(19) United States
(12) Patent Application Publication
(10) Pub. No.: US 2008/0050393 A1
(43) Pub. Date: Feb. 28, 2008

(54) Novel nucleic acids and polypeptides

(76) Inventors: Y. Tom Tang, San Jose, CA (US); Vinod Asundi, Foster City, CA (US); Dennis Ballinger, Menlo Park, CA (US); Ivan Labat, Mountain View, CA (US); Dena Leshkowitz, Yahud (IL); Jin Liu, Wilmington, DE (US); Deborah Loeb, San Jose, CA (US); Julia R. Montgomery, Santa Cruz, CA (US); Ann M. Pace, Scotts Valley, CA (US); James P. Sheridan, Mountain View, CA (US); Radoje T. Drmanac, Palo Alto, CA (US)

Correspondence Address: NUVELO, INC, 201 INDUSTRIAL ROAD, SUITE 310, SAN CARLOS, CA, 94070, US

(21) Appl. No.: 10/302,689

(22) Filed: Nov. 22, 2002

Related U.S. Application Data
(63) Continuation-in-part of application No. 10/084,643, filed on Feb. 26, 2002, now abandoned.
Application No. 10/084,643 is a continuation-in-part of application No. PCT/US00/35017, filed on Dec. 22, 2000.
Application No. PCT/US00/35017 is a continuation-in-part of application No. PCT/US01/02687, filed on Jan. 25, 2001.
Application No. PCT/US01/02687 is a continuation-in-part of application No. PCT/US01/03800, filed on Feb. 5, 2001.
Application No. PCT/US01/03800 is a continuation-in-part of application No. PCT/US01/04927, filed on Feb. 26, 2001.
Application No. PCT/US01/04927 is a continuation-in-part of application No. PCT/US01/04941, filed on Mar. 5, 2001.
Application No. PCT/US01/04941 is a continuation-in-part of application No. PCT/US01/08631, filed on Mar. 30, 2001.
Application No. PCT/US01/08631 is a continuation-in-part of application No. PCT/US01/08656, filed on Apr. 16, 2001.
Application No. PCT/US01/08656 is a continuation-in-part of application No. PCT/US01/14827, filed on May 16, 2001.
Application No. PCT/US01/14827 is a continuation-in-part of application No. 09/898,888, filed on Jul. 3, 2001, now abandoned.
Application No. 09/898,888 is a continuation of application No. 09/340,623, filed on Jun. 28, 1999, now abandoned.
Application No. 09/340,623 is a continuation of application No. 09/205,070, filed on Dec. 3, 1998, now abandoned.

(51) Int. Cl. A61K 39/00; A61K 38/00; C07H 21/04; C07K 14/00; C12N 15/00; C12P 21/00; C12Q 1/68

(52) U.S. Cl. 424/184.1; 435/320.1; 435/6; 435/69.1; 514/2; 530/350; 536/23.5

(57) ABSTRACT

The present invention provides novel nucleic acids, novel polypeptide sequences encoded by these nucleic acids and uses thereof.

### 1. RELATED APPLICATIONS

[0001] This application is a continuation-in-part of each of U.S. application Ser. No. 10/084,643 filed Feb. 26, 2002, Docket No. 21272-502; PCT/US00/35017 filed Dec. 22, 2000, Docket No. 784CIP3A/PCT; PCT/US01/02687 filed Jan. 25, 2001, Docket No. 785CIP2A-C/PCT; PCT/US01/03800 filed Feb. 5, 2001, Docket No. 787CIP3/PCT; PCT/US01/04927 filed Feb. 26, 2001, Docket No. 788CIP3/PCT; PCT/US01/04941 filed Mar. 5, 2001, Docket No. 789CIP3/PCT; PCT/US01/08631 filed Mar. 30, 2001, Docket No. 790CIP3/PCT; PCT/US01/08656 filed Apr. 18, 2001, Docket No. 791CIP3/PCT; PCT/US01/14827 filed May 16, 2001, Docket No. 792CIP3/PCT; U.S. application Ser. No. 09/898,888 filed Jul. 3, 2001, Docket No. 748CON2 (now abandoned), which is a continuation of U.S. application Ser. No. 09/340,623 filed Jun. 28, 1999, Docket No. 20411-748CON1 (now abandoned), which is a continuation of U.S. application Ser. No. 09/205,070 filed Dec. 3, 1998, Docket No. 20411-748 (now abandoned); U.S. application Ser. No. 09/919,002 filed Jul. 30, 2001, Docket No. 752CON2 (now abandoned), which is a continuation of U.S. application Ser. No. 09/359,922 filed Jul. 22, 1999, Docket No. 20411-752CON1 (now abandoned), which is a continuation of U.S. application Ser. No. 09/205,155 filed Dec. 3, 1998, Docket No. 20411-752 (now abandoned); U.S. application Ser. No. 09/905,059 filed Jul. 12, 2001, Docket No. 778CON (now abandoned), which is a continuation of U.S. application Ser. No. 09/347,127 filed Jul. 2, 1999, Docket No. 20411-778 (now abandoned); U.S. application Ser. No. 09/952,981 filed Sep. 14, 2001, Docket No. 779CON (now abandoned), which is a continuation of U.S. application Ser. No. 09/457,877 filed Dec. 8, 1999, Docket No. 20411-779 (now abandoned); U.S. application Ser. No. 09/471,275 filed Dec. 23, 1999, Docket No. 782 (now abandoned); U.S. application Ser. No. 09/552,317 filed Apr. 25, 2000, Docket No. 784CIP (now abandoned); U.S. application Ser. No. 09/488,725 filed Jan. 21, 2000, Docket No. 784; U.S. application Ser. No. 09/922,279 filed Aug. 3, 2001, Docket No. 785CON (now abandoned), which is a continuation of U.S. application Ser. No. 09/491,404 filed Jan. 25, 2000, Docket No. 785 (now abandoned); U.S. application Ser. No. 09/560,875 filed Apr. 27, 2000, Docket No. 787CIP; U.S. application Ser. No. 09/496,914 filed Feb. 3, 2000, Docket No. 787 (now abandoned); U.S. application Ser. No. 09/577,409 filed May 18, 2000, Docket No. 788CIP (now abandoned); U.S. application Ser. No. 09/515,126 filed Feb. 28, 2000, Docket No. 788 (now abandoned); U.S. application Ser. No. 09/574,454 filed May 19, 2000, Docket No. 789CIP (now abandoned), U.S. application Ser. No. 09/519,705 filed Mar. 7, 2000, Docket No. 789 (now abandoned); U.S. application Ser. No. 09/649,167 filed Aug. 23, 2000, Docket No. 790CIP (now abandoned); U.S. application Ser. No. 09/540,217 filed Mar. 31, 2000, Docket No. 790 (now abandoned); U.S. application Ser. No. 10/273,573 filed Oct. 18, 2002, Docket No. 791CIP5; U.S. application Ser. No. 09/770,160 filed Jan. 26, 2001, Docket No. 791CIP; U.S. application Ser. No. 10/014,487 filed Nov. 8, 2001, Docket No. 791CON, which is a continuation of U.S. application Ser. No. 09/552,929 filed Apr. 18, 2000, Docket No. 791 (now abandoned); U.S. application Ser. No. 09/989,660 filed Nov. 21, 2001, Docket No. 792CON, which is a continuation of U.S. application Ser. No. 09/577,408 filed May 18, 2000, Docket No. 792; all of which are incorporated herein by reference in their entirety, specifically including, but not limited to, incorporation by reference of the sequence listing and tables in each application displaying sequence information, homology information, ematrix signatures, pfam signatures, signal peptide information, transmembrane domain information, chromosomal localization and/or tissue distribution information, and ancillary description.

[0002] The material on the compact discs contain the files named Table 10 (787).txt—1.36 MB (1,431,136 bytes), Table 11 (788).txt—2.41 MB (2,527,435 bytes), Table 12 (788).txt—188 KB (193,381 bytes), Table 13 (788).txt—1.22 MB (1,281,546 bytes), Table 14 (789).txt—1.45 MB (1,531,066 bytes), Table 15 (789).txt—193 KB (198,255 bytes), Table 16 (789).txt—603 KB (617,526 bytes), Table 17 (790).txt—12.1 MB (12,784,195 bytes), Table 18 (790).txt—710 KB (727,860 bytes), Table 19 (790).txt—1.81 MB (1,901,731 bytes), Table 2 (782).txt—221 KB (226,754 bytes), Table 20 (791).txt—2.01 MB (2,115,829 bytes), Table 21 (791).txt—217 KB (222,778 bytes), Table 22 (791).txt—442 KB (452,695 bytes), Table 3 (784).txt—997 KB (1,021,276 bytes), Table 4 (784).txt—591 KB (606,081 bytes), Table 6 (785).txt—513 KB (525,701 bytes), Table 8 (787).txt—4.03 MB (4,227,868 bytes), Table 9 (787).txt—368 KB (376,836 bytes). All of these tables have been created and saved on an IBM PC, Windows 2000 operating system on Nov. 14, 2002 and are all incorporated herein by reference in their entirety.

### 2. TECHNICAL FIELD

[0003] The present invention provides novel polynucleotides and proteins encoded by such polynucleotides, along with uses for these polynucleotides and proteins, for example in therapeutic, diagnostic and research methods.

### 3. BACKGROUND

[0004] Technology aimed at the discovery of protein factors (including e.g., cytokines, such as lymphokines, interferons, CSFs, chemokines, and interleukins) has matured rapidly over the past decade. The now routine hybridization cloning and expression cloning techniques clone novel polynucleotides “directly” in the sense that they rely on information directly related to the discovered protein (i.e., partial DNA/amino acid sequence of the protein in the case of hybridization cloning; activity of the protein in the case of expression cloning). More recent “indirect” cloning techniques such as signal sequence cloning, which isolates DNA sequences based on the presence of a now well-recognized secretory leader sequence motif, as well as various PCR-based or low stringency hybridization-based cloning techniques, have advanced the state of the art by making available large numbers of DNA/amino acid sequences for proteins that are known to have biological activity, for example, by virtue of their secreted nature in the case of leader sequence cloning, by virtue of their cell or tissue source in the case of PCR-based techniques, or by virtue of structural similarity to other genes of known biological activity.

[0005] Identified polynucleotide and polypeptide sequences have numerous applications in, for example, diagnostics, forensics, gene mapping; identification of mutations responsible for genetic disorders or other traits, to assess biodiversity, and to produce many other types of data and products dependent on DNA and amino acid sequences.

### 4. SUMMARY OF THE INVENTION

[0006] The compositions of the present invention include novel isolated polypeptides, novel isolated polynucleotides encoding such polypeptides, including recombinant DNA molecules, cloned genes or degenerate variants thereof, especially naturally occurring variants such as allelic variants, antisense polynucleotide molecules, and antibodies that specifically recognize one or more epitopes present on such polypeptides, as well as hybridomas producing such antibodies.

[0007] The compositions of the present invention additionally include vectors, including expression vectors, containing the polynucleotides of the invention, cells genetically engineered to contain such polynucleotides and cells genetically engineered to express such polynucleotides.

[0008] The present invention relates to a collection or library of novel nucleic acid sequences assembled from expressed sequence tags (ESTs) isolated mainly by sequencing by hybridization (SBH), and in some cases, sequences obtained from one or more public databases. The invention also relates to the proteins encoded by such polynucleotides, along with therapeutic, diagnostic and research utilities for these polynucleotides and proteins. These sequences of the present invention are designated herein as 748 SEQ ID NO: 1-45,207, 752 SEQ ID NO: 1-13,203, 778 SEQ ID NO: 1-105, 779 SEQ ID NO: 1-128, 782 SEQ ID NO: 1-10,451, 784 SEQ ID NO: 1-10,289, 785 SEQ ID NO: 1-3796, 787 SEQ ID NO: 1-10,410, 788 SEQ ID NO: 1-14,074, 789 SEQ ID NO: 1-6391, 790 SEQ ID NO: 1-30,533, 791 SEQ ID NO: 1-5822, and 792 SEQ ID NO: 1-8502. The sequences designated 748 SEQ ID NO: 1-45,207 correspond to SEQ ID NO: 1-45,207 in the Sequence Listing; sequences 752 SEQ ID NO: 1-13,203 correspond to SEQ ID NO: 45,208-58,410 in the Sequence Listing; sequences 778 SEQ ID NO: 1-105 correspond to SEQ ID NO: 58,411-58,515; sequences 779 SEQ ID NO: 1-128 correspond to SEQ ID NO: 58,516-58,643 in the Sequence Listing; sequences 782 SEQ ID NO: 1-10,451 correspond to SEQ ID NO: 58,664-69,094 in the Sequence Listing; sequences 784 SEQ ID NO: 1-10,289 correspond to SEQ ID NO: 69,095-79,383; sequences 785 SEQ ID NO: 1-3796 correspond to SEQ ID NO: 79,384-83,179 in the Sequence Listing; sequences 787 SEQ ID NO: 10,410 correspond to SEQ ID NO: 83,180-93,589 in the Sequence Listing; sequences 788 SEQ ID NO: 1-14,074 correspond to SEQ ID NO: 93,590-107,663 in the Sequence Listing; sequences 789 SEQ ID NO: 1-6391 correspond to SEQ ID NO: 107,664-114,054 in the Sequence Listing; sequences 790 SEQ ID NO: 1-30,533 correspond to SEQ ID NO: 114,055-144,607 in the Sequence Listing; sequences 791 SEQ ID NO: 1-5822 correspond to SEQ ID NO: 144,608-150,429 in the Sequence Listing; and sequences 792 SEQ ID NO: 1-8502 correspond to SEQ ID NO: 150,430-158,931 in the Sequence Listing. The nucleic acids and polypeptides are provided in the Sequence Listing, wherein for the nucleic acids, A is adenosine; C is cytosine; G is guanine; T is thymine; and N is any of the four bases. In the amino acids provided in the Sequence Listing, * corresponds to the stop codon.

[0009] The nucleic acid sequences of the present invention also include, nucleic acid sequences that hybridize to the complement of the aforementioned nucleic acid sequences under stringent hybridization conditions; nucleic acid sequences which are allelic variants or species homologues of any of the nucleic acid sequences recited above, or nucleic acid sequences that encode a peptide comprising a specific domain or truncation of the peptides encoded by said nucleic acid sequences, a polynucleotide comprising a nucleotide sequence having at least 90% identity to an identifying sequence or a degenerate variant or fragment thereof. The identifying sequence can be 100 base pairs in length.

[0010] The nucleic acid sequences of the present invention also include the sequence information from the aforementioned nucleic acid sequences of 748 SEQ ID NO: 1-45,207, 752 SEQ ID NO: 1-13,203, 778 SEQ ID NO: 1-105, 779SEQ ID NO: 1-128, 782 SEQ ID NO: 1-10,451, 784 SEQ ID NO: 1-10,289, 785 SEQ ID NO: 1-3796, 787 SEQ ID NO: 1-10,410, 788 SEQ ID NO: 1-14,074, 789 SEQ ID NO: 1-6391, 790 SEQ ID NO: 1-30,533, 791 SEQ ID NO: 1-5822, and 792 SEQ ID NO: 1-8502. The sequence information can be a segment of any one of 748 SEQ ID NO: 1-45,207, 752 SEQ ID NO: 1-13,203, 778 SEQ ID NO: 1-105, 779SEQ ID NO: 1-128, 782SEQ ID NO: 1-10,451, 784SEQ ID NO: 1-10,289, 785 SEQ ID NO: 1-3796, 787 SEQ ID NO: 1-10,410, 788 SEQ ID NO: 1-14,074, 789 SEQ ID NO: 1-6391, 790 SEQ ID NO: 1-30,533, 791 SEQ ID NO: 1-5822, and 792 SEQ ID NO: 1-8502 that uniquely identifies or represents the sequence information of 748 SEQ ID NO: 1-45,207, 752 SEQ ID NO: 1-13,203, 778 SEQ ID NO: 1-105, 779 SEQ ID NO: 1-128, 782 SEQ ID NO: 1-10,451, 784 SEQ ID NO: 1-10,289, 785 SEQ ID NO: 1-3796, 787 SEQ ID NO: 1-10,410, 788 SEQ ID NO: 1-14,074, 789 SEQ ID NO: 1-6391, 790 SEQ ID NO: 1-30,533, 791 SEQ ID NO: 1-5822, and 792 SEQ ID NO: 1-8502.

[0011] A collection as used in this application can be a collection of only one polynucleotide. The collection of sequence information or identifying information of each sequence can be provided on a nucleic acid array. In one embodiment, segments of sequence information is provided on a nucleic acid array to detect the polynucleotide that contains the segment. The array can be designed to detect full-match or mismatch to the polynucleotide that contains the segment. The collection can also be provided in a computer-readable format.

[0012] This invention also includes the reverse or direct complement of any of the nucleic acid sequences recited above; cloning or expression vectors containing the nucleic acid sequences; and host cells or organisms transformed with these expression vectors. Nucleic acid sequences (or their reverse or direct complements) according to the invention have numerous applications in a variety of techniques known to those skilled in the art of molecular biology, such as use as hybridization probes, use as primers for PCR, use in an array, use in computer-readable media, use in sequencing full-length genes, use for chromosome and gene mapping, use in the recombinant production of protein, and use in the generation of anti-sense DNA or RNA, their chemical analogs and the like.

[0013] In a preferred embodiment, the nucleic acid sequences of 748 SEQ ID NO: 1-45,207, 752 SEQ ID NO: 1-13,203, 778 SEQ ID NO: 1-105, 779 SEQ ID NO: 1-128, 782 SEQ ID NO: 1-10,451, 784 SEQ ID NO: 1-10,289, 785 SEQ ID NO: 1-3796, 787 SEQ ID NO: 1-10,410, 788 SEQ ID NO: 1-14,074, 789 SEQ ID NO: 1-6391, 790 SEQ ID NO: 1-30,533, 791 SEQ ID NO: 1-5822, and 792 SEQ ID NO: 1-8502 or novel segments or parts of the nucleic acids of the invention are used as primers in expression assays that are well known in the art. In a particularly preferred embodiment, the nucleic acid sequences of 748 SEQ ID NO: 1-45,207, 752 SEQ ID NO: 1-13,203, 778 SEQ ID NO: 1-105, 779 SEQ ID NO: 1-128, 782 SEQ ID NO: 1-10,451, 784 SEQ ID NO: 1-10,289, 785 SEQ ID NO: 1-3796, 787 SEQ ID NO: 1-10,410, 788 SEQ ID NO: 1-14,074, 789 SEQ ID NO: 1-6391, 790 SEQ ID NO: 1-30,533, 791 SEQ ID NO: 1-5822, and 792 SEQ ID NO: 1-8502 or novel segments or parts of the nucleic acids provided herein are used in diagnostics for identifying expressed genes or, as well known in the art and exemplified by Vollrath et al., Science 258:52-59 (1992), as expressed sequence tags for physical mapping of the human genome.

[0014] The isolated polynucleotides of the invention include, but are not limited to, a polynucleotide comprising any one of the nucleotide sequences set forth in 748 SEQ ID NO: 1-45,207, 752 SEQ ID NO: 1-13,203, 778 SEQ ID NO: 1-105, 779 SEQ ID NO: 1-128, 782 SEQ ID NO: 1-10,451, 784 SEQ ID NO: 1-10,289, 785 SEQ ID NO: 1-3796, 787 SEQ ID NO: 1-10,410, 788 SEQ ID NO: 1-14,074, 789 SEQ ID NO: 1-6391, 790 SEQ ID NO: 1-30,533, 791 SEQ ID NO: 1-5822, and 792 SEQ ID NO: 1-8502; a polynucleotide comprising any of the full length protein coding sequences of 748 SEQ ID NO: 1-45,207, 752 SEQ ID NO: 1-13,203, 778 SEQ ID NO: 1-105, 779 SEQ ID NO: 1-128, 782 SEQ ID NO: 1-10,451, 784SEQ ID NO: 1-10,289, 785SEQ ID NO: 1-3796, 787SEQ ID NO: 1-10,410, 788 SEQ ID NO: 1-14,074, 789 SEQ ID NO: 1-6391, 790 SEQ ID NO: 1-30,533, 791 SEQ ID NO: 1-5822, and 792 SEQ ID NO: 1-8502; and a polynucleotide comprising any of the nucleotide sequences of the mature protein coding sequences of 748 SEQ ID NO: 1-45,207, 752SEQ ID NO: 1-13,203, 778 SEQ ID NO: 1-105, 779 SEQ ID NO: 1-128, 782 SEQ ID NO: 1-10,451, 784 SEQ ID NO: 1-10,289, 785 SEQ ID NO: 1-3796, 787 SEQ ID NO: 1-10,410, 788 SEQ ID NO: 1-14,074, 789 SEQ ID NO: 1-6391, 790SEQ ID NO: 1-30,533, 791 SEQ ID NO: 1-5822, and 792 SEQ ID NO: 1-8502. The polynucleotides of the present invention also include, but are not limited to, a polynucleotide that hybridizes under stringent hybridization conditions to (a) the complement of any one of the nucleotide sequences set forth in 748 SEQ ID NO: 1-45,207, 752 SEQ ID NO: 1-13,203, 778 SEQ ID NO: 1-105, 779 SEQ ID NO: 1-128, 782 SEQ ID NO: 1-10,451, 784 SEQ ID NO: 1-10,289, 785 SEQ ID NO: 1-3796, 787 SEQ ID NO: 1-10,410, 788 SEQ ID NO: 1-14,074, 789 SEQ ID NO: 1-6391, 790 SEQ ID NO: 1-30,533, 791 SEQ ID NO: 1-5822, and 792 SEQ ID NO: 1-8502; (b) a nucleotide sequence encoding any one of the amino acid sequences set forth in the Sequence Listing; (c) a polynucleotide which is an allelic variant of any polynucleotides recited above; (d) a polynucleotide which encodes a species homolog (e.g. orthologs) of any of the proteins recited above; or (e) a polynucleotide that encodes a polypeptide comprising a specific domain or truncation of any of the polypeptides comprising an amino acid sequence set forth in the Sequence Listing.

[0015] The isolated polypeptides of the invention include, but are not limited to, a polypeptide comprising any of the amino acid sequences set forth in the Sequence Listing; or the corresponding full length or mature protein. Polypeptides of the invention also include polypeptides with biological activity that are encoded by (a) any of the polynucleotides having a nucleotide sequence set forth in 748 SEQ ID NO: 1-45,207, 752 SEQ ID NO: 1-13,203, 778 SEQ ID NO: 1-105, 779SEQ ID NO: 1-128, 782SEQ ID NO: 1-10,451, 784 SEQ ID NO: 1-10,289, 785 SEQ ID NO: 1-3796, 787 SEQ ID NO: 1-10,410, 788 SEQ ID NO: 1-14,074, 789 SEQ ID NO: 1-6391, 790 SEQ ID NO: 1-30,533, 791 SEQ ID NO: 1-5822, and 792 SEQ ID NO: 1-8502; or (b) polynucleotides that hybridize to the complement of the polynucleotides of (a) under stringent hybridization conditions. Biologically or immunologically active variants of any of the polypeptide sequences in the Sequence Listing, and “substantial equivalents” thereof (e.g., with at least about 65%, 70%, 75%, 80%, 85%, 90%, 95%, 98% or 99% amino acid sequence identity) that preferably retain biological activity are also contemplated. The polypeptides of the invention may be wholly or partially chemically synthesized but are preferably produced by recombinant means using the genetically engineered cells (e.g. host cells) of the invention.

[0016] The invention also provides compositions comprising a polypeptide of the invention. Polypeptide compositions of the invention may further comprise an acceptable carrier, such as a hydrophilic, e.g., pharmaceutically acceptable, carrier.

[0017] The invention also provides host cells transformed or transfected with a polynucleotide of the invention.

[0018] The invention also relates to methods for producing a polypeptide of the invention comprising growing a culture of the host cells of the invention in a suitable culture medium under conditions permitting expression of the desired polypeptide, and purifying the polypeptide from the culture or from the host cells. Preferred embodiments include those in which the protein produced by such process is a mature form of the protein.

[0019] Polynucleotides according to the invention have numerous applications in a variety of techniques known to those skilled in the art of molecular biology. These techniques include use as hybridization probes, use as oligomers, or primers, for PCR, use for chromosome and gene mapping, use in the recombinant production of protein, and use in generation of anti-sense DNA or RNA, their chemical analogs and the like. For example, when the expression of an mRNA is largely restricted to a particular cell or tissue type, polynucleotides of the invention can be used as hybridization probes to detect the presence of the particular cell or tissue mRNA in a sample using, e.g., in situ hybridization.

[0020] In other exemplary embodiments, the polynucleotides are used in diagnostics as expressed sequence tags for identifying expressed genes or, as well known in the art and exemplified by Vollrath et al., Science 258:52-59 (1992), as expressed sequence tags for physical mapping of the human genome.

[0021] The polypeptides according to the invention can be used in a variety of conventional procedures and methods that are currently applied to other proteins. For example, a polypeptide of the invention can be used to generate an antibody that specifically binds the polypeptide. Such antibodies, particularly monoclonal antibodies, are useful for detecting or quantitating the polypeptide in tissue. The polypeptides of the invention can also be used as molecular weight markers, and as a food supplement.

[0022] Methods are also provided for preventing, treating, or ameliorating a medical condition which comprises the step of administering to a mammalian subject a therapeutically effective amount of a composition comprising a polypeptide of the present invention and a pharmaceutically acceptable carrier.

[0023] In particular, the polypeptides and polynucleotides of the invention can be utilized, for example, in methods for the prevention and/or treatment of disorders involving aberrant protein expression or biological activity.

[0024] The present invention further relates to methods for detecting the presence of the polynucleotides or polypeptides of the invention in a sample. Such methods can, for example, be utilized as part of prognostic and diagnostic evaluation of disorders as recited herein and for the identification of subjects exhibiting a predisposition to such conditions. The invention provides a method for detecting the polynucleotides of the invention in a sample, comprising contacting the sample with a compound that binds to and forms a complex with the polynucleotide of interest for a period sufficient to form the complex and under conditions sufficient to form a complex and detecting the complex such that if a complex is detected, the polynucleotide of interest is detected. The invention also provides a method for detecting the polypeptides of the invention in a sample comprising contacting the sample with a compound that binds to and forms a complex with the polypeptide under conditions and for a period sufficient to form the complex and detecting the formation of the complex such that if a complex is formed, the polypeptide is detected.

[0025] The invention also provides kits comprising polynucleotide probes and/or monoclonal antibodies, and optionally quantitative standards, for carrying out methods of the invention. Furthermore, the invention provides methods for evaluating the efficacy of drugs, and monitoring the progress of patients, involved in clinical trials for the treatment of disorders as recited above.

[0026] The invention also provides methods for the identification of compounds that modulate (i.e., increase or decrease) the expression or activity of the polynucleotides and/or polypeptides of the invention. Such methods can be utilized, for example, for the identification of compounds that can ameliorate symptoms of disorders as recited herein. Such methods can include, but are not limited to, assays for identifying compounds and other substances that interact with (e.g., bind to) the polypeptides of the invention. The invention provides a method for identifying a compound that binds to the polypeptides of the invention comprising contacting the compound with a polypeptide of the invention in a cell for a time sufficient to form a polypeptide/compound complex, wherein the complex drives expression of a reporter gene sequence in the cell; and detecting the complex by detecting the reporter gene sequence expression such that if expression of the reporter gene is detected the compound the binds to a polypeptide of the invention is identified.

[0027] The methods of the invention also provides methods for treatment which involve the administration of the polynucleotides or polypeptides of the invention to individuals exhibiting symptoms or tendencies. In addition, the invention encompasses methods for treating diseases or disorders as recited herein comprising administering compounds and other substances that modulate the overall activity of the target gene products. Compounds and other substances can effect such modulation either on the level of target gene/protein expression or target protein activity.

[0028] The polypeptides of the present invention and the polynucleotides encoding them are also useful for the same functions known to one of skill in the art as the polypeptides and polynucleotides to which they have homology. If no homology is set forth for a sequence, then the polypeptides and polynucleotides of the present invention are useful for a variety of applications, as described herein, including use in arrays for detection.

### 5. DETAILED DESCRIPTION OF THE INVENTION

[0029] 5.1 Definitions

[0030] It must be noted that as used herein and in the appended claims, the singular forms “a”, “an” and “the” include plural references unless the context clearly dictates otherwise.

[0031] The term “active” refers to those forms of the polypeptide which retain the biologic and/or immunologic activities of any naturally occurring polypeptide. According to the invention, the terms “biologically active” or “biological activity” refer to a protein or peptide having structural, regulatory or biochemical functions of a naturally occurring molecule. Likewise “immunologically active” or “immunological activity” refers to the capability of the natural, recombinant or synthetic polypeptide to induce a specific immune response in appropriate animals or cells and to bind with specific antibodies.

[0032] The term “activated cells” as used in this application are those cells which are engaged in extracellular or intracellular membrane trafficking, including the export of secretory or enzymatic molecules as part of a normal or disease process.

[0033] The terms “complementary” or “complementarity” refer to the natural binding of polynucleotides by base pairing. For example, the sequence 5′-AGT-3′ binds to the complementary sequence 3′-TCA-5′. Complementarity between two single-stranded molecules may be “partial” such that only some of the nucleic acids bind or it may be “complete” such that total complementarity exists between the single stranded molecules. The degree of complementarity between the nucleic acid strands has significant effects on the efficiency and strength of the hybridization between the nucleic acid strands.

[0034] The term “embryonic stem cells (ES)” refers to a cell that can give rise to many differentiated cell types in an embryo or an adult, including the germ cells. The term “germ line stem cells (GSCs)” refers to stem cells derived from primordial stem cells that provide a steady and continuous source of germ cells for the production of gametes. The term “primordial germ cells (PGCs)” refers to a small population of cells set aside from other cell lineages particularly from the yolk sac, mesenteries, or gonadal ridges during embryogenesis that have the potential to differentiate into germ cells and other cells. PGCs are the source from which GSCs and ES cells are derived The PGCs, the GSCs and the ES cells are capable of self-renewal. Thus these cells not only populate the germ line and give rise to a plurality of terminally differentiated cells that comprise the adult specialized organs, but are able to regenerate themselves.

[0035] The term “expression modulating fragment,” EMF, means a series of nucleotides which modulates the expression of an operably linked ORF or another EMF.

[0036] As used herein, a sequence is said to “modulate the expression of an operably linked sequence” when the expression of the sequence is altered by the presence of the EMF. EMFs include, but are not limited to, promoters, and promoter modulating sequences (inducible elements). One class of EMFs are nucleic acid fragments which induce the expression of an operably linked ORF in response to a specific regulatory factor or physiological event.

[0037] The terms “nucleotide sequence” or “nucleic acid” or “polynucleotide” or “oligonculeotide” are used interchangeably and refer to a heteropolymer of nucleotides or the sequence of these nucleotides. These phrases also refer to DNA or RNA of genomic or synthetic origin which may be single-stranded or double-stranded and may represent the sense or the antisense strand, to peptide nucleic acid (PNA) or to any DNA-like or RNA-like material. In the sequences herein A is adenine, C is cytosine, T is thymine, G is guanine and N is A, C, G or T (U). It is contemplated that where the polynucleotide is RNA, the T (thymine) in the sequences provided herein is substituted with U (uracil). Generally, nucleic acid segments provided by this invention may be assembled from fragments of the genome and short oligonucleotide linkers, or from a series of oligonucleotides, or from individual nucleotides, to provide a synthetic nucleic acid which is capable of being expressed in a recombinant transcriptional unit comprising regulatory elements derived from a microbial or viral operon, or a eukaryotic gene.

[0038] The terms “oligonucleotide fragment” or a “polynucleotide fragment”, “portion,” or “segment” or “probe” or “primer” are used interchangeably and refer to a sequence of nucleotide residues which are at least about 5 nucleotides, more preferably at least about 7 nucleotides, more preferably at least about 9 nucleotides, more preferably at least about 11 nucleotides and most preferably at least about 17 nucleotides. The fragment is preferably less than about 500 nucleotides, preferably less than about 200 nucleotides, more preferably less than about 100 nucleotides, more preferably less than about 50 nucleotides and most preferably less than 30 nucleotides. Preferably the probe is from about 6 nucleotides to about 200 nucleotides, preferably from about 15 to about 50 nucleotides, more preferably from about 17 to 30 nucleotides and most preferably from about 20 to 25 nucleotides. Preferably the fragments can be used in polymerase chain reaction (PCR), various hybridization procedures or microarray procedures to identify or amplify identical or related parts of mRNA or DNA molecules. A fragment or segment may uniquely identify each polynucleotide sequence of the present invention. Preferably the fragment comprises a sequence substantially similar to any one of 748 SEQ ID NO: 1-45,207, 752 SEQ ID NO: 1-13,203, 778 SEQ ID NO: 1-105, 779 SEQ ID NO: 1-128, 782 SEQ ID NO: 1-10,451, 784 SEQ ID NO: 1-10,289, 785 SEQ ID NO: 1-3796, 787 SEQ ID NO: 1-10,410, 788 SEQ ID NO: 1-14,074, 789 SEQ ID NO: 1-6391, 790 SEQ ID NO: 1-30,533, 791 SEQ ID NO: 1-5822, and 792 SEQ ID NO: 1-8502.

[0039] Probes may, for example, be used to determine whether specific mRNA molecules are present in a cell or tissue or to isolate similar nucleic acid sequences from chromosomal DNA as described by Walsh et. al., (Walsh, P. S. et al., 1992, PCR Methods Appl 1:241-250). They may be labeled by nick translation, Klenow fill-in reaction, PCR, or other methods well known in the art. Probes of the present invention, their preparation and/or labeling are elaborated in Sambrook, J. et al., 1989, Molecular Cloning: A Laboratory Manual, Cold Spring Harbor Laboratory, NY; or Ausubel, F. M. et al., 1989, Current Protocols in Molecular Biology, John Wiley & Sons, New York N.Y., both of which are incorporated herein by reference in their entirety.

[0040] The nucleic acid sequences of the present invention also include the sequence information from the nucleic acid sequences of 748 SEQ ID NO: 1-45,207, 752 SEQ ID NO: 1-13,203, 778 SEQ ID NO: 1-105, 779 SEQ ID NO: 1-128, 782 SEQ ID NO: 1-10,451, 784 SEQ ID NO: 1-10,289, 785 SEQ ID NO: 1-3796, 787 SEQ ID NO: 1-10,410, 788 SEQ ID NO: 1-14,074, 789 SEQ ID NO: 1-6391, 790 SEQ ID NO: 1-30,533, 791 SEQ ID NO: 1-5822, and 792 SEQ ID NO: 1-8502. The sequence information can be a segment of any one of 748 SEQ ID NO: 1-45,207, 752 SEQ ID NO: 1-13,203, 778 SEQ ID NO: 1-105, 779 SEQ ID NO: 1-128, 782 SEQ ID NO: 1-10,451, 784 SEQ ID NO: 1-10,289, 785 SEQ ID NO: 1-3796, 787 SEQ ID NO: 1-10,410, 788 SEQ ID NO: 1-14,074, 789 SEQ ID NO: 1-6391, 790 SEQ ID NO: 1-30,533, 791 SEQ ID NO: 1-5822, and 792 SEQ ID NO: 1-8502 that uniquely identifies or represents the sequence information of that sequence of 748 SEQ ID NO: 1-45,207, 752 SEQ ID NO: 1-13,203, 778 SEQ ID NO: 1-105, 779 SEQ ID NO: 1-128, 782 SEQ ID NO: 1-10,451, 784 SEQ ID NO: 1-10,289, 785 SEQ ID NO: 1-3796, 787 SEQ ID NO: 1-10,410, 788 SEQ ID NO: 1-14,074, 789 SEQ ID NO: 1-6391, 790 SEQ ID NO: 1-30,533, 791 SEQ ID NO: 1-5822, and 792 SEQ ID NO: 1-8502. One such segment can be a twenty-mer nucleic acid sequence because the probability that a twenty-mer is fully matched in the human genome is 1 in 300. In the human genome, there are three billion base pairs in one set of chromosomes. Because 420 possible twenty-mers exist, there are 300 times more twenty-mers than there are base pairs in a set of human chromosomes. Using the same analysis, the probability for a seventeen-mer to be fully matched in the human genome is approximately 1 in 5. When these segments are used in arrays for expression studies, fifteen-mer segments can be used. The probability that the fifteen-mer is fully matched in the expressed sequences is also approximately one in five because expressed sequences comprise less than approximately 5% of the entire genome sequence.

[0041] Similarly, when using sequence information for detecting a single mismatch, a segment can be a twenty-five mer. The probability that the twenty-five mer would appear in a human genome with a single mismatch is calculated by multiplying the probability for a full match (1÷4²⁵) times the increased probability for mismatch at each nucleotide position (3×25). The probability that an eighteen mer with a single mismatch can be detected in an array for expression studies is approximately one in five. The probability that a twenty-mer with a single mismatch can be detected in a human genome is approximately one in five.

[0042] The term “open reading frame,” ORF, means a series of nucleotide triplets coding for amino acids without any termination codons and is a sequence translatable into protein.

[0043] The terms “operably linked” or “operably associated” refer to functionally related nucleic acid sequences. For example, a promoter is operably associated or operably linked with a coding sequence if the promoter controls the transcription of the coding sequence. While operably linked nucleic acid sequences can be contiguous and in the same reading frame, certain genetic elements e.g. repressor genes are not contiguously linked to the coding sequence but still control transcription/translation of the coding sequence.

[0044] The term “pluripotent” refers to the capability of a cell to differentiate into a number of differentiated cell types that are present in an adult organism. A pluripotent cell is restricted in its differentiation capability in comparison to a totipotent cell.

[0045] The terms “polypeptide” or “peptide” or “amino acid sequence” refer to an oligopeptide, peptide, polypeptide or protein sequence or fragment thereof and to naturally occurring or synthetic molecules. A polypeptide “fragment,” “portion,” or “segment” is a stretch of amino acid residues of at least about 5 amino acids, preferably at least about 7 amino acids, more preferably at least about 9 amino acids and most preferably at least about 17 or more amino acids. The peptide preferably is not greater than about 200 amino acids, more preferably less than 150 amino acids and most preferably less than 100 amino acids. Preferably the peptide is from about 5 to about 200 amino acids. To be active, any polypeptide must have sufficient length to display biological and/or immunological activity.

[0046] The term “naturally occurring polypeptide” refers to polypeptides produced by cells that have not been genetically engineered and specifically contemplates various polypeptides arising from post-translational modifications of the polypeptide including, but not limited to, acetylation, carboxylation, glycosylation, phosphorylation, lipidation and acylation.

[0047] The term “translated protein coding portion” means a sequence which encodes for the full length protein which may include any leader sequence or any processing sequence.

[0048] The term “mature protein coding sequence” means a sequence which encodes a peptide or protein without a signal or leader sequence. The “mature protein portion” means that portion of the protein which does not include a signal or leader sequence. The peptide may have been produced by processing in the cell which removes any leader/signal sequence. The mature protein portion may or may not include the initial methionine residue. The methionine residue may be removed from the protein during processing in the cell. The peptide may be produced synthetically or the protein may have been produced using a polynucleotide only encoding for the mature protein coding sequence.

[0049] The term “derivative” refers to polypeptides chemically modified by such techniques as ubiquitination, labeling (e.g., with radionuclides or various enzymes), covalent polymer attachment such as pegylation (derivatization with polyethylene glycol) and insertion or substitution by chemical synthesis of amino acids such as ornithine, which do not normally occur in human proteins.

[0050] The term “variant” (or “analog”) refers to any polypeptide differing from naturally occurring polypeptides by amino acid insertions, deletions, and substitutions, created using, e.g., recombinant DNA techniques. Guidance in determining which amino acid residues may be replaced, added or deleted without abolishing activities of interest, may be found by comparing the sequence of the particular polypeptide with that of homologous peptides and minimizing the number of amino acid sequence changes made in regions of high homology (conserved regions) or by replacing amino acids with consensus sequence.

[0051] Alternatively, recombinant variants encoding these same or similar polypeptides may be synthesized or selected by making use of the “redundancy” in the genetic code. Various codon substitutions, such as the silent changes which produce various restriction sites, may be introduced to optimize cloning into a plasmid or viral vector or expression in a particular prokaryotic or eukaryotic system. Mutations in the polynucleotide sequence may be reflected in the polypeptide or domains of other peptides added to the polypeptide to modify the properties of any part of the polypeptide, to change characteristics such as ligand-binding affinities, interchain affinities, or degradation/turnover rate.

[0052] Preferably, amino acid “substitutions” are the result of replacing one amino acid with another amino acid having similar structural and/or chemical properties, i.e., conservative amino acid replacements. “Conservative” amino acid substitutions may be made on the basis of similarity in polarity, charge, solubility, hydrophobicity, hydrophilicity, and/or the amphipathic nature of the residues involved. For example, nonpolar (hydrophobic) amino acids include alanine, leucine, isoleucine, valine, proline, phenylalanine, tryptophan, and methionine; polar neutral amino acids include glycine, serine, threonine, cysteine, tyrosine, asparagine, and glutamine; positively charged (basic) amino acids include arginine, lysine, and histidine; and negatively charged (acidic) amino acids include aspartic acid and glutamic acid. “Insertions” or “deletions” are preferably in the range of about 1 to 20 amino acids, more preferably 1 to 10 amino acids. The variation allowed may be experimentally determined by systematically making insertions, deletions, or substitutions of amino acids in a polypeptide molecule using recombinant DNA techniques and assaying the resulting recombinant variants for activity.

[0053] Alternatively, where alteration of function is desired, insertions, deletions or non-conservative alterations can be engineered to produce altered polypeptides. Such alterations can, for example, alter one or more of the biological functions or biochemical characteristics of the polypeptides of the invention. For example, such alterations may change polypeptide characteristics such as ligand-binding affinities, interchain affinities, or degradation/turnover rate. Further, such alterations can be selected so as to generate polypeptides that are better suited for expression, scale up and the like in the host cells chosen for expression. For example, cysteine residues can be deleted or substituted with another amino acid residue in order to eliminate disulfide bridges.

[0054] The terms “purified” or “substantially purified” as used herein denotes that the indicated nucleic acid or polypeptide is present in the substantial absence of other biological macromolecules, e.g., polynucleotides, proteins, and the like. In one embodiment, the polynucleotide or polypeptide is purified such that it constitutes at least 95% by weight, more preferably at least 99% by weight, of the indicated biological macromolecules present (but water, buffers, and other small molecules, especially molecules having a molecular weight of less than 1000 daltons, can be present).

[0055] The term “isolated” as used herein refers to a nucleic acid or polypeptide separated from at least one other component (e.g., nucleic acid or polypeptide) present with the nucleic acid or polypeptide in its natural source. In one embodiment, the nucleic acid or polypeptide is found in the presence of (if anything) only a solvent, buffer, ion, or other component normally present in a solution of the same. The terms “isolated” and “purified” do not encompass nucleic acids or polypeptides present in their natural source.

[0056] The term “recombinant,” when used herein to refer to a polypeptide or protein, means that a polypeptide or protein is derived from recombinant (e.g., microbial, insect, or mammalian) expression systems. “Microbial” refers to recombinant polypeptides or proteins made in bacterial or fungal (e.g., yeast) expression systems. As a product, “recombinant microbial” defines a polypeptide or protein essentially free of native endogenous substances and unaccompanied by associated native glycosylation. Polypeptides or proteins expressed in most bacterial cultures, e.g., E. coli, will be free of glycosylation modifications; polypeptides or proteins expressed in yeast will have a glycosylation pattern in general different from those expressed in mammalian cells.

[0057] The term “recombinant expression vehicle or vector” refers to a plasmid or phage or virus or vector, for expressing a polypeptide from a DNA (RNA) sequence. An expression vehicle can comprise a transcriptional unit comprising an assembly of (1) a genetic element or elements having a regulatory role in gene expression, for example, promoters or enhancers, (2) a structural or coding sequence which is transcribed into mRNA and translated into protein, and (3) appropriate transcription initiation and termination sequences. Structural units intended for use in yeast or eukaryotic expression systems preferably include a leader sequence enabling extracellular secretion of translated protein by a host cell. Alternatively, where recombinant protein is expressed without a leader or transport sequence, it may include an amino terminal methionine residue. This residue may or may not be subsequently cleaved from the expressed recombinant protein to provide a final product.

[0058] The term “recombinant expression system” means host cells which have stably integrated a recombinant transcriptional unit into chromosomal DNA or carry the recombinant transcriptional unit extrachromosomally. Recombinant expression systems as defined herein will express heterologous polypeptides or proteins upon induction of the regulatory elements linked to the DNA segment or synthetic gene to be expressed. This term also means host cells which have stably integrated a recombinant genetic element or elements having a regulatory role in gene expression, for example, promoters or enhancers. Recombinant expression systems as defined herein will express polypeptides or proteins endogenous to the cell upon induction of the regulatory elements linked to the endogenous DNA segment or gene to be expressed. The cells can be prokaryotic or eukaryotic.

[0059] The term “secreted” includes a protein that is transported across or through a membrane, including transport as a result of signal sequences in its amino acid sequence when it is expressed in a suitable host cell. “Secreted” proteins include without limitation proteins secreted wholly (e.g., soluble proteins) or partially (e.g., receptors) from the cell in which they are expressed. “Secreted” proteins also include without limitation proteins that are transported across the membrane of the endoplasmic reticulum. “Secreted” proteins are also intended to include proteins containing non-typical signal sequences (e.g. Interleukin-1 Beta, see Krasney, P. A. and Young, P. R. (1992) Cytokine 4(2):134-143) and factors released from damaged cells (e.g. Interleukin-1 Receptor Antagonist, see Arend, W. P. et. al. (1998) Annu. Rev. Immunol. 16:27-55)

[0060] Where desired, an expression vector may be designed to contain a “signal or leader sequence” which will direct the polypeptide through the membrane of a cell. Such a sequence may be naturally present on the polypeptides of the present invention or provided from heterologous protein sources by recombinant DNA techniques.

[0061] The term “stringent” is used to refer to conditions that are commonly understood in the art as stringent. Stringent conditions can include highly stringent conditions (i.e., hybridization to filter-bound DNA in 0.5 M NaHPO₄, 7% sodium dodecyl sulfate (SDS), 1 mM EDTA at 65° C., and washing in 0.1×SSC/0.1% SDS at 68° C.), and moderately stringent conditions (i.e., washing in 0.2×SSC/0.1% SDS at 42° C.). Other exemplary hybridization conditions are described herein in the examples.

[0062] In instances of hybridization of deoxyoligonucleotides, additional exemplary stringent hybridization conditions include washing in 6×SSC/0.05% sodium pyrophosphate at 37° C. (for 14-base oligonucleotides), 48° C. (for 17-base oligos), 55° C. (for 20-base oligonucleotides), and 60° C. (for 23-base oligonucleotides).

[0063] As used herein, “substantially equivalent” can refer both to nucleotide and amino acid sequences, for example a mutant sequence, that varies from a reference sequence by one or more substitutions, deletions, or additions, the net effect of which does not result in an adverse functional dissimilarity between the reference and subject sequences. Typically, such a substantially equivalent sequence varies from one of those listed herein by no more than about 35% (i.e., the number of individual residue substitutions, additions, and/or deletions in a substantially equivalent sequence, as compared to the corresponding reference sequence, divided by the total number of residues in the substantially equivalent sequence is about 0.35 or less). Such a sequence is said to have 65% sequence identity to the listed sequence. In one embodiment, a substantially equivalent, e.g., mutant, sequence of the invention varies from a listed sequence by no more than 30% (70% sequence identity); in a variation of this embodiment, by no more than 25% (75% sequence identity); and in a further variation of this embodiment, by no more than 20% (80% sequence identity) and in a further variation of this embodiment, by no more than 10% (90% sequence identity) and in a further variation of this embodiment, by no more that 5% (95% sequence identity). Substantially equivalent, e.g., mutant, amino acid sequences according to the invention preferably have at least 80% sequence identity with a listed amino acid sequence, more preferably at least 90% sequence identity. Substantially equivalent nucleotide sequences of the invention can have lower percent sequence identities, taking into account, for example, the redundancy or degeneracy of the genetic code. Preferably, nucleotide sequence has at least about 65% identity, more preferably at least about 75% identity, and most preferably at least about 95% identity. For the purposes of the present invention, sequences having substantially equivalent biological activity and substantially equivalent expression characteristics are considered substantially equivalent. For the purposes of determining equivalence, truncation of the mature sequence (e.g., via a mutation which creates a spurious stop codon) should be disregarded. Sequence identity may be determined, e.g., using the Jotun Hein method (Hein, J. (1990) Methods Enzymol. 183:626-645). Identity between sequences can also be determined by other methods known in the art, e.g. by varying hybridization conditions.

[0064] The term “totipotent” refers to the capability of a cell to differentiate into all of the cell types of an adult organism.

[0065] The term “transformation” means introducing DNA into a suitable host cell so that the DNA is replicable, either as an extrachromosomal element, or by chromosomal integration. The term “transfection” refers to the taking up of an expression vector by a suitable host cell, whether or not any coding sequences are in fact expressed. The term “infection” refers to the introduction of nucleic acids into a suitable host cell by use of a virus or viral vector.

[0066] As used herein, an “uptake modulating fragment,” UMF, means a series of nucleotides which mediate the uptake of a linked DNA fragment into a cell. UMFs can be readily identified using known UMFs as a target sequence or target motif with the computer-based systems described below. The presence and activity of a UMF can be confirmed by attaching the suspected UMF to a marker sequence. The resulting nucleic acid molecule is then incubated with an appropriate host under appropriate conditions and the uptake of the marker sequence is determined. As described above, a UMF will increase the frequency of uptake of a linked marker sequence.

[0067] Each of the above terms is meant to encompass all that is described for each, unless the context dictates otherwise.

[0068] 5.2 Nucleic Acids and Peptides of the Invention

[0069] Sequences of the nucleic acids and peptides of the present invention are set forth in the Sequence Listing. Table 1 relates the SEQ ID's listed herein to their identification in parent applications from which this application claims priority.

TABLE 1

| | | | | | | SEQ ID NO: |
|---|---|---|---|---|---|---|
| Gene | | Date | SEQ ID NO. | SEQ ID NO: | Table Name | In Sequence |
| Family | Ser. No. | Filed | in Parent Applications | in Current Application | On CD | Listing |
| 748 | 09/205,070 | Dec. 3, 1998 | SEQ ID NO: 1-45,207 | 748 SEQ ID NO: 1-45,207 | N/A | 1-45,207 |
| | 09/340,623 | Jun. 28, 1999 | SEQ ID NO: 1-45,207 | 748 SEQ ID NO: 1-45,207 | | 1-45,207 |
| | 09/898,888 | Jul. 3, 2001 | SEQ ID NO: 1-45,207 | 748 SEQ ID NO: 1-45,207 | | 1-45,207 |
| 752 | 09/205,155 | Dec. 3, 1998 | SEQ ID NO: 1-13,203 | 752 SEQ ID NO: 1-13,203 | N/A | 45,208-58,410 |
| | 09/359,922 | Jul. 22, 1999 | SEQ ID NO: 1-13,203 | 752 SEQ ID NO: 1-13,203 | | 45,208-58,410 |
| | 09/919,002 | Jul. 30, 2001 | SEQ ID NO: 1-13,203 | 752 SEQ ID NO: 1-13,203 | | 45,208-58,410 |
| 778 | 09/347,127 | Jul. 2, 1999 | SEQ ID NO: 1-105 | 778 SEQ ID NO: 1-105 | N/A | 58,411-58,515 |
| | 09/905,059 | Jul. 12, 2001 | SEQ ID NO: 1-105 | 778 SEQ ID NO: 1-105 | | 58,411-58,515 |
| 779 | 09/457,877 | Dec. 8, 1999 | SEQ ID NO: 1-128 | 779 SEQ ID NO: 1-128 | N/A | 58,516-58,643 |
| | 09/952,981 | Sep. 14, 2001 | SEQ ID NO: 1-128 | 779 SEQ ID NO: 1-128 | | 58,516-58,643 |
| 782 | 09/471,275 | Dec. 23, 1999 | SEQ ID NO: 1-10,451 | 782 SEQ ID NO: 1-10,451 | Table2(782).doc | 58,644-69,094 |
| 784 | 09/488,725 | Jan. 21, 2000 | SEQ ID NO: 1-10289 | 784 SEQ ID NO: 1-10289 | | 69,095-79,383 |
| | | | | | Table3(784).doc; | 69,095-79,383 |
| | 09/552,317 | Apr. 25, 2000 | SEQ ID NO: 1-10289 | 784 SEQ ID NO: 1-10289 | Table4(784).doc | |
| 785 | 09/491,404 | Jan. 25, 2000 | SEQ ID NO: 1-3796 | 785 SEQ ID NO: 1-3796 | (Table 5 and 7 are | 79,384-83,179 |
| | | | | | hard copies) | |
| | 09/922,279 | Aug. 3, 2001 | SEQ ID NO: 1-3796 | 785 SEQ ID NO: 1-3796 | Table6(785).doc | 79,384-83,179 |
| | | | | | Table8(787).doc; | 83,180-93,589 |
| 787 | 09/496,914 | Feb. 23, 2000 | SEQ ID NO: 1-10,410 | 787 SEQ ID NO: 1-10,410 | Table9(787).doc; | |
| | 09/560,875 | Apr. 27, 2000 | SEQ ID NO: 1-10,410 | 787 SEQ ID NO: 1-10,410 | Table10(787).doc | 83,180-93,589 |
| | | | | | Table11(788).doc; | 93,590-107,663 |
| 788 | 09/515,126 | Feb. 28, 2000 | SEQ ID NO: 1-14074 | 788 SEQ ID NO: 1-14074 | Tablel2(788).doc | |
| | | May 18, 2000 | | | Table13(788).doc | 93,590-107,663 |
| | 09/577,409 | | SEQ ID NO: 1-14074 | 788 SEQ ID NO: 1-14074 | | |
| | | | | | Table14(789).doc; | 107,664-114,054 |
| 789 | 09/519,705 | Mar. 7, 2000 | SEQ ID NO: 1-6391 | 789 SEQ ID NO: 1-6391 | Table15(789).doc | |
| | | May 19, 2000 | | | Table16(789).doc | 107,664-114,054 |
| | 09/574,454 | | SEQ ID NO: 1-6391 | 789 SEQ ID NO: 1-6391 | | |
| | | Mar. 31, 2000 | | | Table17(790).doc; | 114,055-144,607 |
| 790 | 09/540,217 | | SEQ ID NO: 1-30533 | 790 SEQ ID NO: 1-30533 | Table18(790).doc | |
| | | Aug. 23, 2000 | | | Table19(790).doc | 114,055-144,607 |
| | 09/649,167 | | SEQ ID NO: 1-30533 | 790 SEQ ID NO: 1-30533 | | |
| | | | | | Table20(791).doc; | 144,608-150,429 |
| 791 | 09/552,929 | Apr. 18, 2000 | SEQ ID NO: 1-5822 | 791 SEQ ID NO: 1-5822 | Table21(791).doc | |
| | 09/770,160 | Jan. 26, 2001 | SEQ ID NO: 1-5822 | 791 SEQ ID NO: 1-5822 | Table22(791).doc | 144,608-150,429 |
| 792 | 09/577,408 | May 18, 2000 | SEQ ID NO: 1-8502 | 792 SEQ ID NO: 1-8502 | (Table 23-25 are | 150,430-158,931 |
| | | | | | hard copies) | |

[0070] The isolated polynucleotides of the invention include a polynucleotide comprising the nucleotide sequences of 748 SEQ ID NO: 1-45,207, 752 SEQ ID NO: 1-13,203, 778 SEQ ID NO: 1-105, 779 SEQ ID NO: 1-128, 782 SEQ ID NO: 1-10,451, 784 SEQ ID NO: 1-10,289, 785 SEQ ID NO: 1-3796, 787 SEQ ID NO: 1-10,410, 788 SEQ ID NO: 1-14,074, 789 SEQ ID NO: 1-6391, 790 SEQ ID NO: 1-30,533, 791 SEQ ID NO: 1-5822, and 792 SEQ ID NO: 1-8502; a polynucleotide encoding any one of the peptide sequences of 748 SEQ ID NO: 1-45,207, 752 SEQ ID NO: 1-13,203, 778 SEQ ID NO: 1-105, 779 SEQ ID NO: 1-128, 782 SEQ ID NO: 1-10,451, 784 SEQ ID NO: 1-10,289, 785 SEQ ID NO: 1-3796, 787 SEQ ID NO: 1-10,410, 788 SEQ ID NO: 1-14,074, 789 SEQ ID NO: 1-6391, 790 SEQ ID NO: 1-30,533, 791 SEQ ID NO: 1-5822, and 792 SEQ ID NO: 1-8502; and a polynucleotide comprising the nucleotide sequence encoding the mature protein coding sequence of the polypeptides of any one of 748 SEQ ID NO: 1-45,207, 752 SEQ ID NO: 1-13,203, 778 SEQ ID NO: 1-105, 779 SEQ ID NO: 1-128, 782 SEQ ID NO: 1-10,451, 784 SEQ ID NO: 1-10,289, 785 SEQ ID NO: 1-3796, 787 SEQ ID NO: 1-10,410, 788 SEQ ID NO: 1-14,074, 789 SEQ ID NO: 1-6391, 790 SEQ ID NO: 1-30,533, 791 SEQ ID NO: 1-5822, and 792 SEQ ID NO: 1-8502. The polynucleotides of the present invention also include, but are not limited to, a polynucleotide that hybridizes under stringent conditions to (a) the complement of any of the nucleotides sequences of 748 SEQ ID NO: 1-45,207, 752 SEQ ID NO: 1-13,203, 778 SEQ ID NO: 1-105, 779 SEQ ID NO: 1-128, 782 SEQ ID NO: 1-10,451, 784 SEQ ID NO: 1-10,289, 785 SEQ ID NO: 1-3796, 787 SEQ ID NO: 1-10,410, 788 SEQ ID NO: 1-14,074, 789 SEQ ID NO: 1-6391, 790 SEQ ID NO: 1-30,533, 791 SEQ ID NO: 1-5822, and 792 SEQ ID NO: 1-8502; (b) nucleotide sequences encoding any one of the amino acid sequences set forth in the Sequence Listing; (c) a polynucleotide which is an allelic variant of any polynucleotide recited above; (d) a polynucleotide which encodes a species homolog of any of the proteins recited above; or (e) a polynucleotide that encodes a polypeptide comprising a specific domain or truncation of the polypeptides encoded by 748 SEQ ID NO: 1-45,207, 752 SEQ ID NO: 1-13,203, 778 SEQ ID NO: 1-105, 779 SEQ ID NO: 1-128, 782 SEQ ID NO: 1-10,451, 784 SEQ ID NO: 1-10,289, 785 SEQ ID NO: 1-3796, 787 SEQ ID NO: 1-10,410, 788 SEQ ID NO: 1-14,074, 789 SEQ ID NO: 1-6391, 790 SEQ ID NO: 1-30,533, 791 SEQ ID NO: 1-5822, and 792 SEQ ID NO: 1-8502. Domains of interest may depend on the nature of the encoded polypeptide; e.g., domains in receptor-like polypeptides include ligand-binding, extracellular, transmembrane, or cytoplasmic domains, or combinations thereof; domains in immunoglobulin-like proteins include the variable immunoglobulin-like domains; domains in enzyme-like polypeptides include catalytic and substrate binding domains; and domains in ligand polypeptides include receptor-binding domains.

[0071] The polynucleotides of the invention include naturally occurring or wholly or partially synthetic DNA, e.g., cDNA and genomic DNA, and RNA, e.g., mRNA. The polynucleotides may include all of the coding region of the cDNA or may represent a portion of the coding region of the cDNA.

[0072] The present invention also provides genes corresponding to the cDNA sequences disclosed herein. The corresponding genes can be isolated in accordance with known methods using the sequence information disclosed herein. Such methods include the preparation of probes or primers from the disclosed sequence information for identification and/or amplification of genes in appropriate genomic libraries or other sources of genomic materials. Further 5′ and 3′ sequence can be obtained using methods known in the art. For example, full length cDNA or genomic DNA that corresponds to any of the polynucleotides of 748 SEQ ID NO: 1-45,207, 752 SEQ ID NO: 1-13,203, 778 SEQ ID NO: 1-105, 779 SEQ ID NO: 1-128, 782 SEQ ID NO: 1-10,451, 784 SEQ ID NO: 1-10,289, 785 SEQ ID NO: 1-3796, 787 SEQ ID NO: 1-10,410, 788 SEQ ID NO: 1-14,074, 789 SEQ ID NO: 1-6391, 790 SEQ ID NO: 1-30,533, 791 SEQ ID NO: 1-5822, and 792 SEQ ID NO: 1-8502 can be obtained by screening appropriate cDNA or genomic DNA libraries under suitable hybridization conditions using any of the polynucleotides of 748 SEQ ID NO: 1-45,207, 752 SEQ ID NO: 1-13,203, 778 SEQ ID NO: 1-105, 779 SEQ ID NO: 1-128, 782 SEQ ID NO: 1-10,451, 784 SEQ ID NO: 1-10,289, 785 SEQ ID NO: 1-3796, 787 SEQ ID NO: 1-10,410, 788 SEQ ID NO: 1-14,074, 789 SEQ ID NO: 1-6391, 790 SEQ ID NO: 1-30,533, 791 SEQ ID NO: 1-5822, and 792 SEQ ID NO: 1-8502 or a portion thereof as a probe. Alternatively, the polynucleotides of 748 SEQ ID NO: 1-45,207, 752 SEQ ID NO: 1-13,203, 778 SEQ ID NO: 1-105, 779 SEQ ID NO: 1-128, 782 SEQ ID NO: 1-10,451, 784 SEQ ID NO: 1-10,289, 785 SEQ ID NO: 1-3796, 787 SEQ ID NO: 1-10,410, 788 SEQ ID NO: 1-14,074, 789 SEQ ID NO: 1-6391, 790 SEQ ID NO: 1-30,533, 791 SEQ ID NO: 1-5822, and 792 SEQ ID NO: 1-8502 may be used as the basis for suitable primer(s) that allow identification and/or amplification of genes in appropriate genomic DNA or cDNA libraries.

[0073] The nucleic acid sequences of the invention can be assembled from ESTs and sequences (including cDNA and genomic sequences) obtained from one or more public databases, such as dbEST, gbpri, and UniGene. The EST sequences can provide identifying sequence information, representative fragment or segment information, or novel segment information for the full-length gene.

[0074] The polynucleotides of the invention also provide polynucleotides including nucleotide sequences that are substantially equivalent to the polynucleotides recited above. Polynucleotides according to the invention can have, e.g., at least about 65%, at least about 70%, at least about 75%, at least about 80%, more typically at least about 90%, and even more typically at least about 95%, sequence identity to a polynucleotide recited above.

[0075] Included within the scope of the nucleic acid sequences of the invention are nucleic acid sequence fragments that hybridize under stringent conditions to any of the nucleotide sequences of 748 SEQ ID NO: 1-45,207, 752 SEQ ID NO: 1-13,203, 778 SEQ ID NO: 1-105, 779 SEQ ID NO: 1-128, 782 SEQ ID NO: 1-10,451, 784 SEQ ID NO: 1-10,289, 785 SEQ ID NO: 1-3796, 787 SEQ ID NO: 1-10,410, 788 SEQ ID NO: 1-14,074, 789 SEQ ID NO: 1-6391, 790 SEQ ID NO: 1-30,533, 791 SEQ ID NO: 1-5822, and 792 SEQ ID NO: 1-8502, or complements thereof, which fragment is greater than about 5 nucleotides, preferably 7 nucleotides, more preferably greater than 9 nucleotides and most preferably greater than 17 nucleotides. Fragments of, e.g. 15, 17, or 20 nucleotides or more that are selective for (i.e. specifically hybridize to any one of the polynucleotides of the invention) are contemplated. Probes capable of specifically hybridizing to a polynucleotide can differentiate polynucleotide sequences of the invention from other polynucleotide sequences in the same family of genes or can differentiate human genes from genes of other species, and are preferably based on unique nucleotide sequences.

[0076] The sequences falling within the scope of the present invention are not limited to these specific sequences, but also include allelic and species variations thereof. Allelic and species variations can be routinely determined by comparing the sequence provided 748 SEQ ID NO: 1-45,207, 752 SEQ ID NO: 1-13,203, 778 SEQ ID NO: 1-105, 779 SEQ ID NO: 1-128, 782 SEQ ID NO: 1-10,451, 784 SEQ ID NO: 1-10,289, 785 SEQ ID NO: 1-3796, 787 SEQ ID NO: 1-10,410, 788 SEQ ID NO: 1-14,074, 789 SEQ ID NO: 1-6391, 790 SEQ ID NO: 1-30,533, 791 SEQ ID NO: 1-5822, and 792 SEQ ID NO: 1-8502, a representative fragment thereof, or a nucleotide sequence at least 90% identical, preferably 95% identical, to 748 SEQ ID NO: 1-45,207, 752 SEQ ID NO: 1-13,203, 778 SEQ ID NO: 1-105, 779 SEQ ID NO: 1-128, 782 SEQ ID NO: 1-10,451, 784 SEQ ID NO: 1-10,289, 785 SEQ ID NO: 1-3796, 787 SEQ ID NO: 1-10,410, 788 SEQ ID NO: 1-14,074, 789 SEQ ID NO: 1-6391, 790 SEQ ID NO: 1-30,533, 791 SEQ ID NO: 1-5822, and 792 SEQ ID NO: 1-8502 with a sequence from another isolate of the same species. Furthermore, to accommodate codon variability, the invention includes nucleic acid molecules coding for the same amino acid sequences as do the specific ORFs disclosed herein. In other words, in the coding region of an ORF, substitution of one codon for another codon that encodes the same amino acid is expressly contemplated.

[0077] The nearest neighbor or homology result for the nucleic acids of the present invention, including 748 SEQ ID NO: 1-45,207, 752 SEQ ID NO: 1-13,203, 778 SEQ ID NO: 1-105, 779 SEQ ID NO: 1-128, 782 SEQ ID NO: 1-10,451, 784 SEQ ID NO: 1-10,289, 785 SEQ ID NO: 1-3796, 787 SEQ ID NO: 1-10,410, 788 SEQ ID NO: 1-14,074, 789 SEQ ID NO: 1-6391, 790 SEQ ID NO: 1-30,533, 791 SEQ ID NO: 1-5822, and 792 SEQ ID NO: 1-8502, can be obtained by searching a database using an algorithm or a program. Preferably, a BLAST which stands for Basic Local Alignment Search Tool is used to search for local sequence alignments (Altshul, S. F. J Mol. Evol. 36 290-300 (1993) and Altschul S. F. et. al., J. Mol. Biol. 21:403-410 (1990)). Alternatively a FASTA version 3 search against Genpept, using Fastxy algorithm.

[0078] Species homologs (or orthologs) of the disclosed polynucleotides and proteins are also provided by the present invention. Species homologs may be isolated and identified by making suitable probes or primers from the sequences provided herein and screening a suitable nucleic acid source from the desired species.

[0079] The invention also encompasses allelic variants of the disclosed polynucleotides or proteins; that is, naturally-occurring alternative forms of the isolated polynucleotide which also encode proteins which are identical, homologous or related to that encoded by the polynucleotides.

[0080] The nucleic acid sequences of the invention are further directed to sequences which encode variants of the described nucleic acids. These amino acid sequence variants may be prepared by methods known in the art by introducing appropriate nucleotide changes into a native or variant polynucleotide. There are two variables in the construction of amino acid sequence variants: the location of the mutation and the nature of the mutation. Nucleic acids encoding the amino acid sequence variants are preferably constructed by mutating the polynucleotide to encode an amino acid sequence that does not occur in nature. These nucleic acid alterations can be made at sites that differ in the nucleic acids from different species (variable positions) or in highly conserved regions (constant regions). Sites at such locations will typically be modified in series, e.g., by substituting first with conservative choices (e.g., hydrophobic amino acid to a different hydrophobic amino acid) and then with more distant choices (e.g., hydrophobic amino acid to a charged amino acid), and then deletions or insertions may be made at the target site. Amino acid sequence deletions generally range from about 1 to 30 residues, preferably about 1 to 10 residues, and are typically contiguous. Amino acid insertions include amino- and/or carboxyl-terminal fusions ranging in length from one to one hundred or more residues, as well as intrasequence insertions of single or multiple amino acid residues. Intrasequence insertions may range generally from about 1 to 10 amino residues, preferably from 1 to 5 residues. Examples of terminal insertions include the heterologous signal sequences necessary for secretion or for intracellular targeting in different host cells and sequences such as FLAG or poly-histidine sequences useful for purifying the expressed protein.

[0081] In a preferred method, polynucleotides encoding the novel amino acid sequences are changed via site-directed mutagenesis. This method uses oligonucleotide sequences to alter a polynucleotide to encode the desired amino acid variant, as well as sufficient adjacent nucleotides on both sides of the changed amino acid to form a stable duplex on either side of the site of being changed. In general, the techniques of site-directed mutagenesis are well known to those of skill in the art and this technique is exemplified by publications such as, Edelman et al., DNA 2:183 (1983). A versatile and efficient method for producing site-specific changes in a polynucleotide sequence was published by Zoller and Smith, Nucleic Acids Res. 10:6487-6500 (1982). PCR may also be used to create amino acid sequence variants of the novel nucleic acids. When small amounts of template DNA are used as starting material, primer(s) that differs slightly in sequence from the corresponding region in the template DNA can generate the desired amino acid variant. PCR amplification results in a population of product DNA fragments that differ from the polynucleotide template encoding the polypeptide at the position specified by the primer. The product DNA fragments replace the corresponding region in the plasmid and this gives a polynucleotide encoding the desired amino acid variant.

[0082] A further technique for generating amino acid variants is the cassette mutagenesis technique described in Wells et al., Gene 34:315 (1985); and other mutagenesis techniques well known in the art, such as, for example, the techniques in Sambrook et al., supra, and Current Protocols in Molecular Biology, Ausubel et. al., Due to the inherent degeneracy of the genetic code, other DNA sequences which encode substantially the same or a functionally equivalent amino acid sequence may be used in the practice of the invention for the cloning and expression of these novel nucleic acids. Such DNA sequences include those which are capable of hybridizing to the appropriate novel nucleic acid sequence under stringent conditions.

[0083] Polynucleotides encoding preferred polypeptide truncations of the invention can be used to generate polynucleotides encoding chimeric or fusion proteins comprising one or more domains of the invention and heterologous protein sequences.

[0084] The polynucleotides of the invention additionally include the complement of any of the polynucleotides recited above. The polynucleotide can be DNA (genomic, cDNA, amplified, or synthetic) or RNA. Methods and algorithms for obtaining such polynucleotides are well known to those of skill in the art and can include, for example, methods for determining hybridization conditions that can routinely isolate polynucleotides of the desired sequence identities.

[0085] In accordance with the invention, polynucleotide sequences comprising the mature protein coding sequences corresponding to any one of 748 SEQ ID NO: 1-45,207, 752 SEQ ID NO: 1-13,203, 778 SEQ ID NO: 1-105, 779 SEQ ID NO: 1-128, 782 SEQ ID NO: 1-10,451, 784 SEQ ID NO: 1-10,289, 785 SEQ ID NO: 1-3796, 787 SEQ ID NO: 1-10,410, 788 SEQ ID NO: 1-14,074, 789 SEQ ID NO: 1-6391, 790 SEQ ID NO: 1-30,533, 791 SEQ ID NO: 1-5822, and 792 SEQ ID NO: 1-8502, or functional equivalents thereof, may be used to generate recombinant DNA molecules that direct the expression of that nucleic acid, or a functional equivalent thereof, in appropriate host cells. Also included are the cDNA inserts of any of the clones identified herein.

[0086] A polynucleotide according to the invention can be joined to any of a variety of other nucleotide sequences by well-established recombinant DNA techniques (see Sambrook J et. al., (1989) Molecular Cloning: A Laboratory Manual, Cold Spring Harbor Laboratory, NY). Useful nucleotide sequences for joining to polynucleotides include an assortment of vectors, e.g., plasmids, cosmids, lambda phage derivatives, phagemids, and the like, that are well known in the art. Accordingly, the invention also provides a vector including a polynucleotide of the invention and a host cell containing the polynucleotide. In general, the vector contains an origin of replication functional in at least one organism, convenient restriction endonuclease sites, and a selectable marker for the host cell. Vectors according to the invention include expression vectors, replication vectors, probe generation vectors, and sequencing vectors. A host cell according to the invention can be a prokaryotic or eukaryotic cell and can be a unicellular organism or part of a multicellular organism.

[0087] The present invention further provides recombinant constructs comprising a nucleic acid having any of the nucleotide sequences of 748 SEQ ID NO: 1-45,207, 752 SEQ ID NO: 1-13,203, 778 SEQ ID NO: 1-105, 779 SEQ ID NO: 1-128, 782 SEQ ID NO: 1-10,451, 784 SEQ ID NO: 1-10,289, 785 SEQ ID NO: 1-3796, 787 SEQ ID NO: 1-10,410, 788 SEQ ID NO: 1-14,074, 789 SEQ ID NO: 1-6391, 790 SEQ ID NO: 1-30,533, 791 SEQ ID NO: 1-5822, and 792 SEQ ID NO: 1-8502 or a fragment thereof or any other polynucleotides of the invention. In one embodiment, the recombinant constructs of the present invention comprise a vector, such as a plasmid or viral vector, into which a nucleic acid having any of the nucleotide sequences of 748 SEQ ID NO: 1-45,207, 752 SEQ ID NO: 1-13,203, 778 SEQ ID NO: 1-105, 779 SEQ ID NO: 1-128, 782 SEQ ID NO: 1-10,451, 784 SEQ ID NO: 1-10,289, 785 SEQ ID NO: 1-3796, 787 SEQ ID NO: 1-10,410, 788 SEQ ID NO: 1-14,074, 789 SEQ ID NO: 1-6391, 790 SEQ ID NO: 1-30,533, 791 SEQ ID NO: 1-5822, and 792 SEQ ID NO: 1-8502 or a fragment thereof is inserted, in a forward or reverse orientation. In the case of a vector comprising one of the ORFs of the present invention, the vector may further comprise regulatory sequences, including for example, a promoter, operably linked to the ORF. Large numbers of suitable vectors and promoters are known to those of skill in the art and are commercially available for generating the recombinant constructs of the present invention. The following vectors are provided by way of example. Bacterial: pBs, phagescript, PsiX174, pBluescript SK, pBs KS, pNH8a, pNH16a, pNH18a, pNH46a (Stratagene); pTrc99A, pKK223-3, pKK233-3, pDR540, pRIT5 (Pharmacia). Eukaryotic: pWLneo, pSV2cat, pOG44, PXTI, pSG (Stratagene) pSVK3, pBPV, pMSG, pSVL (Pharmacia).

[0088] The isolated polynucleotide of the invention may be operably linked to an expression control sequence such as the pMT2 or pED expression vectors disclosed in Kaufman et al., Nucleic Acids Res. 19, 4485-4490 (1991), in order to produce the protein recombinantly. Many suitable expression control sequences are known in the art. General methods of expressing recombinant proteins are also known and are exemplified in R. Kaufman, Methods in Enzymology 185, 537-566 (1990). As defined herein “operably linked” means that the isolated polynucleotide of the invention and an expression control sequence are situated within a vector or cell in such a way that the protein is expressed by a host cell which has been transformed (transfected) with the ligated polynucleotide/expression control sequence.

[0089] Promoter regions can be selected from any desired gene using CAT (chloramphenicol transferase) vectors or other vectors with selectable markers. Two appropriate vectors are pKK232-8 and pCM7. Particular named bacterial promoters include lacI, lacZ, T3, T7, gpt, lambda PR, and trc. Eukaryotic promoters include CMV immediate early, HSV thymidine kinase, early and late SV40, LTRs from retrovirus, and mouse metallothionein-I. Selection of the appropriate vector and promoter is well within the level of ordinary skill in the art. Generally, recombinant expression vectors will include origins of replication and selectable markers permitting transformation of the host cell, e.g., the ampicillin resistance gene of E. coli and S. cerevisiae TRP1 gene, and a promoter derived from a highly-expressed gene to direct transcription of a downstream structural sequence. Such promoters can be derived from operons encoding glycolytic enzymes such as 3-phosphoglycerate kinase (PGK), a-factor, acid phosphatase, or heat shock proteins, among others. The heterologous structural sequence is assembled in appropriate phase with translation initiation and termination sequences, and preferably, a leader sequence capable of directing secretion of translated protein into the periplasmic space or extracellular medium. Optionally, the heterologous sequence can encode a fusion protein including an amino terminal identification peptide imparting desired characteristics, e.g., stabilization or simplified purification of expressed recombinant product. Useful expression vectors for bacterial use are constructed by inserting a structural DNA sequence encoding a desired protein together with suitable translation initiation and termination signals in operable reading phase with a functional promoter. The vector will comprise one or more phenotypic selectable markers and an origin of replication to ensure maintenance of the vector and to, if desirable, provide amplification within the host. Suitable prokaryotic hosts for transformation include E. coli, Bacillus subtilis, Salmonella typhimurium and various species within the genera Pseudomonas, Streptomyces, and Staphylococcus, although others may also be employed as a matter of choice.

[0090] As a representative but non-limiting example, useful expression vectors for bacterial use can comprise a selectable marker and bacterial origin of replication derived from commercially available plasmids comprising genetic elements of the well known cloning vector pBR322 (ATCC 37017). Such commercial vectors include, for example, pKK223-3 (Pharmacia Fine Chemicals, Uppsala, Sweden) and GEM 1 (Promega Biotech, Madison, Wis., USA). These pBR322 “backbone” sections are combined with an appropriate promoter and the structural sequence to be expressed. Following transformation of a suitable host strain and growth of the host strain to an appropriate cell density, the selected promoter is induced or derepressed by appropriate means (e.g., temperature shift or chemical induction) and cells are cultured for an additional period. Cells are typically harvested by centrifugation, disrupted by physical or chemical means, and the resulting crude extract retained for further purification.

[0091] Polynucleotides of the invention can also be used to induce immune responses. For example, as described in Fan et al., Nat. Biotech. 17:870-872 (1999), incorporated herein by reference, nucleic acid sequences encoding a polypeptide may be used to generate antibodies against the encoded polypeptide following topical administration of naked plasmid DNA or following injection, and preferably intramuscular injection of the DNA. The nucleic acid sequences are preferably inserted in a recombinant expression vector and may be in the form of naked DNA.

[0092] 5.3 Antisense

[0093] Another aspect of the invention pertains to isolated antisense nucleic acid molecules that are hybridizable to or complementary to the nucleic acid molecule comprising the nucleotide sequence of 748 SEQ ID NO: 1-45,207, 752 SEQ ID NO: 1-13,203, 778 SEQ ID NO: 1-105, 779 SEQ ID NO: 1-128, 782 SEQ ID NO: 1-10,451, 784 SEQ ID NO: 1-10,289, 785 SEQ ID NO: 1-3796, 787 SEQ ID NO: 1-10,410, 788 SEQ ID NO: 1-14,074, 789 SEQ ID NO: 1-6391, 790 SEQ ID NO: 1-30,533, 791 SEQ ID NO: 1-5822, and 792 SEQ ID NO: 1-8502, or fragments, analogs or derivatives thereof. An “antisense” nucleic acid comprises a nucleotide sequence that is complementary to a “sense” nucleic acid encoding a protein, e.g., complementary to the coding strand of a double-stranded cDNA molecule or complementary to an mRNA sequence. In specific aspects, antisense nucleic acid molecules are provided that comprise a sequence complementary to at least about 10, 25, 50, 100, 250 or 500 nucleotides or an entire coding strand, or to only a portion thereof. Nucleic acid molecules encoding fragments, homologs, derivatives and analogs of a protein of any of 748 SEQ ID NO: 1-45,207, 752 SEQ ID NO: 1-13,203, 778 SEQ ID NO: 1-105, 779 SEQ ID NO: 1-128, 782 SEQ ID NO: 1-10,451, 784 SEQ ID NO: 1-10,289, 785 SEQ ID NO: 1-3796, 787 SEQ ID NO: 1-10,410, 788 SEQ ID NO: 1-14,074, 789 SEQ ID NO: 1-6391, 790 SEQ ID NO: 1-30,533, 791 SEQ ID NO: 1-5822, and 792 SEQ ID NO: 1-8502 or antisense nucleic acids complementary to a nucleic acid sequence of 748 SEQ ID NO: 1-45,207, 752 SEQ ID NO: 1-13,203, 778 SEQ ID NO: 1-105, 779 SEQ ID NO: 1-128, 782 SEQ ID NO: 1-10,451, 784 SEQ ID NO: 1-10,289, 785 SEQ ID NO: 1-3796, 787 SEQ ID NO: 1-10,410, 788 SEQ ID NO: 1-14,074, 789 SEQ ID NO: 1-6391, 790 SEQ ID NO: 1-30,533, 791 SEQ ID NO: 1-5822, and 792 SEQ ID NO: 1-8502 are additionally provided.

[0094] In one embodiment, an antisense nucleic acid molecule is antisense to a “coding region” of the coding strand of a nucleotide sequence of the invention. The term “coding region” refers to the region of the nucleotide sequence comprising codons which are translated into amino acid residues. In another embodiment, the antisense nucleic acid molecule is antisense to a “noncoding region” of the coding strand of a nucleotide sequence of the invention. The term “noncoding region” refers to 5′ and 3′ sequences which flank the coding region that are not translated into amino acids (i.e., also referred to as 5′ and 3′ untranslated regions).

[0095] Given the coding strand sequences encoding a nucleic acid disclosed herein (e.g., 748 SEQ ID NO: 1-45,207, 752 SEQ ID NO: 1-13,203, 778 SEQ ID NO: 1-105, 779 SEQ ID NO: 1-128, 782 SEQ ID NO: 1-10,451, 784 SEQ ID NO: 1-10,289, 785 SEQ ID NO: 1-3796, 787 SEQ ID NO: 1-10,410, 788 SEQ ID NO: 1-14,074, 789 SEQ ID NO: 1-6391, 790 SEQ ID NO: 1-30,533, 791 SEQ ID NO: 1-5822, and 792 SEQ ID NO: 1-8502, antisense nucleic acids of the invention can be designed according to the rules of Watson and Crick or Hoogsteen base pairing. The antisense nucleic acid molecule can be complementary to the entire coding region of a mRNA, but more preferably is an oligonucleotide that is antisense to only a portion of the coding or noncoding region of a mRNA. For example, the antisense oligonucleotide can be complementary to the region surrounding the translation start site of a mRNA. An antisense oligonucleotide can be, for example, about 5, 10, 15, 20, 25, 30, 35, 40, 45 or 50 nucleotides in length. An antisense nucleic acid of the invention can be constructed using chemical synthesis or enzymatic ligation reactions using procedures known in the art. For example, an antisense nucleic acid (e.g., an antisense oligonucleotide) can be chemically synthesized using naturally occurring nucleotides or variously modified nucleotides designed to increase the biological stability of the molecules or to increase the physical stability of the duplex formed between the antisense and sense nucleic acids, e.g., phosphorothioate derivatives and acridine substituted nucleotides can be used.

[0096] Examples of modified nucleotides that can be used to generate the antisense nucleic acid include: 5-fluorouracil, 5-bromouracil, 5-chlorouracil, 5-iodouracil, hypoxanthine, xanthine, 4-acetylcytosine, 5-(carboxyhydroxylmethyl) uracil, 5-carboxymethylaminomethyl-2-thiouridine, 5-carboxymethylaminomethyluracil, dihydrouracil, beta-D-galactosylqueosine, inosine, n6-isopentenyladenine, 1-methylguanine, 1-methylinosine, 2,2-dimethylguanine, 2-methyl adenine, 2-methylguanine, 3-methylcytosine, 5-methylcytosine, n6-adenine, 7-methylguanine, 5-methylaminomethyluracil, 5-methoxyaminomethyl-2-thiouracil, beta-D-mannosylqueosine, 5′-methoxycarboxymethyluracil, 5-methoxyuracil, 2-methylthio-n6-isopentenyladenine, uracil-5-oxyacetic acid (v), wybutoxosine, pseudouracil, queosine, 2-thiocytosine, 5-methyl-2-thiouracil, 2-thiouracil, 4-thiouracil, 5-methyluracil, uracil-5-oxyacetic acid methylester, uracil-5-oxyacetic acid (v), 5-methyl-2-thiouracil, 3-(3-amino-3-N-2-carboxypropyl) uracil, (acp3)w, and 2,6-diaminopurine. Alternatively, the antisense nucleic acid can be produced biologically using an expression vector into which a nucleic acid has been subcloned in an antisense orientation (i.e., RNA transcribed from the inserted nucleic acid will be of an antisense orientation to a target nucleic acid of interest, described further in the following subsection).

[0097] The antisense nucleic acid molecules of the invention are typically administered to a subject or generated in situ such that they hybridize with or bind to cellular mRNA and/or genomic DNA encoding a protein according to the invention to thereby inhibit expression of the protein, e.g., by inhibiting transcription and/or translation. The hybridization can be by conventional nucleotide complementarity to form a stable duplex, or, for example, in the case of an antisense nucleic acid molecule that binds to DNA duplexes, through specific interactions in the major groove of the double helix. An example of a route of administration of antisense nucleic acid molecules of the invention includes direct injection at a tissue site. Alternatively, antisense nucleic acid molecules can be modified to target selected cells and then administered systemically. For example, for systemic administration, antisense molecules can be modified such that they specifically bind to receptors or antigens expressed on a selected cell surface, e.g., by linking the antisense nucleic acid molecules to peptides or antibodies that bind to cell surface receptors or antigens. The antisense nucleic acid molecules can also be delivered to cells using the vectors described herein. To achieve sufficient intracellular concentrations of antisense molecules, vector constructs in which the antisense nucleic acid molecule is placed under the control of a strong pol II or pol III promoter are preferred.

[0098] In yet another embodiment, the antisense nucleic acid molecule of the invention is an α-anomeric nucleic acid molecule. An α-anomeric nucleic acid molecule forms specific double-stranded hybrids with complementary RNA in which, contrary to the usual β-units, the strands run parallel to each other (Gaultier et al., (1987) Nucleic Acids Res 15: 6625-6641). The antisense nucleic acid molecule can also comprise a 2′-o-methylribonucleotide (Inoue et al., (1987) Nucleic Acids Res 15: 6131-6148) or a chimeric RNA-DNA analogue (Inoue et al., (1987) FEBS Lett 215: 327-330).

[0099] 5.4 Ribozymes and PNA Moieties

[0100] In still another embodiment, an antisense nucleic acid of the invention is a ribozyme. Ribozymes are catalytic RNA molecules with ribonuclease activity that are capable of cleaving a single-stranded nucleic acid, such as an mRNA, to which they have a complementary region. Thus, ribozymes (e.g., hammerhead ribozymes (described in Haselhoff and Gerlach (1988) Nature 334:585-591)) can be used to catalytically cleave mRNA transcripts to thereby inhibit translation of the mRNA. A ribozyme having specificity for a nucleic acid of the invention can be designed based upon the nucleotide sequence of a DNA disclosed herein (i.e., 748 SEQ ID NO: 1-45,207, 752 SEQ ID NO: 1-13,203, 778 SEQ ID NO: 1-105, 779 SEQ ID NO: 1-128, 782 SEQ ID NO: 1-10,451, 784 SEQ ID NO: 1-10,289, 785 SEQ ID NO: 1-3796, 787 SEQ ID NO: 1-10,410, 788 SEQ ID NO: 1-14,074, 789 SEQ ID NO: 1-6391, 790 SEQ ID NO: 1-30,533, 791 SEQ ID NO: 1-5822, and 792 SEQ ID NO: 1-8502). For example, a derivative of a Tetrahymena L-19 IVS RNA can be constructed in which the nucleotide sequence of the active site is complementary to the nucleotide sequence to be cleaved in a SECX-encoding mRNA. See, e.g., Cech et al., U.S. Pat. No. 4,987,071; and Cech et al., U.S. Pat. No. 5,116,742. Alternatively, SECX mRNA can be used to select a catalytic RNA having a specific ribonuclease activity from a pool of RNA molecules. See, e.g., Bartel et al., (1993) Science 261:1411-1418.

[0101] Alternatively, gene expression can be inhibited by targeting nucleotide sequences complementary to the regulatory region (e.g., promoter and/or enhancers) to form triple helical structures that prevent transcription of the gene in target cells. See generally, Helene. (1991) Anticancer Drug Des. 6: 569-84; Helene. et al., (1992) Ann. N.Y. Acad. Sci. 660:27-36; and Maher (1992) Bioassays 14: 807-15.

[0102] In various embodiments, the nucleic acids of the invention can be modified at the base moiety, sugar moiety or phosphate backbone to improve, e.g., the stability, hybridization, or solubility of the molecule. For example, the deoxyribose phosphate backbone of the nucleic acids can be modified to generate peptide nucleic acids (see Hyrup et al., (1996) Bioorg Med Chem 4: 5-23). As used herein, the terms “peptide nucleic acids” or “PNAs” refer to nucleic acid mimics, e.g., DNA mimics, in which the deoxyribose phosphate backbone is replaced by a pseudopeptide backbone and only the four natural nucleobases are retained. The neutral backbone of PNAs has been shown to allow for specific hybridization to DNA and RNA under conditions of low ionic strength. The synthesis of PNA oligomers can be performed using standard solid phase peptide synthesis protocols as described in Hyrup et al., (1996) above; Perry-O'Keefe et al., (1996) PNAS 93: 14670-675.

[0103] PNAs of the invention can be used in therapeutic and diagnostic applications. For example, PNAs can be used as antisense or antigene agents for sequence-specific modulation of gene expression by, e.g., inducing transcription or translation arrest or inhibiting replication. PNAs of the invention can also be used, e.g., in the analysis of single base pair mutations in a gene by, e.g., PNA directed PCR clamping; as artificial restriction enzymes when used in combination with other enzymes, e.g., S1 nucleases (Hyrup B. (1996) above); or as probes or primers for DNA sequence and hybridization (Hyrup et al., (1996), above; Perry-O'Keefe (1996), above).

[0104] In another embodiment, PNAs of the invention can be modified, e.g., to enhance their stability or cellular uptake, by attaching lipophilic or other helper groups to PNA, by the formation of PNA-DNA chimeras, or by the use of liposomes or other techniques of drug delivery known in the art. For example, PNA-DNA chimeras can be generated that may combine the advantageous properties of PNA and DNA. Such chimeras allow DNA recognition enzymes, e.g., RNase H and DNA polymerases, to interact with the DNA portion while the PNA portion would provide high binding affinity and specificity. PNA-DNA chimeras can be linked using linkers of appropriate lengths selected in terms of base stacking, number of bonds between the nucleobases, and orientation (Hyrup (1996) above). The synthesis of PNA-DNA chimeras can be performed as described in Hyrup (1996) above and Finn et al., (1996) Nucl Acids Res 24: 3357-63. For example, a DNA chain can be synthesized on a solid support using standard phosphoramidite coupling chemistry, and modified nucleoside analogs, e.g., 5′-(4-methoxytrityl)amino-5′-deoxy-thymidine phosphoramidite, can be used between the PNA and the 5′ end of DNA (Mag et al., (1989) Nucl Acid Res 17: 5973-88). PNA monomers are then coupled in a stepwise manner to produce a chimeric molecule with a 5′ PNA segment and a 3′ DNA segment (Finn et al., (1996) above). Alternatively, chimeric molecules can be synthesized with a 5′ DNA segment and a 3′ PNA segment. See, Petersen et al., (1975) Bioorg Med Chem Lett 5: 1119-11124.

[0105] In other embodiments, the oligonucleotide may include other appended groups such as peptides (e.g., for targeting host cell receptors in vivo), or agents facilitating transport across the cell membrane (see, e.g., Letsinger et al., 1989, Proc. Natl. Acad. Sci. U.S.A. 86:6553-6556; Lemaitre et al., 1987, Proc. Natl. Acad. Sci. 84:648-652; PCT Publication No. WO88/09810) or the blood-brain barrier (see, e.g., PCT Publication No. WO89/10134). In addition, oligonucleotides can be modified with hybridization triggered cleavage agents (See, e.g., Krol et al., 1988, BioTechniques 6:958-976) or intercalating agents. (See, e.g., Zon, 1988, Pharm. Res. 5: 539-549). To this end, the oligonucleotide may be conjugated to another molecule, e.g., a peptide, a hybridization triggered cross-linking agent, a transport agent, a hybridization-triggered cleavage agent, etc.

[0106] 5.5 Hosts

[0107] The present invention further provides host cells genetically engineered to contain the polynucleotides of the invention. For example, such host cells may contain nucleic acids of the invention introduced into the host cell using known transformation, transfection or infection methods. The present invention still further provides host cells genetically engineered to express the polynucleotides of the invention, wherein such polynucleotides are in operative association with a regulatory sequence heterologous to the host cell which drives expression of the polynucleotides in the cell.

[0108] Knowledge of nucleic acid sequences allows for modification of cells to permit, or increase, expression of endogenous polypeptide. Cells can be modified (e.g., by homologous recombination) to provide increased polypeptide expression by replacing, in whole or in part, the naturally occurring promoter with all or part of a heterologous promoter so that the cells express the polypeptide at higher levels. The heterologous promoter is inserted in such a manner that it is operatively linked to the encoding sequences. See, for example, PCT International Publication No. WO94/12650, PCT International Publication No. WO92/20808, and PCT International Publication No. WO91/09955. It is also contemplated that, in addition to heterologous promoter DNA, amplifiable marker DNA (e.g., ada, dhfr, and the multifunctional CAD gene which encodes carbamyl phosphate synthase, aspartate transcarbamylase, and dihydroorotase) and/or intron DNA may be inserted along with the heterologous promoter DNA. If linked to the coding sequence, amplification of the marker DNA by standard selection methods results in co-amplification of the desired protein coding sequences in the cells.

[0109] The host cell can be a higher eukaryotic host cell, such as a mammalian cell, a lower eukaryotic host cell, such as a yeast cell, or the host cell can be a prokaryotic cell, such as a bacterial cell. Introduction of the recombinant construct into the host cell can be effected by calcium phosphate transfection, DEAE, dextran mediated transfection, or electroporation (Davis, L. et al., Basic Methods in Molecular Biology (1986)). The host cells containing one of the polynucleotides of the invention, can be used in conventional manners to produce the gene product encoded by the isolated fragment (in the case of an ORF) or can be used to produce a heterologous protein under the control of the EMF.

[0110] Any host/vector system can be used to express one or more of the ORFs of the present invention. These include, but are not limited to, eukaryotic hosts such as HeLa cells, Cv-1 cell, COS cells, 293 cells, and Sf9 cells, as well as prokaryotic host such as E. coli and B. subtilis. The most preferred cells are those which do not normally express the particular polypeptide or protein or which expresses the polypeptide or protein at low natural level. Mature proteins can be expressed in mammalian cells, yeast, bacteria, or other cells under the control of appropriate promoters. Cell-free translation systems can also be employed to produce such proteins using RNAs derived from the DNA constructs of the present invention. Appropriate cloning and expression vectors for use with prokaryotic and eukaryotic hosts are described by Sambrook, et al., in Molecular Cloning: A Laboratory Manual, Second Edition, Cold Spring Harbor, N.Y. (1989), the disclosure of which is hereby incorporated by reference.

[0111] Various mammalian cell culture systems can also be employed to express recombinant protein. Examples of mammalian expression systems include the COS-7 lines of monkey kidney fibroblasts, described by Gluzman, Cell 23:175 (1981). Other cell lines capable of expressing a compatible vector are, for example, the C127, monkey COS cells, Chinese Hamster Ovary (CHO) cells, human kidney 293 cells, human epidermal A431 cells, human Colo205 cells, 3T3 cells, CV-1 cells, other transformed primate cell lines, normal diploid cells, cell strains derived from in vitro culture of primary tissue, primary explants, HeLa cells, mouse L cells, BHK, HL-60, U937, HaK or Jurkat cells. Mammalian expression vectors will comprise an origin of replication, a suitable promoter and also any necessary ribosome binding sites, polyadenylation site, splice donor and acceptor sites, transcriptional termination sequences, and 5′ flanking nontranscribed sequences. DNA sequences derived from the SV40 viral genome, for example, SV40 origin, early promoter, enhancer, splice, and polyadenylation sites may be used to provide the required nontranscribed genetic elements. Recombinant polypeptides and proteins produced in bacterial culture are usually isolated by initial extraction from cell pellets, followed by one or more salting-out, aqueous ion exchange or size exclusion chromatography steps. Protein refolding steps can be used, as necessary, in completing configuration of the mature protein. Finally, high performance liquid chromatography (HPLC) can be employed for final purification steps. Microbial cells employed in expression of proteins can be disrupted by any convenient method, including freeze-thaw cycling, sonication, mechanical disruption, or use of cell lysing agents.

[0112] Alternatively, it may be possible to produce the protein in lower eukaryotes such as yeast or insects or in prokaryotes such as bacteria. Potentially suitable yeast strains include Saccharomyces cerevisiae, Schizosaccharomyces pombe, Kluyveromyces strains, Candida, or any yeast strain capable of expressing heterologous proteins. Potentially suitable bacterial strains include Escherichia coli, Bacillus subtilis, Salmonella typhimurium, or any bacterial strain capable of expressing heterologous proteins. If the protein is made in yeast or bacteria, it may be necessary to modify the protein produced therein, for example by phosphorylation or glycosylation of the appropriate sites, in order to obtain the functional protein. Such covalent attachments may be accomplished using known chemical or enzymatic methods.

[0113] In another embodiment of the present invention, cells and tissues may be engineered to express an endogenous gene comprising the polynucleotides of the invention under the control of inducible regulatory elements, in which case the regulatory sequences of the endogenous gene may be replaced by homologous recombination. As described herein, gene targeting can be used to replace a gene's existing regulatory region with a regulatory sequence isolated from a different gene or a novel regulatory sequence synthesized by genetic engineering methods. Such regulatory sequences may be comprised of promoters, enhancers, scaffold-attachment regions, negative regulatory elements, transcriptional initiation sites, regulatory protein binding sites or combinations of said sequences. Alternatively, sequences which affect the structure or stability of the RNA or protein produced may be replaced, removed, added, or otherwise modified by targeting. These sequence include polyadenylation signals, mRNA stability elements, splice sites, leader sequences for enhancing or modifying transport or secretion properties of the protein, or other sequences which alter or improve the function or stability of protein or RNA molecules.

[0114] The targeting event may be a simple insertion of the regulatory sequence, placing the gene under the control of the new regulatory sequence, e.g., inserting a new promoter or enhancer or both upstream of a gene. Alternatively, the targeting event may be a simple deletion of a regulatory element, such as the deletion of a tissue-specific negative regulatory element. Alternatively, the targeting event may replace an existing element; for example, a tissue-specific enhancer can be replaced by an enhancer that has broader or different cell-type specificity than the naturally occurring elements. Here, the naturally occurring sequences are deleted and new sequences are added. In all cases, the identification of the targeting event may be facilitated by the use of one or more selectable marker genes that are contiguous with the targeting DNA, allowing for the selection of cells in which the exogenous DNA has integrated into the host cell genome. The identification of the targeting event may also be facilitated by the use of one or more marker genes exhibiting the property of negative selection, such that the negatively selectable marker is linked to the exogenous DNA, but configured such that the negatively selectable marker flanks the targeting sequence, and such that a correct homologous recombination event with sequences in the host cell genome does not result in the stable integration of the negatively selectable marker. Markers useful for this purpose include the Herpes Simplex Virus thymidine kinase (TK) gene or the bacterial xanthine-guanine phosphoribosyl-transferase (gpt) gene.

[0115] The gene targeting or gene activation techniques which can be used in accordance with this aspect of the invention are more particularly described in U.S. Pat. No. 5,272,071 to Chappel; U.S. Pat. No. 5,578,461 to Sherwin et. al.; International Application No. PCT/US92/09627 (WO93/09222) by Selden et. al.; and International Application No. PCT/US90/06436 (WO91/06667) by Skoultchi et al., each of which is incorporated by reference herein in its entirety.

[0116] 5.6 Polypeptides of the Invention

[0117] The isolated polypeptides of the invention include, but are not limited to, a polypeptide comprising: the amino acid sequences set forth as any one of 748 SEQ ID NO: 1-45,207, 752 SEQ ID NO: 1-13,203, 778 SEQ ID NO: 1-105, 779 SEQ ID NO: 1-128, 782 SEQ ID NO: 1-10,451, 784 SEQ ID NO: 1-10,289, 785 SEQ ID NO: 1-3796, 787 SEQ ID NO: 1-10,410, 788 SEQ ID NO: 1-14,074, 789 SEQ ID NO: 1-6391, 790 SEQ ID NO: 1-30,533, 791 SEQ ID NO: 1-5822, and 792 SEQ ID NO: 1-8502 or an amino acid sequence encoded by any one of the nucleotide sequences 748 SEQ ID NO: 1-45,207, 752 SEQ ID NO: 1-13,203, 778 SEQ ID NO: 1-105, 779 SEQ ID NO: 1-128, 782 SEQ ID NO: 1-10,451, 784 SEQ ID NO: 1-10,289, 785 SEQ ID NO: 1-3796, 787 SEQ ID NO: 1-10,410, 788 SEQ ID NO: 1-14,074, 789 SEQ ID NO: 1-6391, 790 SEQ ID NO: 1-30,533, 791 SEQ ID NO: 1-5822, and 792 SEQ ID NO: 1-8502 or the corresponding full length or mature protein. Polypeptides of the invention also include polypeptides preferably with biological or immunological activity that are encoded by: (a) a polynucleotide having any one of the nucleotide sequences set forth in 748 SEQ ID NO: 1-45,207, 752 SEQ ID NO: 1-13,203, 778 SEQ ID NO: 1-105, 779 SEQ ID NO: 1-128, 782 SEQ ID NO: 1-10,451, 784 SEQ ID NO: 1-10,289, 785 SEQ ID NO: 1-3796, 787 SEQ ID NO: 1-10,410, 788 SEQ ID NO: 1-14,074, 789 SEQ ID NO: 1-6391, 790 SEQ ID NO: 1-30,533, 791 SEQ ID NO: 1-5822, and 792 SEQ ID NO: 1-8502 or (b) polynucleotides encoding any one of the amino acid sequences set forth 748 SEQ ID NO: 1-45,207, 752 SEQ ID NO: 1-13,203, 778 SEQ ID NO: 1-105, 779 SEQ ID NO: 1-128, 782 SEQ ID NO: 1-10,451, 784 SEQ ID NO: 1-10,289, 785 SEQ ID NO: 1-3796, 787 SEQ ID NO: 1-10,410, 788 SEQ ID NO: 1-14,074, 789 SEQ ID NO: 1-6391, 790 SEQ ID NO: 1-30,533, 791 SEQ ID NO: 1-5822, and 792 SEQ ID NO: 1-8502 or (c) polynucleotides that hybridize to the complement of the polynucleotides of either (a) or (b) under stringent hybridization conditions. The invention also provides biologically active or immunologically active variants of any of the amino acid sequences set forth as 748 SEQ ID NO: 1-45,207, 752 SEQ ID NO: 1-13,203, 778 SEQ ID NO: 1-105, 779 SEQ ID NO: 1-128, 782 SEQ ID NO: 1-10,451, 784 SEQ ID NO: 1-10,289, 785 SEQ ID NO: 1-3796, 787 SEQ ID NO: 1-10,410, 788 SEQ ID NO: 1-14,074, 789 SEQ ID NO: 1-6391, 790 SEQ ID NO: 1-30,533, 791 SEQ ID NO: 1-5822, and 792 SEQ ID NO: 1-8502 or the corresponding full length or mature protein; and “substantial equivalents” thereof (e.g., with at least about 65%, at least about 70%, at least about 75%, at least about 80%, at least about 85%, at least about 90%, typically at least about 95%, more typically at least about 98%, or most typically at least about 99% amino acid identity) that retain biological activity. Polypeptides encoded by allelic variants may have a similar, increased, or decreased activity compared to polypeptides comprising 748 SEQ ID NO: 1-45,207, 752 SEQ ID NO: 1-13,203, 778 SEQ ID NO: 1-105, 779 SEQ ID NO: 1-128, 782 SEQ ID NO: 1-10,451, 784 SEQ ID NO: 1-10,289, 785 SEQ ID NO: 1-3796, 787 SEQ ID NO: 1-10,410, 788 SEQ ID NO: 1-14,074, 789 SEQ ID NO: 1-6391, 790 SEQ ID NO: 1-30,533, 791 SEQ ID NO: 1-5822, and 792 SEQ ID NO: 1-8502.

[0118] Fragments of the proteins of the present invention which are capable of exhibiting biological activity are also encompassed by the present invention. Fragments of the protein may be in linear form or they may be cyclized using known methods, for example, as described in H. U. Saragovi, et al., Bio/Technology 10, 773-778 (1992) and in R. S. McDowell, et al., J. Amer. Chem. Soc. 114, 9245-9253 (1992), both of which are incorporated herein by reference. Such fragments may be fused to carrier molecules such as immunoglobulins for many purposes, including increasing the valency of protein binding sites.

[0119] The present invention also provides both full-length and mature forms (for example, without a signal sequence or precursor sequence) of the disclosed proteins. The protein coding sequence is identified in the sequence listing by translation of the disclosed nucleotide sequences. The mature form of such protein may be obtained by expression of a full-length polynucleotide in a suitable mammalian cell or other host cell. The sequence of the mature form of the protein is also determinable from the amino acid sequence of the full-length form. Where proteins of the present invention are membrane bound, soluble forms of the proteins are also provided. In such forms, part or all of the regions causing the proteins to be membrane bound are deleted so that the proteins are fully secreted from the cell in which they are expressed.

[0120] Protein compositions of the present invention may further comprise an acceptable carrier, such as a hydrophilic, e.g., pharmaceutically acceptable, carrier.

[0121] The present invention further provides isolated polypeptides encoded by the nucleic acid fragments of the present invention or by degenerate variants of the nucleic acid fragments of the present invention. By “degenerate variant” is intended nucleotide fragments which differ from a nucleic acid fragment of the present invention (e.g., an ORF) by nucleotide sequence but, due to the degeneracy of the genetic code, encode an identical polypeptide sequence. Preferred nucleic acid fragments of the present invention are the ORFs that encode proteins.

[0122] A variety of methodologies known in the art can be utilized to obtain any one of the isolated polypeptides or proteins of the present invention. At the simplest level, the amino acid sequence can be synthesized using commercially available peptide synthesizers. The synthetically-constructed protein sequences, by virtue of sharing primary, secondary or tertiary structural and/or conformational characteristics with proteins may possess biological properties in common therewith, including protein activity. This technique is particularly useful in producing small peptides and fragments of larger polypeptides. Fragments are useful, for example, in generating antibodies against the native polypeptide. Thus, they may be employed as biologically active or immunological substitutes for natural, purified proteins in screening of therapeutic compounds and in immunological processes for the development of antibodies.

[0123] The polypeptides and proteins of the present invention can alternatively be purified from cells which have been altered to express the desired polypeptide or protein. As used herein, a cell is said to be altered to express a desired polypeptide or protein when the cell, through genetic manipulation, is made to produce a polypeptide or protein which it normally does not produce or which the cell normally produces at a lower level. One skilled in the art can readily adapt procedures for introducing and expressing either recombinant or synthetic sequences into eukaryotic or prokaryotic cells in order to generate a cell which produces one of the polypeptides or proteins of the present invention.

[0124] The invention also relates to methods for producing a polypeptide comprising growing a culture of host cells of the invention in a suitable culture medium, and purifying the protein from the cells or the culture in which the cells are grown. For example, the methods of the invention include a process for producing a polypeptide in which a host cell containing a suitable expression vector that includes a polynucleotide of the invention is cultured under conditions that allow expression of the encoded polypeptide. The polypeptide can be recovered from the culture, conveniently from the culture medium, or from a lysate prepared from the host cells and further purified. Preferred embodiments include those in which the protein produced by such process is a full length or mature form of the protein.

[0125] In an alternative method, the polypeptide or protein is purified from bacterial cells which naturally produce the polypeptide or protein. One skilled in the art can readily follow known methods for isolating polypeptides and proteins in order to obtain one of the isolated polypeptides or proteins of the present invention. These include, but are not limited to, immunochromatography, HPLC, size-exclusion chromatography, ion-exchange chromatography, and immuno-affinity chromatography. See, e.g., Scopes, Protein Purification Principles and Practice, Springer-Verlag (1994); Sambrook, et al., in Molecular Cloning: A Laboratory Manual; Ausubel et al., Current Protocols in Molecular Biology. Polypeptide fragments that retain biological/immunological activity include fragments comprising greater than about 100 amino acids, or greater than about 200 amino acids, and fragments that encode specific protein domains.

[0126] The purified polypeptides can be used in in vitro binding assays which are well known in the art to identify molecules which bind to the polypeptides. These molecules include but are not limited to, for e.g., small molecules, molecules from combinatorial libraries, antibodies or other proteins. The molecules identified in the binding assay are then tested for antagonist or agonist activity in in vivo tissue culture or animal models that are well known in the art. In brief, the molecules are titrated into a plurality of cell cultures or animals and then tested for either cell/animal death or prolonged survival of the animal/cells.

[0127] In addition, the peptides of the invention or molecules capable of binding to the peptides may be complexed with toxins, e.g., ricin or cholera, or with other compounds that are toxic to cells. The toxin-binding molecule complex is then targeted to a tumor or other cell by the specificity of the binding molecule for 748 SEQ ID NO: 1-45,207, 752 SEQ ID NO: 1-13,203, 778 SEQ ID NO: 1-105, 779 SEQ ID NO: 1-128, 782 SEQ ID NO: 1-10,451, 784 SEQ ID NO: 1-10,289, 785 SEQ ID NO: 1-3796, 787 SEQ ID NO: 1-10,410, 788 SEQ ID NO: 1-14,074, 789 SEQ ID NO: 1-6391, 790 SEQ ID NO: 1-30,533, 791 SEQ ID NO: 1-5822, and 792 SEQ ID NO: 1-8502.

[0128] The protein of the invention may also be expressed as a product of transgenic animals, e.g., as a component of the milk of transgenic cows, goats, pigs, or sheep which are characterized by somatic or germ cells containing a nucleotide sequence encoding the protein.

[0129] The proteins provided herein also include proteins characterized by amino acid sequences similar to those of purified proteins but into which modification are naturally provided or deliberately engineered. For example, modifications, in the peptide or DNA sequence, can be made by those skilled in the art using known techniques. Modifications of interest in the protein sequences may include the alteration, substitution, replacement, insertion or deletion of a selected amino acid residue in the coding sequence. For example, one or more of the cysteine residues may be deleted or replaced with another amino acid to alter the conformation of the molecule. Techniques for such alteration, substitution, replacement, insertion or deletion are well known to those skilled in the art (see, e.g., U.S. Pat. No. 4,518,584). Preferably, such alteration, substitution, replacement, insertion or deletion retains the desired activity of the protein. Regions of the protein that are important for the protein function can be determined by various methods known in the art including the alanine-scanning method which involved systematic substitution of single or strings of amino acids with alanine, followed by testing the resulting alanine-containing variant for biological activity. This type of analysis determines the importance of the substituted amino acid(s) in biological activity. Regions of the protein that are important for protein function may be determined by the eMATRIX program.

[0130] Other fragments and derivatives of the sequences of proteins which would be expected to retain protein activity in whole or in part and are useful for screening or other immunological methodologies may also be easily made by those skilled in the art given the disclosures herein. Such modifications are encompassed by the present invention.

[0131] The protein may also be produced by operably linking the isolated polynucleotide of the invention to suitable control sequences in one or more insect expression vectors, and employing an insect expression system. Materials and methods for baculovirus/insect cell expression systems are commercially available in kit form from, e.g., Invitrogen, San Diego, Calif., U.S.A. (the MaxBat™ kit), and such methods are well known in the art, as described in Summers and Smith, Texas Agricultural Experiment Station Bulletin No. 1555 (1987), incorporated herein by reference. As used herein, an insect cell capable of expressing a polynucleotide of the present invention is “transformed.”

[0132] The protein of the invention may be prepared by culturing transformed host cells under culture conditions suitable to express the recombinant protein. The resulting expressed protein may then be purified from such culture (i.e., from culture medium or cell extracts) using known purification processes, such as gel filtration and ion exchange chromatography. The purification of the protein may also include an affinity column containing agents which will bind to the protein; one or more column steps over such affinity resins as concanavalin A-agarose, Heparin-Toyopearl™ (TOSOH Biosep LLC, Montgomeryville, Pa.) or Cibacrom blue 3GA Sepharose™ (Pharmacia, Piscataway, N.J.); one or more steps involving hydrophobic interaction chromatography using such resins as phenyl ether, butyl ether, or propyl ether; or immunoaffinity chromatography.

[0133] Alternatively, the protein of the invention may also be expressed in a form which will facilitate purification. For example, it may be expressed as a fusion protein, such as those of maltose binding protein (MBP), glutathione-S-transferase (GST) or thioredoxin (TRX), or as a His tag. Kits for expression and purification of such fusion proteins are commercially available from New England BioLab (Beverly, Mass.), Pharmacia (Piscataway, N.J.) and Invitrogen, respectively. The protein can also be tagged with an epitope and subsequently purified by using a specific antibody directed to such epitope. One such epitope (“FLAG®”) is commercially available from Kodak (New Haven, Conn.).

[0134] Finally, one or more reverse-phase high performance liquid chromatography (RP-HPLC) steps employing hydrophobic RP-HPLC media, e.g., silica gel having pendant methyl or other aliphatic groups, can be employed to further purify the protein. Some or all of the foregoing purification steps, in various combinations, can also be employed to provide a substantially homogeneous isolated recombinant protein. The protein thus purified is substantially free of other mammalian proteins and is defined in accordance with the present invention as an “isolated protein.”

[0135] The polypeptides of the invention include analogs (variants). This embraces fragments, as well as peptides in which one or more amino acids has been deleted, inserted, or substituted. Also, analogs of the polypeptides of the invention embrace fusions of the polypeptides or modifications of the polypeptides of the invention, wherein the polypeptide or analog is fused to another moiety or moieties, e.g., targeting moiety or another therapeutic agent. Such analogs may exhibit improved properties such as activity and/or stability. Examples of moieties which may be fused to the polypeptide or an analog include, for example, targeting moieties which provide for the delivery of polypeptide to pancreatic cells, e.g., antibodies to pancreatic cells, antibodies to immune cells such as T-cells, monocytes, dendritic cells, granulocytes, etc., as well as receptor and ligands expressed on pancreatic or immune cells. Other moieties which may be fused to the polypeptide include therapeutic agents which are used for treatment, for example, immunosuppressive drugs such as cyclosporin, SK506, azathioprine, CD3 antibodies and steroids. Also, polypeptides may be fused to immune modulators, and other cytokines such as alpha or beta interferon.

[0136] 5.6.1 Determining Polypeptide and Polynucleotide Identity and Similarity

[0137] Preferred identity and/or similarity are designed to give the largest match between the sequences tested. Methods to determine identity and similarity are codified in computer programs including, but are not limited to, the GCG program package, including GAP (Devereux, J., et al., Nucleic Acids Research 12(1):387 (1984); Genetics Computer Group, University of Wisconsin, Madison, Wis.), BLASTP, BLASTN, BLASTX, FASTA (Altschul, S. F. et al., J. Molec. Biol. 215:403-410 (1990), PSI-BLAST (Altschul S. F. et al., Nucleic Acids Res. vol. 25, pp. 3389-3402, herein incorporated by reference), eMatrix software (Wu et al., J. Comp. Biol., Vol. 6, pp. 219-235 (1999), herein incorporated by reference), eMotif software (Nevill-Manning et al, ISMB-97, Vol. 4, pp. 202-209, herein incorporated by reference), pFam software (Sonnhammer et al., Nucleic Acids Res., Vol. 26(1), pp. 320-322 (1998), herein incorporated by reference) and the Kyte-Doolittle hydrophobocity prediction algorithm (J. Mol. Biol, 157, pp. 105-31 (1982), incorporated herein by reference). The BLAST programs are publicly available from the National Center for Biotechnology Information (NCBI) and other sources (BLAST Manual, Altschul, S., et. al., NCB NLM NIH Bethesda, Md. 20894; Altschul, S., et al., J. Mol. Biol. 215:403-410 (1990).

[0138] 5.7 Chimeric and Fusion Proteins

[0139] The invention also provides chimeric or fusion proteins. As used herein, a “chimeric protein” or “fusion protein” comprises a polypeptide of the invention operatively linked to another polypeptide. Within a fusion protein the polypeptide according to the invention can correspond to all or a portion of a protein according to the invention. In one embodiment, a fusion protein comprises at least one biologically active portion of a protein according to the invention. In another embodiment, a fusion protein comprises at least two biologically active portions of a protein according to the invention. Within the fusion protein, the term “operatively linked” is intended to indicate that the polypeptide according to the invention and the other polypeptide are fused in-frame to each other. The polypeptide can be fused to the N-terminus or C-terminus.

[0140] For example, in one embodiment a fusion protein comprises a polypeptide according to the invention operably linked to the extracellular domain of a second protein. In another embodiment, the fusion protein is a GST-fusion protein in which the polypeptide sequences of the invention are fused to the C-terminus of the GST (i.e., glutathione S-transferase) sequences.

[0141] In another embodiment, the fusion protein is an immunoglobulin fusion protein in which the polypeptide sequences according to the invention comprises one or more domains are fused to sequences derived from a member of the immunoglobulin protein family. The immunoglobulin fusion proteins of the invention can be incorporated into pharmaceutical compositions and administered to a subject to inhibit an interaction between a ligand and a protein of the invention on the surface of a cell, to thereby suppress signal transduction in vivo. The immunoglobulin fusion proteins can be used to affect the bioavailability of a cognate ligand. Inhibition of the ligand/protein interaction may be useful therapeutically for both the treatment of proliferative and differentiative disorders, e.g., cancer as well as modulating (e.g., promoting or inhibiting) cell survival. Moreover, the immunoglobulin fusion proteins of the invention can be used as immunogens to produce antibodies in a subject, to purify ligands, and in screening assays to identify molecules that inhibit the interaction of a polypeptide of the invention with a ligand.

[0142] A chimeric or fusion protein of the invention can be produced by standard recombinant DNA techniques. For example, DNA fragments coding for the different polypeptide sequences are ligated together in-frame in accordance with conventional techniques, e.g., by employing blunt-ended or stagger-ended termini for ligation, restriction enzyme digestion to provide for appropriate termini, filling-in of cohesive ends as appropriate, alkaline phosphatase treatment to avoid undesirable joining, and enzymatic ligation. In another embodiment, the fusion gene can be synthesized by conventional techniques including automated DNA synthesizers. Alternatively, PCR amplification of gene fragments can be carried out using anchor primers that give rise to complementary overhangs between two consecutive gene fragments that can subsequently be annealed and reamplified to generate a chimeric gene sequence (see, for example, Ausubel et. al., (eds.) CURRENT PROTOCOLS IN MOLECULAR BIOLOGY, John Wiley & Sons, 1992). Moreover, many expression vectors are commercially available that already encode a fusion moiety (e.g., a GST polypeptide). A nucleic acid encoding a polypeptide of the invention can be cloned into such an expression vector such that the fusion moiety is linked in-frame to the protein of the invention.

[0143] 5.8 Gene Therapy

[0144] Mutations in the polynucleotides of the invention gene may result in loss of normal function of the encoded protein. The invention thus provides gene therapy to restore normal activity of the polypeptides of the invention; or to treat disease states involving polypeptides of the invention. Delivery of a functional gene encoding polypeptides of the invention to appropriate cells is effected ex vivo, in situ, or in vivo by use of vectors, and more particularly viral vectors (e.g., adenovirus, adeno-associated virus, or a retrovirus), or ex vivo by use of physical DNA transfer methods (e.g., liposomes or chemical treatments). See, for example, Anderson, Nature, supplement to vol. 392, no. 6679, pp. 25-20 (1998). For additional reviews of gene therapy technology see Friedmann, Science, 244: 1275-1281 (1989); Verma, Scientific American: 68-84 (1990); and Miller, Nature, 357: 455-460 (1992). Introduction of any one of the nucleotides of the present invention or a gene encoding the polypeptides of the present invention can also be accomplished with extrachromosomal substrates (transient expression) or artificial chromosomes (stable expression). Cells may also be cultured ex vivo in the presence of proteins of the present invention in order to proliferate or to produce a desired effect on or activity in such cells. Treated cells can then be introduced in vivo for therapeutic purposes. Alternatively, it is contemplated that in other human disease states, preventing the expression of or inhibiting the activity of polypeptides of the invention will be useful in treating the disease states. It is contemplated that antisense therapy or gene therapy could be applied to negatively regulate the expression of polypeptides of the invention.

[0145] Other methods inhibiting expression of a protein include the introduction of antisense molecules to the nucleic acids of the present invention, their complements, or their translated RNA sequences, by methods known in the art. Further, the polypeptides of the present invention can be inhibited by using targeted deletion methods, or the insertion of a negative regulatory element such as a silencer, which is tissue specific.

[0146] The present invention still further provides cells genetically engineered in vivo to express the polynucleotides of the invention, wherein such polynucleotides are in operative association with a regulatory sequence heterologous to the host cell which drives expression of the polynucleotides in the cell. These methods can be used to increase or decrease the expression of the polynucleotides of the present invention.

[0147] Knowledge of DNA sequences provided by the invention allows for modification of cells to permit, increase, or decrease, expression of endogenous polypeptide. Cells can be modified (e.g., by homologous recombination) to provide increased polypeptide expression by replacing, in whole or in part, the naturally occurring promoter with all or part of a heterologous promoter so that the cells express the protein at higher levels. The heterologous promoter is inserted in such a manner that it is operatively linked to the desired protein encoding sequences. See, for example, PCT International Publication No. WO 94/12650, PCT International Publication No. WO 92/20808, and PCT International Publication No. WO 91/09955. It is also contemplated that, in addition to heterologous promoter DNA, amplifiable marker DNA (e.g., ada, dhfr, and the multifunctional CAD gene which encodes carbamyl phosphate synthase, aspartate transcarbamylase, and dihydroorotase) and/or intron DNA may be inserted along with the heterologous promoter DNA. If linked to the desired protein coding sequence, amplification of the marker DNA by standard selection methods results in co-amplification of the desired protein coding sequences in the cells.

[0148] In another embodiment of the present invention, cells and tissues may be engineered to express an endogenous gene comprising the polynucleotides of the invention under the control of inducible regulatory elements, in which case the regulatory sequences of the endogenous gene may be replaced by homologous recombination. As described herein, gene targeting can be used to replace a gene's existing regulatory region with a regulatory sequence isolated from a different gene or a novel regulatory sequence synthesized by genetic engineering methods. Such regulatory sequences may be comprised of promoters, enhancers, scaffold-attachment regions, negative regulatory elements, transcriptional initiation sites, regulatory protein binding sites or combinations of said sequences. Alternatively, sequences which affect the structure or stability of the RNA or protein produced may be replaced, removed, added, or otherwise modified by targeting. These sequences include polyadenylation signals, mRNA stability elements, splice sites, leader sequences for enhancing or modifying transport or secretion properties of the protein, or other sequences which alter or improve the function or stability of protein or RNA molecules.

[0149] The targeting event may be a simple insertion of the regulatory sequence, placing the gene under the control of the new regulatory sequence, e.g., inserting a new promoter or enhancer or both upstream of a gene. Alternatively, the targeting event may be a simple deletion of a regulatory element, such as the deletion of a tissue-specific negative regulatory element. Alternatively, the targeting event may replace an existing element; for example, a tissue-specific enhancer can be replaced by an enhancer that has broader or different cell-type specificity than the naturally occurring elements. Here, the naturally occurring sequences are deleted and new sequences are added. In all cases, the identification of the targeting event may be facilitated by the use of one or more selectable marker genes that are contiguous with the targeting DNA, allowing for the selection of cells in which the exogenous DNA has integrated into the cell genome. The identification of the targeting event may also be facilitated by the use of one or more marker genes exhibiting the property of negative selection, such that the negatively selectable marker is linked to the exogenous DNA, but configured such that the negatively selectable marker flanks the targeting sequence, and such that a correct homologous recombination event with sequences in the host cell genome does not result in the stable integration of the negatively selectable marker. Markers useful for this purpose include the Herpes Simplex Virus thymidine kinase (TK) gene or the bacterial xanthine-guanine phosphoribosyl-transferase (gpt) gene.

[0150] The gene targeting or gene activation techniques which can be used in accordance with this aspect of the invention are more particularly described in U.S. Pat. No. 5,272,071 to Chappel; U.S. Pat. No. 5,578,461 to Sherwin et. al.; International Application No. PCT/US92/09627 (WO93/09222) by Selden et. al.; and International Application No. PCT/US90/06436 (WO91/06667) by Skoultchi et al., each of which is incorporated by reference herein in its entirety.

[0151] 5.9 Transgenic Animals

[0152] In preferred methods to determine biological functions of the polypeptides of the invention in vivo, one or more genes provided by the invention are either over expressed or inactivated in the germ line of animals using homologous recombination (Capecchi, Science 244:1288-1292 (1989)). Animals in which the gene is over expressed, under the regulatory control of exogenous or endogenous promoter elements, are known as transgenic animals. Animals in which an endogenous gene has been inactivated by homologous recombination are referred to as “knockout” animals. Knockout animals, preferably non-human mammals, can be prepared as described in U.S. Pat. No. 5,557,032, incorporated herein by reference. Transgenic animals are useful to determine the roles polypeptides of the invention play in biological processes, and preferably in disease states. Transgenic animals are useful as model systems to identify compounds that modulate lipid metabolism. Transgenic animals, preferably non-human mammals, are produced using methods as described in U.S. Pat. No. 5,489,743 and PCT Publication No. WO94/28122, incorporated herein by reference.

[0153] Transgenic animals can be prepared wherein all or part of a promoter of the polynucleotides of the invention is either activated or inactivated to alter the level of expression of the polypeptides of the invention. Inactivation can be carried out using homologous recombination methods described above. Activation can be achieved by supplementing or even replacing the homologous promoter to provide for increased protein expression. The homologous promoter can be supplemented by insertion of one or more heterologous enhancer elements known to confer promoter activation in a particular tissue.

[0154] The polynucleotides of the present invention also make possible the development, through, e.g., homologous recombination or knock out strategies, of animals that fail to express polypeptides of the invention or that express a variant polypeptide. Such animals are useful as models for studying the in vivo activities of polypeptide as well as for studying modulators of the polypeptides of the invention.

[0155] In preferred methods to determine biological functions of the polypeptides of the invention in vivo, one or more genes provided by the invention are either over expressed or inactivated in the germ line of animals using homologous recombination (Capecchi, Science 244:1288-1292 (1989)). Animals in which the gene is over expressed, under the regulatory control of exogenous or endogenous promoter elements, are known as transgenic animals. Animals in which an endogenous gene has been inactivated by homologous recombination are referred to as “knockout” animals. Knockout animals, preferably non-human mammals, can be prepared as described in U.S. Pat. No. 5,557,032, incorporated herein by reference. Transgenic animals are useful to determine the roles polypeptides of the invention play in biological processes, and preferably in disease states. Transgenic animals are useful as model systems to identify compounds that modulate lipid metabolism. Transgenic animals, preferably non-human mammals, are produced using methods as described in U.S. Pat. No. 5,489,743 and PCT Publication No. WO94/28122, incorporated herein by reference.

[0156] Transgenic animals can be prepared wherein all or part of the polynucleotides of the invention promoter is either activated or inactivated to alter the level of expression of the polypeptides of the invention. Inactivation can be carried out using homologous recombination methods described above. Activation can be achieved by supplementing or even replacing the homologous promoter to provide for increased protein expression. The homologous promoter can be supplemented by insertion of one or more heterologous enhancer elements known to confer promoter activation in a particular tissue.

[0157] 5.10 Uses and Biological Activity

[0158] The polynucleotides and proteins of the present invention are expected to exhibit one or more of the uses or biological activities (including those associated with assays cited herein) identified herein. Uses or activities described for proteins of the present invention may be provided by administration or use of such proteins or of polynucleotides encoding such proteins (such as, for example, in gene therapies or vectors suitable for introduction of DNA). The mechanism underlying the particular condition or pathology will dictate whether the polypeptides of the invention, the polynucleotides of the invention or modulators (activators or inhibitors) thereof would be beneficial to the subject in need of treatment. Thus, “therapeutic compositions of the invention” include compositions comprising isolated polynucleotides (including recombinant DNA molecules, cloned genes and degenerate variants thereof) or polypeptides of the invention (including full length protein, mature protein and truncations or domains thereof), or compounds and other substances that modulate the overall activity of the target gene products, either at the level of target gene/protein expression or target protein activity. Such modulators include polypeptides, analogs, (variants), including fragments and fusion proteins, antibodies and other binding proteins; chemical compounds that directly or indirectly activate or inhibit the polypeptides of the invention (identified, e.g., via drug screening assays as described herein); antisense polynucleotides and polynucleotides suitable for triple helix formation; and in particular antibodies or other binding partners that specifically recognize one or more epitopes of the polypeptides of the invention.

[0159] The polypeptides of the present invention may likewise be involved in cellular activation or in one of the other physiological pathways described herein.

[0160] 5.10.1 Research Uses and Utilities

[0161] The polynucleotides provided by the present invention can be used by the research community for various purposes. The polynucleotides can be used to express recombinant protein for analysis, characterization or therapeutic use; as markers for tissues in which the corresponding protein is preferentially expressed (either constitutively or at a particular stage of tissue differentiation or development or in disease states); as molecular weight markers on gels; as chromosome markers or tags (when labeled) to identify chromosomes or to map related gene positions; to compare with endogenous DNA sequences in patients to identify potential genetic disorders; as probes to hybridize and thus discover novel, related DNA sequences; as a source of information to derive PCR primers for genetic fingerprinting; as a probe to “subtract-out” known sequences in the process of discovering other novel polynucleotides; for selecting and making oligomers for attachment to a “gene chip” or other support, including for examination of expression patterns; to raise anti-protein antibodies using DNA immunization techniques; and as an antigen to raise anti-DNA antibodies or elicit another immune response. Where the polynucleotide encodes a protein which binds or potentially binds to another protein (such as, for example, in a receptor-ligand interaction), the polynucleotide can also be used in interaction trap assays (such as, for example, that described in Gyuris et al., Cell 75:791-803 (1993)) to identify polynucleotides encoding the other protein with which binding occurs or to identify inhibitors of the binding interaction.

[0162] The polypeptides provided by the present invention can similarly be used in assays to determine biological activity, including in a panel of multiple proteins for high-throughput screening; to raise antibodies or to elicit another immune response; as a reagent (including the labeled reagent) in assays designed to quantitatively determine levels of the protein (or its receptor) in biological fluids; as markers for tissues in which the corresponding polypeptide is preferentially expressed (either constitutively or at a particular stage of tissue differentiation or development or in a disease state); and, of course, to isolate correlative receptors or ligands. Proteins involved in these binding interactions can also be used to screen for peptide or small molecule inhibitors or agonists of the binding interaction.

[0163] Any or all of these research utilities are capable of being developed into reagent grade or kit format for commercialization as research products.

[0164] Methods for performing the uses listed above are well known to those skilled in the art. References disclosing such methods include without limitation “Molecular Cloning: A Laboratory Manual”, 2d ed., Cold Spring Harbor Laboratory Press, Sambrook, J., E. F. Fritsch and T. Maniatis eds., 1989, and “Methods in Enzymology: Guide to Molecular Cloning Techniques”, Academic Press, Berger, S. L. and A. R. Kimmel eds., 1987.

[0165] 5.10.2 Nutritional Uses

[0166] Polynucleotides and polypeptides of the present invention can also be used as nutritional sources or supplements. Such uses include without limitation use as a protein or amino acid supplement, use as a carbon source, use as a nitrogen source and use as a source of carbohydrate. In such cases the polypeptide or polynucleotide of the invention can be added to the feed of a particular organism or can be administered as a separate solid or liquid preparation, such as in the form of powder, pills, solutions, suspensions or capsules. In the case of microorganisms, the polypeptide or polynucleotide of the invention can be added to the medium in or on which the microorganism is cultured.

[0167] 5.10.3 Cytokine and Cell Proliferation/Differentiation Activity

[0168] A polypeptide of the present invention may exhibit activity relating to cytokine, cell proliferation (either inducing or inhibiting) or cell differentiation (either inducing or inhibiting) activity or may induce production of other cytokines in certain cell populations. A polynucleotide of the invention can encode a polypeptide exhibiting such attributes. Many protein factors discovered to date, including all known cytokines, have exhibited activity in one or more factor-dependent cell proliferation assays, and hence the assays serve as a convenient confirmation of cytokine activity. The activity of therapeutic compositions of the present invention is evidenced by any one of a number of routine factor dependent cell proliferation assays for cell lines including, without limitation, 32D, DA2, DA1G, T10, B9, B9/11, BaF3, MC9/G, M+(preB M+), 2E8, RB5, DA1, 123, T1165, HT2, CTLL2, TF-1, Mo7e, CMK, HUVEC, and CaCo. Therapeutic compositions of the invention can be used in the following:

[0169] Assays for T-cell or thymocyte proliferation include without limitation those described in: Current Protocols in Immunology, Ed by J. E. Coligan, A. M. Kruisbeek, D. H. Margulies, E. M. Shevach, W. Strober, Pub. Greene Publishing Associates and Wiley-Interscience (Chapter 3, In vitro assays for Mouse Lymphocyte Function 3.1-3.19; Chapter 7, Immunologic studies in Humans); Takai et al., J. Immunol. 137:3494-3500, 1986; Bertagnolli et al., J. Immunol. 145:1706-1712, 1990; Bertagnolli et al., Cellular Immunology 133:327-341, 1991; Bertagnolli, et al., I. Immunol. 149:3778-3783, 1992; Bowman et al., I. Immunol. 152:1756-1761, 1994.

[0170] Assays for cytokine production and/or proliferation of spleen cells, lymph node cells or thymocytes include, without limitation, those described in: Polyclonal T cell stimulation, Kruisbeek, A. M. and Shevach, E. M. In Current Protocols in Immunology. J. E. e.a. Coligan eds. Vol 1 pp. 3.12.1-3.12.14, John Wiley and Sons, Toronto. 1994; and Measurement of mouse and human interleukin-γ, Schreiber, R. D. In Current Protocols in Immunology. J. E. e.a. Coligan eds. Vol 1 pp. 6.8.1-6.8.8, John Wiley and Sons, Toronto. 1994.

[0171] Assays for proliferation and differentiation of hematopoietic and lymphopoietic cells include, without limitation, those described in: Measurement of Human and Murine Interleukin 2 and Interleukin 4, Bottomly, K., Davis, L. S, and Lipsky, P. E. In Current Protocols in Immunology. J. E. e.a. Coligan eds. Vol 1 pp. 6.3.1-6.3.12, John Wiley and Sons, Toronto. 1991; deVries et al., J. Exp. Med. 173:1205-1211, 1991; Moreau et al., Nature 336:690-692, 1988; Greenberger et al., Proc. Natl. Acad. Sci. U.S.A. 80:2931-2938, 1983; Measurement of mouse and human interleukin 6—Nordan, R. In Current Protocols in Immunology. J. E. Coligan eds. Vol 1 pp. 6.6.1-6.6.5, John Wiley and Sons, Toronto. 1991; Smith et al., Proc. Natl. Aced. Sci. U.S.A. 83:1857-1861, 1986; Measurement of human Interleukin 11—Bennett, F., Giannotti, J., Clark, S. C. and Turner, K. J. In Current Protocols in Immunology. J. E. Coligan eds. Vol 1 pp. 6.15.1 John Wiley and Sons, Toronto. 1991; Measurement of mouse and human Interleukin 9—Ciarletta, A., Giannotti, J., Clark, S. C. and Turner, K. J. In Current Protocols in Immunology. J. E. Coligan eds. Vol 1 pp. 6.13.1, John Wiley and Sons, Toronto. 1991.

[0172] Assays for T-cell clone responses to antigens (which will identify, among others, proteins that affect APC-T cell interactions as well as direct T-cell effects by measuring proliferation and cytokine production) include, without limitation, those described in: Current Protocols in Immunology, Ed by J. E. Coligan, A. M. Kruisbeek, D. H. Margulies, E. M. Shevach, W Strober, Pub. Greene Publishing Associates and Wiley-Interscience (Chapter 3, In vitro assays for Mouse Lymphocyte Function; Chapter 6, Cytokines and their cellular receptors; Chapter 7, Immunologic studies in Humans); Weinberger et al., Proc. Natl. Acad. Sci. USA 77:6091-6095, 1980; Weinberger et al., Eur. J. Immun. 11:405-411, 1981; Takai et al., J. Immunol. 137:3494-3500, 1986; Takai et al., J. Immunol. 140:508-512, 1988.

[0173] 5.10.4 Stem Cell Growth Factor Activity

[0174] A polypeptide of the present invention may exhibit stem cell growth factor activity and be involved in the proliferation, differentiation and survival of pluripotent and totipotent stem cells including primordial germ cells, embryonic stem cells, hematopoietic stem cells and/or germ line stem cells. Administration of the polypeptide of the invention to stem cells in vivo or ex vivo is expected to maintain and expand cell populations in a totipotential or pluripotential state which would be useful for re-engineering damaged or diseased tissues, transplantation, manufacture of bio-pharmaceuticals and the development of bio-sensors. The ability to produce large quantities of human cells has important working applications for the production of human proteins which currently must be obtained from non-human sources or donors, implantation of cells to treat diseases such as Parkinson's, Alzheimer's and other neurodegenerative diseases; tissues for grafting such as bone marrow, skin, cartilage, tendons, bone, muscle (including cardiac muscle), blood vessels, cornea, neural cells, gastrointestinal cells and others; and organs for transplantation such as kidney, liver, pancreas (including islet cells), heart and lung.

[0175] It is contemplated that multiple different exogenous growth factors and/or cytokines may be administered in combination with the polypeptide of the invention to achieve the desired effect, including any of the growth factors listed herein, other stem cell maintenance factors, and specifically including stem cell factor (SCF), leukemia inhibitory factor (LIF), Flt-3 ligand (Flt-3L), any of the interleukins, recombinant soluble IL-6 receptor fused to IL-6, macrophage inflammatory protein 1-alpha (MIP-1-alpha), G-CSF, GM-CSF, thrombopoietin (TPO), platelet factor 4 (PF-4), platelet-derived growth factor (PDGF), neural growth factors and basic fibroblast growth factor (bFGF).

[0176] Since totipotent stem cells can give rise to virtually any mature cell type, expansion of these cells in culture will facilitate the production of large quantities of mature cells. Techniques for culturing stem cells are known in the art and administration of polypeptides of the invention, optionally with other growth factors and/or cytokines, is expected to enhance the survival and proliferation of the stem cell populations. This can be accomplished by direct administration of the polypeptide of the invention to the culture medium. Alternatively, stroma cells transfected with a polynucleotide that encodes for the polypeptide of the invention can be used as a feeder layer for the stem cell populations in culture or in vivo. Stromal support cells for feeder layers may include embryonic bone marrow fibroblasts, bone marrow stromal cells, fetal liver cells, or cultured embryonic fibroblasts (see U.S. Pat. No. 5,690,926).

[0177] Stem cells themselves can be transfected with a polynucleotide of the invention to induce autocrine expression of the polypeptide of the invention. This will allow for generation of undifferentiated totipotential/pluripotential stem cell lines that are useful as is or that can then be differentiated into the desired mature cell types. These stable cell lines can also serve as a source of undifferentiated totipotential/pluripotential mRNA to create cDNA libraries and templates for polymerase chain reaction experiments. These studies would allow for the isolation and identification of differentially expressed genes in stem cell populations that regulate stem cell proliferation and/or maintenance.

[0178] Expansion and maintenance of totipotent stem cell populations will be useful in the treatment of many pathological conditions. For example, polypeptides of the present invention may be used to manipulate stem cells in culture to give rise to neuroepithelial cells that can be used to augment or replace cells damaged by illness, autoimmune disease, accidental damage or genetic disorders. The polypeptide of the invention may be useful for inducing the proliferation of neural cells and for the regeneration of nerve and brain tissue, i.e. for the treatment of central and peripheral nervous system diseases and neuropathies, as well as mechanical and traumatic disorders which involve degeneration, death or trauma to neural cells or nerve tissue. In addition, the expanded stem cell populations can also be genetically altered for gene therapy purposes and to decrease host rejection of replacement tissues after grafting or implantation.

[0179] Expression of the polypeptide of the invention and its effect on stem cells can also be manipulated to achieve controlled differentiation of the stem cells into more differentiated cell types. A broadly applicable method of obtaining pure populations of a specific differentiated cell type from undifferentiated stem cell populations involves the use of a cell-type specific promoter driving a selectable marker. The selectable marker allows only cells of the desired type to survive. For example, stem cells can be induced to differentiate into cardiomyocytes (Wobus et al., Differentiation, 48: 173-182, (1991); Klug et al., J. Clin. Invest., 98(1): 216-224, (1998)) or skeletal muscle cells (Browder, L. W. In: Principles of Tissue Engineering eds. Lanza et al., Academic Press (1997)). Alternatively, directed differentiation of stem cells can be accomplished by culturing the stem cells in the presence of a differentiation factor such as retinoic acid and an antagonist of the polypeptide of the invention which would inhibit the effects of endogenous stem cell factor activity and allow differentiation to proceed.

[0180] In vitro cultures of stem cells can be used to determine if the polypeptide of the invention exhibits stem cell growth factor activity. Stem cells are isolated from any one of various cell sources (including hematopoietic stem cells and embryonic stem cells) and cultured on a feeder layer, as described by Thompson et. al., Proc. Natl. Acad. Sci, U.S.A., 92: 7844-7848 (1995), in the presence of the polypeptide of the invention alone or in combination with other growth factors or cytokines. The ability of the polypeptide of the invention to induce stem cells proliferation is determined by colony formation on semi-solid support e.g. as described by Bernstein Blood, 77: 2316-2321 (1991).

[0181] 5.10.5 Hematopoiesis Regulating Activity

[0182] A polypeptide of the present invention may be involved in regulation of hematopoiesis and, consequently, in the treatment of myeloid or lymphoid cell disorders. Even marginal biological activity in support of colony forming cells or of factor-dependent cell lines indicates involvement in regulating hematopoiesis, e.g. in supporting the growth and proliferation of erythroid progenitor cells alone or in combination with other cytokines, thereby indicating utility, for example, in treating various anemias or for use in conjunction with irradiation/chemotherapy to stimulate the production of erythroid precursors and/or erythroid cells; in supporting the growth and proliferation of myeloid cells such as granulocytes and monocytes/macrophages (i.e., traditional CSF activity) useful, for example, in conjunction with chemotherapy to prevent or treat consequent myelo-suppression; in supporting the growth and proliferation of megakaryocytes and consequently of platelets thereby allowing prevention or treatment of various platelet disorders such as thrombocytopenia, and generally for use in place of or complimentary to platelet transfusions; and/or in supporting the growth and proliferation of hematopoietic stem cells which are capable of maturing to any and all of the above-mentioned hematopoietic cells and therefore find therapeutic utility in various stem cell disorders (such as those usually treated with transplantation, including, without limitation, aplastic anemia and paroxysmal nocturnal hemoglobinuria), as well as in repopulating the stem cell compartment post irradiation/chemotherapy, either in-vivo or ex-vivo (i.e., in conjunction with bone marrow transplantation or with peripheral progenitor cell transplantation (homologous or heterologous)) as normal cells or genetically manipulated for gene therapy.

[0183] Therapeutic compositions of the invention can be used in the following:

[0184] Suitable assays for proliferation and differentiation of various hematopoietic lines are cited above.

[0185] Assays for embryonic stem cell differentiation (which will identify, among others, proteins that influence embryonic differentiation hematopoiesis) include, without limitation, those described in: Johansson et. al., Cellular Biology 15:141-151, 1995; Keller et al. Molecular and Cellular Biology 13:473-486, 1993; McClanahan et al. Blood 81:2903-2915, 1993.

[0186] Assays for stem cell survival and differentiation (which will identify, among others, proteins that regulate lympho-hematopoiesis) include, without limitation, those described in: Methylcellulose colony forming assays, Freshney, M. G. In Culture of Hematopoietic Cells. R. I. Freshney, et. al., eds. Vol pp. 265-268, Wiley-Liss, Inc., New York, N.Y. 1994; Hirayama et al. Proc. Natl. Acad. Sci. USA 89:5907-5911, 1992; Primitive hematopoietic colony forming cells with high proliferative potential, McNiece, I. K. and Briddell, R. A. In Culture of Hematopoietic Cells. R. I. Freshney, et. al., eds. Vol pp. 23-39, Wiley-Liss, Inc., New York, N.Y. 1994; Neben et al. Experimental Hematology 22:353-359, 1994; Cobblestone area forming cell assay, Ploemacher, R. E. In Culture of Hematopoietic Cells. R. I. Freshney, et. al., eds. Vol pp. 1-21, Wiley-Liss, Inc., New York, N.Y. 1994; Long term bone marrow cultures in the presence of stromal cells, Spooncer, E., Dexter, M. and Allen, T. In Culture of Hematopoietic Cells. R. I. Freshney, et. al., eds. Vol pp. 163-179, Wiley-Liss, Inc., New York, N.Y. 1994; Long term culture initiating cell assay, Sutherland, H. J. In Culture of Hematopoietic Cells. R. I. Freshney, et. al., eds. Vol pp. 139-162, Wiley-Liss, Inc., New York, N.Y. 1994.

[0187] 5.10.6 Tissue Growth Activity

[0188] A polypeptide of the present invention also may be involved in bone, cartilage, tendon, ligament and/or nerve tissue growth or regeneration, as well as in wound healing and tissue repair and replacement, and in healing of burns, incisions and ulcers.

[0189] A polypeptide of the present invention which induces cartilage and/or bone growth in circumstances where bone is not normally formed, has application in the healing of bone fractures and cartilage damage or defects in humans and other animals. Compositions of a polypeptide, antibody, binding partner, or other modulator of the invention may have prophylactic use in closed as well as open fracture reduction and also in the improved fixation of artificial joints. De novo bone formation induced by an osteogenic agent contributes to the repair of congenital, trauma induced, or oncologic resection induced craniofacial defects, and also is useful in cosmetic plastic surgery.

[0190] A polypeptide of this invention may also be involved in attracting bone-forming cells, stimulating growth of bone-forming cells, or inducing differentiation of progenitors of bone-forming cells. Treatment of osteoporosis, osteoarthritis, bone degenerative disorders, or periodontal disease, such as through stimulation of bone and/or cartilage repair or by blocking inflammation or processes of tissue destruction (collagenase activity, osteoclast activity, etc.) mediated by inflammatory processes may also be possible using the composition of the invention.

[0191] Another category of tissue regeneration activity that may involve the polypeptide of the present invention is tendon/ligament formation. Induction of tendon/ligament-like tissue or other tissue formation in circumstances where such tissue is not normally formed, has application in the healing of tendon or ligament tears, deformities and other tendon or ligament defects in humans and other animals. Such a preparation employing a tendon/ligament-like tissue inducing protein may have prophylactic use in preventing damage to tendon or ligament tissue, as well as use in the improved fixation of tendon or ligament to bone or other tissues, and in repairing defects to tendon or ligament tissue. De novo tendon/ligament-like tissue formation induced by a composition of the present invention contributes to the repair of congenital, trauma induced, or other tendon or ligament defects of other origin, and is also useful in cosmetic plastic surgery for attachment or repair of tendons or ligaments. The compositions of the present invention may provide environment to attract tendon- or ligament-forming cells, stimulate growth of tendon- or ligament-forming cells, induce differentiation of progenitors of tendon- or ligament-forming cells, or induce growth of tendon/ligament cells or progenitors ex vivo for return in vivo to effect tissue repair. The compositions of the invention may also be useful in the treatment of tendinitis, carpal tunnel syndrome and other tendon or ligament defects. The compositions may also include an appropriate matrix and/or sequestering agent as a carrier as is well known in the art.

[0192] The compositions of the present invention may also be useful for proliferation of neural cells and for regeneration of nerve and brain tissue, i.e. for the treatment of central and peripheral nervous system diseases and neuropathies, as well as mechanical and traumatic disorders, which involve degeneration, death or trauma to neural cells or nerve tissue. More specifically, a composition may be used in the treatment of diseases of the peripheral nervous system, such as peripheral nerve injuries, peripheral neuropathy and localized neuropathies, and central nervous system diseases, such as Alzheimer's, Parkinson's disease, Huntington's disease, amyotrophic lateral sclerosis, and Shy-Drager syndrome. Further conditions which may be treated in accordance with the present invention include mechanical and traumatic disorders, such as spinal cord disorders, head trauma and cerebrovascular diseases such as stroke. Peripheral neuropathies resulting from chemotherapy or other medical therapies may also be treatable using a composition of the invention.

[0193] Compositions of the invention may also be useful to promote better or faster closure of non-healing wounds, including without limitation pressure ulcers, ulcers associated with vascular insufficiency, surgical and traumatic wounds, and the like.

[0194] Compositions of the present invention may also be involved in the generation or regeneration of other tissues, such as organs (including, for example, pancreas, liver, intestine, kidney, skin, endothelium), muscle (smooth, skeletal or cardiac) and vascular (including vascular endothelium) tissue, or for promoting the growth of cells comprising such tissues. Part of the desired effects may be by inhibition or modulation of fibrotic scarring may allow normal tissue to regenerate. A polypeptide of the present invention may also exhibit angiogenic activity.

[0195] A composition of the present invention may also be useful for gut protection or regeneration and treatment of lung or liver fibrosis, reperfusion injury in various tissues, and conditions resulting from systemic cytokine damage.

[0196] A composition of the present invention may also be useful for promoting or inhibiting differentiation of tissues described above from precursor tissues or cells; or for inhibiting the growth of tissues described above.

[0197] Therapeutic compositions of the invention can be used in the following:

[0198] Assays for tissue generation activity include, without limitation, those described in: International Patent Publication No. WO95/16035 (bone, cartilage, tendon); International Patent Publication No. WO95/05846 (nerve, neuronal); International Patent Publication No. WO91/07491 (skin, endothelium).

[0199] Assays for wound healing activity include, without limitation, those described in: Winter, Epidermal Wound Healing, pps. 71-112 (Maibach, H. I. and Rovee, D. T., eds.), Year Book Medical Publishers, Inc., Chicago, as modified by Eaglstein and Mertz, J. Invest. Dermatol 71:382-84 (1978).

[0200] 5.10.7 Immune Stimulating or Suppressing Activity

[0201] A polypeptide of the present invention may also exhibit immune stimulating or immune suppressing activity, including without limitation the activities for which assays are described herein. A polynucleotide of the invention can encode a polypeptide exhibiting such activities. A protein may be useful in the treatment of various immune deficiencies and disorders (including severe combined immunodeficiency (SCID)), e.g., in regulating (up or down) growth and proliferation of T and/or B lymphocytes, as well as effecting the cytolytic activity of NK cells and other cell populations. These immune deficiencies may be genetic or be caused by viral (e.g., HIV) as well as bacterial or fungal infections, or may result from autoimmune disorders. More specifically, infectious diseases causes by viral, bacterial, fungal or other infection may be treatable using a protein of the present invention, including infections by HIV, hepatitis viruses, herpes viruses, mycobacteria, Leishmania spp., malaria spp. and various fungal infections such as candidiasis. Of course, in this regard, proteins of the present invention may also be useful where a boost to the immune system generally may be desirable, i.e., in the treatment of cancer.

[0202] Autoimmune disorders which may be treated using a protein of the present invention include, for example, connective tissue disease, multiple sclerosis, systemic lupus erythematosus, rheumatoid arthritis, autoimmune pulmonary inflammation, Guillain-Barre syndrome, autoimmune thyroiditis, insulin dependent diabetes mellitis, myasthenia gravis, graft-versus-host disease and autoimmune inflammatory eye disease. Such a protein (or antagonists thereof, including antibodies) of the present invention may also to be useful in the treatment of allergic reactions and conditions (e.g., anaphylaxis, serum sickness, drug reactions, food allergies, insect venom allergies, mastocytosis, allergic rhinitis, hypersensitivity pneumonitis, urticaria, angioedema, eczema, atopic dermatitis, allergic contact dermatitis, erythema multiforme, Stevens-Johnson syndrome, allergic conjunctivitis, atopic keratoconjunctivitis, venereal keratoconjunctivitis, giant papillary conjunctivitis and contact allergies), such as asthma (particularly allergic asthma) or other respiratory problems. Other conditions, in which immune suppression is desired (including, for example, organ transplantation), may also be treatable using a protein (or antagonists thereof) of the present invention. The therapeutic effects of the polypeptides or antagonists thereof on allergic reactions can be evaluated by in vivo animals models such as the cumulative contact enhancement test (Lastbom et al. Toxicology 125: 59-66, 1998), skin prick test (Hoffmann et al. Allergy 54: 446-54, 1999), guinea pig skin sensitization test (Vohr et al. Arch. Toxocol. 73: 501-9), and murine local lymph node assay (Kimber et al. J. Toxicol. Environ. Health 53: 563-79).

[0203] Using the proteins of the invention it may also be possible to modulate immune responses, in a number of ways. Down regulation may be in the form of inhibiting or blocking an immune response already in progress or may involve preventing the induction of an immune response. The functions of activated T cells may be inhibited by suppressing T cell responses or by inducing specific tolerance in T cells, or both. Immunosuppression of T cell responses is generally an active, non-antigen-specific, process which requires continuous exposure of the T cells to the suppressive agent. Tolerance, which involves inducing non-responsiveness or anergy in T cells, is distinguishable from immunosuppression in that it is generally antigen-specific and persists after exposure to the tolerizing agent has ceased. Operationally, tolerance can be demonstrated by the lack of a T cell response upon reexposure to specific antigen in the absence of the tolerizing agent.

[0204] Down regulating or preventing one or more antigen functions (including without limitation B lymphocyte antigen functions (such as, for example, B7)), e.g., preventing high level lymphokine synthesis by activated T cells, will be useful in situations of tissue, skin and organ transplantation and in graft-versus-host disease (GVHD). For example, blockage of T cell function should result in reduced tissue destruction in tissue transplantation. Typically, in tissue transplants, rejection of the transplant is initiated through its recognition as foreign by T cells, followed by an immune reaction that destroys the transplant. The administration of a therapeutic composition of the invention may prevent cytokine synthesis by immune cells, such as T cells, and thus acts as an immunosuppressant. Moreover, a lack of costimulation may also be sufficient to anergize the T cells, thereby inducing tolerance in a subject. Induction of long-term tolerance by B lymphocyte antigen-blocking reagents may avoid the necessity of repeated administration of these blocking reagents. To achieve sufficient immunosuppression or tolerance in a subject, it may also be necessary to block the function of a combination of B lymphocyte antigens.

[0205] The efficacy of particular therapeutic compositions in preventing organ transplant rejection or GVHD can be assessed using animal models that are predictive of efficacy in humans. Examples of appropriate systems which can be used include allogeneic cardiac grafts in rats and xenogeneic pancreatic islet cell grafts in mice, both of which have been used to examine the immunosuppressive effects of CTLA4Ig fusion proteins in vivo as described in Lenschow et al. Science 257:789-792 (1992) and Turka et al. Proc. Natl. Acad. Sci. USA, 89:11102-11105 (1992). In addition, murine models of GVHD (see Paul ed., Fundamental Immunology, Raven Press, New York, 1989, pp. 846-847) can be used to determine the effect of therapeutic compositions of the invention on the development of that disease.

[0206] Blocking antigen function may also be therapeutically useful for treating autoimmune diseases. Many autoimmune disorders are the result of inappropriate activation of T cells that are reactive against self tissue and which promote the production of cytokines and autoantibodies involved in the pathology of the diseases. Preventing the activation of autoreactive T cells may reduce or eliminate disease symptoms. Administration of reagents which block stimulation of T cells can be used to inhibit T cell activation and prevent production of autoantibodies or T cell-derived cytokines which may be involved in the disease process. Additionally, blocking reagents may induce antigen-specific tolerance of autoreactive T cells which could lead to long-term relief from the disease. The efficacy of blocking reagents in preventing or alleviating autoimmune disorders can be determined using a number of well-characterized animal models of human autoimmune diseases. Examples include murine experimental autoimmune encephalitis, systemic lupus erythmatosis in MRL/lpr/lpr mice or NZB hybrid mice, murine autoimmune collagen arthritis, diabetes mellitus in NOD mice and BB rats, and murine experimental myasthenia gravis (see Paul ed., Fundamental Immunology, Raven Press, New York, 1989, pp. 840-856).

[0207] Upregulation of an antigen function (e.g., a B lymphocyte antigen function), as a means of up regulating immune responses, may also be useful in therapy. Upregulation of immune responses may be in the form of enhancing an existing immune response or eliciting an initial immune response. For example, enhancing an immune response may be useful in cases of viral infection, including systemic viral diseases such as influenza, the common cold, and encephalitis.

[0208] Alternatively, anti-viral immune responses may be enhanced in an infected patient by removing T cells from the patient, costimulating the T cells in vitro with viral antigen-pulsed APCs either expressing a peptide of the present invention or together with a stimulatory form of a soluble peptide of the present invention and reintroducing the in vitro activated T cells into the patient. Another method of enhancing anti-viral immune responses would be to isolate infected cells from a patient, transfect them with a nucleic acid encoding a protein of the present invention as described herein such that the cells express all or a portion of the protein on their surface, and reintroduce the transfected cells into the patient. The infected cells would now be capable of delivering a costimulatory signal to, and thereby activate, T cells in vivo.

[0209] A polypeptide of the present invention may provide the necessary stimulation signal to T cells to induce a T cell mediated immune response against the transfected tumor cells. In addition, tumor cells which lack MHC class I or MHC class II molecules, or which fail to reexpress sufficient mounts of MHC class I or MHC class II molecules, can be transfected with nucleic acid encoding all or a portion of (e.g., a cytoplasmic-domain truncated portion) of an MHC class I alpha chain protein and β₂ microglobulin protein or an MHC class II alpha chain protein and an MHC class II beta chain protein to thereby express MHC class I or MHC class II proteins on the cell surface. Expression of the appropriate class I or class II MHC in conjunction with a peptide having the activity of a B lymphocyte antigen (e.g., B7-1, B7-2, B7-3) induces a T cell mediated immune response against the transfected tumor cell. Optionally, a gene encoding an antisense construct which blocks expression of an MHC class II associated protein, such as the invariant chain, can also be cotransfected with a DNA encoding a peptide having the activity of a B lymphocyte antigen to promote presentation of tumor associated antigens and induce tumor specific immunity. Thus, the induction of a T cell mediated immune response in a human subject may be sufficient to overcome tumor-specific tolerance in the subject.

[0210] The activity of a protein of the invention may, among other means, be measured by the following methods:

[0211] Suitable assays for thymocyte or splenocyte cytotoxicity include, without limitation, those described in: Current Protocols in Immunology, Ed by J. E. Coligan, A. M. Kruisbeek, D. H. Margulies, E. M. Shevach, W. Strober, Pub. Greene Publishing Associates and Wiley-Interscience (Chapter 3, In Vitro assays for Mouse Lymphocyte Function 3.1-3.19; Chapter 7, Immunologic studies in Humans); Herrmann et al. Proc. Natl. Acad. Sci. USA 78:2488-2492, 1981; Herrmann et al. J. Immunol. 128:1968-1974, 1982; Handa et al. J. Immunol. 135:1564-1572, 1985; Takai et al. I. Immunol. 137:3494-3500, 1986; Takai et al. J. Immunol. 140:508-512, 1988; Bowman et al. J. Virology 61:1992-1998; Bertagnolli et al. Cellular Immunology 133:327-341, 1991; Brown et al. J. Immunol. 153:3079-3092, 1994.

[0212] Assays for T-cell-dependent immunoglobulin responses and isotype switching (which will identify, among others, proteins that modulate T-cell dependent antibody responses and that affect Th1/Th2 profiles) include, without limitation, those described in: Maliszewski, J. Immunol. 144:3028-3033, 1990; and Assays for B cell function: In vitro antibody production, Mond, J. J. and Brunswick, M. In Current Protocols in Immunology. J. E. e.a. Coligan eds. Vol 1 pp. 3.8.1-3.8.16, John Wiley and Sons, Toronto. 1994.

[0213] Mixed lymphocyte reaction (MLR) assays (which will identify, among others, proteins that generate predominantly Th1 and CTL responses) include, without limitation, those described in: Current Protocols in Immunology, Ed by J. E. Coligan, A. M. Kruisbeek, D. H. Margulies, E. M. Shevach, W. Strober, Pub. Greene Publishing Associates and Wiley-Interscience (Chapter 3, In vitro assays for Mouse Lymphocyte Function 3.1-3.19; Chapter 7, Immunologic studies in Humans); Takai et al. J. Immunol. 137:3494-3500, 1986; Takai et al. J. Immunol. 140:508-512, 1988; Bertagnolli et al. J. Immunol. 149:3778-3783, 1992.

[0214] Dendritic cell-dependent assays (which will identify, among others, proteins expressed by dendritic cells that activate naive T-cells) include, without limitation, those described in: Guery et al. J. Immunol. 134:536-544, 1995; Inaba et al. Journal of Experimental Medicine 173:549-559, 1991; Macatonia et al. Journal of Immunology 154:5071-5079, 1995; Porgador et al. Journal of Experimental Medicine 182:255-260, 1995; Nair et al. Journal of Virology 67:4062-4069, 1993; Huang et al. Science 264:961-965, 1994; Macatonia et al. Journal of Experimental Medicine 169:1255-1264, 1989; Bhardwaj et al. Journal of Clinical Investigation 94:797-807, 1994; and Inaba et al. Journal of Experimental Medicine 172:631-640, 1990.

[0215] Assays for lymphocyte survival/apoptosis (which will identify, among others, proteins that prevent apoptosis after superantigen induction and proteins that regulate lymphocyte homeostasis) include, without limitation, those described in: Darzynkiewicz et al. Cytometry 13:795-808, 1992; Gorczyca et al. Leukemia 7:659-670, 1993; Gorczyca et al. Cancer Research 53:1945-1951, 1993; Itoh et al. Cell 66:233-243, 1991; Zacharchuk, Journal of Immunology 145:4037-4045, 1990; Zamai et al. Cytometry 14:891-897, 1993; Gorczyca et al. International Journal of Oncology 1:639-648, 1992.

[0216] Assays for proteins that influence early steps of T-cell commitment and development include, without limitation, those described in: Antica et al. Blood 84:111-117, 1994; Fine et al. Cellular Immunology 155:111-122, 1994; Galy et al. Blood 85:2770-2778, 1995; Toki et al. Proc. Nat. Acad. Sci. USA 88:7548-7551, 1991.

[0217] 5.10.8 Activin/Inhibin Activity

[0218] A polypeptide of the present invention may also exhibit activin- or inhibin-related activities. A polynucleotide of the invention may encode a polypeptide exhibiting such characteristics. Inhibins are characterized by their ability to inhibit the release of follicle stimulating hormone (FSH), while activins and are characterized by their ability to stimulate the release of follicle stimulating hormone (FSH). Thus, a polypeptide of the present invention, alone or in heterodimers with a member of the inhibin family, may be useful as a contraceptive based on the ability of inhibins to decrease fertility in female mammals and decrease spermatogenesis in male mammals. Administration of sufficient amounts of other inhibins can induce infertility in these mammals. Alternatively, the polypeptide of the invention, as a homodimer or as a heterodimer with other protein subunits of the inhibin group, may be useful as a fertility inducing therapeutic, based upon the ability of activin molecules in stimulating FSH release from cells of the anterior pituitary. See, for example, U.S. Pat. No. 4,798,885. A polypeptide of the invention may also be useful for advancement of the onset of fertility in sexually immature mammals, so as to increase the lifetime reproductive performance of domestic animals such as, but not limited to, cows, sheep and pigs.

[0219] The activity of a polypeptide of the invention may, among other means, be measured by the following methods.

[0220] Assays for activin/inhibin activity include, without limitation, those described in: Vale et al. Endocrinology 91:562-572, 1972; Ling et al. Nature 321:779-782, 1986; Vale et al. Nature 321:776-779, 1986; Mason et al. Nature 318:659-663, 1985; Forage et al. Proc. Natl. Acad. Sci. USA 83:3091-3095, 1986.

[0221] 5.10.9 Chemotactic/Chemokinetic Activity

[0222] A polypeptide of the present invention may be involved in chemotactic or chemokinetic activity for mammalian cells, including, for example, monocytes, fibroblasts, neutrophils, T-cells, mast cells, eosinophils, epithelial and/or endothelial cells. A polynucleotide of the invention can encode a polypeptide exhibiting such attributes. Chemotactic and chemokinetic receptor activation can be used to mobilize or attract a desired cell population to a desired site of action. Chemotactic or chemokinetic compositions (e.g. proteins, antibodies, binding partners, or modulators of the invention) provide particular advantages in treatment of wounds and other trauma to tissues, as well as in treatment of localized infections. For example, attraction of lymphocytes, monocytes or neutrophils to tumors or sites of infection may result in improved immune responses against the tumor or infecting agent.

[0223] A protein or peptide has chemotactic activity for a particular cell population if it can stimulate, directly or indirectly, the directed orientation or movement of such cell population. Preferably, the protein or peptide has the ability to directly stimulate directed movement of cells. Whether a particular protein has chemotactic activity for a population of cells can be readily determined by employing such protein or peptide in any known assay for cell chemotaxis.

[0224] Therapeutic compositions of the invention can be used in the following:

[0225] Assays for chemotactic activity (which will identify proteins that induce or prevent chemotaxis) consist of assays that measure the ability of a protein to induce the migration of cells across a membrane as well as the ability of a protein to induce the adhesion of one cell population to another cell population. Suitable assays for movement and adhesion include, without limitation, those described in: Current Protocols in Immunology, Ed by J. E. Coligan, A. M. Kruisbeek, D. H. Marguiles, E. M. Shevach, W. Strober, Pub. Greene Publishing Associates and Wiley-Interscience (Chapter 6.12, Measurement of alpha and beta Chemokines 6.12.1-6.12.28; Taub et. al., J. Clin. Invest. 95:1370-1376, 1995; Lind et. al., APMIS 103:140-146, 1995; Muller et al Eur. J. Immunol. 25:1744-1748; Gruber et. al., J. of Immunol. 152:5860-5867, 1994; Johnston et. al., J. of Immunol. 153:1762-1768, 1994.

[0226] 5.10.10 Hemostatic and Thrombolytic Activity

[0227] A polypeptide of the invention may also be involved in hemostatis or thrombolysis or thrombosis. A polynucleotide of the invention can encode a polypeptide exhibiting such attributes. Compositions may be useful in treatment of various coagulation disorders (including hereditary disorders, such as hemophilias) or to enhance coagulation and other hemostatic events in treating wounds resulting from trauma, surgery or other causes. A composition of the invention may also be useful for dissolving or inhibiting formation of thromboses and for treatment and prevention of conditions resulting therefrom (such as, for example, infarction of cardiac and central nervous system vessels (e.g., stroke).

[0228] Therapeutic compositions of the invention can be used in the following:

[0229] Assay for hemostatic and thrombolytic activity include, without limitation, those described in: Linet et al. J. Clin. Pharmacol. 26:131-140, 1986; Burdick et al. Thrombosis Res. 45:413-419, 1987; Humphrey et al. Fibrinolysis 5:71-79 (1991); Schaub, Prostaglandins 35:467-474, 1988.

[0230] 5.10.11 Cancer Diagnosis and Therapy

[0231] Polypeptides of the invention may be involved in cancer cell generation, proliferation or metastasis. Detection of the presence or amount of polynucleotides or polypeptides of the invention may be useful for the diagnosis and/or prognosis of one or more types of cancer. For example, the presence or increased expression of a polynucleotide/polypeptide of the invention may indicate a hereditary risk of cancer, a precancerous condition, or an ongoing malignancy. Conversely, a defect in the gene or absence of the polypeptide may be associated with a cancer condition. Identification of single nucleotide polymorphisms associated with cancer or a predisposition to cancer may also be useful for diagnosis or prognosis.

[0232] Cancer treatments promote tumor regression by inhibiting tumor cell proliferation, inhibiting angiogenesis (growth of new blood vessels that is necessary to support tumor growth) and/or prohibiting metastasis by reducing tumor cell motility or invasiveness. Therapeutic compositions of the invention may be effective in adult and pediatric oncology including in solid phase tumors/malignancies, locally advanced tumors, human soft tissue sarcomas, metastatic cancer, including lymphatic metastases, blood cell malignancies including multiple myeloma, acute and chronic leukemias, and lymphomas, head and neck cancers including mouth cancer, larynx cancer and thyroid cancer, lung cancers including small cell carcinoma and non-small cell cancers, breast cancers including small cell carcinoma and ductal carcinoma, gastrointestinal cancers including esophageal cancer, stomach cancer, colon cancer, colorectal cancer and polyps associated with colorectal neoplasia, pancreatic cancers, liver cancer, urologic cancers including bladder cancer and prostate cancer, malignancies of the female genital tract including ovarian carcinoma, uterine (including endometrial) cancers, and solid tumor in the ovarian follicle, kidney cancers including renal cell carcinoma, brain cancers including intrinsic brain tumors, neuroblastoma, astrocytic brain tumors, gliomas, metastatic tumor cell invasion in the central nervous system, bone cancers including osteomas, skin cancers including malignant melanoma, tumor progression of human skin keratinocytes, squamous cell carcinoma, basal cell carcinoma, hemangiopericytoma and Karposi's sarcoma.

[0233] Polypeptides, polynucleotides, or modulators of polypeptides of the invention (including inhibitors and stimulators of the biological activity of the polypeptide of the invention) may be administered to treat cancer. Therapeutic compositions can be administered in therapeutically effective dosages alone or in combination with adjuvant cancer therapy such as surgery, chemotherapy, radiotherapy, thermotherapy, and laser therapy, and may provide a beneficial effect, e.g. reducing tumor size, slowing rate of tumor growth, inhibiting metastasis, or otherwise improving overall clinical condition, without necessarily eradicating the cancer.

[0234] The composition can also be administered in therapeutically effective amounts as a portion of an anti-cancer cocktail. An anti-cancer cocktail is a mixture of the polypeptide or modulator of the invention with one or more anti-cancer drugs in addition to a pharmaceutically acceptable carrier for delivery. The use of anti-cancer cocktails as a cancer treatment is routine. Anti-cancer drugs that are well known in the art and can be used as a treatment in combination with the polypeptide or modulator of the invention include: Actinomycin D, Aminoglutethimide, Asparaginase, Bleomycin, Busulfan, Carboplatin, Carmustine, Chlorambucil, Cisplatin (cis-DDP), Cyclophosphamide, Cytarabine HCl (Cytosine arabinoside), Dacarbazine, Dactinomycin, Daunorubicin HCl, Doxorubicin HCl, Estramustine phosphate sodium, Etoposide (V16-213), Floxuridine, 5-Fluorouracil (5-Fu), Flutamide, Hydroxyurea (hydroxycarbamide), Ifosfamide, Interferon Alpha-2a, Interferon Alpha-2b, Leuprolide acetate (LHRH-releasing factor analog), Lomustine, Mechlorethamine HCl (nitrogen mustard), Melphalan, Mercaptopurine, Mesna, Methotrexate (MTX), Mitomycin, Mitoxantrone HCl, Octreotide, Plicamycin, Procarbazine HCl, Streptozocin, Tamoxifen citrate, Thioguanine, Thiotepa, Vinblastine sulfate, Vincristine sulfate, Amsacrine, Azacitidine, Hexamethylmelamine, Interleukin-2, Mitoguazone, Pentostatin, Semustine, Teniposide, and Vindesine sulfate.

[0235] In addition, therapeutic compositions of the invention may be used for prophylactic treatment of cancer. There are hereditary conditions and/or environmental situations (e.g. exposure to carcinogens) known in the art that predispose an individual to developing cancers. Under these circumstances, it may be beneficial to treat these individuals with therapeutically effective doses of the polypeptide of the invention to reduce the risk of developing cancers.

[0236] In vitro models can be used to determine the effective doses of the polypeptide of the invention as a potential cancer treatment. These in vitro models include proliferation assays of cultured tumor cells, growth of cultured tumor cells in soft agar (see Freshney, (1987) Culture of Animal Cells: A Manual of Basic Technique, Wily-Liss, New York, N.Y. Ch 18 and Ch 21), tumor systems in nude mice as described in Giovanella et al. J. Natl. Can. Inst., 52: 921-30 (1974), mobility and invasive potential of tumor cells in Boyden Chamber assays as described in Pilkington et al. Anticancer Res., 17: 4107-9 (1997), and angiogenesis assays such as induction of vascularization of the chick chorioallantoic membrane or induction of vascular endothelial cell migration as described in Ribatta et al. Intl. J. Dev. Biol., 40: 1189-97 (1999) and Li et al. Clin. Exp. Metastasis, 17:423-9 (1999), respectively. Suitable tumor cells lines are available, e.g. from American Type Tissue Culture Collection catalogs.

[0237] 5.10.12 Receptor/Ligand Activity

[0238] A polypeptide of the present invention may also demonstrate activity as receptor, receptor ligand or inhibitor or agonist of receptor/ligand interactions. A polynucleotide of the invention can encode a polypeptide exhibiting such characteristics. Examples of such receptors and ligands include, without limitation, cytokine receptors and their ligands, receptor kinases and their ligands, receptor phosphatases and their ligands, receptors involved in cell-cell interactions and their ligands (including without limitation, cellular adhesion molecules (such as selectins, integrins and their ligands) and receptor/ligand pairs involved in antigen presentation, antigen recognition and development of cellular and humoral immune responses. Receptors and ligands are also useful for screening of potential peptide or small molecule inhibitors of the relevant receptor/ligand interaction. A protein of the present invention (including, without limitation, fragments of receptors and ligands) may themselves be useful as inhibitors of receptor/ligand interactions.

[0239] The activity of a polypeptide of the invention may, among other means, be measured by the following methods:

[0240] Suitable assays for receptor-ligand activity include without limitation those described in: Current Protocols in Immunology, Ed by J. E. Coligan, A. M. Kruisbeek, D. H. Margulies, E. M. Shevach, W. Strober, Pub. Greene Publishing Associates and Wiley-Interscience (Chapter 7.28, Measurement of Cellular Adhesion under static conditions 7.28.1-7.28.22), Takai et al. Proc. Natl. Acad. Sci. USA 84:6864-6868, 1987; Bierer et al. J. Exp. Med. 168:1145-1156, 1988; Rosenstein et al. J. Exp. Med. 169:149-160 1989; Stoltenborg et al. J. Immunol. Methods 175:59-68, 1994; Stitt et al. Cell 80:661-670, 1995.

[0241] By way of example, the polypeptides of the invention may be used as a receptor for a ligand(s) thereby transmitting the biological activity of that ligand(s). Ligands may be identified through binding assays, affinity chromatography, dihybrid screening assays, BIAcore assays, gel overlay assays, or other methods known in the art.

[0242] Studies characterizing drugs or proteins as agonist or antagonist or partial agonists or a partial antagonist require the use of other proteins as competing ligands. The polypeptides of the present invention or ligand(s) thereof may be labeled by being coupled to radioisotopes, colorimetric molecules or a toxin molecules by conventional methods. (“Guide to Protein Purification” Murray P. Deutscher (ed) Methods in Enzymology Vol. 182 (1990) Academic Press, Inc. San Diego). Examples of radioisotopes include, but are not limited to, tritium and carbon-14. Examples of colorimetric molecules include, but are not limited to, fluorescent molecules such as fluorescamine, or rhodamine or other colorimetric molecules. Examples of toxins include, but are not limited, to ricin.

[0243] 5.10.13 Drug Screening

[0244] This invention is particularly useful for screening chemical compounds by using the novel polypeptides or binding fragments thereof in any of a variety of drug screening techniques. The polypeptides or fragments employed in such a test may either be free in solution, affixed to a solid support, borne on a cell surface or located intracellularly. One method of drug screening utilizes eukaryotic or prokaryotic host cells which are stably transformed with recombinant nucleic acids expressing the polypeptide or a fragment thereof. Drugs are screened against such transformed cells in competitive binding assays. Such cells, either in viable or fixed form, can be used for standard binding assays. One may measure, for example, the formation of complexes between polypeptides of the invention or fragments and the agent being tested or examine the diminution in complex formation between the novel polypeptides and an appropriate cell line, which are well known in the art.

[0245] Sources for test compounds that may be screened for ability to bind to or modulate (i.e., increase or decrease) the activity of polypeptides of the invention include (1) inorganic and organic chemical libraries, (2) natural product libraries, and (3) combinatorial libraries comprised of either random or mimetic peptides, oligonucleotides or organic molecules.

[0246] Chemical libraries may be readily synthesized or purchased from a number of commercial sources, and may include structural analogs of known compounds or compounds that are identified as “hits” or “leads” via natural product screening.

[0247] The sources of natural product libraries are microorganisms (including bacteria and fungi), animals, plants or other vegetation, or marine organisms, and libraries of mixtures for screening may be created by: (1) fermentation and extraction of broths from soil, plant or marine microorganisms or (2) extraction of the organisms themselves. Natural product libraries include polyketides, non-ribosomal peptides, and (non-naturally occurring) variants thereof. For a review, see Science 282:63-68 (1998).

[0248] Combinatorial libraries are composed of large numbers of peptides, oligonucleotides or organic compounds and can be readily prepared by traditional automated synthesis methods, PCR, cloning or proprietary synthetic methods. Of particular interest are peptide and oligonucleotide combinatorial libraries. Still other libraries of interest include peptide, protein, peptidomimetic, multiparallel synthetic collection, recombinatorial, and polypeptide libraries. For a review of combinatorial chemistry and libraries created therefrom, see Myers, Curr. Opin. Biotechnol. 8:701-707 (1997). For reviews and examples of peptidomimetic libraries, see Al-Obeidi et al. Mol. Biotechnol, 9(3):205-23 (1998); Hruby et al. Curr Opin Chem Biol, 1(1): 114-19 (1997); Dorner et al. Bioorg Med Chem, 4(5):709-15 (1996) (alkylated dipeptides).

[0249] Identification of modulators through use of the various libraries described herein permits modification of the candidate “hit” (or “lead”) to optimize the capacity of the “hit” to bind a polypeptide of the invention. The molecules identified in the binding assay are then tested for antagonist or agonist activity in in vivo tissue culture or animal models that are well known in the art. In brief, the molecules are titrated into a plurality of cell cultures or animals and then tested for either cell/animal death or prolonged survival of the animal/cells.

[0250] The binding molecules thus identified may be complexed with toxins, e.g., ricin or cholera, or with other compounds that are toxic to cells such as radioisotopes. The toxin-binding molecule complex is then targeted to a tumor or other cell by the specificity of the binding molecule for a polypeptide of the invention. Alternatively, the binding molecules may be complexed with imaging agents for targeting and imaging purposes.

[0251] 5.10.14 Assay for Receptor Activity

[0252] The invention also provides methods to detect specific binding of a polypeptide e.g. a ligand or a receptor. The art provides numerous assays particularly useful for identifying previously unknown binding partners for receptor polypeptides of the invention. For example, expression cloning using mammalian or bacterial cells, or dihybrid screening assays can be used to identify polynucleotides encoding binding partners. As another example, affinity chromatography with the appropriate immobilized polypeptide of the invention can be used to isolate polypeptides that recognize and bind polypeptides of the invention. There are a number of different libraries used for the identification of compounds, and in particular small molecules, that modulate (i.e., increase or decrease) biological activity of a polypeptide of the invention. Ligands for receptor polypeptides of the invention can also be identified by adding exogenous ligands, or cocktails of ligands to two cells populations that are genetically identical except for the expression of the receptor of the invention: one cell population expresses the receptor of the invention whereas the other does not. The response of the two cell populations to the addition of ligands(s) are then compared. Alternatively, an expression library can be co-expressed with the polypeptide of the invention in cells and assayed for an autocrine response to identify potential ligand(s). As still another example, BIAcore assays, gel overlay assays, or other methods known in the art can be used to identify binding partner polypeptides, including, (1) organic and inorganic chemical libraries, (2) natural product libraries, and (3) combinatorial libraries comprised of random peptides, oligonucleotides or organic molecules.

[0253] The role of downstream intracellular signaling molecules in the signaling cascade of the polypeptide of the invention can be determined. For example, a chimeric protein in which the cytoplasmic domain of the polypeptide of the invention is fused to the extracellular portion of a protein, whose ligand has been identified, is produced in a host cell. The cell is then incubated with the ligand specific for the extracellular portion of the chimeric protein, thereby activating the chimeric receptor. Known downstream proteins involved in intracellular signaling can then be assayed for expected modifications i.e. phosphorylation. Other methods known to those in the art can also be used to identify signaling molecules involved in receptor activity.

[0254] 5.10.15 Anti-Inflammatory Activity

[0255] Compositions of the present invention may also exhibit anti-inflammatory activity. The anti-inflammatory activity may be achieved by providing a stimulus to cells involved in the inflammatory response, by inhibiting or promoting cell-cell interactions (such as, for example, cell adhesion), by inhibiting or promoting chemotaxis of cells involved in the inflammatory process, inhibiting or promoting cell extravasation, or by stimulating or suppressing production of other factors which more directly inhibit or promote an inflammatory response. Compositions with such activities can be used to treat inflammatory conditions including chronic or acute conditions), including without limitation intimation associated with infection (such as septic shock, sepsis or systemic inflammatory response syndrome (SIRS)), ischemia-reperfusion injury, endotoxin lethality, arthritis, complement-mediated hyperacute rejection, nephritis, cytokine or chemokine-induced lung injury, inflammatory bowel disease, Crohn's disease or resulting from over production of cytokines such as TNF or IL-1. Compositions of the invention may also be useful to treat anaphylaxis and hypersensitivity to an antigenic substance or material. Compositions of this invention may be utilized to prevent or treat conditions such as, but not limited to, sepsis, acute pancreatitis, endotoxin shock, cytokine induced shock, rheumatoid arthritis, chronic inflammatory arthritis, pancreatic cell damage from diabetes mellitus type 1, graft versus host disease, inflammatory bowel disease, inflammation associated with pulmonary disease, other autoimmune disease or inflammatory disease, an antiproliferative agent such as for acute or chronic mylegenous leukemia or in the prevention of premature labor secondary to intrauterine infections.

[0256] 5.10.16 Leukemias

[0257] Leukemias and related disorders may be treated or prevented by administration of a therapeutic that promotes or inhibits function of the polynucleotides and/or polypeptides of the invention. Such leukemias and related disorders include but are not limited to acute leukemia, acute lymphocytic leukemia, acute myelocytic leukemia, myeloblastic, promyelocytic, myelomonocytic, monocytic, erythroleukemia, chronic leukemia, chronic myelocytic (granulocytic) leukemia and chronic lymphocytic leukemia (for a review of such disorders, see Fishman et al. 1985, Medicine, 2d Ed., J.B. Lippincott Co., Philadelphia).

[0258] 5.10.17 Nervous System Disorders

[0259] Nervous system disorders, involving cell types which can be tested for efficacy of intervention with compounds that modulate the activity of the polynucleotides and/or polypeptides of the invention, and which can be treated upon thus observing an indication of therapeutic utility, include but are not limited to nervous system injuries, and diseases or disorders which result in either a disconnection of axons, a diminution or degeneration of neurons, or demyelination. Nervous system lesions which may be treated in a patient (including human and non-human mammalian patients) according to the invention include but are not limited to the following lesions of either the central (including spinal cord, brain) or peripheral nervous systems:

[0260] (i) traumatic lesions, including lesions caused by physical injury or associated with surgery, for example, lesions which sever a portion of the nervous system, or compression injuries;

[0261] (ii) ischemic lesions, in which a lack of oxygen in a portion of the nervous system results in neuronal injury or death, including cerebral infarction or ischemia, or spinal cord infarction or ischemia;

[0262] (iii) infectious lesions, in which a portion of the nervous system is destroyed or injured as a result of infection, for example, by an abscess or associated with infection by human immunodeficiency virus, herpes zoster, or herpes simplex virus or with Lyme disease, tuberculosis, syphilis;

[0263] (iv) degenerative lesions, in which a portion of the nervous system is destroyed or injured as a result of a degenerative process including but not limited to degeneration associated with Parkinson's disease, Alzheimer's disease, Huntington's chorea, or amyotrophic lateral sclerosis;

[0264] (v) lesions associated with nutritional diseases or disorders, in which a portion of the nervous system is destroyed or injured by a nutritional disorder or disorder of metabolism including but not limited to, vitamin B12 deficiency, folic acid deficiency, Wernicke disease, tobacco-alcohol amblyopia, Marchiafava-Bignami disease (primary degeneration of the corpus callosum), and alcoholic cerebellar degeneration;

[0265] (vi) neurological lesions associated with systemic diseases including but not limited to diabetes (diabetic neuropathy, Bell's palsy), systemic lupus erythematosus, carcinoma, or sarcoidosis;

[0266] (vii) lesions caused by toxic substances including alcohol, lead, or particular neurotoxins; and

[0267] (viii) demyelinated lesions in which a portion of the nervous system is destroyed or injured by a demyelinating disease including but not limited to multiple sclerosis, human immunodeficiency virus-associated myelopathy, transverse myelopathy or various etiologies, progressive multifocal leukoencephalopathy, and central pontine myelinolysis.

[0268] Therapeutics which are useful according to the invention for treatment of a nervous system disorder may be selected by testing for biological activity in promoting the survival or differentiation of neurons. For example, and not by way of limitation, therapeutics which elicit any of the following effects may be useful according to the invention:

[0269] (i) increased survival time of neurons in culture;

[0270] (ii) increased sprouting of neurons in culture or in vivo;

[0271] (iii) increased production of a neuron-associated molecule in culture or in vivo, e.g., choline acetyltransferase or acetylcholinesterase with respect to motor neurons; or

[0272] (iv) decreased symptoms of neuron dysfunction in vivo.

[0273] Such effects may be measured by any method known in the art. In preferred, non-limiting embodiments, increased survival of neurons may be measured by the method set forth in Arakawa et. al., (1990, J. Neurosci. 10:3507-3515); increased sprouting of neurons may be detected by methods set forth in Pestronk et. al., (1980, Exp. Neurol. 70:65-82) or Brown et. al., (1981, Ann. Rev. Neurosci. 4:17-42); increased production of neuron-associated molecules may be measured by bioassay, enzymatic assay, antibody binding, Northern blot assay, etc., depending on the molecule to be measured; and motor neuron dysfunction may be measured by assessing the physical manifestation of motor neuron disorder, e.g., weakness, motor neuron conduction velocity, or functional disability.

[0274] In specific embodiments, motor neuron disorders that may be treated according to the invention include but are not limited to disorders such as infarction, infection, exposure to toxin, trauma, surgical damage, degenerative disease or malignancy that may affect motor neurons as well as other components of the nervous system, as well as disorders that selectively affect neurons such as amyotrophic lateral sclerosis, and including but not limited to progressive spinal muscular atrophy, progressive bulbar palsy, primary lateral sclerosis, infantile and juvenile muscular atrophy, progressive bulbar paralysis of childhood (Fazio-Londe syndrome), poliomyelitis and the post polio syndrome, and Hereditary Motorsensory Neuropathy (Charcot-Marie-Tooth Disease).

[0275] 5.10.18 Other Activities

[0276] A polypeptide of the invention may also exhibit one or more of the following additional activities or effects: inhibiting the growth, infection or function of, or killing, infectious agents, including, without limitation, bacteria, viruses, fungi and other parasites; effecting (suppressing or enhancing) bodily characteristics, including, without limitation, height, weight, hair color, eye color, skin, fat to lean ratio or other tissue pigmentation, or organ or body part size or shape (such as, for example, breast augmentation or diminution, change in bone form or shape); effecting biorhythms or circadian cycles or rhythms; effecting the fertility of male or female subjects; effecting the metabolism, catabolism, anabolism, processing, utilization, storage or elimination of dietary fat, lipid, protein, carbohydrate, vitamins, minerals, co-factors or other nutritional factors or component(s); effecting behavioral characteristics, including, without limitation, appetite, libido, stress, cognition (including cognitive disorders), depression (including depressive disorders) and violent behaviors; providing analgesic effects or other pain reducing effects; promoting differentiation and growth of embryonic stem cells in lineages other than hematopoietic lineages; hormonal or endocrine activity; in the case of enzymes, correcting deficiencies of the enzyme and treating deficiency-related diseases; treatment of hyperproliferative disorders (such as, for example, psoriasis); immunoglobulin-like activity (such as, for example, the ability to bind antigens or complement); and the ability to act as an antigen in a vaccine composition to raise an immune response against such protein or another material or entity which is cross-reactive with such protein.

[0277] 5.10.19 Identification of Polymorphisms

[0278] The demonstration of polymorphisms makes possible the identification of such polymorphisms in human subjects and the pharmacogenetic use of this information for diagnosis and treatment. Such polymorphisms may be associated with, e.g., differential predisposition or susceptibility to various disease states (such as disorders involving inflammation or immune response) or a differential response to drug administration, and this genetic information can be used to tailor preventive or therapeutic treatment appropriately. For example, the existence of a polymorphism associated with a predisposition to inflammation or autoimmune disease makes possible the diagnosis of this condition in humans by identifying the presence of the polymorphism.

[0279] Polymorphisms can be identified in a variety of ways known in the art which all generally involve obtaining a sample from a patient, analyzing DNA from the sample, optionally involving isolation or amplification of the DNA, and identifying the presence of the polymorphism in the DNA. For example, PCR may be used to amplify an appropriate fragment of genomic DNA which may then be sequenced. Alternatively, the DNA may be subjected to allele-specific oligonucleotide hybridization (in which appropriate oligonucleotides are hybridized to the DNA under conditions permitting detection of a single base mismatch) or to a single nucleotide extension assay (in which an oligonucleotide that hybridizes immediately adjacent to the position of the polymorphism is extended with one or more labeled nucleotides). In addition, traditional restriction fragment length polymorphism analysis (using restriction enzymes that provide differential digestion of the genomic DNA depending on the presence or absence of the polymorphism) may be performed. Arrays with nucleotide sequences of the present invention can be used to detect polymorphisms. The array can comprise modified nucleotide sequences of the present invention in order to detect the nucleotide sequences of the present invention. In the alternative, any one of the nucleotide sequences of the present invention can be placed on the array to detect changes from those sequences.

[0280] Alternatively a polymorphism resulting in a change in the amino acid sequence could also be detected by detecting a corresponding change in amino acid sequence of the protein, e.g., by an antibody specific to the variant sequence.

[0281] 5.10.20 Arthritis and Inflammation

[0282] The immunosuppressive effects of the compositions of the invention against rheumatoid arthritis is determined in an experimental animal model system. The experimental model system is adjuvant induced arthritis in rats, and the protocol is described by J. Holoshitz, et at., 1983, Science, 219:56, or by B. Waksman et al. 1963, Int. Arch. Allergy Appl. Immunol., 23:129. Induction of the disease can be caused by a single injection, generally intradermally, of a suspension of killed Mycobacterium tuberculosis in complete Freund's adjuvant (CFA). The route of injection can vary, but rats may be injected at the base of the tail with an adjuvant mixture. The polypeptide is administered in phosphate buffered solution (PBS) at a dose of about 1-5 mg/kg. The control consists of administering PBS only.

[0283] The procedure for testing the effects of the test compound would consist of intradermally injecting killed Mycobacterium tuberculosis in CFA followed by immediately administering the test compound and subsequent treatment every other day until day 24. At 14, 15, 18, 20, 22, and 24 days after injection of Mycobacterium CFA, an overall arthritis score may be obtained as described by J. Holoskitz above. An analysis of the data would reveal that the test compound would have a dramatic affect on the swelling of the joints as measured by a decrease of the arthritis score.

[0284] 5.11 Therapeutic Methods

[0285] The compositions (including polypeptide fragments, analogs, variants and antibodies or other binding partners or modulators including antisense polynucleotides) of the invention have numerous applications in a variety of therapeutic methods. Examples of therapeutic applications include, but are not limited to, those exemplified herein.

[0286] 5.11.1 Example

[0287] One embodiment of the invention is the administration of an effective amount of the polypeptides or other composition of the invention to individuals affected by a disease or disorder that can be modulated by regulating the peptides of the invention. While the mode of administration is not particularly important, parenteral administration is preferred. An exemplary mode of administration is to deliver an intravenous bolus. The dosage of the polypeptides or other composition of the invention will normally be determined by the prescribing physician. It is to be expected that the dosage will vary according to the age, weight, condition and response of the individual patient. Typically, the amount of polypeptide administered per dose will be in the range of about 0.01 μg/kg to 100 mg/kg of body weight, with the preferred dose being about 0.1 μg/kg to 10 mg/kg of patient body weight. For parenteral administration, polypeptides of the invention will be formulated in an injectable form combined with a pharmaceutically acceptable parenteral vehicle. Such vehicles are well known in the art and examples include water, saline, Ringer's solution, dextrose solution, and solutions consisting of small amounts of the human serum albumin. The vehicle may contain minor amounts of additives that maintain the isotonicity and stability of the polypeptide or other active ingredient. The preparation of such solutions is within the skill of the art.

[0288] 5.12 Pharmaceutical Formulations and Routes of Administration

[0289] A protein or other composition of the present invention (from whatever source derived, including without limitation from recombinant and non-recombinant sources and including antibodies and other binding partners of the polypeptides of the invention) may be administered to a patient in need, by itself, or in pharmaceutical compositions where it is mixed with suitable carriers or excipient(s) at doses to treat or ameliorate a variety of disorders. Such a composition may optionally contain (in addition to protein or other active ingredient and a carrier) diluents, fillers, salts, buffers, stabilizers, solubilizers, and other materials well known in the art. The term “pharmaceutically acceptable” means a non-toxic material that does not interfere with the effectiveness of the biological activity of the active ingredient(s). The characteristics of the carrier will depend on the route of administration. The pharmaceutical composition of the invention may also contain cytokines, lymphokines, or other hematopoietic factors such as M-CSF, GM-CSF, TNF, IL-1, IL-2, IL-3, IL-4, IL-5, IL-6, IL-7, IL-8, IL-9, IL-10, IL-11, IL-12, IL-13, IL-14, IL-15, IFN, TNF0, TNF1, TNF2, G-CSF, Meg-CSF, thrombopoietin, stem cell factor, and erythropoietin. In further compositions, proteins of the invention may be combined with other agents beneficial to the treatment of the disease or disorder in question. These agents include various growth factors such as epidermal growth factor (EGF), platelet-derived growth factor (PDGF), transforming growth factors (TGF-α and TGF-β), insulin-like growth factor (IGF), as well as cytokines described herein.

[0290] The pharmaceutical composition may further contain other agents which either enhance the activity of the protein or other active ingredient or complement its activity or use in treatment. Such additional factors and/or agents may be included in the pharmaceutical composition to produce a synergistic effect with protein or other active ingredient of the invention, or to minimize side effects. Conversely, protein or other active ingredient of the present invention may be included in formulations of the particular clotting factor, cytokine, lymphokine, other hematopoietic factor, thrombolytic or anti-thrombotic factor, or anti-inflammatory agent to minimize side effects of the clotting factor, cytokine, lymphokine, other hematopoietic factor, thrombolytic or anti-thrombotic factor, or anti-inflammatory agent (such as IL-1Ra, IL-1 Hy1, IL-1 Hy2, anti-TNF, corticosteroids, immunosuppressive agents). A protein of the present invention may be active in multimers (e.g., heterodimers or homodimers) or complexes with itself or other proteins. As a result, pharmaceutical compositions of the invention may comprise a protein of the invention in such multimeric or complexed form.

[0291] As an alternative to being included in a pharmaceutical composition of the invention including a first protein, a second protein or a therapeutic agent may be concurrently administered with the first protein (e.g., at the same time, or at differing times provided that therapeutic concentrations of the combination of agents is achieved at the treatment site). Techniques for formulation and administration of the compounds of the instant application may be found in “Remington's Pharmaceutical Sciences,” Mack Publishing Co., Easton, Pa., 18^{th} edition. A therapeutically effective dose further refers to that amount of the compound sufficient to result in amelioration of symptoms, e.g., treatment, healing, prevention or amelioration of the relevant medical condition, or an increase in rate of treatment, healing, prevention or amelioration of such conditions. When applied to an individual active ingredient, administered alone, a therapeutically effective dose refers to that ingredient alone. When applied to a combination, a therapeutically effective dose refers to combined amounts of the active ingredients that result in the therapeutic effect, whether administered in combination, serially or simultaneously.

[0292] In practicing the method of treatment or use of the present invention, a therapeutically effective amount of protein or other active ingredient of the present invention is administered to a mammal having a condition to be treated. Protein or other active ingredient of the present invention may be administered in accordance with the method of the invention either alone or in combination with other therapies such as treatments employing cytokines, lymphokines or other hematopoietic factors. When co-administered with one or more cytokines, lymphokines or other hematopoietic factors, protein or other active ingredient of the present invention may be administered either simultaneously with the cytokine(s), lymphokine(s), other hematopoietic factor(s), thrombolytic or anti-thrombotic factors, or sequentially. If administered sequentially, the attending physician will decide on the appropriate sequence of administering protein or other active ingredient of the present invention in combination with cytokine(s), lymphokine(s), other hematopoietic factor(s), thrombolytic or anti-thrombotic factors.

[0293] 5.12.1 Routes of Administration

[0294] Suitable routes of administration may, for example, include oral, rectal, transmucosal, or intestinal administration; parenteral delivery, including intramuscular, subcutaneous, intramedullary injections, as well as intrathecal, direct intraventricular, intravenous, intraperitoneal, intranasal, or intraocular injections. Administration of protein or other active ingredient of the present invention used in the pharmaceutical composition or to practice the method of the present invention can be carried out in a variety of conventional ways, such as oral ingestion, inhalation, topical application or cutaneous, subcutaneous, intraperitoneal, parenteral or intravenous injection. Intravenous administration to the patient is preferred.

[0295] Alternately, one may administer the compound in a local rather than systemic manner, for example, via injection of the compound directly into a arthritic joints or in fibrotic tissue, often in a depot or sustained release formulation. In order to prevent the scarring process frequently occurring as complication of glaucoma surgery, the compounds may be administered topically, for example, as eye drops. Furthermore, one may administer the drug in a targeted drug delivery system, for example, in a liposome coated with a specific antibody, targeting, for example, arthritic or fibrotic tissue. The liposomes will be targeted to and taken up selectively by the afflicted tissue.

[0296] The polypeptides of the invention are administered by any route that delivers an effective dosage to the desired site of action. The determination of a suitable route of administration and an effective dosage for a particular indication is within the level of skill in the art. Preferably for wound treatment, one administers the therapeutic compound directly to the site. Suitable dosage ranges for the polypeptides of the invention can be extrapolated from these dosages or from similar studies in appropriate animal models. Dosages can then be adjusted as necessary by the clinician to provide maximal therapeutic benefit.

[0297] 5.12.2 Compositions/Formulations

[0298] Pharmaceutical compositions for use in accordance with the present invention thus may be formulated in a conventional manner using one or more physiologically acceptable carriers comprising excipients and auxiliaries which facilitate processing of the active compounds into preparations which can be used pharmaceutically. These pharmaceutical compositions may be manufactured in a manner that is itself known, e.g., by means of conventional mixing, dissolving, granulating, dragee-making, levigating, emulsifying, encapsulating, entrapping or lyophilizing processes. Proper formulation is dependent upon the route of administration chosen. When a therapeutically effective amount of protein or other active ingredient of the present invention is administered orally, protein or other active ingredient of the present invention will be in the form of a tablet, capsule, powder, solution or elixir. When administered in tablet form, the pharmaceutical composition of the invention may additionally contain a solid carrier such as a gelatin or an adjuvant. The tablet, capsule, and powder contain from about 5 to 95% protein or other active ingredient of the present invention, and preferably from about 25 to 90% protein or other active ingredient of the present invention. When administered in liquid form, a liquid carrier such as water, petroleum, oils of animal or plant origin such as peanut oil, mineral oil, soybean oil, or sesame oil, or synthetic oils may be added. The liquid form of the pharmaceutical composition may further contain physiological saline solution, dextrose or other saccharide solution, or glycols such as ethylene glycol, propylene glycol or polyethylene glycol. When administered in liquid form, the pharmaceutical composition contains from about 0.5 to 90% by weight of protein or other active ingredient of the present invention, and preferably from about 1 to 50% protein or other active ingredient of the present invention.

[0299] When a therapeutically effective amount of protein or other active ingredient of the present invention is administered by intravenous, cutaneous or subcutaneous injection, protein or other active ingredient of the present invention will be in the form of a pyrogen-free, parenterally acceptable aqueous solution. The preparation of such parenterally acceptable protein or other active ingredient solutions, having due regard to pH, isotonicity, stability, and the like, is within the skill in the art. A preferred pharmaceutical composition for intravenous, cutaneous, or subcutaneous injection should contain, in addition to protein or other active ingredient of the present invention, an isotonic vehicle such as sodium chloride injection, Ringer's injection, dextrose injection, dextrose and sodium chloride injection, lactated Ringer's injection, or other vehicle as known in the art. The pharmaceutical composition of the present invention may also contain stabilizers, preservatives, buffers, antioxidants, or other additives known to those of skill in the art. For injection, the agents of the invention may be formulated in aqueous solutions, preferably in physiologically compatible buffers such as Hanks's solution, Ringer's solution, or physiological saline buffer. For transmucosal administration, penetrants appropriate to the barrier to be permeated are used in the formulation. Such penetrants are generally known in the art.

[0300] For oral administration, the compounds can be formulated readily by combining the active compounds with pharmaceutically acceptable carriers well known in the art. Such carriers enable the compounds of the invention to be formulated as tablets, pills, dragees, capsules, liquids, gels, syrups, slurries, suspensions and the like, for oral ingestion by a patient to be treated. Pharmaceutical preparations for oral use can be obtained from a solid excipient, optionally grinding a resulting mixture, and processing the mixture of granules, after adding suitable auxiliaries, if desired, to obtain tablets or dragee cores. Suitable excipients are, in particular, fillers such as sugars, including lactose, sucrose, mannitol, or sorbitol; cellulose preparations such as, for example, maize starch, wheat starch, rice starch, potato starch, gelatin, gum tragacanth, methyl cellulose, hydroxypropylmethyl-cellulose, sodium carboxymethylcellulose, and/or polyvinylpyrrolidone (PVP). If desired, disintegrating agents may be added, such as the cross-linked polyvinyl pyrrolidone, agar, or alginic acid or a salt thereof such as sodium alginate. Dragee cores are provided with suitable coatings. For this purpose, concentrated sugar solutions may be used, which may optionally contain gum arabic, talc, polyvinyl pyrrolidone, carbopol gel, polyethylene glycol, and/or titanium dioxide, lacquer solutions, and suitable organic solvents or solvent mixtures. Dyestuffs or pigments may be added to the tablets or dragee coatings for identification or to characterize different combinations of active compound doses.

[0301] Pharmaceutical preparations which can be used orally include push-fit capsules made of gelatin, as well as soft, sealed capsules made of gelatin and a plasticizer, such as glycerol or sorbitol. The push-fit capsules can contain the active ingredients in admixture with filler such as lactose, binders such as starches, and/or lubricants such as talc or magnesium stearate and, optionally, stabilizers. In soft capsules, the active compounds may be dissolved or suspended in suitable liquids, such as fatty oils, liquid paraffin, or liquid polyethylene glycols. In addition, stabilizers may be added. All formulations for oral administration should be in dosages suitable for such administration. For buccal administration, the compositions may take the form of tablets or lozenges formulated in conventional manner.

[0302] For administration by inhalation, the compounds for use according to the present invention are conveniently delivered in the form of an aerosol spray presentation from pressurized packs or a nebuliser, with the use of a suitable propellant, e.g., dichlorodifluoromethane, trichlorofluoromethane, dichlorotetrafluoroethane, carbon dioxide or other suitable gas. In the case of a pressurized aerosol the dosage unit may be determined by providing a valve to deliver a metered amount. Capsules and cartridges of, e.g., gelatin for use in an inhaler or insufflator may be formulated containing a powder mix of the compound and a suitable powder base such as lactose or starch. The compounds may be formulated for parenteral administration by injection, e.g., by bolus injection or continuous infusion. Formulations for injection may be presented in unit dosage form, e.g., in ampules or in multi-dose containers, with an added preservative. The compositions may take such forms as suspensions, solutions or emulsions in oily or aqueous vehicles, and may contain formulatory agents such as suspending, stabilizing and/or dispersing agents.

[0303] Pharmaceutical formulations for parenteral administration include aqueous solutions of the active compounds in water-soluble form. Additionally, suspensions of the active compounds may be prepared as appropriate oily injection suspensions. Suitable lipophilic solvents or vehicles include fatty oils such as sesame oil, or synthetic fatty acid esters, such as ethyl oleate or triglycerides, or liposomes. Aqueous injection suspensions may contain substances which increase the viscosity of the suspension, such as sodium carboxymethyl cellulose, sorbitol, or dextran. Optionally, the suspension may also contain suitable stabilizers or agents which increase the solubility of the compounds to allow for the preparation of highly concentrated solutions. Alternatively, the active ingredient may be in powder form for constitution with a suitable vehicle, e.g., sterile pyrogen-free water, before use.

[0304] The compounds may also be formulated in rectal compositions such as suppositories or retention enemas, e.g., containing conventional suppository bases such as cocoa butter or other glycerides. In addition to the formulations described previously, the compounds may also be formulated as a depot preparation. Such long acting formulations may be administered by implantation (for example subcutaneously or intramuscularly) or by intramuscular injection. Thus, for example, the compounds may be formulated with suitable polymeric or hydrophobic materials (for example as an emulsion in an acceptable oil) or ion exchange resins, or as sparingly soluble derivatives, for example, as a sparingly soluble salt.

[0305] A pharmaceutical carrier for the hydrophobic compounds of the invention is a co-solvent system comprising benzyl alcohol, a nonpolar surfactant, a water-miscible organic polymer, and an aqueous phase. The co-solvent system may be the VPD co-solvent system. VPD is a solution of 3% w/v benzyl alcohol, 8% w/v of the nonpolar surfactant polysorbate 80, and 65% w/v polyethylene glycol 300, made up to volume in absolute ethanol. The VPD co-solvent system (VPD:5W) consists of VPD diluted 1:1 with a 5% dextrose in water solution. This co-solvent system dissolves hydrophobic compounds well, and itself produces low toxicity upon systemic administration. Naturally, the proportions of a co-solvent system may be varied considerably without destroying its solubility and toxicity characteristics. Furthermore, the identity of the co-solvent components may be varied: for example, other low-toxicity nonpolar surfactants may be used instead of polysorbate 80; the fraction size of polyethylene glycol may be varied; other biocompatible polymers may replace polyethylene glycol, e.g. polyvinyl pyrrolidone; and other sugars or polysaccharides may substitute for dextrose. Alternatively, other delivery systems for hydrophobic pharmaceutical compounds may be employed. Liposomes and emulsions are well known examples of delivery vehicles or carriers for hydrophobic drugs. Certain organic solvents such as dimethylsulfoxide also may be employed, although usually at the cost of greater toxicity. Additionally, the compounds may be delivered using a sustained-release system, such as semipermeable matrices of solid hydrophobic polymers containing the therapeutic agent. Various types of sustained-release materials have been established and are well known by those skilled in the art. Sustained-release capsules may, depending on their chemical nature, release the compounds for a few weeks up to over 100 days. Depending on the chemical nature and the biological stability of the therapeutic reagent, additional strategies for protein or other active ingredient stabilization may be employed.

[0306] The pharmaceutical compositions also may comprise suitable solid or gel phase carriers or excipients. Examples of such carriers or excipients include but are not limited to calcium carbonate, calcium phosphate, various sugars, starches, cellulose derivatives, gelatin, and polymers such as polyethylene glycols. Many of the active ingredients of the invention may be provided as salts with pharmaceutically compatible counter ions. Such pharmaceutically acceptable base addition salts are those salts which retain the biological effectiveness and properties of the free acids and which are obtained by reaction with inorganic or organic bases such as sodium hydroxide, magnesium hydroxide, ammonia, trialkylamine, dialkylamine, monoalkylamine, dibasic amino acids, sodium acetate, potassium benzoate, triethanol amine and the like.

[0307] The pharmaceutical composition of the invention may be in the form of a complex of the protein(s) or other active ingredient(s) of present invention along with protein or peptide antigens. The protein and/or peptide antigen will deliver a stimulatory signal to both B and T lymphocytes. B lymphocytes will respond to antigen through their surface immunoglobulin receptor. T lymphocytes will respond to antigen through the T cell receptor (TCR) following presentation of the antigen by MHC proteins. MHC and structurally related proteins including those encoded by class I and class II MHC genes on host cells will serve to present the peptide antigen(s) to T lymphocytes. The antigen components could also be supplied as purified MHC-peptide complexes alone or with co-stimulatory molecules that can directly signal T cells. Alternatively antibodies able to bind surface immunoglobulin and other molecules on B cells as well as antibodies able to bind the TCR and other molecules on T cells can be combined with the pharmaceutical composition of the invention.

[0308] The pharmaceutical composition of the invention may be in the form of a liposome in which protein of the present invention is combined, in addition to other pharmaceutically acceptable carriers, with amphipathic agents such as lipids which exist in aggregated form as micelles, insoluble monolayers, liquid crystals, or lamellar layers in aqueous solution. Suitable lipids for liposomal formulation include, without limitation, monoglycerides, diglycerides, sulfatides, lysolecithins, phospholipids, saponin, bile acids, and the like. Preparation of such liposomal formulations is within the level of skill in the art, as disclosed, for example, in U.S. Pat. Nos. 4,235,871; 4,501,728; 4,837,028; and 4,737,323, all of which are incorporated herein by reference.

[0309] The amount of protein or other active ingredient of the present invention in the pharmaceutical composition of the present invention will depend upon the nature and severity of the condition being treated, and on the nature of prior treatments which the patient has undergone. Ultimately, the attending physician will decide the amount of protein or other active ingredient of the present invention with which to treat each individual patient. Initially, the attending physician will administer low doses of protein or other active ingredient of the present invention and observe the patient's response. Larger doses of protein or other active ingredient of the present invention may be administered until the optimal therapeutic effect is obtained for the patient, and at that point the dosage is not increased further. It is contemplated that the various pharmaceutical compositions used to practice the method of the present invention should contain about 0.01 μg to about 100 mg (preferably about 0.1 μg to about 10 mg, more preferably about 0.1 μg to about 1 mg) of protein or other active ingredient of the present invention per kg body weight. For compositions of the present invention which are useful for bone, cartilage, tendon or ligament regeneration, the therapeutic method includes administering the composition topically, systematically, or locally as an implant or device. When administered, the therapeutic composition for use in this invention is, of course, in a pyrogen-free, physiologically acceptable form. Further, the composition may desirably be encapsulated or injected in a viscous form for delivery to the site of bone, cartilage or tissue damage. Topical administration may be suitable for wound healing and tissue repair. Therapeutically useful agents other than a protein or other active ingredient of the invention which may also optionally be included in the composition as described above, may alternatively or additionally, be administered simultaneously or sequentially with the composition in the methods of the invention. Preferably for bone and/or cartilage formation, the composition would include a matrix capable of delivering the protein-containing or other active ingredient-containing composition to the site of bone and/or cartilage damage, providing a structure for the developing bone and cartilage and optimally capable of being resorbed into the body. Such matrices may be formed of materials presently in use for other implanted medical applications.

[0310] The choice of matrix material is based on biocompatibility, biodegradability, mechanical properties, cosmetic appearance and interface properties. The particular application of the compositions will define the appropriate formulation. Potential matrices for the compositions may be biodegradable and chemically defined calcium sulfate, tricalcium phosphate, hydroxyapatite, polylactic acid, polyglycolic acid and polyanhydrides. Other potential materials are biodegradable and biologically well-defined, such as bone or dermal collagen. Further matrices are comprised of pure proteins or extracellular matrix components. Other potential matrices are nonbiodegradable and chemically defined, such as sintered hydroxyapatite, bioglass, aluminates, or other ceramics. Matrices may be comprised of combinations of any of the above mentioned types of material, such as polylactic acid and hydroxyapatite or collagen and tricalcium phosphate. The bioceramics may be altered in composition, such as in calcium-aluminate-phosphate and processing to alter pore size, particle size, particle shape, and biodegradability. Presently preferred is a 50:50 (mole weight) copolymer of lactic acid and glycolic acid in the form of porous particles having diameters ranging from 150 to 800 microns. In some applications, it will be useful to utilize a sequestering agent, such as carboxymethyl cellulose or autologous blood clot, to prevent the protein compositions from disassociating from the matrix.

[0311] A preferred family of sequestering agents is cellulosic materials such as alkylcelluloses (including hydroxyalkylcelluloses), including methylcellulose, ethylcellulose, hydroxyethylcellulose, hydroxypropylcellulose, hydroxypropyl-methylcellulose, and carboxymethylcellulose, the most preferred being cationic salts of carboxymethylcellulose (CMC). Other preferred sequestering agents include hyaluronic acid, sodium alginate, poly(ethylene glycol), polyoxyethylene oxide, carboxyvinyl polymer and poly(vinyl alcohol). The amount of sequestering agent useful herein is 0.5-20 wt %, preferably 1-10 wt % based on total formulation weight, which represents the amount necessary to prevent desorption of the protein from the polymer matrix and to provide appropriate handling of the composition, yet not so much that the progenitor cells are prevented from infiltrating the matrix, thereby providing the protein the opportunity to assist the osteogenic activity of the progenitor cells. In further compositions, proteins or other active ingredients of the invention may be combined with other agents beneficial to the treatment of the bone and/or cartilage defect, wound, or tissue in question. These agents include various growth factors such as epidermal growth factor (EGF), platelet derived growth factor (PDGF), transforming growth factors (TGF-α and TGF-β), and insulin-like growth factor (IGF).

[0312] The therapeutic compositions are also presently valuable for veterinary applications. Particularly domestic animals and thoroughbred horses, in addition to humans, are desired patients for such treatment with proteins or other active ingredients of the present invention. The dosage regimen of a protein-containing pharmaceutical composition to be used in tissue regeneration will be determined by the attending physician considering various factors which modify the action of the proteins, e.g., amount of tissue weight desired to be formed, the site of damage, the condition of the damaged tissue, the size of a wound, type of damaged tissue (e.g., bone), the patient's age, sex, and diet, the severity of any infection, time of administration and other clinical factors. The dosage may vary with the type of matrix used in the reconstitution and with inclusion of other proteins in the pharmaceutical composition. For example, the addition of other known growth factors, such as IGF I (insulin like growth factor I), to the final composition, may also effect the dosage. Progress can be monitored by periodic assessment of tissue/bone growth and/or repair, for example, X-rays, histomorphometric determinations and tetracycline labeling.

[0313] Polynucleotides of the present invention can also be used for gene therapy. Such polynucleotides can be introduced either in vivo or ex vivo into cells for expression in a mammalian subject. Polynucleotides of the invention may also be administered by other known methods for introduction of nucleic acid into a cell or organism (including, without limitation, in the form of viral vectors or naked DNA). Cells may also be cultured ex vivo in the presence of proteins of the present invention in order to proliferate or to produce a desired effect on or activity in such cells. Treated cells can then be introduced in vivo for therapeutic purposes.

[0314] 5.12.3 Effective Dosage

[0315] Pharmaceutical compositions suitable for use in the present invention include compositions wherein the active ingredients are contained in an effective amount to achieve its intended purpose. More specifically, a therapeutically effective amount means an amount effective to prevent development of or to alleviate the existing symptoms of the subject being treated. Determination of the effective amount is well within the capability of those skilled in the art, especially in light of the detailed disclosure provided herein. For any compound used in the method of the invention, the therapeutically effective dose can be estimated initially from appropriate in vitro assays. For example, a dose can be formulated in animal models to achieve a circulating concentration range that can be used to more accurately determine useful doses in humans. For example, a dose can be formulated in animal models to achieve a circulating concentration range that includes the IC₅₀ as determined in cell culture (i.e., the concentration of the test compound which achieves a half-maximal inhibition of the protein's biological activity). Such information can be used to more accurately determine useful doses in humans.

[0316] A therapeutically effective dose refers to that amount of the compound that results in amelioration of symptoms or a prolongation of survival in a patient. Toxicity and therapeutic efficacy of such compounds can be determined by standard pharmaceutical procedures in cell cultures or experimental animals, e.g., for determining the LD₅₀ (the dose lethal to 50% of the population) and the ED₅₀ (the dose therapeutically effective in 50% of the population). The dose ratio between toxic and therapeutic effects is the therapeutic index and it can be expressed as the ratio between LD₅₀ and ED₅₀. Compounds which exhibit high therapeutic indices are preferred. The data obtained from these cell culture assays and animal studies can be used in formulating a range of dosage for use in human. The dosage of such compounds lies preferably within a range of circulating concentrations that include the ED₅₀ with little or no toxicity. The dosage may vary within this range depending upon the dosage form employed and the route of administration utilized. The exact formulation, route of administration and dosage can be chosen by the individual physician in view of the patient's condition. See, e.g., Fingl et al. 1975, in “The Pharmacological Basis of Therapeutics”, Ch. 1 p. 1. Dosage amount and interval may be adjusted individually to provide plasma levels of the active moiety which are sufficient to maintain the desired effects, or minimal effective concentration (MEC). The MEC will vary for each compound but can be estimated from in vitro data. Dosages necessary to achieve the MEC will depend on individual characteristics and route of administration. However, HPLC assays or bioassays can be used to determine plasma concentrations.

[0317] Dosage intervals can also be determined using MEC value. Compounds should be administered using a regimen which maintains plasma levels above the MEC for 10-90% of the time, preferably between 30-90% and most preferably between 50-90%. In cases of local administration or selective uptake, the effective local concentration of the drug may not be related to plasma concentration.

[0318] An exemplary dosage regimen for polypeptides or other compositions of the invention will be in the range of about 0.01 μg/kg to 100 mg/kg of body weight daily, with the preferred dose being about 0.1 μg/kg to 25 mg/kg of patient body weight daily, varying in adults and children. Dosing may be once daily, or equivalent doses may be delivered at longer or shorter intervals.

[0319] The amount of composition administered will, of course, be dependent on the subject being treated, on the subject's age and weight, the severity of the affliction, the manner of administration and the judgment of the prescribing physician.

[0320] 5.12.4 Packaging

[0321] The compositions may, if desired, be presented in a pack or dispenser device which may contain one or more unit dosage forms containing the active ingredient. The pack may, for example, comprise metal or plastic foil, such as a blister pack. The pack or dispenser device may be accompanied by instructions for administration. Compositions comprising a compound of the invention formulated in a compatible pharmaceutical carrier may also be prepared, placed in an appropriate container, and labeled for treatment of an indicated condition.

[0322] 5.13 Antibodies

[0323] Also included in the invention are antibodies to proteins, or fragments of proteins of the invention. The term “antibody” as used herein refers to immunoglobulin molecules and immunologically active portions of immunoglobulin (Ig) molecules, i.e., molecules that contain an antigen binding site that specifically binds (immunoreacts with) an antigen. Such antibodies include, but are not limited to, polyclonal, monoclonal, chimeric, single chain, F_{ab}, F_{ab′} and F_{(ab′)2} fragments, and an F_{ab} expression library. In general, an antibody molecule obtained from humans relates to any of the classes IgG, IgM, IgA, IgE and IgD, which differ from one another by the nature of the heavy chain present in the molecule. Certain classes have subclasses as well, such as IgG₁, IgG₂, and others. Furthermore, in humans, the light chain may be a kappa chain or a lambda chain. Reference herein to antibodies includes a reference to all such classes, subclasses and types of human antibody species.

[0324] An isolated related protein of the invention may be intended to serve as an antigen, or a portion or fragment thereof, and additionally can be used as an immunogen to generate antibodies that immunospecifically bind the antigen, using standard techniques for polyclonal and monoclonal antibody preparation. The full-length protein can be used or, alternatively, the invention provides antigenic peptide fragments of the antigen for use as immunogens. An antigenic peptide fragment comprises at least 6 amino acid residues of the amino acid sequence of the full length protein, such as an amino acid sequence encoded by 748 SEQ ID NO: 1-45,207, 752 SEQ ID NO: 1-13,203, 778 SEQ ID NO: 1-105, 779 SEQ ID NO: 1-128, 782 SEQ ID NO: 1-10,451, 784 SEQ ID NO: 1-10,289, 785 SEQ ID NO: 1-3796, 787 SEQ ID NO: 1-10,410, 788 SEQ ID NO: 1-14,074, 789 SEQ ID NO: 1-6391, 790 SEQ ID NO: 1-30,533, 791 SEQ ID NO: 1-5822, and 792 SEQ ID NO: 1-8502, and encompasses an epitope thereof such that an antibody raised against the peptide forms a specific immune complex with the full length protein or with any fragment that contains the epitope. Preferably, the antigenic peptide comprises at least 10 amino acid residues, or at least 15 amino acid residues, or at least 20 amino acid residues, or at least 30 amino acid residues. Preferred epitopes encompassed by the antigenic peptide are regions of the protein that are located on its surface; commonly these are hydrophilic regions.

[0325] In certain embodiments of the invention, at least one epitope encompassed by the antigenic peptide is a region of—related protein that is located on the surface of the protein, e.g., a hydrophilic region. A hydrophobicity analysis of the human related protein sequence will indicate which regions of a related protein are particularly hydrophilic and, therefore, are likely to encode surface residues useful for targeting antibody production. As a means for targeting antibody production, hydropathy plots showing regions of hydrophilicity and hydrophobicity may be generated by any method well known in the art, including, for example, the Kyte Doolittle or the Hopp Woods methods, either with or without Fourier transformation. See, e.g., Hopp and Woods, 1981, Proc. Nat. Acad. Sci. USA 78: 3824-3828; Kyte and Doolittle 1982, J. Mol. Biol. 157: 105-142, each of which is incorporated herein by reference in its entirety. Antibodies that are specific for one or more domains within an antigenic protein, or derivatives, fragments, analogs or homologs thereof, are also provided herein.

[0326] A protein of the invention, or a derivative, fragment, analog, homolog or ortholog thereof, may be utilized as an immunogen in the generation of antibodies that immunospecifically bind these protein components.

[0327] Various procedures known within the art may be used for the production of polyclonal or monoclonal antibodies directed against a protein of the invention, or against derivatives, fragments, analogs homologs or orthologs thereof (see, for example, Antibodies: A Laboratory Manual, Harlow E, and Lane D, 1988, Cold Spring Harbor Laboratory Press, Cold Spring Harbor, N.Y., incorporated herein by reference). Some of these antibodies are discussed below.

[0328] 5.13.1 Polyclonal Antibodies

[0329] For the production of polyclonal antibodies, various suitable host animals (e.g., rabbit, goat, mouse or other mammal) may be immunized by one or more injections with the native protein, a synthetic variant thereof, or a derivative of the foregoing. An appropriate immunogenic preparation can contain, for example, the naturally occurring immunogenic protein, a chemically synthesized polypeptide representing the immunogenic protein, or a recombinantly expressed immunogenic protein. Furthermore, the protein may be conjugated to a second protein known to be immunogenic in the mammal being immunized. Examples of such immunogenic proteins include but are not limited to keyhole limpet hemocyanin, serum albumin, bovine thyroglobulin, and soybean trypsin inhibitor. The preparation can further include an adjuvant. Various adjuvants used to increase the immunological response include, but are not limited to, Freund's (complete and incomplete), mineral gels (e.g., aluminum hydroxide), surface active substances (e.g., lysolecithin, pluronic polyols, polyanions, peptides, oil emulsions, dinitrophenol, etc.), adjuvants usable in humans such as Bacille Calmette-Guerin (BCG) and Corynebacterium parvum, or similar immunostimulatory agents. Additional examples of adjuvants which can be employed include MPL-TDM adjuvant (monophosphoryl Lipid A, synthetic trehalose dicorynomycolate).

[0330] The polyclonal antibody molecules directed against the immunogenic protein can be isolated from the mammal (e.g., from the blood) and further purified by well known techniques, such as affinity chromatography using protein A or protein G, which provide primarily the IgG fraction of immune serum. Subsequently, or alternatively, the specific antigen which is the target of the immunoglobulin sought, or an epitope thereof, may be immobilized on a column to purify the immune specific antibody by immunoaffinity chromatography. Purification of immunoglobulins is discussed, for example, by D. Wilkinson (The Scientist, published by The Scientist, Inc., Philadelphia Pa., Vol. 14, No. 8 (Apr. 17, 2000), pp. 25-28).

[0331] 5.13.2 Monoclonal Antibodies

[0332] The term “monoclonal antibody” (MAb) or “monoclonal antibody composition”, as used herein, refers to a population of antibody molecules that contain only one molecular species of antibody molecule consisting of a unique light chain gene product and a unique heavy chain gene product. In particular, the complementarity determining regions (CDRs) of the monoclonal antibody are identical in all the molecules of the population. MAbs thus contain an antigen binding site capable of immunoreacting with a particular epitope of the antigen characterized by a unique binding affinity for it.

[0333] Monoclonal antibodies can be prepared using hybridoma methods, such as those described by Kohler and Milstein, Nature, 256:495 (1975). In a hybridoma method, a mouse, hamster, or other appropriate host animal, is typically immunized with an immunizing agent to elicit lymphocytes that produce or are capable of producing antibodies that will specifically bind to the immunizing agent. Alternatively, the lymphocytes can be immunized in vitro. The immunizing agent will typically include the protein antigen, a fragment thereof or a fusion protein thereof. Generally, either peripheral blood lymphocytes are used if cells of human origin are desired, or spleen cells or lymph node cells are used if non-human mammalian sources are desired. The lymphocytes are then fused with an immortalized cell line using a suitable fusing agent, such as polyethylene glycol, to form a hybridoma cell (Goding, Monoclonal Antibodies: Principles and Practice, Academic Press, (1986) pp. 59-103). Immortalized cell lines are usually transformed mammalian cells, particularly myeloma cells of rodent, bovine and human origin. Usually, rat or mouse myeloma cell lines are employed. The hybridoma cells can be cultured in a suitable culture medium that preferably contains one or more substances that inhibit the growth or survival of the unfused, immortalized cells. For example, if the parental cells lack the enzyme hypoxanthine guanine phosphoribosyl transferase (HGPRT or HPRT), the culture medium for the hybridomas typically will include hypoxanthine, aminopterin, and thymidine (“HAT medium”), which substances prevent the growth of HGPRT-deficient cells.

[0334] Preferred immortalized cell lines are those that fuse efficiently, support stable high level expression of antibody by the selected antibody-producing cells, and are sensitive to a medium such as HAT medium. More preferred immortalized cell lines are murine myeloma lines, which can be obtained, for instance, from the Salk Institute Cell Distribution Center, San Diego, Calif. and the American Type Culture Collection, Manassas, Va. Human myeloma and mouse-human heteromyeloma cell lines also have been described for the production of human monoclonal antibodies (Kozbor, J. Immunol., 133:3001 (1984); Brodeur et al., Monoclonal Antibody Production Techniques and Applications, Marcel Dekker, Inc., New York, (1987) pp. 51-63).

[0335] The culture medium in which the hybridoma cells are cultured can then be assayed for the presence of monoclonal antibodies directed against the antigen. Preferably, the binding specificity of monoclonal antibodies produced by the hybridoma cells is determined by immunoprecipitation or by an in vitro binding assay, such as radioimmunoassay (RIA) or enzyme-linked immunoabsorbent assay (ELISA). Such techniques and assays are known in the art. The binding affinity of the monoclonal antibody can, for example, be determined by the Scatchard analysis of Munson and Pollard, Anal. Biochem., 107:220 (1980). Preferably, antibodies having a high degree of specificity and a high binding affinity for the target antigen are isolated.

[0336] After the desired hybridoma cells are identified, the clones can be subcloned by limiting dilution procedures and grown by standard methods. Suitable culture media for this purpose include, for example, Dulbecco's Modified Eagle's Medium and RPMI-1640 medium. Alternatively, the hybridoma cells can be grown in vivo as ascites in a mammal. The monoclonal antibodies secreted by the subclones can be isolated or purified from the culture medium or ascites fluid by conventional immunoglobulin purification procedures such as, for example, protein A-Sepharose, hydroxylapatite chromatography, gel electrophoresis, dialysis, or affinity chromatography.

[0337] The monoclonal antibodies can also be made by recombinant DNA methods, such as those described in U.S. Pat. No. 4,816,567. DNA encoding the monoclonal antibodies of the invention can be readily isolated and sequenced using conventional procedures (e.g., by using oligonucleotide probes that are capable of binding specifically to genes encoding the heavy and light chains of murine antibodies). The hybridoma cells of the invention serve as a preferred source of such DNA. Once isolated, the DNA can be placed into expression vectors, which are then transfected into host cells such as simian COS cells, Chinese hamster ovary (CHO) cells, or myeloma cells that do not otherwise produce immunoglobulin protein, to obtain the synthesis of monoclonal antibodies in the recombinant host cells. The DNA also can be modified, for example, by substituting the coding sequence for human heavy and light chain constant domains in place of the homologous murine sequences (U.S. Pat. No. 4,816,567; Morrison, Nature 368, 812-13 (1994)) or by covalently joining to the immunoglobulin coding sequence all or part of the coding sequence for a non-immunoglobulin polypeptide. Such a non-immunoglobulin polypeptide can be substituted for the constant domains of an antibody of the invention, or can be substituted for the variable domains of one antigen-combining site of an antibody of the invention to create a chimeric bivalent antibody.

[0338] 5.13.2 Humanized Antibodies

[0339] The antibodies directed against the protein antigens of the invention can further comprise humanized antibodies or human antibodies. These antibodies are suitable for administration to humans without engendering an immune response by the human against the administered immunoglobulin. Humanized forms of antibodies are chimeric immunoglobulins, immunoglobulin chains or fragments thereof (such as Fv, Fab, Fab′, F(ab′)₂ or other antigen-binding subsequences of antibodies) that are principally comprised of the sequence of a human immunoglobulin, and contain minimal sequence derived from a non-human immunoglobulin. Humanization can be performed following the method of Winter and co-workers (Jones et al. Nature, 321:522-525 (1986); Riechmann et al. Nature, 332:323-327 (1988); Verhoeyen et al. Science, 239:1534-1536 (1988)), by substituting rodent CDRs or CDR sequences for the corresponding sequences of a human antibody. (See also U.S. Pat. No. 5,225,539.) In some instances, Fv framework residues of the human immunoglobulin are replaced by corresponding non-human residues. Humanized antibodies can also comprise residues which are found neither in the recipient antibody nor in the imported CDR or framework sequences. In general, the humanized antibody will comprise substantially all of at least one, and typically two, variable domains, in which all or substantially all of the CDR regions correspond to those of a non-human immunoglobulin and all or substantially all of the framework regions are those of a human immunoglobulin consensus sequence. The humanized antibody optimally also will comprise at least a portion of an immunoglobulin constant region (Fc), typically that of a human immunoglobulin (Jones et al. 1986; Riechmann et al. 1988; and Presta, Curr. Op. Struct. Biol., 2:593-596 (1992)).

[0340] 5.13.3 Human Antibodies

[0341] Fully human antibodies relate to antibody molecules in which essentially the entire sequences of both the light chain and the heavy chain, including the CDRs, arise from human genes. Such antibodies are termed “human antibodies”, or “fully human antibodies” herein. Human monoclonal antibodies can be prepared by the trioma technique; the human B-cell hybridoma technique (see Kozbor, et al. 1983 Immunol Today 4: 72) and the EBV hybridoma technique to produce human monoclonal antibodies (see Cole, et al. 1985 In: MONOCLONAL ANTIBODIES AND CANCER THERAPY, Alan R. Liss, Inc., pp. 77-96). Human monoclonal antibodies may be utilized in the practice of the present invention and may be produced by using human hybridomas (see Cote, et al. 1983. Proc Natl Acad Sci USA 80: 2026-2030) or by transforming human B-cells with Epstein Barr Virus in vitro (see Cole, et al. 1985 In: MONOCLONAL ANTIBODIES AND CANCER THERAPY, Alan R. Liss, Inc., pp. 77-96).

[0342] In addition, human antibodies can also be produced using additional techniques, including phage display libraries (Hoogenboom and Winter, J. Mol. Biol., 227:381 (1991); Marks et al. J. Mol. Biol., 222:581 (1991)). Similarly, human antibodies can be made by introducing human immunoglobulin loci into transgenic animals, e.g., mice in which the endogenous immunoglobulin genes have been partially or completely inactivated. Upon challenge, human antibody production is observed, which closely resembles that seen in humans in all respects, including gene rearrangement, assembly, and antibody repertoire. This approach is described, for example, in U.S. Pat. Nos. 5,545,807; 5,545,806; 5,569,825; 5,625,126; 5,633,425; 5,661,016, and in Marks et. al., (Bio/Technology 10, 779-783 (1992)); Lonberg et. al., (Nature 368 856-859 (1994)); Morrison (Nature 368, 812-13 (1994)); Fishwild et al., (Nature Biotechnology 14, 845-51 (1996)); Neuberger (Nature Biotechnology 14, 826 (1996)); and Lonberg and Huszar (Intern. Rev. Immunol. 13 65-93 (1995)).

[0343] Human antibodies may additionally be produced using transgenic nonhuman animals which are modified so as to produce fully human antibodies rather than the animal's endogenous antibodies in response to challenge by an antigen. (See PCT publication WO94/02602). The endogenous genes encoding the heavy and light immunoglobulin chains in the nonhuman host have been incapacitated, and active loci encoding human heavy and light chain immunoglobulins are inserted into the host's genome. The human genes are incorporated, for example, using yeast artificial chromosomes containing the requisite human DNA segments. An animal which provides all the desired modifications is then obtained as progeny by crossbreeding intermediate transgenic animals containing fewer than the full complement of the modifications. The preferred embodiment of such a nonhuman animal is a mouse, and is termed the Xenomouse™ (Abgenix Inc., Freemont, Calif.) as disclosed in PCT publications WO 96/33735 and WO 96/34096. This animal produces B cells which secrete fully human immunoglobulins. The antibodies can be obtained directly from the animal after immunization with an immunogen of interest, as, for example, a preparation of a polyclonal antibody, or alternatively from immortalized B cells derived from the animal, such as hybridomas producing monoclonal antibodies. Additionally, the genes encoding the immunoglobulins with human variable regions can be recovered and expressed to obtain the antibodies directly, or can be further modified to obtain analogs of antibodies such as, for example, single chain Fv molecules.

[0344] An example of a method of producing a nonhuman host, exemplified as a mouse, lacking expression of an endogenous immunoglobulin heavy chain is disclosed in U.S. Pat. No. 5,939,598. It can be obtained by a method including deleting the J segment genes from at least one endogenous heavy chain locus in an embryonic stem cell to prevent rearrangement of the locus and to prevent formation of a transcript of a rearranged immunoglobulin heavy chain locus, the deletion being effected by a targeting vector containing a gene encoding a selectable marker; and producing from the embryonic stem cell a transgenic mouse whose somatic and germ cells contain the gene encoding the selectable marker.

[0345] A method for producing an antibody of interest, such as a human antibody, is disclosed in U.S. Pat. No. 5,916,771. It includes introducing an expression vector that contains a nucleotide sequence encoding a heavy chain into one mammalian host cell in culture, introducing an expression vector containing a nucleotide sequence encoding a light chain into another mammalian host cell, and fusing the two cells to form a hybrid cell. The hybrid cell expresses an antibody containing the heavy chain and the light chain.

[0346] In a further improvement on this procedure, a method for identifying a clinically relevant epitope on an immunogen, and a correlative method for selecting an antibody that binds immunospecifically to the relevant epitope with high affinity, are disclosed in PCT publication WO 99/53049.

[0347] 5.13.4 F_{ab} Fragments and Single Chain Antibodies

[0348] According to the invention, techniques can be adapted for the production of single-chain antibodies specific to an antigenic protein of the invention (see e.g., U.S. Pat. No. 4,946,778). In addition, methods can be adapted for the construction of F_{ab} expression libraries (see e.g., Huse, et al. 1989 Science 246: 1275-1281) to allow rapid and effective identification of monoclonal F_{ab} fragments with the desired specificity for a protein or derivatives, fragments, analogs or homologs thereof. Antibody fragments that contain the idiotypes to a protein antigen may be produced by techniques known in the art including, but not limited to: (i) an F(ab′)₂ fragment produced by pepsin digestion of an antibody molecule; (ii) an F_{ab} fragment generated by reducing the disulfide bridges of an F_{(ab′)2} fragment; (iii) an F_{ab} fragment generated by the treatment of the antibody molecule with papain and a reducing agent and (iv) Fᵥ fragments.

[0349] 5.13.5 Bispecific Antibodies

[0350] Bispecific antibodies are monoclonal, preferably human or humanized, antibodies that have binding specificities for at least two different antigens. In the present case, one of the binding specificities is for an antigenic protein of the invention. The second binding target is any other antigen, and advantageously is a cell-surface protein or receptor or receptor subunit.

[0351] Methods for making bispecific antibodies are known in the art. Traditionally, the recombinant production of bispecific antibodies is based on the co-expression of two immunoglobulin heavy-chain/light-chain pairs, where the two heavy chains have different specificities (Milstein and Cuello, Nature, 305:537-539 (1983)). Because of the random assortment of immunoglobulin heavy and light chains, these hybridomas (quadromas) produce a potential mixture of ten different antibody molecules, of which only one has the correct bispecific structure. The purification of the correct molecule is usually accomplished by affinity chromatography steps. Similar procedures are disclosed in WO 93/08829, published 13 May 1993, and in Traunecker et al., 1991 EMBO J., 10:3655-3659.

[0352] Antibody variable domains with the desired binding specificities (antibody-antigen combining sites) can be fused to immunoglobulin constant domain sequences. The fusion preferably is with an immunoglobulin heavy-chain constant domain, comprising at least part of the hinge, CH2, and CH3 regions. It is preferred to have the first heavy-chain constant region (CH1) containing the site necessary for light-chain binding present in at least one of the fusions. DNAs encoding the immunoglobulin heavy-chain fusions and, if desired, the immunoglobulin light chain, are inserted into separate expression vectors, and are co-transfected into a suitable host organism. For further details of generating bispecific antibodies see, for example, Suresh et al. Methods in Enzymology, 121:210 (1986).

[0353] According to another approach described in WO 96/27011, the interface between a pair of antibody molecules can be engineered to maximize the percentage of heterodimers which are recovered from recombinant cell culture. The preferred interface comprises at least a part of the CH3 region of an antibody constant domain. In this method, one or more small amino acid side chains from the interface of the first antibody molecule are replaced with larger side chains (e.g. tyrosine or tryptophan). Compensatory “cavities” of identical or similar size to the large side chain(s) are created on the interface of the second antibody molecule by replacing large amino acid side chains with smaller ones (e.g. alanine or threonine). This provides a mechanism for increasing the yield of the heterodimer over other unwanted end-products such as homodimers.

[0354] Bispecific antibodies can be prepared as full length antibodies or antibody fragments (e.g. F(ab′)₂ bispecific antibodies). Techniques for generating bispecific antibodies from antibody fragments have been described in the literature. For example, bispecific antibodies can be prepared using chemical linkage. Brennan et al. Science 229:81 (1985) describe a procedure wherein intact antibodies are proteolytically cleaved to generate F(ab′)₂ fragments. These fragments are reduced in the presence of the dithiol complexing agent sodium arsenite to stabilize vicinal dithiols and prevent intermolecular disulfide formation. The Fab′ fragments generated are then converted to thionitrobenzoate (TNB) derivatives. One of the Fab′-TNB derivatives is then reconverted to the Fab′-thiol by reduction with mercaptoethylamine and is mixed with an equimolar amount of the other Fab′-TNB derivative to form the bispecific antibody. The bispecific antibodies produced can be used as agents for the selective immobilization of enzymes.

[0355] Additionally, Fab′ fragments can be directly recovered from E. coli and chemically coupled to form bispecific antibodies. Shalaby et al. J. Exp. Med. 175:217-225 (1992) describe the production of a fully humanized bispecific antibody F(ab′)₂ molecule. Each Fab′ fragment was separately secreted from E. coli and subjected to directed chemical coupling in vitro to form the bispecific antibody. The bispecific antibody thus formed was able to bind to cells overexpressing the ErbB2 receptor and normal human T cells, as well as trigger the lytic activity of human cytotoxic lymphocytes against human breast tumor targets.

[0356] Various techniques for making and isolating bispecific antibody fragments directly from recombinant cell culture have also been described. For example, bispecific antibodies have been produced using leucine zippers. Kostelny et al. J. Immunol. 148(5):1547-1553 (1992). The leucine zipper peptides from the Fos and Jun proteins were linked to the Fab′ portions of two different antibodies by gene fusion. The antibody homodimers were reduced at the hinge region to form monomers and then re-oxidized to form the antibody heterodimers. This method can also be utilized for the production of antibody homodimers. The “diabody” technology described by Hollinger et al. Proc. Natl. Acad. Sci. USA 90:6444-6448 (1993) has provided an alternative mechanism for making bispecific antibody fragments. The fragments comprise a heavy-chain variable domain (V_{H}) connected to a light-chain variable domain (V_{L}) by a linker which is too short to allow pairing between the two domains on the same chain. Accordingly, the V_{H} and V_{L} domains of one fragment are forced to pair with the complementary V_{L} and V_{H} domains of another fragment, thereby forming two antigen-binding sites. Another strategy for making bispecific antibody fragments by the use of single-chain Fv (sFv) dimers has also been reported. See, Gruber et al. J. Immunol. 152:5368 (1994).

[0357] Antibodies with more than two valencies are contemplated. For example, trispecific antibodies can be prepared. Tutt et al. J. Immunol. 147:60 (1991). Exemplary bispecific antibodies can bind to two different epitopes, at least one of which originates in the protein antigen of the invention. Alternatively, an anti-antigenic arm of an immunoglobulin molecule can be combined with an arm which binds to a triggering molecule on a leukocyte such as a T-cell receptor molecule (e.g. CD2, CD3, CD28, or B7), or Fc receptors for IgG (FcγR), such as FcRn, FcγRI (CD64), FcγRII (CD32), FcγRIII (CD16), so as to focus cellular defense mechanisms to the cell expressing the particular antigen. Bispecific antibodies can also be used to direct cytotoxic agents to cells which express a particular antigen. These antibodies possess an antigen-binding arm and an arm which binds a cytotoxic agent or a radionuclide chelator, such as EOTUBE, DPTA, DOTA, or TETA. Another bispecific antibody of interest binds the protein antigen described herein and further binds tissue factor (TF).

[0358] 5.13.6 Heteroconjugate Antibodies

[0359] Heteroconjugate antibodies are also within the scope of the present invention. Heteroconjugate antibodies are composed of two covalently joined antibodies. Such antibodies have, for example, been proposed to target immune system cells to unwanted cells (U.S. Pat. No. 4,676,980), and for treatment of HIV infection (WO 91/00360; WO 92/200373; EP 03089). It is contemplated that the antibodies can be prepared in vitro using known methods in synthetic protein chemistry, including those involving crosslinking agents. For example, immunotoxins can be constructed using a disulfide exchange reaction or by forming a thioether bond. Examples of suitable reagents for this purpose include iminothiolate and methyl-4-mercaptobutyrimidate and those disclosed, for example, in U.S. Pat. No. 4,676,980.

[0360] 5.13.7 Effector Function Engineering

[0361] It can be desirable to modify the antibody of the invention with respect to effector function, so as to enhance, e.g., the effectiveness of the antibody in treating cancer. For example, cysteine residue(s) can be introduced into the Fc region, thereby allowing interchain disulfide bond formation in this region. The homodimeric antibody thus generated can have improved internalization capability and/or increased complement-mediated cell killing and antibody-dependent cellular cytotoxicity (ADCC). See Caron et al. J. Exp Med., 176: 1191-1195 (1992) and Shopes, J. Immunol., 148: 2918-2922 (1992). Homodimeric antibodies with enhanced anti-tumor activity can also be prepared using heterobifunctional cross-linkers as described in Wolff et. al., Cancer Research, 53: 2560-2565 (1993). Alternatively, an antibody can be engineered that has dual Fc regions and can thereby have enhanced complement lysis and ADCC capabilities. See Stevenson et al. Anti-Cancer Drug Design, 3: 219-230 (1989).

[0362] 5.13.8 Immunoconjugates

[0363] The invention also pertains to immunoconjugates comprising an antibody conjugated to a cytotoxic agent such as a chemotherapeutic agent, toxin (e.g., an enzymatically active toxin of bacterial, fungal, plant, or animal origin, or fragments thereof), or a radioactive isotope (i.e., a radioconjugate).

[0364] Chemotherapeutic agents useful in the generation of such immunoconjugates have been described above. Enzymatically active toxins and fragments thereof that can be used include diphtheria A chain, nonbinding active fragments of diphtheria toxin, exotoxin A chain (from Pseudomonas aeruginosa), ricin A chain, abrin A chain, modeccin A chain, alpha-sarcin, Aleurites fordii proteins, dianthin proteins, Phytolaca americana proteins (PAPI, PAPII, and PAP-S), momordica charantia inhibitor, curcin, crotin, sapaonaria officinalis inhibitor, gelonin, mitogellin, restrictocin, phenomycin, enomycin, and the tricothecenes. A variety of radionuclides are available for the production of radioconjugated antibodies. Examples include ²¹²Bi, ¹³¹I, ¹²⁵I, ¹³¹In, ⁹⁰Y, and ¹⁸⁶Re.

[0365] Conjugates of the antibody and cytotoxic agent are made using a variety of bifunctional protein-coupling agents such as N-succinimidyl-3-(2-pyridyldithiol) propionate (SPDP), iminothiolane (IT), bifunctional derivatives of imidoesters (such as dimethyl adipimidate HCL), active esters (such as disuccinimidyl suberate), aldehydes (such as glutareldehyde), bis-azido compounds (such as bis (p-azidobenzoyl) hexanediamine), bis-diazonium derivatives (such as bis-(p-diazoniumbenzoyl)-ethylenediamine), diisocyanates (such as tolyene 2,6-diisocyanate), and bis-active fluorine compounds (such as 1,5-difluoro-2,4-dinitrobenzene). For example, a ricin immunotoxin can be prepared as described in Vitetta et al. Science, 238: 1098 (1987). Carbon-14-labeled 1-isothiocyanatobenzyl-3-methyldiethylene triaminepentaacetic acid (MX-DTPA) is an exemplary chelating agent for conjugation of radionucleotide to the antibody. See WO94/11026.

[0366] In another embodiment, the antibody can be conjugated to a “receptor” (such streptavidin) for utilization in tumor pretargeting wherein the antibody-receptor conjugate is administered to the patient, followed by removal of unbound conjugate from the circulation using a clearing agent and then administration of a “ligand” (e.g., avidin) that is in turn conjugated to a cytotoxic agent.

[0367] 5.14 Computer Readable Sequences

[0368] In one application of this embodiment, a nucleotide sequence of the present invention can be recorded on computer readable media. As used herein, “computer readable media” refers to any medium which can be read and accessed directly by a computer. Such media include, but are not limited to: magnetic storage media, such as floppy discs, hard disc storage medium, and magnetic tape; optical storage media such as CD-ROM; electrical storage media such as RAM and ROM; and hybrids of these categories such as magnetic/optical storage media. A skilled artisan can readily appreciate how any of the presently known computer readable mediums can be used to create a manufacture comprising computer readable medium having recorded thereon a nucleotide sequence of the present invention. As used herein, “recorded” refers to a process for storing information on computer readable medium. A skilled artisan can readily adopt any of the presently known methods for recording information on computer readable medium to generate manufactures comprising the nucleotide sequence information of the present invention.

[0369] A variety of data storage structures are available to a skilled artisan for creating a computer readable medium having recorded thereon a nucleotide sequence of the present invention. The choice of the data storage structure will generally be based on the means chosen to access the stored information. In addition, a variety of data processor programs and formats can be used to store the nucleotide sequence information of the present invention on computer readable medium. The sequence information can be represented in a word processing text file, formatted in commercially-available software such as WordPerfect and Microsoft Word, or represented in the form of an ASCII file, stored in a database application, such as DB2, Sybase, Oracle, or the like. A skilled artisan can readily adapt any number of data processor structuring formats (e.g. text file or database) in order to obtain computer readable medium having recorded thereon the nucleotide sequence information of the present invention.

[0370] By providing any of the nucleotide sequences 748 SEQ ID NO: 1-45,207, 752 SEQ ID NO: 1-13,203, 778 SEQ ID NO: 1-105, 779 SEQ ID NO: 1-128, 782 SEQ ID NO: 1-10,451, 784 SEQ ID NO: 1-10,289, 785 SEQ ID NO: 1-3796, 787 SEQ ID NO: 1-10,410, 788 SEQ ID NO: 1-14,074, 789 SEQ ID NO: 1-6391, 790 SEQ ID NO: 1-30,533, 791 SEQ ID NO: 1-5822, and 792 SEQ ID NO: 1-8502 or a representative fragment thereof; or a nucleotide sequence at least 95% identical to any of the nucleotide sequences of 748 SEQ ID NO: 1-45,207, 752 SEQ ID NO: 1-13,203, 778 SEQ ID NO: 1-105, 779 SEQ ID NO: 1-128, 782 SEQ ID NO: 1-10,451, 784 SEQ ID NO: 1-10,289, 785 SEQ ID NO: 1-3796, 787 SEQ ID NO: 1-10,410, 788 SEQ ID NO: 1-14,074, 789 SEQ ID NO: 1-6391, 790 SEQ ID NO: 1-30,533, 791 SEQ ID NO: 1-5822, and 792 SEQ ID NO: 1-8502 in computer readable form, a skilled artisan can routinely access the sequence information for a variety of purposes. Computer software is publicly available which allows a skilled artisan to access sequence information provided in a computer readable medium. The examples which follow demonstrate how software which implements the BLAST (Altschul et al. J. Mol. Biol. 215:403-410 (1990)) and BLAZE (Brutlag et al. Comp. Chem. 17:203-207 (1993)) search algorithms on a Sybase system is used to identify open reading frames (ORFs) within a nucleic acid sequence. Such ORFs may be protein encoding fragments and may be useful in producing commercially important proteins such as enzymes used in fermentation reactions and in the production of commercially useful metabolites.

[0371] As used herein, “a computer-based system” refers to the hardware means, software means, and data storage means used to analyze the nucleotide sequence information of the present invention. The minimum hardware means of the computer-based systems of the present invention comprises a central processing unit (CPU), input means, output means, and data storage means. A skilled artisan can readily appreciate that any one of the currently available computer-based systems are suitable for use in the present invention. As stated above, the computer-based systems of the present invention comprise a data storage means having stored therein a nucleotide sequence of the present invention and the necessary hardware means and software means for supporting and implementing a search means. As used herein, “data storage means” refers to memory which can store nucleotide sequence information of the present invention, or a memory access means which can access manufactures having recorded thereon the nucleotide sequence information of the present invention.

[0372] As used herein, “search means” refers to one or more programs which are implemented on the computer-based system to compare a target sequence or target structural motif with the sequence information stored within the data storage means. Search means are used to identify fragments or regions of a known sequence which match a particular target sequence or target motif. A variety of known algorithms are disclosed publicly and a variety of commercially available software for conducting search means are and can be used in the computer-based systems of the present invention. Examples of such software includes, but is not limited to, Smith-Waterman, MacPattern (EMBL), BLASTN and BLASTA (NPOLYPEPTIDEIA). A skilled artisan can readily recognize that any one of the available algorithms or implementing software packages for conducting homology searches can be adapted for use in the present computer-based systems. As used herein, a “target sequence” can be any nucleic acid or amino acid sequence of six or more nucleotides or two or more amino acids. A skilled artisan can readily recognize that the longer a target sequence is, the less likely a target sequence will be present as a random occurrence in the database. The most preferred sequence length of a target sequence is from about 10 to 300 amino acids, more preferably from about 30 to 100 nucleotide residues. However, it is well recognized that searches for commercially important fragments, such as sequence fragments involved in gene expression and protein processing, may be of shorter length.

[0373] As used herein, “a target structural motif,” or “target motif,” refers to any rationally selected sequence or combination of sequences in which the sequence(s) are chosen based on a three-dimensional configuration which is formed upon the folding of the target motif. There are a variety of target motifs known in the art. Protein target motifs include, but are not limited to, enzyme active sites and signal sequences. Nucleic acid target motifs include, but are not limited to, promoter sequences, hairpin structures and inducible expression elements (protein binding sequences).

[0374] 5.15 Triple Helix Formation

[0375] In addition, the fragments of the present invention, as broadly described, can be used to control gene expression through triple helix formation or antisense DNA or RNA, both of which methods are based on the binding of a polynucleotide sequence to DNA or RNA. Polynucleotides suitable for use in these methods are preferably 20 to 40 bases in length and are designed to be complementary to a region of the gene involved in transcription (triple helix—see Lee et al. Nucl. Acids Res. 6:3073 (1979); Cooney et al. Science 15241:456 (1988); and Dervan et al. Science 251:1360 (1991)) or to the mRNA itself (antisense—Olmno, J. Neurochem. 56:560 (1991); Oligodeoxynucleotides as Antisense Inhibitors of Gene Expression, CRC Press, Boca Raton, Fla. (1988)). Triple helix-formation optimally results in a shut-off of RNA transcription from DNA, while antisense RNA hybridization blocks translation of an mRNA molecule into polypeptide. Both techniques have been demonstrated to be effective in model systems. Information contained in the sequences of the present invention is necessary for the design of an antisense or triple helix oligonucleotide.

[0376] 5.16 Diagnostic Assays and Kits

[0377] The present invention further provides methods to identify the presence or expression of one of the ORFs of the present invention, or homolog thereof, in a test sample, using a nucleic acid probe or antibodies of the present invention, optionally conjugated or otherwise associated with a suitable label.

[0378] In general, methods for detecting a polynucleotide of the invention can comprise contacting a sample with a compound that binds to and forms a complex with the polynucleotide for a period sufficient to form the complex, and detecting the complex, so that if a complex is detected, a polynucleotide of the invention is detected in the sample. Such methods can also comprise contacting a sample under stringent hybridization conditions with nucleic acid primers that anneal to a polynucleotide of the invention under such conditions, and amplifying annealed polynucleotides, so that if a polynucleotide is amplified, a polynucleotide of the invention is detected in the sample.

[0379] In general, methods for detecting a polypeptide of the invention can comprise contacting a sample with a compound that binds to and forms a complex with the polypeptide for a period sufficient to form the complex, and detecting the complex, so that if a complex is detected, a polypeptide of the invention is detected in the sample.

[0380] In detail, such methods comprise incubating a test sample with one or more of the antibodies or one or more of the nucleic acid probes of the present invention and assaying for binding of the nucleic acid probes or antibodies to components within the test sample.

[0381] Conditions for incubating a nucleic acid probe or antibody with a test sample vary. Incubation conditions depend on the format employed in the assay, the detection methods employed, and the type and nature of the nucleic acid probe or antibody used in the assay. One skilled in the art will recognize that any one of the commonly available hybridization, amplification or immunological assay formats can readily be adapted to employ the nucleic acid probes or antibodies of the present invention. Examples of such assays can be found in Chard, T., An Introduction to Radioimmunoassay and Related Techniques, Elsevier Science Publishers, Amsterdam, The Netherlands (1986); Bullock, G. R. et al. Techniques in Immunocytochemistry, Academic Press, Orlando, Fla. Vol. 1 (1982), Vol. 2 (1983), Vol. 3 (1985); Tijssen, P., Practice and Theory of immunoassays: Laboratory Techniques in Biochemistry and Molecular Biology, Elsevier Science Publishers, Amsterdam, The Netherlands (1985). The test samples of the present invention include cells, protein or membrane extracts of cells, or biological fluids such as sputum, blood, serum, plasma, or urine. The test sample used in the above-described method will vary based on the assay format, nature of the detection method and the tissues, cells or extracts used as the sample to be assayed. Methods for preparing protein extracts or membrane extracts of cells are well known in the art and can be readily be adapted in order to obtain a sample which is compatible with the system utilized.

[0382] In another embodiment of the present invention, kits are provided which contain the necessary reagents to carry out the assays of the present invention. Specifically, the invention provides a compartment kit to receive, in close confinement, one or more containers which comprises: (a) a first container comprising one of the probes or antibodies of the present invention; and (b) one or more other containers comprising one or more of the following: wash reagents, reagents capable of detecting presence of a bound probe or antibody.

[0383] In detail, a compartment kit includes any kit in which reagents are contained in separate containers. Such containers include small glass containers, plastic containers or strips of plastic or paper. Such containers allows one to efficiently transfer reagents from one compartment to another compartment such that the samples and reagents are not cross-contaminated, and the agents or solutions of each container can be added in a quantitative fashion from one compartment to another. Such containers will include a container which will accept the test sample, a container which contains the antibodies used in the assay, containers which contain wash reagents (such as phosphate buffered saline, Tris-buffers, etc.), and containers which contain the reagents used to detect the bound antibody or probe. Types of detection reagents include labeled nucleic acid probes, labeled secondary antibodies, or in the alternative, if the primary antibody is labeled, the enzymatic, or antibody binding reagents which are capable of reacting with the labeled antibody. One skilled in the art will readily recognize that the disclosed probes and antibodies of the present invention can be readily incorporated into one of the established kit formats which are well known in the art.

[0384] 5.17 Medical Imaging

[0385] The novel polypeptides and binding partners of the invention are useful in medical imaging of sites expressing the molecules of the invention (e.g., where the polypeptide of the invention is involved in the immune response, for imaging sites of inflammation or infection). See, e.g., Kunkel et al. U.S. Pat. No. 5,413,778. Such methods involve chemical attachment of a labeling or imaging agent, administration of the labeled polypeptide to a subject in a pharmaceutically acceptable carrier, and imaging the labeled polypeptide in vivo at the target site.

[0386] 5.18 Screening Assays

[0387] Using the isolated proteins and polynucleotides disclosed herein, the present invention further provides methods of obtaining and identifying agents which bind to a polypeptide encoded by an ORF corresponding to any of the nucleotide sequences set forth in 748 SEQ ID NO: 1-45,207, 752 SEQ ID NO: 1-13,203, 778 SEQ ID NO: 1-105, 779 SEQ ID NO: 1-128, 782 SEQ ID NO: 1-10,451, 784 SEQ ID NO: 1-10,289, 785 SEQ ID NO: 1-3796, 787 SEQ ID NO: 1-10,410, 788 SEQ ID NO: 1-14,074, 789 SEQ ID NO: 1-6391, 790 SEQ ID NO: 1-30,533, 791 SEQ ID NO: 1-5822, and 792 SEQ ID NO: 1-8502, or bind to a specific domain of the polypeptide encoded by the nucleic acid. In detail, said method comprises the steps of:

[0388] (a) contacting an agent with an isolated protein encoded by an ORF of the present invention, or nucleic acid of the invention; and

[0389] (b) determining whether the agent binds to said protein or said nucleic acid.

[0390] In general, therefore, such methods for identifying compounds that bind to a polynucleotide of the invention can comprise contacting a compound with a polynucleotide of the invention for a time sufficient to form a polynucleotide/compound complex, and detecting the complex, so that if a polynucleotide/compound complex is detected, a compound that binds to a polynucleotide of the invention is identified.

[0391] Likewise, in general, therefore, such methods for identifying compounds that bind to a polypeptide of the invention can comprise contacting a compound with a polypeptide of the invention for a time sufficient to form a polypeptide/compound complex, and detecting the complex, so that if a polypeptide/compound complex is detected, a compound that binds to a polynucleotide of the invention is identified.

[0392] Methods for identifying compounds that bind to a polypeptide of the invention can also comprise contacting a compound with a polypeptide of the invention in a cell for a time sufficient to form a polypeptide/compound complex, wherein the complex drives expression of a receptor gene sequence in the cell, and detecting the complex by detecting reporter gene sequence expression, so that if a polypeptide/compound complex is detected, a compound that binds a polypeptide of the invention is identified.

[0393] Compounds identified via such methods can include compounds which modulate the activity of a polypeptide of the invention (that is, increase or decrease its activity, relative to activity observed in the absence of the compound). Alternatively, compounds identified via such methods can include compounds which modulate the expression of a polynucleotide of the invention (that is, increase or decrease expression relative to expression levels observed in the absence of the compound). Compounds, such as compounds identified via the methods of the invention, can be tested using standard assays well known to those of skill in the art for their ability to modulate activity/expression.

[0394] The agents screened in the above assay can be, but are not limited to, peptides, carbohydrates, vitamin derivatives, or other pharmaceutical agents. The agents can be selected and screened at random or rationally selected or designed using protein modeling techniques.

[0395] For random screening, agents such as peptides, carbohydrates, pharmaceutical agents and the like are selected at random and are assayed for their ability to bind to the protein encoded by the ORF of the present invention. Alternatively, agents may be rationally selected or designed. As used herein, an agent is said to be “rationally selected or designed” when the agent is chosen based on the configuration of the particular protein. For example, one skilled in the art can readily adapt currently available procedures to generate peptides, pharmaceutical agents and the like, capable of binding to a specific peptide sequence, in order to generate rationally designed antipeptide peptides, for example see Hurby et al. Application of Synthetic Peptides: Antisense Peptides,” In Synthetic Peptides, A User's Guide, W.H. Freeman, NY (1992), pp. 289-307, and Kaspczak et al. Biochemistry 28:9230-8 (1989), or pharmaceutical agents, or the like.

[0396] In addition to the foregoing, one class of agents of the present invention, as broadly described, can be used to control gene expression through binding to one of the ORFs or EMFs of the present invention. As described above, such agents can be randomly screened or rationally designed/selected. Targeting the ORF or EMF allows a skilled artisan to design sequence specific or element specific agents, modulating the expression of either a single ORF or multiple ORFs which rely on the same EMF for expression control. One class of DNA binding agents are agents which contain base residues which hybridize or form a triple helix formation by binding to DNA or RNA. Such agents can be based on the classic phosphodiester, ribonucleic acid backbone, or can be a variety of sulfhydryl or polymeric derivatives which have base attachment capacity.

[0397] Agents suitable for use in these methods preferably contain 20 to 40 bases and are designed to be complementary to a region of the gene involved in transcription (triple helix—see Lee et al. Nucl. Acids Res. 6:3073 (1979); Cooney et al. Science 241:456 (1988); and Dervan et al. Science 251:1360 (1991)) or to the mRNA itself (antisense—Okano, J. Neurochem. 56:560 (1991); Oligodeoxynucleotides as Antisense Inhibitors of Gene Expression, CRC Press, Boca Raton, Fla. (1988)). Triple helix-formation optimally results in a shut-off of RNA transcription from DNA, while antisense RNA hybridization blocks translation of an mRNA molecule into polypeptide. Both techniques have been demonstrated to be effective in model systems. Information contained in the sequences of the present invention is necessary for the design of an antisense or triple helix oligonucleotide and other DNA binding agents.

[0398] Agents which bind to a protein encoded by one of the ORFs of the present invention can be used as a diagnostic agent. Agents which bind to a protein encoded by one of the ORFs of the present invention can be formulated using known techniques to generate a pharmaceutical composition.

[0399] 5.19 Use of Nucleic Acids as Probes

[0400] Another aspect of the present invention is to provide for polypeptide-specific nucleic acid hybridization probes capable of hybridizing with naturally occurring nucleotide sequences. The hybridization probes of the subject invention may be derived from any of the nucleotide sequences 748 SEQ ID NO: 1-45,207, 752 SEQ ID NO: 1-13,203, 778 SEQ ID NO: 1-105, 779 SEQ ID NO: 1-128, 782 SEQ ID NO: 1-10,451, 784 SEQ ID NO: 1-10,289, 785 SEQ ID NO: 1-3796, 787 SEQ ID NO: 1-10,410, 788 SEQ ID NO: 1-14,074, 789 SEQ ID NO: 1-6391, 790 SEQ ID NO: 1-30,533, 791 SEQ ID NO: 1-5822, and 792 SEQ ID NO: 1-8502. Because the corresponding gene is only expressed in a limited number of tissues, a hybridization probe derived from of any of the nucleotide sequences 748 SEQ ID NO: 1-45,207, 752 SEQ ID NO: 1-13,203, 778 SEQ ID NO: 1-105, 779 SEQ ID NO: 1-128, 782 SEQ ID NO: 1-10,451, 784 SEQ ID NO: 1-10,289, 785 SEQ ID NO: 1-3796, 787 SEQ ID NO: 1-10,410, 788 SEQ ID NO: 1-14,074, 789 SEQ ID NO: 1-6391, 790 SEQ ID NO: 1-30,533, 791 SEQ ID NO: 1-5822, and 792 SEQ ID NO: 1-8502 can be used as an indicator of the presence of RNA of cell type of such a tissue in a sample.

[0401] Any suitable hybridization technique can be employed, such as, for example, in situ hybridization. PCR as described in U.S. Pat. Nos. 4,683,195 and 4,965,188 provides additional uses for oligonucleotides based upon the nucleotide sequences. Such probes used in PCR may be of recombinant origin, may be chemically synthesized, or a mixture of both. The probe will comprise a discrete nucleotide sequence for the detection of identical sequences or a degenerate pool of possible sequences for identification of closely related genomic sequences.

[0402] Other means for producing specific hybridization probes for nucleic acids include the cloning of nucleic acid sequences into vectors for the production of mRNA probes. Such vectors are known in the art and are commercially available and may be used to synthesize RNA probes in vitro by means of the addition of the appropriate RNA polymerase as T7 or SP6 RNA polymerase and the appropriate radioactively labeled nucleotides. The nucleotide sequences may be used to construct hybridization probes for mapping their respective genomic sequences. The nucleotide sequence provided herein may be mapped to a chromosome or specific regions of a chromosome using well known genetic and/or chromosomal mapping techniques. These techniques include in situ hybridization, linkage analysis against known chromosomal markers, hybridization screening with libraries or flow-sorted chromosomal preparations specific to known chromosomes, and the like. The technique of fluorescent in situ hybridization of chromosome spreads has been described, among other places, in Verma et al (1988) Human Chromosomes: A Manual of Basic Techniques, Pergamon Press, New York N.Y.

[0403] Fluorescent in situ hybridization of chromosomal preparations and other physical chromosome mapping techniques may be correlated with additional genetic map data. Examples of genetic map data can be found in the 1994 Genome Issue of Science (265:1981f). Correlation between the location of a nucleic acid on a physical chromosomal map and a specific disease (or predisposition to a specific disease) may help delimit the region of DNA associated with that genetic disease. The nucleotide sequences of the subject invention may be used to detect differences in gene sequences between normal, carrier or affected individuals.

[0404] 5.20 Preparation of Support Bound Oligonucleotides

[0405] Oligonucleotides, i.e., small nucleic acid segments, may be readily prepared from the sequences disclosed herein by, for example, directly synthesizing the oligonucleotide by chemical means, as is commonly practiced using an automated oligonucleotide synthesizer.

[0406] Support bound oligonucleotides may be prepared by any of the methods known to those of skill in the art using any suitable support such as glass, polystyrene or Teflon® (DuPont). One strategy is to precisely spot oligonucleotides synthesized by standard synthesizers. Immobilization can be achieved using passive adsorption (Inouye & Hondo, (1990) J. Clin. Microbiol. 28(6) 1469-72); using UV light (Nagata et al. 1985; Dahlen et al. 1987; Morrissey & Collins, (1989) Mol. Cell. Probes 3(2) 189-207) or by covalent binding of base modified DNA (Keller et al. 1988; 1989); all references being specifically incorporated herein.

[0407] Another strategy that may be employed is the use of the strong biotin-streptavidin interaction as a linker. For example, Broude et al. (1994) Proc. Natl. Acad. Sci. USA 91(8) 3072-6, describe the use of biotinylated probes, although these are duplex probes, that are immobilized on streptavidin-coated magnetic beads. Streptavidin-coated beads may be purchased from Dynal, Oslo. Of course, this same linking chemistry is applicable to coating any surface with streptavidin. Biotinylated probes may be purchased from various sources, such as, e.g., Operon Technologies (Alameda, Calif.).

[0408] Nunc Laboratories (Naperville, Ill.) is also selling suitable material that could be used. Nunc Laboratories have developed a method by which DNA can be covalently bound to the microwell surface termed Covalink NH. CovaLink NH is a polystyrene surface grafted with secondary amino groups (>NH) that serve as bridge-heads for further covalent coupling. CovaLink Modules may be purchased from Nunc Laboratories. DNA molecules may be bound to CovaLink exclusively at the 5′-end by a phosphoramidate bond, allowing immobilization of more than 1 pmol of DNA (Rasmussen et al. (1991) Anal. Biochem. 198(1) 138-42).

[0409] The use of CovaLink NH strips for covalent binding of DNA molecules at the 5′-end has been described (Rasmussen et al. (1991). In this technology, a phosphoramidate bond is employed (Chu et al. (1983) Nucleic Acids Res. 11(8) 6513-29). This is beneficial as immobilization using only a single covalent bond is preferred. The phosphoramidate bond joins the DNA to the CovaLink NH secondary amino groups that are positioned at the end of spacer arms covalently grafted onto the polystyrene surface through a 2 nm long spacer arm. To link an oligonucleotide to CovaLink NH via an phosphoramidate bond, the oligonucleotide terminus must have a 5′-end phosphate group. It is, perhaps, even possible for biotin to be covalently bound to CovaLink and then streptavidin used to bind the probes.

[0410] More specifically, the linkage method includes dissolving DNA in water (7.5 ng/ul) and denaturing for 10 min. at 95° C. and cooling on ice for 10 min. Ice-cold 0.1 M 1-methylimidazole, pH 7.0 (1-MeIm₇), is then added to a final concentration of 10 mM 1-MeIm₇. A ss DNA solution is then dispensed into CovaLink NH strips (75 ul/well) standing on ice.

[0411] Carbodiimide 0.2 M 1-ethyl-3-(3-dimethylaminopropyl)-carbodiimide (EDC), dissolved in 10 mM 1-MeIm₇, is made fresh and 25 ul added per well. The strips are incubated for 5 hours at 50° C. After incubation the strips are washed using, e.g., Nunc-Immuno Wash; first the wells are washed 3 times, then they are soaked with washing solution for 5 min., and finally they are washed 3 times (where in the washing solution is 0.4 N NaOH, 0.25% SDS heated to 50° C.).

[0412] It is contemplated that a further suitable method for use with the present invention is that described in PCT Patent Application WO 90/03382 (Southern & Maskos), incorporated herein by reference. This method of preparing an oligonucleotide bound to a support involves attaching a nucleoside 3′-reagent through the phosphate group by a covalent phosphodiester link to aliphatic hydroxyl groups carried by the support. The oligonucleotide is then synthesized on the supported nucleoside and protecting groups removed from the synthetic oligonucleotide chain under standard conditions that do not cleave the oligonucleotide from the support. Suitable reagents include nucleoside phosphoramidite and nucleoside hydrogen phosphorate.

[0413] An on-chip strategy for the preparation of DNA probe for the preparation of DNA probe arrays may be employed. For example, addressable laser-activated photodeprotection may be employed in the chemical synthesis of oligonucleotides directly on a glass surface, as described by Fodor et al. (1991) Science 251(4995) 767-73, incorporated herein by reference. Probes may also be immobilized on nylon supports as described by Van Ness et al. (1991) Nucleic Acids Res. 19(12) 3345-50; or linked to Teflon using the method of Duncan & Cavalier (1988) Anal. Biochem. 169(1) 104-8; all references being specifically incorporated herein.

[0414] To link an oligonucleotide to a nylon support, as described by Van Ness et al. (1991), requires activation of the nylon surface via alkylation and selective activation of the 5′-amine of oligonucleotides with cyanuric chloride.

[0415] One particular way to prepare support bound oligonucleotides is to utilize the light-generated synthesis described by Pease et al. (1994) PNAS USA 91(11) 5022-6, incorporated herein by reference). These authors used current photolithographic techniques to generate arrays of immobilized oligonucleotide probes (DNA chips). These methods, in which light is used to direct the synthesis of oligonucleotide probes in high-density, miniaturized arrays, utilize photolabile 5′-protected N-acyl-deoxynucleoside phosphoramidites, surface linker chemistry and versatile combinatorial synthesis strategies. A matrix of 256 spatially defined oligonucleotide probes may be generated in this manner.

[0416] 5.21 Preparation of Nucleic Acid Fragments

[0417] The nucleic acids may be obtained from any appropriate source, such as cDNAs, genomic DNA, chromosomal DNA, microdissected chromosome bands, cosmid or YAC inserts, and RNA, including mRNA without any amplification steps. For example, Sambrook et al. (1989) describes three protocols for the isolation of high molecular weight DNA from mammalian cells (p. 9.14-9.23).

[0418] DNA fragments may be prepared as clones in M13, plasmid or lambda vectors and/or prepared directly from genomic DNA or cDNA by PCR or other amplification methods. Samples may be prepared or dispensed in multiwell plates. About 100-1000 ng of DNA samples may be prepared in 2-500 ml of final volume.

[0419] The nucleic acids would then be fragmented by any of the methods known to those of skill in the art including, for example, using restriction enzymes as described at 9.24-9.28 of Sambrook et al. (1989), shearing by ultrasound and NaOH treatment.

[0420] Low pressure shearing is also appropriate, as described by Schriefer et al. (1990) Nucleic Acids Res. 18(24) 7455-6, incorporated herein by reference). In this method, DNA samples are passed through a small French pressure cell at a variety of low to intermediate pressures. A lever device allows controlled application of low to intermediate pressures to the cell. The results of these studies indicate that low-pressure shearing is a useful alternative to sonic and enzymatic DNA fragmentation methods.

[0421] One particularly suitable way for fragmenting DNA is contemplated to be that using the two base recognition endonuclease, CviJI, described by Fitzgerald et al. (1992) Nucleic Acids Res. 20(14) 3753-62. These authors described an approach for the rapid fragmentation and fractionation of DNA into particular sizes that they contemplated to be suitable for shotgun cloning and sequencing.

[0422] The restriction endonuclease CviJI normally cleaves the recognition sequence PuGCPy between the G and C to leave blunt ends. Atypical reaction conditions, which alter the specificity of this enzyme (CviJI**), yield a quasi-random distribution of DNA fragments form the small molecule pUC19 (2688 base pairs). Fitzgerald et al. (1992) quantitatively evaluated the randomness of this fragmentation strategy, using a CviJI** digest of pUC19 that was size fractionated by a rapid gel filtration method and directly ligated, without end repair, to a lac Z minus M13 cloning vector. Sequence analysis of 76 clones showed that CviJI** restricts pyGCPy and PuGCPu, in addition to PuGCPy sites, and that new sequence data is accumulated at a rate consistent with random fragmentation.

[0423] As reported in the literature, advantages of this approach compared to sonication and agarose gel fractionation include: smaller amounts of DNA are required (0.2-0.5 μg instead of 2-5 μg); and fewer steps are involved (no preligation, end repair, chemical extraction, or agarose gel electrophoresis and elution are needed

[0424] Irrespective of the manner in which the nucleic acid fragments are obtained or prepared, it is important to denature the DNA to give single stranded pieces available for hybridization. This is achieved by incubating the DNA solution for 2-5 minutes at 80-90° C. The solution is then cooled quickly to 2° C. to prevent renaturation of the DNA fragments before they are contacted with the chip. Phosphate groups must also be removed from genomic DNA by methods known in the art.

[0425] 5.22 Preparation of DNA Arrays

[0426] The nucleic acid sequences disclose herein can be used to create arrays. Arrays may be prepared by spotting DNA samples on a support such as a nylon membrane. Spotting may be performed by using arrays of metal pins (the positions of which correspond to an array of wells in a microtiter plate) to repeated by transfer of about 20 nl of a DNA solution to a nylon membrane. By offset printing, a density of dots higher than the density of the wells is achieved. One to 25 dots may be accommodated in 1 mm², depending on the type of label used. By avoiding spotting in some preselected number of rows and columns, separate subsets (subarrays) may be formed. Samples in one subarray may be the same genomic segment of DNA (or the same gene) from different individuals, or may be different, overlapped genomic clones. Each of the subarrays may represent replica spotting of the same samples. In one example, a selected gene segment may be amplified from 64 patients. For each patient, the amplified gene segment may be in one 96-well plate (all 96 wells containing the same sample). A plate for each of the 64 patients is prepared. By using a 96-pin device, all samples may be spotted on one 8×12 cm membrane. Subarrays may contain 64 samples, one from each patient. Where the 96 subarrays are identical, the dot span may be 1 mm² and there may be a 1 mm space between subarrays.

[0427] Another approach is to use membranes or plates (available from NUNC, Naperville, Ill.) which may be partitioned by physical spacers e.g. a plastic grid molded over the membrane, the grid being similar to the sort of membrane applied to the bottom of multiwell plates, or hydrophobic strips. A fixed physical spacer is not preferred for imaging by exposure to flat phosphor-storage screens or x-ray films.

[0428] 5.23 Preparation of a Universal Set of Probes

[0429] The nucleic acid sequences disclosed herein may be used to design universal hybidization probes for detecting genetic markers. Two types of universal sets of probes may be prepared. The first is a complete set (or at least a noncomplementary subset) of relatively short probes, for example all 4096 (or about 2000 non-complementary) 6-mers, or all 16,384 (or about 8,000 non-complementary) 7-mers. Full noncomplementary subsets of 8-mers and longer probes are less convenient inasmuch as they include 32,000 or more probes.

[0430] A second type of probe set is selected as a small subset of probes still sufficient for reading every bp in any sequence with at least with one probe. For example, 12 of 16 dimers are sufficient. A small subset for 7-mers, 8-mer and 9-mers for sequencing double stranded DNA may be about 3000, 10,000 and 30,000 probes, respectively.

[0431] Probes may be prepared using standard chemistry with one to three non-specified (mixed A, T, C and El) or universal (e.g. M base or inosine) bases at the ends. If radiolabelling is used, probes may have an OH group at the 5′ end for kinasing by radiolabelled phosphorous groups. Alternatively, probes labelled with any compatible system, such as fluorescent dyes, may be employed. Other types of probes, such as PNA (Protein Nucleic Acids) or probes containing modified bases which change duplex stability also may be used.

[0432] Probes may be stored in bar-coded multiwell plates. For small numbers of probes, 96-well plates may be used; for 10,000 or more probes, storage in 384- or 864-well plates is preferred. Stacks of 5 to 50 plates are enough to store all probes. Approximately 5 pg of a probe may be sufficient for hybridization with one DNA sample. Thus, from a small synthesis of about 50 mg per probe, ten million samples may be analyzed. If each probe is used for every third sample, and if each sample is 1000 bp in length, then over 30 billion bases (10 human genomes) may be sequenced by a set of 5,000 probes.

[0433] 5.24 Probes Having Modified Oligonucleotides

[0434] Modified oligonucleotides may be introduced into hybridization probes described in section 5.23 and used under appropriate conditions therefor. For example, pyrimidines with a halogen at the C5-position may be used to improve duplex stability by influencing base stacking.

[0435] 2,6-diaminopurine may be used to provide a third hydrogen bond in base pairing with thymine, thereby thermally stabilizing DNA-duplexes. Using 2,5-diaminopurine may increase duplex stability to allow more stringent conditions for annealing, thereby improving the specificity of duplex formation, suppressing background problems and permitting the use of shorter oligomers. The synthesis of the triphosphate versions of these modified nucleotides is disclosed by Hoheisel & Lehrach (1990).

[0436] One may also use the non-discriminatory base analogue, or universal base, designed by Nichols et. al., (1994). This new analogue, 1-(2-deoxy-10-D-ribftzranosyl)-3-nitropyrrole ignated M), was generated for use in oligonucleotide probes and primers for solving the design problems that arise as a result of the degeneracy of the genetic code, or when only fragmentary peptide sequence data are available. This analogue maximizes stacking while minimizing hydrogen-bonding interactions without sterically disrupting a DNA duplex.

[0437] The M nucleoside analogue was designed to maximize stacking interactions using aprotic polar substituents linked to heteroaromatic rings, enhancing intra- and inter-stand stacking interactions to lessen the role of hydrogen bonding in base-pairing specificity. Nichols et al. (1994) favored 3-nitropyrrole2-deoxyribonucleoside because of its structural and electronic resemblance to p-nitroaniline, whose derivatives are among the smallest known intercaltors of double-stranded DNA.

[0438] The dimethoxytrityl-protected phosphoramidite of nucleoside M is also available for incorporation into nucleotides used as primers for sequencing and polymerase chain reaction (PCR). Nichols et. al., (1994) showed that a substantial number of nucleotides can be replaced by M without loss of primer specificity.

[0439] A unique property of M is its ability to replace long strings of contiguous nucleosides and still yield functional sequencing primers. Sequences with three, six and nine M substitutions have all been reported to give readable sequencing ladders, and PCR with three different M-containing primers all resulted in amplification of the correct product (Nichols et. al., 1994).

[0440] Probes may be retrieved one by one and added to subarrays covered by hybridization buffer. It is preferred that retrieved probes be placed in a new plate and labelled or mixed with hybridization buffer. The preferred method of retrieval is by accessing stored plates one by one and pipetting (or transferring by metal pins) a sufficient amount of each selected probe from each plate to specific wells in an intermediary plate. An array of individually addressable pipettes or pins may be used to speed up the retrieval process.

[0441] 5.25 Preparation of Labeled Probes

[0442] The oligonucleotide probes may be prepared by automated synthesis, which is routine to those of skill in the art, for example, using and Applied Biosystems system. Alternatively, probes may be prepared using Genosys Biotechnologies Inc. Methods using stacks of porous Teflon wafers.

[0443] Oligonucleotide probes may be labeled with, for example, radioactive labels (³⁵S, ³²P, and preferably, ³³P) for arrays with 100-200 μm or 100-400 μm spots; non-radioactive isotopes (Jacobsen et al. 1990); or fluorophores (Brumbaugh et al. 1988). All such labeling methods are routine in the art, as exemplified by the relevant sections in Sambrook et al. (1989) and by further references such as Schubert et al. (1990), Murakami et al. (1991) and Cate et al. (1991), all articles being specifically incorporated herein by reference.

[0444] In regard to radiolabelling, the common methods are end-labeling using T4 polynucleotide kinase or high specific activity labeling using Klenow or even T7 polymerase. These are described as follows.

[0445] Synthetic oligonucleotides are synthesized without a phosphate group at their 5′ termini and are therefore easily labeled by transfer of the ³²P or ³³P from [³²P]ATP or [³³P]ATP using the enzyme bacteriophage T4 polynucleotide kinase. If the reaction is carried out efficiently, the specificity activity of such probes can be as high as the specific activity of the [³²P]ATP or [³³ P]ATP itself. The reaction described below is designed to label 10 pmoles of an oligonucleotide to high specific activity. Labeling of different amounts of oligonucleotide can easily be achieved by increasing or decreasing the size of the reaction, keeping the concentrations of all components constant.

[0446] A reaction mixture would be created using 1.0 μl of oligonucleotide (10 pmoles/μl); 2.0 μl of 10× bacteriophage T4 polynucleotide kinase buffer; 5.0 μl of [-³²P]ATP or [³³P]ATP (sp. act. 5000 Ci/mmole; 10 mCi/ml in aqueous solution) (10 pmoles); and 11.4 μl of water. Eight (8) units (10 u/μl 1) of bacteriophagT4 polynucleotide kinase is added to the reaction mixture, mixed well, and incubated for 45 minutes at 37° C. The reaction is heated for 10 minutes at 68° C. to inactivate the bacteriophage T4 polynucleotide kinase.

[0447] The efficiency of transfer of ³²P or ³³P to the oligonucleotide and its specific activity is then determined. If the specific activity of the probe is acceptable, it is purified. If the specific activity is too low, an additional 8 units of enzyme is added and incubated for a further 30 minutes at 37° C. before heating the reaction for 10 minutes at 68° C. to inactivate the enzyme.

[0448] Purification of radiolabeled oligonucleotides can be achieved by precipitation with thanol; precipitation with cetylpyridinium bromide; by chromatography through Bio-gel P-60; or by chromatography on a Sep-Pak C₁₈ column (Pharmacia).

[0449] Probes of higher specific activities can be obtained using the Klenow fragment of E. coli DNA polymerase I to synthesize a strand of DNA complementary to the synthetic oligonucleotide. A short primer is hybridized to an oligonucleotide template whose sequence is the complement of the desired radiolabeled probe. The primer is then extended using the Klenow fragment of E. coli DNA polymerase I to incorporate [-³²P] dNTPs or [-³³P] dNTPs in a template-directed manner. After the reaction, the template and product are separated by denaturation followed by electrophoresis through a polyacrylamide gel under denaturing conditions. With this method, it is possible to generate oligonucleotide probes that contain several radioactive atoms per molecule of oligonucleotide if desired.

[0450] To use this method, one would mix in a microfuge tube the calculated amounts of [(α-³²P]dNTP's or [α-³³ P]dNTP's necessary to achieve the desired specific activity and sufficient to allow complete synthesis of all template strands. The concentration of dNTPs should not be less than IμM at any stage during the reaction. Then add to the tube the appropriate amounts of primer and template DNAs, with the primer being in three- to tenfold molar excess over the template.

[0451] Klenow buffer is then added and mixed well. 2-4 units of the Klenow fragment of E. coli DNA polymerase I would then be added per 5 μl of reaction volume, mixed and incubated for 2-3 hours at 4° C. If desired, the process of the reaction may be monitored by removing small (0.1 μl) aliquots and measuring the proportion of radioactivity that has become precipitable with 10% trichloroacetic acid (TCA).

[0452] The reaction would be diluted with an equal volume of gel-loading buffer, heated to 80° C. for 3 minutes, and then the entire sample loaded on a denaturing polyacrylamide gel. Following electrophoresis, the gel is autoradiographed, allowing the probe to be localized and removed from the gel. Various methods for fluorphoric labeling are also available, as follows. Brumbaugh et al. (1988) describe the synthesis of fluorescently labeled primers. A deoxyuridine analog with a primary amine “linker arm,” of 12 atoms attached at C—S is synthesized. Synthesis of the analog consists of derivatizing 2-deoxyuridine through organometallic-intermediates to give 5 (methylpropenoyl)-2-deoxyuridine. Reaction dimethoxytrityl-chloride produces the corresponding 5-dimethoxytrityl adduct. The methyl ester is hydrolyzed, activated, and reacted with an appropriately monoacylated 1diamine. After purification, the resultant linker arm nucleosides are converted to nucleoside analogs suitable for chemical oligonucleotide synthesis.

[0453] Oligonucleotides would then be made that include one or two linker arm bases by using modified phosphoridite chemistry. To a solution of 50 nmol of the linker arm oligonucleotide in 25 μl of 500 mM sodium biocarbonate (pH 9.4) is added 20 ul of 300 mM FITC in dimethyl sulfoxide. The mixture is agitated at room temperature for 6 hrs. The oligonucleotide is separated from free FITC by elution form a 1×30 cm Sephadex G-25 column with 20 mM ammonium acetate (pH 6), combining fractions in the first UV-absorbing peak.

[0454] In general, fluorescent labeling of an oligonucleotide at it s 5′-end initially involved two steps. First, a N-protected aminoalkyl phosphoramidite derivative is added to the 5′-end of an oligonucleotide during automated DNA synthesis. After removal of all protecting groups, the NHS ester of an appropriate fluorescent dye is coupled to the 5-amino group overnight followed by purification of the labeled oligonucleotide from the excess of dye using reverse phase HPLC or PAGE.

[0455] Schubert et al. (1990) describes the synthesis of a phosphoramidite that enables oligonucleotides labeled with fluorescent tags to be produced during automated DNA synthesis.

[0456] Murakami et al. also described the preparation of fluorescein-labeled oligonucleotides.

[0457] Cate et al. (1991) describes the use of oligonucleotide probes directly conjugated to alkaline phosphatase in combination with a direct chemiluminescent substrate (AMPPD) to allow probe detection.

[0458] Labeled probes could readily be purchased form a variety of commercial sources, including GENSET, rather then synthesized.

[0459] Other labels include ligands which can serve as specific binding members to a labeled antibody, chemiluminescers, enzymes, antibodies which can serve as a specific binding pair member for a labeled ligand, and the like. A wide variety of labels have been employed in immunoassays which can readily be employed. Still other labels include antigens, groups with specific reactivity, and electrochemically detectable moeities.

[0460] In general, labeling of nucleic acids with electrophore mass labels (“EML”) is described, for example, in Xu et al., J. Chromatography 764:95-102 (1997). Electrophores are compounds that can be detected with high sensitivity by electron capture mass spectrometry (EC-MS). EMLs can be attached to a probe using chemistry that is well known in the art for reversibly modifying a nucleotide (e.g., well known nucleotide synthesis chemistry teaches a variety of methods for attaching molecules to nucleotides as protecting groups). EMLs are detected using a variety of well known electron capture mass spectrometry devices (e.g., devices sold by Finnigan Corporation). Further, techniques that may be used in the detection of EMLs include, for example, fast atomic bombardment mass spectrometry (see, e.g., Koster et al., Biomedical Environ. Mass Spec. 14:111-116 (1987)); plasma desorption mass spectrometry; electrospray/ionspray (see, e.g., Fenn et al., J. Phys. Chem. 88:4451-59 (1984), PCI Appln. No. WO 90/14148, Smith cial., Anal. Chem. 62:882-89 (1990)); and matrix-assisted laser desorption/ionization (Hillenkamp, et al., “Matrix Assisted UV-Laser Desorption/Ionization: A New Approach to Mass Spectrometry of Large Biomolecules,” Biological Mass Spcciromctry (Burlingame and McCloskey, eds.), Elsevier Science Publishers, Amsterdam, pp. 49-60, 1990); Huth-Fehre et al., “Matrix Assisted Laser Desorption Mass Spectrometry of Oligodeoxythymidylic Acids,” Rapid Communications in Mass Spectrometry, 6:209-13 (1992)).

[0461] In preferred embodiments, the EMLs are attached to a probe by a covalent bond that is light sensitive. The EML is released from the probe after hybridization with a target nucleic acid by a laser or other light source emitting the desired wavelength of light. The EML is then fed into a GC-MS (gas chromatograph-mass spectrometer) or other appropriate device, and identified by its mass.

[0462] 5.26 Preparation of Sequencing Chips and Arrays

[0463] The nucleic acids of the present invention can be affixed to chips to create arrays. A basic example is using 6-mers attached to 50 micron surfaces to give a chip with dimensions of 3×3 mm which can be combined to give an array of 20×2020 cm. Another example is using 9-mer oligonucleotides attached to 10×10 micron surface to create a 9-mer chip, with dimensions of 5×5 mm. 4000 units of such chips may be used to create a 30×30 cm array. In one embodiment the nucleic acids comprise an oligochip array in which 4,000 to 16,000 oligochips are arranged into a square array. A plate, or collection of tubes, as also depicted, may be packaged with the array as part of the sequencing kit.

[0464] The arrays may be separated physically from each other or by hydrophobic surfaces. One possible way to utilize the hydrophobic strip separation is to use technology such as the Iso-Grid Microbiology System produced by QA Laboratories, Toronto, Canada.

[0465] Hydrophobic grid membrane filters (HGMF) have been in use in analytical food microbiology for about a decade where they exhibit unique attractions of extended numerical range and automated counting of colonies. One commercially-available grid is Iso-GRID™ from QA Laboratories Ltd. (Toronto, Canada) which consists of a square (60×60 cm) of polysulfone polymer (Gelman Tuffryn HT-450, 0.4 micron pore size) on which is printed a black hydrophobic ink grid consisting of 1600 (40×40) square cells. HCMF have previously been inoculated with bacterial suspensions by vacuum filtration and incubated on the differential or selective media of choice.

[0466] Because the microbial growth is confined to grid cells of known position and size on the membrane, the HGMF functions more like an MPN apparatus than a conventional plate or membrane filter. Peterkin et al. (1987) reported that these HGMFs can be used to propagate and store genomic libraries when used with a HGMF replicator. One such instrument replicates growth from each of the 1600 cells of the ISO-GRID and enables many copies of the master HGMF to be made (Peterkin et al., 1987).

[0467] Sharpe et al. (1989) also used ISO-GRID HGMF form QA Laboratories and an automated HGMF counter (MI-I 00 Interpreter) and RP-100 Replicator. They reported a technique for maintaining and screening many microbial cultures.

[0468] Peterkin and colleagues later described a method for screening DNA probes using the hydrophobic grid-membrane filter (Peterkin et al., 1989). These authors reported methods for effective colony hybridization directly on HGMFs. Previously, poor results had been obtained due to the low DNA binding capacity of the epoxysulfone polymer on which the HGMFs are printed: However, Peterkin et al. (1989) reported that the binding of DNA to the surface of the membrane was improved by treating the replicated and incubated HGMF with polyethyleneimine, a polycation, prior to contact with DNA. Although this early work uses cellular DNA attachment, and has a different objective to the present invention, the methodology described may be readily adapted for Format 3 SBH.

[0469] In order to identify useful sequences rapidly, Peterkin et al. (1989) used radiolabeled plasmid DNA from various clones and tested its specificity against the DNA on the prepared HGMFs. In this way, DNA from recombinant plasmids was rapidly screened by colony hybridization against 100 organisms on HGMF replicates which can be easily and reproducibly prepared. Manipulation with small (2-3 mm) chips, and parallel execution of thousands of the reactions. The solution of the invention is to keep the chips and the probes in the corresponding arrays. In one example, chips containing 250,000 9-mers are synthesized on a silicon wafer in the form of 8×8 mM plates (15 μM/oligonucleotide, Pease et al., 1994) arrayed in 8×12 format (96 chips) with a 1 mM groove in between. Probes are added either by multichannel pipette or pin array, one probe on one chip. To score all 4000 6-mers, 42 chip arrays have to be used, either using different ones, or by reusing one set of chip arrays several times. In the above case, using the earlier nomenclature of the application, F=9; P=6; and F+P=15. Chips may have probes of formula BₓNₙ, where x is a number of specified bases B; and n is a number of non-specified bases, so that x=4 to 10 and n=1 to 4. To achieve more efficient hybridization, and to avoid potential influence of any support oligonucleotides, the specified bases can be surrounded by unspecified bases, thus represented by a formula such as (N)ₙBₓ(N)ₘ.

[0470] 5.27 Hybridization and Scoring Process

[0471] Labeled probes may be mixed with hybridization buffer and pipetted, preferably by multichannel pipettes, to the subarrays. To prevent mixing of the probes between subarrays (if there are no hydrophobic strips or physical barriers imprinted in the membrane), a corresponding plastic, metal or ceramic grid may be firmly pressed to the membrane. Also, the volume of the buffer may be reduced to about 1 μl or less per mm². The concentration of the probes and hybridization conditions used may be as described previously except that the washing buffer may be quickly poured over the array of subarrays to allow fast dilution of probes and thus prevent significant cross-hybridization. For the same reason, a minimal concentration of the probes may be used and hybridization time extended to the maximal practical level. For DNA detection and sequencing, knowledge of a “normal” sequence allows the use of the continuous stacking interaction phenomenon to increase the signal. In addition to the labelled probe, additional unlabelled probes which hybridize back to back with a labelled one may be added in the hybridization reaction. The amount of the hybrid may be increased several times. The probes may be connected by ligation. This approach may be important for resolving DNA regions forming “compressions”.

[0472] In the case of radiolabelled probes, images of the filters may be obtained, preferably by phosphor storage technology. Fluorescent labels may be scored by CCD cameras, confocal microscopy or otherwise. In order to properly scale and integrate data from different hybridization experiments, raw signals are normalized based on the amount of target in each dot. Differences in the amount of target DNA per dot may be corrected for dividing signals of each probe by an average signal for all probes scored on one dot. The normalized signals may be scaled, usually from 1-100, to compare data from different experiments. Also, in each subarray, several control DNAs may be used to determine an average background signal in those samples which do not contain a full match target. For samples obtained from diploid (polyploid) scores, homozygotic controls may be used to allow recognition of heterozygotes in the samples.

[0473] 5.28 Hybridization with Oligonucleotides

[0474] Oligonucleotides were either purchased from Genosys Inc., Houston, Tex. or made on an Applied Biosystems 381A DNA synthesizer. Most of the probes used were not purified by HPLC or gel electrophoresis. For example, probes were designed to have both a single perfectly complementary target in interferon, a Ml3 clone containing a 921 bp Eco RI-Bgl II human BI-interferon fragment (Ohno and Tangiuchi, Proc. Natl. Acad. Sci. 74: 4370-4374 (1981)], and at least one target with an end base mismatch in Ml3 vector itself.

[0475] End labelling of oligonucleotides was performed as described (Maniatis et al., Molecular Cloning: A Laboratory Manual, Cold Spring Harbor Laboratory Cold Spring Harbor, N.Y. (1982)) in 10 μl containing T4-polynucleotide kinase (5 units Amersham), □²P-ATP (3.3 pM, 10 mCi Amersham 3000 Ci/mM) and the oligonucleotide (4 pM, 10 ng). Specific activities of the probes were 2.5−5×10⁹ cpm/nm.

[0476] Single stranded DNA (2 to 4 ml in 0.5 NaOH, 1.5 M NaCl) was spotted on a Gene Screen membrane wetted with the same solution, the filters were neutralized in 0.05 M Na₂HPO₄ pH 6.5, baked in an oven at 80° C. for 60 min, and UV irradiated for 1 min. Then, the filters were incubated in hybridization solution (0.5 M Na₂HPO₄ pH 7.2, 7% sodium lauroyl sarcosine for 5 min at room temperature and placed on the surface of a plastic Petri dish. A drop of hybridization solution (10 ml, 0.5 M Na₂HPO₄ pH 7.2, 7% sodium lauroyl sarcosine) with a 32ρ end-labeled oligomer probe at 4 nM concentration was placed over 1-6 dots per filter, overlaid with a square piece of polyethylene (approximately 1×1 cm.), and incubated in a moist chamber at the indicated temperatures for 3 hr. Hybridization was stopped by placing the filter in 6×SSC washing solution for 3 to 5 minutes at 0° C. to remove unhybridized probe. The filter was either dried, or further washed for the indicated times and temperatures, and autoradiographed. For discrimination measurements, the dots were excised from the dried filters after autoradiography (a phosphoimager (Molecular Dynamics, Sunnyvale, Calif.) may be used) placed in liquid scintillation cocktail and counted. The uncorrected ratio of cpms for IF and M13 dots is given as D.

[0477] The conditions reported herein allow hybridization with very short oligonucleotides but ensure discriminations between matched and mismatched oligonucleotides that are complementary to and therefore bind to a target nucleic acid. Factors which influence the efficient detection of hybridization of specific short sequences based on the degree of discriminations (D) between a perfectly complementary target and an imperfectly complementary target with a single mismatch in the hybrid are defined. In experimental tests, dot blot hybridization of twenty-eight probes that were 6 to 8 nucleotides in length to two M13 clones or to model oligonucleotides bound to membrane filters was accomplished. The principles guiding the experimental procedures are given below.

[0478] Oligonucleotide hybridization to filter bound target nucleic acids only a few nucleotides longer than the probe in conditions of probe excess is a pseudo-first order reaction with respect to target concentration. This reaction is defined by:

Sₜ/Sₒ=e−^{kh[OP]t}

[0479] Wherein Sₜ and Sₒ are target sequence concentrations at time t and t₀, respectively. (OP) is probe concentration and t is temperature. The rate constant for hybrid formation, kₕ increases only slightly in the 0° C. to 30° C. range (Porschke and Eigen, J. Mol. Biol. 62: 361 (1971); Craig et al. J Mol. Biol. 62: 383 (1971). Hybrid melting is a first order reaction with respect to hybrid concentration (here replaced by mass due to filter bound state) as shown in:

Hₜ/Hₒ=e^{-kmt}

[0480] In this equation, Hₜ and Hₒ are hybrid concentrations at times t and tₒ, respectively; kₘ is a rate constant for hybrid melting which is dependent on temperature and salt concentration (Ikuta et al. Nucl. Acids Res. 15: 797 (1987); Porsclike and Eigen, J. Mol. Biol. 62: 361 (1971); Craig et al. J. Mol. Biol. 62: 303 (1971)). During hybridization, which is a strand association process, the back, melting, or strand dissociation, reaction takes place as well. Thus, the amount of hybrid formed in time is result of forward and back reactions. The equilibrium may be moved towards hybrid formation by increasing probe concentration and/or decreasing temperature. However, during washing cycles in large volumes of buffer, the melting reaction is dominant and the back reaction hybridization is insignificant, since the probe is absent. This analysis indicates workable Short Oligonucleotide Hybridization (SOH) conditions call be varied for probe concentration or temperature.

[0481] D or discrimination is defined above:

D=Hₚ(t_{w})/Hᵢ(t_{w})

[0482] Hₚ(t_{w}) and Hᵢ(t_{w}) are the amounts hybrids remaining after a washing time, t_{w}, for the identical amounts of perfectly and imperfectly complementary duplex, respectively. For a given temperature, the discrimination D changes with the 10 length of washing time and reaches the maximal value when Hᵢ=B which is equation five.

[0483] The background, B, represents the lowest hybridization signal detectable in the system. Since any further decrease of Hᵢ may not be examined, D increases upon continued washing. Washing past t_{w} just decreases Hₚ relative to B, and is seen as a decrease in D. The optimal washing time, t_{w}, for imperfect hybrids, from equation three and equation five is:

t_{w}=ln (B/Hᵢ(t₀)/k_{m.i}

[0484] Since Hₚ is being washed for the same t_{w}, combining equations, one obtains the optimal discrimination function:

D=e^{ln B/Hi(t0))km,p/km,i}

[0485] The change of D as a function, of T is important because of the choice of an optimal washing temperature. It is obtained by substituting the Arrhenius equation which is:

K−=Ae^{-Ea/RT}

[0486] into the previous equation to form the final equation:

D=Hₚ((t₀)/B×(B/Hᵢ(t₀))^{(Ap/Ai)e(E}a,i^{-E}a,p^{)/RT};

[0487] Wherein B is less than Hᵢ(t₀).

[0488] Since the activation energy for perfect hybrids, Eₐₚ, and the activation energy for imperfect hybrids, E_{a,i}, can be either equal, or E_{a,i} less than E_{a,p} D is temperature independent, or decreases with increasing temperature, respectively. This result implies that the search for stringent temperature conditions for good discrimination in SOH is unjustified. By washing at lower temperatures, one obtains equal or better discrimination, but the time of washing exponentially increases with the decrease of temperature. Discrimination more strongly decreases with T, if Hᵢ(t₀) increases relative to Hₚ(t₀).

[0489] D at lower temperatures depends to a higher degree on the Hₚ(t₀)/B ratio than on the Hₚ(t₀)/Hᵢ(t₀) ratio. This result indicates that it is better to obtain a sufficient quantity of Hₚ in the hybridization regardless of the discrimination that can be achieved in this step. Better discrimination can then be obtained by washing, since the higher amounts of perfect hybrid allow more time for differential melting to show an effect. Similarly, using larger amounts of target nucleic acid a necessary discrimination can be obtained even with small differences between K_{m,p} and K_{m,i}.

[0490] Extrapolated to a more complex situation than covered in this simple model, the result is that washing at lower temperatures is even more important for obtaining discrimination in the case of hybridization of a probe having many end-mismatches within a given nucleic acid target.

[0491] Using the described theoretical principles as a guide for experiments, reliable hybridizations have been obtained with probes six to eight nucleotides in length. All experiments were performed with a floating plastic sheet providing a film of hybridization solution above the filter. This procedure allows maximal reduction in the amount of probe, and thus reduced label costs in dot blot hybridizations. The high concentration of sodium lauroyl sarcosine instead of sodium lauroyl sulfate in the phosphate hybridization buffer allows dropping the reaction from room temperature down to 12° C. Similarly, the 4-6×SSC, 10% sodium lauroyl sarcosine buffer allows hybridization at temperatures as low as 2° C. The detergent in these buffers is for obtaining tolerable background with up to 40 nM concentrations of labelled probe. Preliminary characterization of the thermal stability of short oligonucleotide hybrids was determined on a prototype octamer with 50% G+C content, i.e. probe of sequence TGCTCATG. The theoretical expectation is that this probe is among the less stable octamers. Its transition enthalpy is similar to those of more stable heptamers or, even to probes 6 nucleotides in length (Bresslauer et al. Proc. Natl. Acad. Sci. U.S.A. 83: 3746 (1986)). Parameter T_{d}, the temperature at which 50% of the hybrid is melted in unit time of a minute is 18° C. The result shows that T_{d} is 15° C. lower for the 8 bp hybrid than for an 11 bp duplex (Wallace et al. Nucleic Acids Res. 6: 3543 (1979)).

[0492] In addition to experiments with model oligonucleotides, an M13 vector was chosen as a system for a practical demonstration of short oligonucleotide hybridization. The main aim was to show useful end-mismatch discrimination with a target similar to the ones which will be used in various applications of the method of the invention. Oligonucleotide probes for the M13 model were chosen in such a way that the M13 vector itself contains the end mismatched base. Vector IF, an M13 recombinant containing a 921 bp human interferon gene insert, carries single perfectly matched target. Thus, IF has either the identical or a higher number of mismatched targets in comparison to the M13 vector itself. Using low temperature conditions and dot blots, sufficient differences in hybridization signals were obtained between tie dot containing the perfect and the mismatched targets and the dot containing the mismatched targets only. This was true for the 6-mer oligonucleotides and was also true for the 7 and 8-mer oligonucleotides hybridized to the large JF-M13 pair of nucleic acids.

[0493] The hybridization signal depends on the amount of target available on the filter for reaction with the probe. A necessary control is to show that the difference in sign intensity is not a reflection of varying amounts of nucleic acid in the two dots. Hybridization with a probe that has the same number and kind of targets in both IF and M13 shows that there is an equal amount of DNA in the dots. Since the efficiency of hybrid formation increases with hybrid length, the signal for a duplex having six nucleotides was best detected with a high mass of oligonucleotide target bound to the filter. Due to their lower molecular weight, a larger number of oligonucleotide target molecules can be bound to a given surface area when compared to large molecules of nucleic acid that serves as target.

[0494] To measure the sensitivity of detection with unpurified DNA, various amounts of phage supernatants were spotted on the filter and hybridized with ³²P-labelled octamer. As little as 50 million unpurified phage containing no more than 0.5 ng of DNA gave a detectable signal indicating that sensitivity of the short oligonucleotide hybridization method is sufficient. Reaction time is short, adding to the practicality.

[0495] As mentioned in the theoretical section above, the equilibrium yield of hybrid depends oil probe concentration and/or temperature of reaction. For instance, the signal level for the same amount of target with 4 nM octamer at 13° C. is 3 times lower than with a probe concentration of 40 nM, and is decreased 4 to 5 times by raising the hybridization 5 temperature to 25° C.

[0496] The utility of the low temperature wash for achieving maximal discrimination is demonstrated. To make the phenomenon visually obvious, 50 times more DNA was put in the M13 dot than in the IF dot using hybridization with a vector specific probe. In this way, the signal after the hybridization step with the actual probe was made stronger in the, mismatched that in the matched case. The Hₚ/Hᵢ ratio was 1:4. Inversion of signal intensities after prolonged washing at 7° C. was achieved without a massive loss of perfect hybrid, resulting in a ratio of 2:1. In contrast, it is impossible to achieve any discrimination at 25° C., since the matched target signal is already brought down to the background level with 2 minute washing; at the same time, the signal from the mismatched hybrid is still detectable. The loss of discrimination at 13° C. compared to 7° C. is not so great but is clearly visible. If one considers the 90 minute point at 7° C. and the 15 minute point at 13° C. when, the mismatched hybrid signal is near the background level, which represents optimal washing times for the respective conditions, it is obvious that the amount of several times greater at 7° C. than at 13° C. To illustrate this further, the time course of the change discrimination with washing of the same amount of starting hybrid at the two temperatures shows the higher maximal D at the lower temperature. These results confirm the trend in the change of D with temperature and the ratio of amounts of the two types of hybrid at the start of the washing step.

[0497] In order to show the general utility of the short oligonucleotide hybridization conditions, we have looked hybridization of 4 heptamers, 10 octamers and an additional 14 probes up to 12 nucleotides in length in our simple M13 system. These include—the nonamer GTTTTTTAA and octamer GGCAGGCG representing the two extremes of GC content. Although GC content and sequence are expected to influence the stability of short hybrids (Bresslauer et al. Proc. Natl. Acad. Sci. U.S.A. 83: 3746 (1986)), the low temperature short oligonucleotide conditions were applicable to all tested probes in achieving sufficient discrimination. Since the best discrimination value obtained with probes 13 nucleotides in length was 20, a several fold drop due to sequence variation is easily tolerated.

[0498] The M13 system has the advantage of showing the effects of target DNA complexity on the levels of discrimination. For two octamers having either none or five mismatched targets and differing in only one GC pair the observed discriminations were 18.3 and 1.7, respectively.

[0499] In order to show the utility of this method, three probes 8 nucleotides in length were tested on a collection of 51 plasmid DNA dots made from a library in Bluescript vector. One probe was present and specific for Bluescript vector but was absent in M13, while the other two probes had targets that were inserts of known sequence. This system allowed the use of hybridization negative or positive control DNAs with each probe. This probe sequence (CTCCCTTT) also had a complementary target in the interferon insert. Since the M13 dot is negative while the interferon insert in either M13 or Bluescript was positive, hybridization is sequence specific. Similarly, probes that detect the target sequence in only one of 51 inserts, or in none of the examined inserts along with controls that confirm that hybridization would have occurred if the appropriate targets were present in the clones.

[0500] Thermal stability curves for very short oligonucleotide hybrids that are 6-8 nucleotides in length are at least 15° C. lower than for hybrids 11-12 nucleotides in length (Wallace et al. Nucleic Acids Res. 6: 3543-3557 (1979). However, performing the hybridization reaction at a low temperature and with a very practical 0.4-40 nM concentration of oligonucleotide probe allows the detection of complementary sequence in known or unknown nucleic acid target. To determine an unknown nucleic acid sequence completely, an entire set containing 65,535 8-mer probes may be used. Sufficient amounts of nucleic acid for this purpose are present in convenient biological samples such as a few microliters of M13 culture, a plasmid prep from 10 ml of bacterial culture or a single colony of bacteria, or less than 1 ml of a standard PCR reaction.

[0501] Short oligonucleotides 6-10 nucleotides long give excellent discrimination. The relative decrease in hybrid stability with a single end mismatch is greater than for longer probes. Results with the octamer TGCTCATG support this conclusion. In the experiments, the target with a G/T end mismatch, hybridization to the target of this type of mismatch is the most stable of all other types of oligonucleotide. This discrimination achieved is the same as or greater than an internal G/T mismatch in a 19 base paired duplex greater than an internal G/T mismatch in a 19 paired duplex see, (Ikuta et al. Nucl. Acids Res. 15: 797 (1987). Exploiting these discrimination properties using the described hybridization conditions for short oligonucleotide hybridization allows a very precise determination of oligonucleotide targets. In contrast to the ease of detecting discrimination between perfect and imperfect hybrids, a problem that may exist with using very short oligonucleotides is the preparation of sufficient amounts of hybrids. In practice, the need to discriminate Hₚ and Hᵢ is aided by increasing the amount of DNA in the dot and/or the probe concentration, or by decreasing the hybridization temperature. However, higher probe concentrations usually increase background. Moreover, there are limits to the amounts of target nucleic acid that are practical to use. This problems was solved by the higher concentration of the detergent Sarcosyl which gave an effective background with 4 nM of probe. Further improvements may be effected either in the use of competitors for unspecific binding of probe to filter, or by changing the hybridization support material. Moreover, for probes having Eₐ less than 45 Kcal/mol (eg., for many heptamers and a majority of hexamers, modified oligonucleotides give a more stable hybrid (Asseline, et al. Proc. Nat'l Acad. Sci. 81: 3297 (1984) than their unmodified counterparts. The hybridization conditions described in this invention for short oligonucleotide hybridization using low temperatures give better discriminating for all sequences and duplex hybrid inputs. The only price paid in achieving uniformity in hybridization conditions for different sequences is an increase in washing time from minutes to up to 24 hours depending on the sequence. Moreover, the washing time can be further reduced by decreasing the salt concentration.

[0502] Although there is excellent discrimination of one matched hybrid over a mismatched hybrids, in short oligonucleotide hybridization, signals from mismatched hybrids exist, with the majority of the mismatch hybrids resulting from end mismatch. This may limit insert sizes that may be effectively examined by a probe of a certain length.

[0503] The influence of sequence complexity on discrimination cannot be ignored. However, the complexity effects are more significant when defining sequence information by short oligonucleotide hybridization for specific, nonrandom sequences, and can be overcome by using an appropriate probe to target length ratio. The length ratio is chosen to make unlikely, on statistical grounds, the occurrence of specific sequences which have a number of end-mismatches which would be able to eliminate or falsely invert discrimination. Results suggest the use of oligonucleotides 6, 7, and 8 nucleotides in length on target nucleic acid inserts shorter than 0.6, 2.5, and 10 kb, respectively.

[0504] 5.29 DNA Sequencing

[0505] An array of subarrays allows for efficient sequencing of a small set of samples arrayed in the form of replicated subarrays; for example, 64 samples may be arrayed on a 8×8 mm subarray and 16×24 subarrays may be replicated on a 15×23 cm membrane with 1 mm wide spacers between the subarrays. Several replica membranes may be made. For example, probes from a universal set of three thousand seventy-two 7-mers may be divided in thirty-two 96-well plates and labelled by kinasing. Four membranes may be processed in parallel during one hybridization cycle. On each membrane, 384 probes may be scored. All probes may be scored in two hybridization cycles. Hybridization intensities may be scored and the sequence assembled as described below.

[0506] If a single sample subarray or subarrays contains several unknowns, especially when similar samples are used, a smaller number of probes may be sufficient if they are intelligently selected on the basis of results of previously scored probes. For example, if probe AAAAAAA is not positive, there is a small chance that any of 8 overlapping probes are positive. If AAAAAAA is positive, then two probes are usually positive. The sequencing process in this case consists of first hybridizing a subset of minimally overlapped probes to define positive anchors and then to successively select probes which confirms one of the most likely hypotheses about the order of anchors and size and type of gaps between them. In this second phase, pools of 2-10 probes may be used where each probe is selected to be positive in only one DNA sample which is different from the samples expected to be positive with other probes from the pool.

[0507] The subarray approach allows efficient implementation of probe competition (overlapped probes) or probe cooperation (continuous stacking of probes) in solving branching problems. After hybridization of a universal set of probes the sequence assembly program determines candidate sequence subfragments (SFs). For the further assembly of SFs, additional information has to be provided (from overlapped sequences of DNA fragments, similar sequences, single pass gel sequences, or from other hybridization or restriction mapping data). Competitive hybridization and continuous stacking interactions have been proposed for SF assembly. These approaches are of limited practical value for sequencing of large numbers of samples by SBH wherein a labelled probe is applied to a sample affixed to an array if a uniform array is used. Fortunately, analysis of small numbers of samples using replica subarrays allows efficient implementation of both approaches. On each of the replica subarrays, one branching point may be tested for one or more DNA samples using pools of probes similarly as in solving mutated sequences in different samples spotted in the same subarray (see above).

[0508] If in each of 64 samples described in this example, there are about 100 branching points, and if 8 samples are analyzed in parallel in each subarray, then at least 800 subarray probings solve all branches. This means that for the 3072 basic probings an additional 800 probings (25%) are employed. More preferably, two probings are used for one branching point. If the subarrays are smaller, less additional probings are used. For example, if subarrays consist of 16 samples, 200 additional probings may be scored (6%). By using 7-mer probes (N₁₋₂B₇N₁₋₂) and competitive or collaborative branching solving approaches or both, fragments of about 1000 bp fragments may be assembled by about 4000 probings. Furthermore, using 8-mer probes (NB₈N) 4 kb or longer fragments may be assembled with 12,000 probings. Gapped probes, for example, NB₄NB₃N or NB₄NB₄N may be used to reduce the number of branching points.

[0509] 5.30 DNA Analysis by Transient Attachment to Subarrays of Probes and Ligation of Labelled Probes

[0510] Oligonucleotide probes having an informative length of four to 40 bases are synthesized by standard chemistry and stored in tubes or in multiwell plates. Specific sets of probes comprising one to 10,000 probes are arrayed by deposition or in situ synthesis on separate supports or distinct sections of a larger support. In the last case, sections or subarrays may be separated by physicalor hydrophobic barriers. The probe arrays may be prepared by in situ synthesis. A sample DNA of appropriate size is hybridized with one or more specific arrays. Many samples may be interrogated as pools at the same subarrays or independently with different subarrays within one support. Simultaneously with the sample or subsequently, a single labelled probe or a pool of labelled probes is added on each of the subarrays. If attached and labelled probes hybridize back to back on the complementary target in the sample DNA they are ligated. Occurrence of ligation will be measured by detecting a label from the probe.

[0511] This procedure is a variant of the described DNA analysis process in which DNA samples are not permanently attached to the support. Transient attachment is provided by probes fixed to the support. In this case there is no need for a target DNA arraying process. In addition, ligation allows detection of longer oligonucleotide sequences by combining short labelled probes with short fixed probes.

[0512] The process has several unique features. Basically, the transient attachment of the target allows its reuse. After ligation occur the target may be released and the label will stay covalently attached to the support. This feature allows cycling the target and production of detectable signal with a small quantity of the target. Under optimal conditions, targets do not need to be amplified, e.g. natural sources of the DNA samples may be directly used for diagnostics and sequencing purposes. Targets may be released by cycling the temperature between efficient hybridization and efficient melting of duplexes. More preferably, there is no cycling. The temperature and concentrations of components may be defined to have an equilibrium between free targets and targets entered in hybrids at about 50:50% level. In this case there is a continuous production of ligated products. For different purposes different equilibrium ratios are optimal.

[0513] An electric field may be used to enhance target use. At the beginning, a horizontal field pulsing within each subarray may be employed to provide for faster target sorting. In this phase, the equilibrium is moved toward hybrid formation, and unlabelled probes may be used. After a target sorting phase, an appropriate washing (which may be helped by a vertical electric field for restricting movement of the samples) may be performed. Several cycles of discriminative hybrid melting, target harvesting by hybridization and ligation and removing of unused targets may be introduced to increase specificity. In the next step, labelled probes are added and vertical electrical pulses may be applied. By increasing temperature, an optimal free and hybridized target ratio may be achieved. The vertical electric field prevents diffusion of the sorted targets.

[0514] The subarrays of fixed probes and sets of labelled probes (specially designed or selected from a universal probe set) may be arranged in various ways to allow an efficient and flexible sequencing and diagnostics process. For example, if a short fragment (about 100-500 bp) of a bacterial genome is to be partially or completely sequenced, small arrays of probes (5-30 bases in length) designed on the bases of known sequence may be used. If interrogated with a different pool of 10 labelled probes per subarray, an array of 10 subarrays each having 10 probes, allows checking of 200 bases, assuming that only two bases connected by ligation are scored. Under the conditions where mismatches are discriminated throughout the hybrid, probes may be displaced by more than one base to cover the longer target with the same number of probes. By using long probes, the target may be interrogated directly without amplification or isolation from the rest of DNA in the sample. Also, several targets may be analyzed (screened for) in one sample simultaneously. If the obtained results indicate occurrence of a mutation (or a pathogen), additional pools of probes may be used to detect type of the mutation or subtype of pathogen. This is a desirable feature of the process which may be very cost effective in preventive diagnosis where only a small fraction of patients is expected to have an infection or mutation.

[0515] In the processes described in the examples, various detection methods may be used, for example, radiolabels, fluorescent labels, enzymes or antibodies (chemiluminescence), large molecules or particles detectable by light scattering or interferometric procedures.

[0516] 5.31 Sequencing a Target Using Octamers and Nonamers

[0517] Data resulting from the hybridization of octamer and nonamer oligonucleotides shows that sequencing by hybridization provides an extremely high degree of accuracy. In this experiment, a known sequence was used to predict a series of contiguous overlapping component octamer and nonamer oligonucleotides.

[0518] In addition to the perfectly matching oligonucleotides, mismatch oligonucleotides, mismatch oligonucleotides wherein internal or end mismatches occur in the duplex formed by the oligonucleotide and the target were examined. In these analyses, the lowest practical temperature was used to maximize hybridization formation. Washes were accomplished at the same or lower temperatures to ensure maximal discrimination by utilizing the greater dissociation rate of mismatch versus matched oligonucleotide/target hybridization. These conditions are shown to be applicable to all sequences although the absolute hybridization yield is shown to be sequence dependent.

[0519] The least destabilizing mismatch that can be postulated is a simple end mismatch, so that the test of sequencing by hybridization is the ability to discriminate perfectly matched oligonucleotide/target duplexes from end-mismatched oligonucleotide/target duplexes.

[0520] The discriminative values for 102 of 105 hybridizing oligonucleotides in a dot blot format were greater than 2 allowing a highly accurate generation of the sequence. This system also allowed an analysis of the effect of sequence on hybridization formation and hybridization instability.

[0521] One hundred base pairs of a known portion of a human-interferon genes prepared by PCR, i.e. a 100 bp target sequence, was generated with data resulting from the hybridization of 105 oligonucleotides probes of known sequence to the target nucleic acid. The oligonucleotide probes used included 72 octamer and 21 nonamer oligonucleotides whose sequence was perfectly complementary to the target. The set of 93 probes provided consecutive overlapping frames of the target sequence e displaced by one or two bases.

[0522] To evaluate the effect of mismatches, hybridization was examined for 12 additional probes that contained at least one end mismatch when hybridized to the 100 bp test target sequence. Also tested was the hybridization of twelve probes with target end-mismatched to four other control nucleic acid sequences chosen so that the 12 oligonucleotides formed perfectly matched duplex hybrids with the four control DNAs. Thus, the hybridization of internal mismatched, end-mismatched and perfectly matched duplex pairs of oligonucleotide and target were evaluated for each oligonucleotide used in the experiment. The effect of absolute DNA target concentration on the hybridization with the test octamer and nonamer oligonucleotides was determined by defining target DNA concentration by detecting hybridization of a different oligonucleotide probe to a single occurrence non-target site within the co-amplified plasmid DNA.

[0523] The results of this experiment showed that all oligonucleotides containing perfect matching complementary sequence to the target or control DNA hybridized more strongly than those oligonucleotides having mismatches. To come to this conclusion, we examined Hₚ and D values for each probe. Hₚ defines the amount of hybrid duplex formed between a test target and an oligonucleotide probe. By assigning values of between 0 and 10 to the hybridization obtained for the 105 probes, it was apparent that 68.5% of the 105 probes had an Hₚ greater than 2.

[0524] Discrimination (D) values were obtained where D was defined as the ratio of signal intensities between 1) the dot containing a perfect matched duplex formed between test oligonucleotide and target or control nucleic acid and 2) the dot containing a mismatch duplex formed between the same oligonucleotide and a different site within the target or control nucleic acid. Variations in the value of D result from either 1) perturbations in the hybridization efficiency which allows visualization of signal over background, or 2) the type of mismatch found between the test oligonucleotide and the target. The D values obtained in this experiment were between 2 and 40 for 102 of the 105 oligonucleotide probes examined. Calculations of D for the group of 102 oligonucleotides as a whole showed the average D was 10.6.

[0525] There were 20 cases where oligonucleotide/target duplexes exhibited an end-mismatch. In five of these, D was greater than 10. The large D value in these cases is most likely due to hybridization destabilization caused by other than the most stable (G/T and G/A) end mismatches. The other possibility is there was an error in the sequence of either the oligonucleotides or the target.

[0526] Error in the target for probes with low Hₚ, was excluded as a possibility because such an error would have affected the hybridization of each of the other eight overlapping oligonucleotides. There was no apparent instability due to sequence mismatch for the other overlapping oligonucleotides, indicating the target sequence was correct. Error in the oligonucleotide sequence was excluded as a possibility after the hybridization of seven newly synthesized oligonucleotides was re-examined. Only 1 of the seven oligonucleotides resulted in a better D value. Low hybrid formation values may result from hybrid instability or from an inability to form hybrid duplex. An inability to form hybrid duplexes would result from either 1) self complementarity of the chosen probe or 2) target/target self hybridization. Oligonucleotide/oligonucleotide duplex formation may be favored over oligonucleotide/target hybrid duplex formation if the probe was self-complementary. Similarly, target/target association may be favored if the target was self-complementary or may form internal palindromes. In evaluating these possibilities, it was apparent from probe analysis that the questionable probes did not form hybrids with themselves. Moreover, in examining the contribution of target/target hybridization, it was determined that one of the questionable oligonucleotide probes hybridized inefficiently with two different DNAs containing the same target. The low probability that two different DNAs have a self-complementary region for the same target sequence leads to the conclusion that target/target hybridization did not contribute to low hybridization formation. Thus, these results indicate that hybrid instability and not the inability to form hybrids was the cause of the low hybrid formation observed for specific oligonucleotides. The results also indicate that low hybrid formation is due to the specific sequences of certain oligonucleotides. Moreover, the results indicate that reliable results may be obtained to generate sequences if octamer and nonamer oligonucleotides are used.

[0527] These results show that using the methods described long sequences of any target nucleic acid may be generated by maximal and unique overlap of constituent oligonucleotides. Such sequencing methods are dependent on the content of the individual component oligomers regardless of their frequency and their position.

[0528] The sequence which is generated using the algorithm described below is of high fidelity. The algorithm tolerates false positive signals from the hybridization dots as is indicated from the fact the sequence generated from the 105 hybridization values, which included four less reliable values, was correct. This fidelity in sequencing by hybridization is due to the “all or none” kinetics of short oligonucleotide hybridization and the difference in duplex stability that exists between perfectly matched duplexes and mismatched duplexes. The ratio of duplex stability of matched and end-mismatched duplexes increases with decreasing duplex length. Moreover, binding energy decreases with decreasing duplex length resulting in a lower hybridization efficiency. However, the results provided show that octamer hybridization allows the balancing of the factors affecting duplex stability and discrimination to produce a highly accurate method of sequencing by hybridization. Results presented in other examples show that oligonucleotides that are 6, 7, or 8 nucleotides can be effectively used to generate reliable sequence on targets that are 0.5 kb (for hexamers) 2 kb (for septamers) and 6 kb (for octamers). The sequence of long fragments may be overlapped to generate a complete genome sequence.

[0529] 5.32 Analyzing the Data Obtained

[0530] Image files are analyzed by an image analysis program, like DOTS program (Drmanac et al. 1993), and scaled and evaluated by statistical functions included, e.g., in SCORES program (Drmanac et al. 1994). From the distribution of the signals an optimal threshold is determined for transforming signal into +/−output. From the position of the label detected, F+P nucleotide sequences from the fragments would be determined by combining the known sequences of the immobilized and labeled probes corresponding to the labeled positions. The complete nucleic acid sequence or sequence subfragments of the original molecule, such as a human chromosome, would then be assembled from the overlapping F+P sequence determined by computational deduction.

[0531] One option is to transform hybridization signals e.g., scores, into +/−output during the sequence assembly process. In this case, assembly will start with a F+P sequence with a very high score, for example F+P sequence AAAAAATTTTTT. Scores of all four possible overlapping probes AAAAATTTTTTA, AAAAATTTTTT, AAAAATTTTTTC and AAAAATTTTTTG and three additional probes that are different at the beginning (TAAAAATTTTTT, CAAAAATTTTTT, GAAAAATTTTTT, are compared and three outcomes defined: (i) only the starting probe and only one of the four overlapping proves have scores that are significantly positive relatively to the other six probes, in this case the AAAAAATTTTTT sequence will be extended for one nucleotide to the right; (ii) no one probe except the starting probe has a significantly positive score, assembly will stop, e.g., the AAAAAATTTTTT sequence is at the end of the DNA molecule that is sequenced; (iii) more than one significantly positive probe among the overlapped and/or other three probes is found; assembly is stopped because of the error or branching (Drmanac et al., 1989).

[0532] The processes of computational deduction would employ computer programs using existing algorithms (see, e.g., Pevzner, 1989; Drmanac et al., 1991; Labat and Drmanac, 1993; each incorporated herein by reference).

[0533] If, in addition to F+P, F (1)P, F (2)P, F(3)P or F(4)P are determined, algorithms will be used to match all data sets to correct potential errors or to solve the situation where there is a branching problem (see, e.g., Drmanac et al., 1989; Bains et al., 1988; each incorporated herein by reference).

[0534] 5.33 Conducting Sequencing by Two Step Hybridization

[0535] Sequencing is accomplished as described herein. First, the whole chip is hybridized to a mixture of DNA as complex as 100 million of bp (one human chromosome). Guidelines for conducting hybridization can be found in papers such as Drmanac et al. (1990); Khrapko et al. (1991); and Broude et al. (1994). These articles teach the ranges of hybridization temperatures, buffers and washing steps that are appropriate for use in the initial steps of Format 3 SBH.

[0536] The present invention particularly contemplates that hybridization is to be carried out for up to several hours in high salt concentrations at a low temperature (−2° C. to 5° C.) because of a relatively low concentration of target DNA that can be provided. For this purpose, SSC buffer is used instead of sodium phosphate buffer (Drmanac et al., 1990), which precipitates at 10° C. Washing does not have to be extensive (a few minutes) because of the second step, and can be completely eliminated when the hybridization cycling is used for the sequencing of highly complex DNA samples. The same buffer is used for hybridization and washing steps to be able to continue with the second hybridization step with labeled probes.

[0537] After proper washing using a simple robotic device on each array, e.g., a 8×8 mm array, one labeled, probe, e.g., a 6-mer, would be added. A 96-tip or 96-pin device would be used, performing this in 42 operations. Again, a range of discriminatory conditions could be employed, as previously described in the scientific literature.

[0538] The present invention particularly contemplates the use of the following conditions. First, after adding labeled probes and incubating for several minutes only (because of the high concentration of added oligonucleotides) at a low temperature (0-5° C.), the temperature is increased to 3-10° C., depending on F+P length, and the washing buffer is added. At this time, the washing buffer used is one compatible with any ligation reaction (e.g., 100 mM salt concentration range). After adding ligase, the temperate is increased again to 15-37° C. to allow fast ligation (less than 30 min) and further discrimination of full match and mismatch hybrids.

[0539] The use of cationic detergents is also contemplated for use in Format 3 SBH, as described by Pontius & Berg (1991, incorporated herein by reference). These authors describe the use of two simple cationic detergents, dodecy- and cetyltrimethylammionium bromide (DTAB and CTAB) in DNA renaturation.

[0540] DTAB and CTAB are variants of the quaternary amine tetramethylammonium bromide (TMAB) in which one of the methyl groups is replaced by either a 12-carbon (DTAB) or a 16-carbon (CTAB) alkyl group. TMAB is the bromide salt of the tetramethylammoniumcation, a reagent used in nucleic acid renaturation experiments to decrease the G-C content bias of the melting temperature. DTAB and CTAB are similar in structure to sodium dodecyl sulfate (SDS), with the replacement of the negatively charged sulfate of SDS by a positively charged quaternary amine. While SDS is commonly used in hybridization buffers to reduce nonspecific binding and inhibit nucleases, it does not greatly affect the rate of renaturation.

[0541] When using a ligation process, the enzyme could be added with the labeled probes or after the proper washing step to reduce the background. Although not previously proposed for use in any SBH method, ligase technology is well established within the field of molecular biology. For example, Hood and colleagues described a ligase-mediated gene detection technique (Landegren et al., 1988), the methodology of which can be readily adapted for use in Format 3 SBH. Wu & Wallace also describe the use of bacteriophage T4 DNA ligase to join two adjacent, short synthetic oligonucleotides. Their oligoligation reactions were carried out in 50 mM Tris HCl pH 7.6, 10 mM MgCl₂, 1 mM ATP, 1 mM DTT, and 5% PEG. Ligation reactions were heated to 100° C. for 5-10 min followed by cooling to 0° C. prior to the addition of T4 DNA ligase (1 unit; Bethesda Research Laboratory, gaithersburg, MD). Most ligation reactions were carried out at 30° C. and terminated by heating to 100° C. for 5 min.

[0542] Final washing appropriate for discriminating detection of hybridized adjacent, or ligated, oligonucleotides of length (F+P), is then performed. This washing step is done in water for several minutes at 40-60° C. to wash out all the non-ligated labeled probes, and all other compounds, to maximally reduce background. Because of the covalently bound labeled oligonucleotides, detection is simplified (it does not have time and low temperature constraints).

[0543] Depending on the label used, imaging of the chips is done with different apparati. For radioactive labels, phosphor storage screen technology and PhosphorImager as a scanner may be used (Molecular Dynamics, Sunnyvale, Calif.). Chips are put in a cassette and covered by a phosphorous screen. After 1-4 hours of exposure, the screen is scanned and the image file stored at a computer hard disc. For the detection of fluorescent labels, CCD cameras and epifluorescent or confocal microscopy are used. For the chips generated directly on the pixels of a CCD camera, detection can be performed as described by Eggers et al. (1994, incorporated herein by reference).

[0544] Charge-coupled device (CCD) detectors serve as active solid supports that quantitatively detect and image the distribution of labeled target molecules in probe-based assays. These devices use the inherent characteristics of microelectronics that accommodate highly parallel assays, ultrasensitive detection, high throughput, integrated data acquisition and computation. Eggers et al. (1994) describe CCDs for use with probe-based assays, such as Format 3 SBH of the present invention, that allow quantitative assessment within seconds due to the high sensitivity and direct coupling employed.

[0545] The integrated CCD detection approach enables the detection of molecular binding events on chips. The detector rapidly generates a two-dimensional pattern that uniquely characterizes the sample. In the specific operation of the CCD-based molecular detector, distinct biological probes are immobilized directly on the pixels of a CCD or can be attached to a disposable cover slip placed on the CCD surface. The sample molecules can be labeled with radioisotope, chemiluminescent or fluorescent tags.

[0546] Upon exposure of the sample to the CCD-based probe array, photons or radioisotope decay products are emitted at the pixel locations where the sample has bound, in the case of Format 3, to two complementary probes. In turn, electron-hole pairs are generated in the silicon when the charged particles, or radiation from the labeled sample, are incident on the CCD gates. Electrons are then collected beneath adjacent CCD gates and sequentially read out on a display module. The number of photoelectrons generated at each pixel is directly proportional to the number of molecular binding events in such proximity. Consequently, molecular binding can be quantitatively determined (Eggers et al. 1994).

[0547] By placing the imaging array in proximity to the sample, the collection efficiency is improved by a factor of at least 10 over lens-based techniques such as those found in conventional CCD cameras. That is, the sample (emitter) is in near contact with the detector (imaging array). and this eliminates conventional imaging optics such as lenses and mirrors.

[0548] When radioisotopes are attached as reporter groups to the target molecules, energetic particles are detected. Several reporter groups that emit particles of varying energies have been successfully utilized with the micro-fabricated detectors, including ³²P, ³³P, ³⁵P, ¹⁴C and ¹²⁵I. The higher energy particles, such as from ³²P, provide the highest molecular detection sensitivity, whereas the lower energy particles, such as from ³⁵S, provide better resolution. Hence the choice of the radioisotope reporter can be tailored as required. Once the particular radioisotope label is selected, the detection performance can be predicted by calculating the signal-to-noise ration (SNR), as described by Eggers et al. (1994).

[0549] An alternative luminescent detection procedure involves the use of fluorescent or chemiluminescent reporter groups attached to the target molecules. The fluorescent labels can be attached covalently or through interaction. Fluorescent dyes, such as ethidium bromide, with intense absorption bands in the near UV (300-350 nm) range and principal emission bands in the visible (500-650 nm) range, are most suited for the CCD devices employed since the quantum efficiency is several orders of magnitude lower at the excitation wavelength then at the fluorescent signal wavelength.

[0550] From the perspective of detecting luminescence, the polysilicon CCD gates have in capacity to filter away the contribution of incident light in the UV range, yet are very sensitive to the visible luminescence generated by the fluorescent reporter groups. Such inherently large discrimination against UV excitation enables large SNRs (greater than 100) to be achieved by the CCDs as formulated in the incorporated paper by Eggers et al. (1994).

[0551] For probe immobilization on the detector, hybridization matrices may be produced on inexpensive SiO₂ wafers, which are subsequently placed on the surface of the CCD following hybridization and drying. This format is economically efficient since the hybridization of the DNA is conducted on inexpensive disposable SiO₂ wafers, thus allowing reuse of the more expensive CCD detector. Alternatively, the probes can be immobilized directly on the CCD to create a dedicated probe matrix.

[0552] To immobilize probes upon the SiO₂ coating, a uniform epoxide layer is linked to the film surface, employing an epoxy-silane reagent and standard SiO₂ modification chemistry. Amine-modified oligonucleotide probes are then linked to the SiO₂ surface by means of secondary amine formation with the epoxide ring. The resulting linkage provides 17 rotatable bonds of separation between the 3 base of the oligonucleotide and the SiO₂ surface. To ensure complete amine deprotonation and to minimize secondary structure formation during coupling, the reaction is performed in 0.1 M KOH and incubated at 37° C. for 6 hours.

[0553] In Format 3 SBH in general, signals are scored per each of billion points. It would not be necessary to hybridize all arrays, e.g., 4000 5×5 mm, at a time and the successive use of smaller number of arrays is possible.

[0554] Cycling hybridizations are one possible method for increasing the hybridization signal. In one cycle, most of the fixed probes will hybridize with DNA fragments with tail sequences non-complementary for labeled probes. By increasing the temperature, those hybrids will be melted. In the next cycle, some of them (˜0.1%) will hybridize with an appropriate DNA fragment and additional labeled probes will be ligated. In this case, there occurs a discriminative melting of DNA hybrids with mismatches for both probe sets simultaneously.

[0555] In the cycle hybridization, all components are added before the cycling starts, at the T4, or a higher temperature for a thermostable ligase. Then the temperature is decreased to 15-37° C. and the chip is incubated for up to 10 minutes, and then the temperature is increased to 37° C. or higher for a few minutes and then again reduced. Cycles can be repeated up to 10 times. In one variant, an optimal higher temperature (10-50° C.) can be used without cycling and longer ligation reaction can be performed (1-3 hours).

[0556] The procedure described herein allows complex chip manufacturing using standard synthesis and precise spotting of oligonucleotides because a relatively small number of oligonucleotides are necessary. For example, if all 7-mer oligos are synthesized (16384 probes), lists of 256 million 14-mers can be determined.

[0557] One important variant of the invented method is to use more than one differently labeled probe per base array. This can be executed with two purposes in mind; multiplexing to reduce number of separately hybridized arrays; or to determine a list of even longer oligosequences such as 3×6 or 3×7. In this case, if two labels are used, the specificity of the 3 consecutive oligonucleotides can be almost absolute because positive sites must have enough signals of both labels.

[0558] A further and additional variant is to use chips containing BxNy probes with y being from 1 to 4. Those chips allow sequence reading in different frames. This can also be achieved by using appropriate sets of labeled probes or both F and P probes could have some unspecified end positions (i.e., some element of terminal degeneracy). Universal bases may also be employed as part of a linker to join the probes of defined sequence to the solid support. This makes the probe more available to hybridization and makes the construct more stable. If a probe has 5 bases, one may, e.g., use 3 universal bases as a linker.

[0559] 5.34 Determining Sequence from Hybridization Data

[0560] Sequence assembly may be interrupted where ever a given overlapping (N−1) mer is duplicated two or more times. Then either of the two N-mers differing in the last nucleotide may be used in extending the sequence. This branching point limits unambiguous assembly of sequence.

[0561] Reassembling the sequence of known oligonucleotides that hybridize to the target nucleic acid to generate the complete sequence of the target nucleic acid may not be accomplished in some cases. This is because some information may be lost if the target nucleic acid is not in fragments of appropriate size in relation to the size of oligonucleotide that is used for hybridizing. The quantity of information lost is proportional to the length of a target being sequenced. However, if sufficiently short targets are used, their sequence may be unambiguously determined.

[0562] The probable frequency of duplicated sequences that would interfere with sequence y which is distributed along a certain length of DNA may be calculated. This derivation requires the introduction of the definition of a parameter having to do with sequence organization: the sequence subfragment (SF). A sequence subfragment results if any part of the sequence of a target nucleic acid starts and ends with an (N−1) mer that is repeated two or more times within the target sequence. Thus, subfragments are sequences generated between two points of branching in the process of assembly of the sequences; in the method of the invention. The sum of all subfragments is longer than the actual target nucleic acid because of overlapping short ends. Generally, subfragments may not be assembled in a linear order without additional information since they have shared (N−1) mers at their ends and starts. Different numbers of subfragments are obtained for each nucleic acid target depending on the number of its repeated (N−1) mers. The number depends on the value of N−1 and the length of the target.

[0563] Probability calculations can estimate the interrelationship of the two factors. If the ordering of positive N-mers is accomplished by using overlapping sequences of length N−1 or at an average distance of A₀, the N−1 of a fragment L_{f} bases long is given by equation one:

N_{sf}=1+Aₒ×K×P(K,L_{f})

[0564] Where K greater than or =2, and P(K, L_{f}) represents the probability of an N-mer occurring K-times on a fragment L_{f} base long. Also, a computer program that is able to form subfragments from the content of N-mers for any given sequence is described below.

[0565] The number of subfragments increases with the increase of lengths of fragments for a given length of probe. Obtained subfragments may not be uniquely ordered among themselves. Although not complete, this information is very useful for comparative sequence analysis and the recognition of functional sequence characteristics. This type of information may be called partial sequence. Another way of obtaining partial sequence is the use of only a subset of oligonucleotide probes of a given length.

[0566] There may be relatively good agreement between predicted sequence according to theory and a computer simulation for a random DNA sequence. For instance, for N−1=7, [using an 8-mer or groups of sixteen 10-mers of type 5′ (A,T,C,G) B₈ (A,T,C,G) 3′] a target nucleic acid of 200 bases will have an average of three subfragments. However, because of the dispersion around the mean, a library of target nucleic acid should have inserts of 500 bp so that less than 1 in 2000 targets have more than three subfragments. Thus, in an ideal case of sequence determination of a long nucleic acid of random sequence, a representative library with sufficiently short inserts of target nucleic acid may be used. For such inserts, it is possible to reconstruct the individual target by the method of the invention. The entire sequence of a large nucleic acid is then obtained by overlapping of the defined individual insert sequences.

[0567] To reduce the need for very short fragments, e.g. 50 bases for 8-mer probes. The information contained in the overlapped fragments present in every random DNA fragmentation process like cloning, or random PCR is used. It is also possible to use pools of short physical nucleic acid fragments. Using 8-mers or 11-mers like 5′ (A, T, C, G) N₈ (A, T, C, G) 3′ for sequencing 1 megabase, instead of needing 20,000 50 bp fragments only 2,100 samples are sufficient. This number consists of 700 random 7 kb clones (basic library), 1250 pools of 20 clones of 500 bp (subfragments ordering library) and 150 clones from jumping (or similar) library. The developed algorithm (see Example 18) regenerates sequence using hybridization data of these described samples.

[0568] 5.35 Algorithm

[0569] This example describes an algorithm for generation of a long sequence written in a four letter alphabet from constituent k-tuple words in a minimal number of separate, randomly defined fragments of a starting nucleic acid sequence where K is the length of an oligonucleotide probe. The algorithm is primarily intended for use in the sequencing by hybridization (SBH) process. The algorithm is based on subfragments (SF), informative fragments (IF) and the possibility of using pools of physical nucleic sequences for defining informative fragments.

[0570] As described, subfragments may be caused by branch points in the assembly process resulting from the repetition of a K−1 oligomer sequence in a target nucleic acid. Subfragments are sequence fragments found between any two repetitive words of the length K−1 that occur in a sequence. Multiple occurrences of K−1 words are the cause of interruption of ordering the overlap of K-words in the process of sequence generation. Interruption leads to a sequence remaining in the form of subfragments. Thus, the unambiguous segments between branching points whose order is not uniquely determined are called sequence subfragments.

[0571] Informative fragments are defined as fragments of a sequence that are determined by the nearest ends of overlapped physical sequence fragments.

[0572] A certain number of physical fragments may be pooled without losing the possibility of defining informative fragments. The total length of randomly pooled fragments depends on the length of k-tuples that are used in the sequencing process.

[0573] The algorithm consists of two main units. The first part is used for generation of subfragments from the set of k-tuples contained in a sequence. Subfragments may be generated within the coding region of physical nucleic acid sequence of certain sizes, or within the informative fragments defined within long nucleic acid sequences. Both types of fragments are members of the basic library. This algorithm does not describe the determination of the content of the k-tuples of the informative fragments of the basic library, i.e. the step of preparation of informative fragments to be used in the sequence generation process.

[0574] The second part of the algorithm determines the linear order of obtained subfragments with the purpose of regenerating the complete sequence of the nucleic acid fragments of the basic library. For this purpose a second, ordering library is used, made of randomly pooled fragments of the starting sequence. The algorithm does not include the step of combining sequences of basic fragments to regenerate an entire, megabase plus sequence. This may be accomplished using the link-up of fragments of the basic library which is a prerequisite for informative fragment generation. Alternatively, it may be accomplished after generation of sequences of fragments of the basic library by this algorithm, using search for their overlap, based on the presence of common end-sequences.

[0575] The algorithm requires neither knowledge of the number of appearances of a given k-tuple in a nucleic acid sequence of the basic and ordering libraries, nor does it require the information of which k-tuple words are present on the ends of a fragment. The algorithm operates with the mixed content of k-tuples of various length. The concept of the algorithm enables operations with the k-tuple sets that contain false positive and false negative k-tuples. Only in specific cases does the content of the false k-tuples primarily influence the completeness and correctness of the generated sequence. The algorithm may be used for optimization of parameters in simulation experiments, as well as for sequence generation in the actual SBH experiments e.g., generation of the genomic DNA sequence. In optimization of parameters, the choice of the oligonucleotide probes (k-tuples) for practical and convenient fragments and/or the choice of the optimal lengths and the number of fragments for the defined probes are especially important.

[0576] This part of the algorithm has a central role in the process of the generation of the e from the content of k-tuples. It is based on the unique ordering of k-tuples by means of maximal overlap. The main obstacles in sequence generation are specific repeated sequences and false positive and/or negative k-tuples. The aim of this part of the algorithm is to obtain the minimal number of the longest possible subfragments, with correct sequence. This part of the algorithm consists of one basic, and several control steps. A two-stage process is necessary since certain information can be used only after generation of all primary subfragments.

[0577] The main problem of sequence generation is obtaining a repeated sequence from word contents that by definition do not carry information on the number of occurrences of the particular k-tuples. The concept of the entire algorithm depends on the basis on which this problem is solved. In principle, there are two opposite approaches: 1) repeated sequences may be obtained at the beginning, in the process of generation of pSFs, or 2) repeated sequences can be obtained later, in the process of the final ordering of the subfragments. In the first case, pSFs contain an excess of sequences and in the second case, they contain a deficit of sequences. The first approach requires elimination of the excess sequences generated, and the second requires permitting multiple use of some of the subfragments in the process of the final assembling of the sequence.

[0578] The difference in the two approaches in the degree of strictness of the rule of unique overlap of k-tuples. The less severe rule is: k-tuple X is unambiguously maximally overlapped with k-tuple Y if and only if, the rightmost k−1 end of k-tuple X is present only on the leftmost end of k-tuple Y. This rule allows the generation of repetitive sequences and the formation of surplus sequences.

[0579] A stricter rule which is used in the second approach has an addition caveat: k-tuple X is unambiguously maximally overlapped with k-tuple Y if and only if, the rightmost K−1 end of k-tuple X is present only on the leftmost end of k-tuple Y and if the leftmost K−1 end of k-tuple Y is not present on the rightmost end of any other k-tuple. The algorithm based on the stricter rule is simpler, and is described herein.

[0580] The process of elongation of a given subfragment is stopped when the right k−1 end of the last k-tuple included is not present on the left end of any k-tuple or is present on two or more k-tuples. If it is present on only one k-tuple the second part of the rule is tested. If in addition there is a k-tuple which differs from the previously included one, the assembly of the given subfragment is terminated only on the first leftmost position. If this additional k-tuple does not exist, the conditions are met for unique k−1 overlap and a given subfragment is extended to the right by one element.

[0581] Beside the basic rule, a supplementary one is used to allow the usage of k-tuples of different lengths. The maximal overlap is the length of k−1 of the shorter k-tuple of the overlapping pair. Generation of the pSFs is performed starting from the first k-tuple from the file in which k-tuples are displayed randomly and independently from their order in a nucleic acid sequence. Thus, the first k-tuple in the file is not necessarily on the beginning of the sequence, nor on the start of the particular subfragment. The process of subfragment generation is performed by ordering the k-tuples by means of unique overlap, which is defined by the described rule. Each used k-tuple is erased from the file. At the point when there are no further k-tuples unambiguously overlapping with the last one included, the building of subfragment is terminated and the buildup of another pSF is started. Since generation of a majority of subfragments does not begin from their actual starts, the formed pSF are added to the k-tuple file and are considered as a longer k-tuple. Another possibility is to form subfragments going in both directions from the starting k-tuple. The process ends when further overlap, i.e. the extension of any of the subfragments, is not possible.

[0582] The pSFs can be divided in three groups: 1) subfragments of the maximal length and correct sequence in cases of exact k-tuple set; 2) short subfragments, formed due to the used of the maximal and unambiguous overlap rule on the incomplete set, and/or the set with some false positive k-tuples; and 3) pSFs of an incorrect sequence. The incompleteness of the set in 2) is caused by false negative results of a hybridization experiment, as well as by using an incorrect set of k-tuples. These are formed due to the false positive and false negative k-tuples and can be: a) misconnected subfragments; b) subfragments with the wrong end; and c) false positive k-tuples which appears as false minimal subfragments.

[0583] Considering false positive k-tuples, there is the possibility for the presence of a k-tuple containing more than one wrong base or containing one wrong base somewhere in the middle, as well as the possibility for a k-tuple with a wrong base on the end. Generation of short, erroneous or misconnected subfragments is caused by the latter k-tuples. The k-tuples of the former two kinds represent wrong pSFs with length equal to k-tuple length.

[0584] In the case of one false negative k-tuple, pSFs are generated because of the impossibility of maximal overlapping. In the case of the presence of one false positive k-tuple with the wrong base on its leftmost or rightmost end, pSFs are generated because of the impossibility of unambiguous overlapping. When both false positive and false negative k-tuples with a common k−1 sequence are present in the file, pSFs are generated, and one of these pSFs contains the wrong k-tuple at the relevant end.

[0585] The process of correcting subfragments with errors in sequence and the linking of unambiguously connected pSF is performed after subfragment generation and in the process of subfragment ordering. The first step which consists of cutting the misconnected pSFs and obtaining the final subfragments by unambiguous connection of pSFs is described below.

[0586] There are two approaches for the formation of misconnected subfragments. In the first a mistake occurs when an erroneous k-tuple appears on the points of assembly of the repeated sequences of lengths k−1. In the second, the repeated sequences are shorter than k−1. These situations can occur in two variants each. In the first variant, one of the repeated sequences represents the end of a fragment. In the second variant, the repeated sequence occurs at any position within the fragment. For the first possibility, the absence of some k-tuples from the file (false negatives) is required to generate a misconnection. The second possibility requires the presence of both false negative and false positive k-tuples in the file. Considering the repetitions of k−1 sequence, the lack of only one k-tuple is sufficient when either end is repeated internally. The lack of two is needed for strictly internal repetition. The reason is that the end of a sequence can be considered informatically as an endless linear array of false negative k-tuples. From the “smaller than k−1 case”, only the repeated sequence of the length of k−2, which requires two or three specific erroneous k-tuples, will be considered. It is very likely that these will be the only cases which will be detected in a real experiment, the others being much less frequent.

[0587] Recognition of the misconnected subfragments is more strictly defined when a repeated sequence does not appear at the end of the fragment. In this situation, one can detect further two subfragments, one of which contains on its leftmost, and the other on its rightmost end k−2 sequences which are also present in the misconnected subfragment. When the repeated sequence is on the end of the fragment, there is only one subfragment which contains k−2 sequence causing the mistake in subfragment formation on its leftmost or rightmost end.

[0588] The removal of misconnected subfragments by their cutting is performed according to the common rule: If the leftmost or rightmost sequence of the length of k−2 of subfragments is present in any other subfragment, the subfragment is to be cut into subfragments, each of them containing k−2 sequence. This rule does not cover rarer situations of a repeated end when there are more than one false negative k-tuple on the point of repeated k−1 sequence. Misconnected subfragments of this kind can be recognized by using the information from the overlapped fragments, or informative fragments of basic and ordering libraries. In addition, the Disconnected subfragment will remain when two or more false negative k-tuples occur on both positions which contain the identical k−1 sequence. This is a very rare situation since it requires at least 4 specific false k-tuples. An additional rule can be introduced to cut these subfragments on sequences of length k if the given sequence can be obtained by combination of sequences shorter than k−2 from the end of one subfragment and the start of another.

[0589] By strict application of the described rule, some completeness is lost to ensure the accuracy of the output. Some of the subfragments will be cut although they are not misconnected since they fit into the pattern of a misconnected subfragment. There are several situations of this kind. For example, a fragment, beside at least two identical k−1 sequences, contains any k−2 sequence from k−1 or a fragment contains k−2 sequence repeated at least twice and at least one false negative k-tuple containing given k−2 sequence in the middle, etc.

[0590] The aim of this part of the algorithm is to reduce the number of pSFs to a minimal number of longer subfragments with correct sequence. The generation of unique longer subfragments or a complete sequence is possible in two situations. The first situation concerns the specific order of repeated k−1 words. There are cases in which some or all maximally extended pSFs (the first group of pSFs) can be uniquely ordered. For example, in fragment S-R1-a-R2-b-R1-c-R2-E where S and E are the start and end of a fragment, a, b, and c are different sequences specific to respective subfragments and R1 and R2 are two k−1 sequences that are tandemly repeated, five subfragments are generated (S-R1, R1-a-R2, R2-b-R1, R1-c-R2, and R-E). They may be ordered in two ways; the original sequence above or S-R1-c-R-b-R1-a-R-E. In contrast, in a fragment with the same number and types of repeated sequences but ordered differently, i.e. S-R1-a-R1-b-R-c-R-E, there is no other sequence which includes all subfragments. Examples of this type can be recognized only after the process of generation of pSFs. They represent the necessity for two steps in the process of pSF generation. The second situation of generation of false short subfragments on positions of nonrepeated k−1 sequences when the files contain false negative and/or positive k-tuples is more important.

[0591] The solution for both pSF groups consists of two parts. First, the false positive k-tuples appearing as the nonexisting minimal subfragments are eliminated. All k-tuple subfragments of length k which do not have an overlap on either end, of the length of longer than k−a on one end and longer than k−b on the other end, are eliminated to enable formation of the maximal number of connections. In our experiments, the values for a and b of 2 and 3, respectively, appeared to be adequate to eliminate a sufficient number of false positive k-tuples.

[0592] The merging of subfragments that can be uniquely connected is accomplished in the second step. The rule for connection is: two subfragments may be unambiguously connected if, and only if, the overlapping sequence at the relevant end or start of two subfragments is not present at the start and/or end of any other subfragment.

[0593] The exception is if one subfragment from the considered pair has the identical beginning and end. In that case connection is permitted, even if there is another subfragment with the same end present in the file. The main problem here is the precise definition of overlapping sequence. The connection is not permitted if the overlapping sequence unique for only one pair of subfragments is shorter than k−2, or it is k−2 or longer but an additional subfragment exists with the overlapping sequence of any length longer than k−4. Also, both the canonical ends of pSFs and the ends after omitting one (or few) last bases are considered as the overlapping sequences.

[0594] After this step some false positive k-tuples (as minimal subfragments) and some subfragments with a wrong end may survive. In addition, in very rare occasions where a certain number of some specific false k-tuples are simultaneously present, an erroneous connection may take place. These cases will be detected and solved in the subfragment ordering process, and in the additional control steps along with the handling of uncut “misconnected” subfragments.

[0595] The short subfragments that are obtained are of two kinds. In the common case, these subfragments may be unambiguously connected among themselves because of the distribution of repeated k−1 sequences. This may be done after the process of generation of pSFs and is a good example of the necessity for two steps in the process of pSF generation. In the case of using the file containing false positive and/or false negative k-tuples, short pSFs are obtained on the sites of nonrepeated k−1 sequences. Considering false positive k-tuples, a k-tuple may contain more than one wrong base (or containing one wrong base somewhere in the middle), as well as k-tuple on the end. Generation of short and erroneous (or misconnected) subfragments is caused by the latter k-tuples. The k-tuples of the former kind represent wrong pSFs with length equal to k-tuple length.

[0596] The aim of merging pSF part of the algorithm is the reduction of the number of pSFs to the minimal number of longer subfragments with the correct sequence. All k-tuple subfragments that do not have an overlap on either end, of the length of longer than k−a on one, and longer than k−b on the other end, are eliminated to enable the maximal number of connections. In this way, the majority of false positive k-tuples are discarded. The rule for connection is: two subfragments can be unambiguously connected if, and only if the overlapping sequence of the relevant end or start of two subfragments is not present on the start and/or end of any other subfragment. The exception is a subfragment with the identical beginning and end. In that case connection is permitted, provided that there is another subfragment with the same end present in the file. The main problem here is of precise definition of overlapping sequence. The presence of at least two specific false negative k-tuples on the points of repetition of k−1 or k−2 sequences, as well as combining of the false positive and false negative k-tuples may destroy or “mask” some overlapping sequences and can produce an unambiguous, but wrong connection of pSFs. To prevent this, completeness must be sacrificed on account of exactness: the connection is not permitted on the end-sequences shorter than k−2, and in the presence of an extra overlapping sequence longer than k−4. The overlapping sequences are defined from the end of the pSFs, or omitting one, or few last bases.

[0597] In the very rare situations, with the presence of a certain number of some specific false positive and false negative k-tuples, some subfragments with the wrong end can survive, some false positive k-tuples (as minimal subfragments) can remain, or the erroneous connection can take place. These cases are detected and solved in the subfragments ordering process, and in the additional control steps along with the handling of uncut, misconnected subfragments.

[0598] The process of ordering of subfragments is similar to the process of their generation. If one considers subfragments as longer k-tuples, ordering is performed by their unambiguous connection via overlapping ends. The informational basis for unambiguous connection is the division of subfragments generated in fragments of the basic library into groups representing segments of those fragments. The method is analogous to the biochemical solution of this problem based on hybridization with longer oligonucleotides with relevant connecting sequence. The connecting sequences are generated as subfragments using the k-tuple sets of the appropriate segments of basic library fragments. Relevant segments are defined by the fragments of the ordering library that overlap with the respective fragments of the basic library. The shortest segments are informative fragments of the ordering library. The longer ones are several neighboring informative fragments or total overlapping portions of fragments corresponding of the ordering and basic libraries. In order to decrease the number of separate samples, fragments of the ordering library are randomly pooled, and the unique k-tuple content is determined.

[0599] By using the large number of fragments in the ordering library very short segments are generated, thus reducing the chance of the multiple appearance of the k−1 sequences which are the reasons for generation of the subfragments. Furthermore, longer segments, consisting of the various regions of the given fragment of the basic library, do not contain some of the repeated k−1 sequences. In every segment a connecting sequence (a connecting subfragment) is generated for a certain pair of the subfragments from the given fragment. The process of ordering consists of three steps: (1) generation of the k-tuple contents of each segment; (2) generation of subfragments in each segment; and (3) connection of the subfragments of the segments. Primary segments are defined as significant intersections and differences of k-tuple contents of a given fragment of the basic library with the k-tuple contents of the pools of the ordering library. Secondary (shorter) segments are defined as intersections and differences of the k-tuple contents of the primary segments.

[0600] There is a problem of accumulating both false positive and negative k-tuples in both the differences and intersections. The false negative k-tuples from starting sequences accumulate in the intersections (overlapping parts), as well as false positive k-tuples occurring randomly in both sequences, but not in the relevant overlapping region. On the other hand, the majority of false positives from either of the starting sequences is not taken up into intersections. This is an example of the reduction of experimental errors from individual fragments by using information from fragments overlapping with them. The false k-tuples accumulate in the differences for another reason. The set of false negatives from the original sequences are enlarged for false positives from intersections and the set of false positives for those k-tuples which are not included in the intersection by error, i.e. are false negative in the intersection. If the starting sequences contain 10% false negative data, the primary and secondary intersections will contain 19% and 28% false negative k-tuples. respectively. On the other hand, a mathematical expectation of 77 false positives may be predicted if the basic fragment and the pools have lengths of 500 bp and 10,000 bp, respectively. However, there is a possibility of recovering most of the “lost” k-tuples and of eliminating most of the false positive k-tuples.

[0601] First, one has to determine a basic content of the k-tuples for a given segment as the intersection of a given pair of the k-tuple contents. This is followed by including all k-tuples of the starting k-tuple contents in the intersection, which contain at one end k−1 and at the other end k−+ sequences which occur at the ends of two k-tuples of the basic set. This is done before generation of the differences thus preventing the accumulation of false positives in that process. Following that, the same type of enlargement of k-tuple set is applied to differences with the distinction that the borrowing is from the intersections. All borrowed k-tuples are eliminated from the intersection files as false positives.

[0602] The intersection, i.e. a set of common k-tuples, is defined for each pair (a basic fragment)×(a pool of ordering library). If the number of k-tuples in the set is significant it is enlarged with the false negatives according to the described rule. The primary difference set is obtained by subtracting from a given basic fragment the obtained intersection set. The false negative k-tuples are appended to the difference set by borrowing from the intersection set according to the described rule and, at the same time, removed from the intersection set as false positive k-tuples. When the basic fragment is longer than the pooled fragments, this difference can represent the two separate segments which somewhat reduces its utility in further steps. The primary segments are all generated intersections and differences of pairs (a basic fragment)×(a pool of ordering library) containing the significant number of k-tuples. K-tuple sets of secondary segments are obtained by comparison of k-tuple sets of all possible pairs of primary segments. The two differences are defined from each pair which produces the intersection with the significant number of k-tuples. The majority of available information from overlapped fragments is recovered in this step so that there is little to be gained from the third round of forming intersections, and differences.

[0603] (2) Generation of the subfragments of the segments is performed identically as described for the fragments of the basic library.

[0604] (3) The method of connection of subfragments consists of sequentially determining the correctly linked pairs of subfragments among the subfragments from a given basic library fragment which have some overlapped ends. In the case of 4 relevant subfragments, two of which contain the same beginning and two having the same end, there are 4 different pairs of subfragments that can be connected. In general 2 are correct and 2 are wrong. To find correct ones, the presence of the connecting sequences of each pair is tested in the subfragments generated from all primary and secondary segments for a given basic fragment. The length and the position of the connecting sequence are chosen to avoid interference with sequences which occur by chance. They are k+2 or longer, and include at least one element 2 beside overlapping sequence in both subfragments of a given pair. The connection is permitted only if the two connecting sequences are found and the remaining two do not exist. The two linked subfragments replace former subfragments in the file and the process is cyclically repeated. Repeated sequences are generated in this step. This means that some subfragments are included in linked subfragments more than once. They will be recognized by finding the relevant connecting sequence which engages one subfragment in connection with two different subfragments.

[0605] The recognition of misconnected subfragments generated in the processes of building pSFs and merging pSFs into longer subfragments is based on testing whether the sequences of subfragments from a given basic fragment exist in the sequences of subfragments generated in the segments for the fragment. The sequences from an incorrectly connected position will not be found indicating the misconnected subfragments.

[0606] Beside the described three steps in ordering of subfragments some additional control steps or steps applicable to specific sequences will be necessary for the generation of more complete sequence without mistakes.

[0607] The determination of which subfragment belongs to which segment is performed by comparison of contents of k-tuples in segments and subfragments. Because of the errors in the k-tuple contents (due to the primary error in pools and statistical errors due to the frequency of occurrences of k-tuples) the exact partitioning of subfragments is impossible. Thus, instead of “all or none” partition, the chance of coming from the given segment (P(sf,s)) is determined for each subfragment. This possibility is the function of the lengths of k-tuples, the lengths of subfragments, the lengths of fragments of ordering library, the size of the pool, and of the percentage of false k-tuples in the file:

P(sf,s)=(Ck−F)/Lsf,

[0608] where Lsf is the length of subfragment, Ck is the number of common k-tuples for a given subfragment/segment pair, and F is the parameter that includes relations between lengths of k-tuples, fragments of basic library, the size of the pool, and the error percentage.

[0609] Subfragments attributed to a particular segment are treated as redundant short pSFs and are submitted to a process of unambiguous connection. The definition of unambiguous connection is slightly different in this case, since it is based on a probability that subfragments with overlapping end(s) belong to the segment considered. Besides, the accuracy of unambiguous connection is controlled by following the connection of these subfragments in other segments. After the connection in different segments, all of the obtained subfragments are merged together, shorter subfragments included within longer ones are eliminated, and the remaining ones are submitted to the ordinary connecting process. If the sequence is not regenerated completely, the process of partition and connection of subfragments is repeated with the same or less severe criterions of probability of belonging to the particular segment, followed by unambiguous connection.

[0610] Using severe criteria for defining unambiguous overlap, some information is not used. Instead of a complete sequence, several subfragments that define a number of possibilities for a given fragment are obtained. Using less severe criteria an accurate and complete sequence is generated. In a certain number of situations, e.g., an erroneous connection, it is possible to generate a complete, but an incorrect sequence, or to generate “monster” subfragments with no connection among them. Thus, for each fragment of the basic library one obtains: a) several possible solutions where one is correct and b) the most probable correct solution. Also, in a very small number of cases, due to the mistake in the subfragment generation process or due to the specific ratio of the probabilities of belonging. no unambiguous solution is generated or one, the most probable solution. These cases remain as incomplete sequences, or the unambiguous solution is obtained by comparing these data with other, overlapped fragments of basic library.

[0611] The described algorithm was tested on a randomly generated, 50 kb sequence, containing 40% GC to simulate the GC content of the human genome. In the middle part of this sequence were inserted various All, and some other repetitive sequences, of a total length of about 4 kb. To simulate an in vitro SBH experiment, the following operations were performed to prepare appropriate data.

[0612] 1) Positions of sixty 5 kb overlapping “clones” were randomly defined, to simulate preparation of a basic library:

[0613] 2) Positions of one thousand 500 bp “clones” were randomly determined to simulate making the ordering library. These fragments were extracted from the sequence. Random pools of 20 fragments were made, and k-tuple sets of pools were determined and stored on the hard disk. These data are used in the subfragment ordering phase: For the same density of clones 4 million clones in basic library and 3 million clones in ordering library are used for the entire human genome. The total number of 7 million clones is several fold smaller than the number of clones a few kb long for random cloning of almost all of genomic DNA and sequencing by a gel-based method.

[0614] From the data on the starts and ends of 5 kb fragments, 117 “informative fragments” were determined to be in the sequence. This was followed by determination of sets of overlapping k-tuples of which the single “informative fragment” consist. Only the subset of k-tuples matching a predetermined list were used. The list contained 65% 8-mers, 30% 9-mers, and 5% 10-12-mers. Processes of generation and the ordering of subfragments were performed on these data.

[0615] The testing of the algorithm was performed on the simulated data in two experiments. The sequence of 50 informative fragments was regenerated with the 100% correct data set (over 20,000 bp), and 26 informative fragments (about 10,000 bp) with 10% false k-tuples (5% positive and 5% negative ones).

[0616] In the first experiment, all subfragments were correct and in only one out of 50 informative fragments the sequence was not completely regenerated but remained in the form of 5 subfragments. The analysis of positions of overlapped fragments of ordering library has shown that they lack the information for the unique ordering of the 5 subfragments. The subfragments may be connected in two ways based on overlapping ends, 1-2-3-4-5 and 1-4-3-2-5. The only difference is the exchange of positions of subfragments 2 and 4. Since subfragments 2, 3, and 4 are relatively short (total of about 100 bp), the relatively greater chance existed, and occurred in this case, that none of the fragments of ordering library started or ended in the subfragment 3 region.

[0617] To simulate real sequencing, some false (“hybridization”) data was included as input in a number of experiments. In oligomer hybridization experiments, under proposed conditions, the only situation producing unreliable data is the end mismatch versus full match hybridization. Therefore, in simulation only those k-tuples differing in a single element on either end from the real one were considered to be false positives. These “false” sets are made as follows. On the original set of a k-tuples of the informative fragment, a subset of 5% false positive k-tuples are added. False positive k-tuples are made by randomly picking a k-tuple from the set, copying it and altering a nucleotide on its beginning or end. This is followed by subtraction of a subset of 5% randomly chosen k-tuples. In this way the statistically expected number of the most complicated cases is generated in which the correct k-tuple is replaced with a k-tuple with the wrong base on the end.

[0618] Production of k-tuple sets as described leads to up to 10% of false data. This value varies from case to case, due to the randomness of choice of k-tuples to be copied, altered, and erased. Nevertheless, this percentage 3-4 times exceeds the amount of unreliable data in real hybridization experiments. The introduced error of 10% leads to the two fold increase in the number of subfragments both in fragments of basic library (basic library informative fragments) and in segments. About 10% of the final subfragments have a wrong base at the end as expected for the k-tuple set which contains false positives (see generation of primary subfragments). Neither the cases of misconnection of subfragments nor subfragments with the wrong sequence were observed. In 4 informative fragments out of 26 examined in the ordering process the complete sequence was not regenerated. In all 4 cases the sequence was obtained in the form of several longer subfragments and several shorter subfragments contained in the same segment. This result shows that the algorithmic principles allow working with a large percentage of false data.

[0619] The success of the generation of the sequence from its k-tuple content may be described in terms of completeness and accuracy. In the process of generation, two particular situations can be defined: 1) Some part of the information is missing in the generated sequence, but one knows where the ambiguities are and to which type they belong, and 2) the regenerated sequence that is obtained does not match the sequence from which the k-tuple content is generated, but the mistake can not be detected. Assuming the algorithm is developed to its theoretical limits, as in the use of the exact k-tuple sets, only the first situation can take place. There the incompleteness results in a certain number of subfragments that may not be ordered unambiguously and the problem of determination of the exact length of monotonous sequences, i.e. the number of perfect tandem repeats.

[0620] With false k-tuples, incorrect sequences may be generated. The reason for mistakes does not lie in the shortcomings of the algorithm, but in the fact that a given content of k-tuples unambiguously represents the sequence that differs from the original one. One may define three classes of error, depending on the kind of the false k-tuples present in the file. False negative k-tuples (which are not accompanied with the false. positives) produce “deletions”. False positive k-tuples are producing “elongations (unequal crossing over)”. False positives accompanied with false negatives are the reason for generation of “insertions”, alone or combined with “deletions”. The deletions are produced when all of the k-tuples (or their majority) between two possible starts of the subfragments are false negatives. Since every position in the sequence is defined by k-tuples, the occurrence of the deletions in a common case requires k consecutive false negatives. (With 10% of the false negatives and k=8, this situation takes place after every 108 elements). This situation is extremely infrequent even in mammalian genome sequencing using random libraries containing ten genome equivalents.

[0621] Elongation of the end of the sequence caused by false positive k-tuples is the special case of “insertions”, since the end of the sequence can be considered as the endless linear array of false negative k-tuples. One may consider a group of false positive k-tuples producing subfragments longer than one k-tuple. Situations of this kind may be detected if subfragments are generated in overlapped fragments, like random physical fragments of the ordering library. An insertion, or insertion in place of a deletion, can arise as a result of specific combinations of false positive and false negative k-tuples. In the first case. the number of consecutive false negatives is smaller than k. Both cases require several overlapping false positive k-tuples. The insertions and deletions are mostly theoretical possibilities without sizable practical repercussions since the requirements in the number and specificity of false k-tuples are simply too high.

[0622] In every other situation of not meeting the theoretical requirement of the minimal number an the kind of the false positive and/or negatives, mistakes in the k-tuples content may produce only the lesser completeness of a generated sequence.

[0623] In SBH, a sample nucleic acid is sequenced by exposing the sample to a support-bound probe of known sequence and a labeled probe or probes in solution. Wherever the probes ligase is introduced into the mixture of probes and sample, such that, wherever a support has a bound probe and a labeled probe hybridized back to back along the sample, the two probes will be chemically linked by the action of the ligase. After washing, only chemically linked support-bound and labeled probes are detected by the presence of the labeled probe. By knowing the identity of the support-bound probe at a particular location in an array, and the identity of the labeled probe, a portion of the sequence of the sample may be determined by the presence of a label at a point in an array on a Format with a sample of three substrates Not all of the sample to be sequenced may be a nucleic acid fragment or oligonucleotide of ten base pairs (“bp”). The sample is preferably four to one thousand bases in length.

[0624] The length of the probe is a fragment less than ten bases in length, and, preferably, is between four and nine bases in length. In this way, arrays of support-bound probes may include all oligonucleotides of a given length or may include only oligonucleotides selected for a particular test. Where all oligonucleotides of a given length are used, the number of central oligonucleotides may be calculated by ₄N where N is the length of the probe.

[0625] 5.36 Re-Using Sequencing Chips

[0626] When ligation is employed in the sequencing process, then the ordinary oligonucleotide chip cannot be immediately reused. The inventors contemplate that this may be overcome in various ways.

[0627] One may employ ribonucleotides for the second probe, probe P, so that this probe may subsequently be removed by RNAse treatment. RNAse treatment may utilize RNAse A, an endoribonuclease that specifically attacks single-stranded RNA 3′-to pyrimidine residues and cleaves the phosphate linkage to the adjacent nucleotide. The end products are pyrimidine 3′ phosphates and oligonucleotides with terminal pyrimidine 3′ phosphates. RNAse A works in the absence of cofactors and divalent cations.

[0628] To utilize an RNAse, one would generally incubate the chip in any appropriate RNAse-containing buffer, as described by Sambrook et al. (1989; incorporated herein by reference). The use of 30-50 μl of RNAse-containing buffer per 8×8 mm or 9×9 mm array at 37° C. for between 10 and 60 minutes is appropriate. One would then wash with hybridization buffer.

[0629] Although not widely applicable, one could also use the uracil base, as described by Craig et al. (1989), incorporated herein by reference, in specific embodiments. Destruction of the ligated probe combination, to yield a re-usable chip, would be achieved by digestion with the E. coli repair enzyme, uracil-DNA glycosylase which removes uracil from DNA.

[0630] One could also generate a specifically cleavable bond between the probes and then cleave the bond after detection. For example, this may be achieved by chemical ligation as described by Shabarova et al., (1991) and Dolmnnaya et at, (1988), both references being specifically incorporated herein by reference.

[0631] Shabarova et al. (1991) describe the condensation of oligodeoxyribonucleotides with cyanogen bromide as a condensing agent. In their one step chemical ligation reaction, the oligonucleotides are heated to 97° C., slowly cooled to 0° C., then 1 μl 10 mM BrCN in acetonitrile is added.

[0632] Dolmnnaya et al. (1988) show how to incorporate phosphoramidite and pyrophosphate internucleotide bonds in DNA duplexes. They also use a chemical ligation method for modification of the sugar phosphate backbone of DNA, with a water-soluble carbodiimide (CDI) as a coupling agent. The selective cleavage of a phosphoamide bond involves contact with 15% CH₃COOH for 5 mm at 95° C. The selective cleavage of a pyrophosphate bond involves contact with a pyridine-water mixture (9:1) and freshly distilled (CF₃CO)₂O.

[0633] 5.37 Diagnostics—Scoring Known Mutations or Full Gene Resequencing

[0634] In a simple case, the goal may be to discover whether selected, known mutations occur in a DNA segment. Less than 12 probes may suffice for this purpose, for example, probes positive for one allele, 5 positive for the other, and 2 negative for both. Because of the small number of probes to be scored per sample, large numbers of samples may be analyzed in parallel. For example, with 12 probes in 3 hybridization cycles, 96 different genomic loci or gene segments from 64 patient may be analyzed on one 6×9 in membrane containing 12×24 subarrays each with 64 dots representing the same DNA segment from 64 patients. In this example, samples may be prepared in sixty-four 96-well plates. Each plate may represent one patient, and each well may represent one of the DNA segments to be analyzed. The samples from 64 plates may be spotted in four replicas as four quarters of the same membrane.

[0635] A set of 12 probes may be selected by single channel pipetting or by a single pin transferring device (or by an array of individually-controlled pipets or pins) for each of the 96 segments, and the selected probes may be arrayed in twelve 96-well plates. Probes may be labelled, if they are not prelabelled, and then probes from four plates may be mixed with hybridization buffer and added to the subarrays preferentially by a 96-channel pipeting device. After one hybridization cycle it is possible to strip off previously-applied probes by incubating the membrane at 37° to 55° C. in the preferably undiluted hybridization or washing buffer.

[0636] The likelihood that probes positive for one allele are positive and probes positive for the other allele are negative may be used to determine which of the two alleles is present. In this redundant scoring scheme, some level (about 10%) of errors in hybridization of each probe may be tolerated.

[0637] An incomplete set of probes may be used for scoring most of the alleles, especially if the smaller redundancy is sufficient, e.g., one or two probes which prove the presence or absence in a sample of one of the two alleles. For example, with a set of four thousand 8-mers there is a 91% chance of finding at least one positive probe for one of the two alleles for a randomly selected locus. The incomplete set of probes may be optimized to reflect G+C content and other biases in the analyzed samples.

[0638] For full gene sequencing, genes may be amplified in an appropriate number of segments. For each segment, a set of probes (about one probe per 2-4 bases) may be selected and hybridized. These probes may identify whether there is a mutation anywhere in the analyzed segments. Segments (i.e., subarrays which contain these segments) where one or more mutated sites are detected may be hybridized with additional probes to find the exact sequence at the mutated sites. If a DNA sample is tested by every second 6-mer, and a mutation is localized at the position that is surrounded by positively hybridized probes TGCAAA and TATTCC and covered by three negative probes: CAAAAC, AAACTA and ACTATT, the mutated nucleotides must be A and/or C occurring in the normal sequence at that position. They may be changed by a single base mutation, or by a one or two nucleotide deletion and/or insertion between bases AA, AC or CT.

[0639] One approach is to select a probe that extends the positively hybridized probe TGCAAA for one nucleotide to the right, and which extends the probe TATTCC one nucleotide to the left, With these 8 probes (GCAAAA, GCAAAT, GCAAAC, GCAAAG and ATATTC, TTATTC, CTATTC, GTATTC) two questionable nucleotides are determined.

[0640] The most likely hypothesis about the mutation may be determined. For example, A is found to be mutated to G. There are two solutions satisfied by these results. Either replacement of A with G is the only change or there is in addition to that change an insertion of some number of bases between newly determined G and the following C. If the result with bridging probes is negative these options may then be checked first by at least one bridging probe comprising the mutated position (AAGCTA) and with an additional 8 probes: CAAAGA, CAAAGT, CAAAGC, CAAAGG and ACTATT, TCTATT, CCTATT, GCTATT, There are many other ways to select mutation-solving probes.

[0641] In the case of diploid, particular comparisons of scores for the test samples and homozygotic control may be performed to identify heterozygotes (see above). A few consecutive probes are expected to have roughly twice smaller signals if the segment covered by these probes is mutated on one of the two chromosomes.

[0642] 5.38 Identification of Genes (Mutations) Responsible for Genetic Disorders and Other Traits

[0643] Using universal sets of longer probes (8-mers or 9-mers) on immobilized arrays of samples, DNA fragments as long as 5-20 kb may be sequenced without subcloning. Furthermore, the speed of sequencing readily may be about 10 million bp/day/hybridization instrument. This performance allows for resequencing a large fraction of human genes or the human genome repeatedly from scientifically or medically interesting individuals. To resequence 50% of the human genes, about 100 million bp is checked. That may be done in a relatively short period of time at an affordable cost.

[0644] This enormous resequencing capability may be used in several ways to identify mutations and/or genes that encode for disorders or any other traits. Basically, mRNAs (which may be converted into cDNAs) from particular tissues or genomic DNA of patients with particular disorders may be used as starting materials. From both sources of DNA, separate genes or genomic fragments of appropriate length may be prepared either by cloning procedures or by in vitro amplification procedures (for example by PCR). If cloning is used, the minimal set of clones to be analyzed may be selected from the libraries before sequencing. That may be done efficiently by hybridization of a small number of probes, especially if a small number of clones longer than 5 kb is to be sorted. Cloning may increase the amount of hybridization data about two times, but does not require tens of thousands of PCR primers.

[0645] In one variant of the procedure, gene or genomic fragments may be prepared by restriction cutting with enzymes like Hga I which cuts DNA in following way: GACGC(N5′)/CTGCG(N10′). Protruding ends of five bases are different for different fragments. One enzyme produces appropriate fragments for a certain number of genes. By cutting cDNA or genomic DNA with several enzymes in separate reactions, every gene of interest may be excised appropriately. In one approach, the cut DNA is fractionated by size. DNA fragments prepared in this way (and optionally treated with Exonuclease III which individually removes nucleotides from the 3′ end and increases length and specificity of the ends) may be dispensed in the tubes or in multiwell plates. From a relatively small set of DNA adapters with a common portion and a variable protruding end of appropriate length, a pair of adapters may be selected for every gene fragment that needs to be amplified. These adapters are ligated and then PCR is performed by universal primers. From 1000 adapters, a million pairs may be generated, thus a million different fragments may be specifically amplified in the identical conditions with a universal pair of primers complementary to the common end of the adapters.

[0646] If a DNA difference is found to be repeated in several patients, and that sequence change is nonsense or can change function of the corresponding protein, then the mutated gene may be responsible for the disorder. By analyzing a significant number of individuals with particular traits, functional allelic variations of particular genes could be associated by specific traits.

[0647] This approach may be used to eliminate the need for very expensive genetic mapping on extensive pedigrees and has special value when there is no such genetic data or material.

[0648] 5.39 Scoring Single Nucleotide Polymorphisms in Genetic Mapping

[0649] Techniques disclosed in this application are appropriate for an efficient identification of genomic fragments with single nucleotide polymorphisms (SNUPs). In 10 individuals by applying the described sequencing process on a large number of genomic fragments of known sequence that may be amplified by cloning or by in vitro amplification, a sufficient number of DNA segments with SNUPs may be identified. The polymorphic fragments are further used as SNUP markers. These markers are either mapped previously (for example they represent mapped STSs) or they may be mapped through the screening procedure described below.

[0650] SNUPs may be scored in every individual from relevant families or populations by amplifying markers and arraying them in the form of the array of subarrays. Subarrays contain the same marker amplified from the analyzed individuals. For each marker, as in the diagnostics of known mutations, a set of 6 or less probes positive for one allele and 6 or less probes positive for the other allele may be selected and scored. From the significant association of one or a group of the markers with the disorder, chromosomal position of the responsible gene(s) may be determined. Because of the high throughput and low cost, thousands of markers may be scored for thousands of individuals. This amount of data allows localization of a gene at a resolution level of less than one million bp as well as localization of genes involved in polygenic diseases. Localized genes may be identified by sequencing particular regions from relevant normal and affected individuals to score a mutation(s).

[0651] PCR is preferred for amplification of markers from genomic DNA. Each of the markers require a specific pair of primers. The existing markers may be convertible or new markers may be defined which may be prepared by cutting genomic DNA by Hga I type restriction enzymes, and by ligation with a pair of adapters.

[0652] SNUP markers can be amplified or spotted as pools to reduce the number of independent amplification reactions. In this case, more probes are scored per one sample. When 4 markers are pooled and spotted on 12 replica membranes, then 48 probes (12 per marker) may be scored in 4 cycles.

[0653] 5.40 Detection and Verification of Identity of DNA Fragments

[0654] DNA fragments generated by restriction cutting, cloning or in vitro amplification (e.g. PCR) frequently may be identified in a experiment. Identification may be performed by verifying the presence of a DNA band of specific size on gel electrophoresis.

[0655] Alternatively, a specific oligonucleotide may be prepared and used to verify a DNA sample in question by hybridization. The procedure developed here allows for more efficient identification of a large number of samples without preparing a specific oligonucleotide for each fragment. A set of positive and negative probes may be selected from the universal set for each fragment on the basis of the known sequences. Probes that are selected to be positive usually are able to form one or a few overlapping groups and negative probes are spread over the whole insert.

[0656] This technology may be used for identification of STSs in the process of their mapping on the YAC clones. Each of the STSs may be tested on about 100 YAC clones or pools of YAC clones. DNAs from these 100 reactions possibly are spotted in one subarray. Different STSs may represent consecutive subarrays. In several hybridization cycles, a signature may be generated for each of the DNA samples, which signature proves or disproves existence of the particular STS in the given YAC clone with necessary confidence.

[0657] To reduce the number of independent PCR reactions or the number of independent samples for spotting, several STSs may be amplified simultaneously in a reaction or PCR samples may be mixed, respectively. In this case more probes have to be scored per one dot. The pooling of STSs is independent of pooling YACs and may be used on single YACs or pools of YACs. This scheme is especially attractive when several probes labelled with different colors are hybridized together.

[0658] In addition to confirmation of the existence of a DNA fragment in a sample, the amount of DNA may be estimated using intensities of the hybridization of several separate probes or one or more pools of probes. By comparing obtained intensities with intensities for control samples having a known amount of DNA, the quantity of DNA in all spotted samples is determined simultaneously. Because only a few probes are necessary for identification of a DNA fragment, and there are N possible probes that may be used for DNA N bases long, this application does not require a large set of probes to be sufficient for identification of any DNA segment. From one thousand 8-mers, on average about 30 full matching probes may be selected for a 1000 bp fragment.

[0659] 5.41 Identification of Infectious Disease Organisms and Their Variants

[0660] DNA-based tests for the detection of viral, bacterial, fungal and other parasitic organisms in patients are usually more reliable and less expensive than alternatives. The major advantage of DNA tests is to be able to identify specific strains and mutants, and eventually be able to apply more effective treatment. Two applications are described below.

[0661] The presence of 12 known antibiotic resistance genes in bacterial infections may be tested by amplifying these genes. The amplified products from 128 patients may be spotted in two subarrays and 24 subarrays for 12 genes may then be repeated four times on a 8×12 cm membrane. For each gene, 12 probes may be selected for positive and negative scoring. Hybridizations may be performed in 3 cycles. For these tests, a much smaller set of probes is most likely to be universal. For example, from a set of one thousand 8-mers, on average 30 probes are positive in 1000 bp fragments, and 10 positive probes are usually sufficient for a highly reliable identification. As described in Section 5.22, several genes may be amplified and/or spotted together and the amount of the given DNA may be determined. The amount of amplified gene may be used as an indicator of the level of infection.

[0662] Another example involves possible sequencing of one gene or the whole genome of an HIV virus. Because of rapid diversification, the virus poses many difficulties for selection of an optimal therapy. DNA fragments may be amplified from isolated viruses from up to 64 patients and resequenced by the described procedure. On the basis of the obtained sequence the optimal therapy may be selected. If there is a mixture of two virus types of which one has the basic sequence (similar to the case of heterozygotes), the mutant may be identified by quantitative comparisons of its hybridization scores with scores of other samples, especially control samples containing the basic virus type only. Scores twice as small may be obtained for three to four probes that cover the site mutated in one of the two virus types present in the sample (see above).

[0663] 5.42 Forensic and Parental Identification

[0664] Sequence polymorphisms make an individual genomic DNA unique. This permits analysis of blood or other body fluids or tissues from a crime scene and comparison with samples from criminal suspects. A sufficient number of polymorphic sites are scored to produce a unique signature of a sample. SBH may easily score single nucleotide polymorphisms to produce such signatures.

[0665] A set of DNA fragments (10-1000 mer) may be amplified from samples and suspects. DNAs from samples and suspects representing one fragment are spotted in one or several subarrays and each subarray may be replicated 4 times. In three cycles, 12 probes may determine the presence of allele A or B in each of the samples, including suspects, for each DNA locus. Matching the patterns of samples and suspects may lead to discovery of the suspect responsible for the crime.

[0666] The same procedure may be applicable to prove or disprove the identity of parents of a child. DNA may be prepared and polymorphic loci amplified from the child and adults; patterns of A or B alleles may be determined by hybridization for each. Comparisons of the obtained patterns, along with positive and negative controls, aide in the determination of familial relationships. In this case, only a significant portion of the alleles need match with one parent for identification. Large numbers of scored loci allow for the avoidance of statistical errors in the procedure or of masking effects of de novo mutations.

[0667] 5.43 Assessing Genetic Diversity of Populations or Species and Biological Diversity of Ecological Niches

[0668] Measuring the frequency of allelic variations on a significant umber of loci (for example, several genes or entire mitochondrial DNA) permits development of different types of conclusions, such as conclusions regarding the impact of the environment on the genotypes, history and evolution of a population or its susceptibility to diseases or extinction, and others. These assessments may be performed by testing specific known alleles or by full resequencing of some loci to be able to define de novo mutations which may reveal fine variations or presence of mutagens in the environment.

[0669] Additionally, biodiversity in the microbial world may be surveyed by resequencing evolutionarily conserved DNA sequences, such as the genes for ribosomal RNAs or genes for highly conservative proteins. DNA may be prepared from the environment and particular genes amplified using primers corresponding to conservative sequences. DNA fragments may be cloned preferentially in a plasmid vector (or diluted to the level of one molecule per well in multiwell plates and than amplified in vitro). Clones prepared this way may be resequenced as described above. Two types of information are obtained. First of all, a catalogue of different species may be defined as well as the density of the individuals for each species. Another segment of information may be used to measure the influence of ecological factors or pollution on the ecosystem. It may reveal whether some species are eradicated or whether the abundance ratios among species is altered due to the pollution. The method also is applicable for sequencing DNA from fossils.

[0670] 5.44 Detection or Quantification of Nucleic Acid Species

[0671] DNA or RNA species may be detected and quantified by employing a probe pair including an unlabeled probe fixed to a substrate and a labeled probe in a solution. The species may be detected and quantified by exposure to the unlabeled probe in the presence of the labeled probe and ligase. Specifically, the formation of an extended probe by ligation of the labeled and unlabeled probe on the sample nucleic acid backbone is indicative of the presence of the species to be detected. Thus, the presence of label at a specific point in the array on the substrate after removing unligated labeled probe indicates the presence of a sample species while the quantity of label indicates the expression level of the species.

[0672] Alternatively, one or more unlabeled probes may be arrayed on a substrate as first members of pairs with one or more labeled probes to be introduced in solution. According to one method, multiplexing of the label on the array may be carried out by using dyes which fluoresce at distinguishable wavelengths. In this manner, a mixture of cDNAs applied to an array with pairs of labeled and unlabeled probes specific for species to be identified may be examined for the presence of and expression level of cDNA species. According to a preferred embodiment this approach may be carried out to sequence portions of cDNAs by selecting pairs of unlabeled and labeled probes pairs comprising sequences which overlap along the sequence of a cDNA to be detected.

[0673] Probes may be selected to detect the presence and quantity of particular pathogenic organisms genome by including in the composition selected probe pairs which appear in combination only in target pathogenic genome organisms. Thus, while no single probe pair may necessarily be specific for the pathogenic organism genome, the combination of pairs is. Similarly, in detecting or sequencing cDNAs, it might occur that a particular probe is not be specific for a cDNA or other type of species. Nevertheless, the presence and quantity of a particular species may be determined by a result wherein a combination of selected probes situated at distinct array locations is indicative of the presence of a particular species.

[0674] An infectious agent with about 10 kb or more of DNA may be detected using a support-bound detection chip without the use of polymerase chain reaction (PCR) or other target amplification procedures. According to other methods, the genomes of infectious agents including bacteria and viruses are assayed by amplification of a single target nucleotide sequence through PCR and detection of the presence of target by hybridization of a labelled probe specific for the target sequence. Because such an assay is specific for only a single target sequence it therefore is necessary to amplify the gene by methods such as PCR to provide sufficient target to provide a detectable signal.

[0675] According to this example, an improved method of detecting nucleotide sequences characteristic of infectious agents through a Format 3-type reaction is provided wherein a solid phase detection chip is prepared which comprises an array of multiple different immobilized oligonucleotide probes specific for the infectious agent of interest: A single dot comprising a mixture of many unlabeled probes complementary to the target nucleic acid concentrates the label specific to a species at one location thereby improving sensitivity over diffuse or single probe labeling. Such multiple probes may be of overlapping sequences of the target nucleotide sequence but may also be non-overlapping sequences as well as non-adjacent. Such probes preferably have a length of about 5 to 12 nucleotides.

[0676] A nucleic acid sample exposed to the probe array and target sequences present in the sample will hybridize with the multiple immobilized probes. A pool of multiple labeled probes selected to specifically bind to the target sequences adjacent to the immobilized probes is then applied with the sample to an array of unlabeled oligonucleotide probe mixtures. Ligase enzyme is then applied to the chip to ligate the adjacent probes on the sample. The detection chip is then washed to remove unhybridized and unligated probe and sample nucleic acids and the presence of sample nucleic acid may be determined by the presence or absence of label. This method provides reliable sample detection with about a 1000-fold reduction of molarity of the sample agent.

[0677] As a further aspect of the invention, the signal of the labelled probes may be amplified by means such as providing a common tail to the free probe which itself comprises multiple chromogenic, enzymatic or radioactive labels or which is itself susceptible to specific binding by a further probe agent which is multiply labelled. In this way, a second round of signal amplification may be carried out. Labeled or unlabeled probes may be used in a second round of amplification. In this second round of amplification, a lengthy DNA sample with multiple labels may result in an increased amplification intensity signal between 10 to 100 fold which may result in a total signal amplification of 100,000 fold. Through the use of both aspects of this example, an intensity signal approximately 100,000 fold may give a positive result of probe-DNA ligation without having to employ PCR or other amplification procedures.

[0678] According to a further aspect of the invention an array or super array may be prepared which consists of a complete set of probes, for example 4096 6-mer probes. Arrays of this type are universal in a sense that they can be used for detection or partial to complete sequencing of any nucleic acid species. Individual spots in an array may contain single probe species or mixtures of probes, for example N(1-3) B(4-6) N(1-3) type of mixtures that are synthesized in the single reaction (N represents all four nucleotides, B one specific nucleotide and where the associated numbers are a range of numbers of bases i.e., 1-3 means “from one to three bases”). These mixtures provide stronger signal for a nucleic acid species present at low concentration by collecting signal from different parts of the same long nucleic acid species molecule. The universal set of probes may be subdivided in many subsets which are spotted as unit arrays separated by barriers that prevent spreading of hybridization buffer with sample and labeled probe(s).

[0679] For detection of a nucleic acid species with a known sequence one of more oligonucleotide sequences comprising both unlabelled fixed and labeled probes in solution may be selected. Labeled probes are synthesized or selected from the presynthesized complete sets of, for example, 7-mers. The labeled probes are added to corresponding unit arrays of fixed probes such that a pair of fixed and labeled probes will adjacently hybridize to the target sequence such that upon administration of ligase the probes will be covalently bound.

[0680] If a unit array contains more than one fixed probe (as separated spots or within the same spot) that are positive in a given nucleic acid species all corresponding labeled probes may be mixed and added to the same unit array. The mixtures of labeled probes are even more important when mixtures of nucleic acid species are tested. One example of a complex mixture of nucleic acid species are mRNAs in one cell or tissue.

[0681] According to one embodiment of the invention unit arrays of fixed probes allow use of every possible immobilized probe with cocktails of a relatively small number of labeled probes. More complex cocktails of labeled probes may be used if a multiplex labeling scheme is implemented. Preferred multiplexing methods may use different fluorescent dyes or molecular tags that may be separated by mass spectroscopy.

[0682] Alternatively, according to a preferred embodiment of the invention, relatively short fixed probes may be selected which frequently hybridize to many nucleic acid sequences. Such short probes are used in combination with a cocktail of labeled probes which may be prepared such that at least one labeled probe corresponds to each of the fixed proves. Preferred cocktails are those in which none of the labeled probes corresponds to more than one fixed probe.

[0683] 5.45 Interrogation of Segments of the HIV Virus with All Possible 5-mers

[0684] In this example of Format III SBH, an array was generated on nylon membranes (e.g., Gene Screen) of all possible bound 5-mers (1024 possible pentamers). The bound 5-mer oligonucleotides were synthesized with 5′ tails of 5′-TTTTTT-NNN-3′ (N=all four bases A, C, G, T, at this step in the synthesis equal molar amounts of all four bases are added). These oligonucleotides were precisely spotted onto the nylon membrane, the spots were allowed to dry, and the oligonucleotides were immobilized by treating the dried spots with UV light. Oligonucleotide densities of up to 18 oligonucleotides per square nanometer were obtained using this method. After the UV treatment, the nylon membranes were treated with a detergent containing buffer at 60-80° C. The spots of oligonucleotides were gridded in subarrays of 10 by 10 spots, and each subarray has 64 5-mer spots and 36 control spots. 16 subarrays give 1024 5-mers which encompasses all possible 5-mers.

[0685] The subarrays in the array were partitioned from each other by physical barriers, e.g., a hydrophobic strip, that allowed each subarray to be hybridized to a sample without cross-contamination from adjacent subarrays. In a preferred embodiment, the hydrophobic strip is made from a solution of silicone (e.g., household silicone glue and seal paste) in an appropriate solvent (such solvents are well known in the art). This solution of silicone grease is applied between the subarrays to form lines which after the solvent evaporates act as hydrophobic strips separating the cells.

[0686] In this Format III example, the free or solution (nonbound) 5-mers were synthesized with 3′ tails of 5′-NN-3′ (N=all four bases A, C, G, T). In this embodiment, the free 5-mers and the bound 5-mers are combined to produce all possible I 0-mers for sequencing a known DNA sequence of less than 20 kb. 20 kb of double stranded DNA is denatured into 40 kb of single-stranded DNA. This 40 kb of ss DNA hybridizes to about 4% of all possible 10-mers. This low frequency of 10-mer binding and the known target sequence allow the pooling of free or solution (nonbound) 5-mers for treatment of each subarray, without a loss of sequence information. In a preferred embodiment, 16 probes are pooled for each subarray, and all possible 5-mers are represented in 64 total pools of free 5-mers. Thus, all possible I 0-mers may be probed against a DNA sample using 1024 subarrays (16 subarrays for each pool of free 5-mers).

[0687] The target DNA in this embodiment represents two-600 bp segments of the HIV virus. These 600 bp segments are represented by pools of 60 overlapping 30-mers (the 30-mers overlap each adjacent 30 mer by 20 nucleotides). The pools of 30-mers mimic a target DNA that has been treated using techniques well known in the art to shear, digest, and/or random PCR the target DNA to produce a random pool of very small fragments.

[0688] As described above in the previous Format II examples, the free 5-mers are labeled with radioactive isotopes, biotin, fluorescent dyes, etc. The labeled free 5-mers are then hybridized along with the bound 5-mers to the target DNA, and ligated. In a preferred embodiment, 300-1000 units of ligase are added to the reaction. The hybridization conditions were worked out following the teachings of the previous examples. Following ligation and removal of the target DNA and excess free probe, the array is assayed to determine the location of labeled probes (using the techniques described in the examples above).

[0689] The known DNA sequence of the target, and the known free and bound 5-mers in each subarray, predict which bound 5-mers will be ligated to a labeled free 5-mer in each subarray. The signal from 20 of these predicted dots were lost and 20 new signals were gained for each change in the target DNA from the predicted sequence. The overlapping sequence of the bound 5-mers in these ten new dots identifies which free, labeled 5-mer is bound in each new dot.

[0690] Using the described methods, arrays and pools of free, labeled 5-mers, the test HIV DNA sequence was probed with all possible 10mers. Using this Format III approach, we properly identified the “wild-type” sequence of the segments tested, as well as several sequence “mutants” that were introduced into these segments.

[0691] 5.46 Sequencing of Repetitive DNA Sequences

[0692] Repetitive DNA sequences in the target DNA are sequenced with “spacer oligonucleotides” in a modified Format III approach. Spacer oligonucleotides of varying lengths of the repetitive DNA sequence (the repeating sequence is identified on a first SBH run) are hybridized to the target DNA along with a first known adjoining oligonucleotide and a second known, or group of possible oligonucleotides adjoining the other side of the spacer (known from the first SBH run). When a spacer matching the length of the repetitive DNA segment is hybridized to the target, the two adjacent oligonucleotides can be ligated to the spacer. If the first known oligonucleotide is fixed to a substrate, and the second known or possible oligonucleotide(s) is labeled, a bound ligation product including the labeled second known or possible oligonucleotide(s) is formed when a spacer of the proper length is hybridized to the target DNA.

[0693] 5.47 Sequencing Through Branch Points with Format III SBH

[0694] Branch points in the target DNA are sequenced using a third set of oligonucleotides and a modified Format III approach. After a first SBH run, several branch points may be identified when the sequence is compiled. These can be solved by hybridizing oligonucleotide(s) that overlap partially with one of the known sequences leading into the branch point and then hybridizing to the target an additional oligonucleotide that is labeled and corresponds to one of the sequences that comes out of the branch point. When the proper oligonucleotides are hybridized to the target DNA, the labeled oligonucleotide can be ligated to the other(s). In a preferred embodiment, a first oligonucleotide that is offset by one to several nucleotides from the branch point is selected (so that it reads into one of the branch sequences), a second oligonucleotide reading from the first and into the branch point sequence is also selected, and a set of third oligonucleotides that correspond to all the possible branch sequences with an overlap of the branch point sequence by one or a few nucleotides (corresponding to the first oligonucleotide) is selected. These oligonucleotides are hybridized to the target DNA, and only the third oligonucleotide with the proper branch sequence (that matches the branch sequence of the first oligonucleotide) will produce a ligation product with the first and second oligonucleotides.

[0695] 5.48 Multiplexing Probes for Analyzing a Target Nucleic Acid

[0696] Sets of probes are labeled with different labels so that each probe of a set can be differentiated from the other probes in the set. Thus, the set of probes may be contacted with target nucleic acid in a single hybridization reaction without the loss of any probe information. In preferred embodiments, the different labels are different radioisotopes, or different fluorescent labels, or different EMLs. These sets of probes may be used in either Format I, Format II or Format III SBH.

[0697] In Format 1 SBH, the set of differently labeled probes are hybridized to target nucleic acid which is fixed to a substrate under conditions that allow differentiation between perfect matches one base-pair mismatches. Specific probes which bind to the target nucleic acid are identified by their different labels and perfect matches are determined, at least in part, from this binding information.

[0698] In Format II SBH, the target nucleic acids are labeled with different probes and hybridized to arrays of probes. Specific target nucleic acids which bind to the probes are identified by their different labels and perfect matches are determined, at least in part, form this binding information.

[0699] In Format III SBH, the set of differently labeled probes and fixed probes are hybridized to a target nucleic acid under conditions that allow perfect matches to be differentiated from one base-pair mismatches. Labeled probes that are adjacent on the target to a fixed probe are bound to the fixed probe, and these products are detected and differentiated by their different labels.

[0700] In a preferred embodiment, the different labels are EMLs, which can be detected by electron capture mass spectrometry (EC-MS). EMLs may be prepared from a variety of backbone molecules, with certain aromatic backbones being particularly preferred, e.g., see Xu et al., J. Chromatog. 764:95-102 (1997). The EML is attached to a probe in a reversible and stable manner, and after the rpobe is hybridized to target nucleic acid, the EML is removed from the probe and identified by standard EC-MS (e.g., the EC-MS may be done by a gas chromatograph-mass spectrometer).

[0701] 5.49 Detection of Low Frequency Target Nucleic Acids

[0702] Format III SBH has sufficient discrimination power to identify a sequence that is present in a sample at 1 part to 99 parts of a similar sequence that differs by a single nucleotide. Thus, Format III can be used to identify a nucleic acid present at a very low concentration in a sample of nucleic acids, e.g., a sample derived from blood.

[0703] In one embodiment, the two sequences are for cystic fibrosis and the sequences differ from each other by a deletion of three nucleotides. Probes for the two sequences were as follows, probes distinguishing the deletion from wild type were fixed to a substrate, and a labeled contiguous probe was common to both. Using these targets and probes, the deletion mutant could be detected with Format III SBH when it was present at one part to ninety nine pans of the wild-type.

[0704] 5.50 Polaroid Apparatus and Method for Analyzing a Target Nucleic Acid

[0705] An apparatus for analyzing a nucleic acid can be constructed with two arrays of nucleic acids, and an optional material that prevents the nucleic acids of the two arrays from mixing until such mixing is desired. The arrays of the apparatus may be supported by a variety of substrates, including but not limited to, nylon membranes, nitrocellulose membranes, or other materials disclosed above. In preferred embodiments, one of the substrate is a membrane separated into sectors by hydrophobic strips, or a suitable support material with wells which may contain a gel or sponge. In this embodiment, probes are placed on a sector of the membrane, or in the well, the gel, or sponge, and a solution (with or without target nucleic acids) is added to the membrane or well so that the probes are solubilized. The solution with the solubilized probes is then allowed to contact the second array of nucleic acids. The nucleic acids may be, but are not limited to, oligonucleotide probes, or target nucleic acids, and the probes or target nucleic acids may be labeled. The nucleic acids may be labeled with any labels conventionally used in the art, including but not limited to radioisotopes, fluorescent labels or electrophore mass labels.

[0706] The material which prevents mixing of the nucleic acids may be disposed between the two arrays in such a way that when the material is removed the nucleic acids of the two arrays mix together. This material may be in the form of a sheet, membrane, or other barrier, and this material may be comprised of any material that prevents mixing of the nucleic acids.

[0707] This apparatus may be used in Format I SBH as follows: a first array of the apparatus has target nucleic acids that are fixed to the substrate, and a second array of the apparatus has nucleic acid probes that are labeled and can be removed to interrogate the target nucleic acid of the first array. The two arrays are optionally separated by a sheet of material that prevents the probes from contacting the target nucleic acid, and when this sheet is removed, the probes can interrogate the target. After appropriate incubation, and (optionally) washing steps the array of targets may be read to determine which probes formed perfect matches with the target. This reading may be automated or can be done manually (e.g. by eye with an autoradiogram). In format II SBH, the procedure followed would be similar to that described above except the target is labeled and the probes are fixed.

[0708] Alternatively the apparatus may be used in Format II SBH as follows: to arrays of nucleic acid probes are formed, the nucleic acid probes of either or both arrays may be labeled and one of the arrays may be fixed to its substrate. The two arrays are separated by a sheet of material that prevents the probes from mixing. A Format II reaction is initiated by adding target nucleic acid and removing the sheet allowing the probes to mix with each other and the target. Probes which bind to adjacent sites on the target are bound together (e.g., by base stacking interactions or by covalently joining the backbones), and the results are read to determine which probes bound to the target at adjacent sites. When one set of probes is fixed to the substrate, the fixed array can be read to determine which probes from the other array are bound together with the fixed probes. As with the method above, this reading may be automated (e.g., with an ELISA reader) or can be done manually (e.g., by eye with an autoradiogram).

### 6.0 EXAMPLES

[0709] Selected tables are provided on the CD-ROM, supplied concurrently with this application. The entirety of the contents of the CD-ROM are intended to be a part of this application, and are incorporated by reference. The electronic file name, where appropriate, follows the first reference to the table throughout the application.

[0710] 6.1 The 748 Gene Family

[0711] Novel Contigs

[0712] The novel contigs of the invention, were assembled from novel expressed sequence tags (EST's) isolated by methods described herein (e.g., SBH), and in some cases sequences obtained from one or more public databases. The inserts for the cDNA libraries from which the novel ESTs were obtained were amplified with PCR using primers specific for the vector sequences which flank the inserts. These samples were spotted onto nylon membranes and interrogated with oligonucleotide probes to give sequence signatures. The clones were clustered into groups of similar or identical sequences, and single representative clones were selected from each group for gel sequencing. The 5 □sequence of the amplified inserts was then deduced using the reverse M13 sequencing primer in a typical Sanger sequencing protocol. PCR products were purified and subjected to fluorescent dye terminator cycle sequencing. Single pass gel sequencing was done using a 377 Applied Biosystems (ABI) sequencer to obtain the novel ESTs. The novel contigs of the invention, were assembled from the novel ESTs and, in some cases, sequences obtained from one or more public databases. The sequences for the resulting contigs from the 748 gene family are designated as 748 SEQ ID NO: 1-45,207 and are provided in the Sequence Listing.

[0713] 6.2 The 752 Gene Family

[0714] Novel Contigs

[0715] The novel contigs of the invention, were assembled from novel expressed sequence tags (EST's) isolated by methods described herein (e.g., SBH), and in some cases sequences obtained from one or more public databases. The inserts for the cDNA libraries from which the novel ESTs were obtained were amplified with PCR using primers specific for the vector sequences which flank the inserts. These samples were spotted onto nylon membranes and interrogated with oligonucleotide probes to give sequence signatures. The clones were clustered into groups of similar or identical sequences, and single representative clones were selected from each group for gel sequencing. The 5 □sequence of the amplified inserts was then deduced using the reverse M13 sequencing primer in a typical Sanger sequencing protocol. PCR products were purified and subjected to fluorescent dye terminator cycle sequencing. Single pass gel sequencing was done using a 377 Applied Biosystems (ABI) sequencer to obtain the novel ESTs. The novel contigs of the invention, were assembled from the novel ESTs and, in some cases, sequences obtained from one or more public databases. The sequences for the resulting contigs from the 752 gene family are designated as 752 SEQ ID NO: 1-13,203 and are provided in the Sequence Listing.

[0716] 6.3 The 778 Gene Family

[0717] Novel Contigs

[0718] The novel contigs of the invention, were assembled from novel expressed sequence tags (ESTs) isolated by methods described herein (e.g., SBH), and in some cases sequences obtained from one or more public databases. The inserts for the cDNA libraries from which the novel ESTs were obtained were amplified with PCR using primers specific for the vector sequences which flank the inserts. These samples were spotted onto nylon membranes and interrogated with oligonucleotide probes to give sequence signatures. The clones were clustered into groups of similar or identical sequences, and single representative clones were selected from each group for gel sequencing. The 5 □sequence of the amplified inserts was then deduced using the reverse M13 sequencing primer in a typical Sanger sequencing protocol. PCR products were purified and subjected to fluorescent dye terminator cycle sequencing. Single pass gel sequencing was done using a 377 Applied Biosystems (ABI) sequencer to obtain the novel ESTs. The novel contigs of the invention, were assembled from the novel ESTs and, in some cases, sequences obtained from one or more public databases. The sequences for the resulting contigs from the 778 gene family are designated as 778 SEQ ID NO: 1-105 and are provided in the Sequence Listing.

[0719] 6.4 The 779 Gene Family

[0720] Novel Contigs

[0721] The novel contigs of the invention, were assembled from sequences that were obtained from cDNA libraries by methods described herein (e.g., SBH). Briefly, clones from cDNA libraries were spotted on nylon membrane filters and screened with oligonucleotide probes (e.g., 7-mers) to obtain signature sequences. The clones were clustered into groups of similar or identical sequences, and single representative clones were selected from each group for gel sequencing. The inserts for the cDNA libraries from which the sequences were obtained were amplified with PCR using primers specific for the vector sequences which flank the inserts, or isolated from plasmid preparations. The 5′ sequence of the amplified inserts was then deduced using the reverse M13 sequencing primer in a typical Sanger sequencing protocol, as well as internal primers in both the forward and reverse direction. In some cases RACE (Random Amplification of cDNA Ends) was performed to further extend the sequence in the 5 □direction. In some cases all of a signature cluster was sequenced to generate overlapping clones to assemble the contigs.

[0722] Chromatograms were base called and assembled using a software suite from Washington University, MO containing three applications designated PHRED, PEIRAP, and CONSED. The sequences for the resulting contigs for the 779 gene family are designated as 779 SEQ ID NO: 1-128 and are provided in the Sequence Listing.

[0723] Additionally, contig sequences were BLASTed against Hyseq's database to determine adequate sequence homology for addition to the contigs. Full length clones of the entire message were obtained either by identifying clones which contained the beginning of the open reading frame and fully sequenced and verified against the contig. If no clones were available containing the full length sequence, PCR was used to generate an amplicon from tissue libraries and the entire length sequenced and verified against the contig.

[0724] 6.5 The 782 Gene Family

[0725] Novel Contigs

[0726] A novel contig of the invention was assembled from sequences that were obtained from a cDNA library by methods described herein (e.g., SBH). Briefly, clones from cDNA libraries were spotted on nylon membrane filters and screened with oligonucleotide probes (e.g., 7-mers) to obtain signature sequences. The inserts for the cDNA libraries from which the sequences were obtained were amplified with PCR using primers specific for the vector sequences which flank the inserts, or isolated from plasmid preparations. The 5′ sequence of the amplified inserts was then deduced using the reverse M13 sequencing primer in a typical Sanger sequencing protocol, as well as internal primers in both the forward and reverse direction. In some cases RACE (Random Amplification of cDNA Ends) was performed to further extend the sequence in the 5′ direction. In all cases all of a signature cluster was sequenced to generate overlapping clones to assemble the contigs. Chromatograms were base called and assembled using a software suite from University of Washington, Seattle containing three applications designated PHRED, PHRAP, and CONSED. The sequences for the resulting contigs for the 782 gene family are designated as 782 SEQ ID NO: 1-10,451 and are provided in the attached Sequence Listing. inserts was then deduced in a typical Sanger sequencing protocol. The inserts of the library were, amplified with PCR using 5 primers specific for vector sequences which flank the inserts.

[0727] The contigs were assembled using an EST sequence as a seed. Then a recursive algorithm was used to extend the seed EST into an extended assemblage, by pulling additional sequences from different databases (i.e., Hyseq's database containing EST sequences, dbEST version 114, gb pri 114, and UniGene version 101) that belong to this assemblage. The algorithm terminated when there was no additional sequences from the above databases that would extend the assemblage. Inclusion of component sequences into the assemblage was based on a BLASTN hit to the extending assemblage with BLAST score greater than 300 and percent identity greater than 95%.

[0728] The nearest neighbor result for the assembled contig was obtained by a FASTA version 3 search against Genpept release 114, using FASTXY algorithm. FASTXY is an improved version of FASTA alignment which allows in-codon frame shifts. The nearest neighbor result showed the closest homologue for each assemblage from Genpept (and contains the translated amino acid sequences for which the assemblage encodes). The nearest neighbor results for 782 SEQ ID NO: 1-10,451 are shown in Table 2, and identified as Table 2 (782).doc on the enclosed compact disc.

[0729] 6.6 The 784 Gene Family

[0730] Novel Contigs

[0731] Table 3 (identified as Table3(784).doc on the enclosed CD) sets forth the novel predicted polypeptides (including proteins) encoded by the novel polynucleotides (784 SEQ ID NO: 1-10,289) of the present invention, and their corresponding nucleotide locations to each of 748 SEQ ID NO: 1-10,289. Table 3 also indicates the method by which the polypeptide was predicted. Method A refers to a polypeptide obtained by using a software program called FASTY (available from http://fasta.bioch.virginia.edu) which selects a polypeptide based on a comparison of translated novel polynucleotide to known polypeptides (W. R. Pearson, Methods in Enzymology, 183: 63-98 (1990), incorporated herein by reference). Method B refers to a polypeptide obtained by using a software program called GenScan for human/vertebrate sequences (available from Stanford University, Office of Technology Licensing) that predicts the polypeptide based on a probabilistic model of gene structure/compositional properties (C. Burge and S. Karlin, J. Mol. Biol., 268: 78-94 (1997), incorporated herein by reference). Method C refers to a polypeptide obtained by using a Hyseq proprietary software program that translates the novel polynucleotide and its complementary strand into six possible amino acid sequences (forward and reverse frames) and chooses the polypeptide with the longest open reading frame. When the predicted beginning nucleotide of Table 3 is a higher number than the predicted end nucleotide of Table 3, then the amino acid sequence is derived from the complementary strand of the indicated SEQ ID NO. The locations of the predicted beginning and end nucleotides correlate to the nucleotide sequence of the indicated SEQ ID NO., not its complementary strand.

[0732] The isolated polypeptides of the invention include, but are not limited to, a polypeptide comprising any of the amino acid sequences set forth in Table 3 or from six frame translations of 784 SEQ ID NO: 1-10,289; or the corresponding full length or mature protein. One of skill in the art could determine the corresponding amino acid sequence using techniques well known in the art to translate and analyze all possible six frames. Polypeptides of the invention also include polypeptides with biological activity that are encoded by (a) any of the polynucleotides having a nucleotide sequence set forth in the 784 SEQ ID NO: 1-10,289; or (b) polynucleotides that hybridize to the complement of the polynucleotides of (a) under stringent hybridization conditions. Biologically or immunologically active variants of any of the polypeptide sequences in Table 3 or from six frame translations of 784 SEQ ID NO: 1-10,289, and “substantial equivalents” thereof (e.g., with at least about 65%, 70%, 75%, 80%, 85%, 90%, 95%, 98% or 99% amino acid sequence identity) that preferably retain biological activity are also contemplated. The polypeptides of the invention may be wholly or partially chemically synthesized but are preferably produced by recombinant means using the genetically engineered cells (e.g. host cells) of the invention.

[0733] A plurality of novel nucleic acids were obtained from cDNA libraries prepared 20 from various human tissues and in some cases isolated from a genomic library derived from human chromosome using standard PCR, SBH sequence signature analysis and Sanger sequencing techniques. The inserts of the library were amplified with PCR using primers specific for the vector sequences which flank the inserts. Clones from cDNA libraries were spotted on nylon membrane filters and screened with oligonucleotide probes (e.g., 7-mers) to obtain signature sequences. The clones were clustered into groups of similar or identical sequences. Representative clones were selected for sequencing.

[0734] In some cases, the 5′ sequence of the amplified inserts was then deduced using a typical Sanger sequencing protocol. PCR products were purified and subjected to fluorescent dye terminator cycle sequencing. Single pass gel sequencing was done using a 377 Applied Biosystems (ABI) sequencer to obtain the novel nucleic acid sequences. In some cases RACE (Random Amplification of cDNA Ends) was performed to further extend the sequence in the 5′ direction.

[0735] The contigs or the nucleic acids of the present invention, designated as 784 SEQ ID NO: 1-10,289 were assembled using an EST sequence as a seed. Then a recursive algorithm was used to extend the seed EST into an extended assemblage, by pulling additional sequences from different databases (i.e., Hyseq's database containing EST sequences, dbEST version 114, gb pri 114, and UniGene version 101) that belong to this assemblage. The algorithm terminated when there was no additional sequences from the above databases that would extend the assemblage. Inclusion of component sequences into the assemblage was based on a BLASTN hit to the extending assemblage with BLAST score greater than 300 and percent identity greater than 95%.

[0736] Table 4 (identified as Table4(784).doc on the enclosed CD) shows the various tissue sources of the EST sequences from Hyseq's database which were used to assemble the contigs or nucleic acids of the present invention (identified by 784 SEQ ID NO: 1-10,289).

[0737] The nearest neighbor result for the assembled contig was obtained by a FASTA version 3 search against Genpept release 114, using FASTXY algorithm. FASTXY is an improved version of FASTA alignment which allows in-codon frame shifts. The nearest neighbor result showed the closest homologue for each assemblage from Genpept (and contains the translated amino acid sequences for which the assemblage encodes). The nearest neighbor results for 784 SEQ ID NO: 1-10,289 are shown in the Table 5, infra.

[0738] 6.7 The 785 Gene Family

[0739] Novel Nucleic Acid Sequences Obtained from Various Libraries

[0740] A plurality of novel nucleic acids were obtained from cDNA libraries prepared from various human tissues and in some cases isolated from a genomic library derived from human chromosome using standard PCR, SBH sequence signature analysis and Sanger sequencing techniques. The inserts of the library were amplified with PCR using primers specific for the vector sequences which flank the inserts. Clones from cDNA libraries were spotted on nylon membrane filters and screened with oligonucleotide probes (e.g., 7-mers) to obtain signature sequences. The clones were clustered into groups of similar or identical sequences. Representative clones were selected for sequencing.

[0741] In some cases, the 5′ sequence of the amplified inserts was then deduced using a typical Sanger sequencing protocol. PCR products were purified and subjected to fluorescent dye terminator cycle sequencing. Single pass gel sequencing was done using a 377 Applied Biosystems (ABI) sequencer to obtain the novel nucleic acid sequences. In some cases RACE (Random Amplification of cDNA Ends) was performed to further extend the sequence in the 5′ direction.

[0742] The novel contigs of the invention were assembled from sequences that were obtained from a cDNA library by methods described above, and in some cases sequences obtained from one or more public databases. Chromatograms were base called and assembled using a software suite from University of Washington, Seattle containing three applications designated PJRED, PHRAP, and CONSED. The sequences for the resulting contigs are designated as 785 SEQ ID NO: 1-3,796 and are provided in the Sequence Listing. The contigs were assembled using an EST sequence as a seed. Then a recursive algorithm was used to extend the seed EST into an extended assemblage, by pulling additional sequences from different databases (i.e., Hyseq's database containing EST sequences, dbEST version 114, gb pri 114, and UniGene version 101) that belong to this assemblage. The algorithm terminated when there was no additional sequences from the above databases that would extend the assemblage. Inclusion of component sequences into the assemblage was based on a BLASTN hit to the extending assemblage with BLAST score greater than 300 and percent identity greater than 95%.

[0743] The nearest neighbor result for the assembled contig was obtained by a FASTA version 3 search against Genpept release 114, using Fastxy algorithm. Fastxy is an improved version of FASTA alignment which allows in-codon frame shifts. The nearest neighbor result showed the closest homologue for each assemblage from Genpept (and contains the translated amino acid sequences for which the assemblage encodes). The nearest neighbor results for 785 SEQ ID NO: 1-3,796 are shown in Table 6 (identified as Table6(785).doc on the enclosed CD), infra.

[0744] The nucleotide sequence within the assembled contigs that codes for signal peptide sequences and their cleavage sites can be determined from using Neural network SignalP V1.1 program (from Center for Biological Sequence Analysis, The Technical University of Denmark). The process for identifying prokaryotic and eukaryotic signal peptides and their cleavage sites are also disclosed iby Henrick Nielson, Jacob Englebrecht, Soren Brunak, and Gunnar von Heijne in the publication “Identification of prokaryotic and eukaryotic signal peptides and prediction of their cleavage sites” Protein Engineering, vol. 10, no. 1, pp. 1-6 (1997) incorporated herein by reference. A maximum S score and a mean S score, as described in the Nielson et. al., reference, are obtained from each assembled contig. Table 7 sets forth the nucleotide sequence range for each sequence of 785 SEQ ID NO: 1-3,796 that encodes a corresponding forty-five amino acid sequence containing the signal peptide sequence and its cleavage site, the maximum S score and the mean S score obtained for each sequence. Not all forty-five amino acids in the sequence may comprise the signal peptide.

[0745] 6.8 The 787 Gene Family

[0746] Table 8 (identified as Table8(787).doc on the enclosed CD) sets forth the novel predicted polypeptides (including proteins) encoded by the novel polynucleotides (787 SEQ ID NO: 1-10,410) of the present invention, and their corresponding nucleotide locations to each of 787 SEQ ID NO: 1-10,410. Table 8 also indicates the method by which the polypeptide was predicted. Method A refers to a polypeptide obtained by using a software program called FASTY (available from http://fasta.bioch.virginia.edu) which selects a polypeptide based on a comparison of translated novel polynucleotide to known polypeptides (W. R. Pearson, Methods in Enzymology, 183: 63-98 (1990), incorporated herein by reference). Method B refers to a polypeptide obtained by using a software program called GenScan for human/vertebrate sequences (available from Stanford University, Office of Technology Licensing) that predicts the polypeptide based on a probabilistic model of gene structure/compositional properties (C. Burge and S. Karlin, J. Mol. Biol., 268: 78-94 (1997), incorporated herein by reference). Method C refers to a polypeptide obtained by using a Hyseq proprietary software program that translates the novel polynucleotide and its complementary strand into six possible amino acid sequences (forward and reverse frames) and chooses the polypeptide with the longest open reading frame. When the predicted beginning nucleotide of Table 8 is a higher number than the predicted end nucleotide of Table 8, then the amino acid sequence is derived from the complementary strand of the indicated SEQ ID NO. The locations of the predicted beginning and end nucleotides correlate to the nucleotide sequence of the indicated SEQ ID NO., not its complementary strand.

[0747] The isolated polypeptides of the invention include, but are not limited to, a polypeptide comprising any of the amino acid sequences set forth in Table 8 or from six frame translations of 787 SEQ ID NO: 1-10,410; or the corresponding full length or mature protein. One of skill in the art could determine the corresponding amino acid sequence using techniques well known in the art to translate and analyze all possible six frames. Polypeptides of the invention also include polypeptides with biological activity that are encoded by (a) any of the polynucleotides having a nucleotide sequence set forth in the 787 SEQ ID NO: 1-10,410; or (b) polynucleotides that hybridize to the complement of the polynucleotides of (a) under stringent hybridization conditions. Biologically or immunologically active variants of any of the polypeptide sequences in Table 8 or from six frame translations of 787 SEQ ID NO: 1-10,410, and “substantial equivalents” thereof (e.g., with at least about 65%, 70%, 75%, 80%, 85%, 90%, 95%, 98% or 99% amino acid sequence identity) that preferably retain biological activity are also contemplated. The polypeptides of the invention may be wholly or partially chemically synthesized but are preferably produced by recombinant means using the genetically engineered cells (e.g. host cells) of the invention.

[0748] A plurality of novel nucleic acids were obtained from cDNA libraries prepared 20 from various human tissues and in some cases isolated from a genomic library derived from human chromosome using standard PCR, SBH sequence signature analysis and Sanger sequencing techniques. The inserts of the library were amplified with PCR using primers specific for the vector sequences which flank the inserts. Clones from cDNA libraries were spotted on nylon membrane filters and screened with oligonucleotide probes (e.g., 7-mers) to obtain signature sequences. The clones were clustered into groups of similar or identical sequences. Representative clones were selected for sequencing.

[0749] In some cases, the 5′ sequence of the amplified inserts was then deduced using a typical Sanger sequencing protocol. PCR products were purified and subjected to fluorescent dye terminator cycle sequencing. Single pass gel sequencing was done using a 377 Applied Biosystems (ABI) sequencer to obtain the novel nucleic acid sequences. In some cases RACE (Random Amplification of cDNA Ends) was performed to further extend the sequence in the 5′ direction.

[0750] Novel Contigs

[0751] The contigs or the nucleic acids of the present invention, designated as 787 SEQ ID NO: 1-10,410 were assembled using an EST sequence as a seed. Then a recursive algorithm was used to extend the seed EST into an extended assemblage, by pulling additional sequences from different databases (i.e., Hyseq's database containing EST sequences, dbEST version 114, gb pri 114, and UniGene version 101) that belong to this assemblage. The algorithm terminated when there was no additional sequences from the above databases that would extend the assemblage. Inclusion of component sequences into the assemblage was based on a BLASTN hit to the extending assemblage with BLAST score greater than 300 and percent identity greater than 95%.

[0752] Table 9 (identified as Table9(787).doc on the enclosed CD) shows the various tissue sources of the EST sequences from Hyseq's database which were used to assemble the contigs or nucleic acids of the present invention (identified by 787 SEQ ID NO: 1-10,410).

[0753] The nearest neighbor result for the assembled contig was obtained by a FASTA version 3 search against Genpept release 114, using FASTXY algorithm. FASTXY is an improved version of FASTA alignment which allows in-codon frame shifts. The nearest neighbor result showed the closest homologue for each assemblage from Genpept (and contains the translated amino acid sequences for which the assemblage encodes). The nearest neighbor results for 787 SEQ ID NO: 1-10,410 are shown in the Table 10, (identified as Table10(787).doc on the enclosed CD) infra.

[0754] 6.9 The 788 Gene Family

[0755] Table 11 (identified as Table11(788).doc on the enclosed CD) sets forth the novel predicted polypeptides (including proteins) encoded by the novel polynucleotides (788 SEQ ID NO: 1-14,074) of the present invention, and their corresponding nucleotide locations to each of 788 SEQ ID NO: 1-14,074. Table 11 also indicates the method by which the polypeptide was predicted. Method A refers to a polypeptide obtained by using a software program called FASTY (available from http://fasta.bioch.virginia.edu) which selects a polypeptide based on a comparison of translated novel polynucleotide to known polypeptides (W. R. Pearson, Methods in Enzymology, 183: 63-98 (1990), incorporated herein by reference). Method B refers to a polypeptide obtained by using a software program called GenScan for human/vertebrate sequences (available from Stanford University, Office of Technology Licensing) that predicts the polypeptide based on a probabilistic model of gene structure/compositional properties (C. Burge and S. Karlin, J. Mol. Biol., 268: 78-94 (1997), incorporated herein by reference). Method C refers to a polypeptide obtained by using a Hyseq proprietary software program that translates the novel polynucleotide and its complementary strand into six possible amino acid sequences (forward and reverse frames) and chooses the polypeptide with the longest open reading frame. When the predicted beginning nucleotide of Table 11 is a higher number than the predicted end nucleotide of Table 11, then the amino acid sequence is derived from the complementary strand of the indicated SEQ ID NO. The locations of the predicted beginning and end nucleotides correlate to the nucleotide sequence of the indicated SEQ ID NO., not its complementary strand.

[0756] The isolated polypeptides of the invention include, but are not limited to, a polypeptide comprising any of the amino acid sequences set forth in Table 11 or from six frame translations of 788 SEQ ID NO: 1-14,074; or the corresponding full length or mature protein. One of skill in the art could determine the corresponding amino acid sequence using techniques well known in the art to translate and analyze all possible six frames. Polypeptides of the invention also include polypeptides with biological activity that are encoded by (a) any of the polynucleotides having a nucleotide sequence set forth in the 788 SEQ ID NO: 1-14,074; or (b) polynucleotides that hybridize to the complement of the polynucleotides of (a) under stringent hybridization conditions. Biologically or immunologically active variants of any of the polypeptide sequences in Table 11 or from six frame translations of 788 SEQ ID NO: 1-14,074, and “substantial equivalents” thereof (e.g., with at least about 65%, 70%, 75%, 80%, 85%, 90%, 95%, 98% or 99% amino acid sequence identity) that preferably retain biological activity are also contemplated. The polypeptides of the invention may be wholly or partially chemically synthesized but are preferably produced by recombinant means using the genetically engineered cells (e.g. host cells) of the invention.

[0757] A plurality of novel nucleic acids were obtained from cDNA libraries prepared 20 from various human tissues and in some cases isolated from a genomic library derived from human chromosome using standard PCR, SBH sequence signature analysis and Sanger sequencing techniques. The inserts of the library were amplified with PCR using primers specific for the vector sequences which flank the inserts. Clones from cDNA libraries were spotted on nylon membrane filters and screened with oligonucleotide probes (e.g., 7-mers) to obtain signature sequences. The clones were clustered into groups of similar or identical sequences. Representative clones were selected for sequencing. In some cases the 5′ sequence of the amplified inserts was then deduced using a typical Sanger sequencing protocol. PCR products were purified and subjected to fluorescent dye terminator cycle sequencing. Single pass gel sequencing was done using a 377 Applied Biosystems (ABI) sequencer to obtain the novel nucleic acid sequences. In some cases RACE (Random Amplification of cDNA Ends) was performed to further extend the sequence in the 5′ direction.

[0758] Novel Contigs

[0759] The novel contigs of the invention were assembled from sequences that were obtained from a cDNA library by methods described above, and in some cases sequences obtained from one or more public databases. The sequences for the resulting contigs are designated as 788 SEQ ID NO: 1-14,074 and are provided in the attached Sequence Listing; The contigs were assembled using an EST sequence as a seed. Then a recursive algorithm was used to extend the seed EST into an extended assemblage, by pulling additional sequences from different databases (i.e., Hyseq's database containing EST sequences, dbEST version 114, gb pri 114, and UniGene version 101) that belong to this assemblage. The algorithm terminated when there was no additional sequences from the above databases that would extend the assemblage. Inclusion of component sequences into the assemblage was based on a BLASTN hit to the extending assemblage with BLAST score greater than 300 and percent identity greater than 95%.

[0760] Table 12 (identified as Table12(788).doc on the enclosed CD) shows the various tissue sources of the EST sequences from Hyseq's database which were used to assemble the contigs or nucleic acids of the present invention (identified by 788 SEQ ID NO: 1-14,074).

[0761] The nearest neighbor result for the assembled contig was obtained by a FASTA version 3 search against Genpept release 115, using FASTXY algorithm. FASTXY is an improved version of FASTA alignment which allows in-codon frame shifts. The nearest neighbor result showed the closest homologue for each assemblage from Genpept (and contains the translated amino acid sequences for which the assemblage encodes). The nearest neighbor results for 788 SEQ ID NO: 1-14,074 are shown in the Table 13, (identified as Table13(788).doc on the enclosed CD) infra.

[0762] 6.10 The 789 Gene Family

[0763] Table 14 (identified as Table14(789).doc on the enclosed CD) sets forth the novel predicted polypeptides (including proteins) encoded by the novel polynucleotides (789 SEQ ID NO: 1-6,391) of the present invention, and their corresponding nucleotide locations to each of SEQ ID NO: 1-6,391. Table 14 also indicates the method by which the polypeptide was predicted. Method A refers to a polypeptide obtained by using a software program called FASTY (available from http://fasta.bioch.virginia.edu) which selects a polypeptide based on a comparison of translated novel polynucleotide to known polypeptides (W. R. Pearson, Methods in Enzymology, 183: 63-98 (1990), incorporated herein by reference). Method B refers to a polypeptide obtained by using a software program called GenScan for human/vertebrate sequences (available from Stanford University, Office of Technology Licensing) that predicts the polypeptide based on a probabilistic model of gene structure/compositional properties (C. Burge and S. Karlin, J. Mol. Biol., 268: 78-94 (1997), incorporated herein by reference). Method C refers to a polypeptide obtained by using a Hyseq proprietary software program that translates the novel polynucleotide and its complementary strand into six possible amino acid sequences (forward and reverse frames) and chooses the polypeptide with the longest open reading frame.

[0764] A plurality of novel nucleic acids were obtained from cDNA libraries prepared from various human tissues and in some cases isolated from a genomic library derived from human chromosome using standard PCR, SBH sequence signature analysis and Sanger sequencing techniques. The inserts of the library were amplified with PCR using primers specific for the vector sequences which flank the inserts. Clones from cDNA libraries were spotted on nylon membrane filters and screened with oligonucleotide probes (e.g., 7-mers) to obtain signature sequences. The clones were clustered into groups of similar or identical sequences. Representative clones were selected for sequencing.

[0765] In some cases, the 5′ sequence of the amplified inserts was then deduced using a typical Sanger sequencing protocol. PCR products were purified and subjected to fluorescent dye terminator cycle sequencing. Single pass gel sequencing was done using a 377 Applied Biosystems (ABI) sequencer to obtain the novel nucleic acid sequences. In some cases RACE (Random Amplification of cDNA Ends) was performed to further extend the sequence in the 5′ direction.

[0766] Novel Contigs

[0767] The novel contigs or the nucleic acids of the present invention of the invention were assembled from sequences that were obtained from a cDNA library by methods described above, and in some cases sequences obtained from one or more public databases. The sequences for the resulting contigs are designated as 789 SEQ ID NO: 1-6,391 and are provided in the attached Sequence Listing. The contigs were assembled using an EST sequence as a seed. Then a recursive algorithm was used to extend the seed EST into an extended assemblage, by pulling additional sequences from different databases (i.e., Hyseq's database containing EST sequences, dbEST version 114, gb pri 114, and UriGene version 101) that belong to this assemblage. The algorithm terminated when there was no additional sequences from the above databases that would extend the assemblage. Inclusion of component sequences into the assemblage was based on a BLASTN hit to the extending assemblage with BLAST score greater than 300 and percent identity greater than 95%.

[0768] Table 15 (identified as Table15(789).doc on the enclosed CD) shows the various tissue sources of the EST sequences from Hyseq's database which were used to assemble the contigs or nucleic acids of the present invention (identified by 789 SEQ ID NO: 1-6,391).

[0769] The nearest neighbor result far the assembled contig was obtained by a FASTA version 3 search against Genpept release 115, using FASTXY algorithm. FASTXY is an improved version of FASTA alignment which allows in-codon frame shifts. The nearest neighbor result showed the closest homologue for each assemblage from Genpept (and contains the translated amino acid sequences for which the assemblage encodes). The nearest neighbor results for 789 SEQ ID NO: 1-6,391 are shown in the Table 16, (identified as Table16(789).doc on the enclosed CD) infra.

[0770] 6.11 The 790 Gene Family

[0771] Table 17 (identified as Table17(790).doc on the enclosed CD) sets forth the novel predicted polypeptides (including proteins) encoded by the novel polynucleotides (790 SEQ ID NO: 1-30,553) of the present invention, and their corresponding start and stop nucleotide location to each of 790 SEQ ID NO: 1-30,553. Table 17 also indicates the method by which the polypeptide was predicted. Method A refers to a polypeptide obtained by using a software program called FASTY (available from http://fasta.bioch.virginia.edu) which selects a polypeptide based on a comparison of translated novel polynucleotide to known polypeptides (W. R. Pearson, Methods in Enzymology, 183: 63-98 (1990), incorporated herein by reference). Method B refers to a polypeptide obtained by using a software program called GenScan for human/vertebrate sequences (available from Stanford University, Office of Technology Licensing) that predicts the polypeptide based on a probabilistic model of gene structure/compositional properties (C. Burge and S. Karlin, J. Mol. Biol., 268: 78-94 (1997), incorporated herein by reference). Method C refers to a polypeptide obtained by using a Hyseq proprietary software program that translates the novel polynucleotide and its complementary strand into six possible amino acid sequences (forward and reverse frames) and chooses the polypeptide with the longest open reading frame.

[0772] A plurality of novel nucleic acids were obtained from cDNA libraries prepared from various human tissues and in some cases isolated from a genomic library derived from human chromosome using standard PCR, SBH sequence signature analysis and Sanger sequencing techniques. The inserts of the library were amplified with PCR using primers specific for the vector sequences which flank the inserts. Clones from cDNA libraries were spotted on nylon membrane filters and screened with oligonucleotide probes (e.g., 7-mers) to obtain signature sequences. The clones were clustered into groups of similar or identical sequences. Representative clones were selected for sequencing.

[0773] In some cases, the 5′ sequence of the amplified inserts was then deduced using a typical Sanger sequencing protocol. PCR products were purified and subjected to fluorescent dye terminator cycle sequencing. Single pass gel sequencing was done using a 377 Applied Biosystems (ABI) sequencer to obtain the novel nucleic acid sequences. In some cases RACE (Random Amplification of cDNA Ends) was performed to further extend the sequence in the 5′ direction.

[0774] Novel Contigs

[0775] The contigs or the nucleic acids of the present invention, designated as 790 SEQ ID NO: 1-30,553 were assembled using an EST sequence from Hyseq's database as a seed. A recursive algorithm was used to extend the seed EST into an extended assemblage, by pulling additional sequences from different databases (e.g., Hyseq's database containing EST sequences, dbEST version 115, gb pri 115, and UniGene version 10.3, and exons from public domain genomic sequences predicted by GenScan) that belong to this assemblage. The algorithm terminated when there were no additional sequences from the databases that will extend the assemblage. Further, the inclusion of component sequences into the assemblage was based on a BLASTN hit to the extending assemblage with BLAST score greater than 300 and percent identity greater than 95%.

[0776] Table 18 (identified as Table18(790).doc on the enclosed CD) shows the various tissue sources of the EST sequences from Hyseq's database which were used to assemble the contigs or nucleic acids of the present invention (identified by 790 SEQ ID NO: 1-30,553).

[0777] The nearest neighbor result for the assembled contig was obtained by a FASTA version 3 search against Genpept release 1.15, using FASTXY algorithm. FASTXY is an improved version of FASTA alignment which allows in-codon frame shifts. The nearest neighbor result showed the closest homologue for each assemblage from Genpept (and contains the translated amino acid sequences for which the assemblage encodes). The nearest neighbor results for 790 SEQ ID NO: 1-30,553 are shown in the Table 19, (identified as Table19(790).doc on the enclosed CD) infra.

[0778] 6.12 The 791 Gene Family

[0779] Table 20 (identified as Table20(791).doc on the enclosed CD) sets forth the novel predicted polypeptides (including proteins) encoded by the novel polynucleotides (791 SEQ ID NO: 1-5,822) of the present invention, and their corresponding nucleotide locations to each of 791 SEQ ID NO: 1-5,822. Table 20 also indicates the method by which the polypeptide was predicted. Method A refers to a polypeptide obtained by using a software program called FASTY (available from http://fasta.bioch.virginia.edu) which selects a polypeptide based on a comparison of translated novel polynucleotide to known polypeptides (W. R. Pearson, Methods in Enzymology, 183: 63-98 (1990), incorporated herein by reference). Method B refers to a polypeptide obtained by using a software program called GenScan for human/vertebrate sequences (available from Stanford University, Office of Technology Licensing) that predicts the polypeptide based on a probabilistic model of gene structure/compositional properties (C. Burge and S. Karlin, J. Mol. Biol., 268: 78-94 (1997), incorporated herein by reference). Method C refers to a polypeptide obtained by using a Hyseq proprietary software program that translates the novel polynucleotide and its complementary strand into six possible amino acid sequences (forward and reverse frames) and chooses the polypeptide with the longest open reading frame.

[0780] Novel Nucleic Acid Sequences Obtained from Various Libraries

[0781] A plurality of novel nucleic acids were obtained from cDNA libraries prepared from various human tissues and in some cases isolated from a genomic library derived from human chromosome using standard PCR, SBH sequence signature analysis and Sanger sequencing techniques. The inserts of the library were amplified with PCR using primers specific for the vector sequences which flank the inserts. Clones from cDNA libraries were spotted on nylon membrane filters and screened with oligonucleotide probes (e.g., 7-mers) to obtain signature sequences. The clones were clustered into groups of similar or identical sequences. Representative clones were selected for sequencing.

[0782] In some cases, the 5′ sequence of the amplified inserts was then deduced using a typical Sanger sequencing protocol. PCR products were purified and subjected to fluorescent dye terminator cycle sequencing. Single pass gel sequencing was done using a 377 Applied Biosystems (ABI) sequencer to obtain the novel nucleic acid sequences. In some cases RACE (Random Amplification of cDNA Ends) was performed to further extend the sequence in the 5′ direction.

[0783] Novel Contigs

[0784] The contigs or the nucleic acids of the present invention, designated as 791 SEQ ID NO: 1-5,822 were assembled using an EST sequence from Hyseq's database as a seed. A recursive algorithm was used to extend the seed EST into an extended assemblage, by pulling additional sequences from different databases (e.g., Hyseq's database containing EST sequences, dbEST version 115, gb pri 115, and UniGene version 103, and exons from public domain genomic sequences predicted by GenScan) that belong to this assemblage. The algorithm terminated when there were no additional sequences from the databases that will extend the assemblage. Further, the inclusion of component sequences into the assemblage was based on a BLASTN hit to the extending assemblage with BLAST score greater than 300 and percent identity greater than 95%.

[0785] Table 21 (identified as Table21(791).doc on the enclosed CD) shows the various tissue sources of the EST sequences from Hyseq's database which were used to assemble the contigs or nucleic acids of the present invention (identified by 791 SEQ ID NO: 1-5,822).

[0786] The nearest neighbor result for the assembled contig was obtained by a FASTA version 3 search against Genpept release 115, using FASTXY algorithm. FASTXY is an improved version of FASTA alignment which allows in-codon frame shifts. The nearest neighbor result showed the closest homologue for each assemblage from Genpept (and contains the translated amino acid sequences for which the assemblage encodes). The nearest neighbor results for 791 SEQ ID NO: 1-5,822 are shown in the Table 22, (identified as Table22(791).doc on the enclosed CD) infra.

[0787] 6.13 The 792 Gene Family

[0788] Table 23 sets forth the novel predicted polypeptides (including proteins) encoded by the novel polynucleotides (792 SEQ ID NO: 1-8,502) of the present invention, and their corresponding nucleotide locations to each of 792 SEQ ID NO: 1-8,502. Table 23 also indicates the method by which the polypeptide was predicted. Method A refers to a polypeptide obtained by using a software program called FASTY (available from http://fasta.bioch.virginia.edu) which selects a polypeptide based on a comparison of translated novel polynucleotide to known polypeptides (W. R. Pearson, Methods in Enzymology, 183: 63-98 (1990), incorporated herein by reference). Method B refers to a polypeptide obtained by using a software program called GenScan for human/vertebrate sequences (available from Stanford University, Office of Technology Licensing) that predicts the polypeptide based on a probabilistic model of gene structure/compositional properties (C. Burge and S. Karlin, J. Mol. Biol., 268: 78-94 (1997), incorporated herein by reference). Method C refers to a polypeptide obtained by using a Hyseq proprietary software program that translates the novel polynucleotide and its complementary strand into six possible amino acid sequences (forward and reverse frames) and chooses the polypeptide with the longest open reading frame.

[0789] The isolated polypeptides of the invention include, but are not limited to, a polypeptide comprising any of the amino acid sequences set forth in Table 23 or from six frame translations of 792 SEQ ID NO: 1-8,502; or the corresponding full length or mature protein. One of skill in the art could determine the corresponding amino acid sequence using techniques well known in the art to translate and analyze all possible six frames. Polypeptides of the invention also include polypeptides with biological activity that are encoded by (a) any of the polynucleotides having a nucleotide sequence set forth in the 792 SEQ ID NO: 1-8,502; or (b) polynucleotides that hybridize to the complement of the polynucleotides of (a) under stringent hybridization conditions. Biologically or immunologically active variants of any of the polypeptide sequences in Table 23 or from six frame translations of 792 SEQ ID NO: 1-8,502, and “substantial equivalents” thereof (e.g., with at least about 65%, 70%, 75%, 80%, 85%, 90%, 95%, 98% or 99% amino acid sequence identity) that preferably retain biological activity are also contemplated. The polypeptides of the invention may be wholly or partially chemically synthesized but are preferably produced by recombinant means using the genetically engineered cells (e.g. host cells) of the invention.

[0790] Novel Nucleic Acid Sequences Obtained from Various Libraries

[0791] A plurality of novel nucleic acids were obtained from cDNA libraries prepared from various human tissues and in some cases isolated from a genomic library derived from human chromosome using standard PCR, SBH sequence signature analysis and Sanger sequencing techniques. The inserts of the library were amplified with PCR using primers specific for the vector sequences which flank the inserts. Clones from cDNA libraries were spotted on nylon membrane filters and screened with oligonucleotide probes (e.g., 7-mers) to obtain signature sequences. The clones were clustered into groups of similar or identical sequences. Representative clones were selected for sequencing.

[0792] In some cases, the 5′ sequence of the amplified inserts was then deduced using a typical Sanger sequencing protocol. PCR products were purified and subjected to fluorescent dye terminator cycle sequencing. Single pass gel sequencing was done using a 377 Applied Biosystems (ABI) sequencer to obtain the novel nucleic acid sequences. In some cases RACE (Random Amplification of cDNA Ends) was performed to further extend the sequence in the 5′ direction.

[0793] Novel Contigs

[0794] The contigs or the nucleic acids of the present invention, designated as 792 SEQ ID NO: 1-8,502 were assembled using an EST sequence from Hyseq's database as a seed. A recursive algorithm was used to extend the seed EST into an extended assemblage, by pulling additional sequences from different databases (e.g., Hyseq's database containing EST sequences, dbEST version 115, gb pri 115, and UniGene version 103, and exons from public domain genomic sequences predicted by GenScan) that belong to this assemblage. The algorithm terminated when there were no additional sequences from the databases that will extend the assemblage. Further, the inclusion of component sequences into the assemblage was based on a BLASTN hit to the extending assemblage with BLAST score greater than 300 and percent identity greater than 95%.

[0795] Table 24 shows the various tissue sources of the EST sequences from Hyseq's database which were used to assemble the contigs or nucleic acids of the present invention (identified by 792 SEQ ID NO 1-8,502).

[0796] The nearest neighbor result for the assembled contig was obtained by a FASTA version 3 search against Genpept release 115, using FASTXY algorithm. FASTXY is an improved version of FASTA alignment which allows in-codon frame shifts. The nearest neighbor result showed the closest homologue for each assemblage from Genpept (and contains the translated amino acid sequences for which the assemblage encodes). The nearest neighbor results for 792 SEQ ID NO: 1-8,502 are shown in the Table 25, infra.

The application's sequence listing, which the Patent Office published only in electronic form, follows.

SEQUENCE LISTING (158931 sequences)

SEQ ID NO: 1 - DNA, 334 bp, Homo sapiens
ggtacggtactgaggataacagtactgcagtagtagtgccttttggtgcctggggaaaatataagaactctgaaatcaacttctcattcagcagaagctttgcctccagtggacgatgggcctgattaccagctgggacttagagtttctgtgcaacagtttttcactgagcatgtcaagaaactgataagatcaaaaaggtctcctaactcactagatcagcgcacaagtcagtgtaaaccacttagatagtagttttttcataaatgctcatcatatttatgttccgctgtacatgttcagtataaatatatgtgtagtgaagctactgtga

SEQ ID NO: 2 - DNA, 533 bp, Homo sapiens
  misc_feature (1)...(533): n = a,t,c or g
gggctggtcttgaactggnnnnnnnnnnnnnnnnnnnnnnnnnnnnnnnnnnnnnnnnnnnnnnnnnnnnnnnnnnnnnnnnnnnnnnncaacatattttcaataggtgatgggtcattatgaaaaaaggacactgaagctaatgtaacactgaaatggtctaaagaaacaggaaactatagacatgttttagaatatccaatacatggcaagaccaaaatatgaaacctatccttttcatgtattgtttgggactgactcatatttgtactctttgtattgctaatttacatagctgtttaaaaggtcacattcatactaatgatatgcaatgatacattttattgagccaagagtaaggtagaacagaacagcccagggcaatgaggatggggcaagggaggangagtagaaaacagcccccaaaagaaaggcaagatgtcacgtgtatataacttacaattcnaagtgaagantatggtctgaactttgctacncctgcctaatttttaccccccaataaaattcccccg

SEQ ID NO: 3 - DNA, 430 bp, Homo sapiens
gggtgcttcctgttcgcagctgcggcagtgacttcaaggttactgactttttatgatgtttggtggctatgagactatagaagcatacgaagatgatctttatcgagatgagtcatctagtgaactgagtgttgatagtgaggtggaatttcaactctatagccaaattcattatgcccaagatcttgatgatgtcatcagggaggaagagcatgaagaaaagaactctgggaattcggaatcttcgagtagtaaaccaaatcagaagaagctaatcgtcctttcagatagtgaggtcatccagctgtcagatgggtcagaggtcatcactttgtctgatgaagacagtatttatagatgtaaaggaaagaatgttagagttcaagcacaagaaaatgcccatggtctttcttcttctcttcaatctaat

SEQ ID NO: 4 - DNA, 237 bp, Homo sapiens
  misc_feature (1)...(237): n = a,t,c or g
caaacacagctcactgcaacctctaactcctgcaaacacagctcactgcaacctctaactcctgcaaacacagctcactgcaacctctaactcctgcaaacacagctcactggcaaccttttaactcctggcagtggaaccaagattcatgccagggtgggtctcaaactnctgggggntcaaggcaatccttcctcaggcttttcaaggagtttggggttttacagggcgttacga

SEQ ID NO: 5 - DNA, 742 bp, Homo sapiens
  misc_feature (1)...(742): n = a,t,c or g
gtttctaagaatttgtccagttcatctaggttatccaattctttgatatgtaattactcatagtactcttaatcctttttatttctgtaaaatcggttgtaatgtctcctcctggtttttagttgtttttcttagtcactcttagctatcaacaaactcttggtttcatttatttttctctattgcttttctgttctctattttgtctctgctctaatctttattattattataatctccattctgctggctttgggttgattgctcttctttttctagttctttcagatgtaaattttgggttgacttgagatcttaatttgtttaataggtgtatttacagttacaaatttccctcctaccactgctttgactgtacctgtttttttgtatattacgtttaagttttcatttaccacaagatattttctaatttcccttgtgagttccccattaatctgctggttgagagcgttgtttaattttcacataattgtgtacttttcagttttttgtctgttactgatttctagtttcatcccactgtgggccagaaaagatattttatttcctcagtcttttgaaatttgttgacttgtttagtcatctaacatactgtctatcctagaggaaagggtcccatttggcacttgaggaaaaacgtgtgtaactggctggttgtggtctgttagggncccagcgggtatggatgctggttccaaggttcnggtcttggcggacc

SEQ ID NO: 6 - DNA, 544 bp, Homo sapiens
gcgtaatcgccgagggcacgtgcatgccccctggttaagagttgcaggtagcggtagcgatggacactctggatcgagtagtaaagcccaaaacgaaaagagccaagagattccttgagaagagagaaccgaaactcaatgaaaatattaaaaatgccatgctgattaaagggggaaatgcaaatgcaacagtgacaaaagtacttaaagatgtgtatgcactgaaaaaaccatacggtgtactatataaaaagaaaaatattacaagaccttttgaggatccagacatcactggaattcttttcaaagaagtcagattgttctttattcatgtttggctcccataataagaagcggccaaataatctagtaataggtcgtatgtatgactaccatgtgctggatatgattgaattaggtattgagaattttgtctctctaaaagacattaagaacagtaaatgtcctgagggaacaaaacccatgctgatatttgctggcgatgatttcgatgtaacagaagattatagaagactaaaaagtc

SEQ ID NO: 7 - DNA, 462 bp, Homo sapiens
ttttttttaaacttaaaaaaaatttaatgataaatacatattgatagaaattattcaattctcctatgaatgcagcatccaaggatattctccatgttcatggctcccagcccttccctccaggctgatggggcaacttgagacccaccaagccagcagactcctccaccgagcgctcacccttgccatgaaattcctgatgtagggccacatgtttccggatgctacgcaggaggcagagataggtggcagcttggaaatgaagctcatgttgggctctgcacaacttttcactggtgacccgatgtgcacggaaagccttcacaaggtaccgataggccgcggtgtcgcgatagggtcggccggtggccgcgctcaggtagcgcaactcccgcagaagtcctcgaaaagtgtgcgccggggaccctaaggccgccattgtcctgtccttctccgagcgtg

SEQ ID NO: 8 - DNA, 173 bp, Homo sapiens
taggcatgagccacagtgcccaggtgatacccctatcatttcatctcaaccatttagctgcacccatcctctagctccacgcctaccagattgtccataaaaaccctaacctgcaagcctctggggagactgatttgagtaggaactccatctcccacggggctggactcaca

SEQ ID NO: 9 - DNA, 586 bp, Homo sapiens
gggtaaatagttgtgaacataactattgtgaatactatgttatatgttatagttgtgaatgtaaatagtattcacaattgtgaatacaatgtaaatagctttcacaattgtgaatacaatgtaagtagctatgtaaatagtgaatacaatgtaaatagctatgtaaatagttgttatgctgattagggaataatgagaaggaaaaaaagtatacatattcagtacagatgcagtcatctttttttcccctcgaacatttttgatccacaattggttgaatccacagatggggaacacacagtcttggtaaatttaaccaacaaggagggtaaacgcatcccaacagggaaggtaaactgcacatccatcagtacctctagaggggcatcactggtttatagctcaatacagtgactatatcagaataatggcctttagttttcctgaaagattaaattaggcttgctaacttgtttaatgagataatcaaacatatgatgtaattttaaagggtttacatttttaaaaatttaatgattgctacataaaaagggtatcagttaactaattttacttagatggaact

SEQ ID NO: 10 - DNA, 1289 bp, Homo sapiens
atgacaagacctggacaaccagcacttaccagagtgcccccacctattcttccaaggccatcacagcagacaggaagtagcagtgtgaacacttttagacctgcttacagttcattttcttctggatatggtgcctatggaaattcattttatggaggctatagtccttatagttatggatataatgggctgggctacaaccgcctccgtgtagatgatcttccacccagtagatttgttcagcaagctgaagaaagcagcaggggtgcatttcagtccattgaaagtattgtgcatgcatttgcctctgtcagtatgatgatggatgctaccttttcagctgtctataacagtttcagggctgtattggatgtagcaaatcacttttcccgattgaaaatacactttacaaaagtgttttcagcttttgcattggttaggactatacggtatctttacagacggctacagcggatgttaggtttaagaagaggctctgagaatgaagacctctgggcagagagtgaaggaactgtggcatgccttggtgctgaggaccgagcagctacctcagcaaaatcttggccaatattcttgttctttgctgttatccttggtggtccttacctcatttggaaactattgtctactcacagtgatgaagtaacagacagcatcaactgggcaagtggtgaggatgaccatgtagttgccagagcagaatatgattttgctgccgtatctgaagaagaaatttctttccgggctggtgatatgctgaacttagctctcaaagaacaacaacccaaagtgcgtggttggcttctggctagccttgatggccaaacaacaggacttatacctgcgaattatgtcaaaattcttggcaaaagaaaaggtaggaaaacggtggaatcaagtaaagtttccaagcagcaacaatcttttaccaacccaacactaactaaaggagccacggttgctgattctttggatgaacaggaagctgcctttgaatctgtttttgttgaaactaataaggttccagttgcacctgattccattgggaaagatggagaaaagcaagatctttgatatctttcatgtttgcctgcagttgaacaatactttagagtactttttaaaattatttctcacaaagaaatgaatgtacaatccaatgaaaacatttgttattggctatttcaggtgttttgctgctagaaattattaaagttacacactagtatgttggtctggtgacctggttacattttattatacacatt

SEQ ID NO: 11 - DNA, 145 bp, Homo sapiens
  misc_feature (1)...(145): n = a,t,c or g
catacaaaatatttgttaattgactttantgtcatttgttaagacttccgggtcaacagtaggctattnccagttaattttatggggagtcaaaaattacattcagcttttcgactgggcgggctgtcctcagtcccaacccctg

SEQ ID NO: 12 - DNA, 1663 bp, Homo sapiens
  misc_feature (1)...(1663): n = a,t,c or g
tttttttttttacagttgcctgtttattatttttcaaaacaaaacaaaaacaaaagacattcaaaattcccctgtggtggacaactgagttgatgtggctgatccaggctgtctcccaggttgtctcagggagcatcagttgtactagggggtgggctgttgccctggcacggctggatgaacacttgcaccagggatggccatcagaagagctgcaggccagttttgagcccatgcagctgcccctggctccagagaaggccctcgaagttgctgctgctgctgttgctgcagttgccactgccgacaccacagctcaggcccaaggtgtcagtcttgcatgttgagggttccagccgctgctctagcacaggctnggtccaaaagatacatggtgtcataattctccagcatgagctctgctgggtcctcggtctgacctggcattcggcctaggggaaatgtgtcccatcgcacgtcttctgagctaacctgccatgcagaccctgcaaagctcctcttttctgggccagaagcctagcattctcggcagtgggggactcttgccctgtagagaaaggccccacctccattctgtcttcctcttcatcatcttcatcatcttcatcctcctcttcctcctcttggtcatcattttcttcctcctcctctacctggtctggcaagacctctttctcctccttctcctcttccttgacatcattaacactgccctgctcctcctgttgctgggcctttgcttcagacccgaagctggagctggctggcttgacgctccaatacaggctgtctagtgtatatggagacttcccaatgggggaggcctcagagccctcctgcaccaggctgttttctccactctgggtataaatggaacagatgcgcagcagcttctcctgctccctcgtcttgcaagccctgccccatggctttgaagatgatccgaaggagttgggggctggcccagcaaggtgagcccaagcaggactcaaccatccggggccagtcaagggaggcggagcagttgaacagcctccagccccttcttgcttcccactggcctgcagaaaatcggcgagcattccgtccagtcttggtgttggccacgatcagttcaacggtccatctgaggatgtaggtaggccggatcccgctgatccccaaggctggcagttcagagagcatcctctccaatagggcctgcgtgaagttctgggagtgcaggcccctgagcaggggctgccatgccatagagcagtctaagttcatcagtgcccaagccaccagttacatccaagganttacagcgtatcaggtcagcagtagaagccactgccagagggagttcgttgcctaacctgctcctccacaccgtgatgcggttaaagccgtaccgctgcaacttatggtcgtcacagaacagataaaccgtcacctggtcccactcggccctgctgagccaggcgaccacgatgccgtgggccgagagtggcaangaccctttccctttaacgcactttcagtaccacgcactccacacgagatccatcccctgggaacttagacctggcccggccccggattcccacgacatactgagctcaacaacaggctctgtgacgcagccntccgnacagccttc

SEQ ID NO: 13 - DNA, 432 bp, Homo sapiens
agctgctcaagcgcctgcagaacaacgacacgtgcagcatgccaggcctcacgtgcttcacccacgacaaccagcactggcagacggcgcctttctggacactggggcctttctgtgcctgcaccagcgccaacaataacacgtactggtgcatgaggaccatcaatgagactcacaatttcctcttctgtgaatttgcaactggcttcctagagtactttgatctcaacacagacccctaccagctgatgaatgcagtgaacacactggacagggatgtcctcaaccagctacacgtacagctcatggagctgaggagctgcaagggttacaagcagtgtaacccccggactcgaaacatggacctggggacttaaagatggaggaagctatgagcaatacaggcagtttcagcgtcgaaagtggccagaa

SEQ ID NO: 14 - DNA, 326 bp, Homo sapiens
  misc_feature (1)...(326): n = a,t,c or g
gggtnnnnnnnnnnnnnnnnnnnnnnnnnnnnnnnnnnnnnnnnnnnnnnnnnnnnnnnnnnnnnnnnnnnnnnnnnnnnnaggcatgagccacgcccagccgagtatctgtctttttaatattctgtatgatatgaagtagaatgtatgaacaaagcacttctgcatgtcatagtatgatagttgtctggaagaaaagcacttctacagttgtttgagttgcaatttgaatgactttttcatggaacattttttacttgaaaatacagacaagctgtggttattcaggtttgaatatatggcagacatattctcagaagtaatgt

SEQ ID NO: 15 - DNA, 431 bp, Homo sapiens
gggcttggaaatagtgagaacaaagcccagagcccagggcttggtgggaaagcaggccctggctccccttcctgcatgtgagttttgacttcttccctgtgctggtcaggggcttgcaaatgggttgataatatcacttgaagcctggactatcttccaaagccccgacttgggaccaaatggcctattaatgtagtatctcatttcctttgcattctggggacaagtgggattggctcgatgcccagggatatcctgtgaactcatggaataggactgggctaagcctggctagcacctgacagatcctgtctatggaactagggacattttttctcactgcttgaattggttggaacataaaactaagatggcatttgatctgcttgcaaagatttggttcagaaaaatcttaccaatatgctgatagg

SEQ ID NO: 16 - DNA, 333 bp, Homo sapiens
ggtatcaggcacatactacacacttaacatgcattgctttcacataccagctccatggtaacattgcgctggctttacagctaaagaaactgagctagaaaggggttaagtatcctgtacaagatcacagctggccagcaatagaggtgggatcccactgcagacagtctcccccacagatgccatgctcccactgtaccaccatgtactgcttcctgagatctctgcttccttcagtcgacccagctgacacctgtttccttcctaactccaactaattaattccagttaatggaattgactggaattagtgacattaatatttactgagcg

SEQ ID NO: 17 - DNA, 10675 bp, Homo sapiens
atggccaagtatggagaacatgaagccagtcctgacaatgggcagaacgaattcagtgatatcattaagtccagatctgatgaacacaatgacgtacagaagaaaacctttaccaaatggataaatgctcgattttcaaagagtgggaaaccacccatcaatgatatgttcacagacctcaaagatggaaggaagctattggatcttctagaaggcctcacaggaacatcactgccaaaggaacgtggttccacaagggtacatgccttaaataacgtcaacagagtgctgcaggttttacatcagaacaatgtggaattagtgaatatagggggaactgacattgtggatggaaatcacaaactgactttggggttactttggagcatcattttgcactggcaggtgaaagatgtcatgaaggatgtcatgtcggacctgcagcagacgaacagtgagaagatcctgctcagctgggtgcgtcagaccaccaggccctacagccaagtcaacgtcctcaacttcaccaccagctggacagatggactcgcctttaatgctgtcctccaccgacataaacctgatctcttcagctgggataaagttgtcaaaatgtcaccaattgagagacttgaacatgccttcagcaaggctcaaacttatttgggaattgaaaagctgttagatcctgaagatgttgccgttcggcttcctgacaagaaatccataattatgtatttaacatctttgtttgaggtgctacctcagcaagtcaccatagacgccatccgtgaggtagagacactcccaaggaaatataaaaaagaatgtgaagaagaggcaattaatatacagagtacagcgcctgaggaggagcatgagagtccccgagctgaaactcccagcactgtcactgaggtcgacatggatctggacagctatcagattgcgttggaggaagtgctgacctggttgctttctgctgaggacactttccaggagcaggatgatatttctgatgatgttgaagaagtcaaagaccagtttgcaacccatgaagcttttatgatggaactgactgcacaccagagcagtgtgggcagcgtcctgcaggcaggcaaccaactgataacacaaggaactctgtcagacgaagaagaatttgagattcaggaacagatgaccctgctgaatgctagatgggaggctcttagggtggagagtatggacagacagtcccggctgcacgatgtgctgatggaactgcagaagaagcaactgcagcagctctccgcctggttaacactcacagaggagcgcattcagaagatggaaacttgccccctggatgatgatgtaaaatctctacaaaagctgctagaagaacataaaagtttgcaaagtgatcttgaggctgaacaggtgaaagtaaattcactaactcacatggtggtcattgttgatgaaaacagtggtgagagcgctacagctatcctagaagaccagttacagaaacttggtgagcgctggacagcagtatgccgttggactgaagaacgctggaataggttacaagaaatcaatatattgtggcaggaattattggaagaacagtgcttgttgaaagcttggttaaccgaaaaagaagaggctttaaataaagtccagacaagcaacttcaaagaccaaaaggaactaagtgtcagtgttcgacgtctggctattttgaaggaagacatggaaatgaagcgtcaaacattggatcagctgagtgagattggccaggatgtgggacaattacttgataattccaaggcatctaagaagatcaacagtgactcagaggaactgactcaaagatgggattctttggttcagagactagaagattcctccaaccaggtgactcaggctgtagcaaagctggggatgtctcagattcctcagaaggaccttttggagactgttcgtgtaagagaacaagcaattacaaaaaaatctaagcaggaactgcctcctcctcctcccccaaagaagagacagatccatgtggatattgaagctaagaaaaagtttgatgctataagtgcagagctgttgaactggattttgaaatggaaaactgccattcagaccacagagataaaagagtatatgaagatgcaagacacttccgaaatgaaaaagaagttgaaggcattagaaaaagaacagagagaaagaatccccagagcagatgaattaaaccaaactggacaaatccttgtggagcaaatgggaaaagaaggccttcctactgaagaaataaaaaatgttctggagaaggtttcatcagaatggaagaatgtatctcaacatttggaagatctagaaagaaagattcagctacaggaagatataaatgcttatttcaagcagcttgatgagcttgaaaaggtcatcaagacaaaggaggagtgggtaaaacacacttccatttctgaatcttcccggcagtccttgccaagcttgaaggattcctgtcagcgggaattgacaaatcttcttggccttcaccccaaaattgaaatggctcgtgcaagctgctcggccctgatgtctcagccttctgccccagattttgtccagcggggcttcgatagctttctgggccgctaccaagctgtacaagaggctgtagaggatcgtcaacaacatctagagaatgaactgaagggccaacctggacatgcatatctggaaacattgaaaacactgaaagatgtgctaaatgattcagaaaataaggcccaggtgtctctgaatgtccttaatgatcttgccaaggtggagaaggccctgcaagaaaaaaagacccttgatgaaatccttgagaatcagaaacctgcattacataaacttgcagaagaaacaaaggctctggagaaaaatgttcatcctgatgtagaaaaattatataagcaagaatttgatgatgtgcaaggaaagtggaacaagctaaaggtcttggtttccaaagatctacatttgcttgaggaaattgctctcacactcagagcttttgaggccgattcaacagtcattgagaagtggatggatggcgtgaaagacttcttaatgaaacagcaggctgcccaaggagacgacgcaggtctacagaggcagttagaccagtgctctgcatttgttaatgaaatagaaacaattgaatcatctctgaaaaacatgaaggaaatagagactaatcttcgaagtggtccagttgctggaataaaaacttgggtgcagacaagactaggtgactaccaaactcaactggagaaacttagcaaggagatcgctactcaaaaaagtaggttgtctgaaagtcaagaaaaagctgcgaacctgaagaaagacttggcagagatgcaggaatggatgacccaggccgaggaagaatatttggagcgggattttgagtacaagtcaccagaagagcttgagagtgctgtggaagagatgaagagggcaaaagaggatgtgttgcagaaggaggtgagagtgaagattctcaaggacaacatcaagttattagctgccaaggtgccctctggtggccaggagttgacgtctgagctgaatgttgtgctggagaattaccaacttctttgtaatagaattcgaggaaagtgccacacgctagaggaggtctggtcttgttggattgaactgcttcactatttggatcttgaaactacctggttaaacactttggaagagcggatgaagagcacagaggtcctgcctgagaagacggatgctgtcaacgaagccctggagtctctggaatctgttctgcgccacccggcagataatcgcacccagattcgagagcttggccagactctgattgatggggggatcctggatgatataatcagtgagaaactggaggctttcaacagccgatatgaagatctaagtcacctggcagagagcaagcagatttctttggaaaagcaactccaggtgctgcgggaaactgaccagatgcttcaagtcttgcaagagagcttgggggagctggacaaacagctcaccacatacctgactgacaggatagatgctttccaagttccacaggaagctcagaaaatccaagcagagatctcagcccatgagctaaccctagaggagttgagaagaaatatgcgttctcagcccctgacctccccagagagtaggactgccagaggaggaagtcagatggatgtgctacagaggaaactccgagaggtgtccacaaagttccagcttttccagaagccagctaacttcgagcagcgcatgctggactgcaagcgtgtgctggatggcgtgaaagcagaacttcacgttctggatgtgaaggacgtagaccctgacgtcatacagacgcacctggacaagtgtatgaaactgtataaaactttgagtgaagtcaaacttgaagtggaaactgtgattaaaacaggaagacatattgtccagaaacagcaaacggacaacccaaaagggatggatgagcagctgacttccctgaaggttctttacaatgacctgggcgcacaggtgacagaaggaaaacaggatctggaaagagcatcacagttggcccggaaaatgaagaaagaggctgcttctctctctgaatggctttctgctactgaaactgaattggtacagaagtccacttcagaaggtctgcttggtgacttggatacagaaatttcctgggctaaaaatgttctgaaggatctggaaaagagaaaagctgatttaaataccatcacagagagtagtgctgccctgcaaaacttgattgagggcagtgagcctattttagaagagaggctctgcgtccttaacgctgggtggagccgagttcgtacctggactgaagattggtgcaataccttgatgaaccatcagaaccagctagaaatatttgatgggaacgtggctcacataagtacctggctttatcaagctgaagctctattggatgaaattgaaaagaaaccaacaagtaaacaggaagaaattgtgaagcgtttagtatctgagctggatgatgccaacctccaggttgaaaatgtccgcgatcaagcccttattttgatgaatgcccgtggaagctcaagcagggagcttgtagaaccaaagttagctgagctgaataggaactttgaaaaggtgtctcaacatatcaaaagtgccaaattgctaattgctcaggaaccattataccaatgtttggtcaccactgaaacatttgaaactggtgtgcctttctctgacttggaaaaattagaaaatgacatagaaaatatgttaaaatttgtggaaaaacacttggaatccagtgatgaagatgaaaagatggatgaggagagtgcccagattgaggaagttctacaaagaggagaagaaatgttacatcaacctatggaagataataaaaaagaaaagatccgtttgcaattattacttttgcatactagatacaacaaaattaaggcaatccctattcaacagaggaaaatgggtcaacttgcttctggaattagatcatcacttcttcctacagattatctggttgaaattaacaaaattttactttgcatggatgatgttgaattatcgcttaatgttccagagctcaacactgctatttacgaagacttctcttttcaggaagactctctgaagaatatcaaagaccaactggacaaacttggagagcagattgcagtcattcatgaaaaacagccagatgtcatccttgaagcctctggacctgaagccattcagatcagagatacacttactcagctgaatgcaaaatgggacagaattaatagaatgtacagtgatcggaaaggttgttttgacagggcaatggaagaatggagacagttccattgtgaccttaatgacctcacacagtggataacagaggctgaagaattactggttgatacctgtgctccaggtggcagcctggacttagagaaagccaggatacatcagcaggaacttgaggtgggcatcagcagccaccagcccagttttgcagcactaaaccgaactggggatgggattgtgcagaaactctcccaggcagatggaagcttcttgaaagaaaaactggcaggtttaaaccaacgctgggatgcaattgttgcagaagtgaaggataggcagccaaggctaaaaggagaaagtaagcaggtgatgaagtacaggcatcagctagatgagattatctgttggttaacaaaggctgagcatgctatgcaaaagagatcaaccaccgaattgggagaaaacctgcaagaattaagagacttaactcaagaaatggaagtacatgctgaaaaactcaaatggctgaatagaactgaattggagatgctttcagataaaagtctgagtttacctgaaagggataaaatttcagaaagcttaaggactgtaaatatgacatggaataagatttgcagagaggtgcctaccaccctgaaggaatgcatccaggagcccagttctgtttcacagacaaggattgctgctcatcctaatgtccaaaaggtggtgctagtatcatctgcgtcagatattcctgttcagtctcatcgtacttcggaaatttcaattcctgctgatcttgataaaactataacagaactagccgactggctggtattaatcgaccagatgctgaagtccaacattgtcactgttggggatgtagaagagatcaataagaccgtttcccgaatgaaaattacaaaggctgacttagaacagcgccatcctcagctggattatgtttttacattggcacagaatttgaaaaataaagcttccagttcagatatgagaacagcaattacagaaaaattggaaagggtcaagaaccagtgggatggcacccagcatggcgttgagctaagacagcagcagcttgaggacatgattattgacagtcttcagtgggatgaccatagggaggagactgaagaactgatgagaaaatatgaggctcgactctatattcttcagcaagcccgacgggatccactcaccaaacaaatttctgataaccaaatactgcttcaagaactgggtcctggagatggtatcgtcatggcgttcgataacgtcctgcagaaactcctggaggaatatgggagtgatgacacaaggaatgtgaaagaaaccacagagtacttaaaaacatcatggatcaatctcaaacaaagtattgctgacagacagaacgccttggaggctgagtggaggacggtgcaggcctctcgcagagatctggaaaacttcctgaagtggatccaagaagcagagaccacagtgaatgtgcttgtggatgcctctcatcgggagaatgctcttcaggatagtatcttggccagggaactcaaacagcagatgcaggacatccaggcagaaattgatgcccacaatgacatatttaaaagcattgacggaaacaggcagaagatggtaaaagctttgggaaattctgaagaggctactatgcttcaacatcgactggatgatatgaaccaaagatggaatgacttaaaagcaaaatctgctagcatcagggcccatttggaggccagcgctgagaagtggaacaggttgctgatgtccttagaagaactgatcaaatggctgaatatgaaagatgaagagcttaagaaacaaatgcctattggaggagatgttccagccttacagctccagtatgaccattgtaaggccctgagacgggagttaaaggagaaagaatattctgtcctgaatgctgtcgaccaggcccgagttttcttggctgatcagccaattgaggcccctgaagagccaagaagaaacctacaatcaaaaacagaattaactcctgaggagagagcccaaaagattgccaaagccatgcgcaaacagtcttctgaagtcaaagaaaaatgggaaagtctaaatgctgtaactagcaattggcaaaagcaagtggacaaggcattggagaaactcagagacctgcagggagctatggatgacctggacgctgacatgaaggaggcagagtccgtgcggaatggctggaagcccgtgggagacttactcattgactcgctgcaggatcacattgaaaaaatcatggcatttagagaagaaattgcaccaatcaactttaaagttaaaacggtgaatgatttatccagtcagctgtctccacttgacctgcatccctctctaaagatgtctcgccagctagatgaccttaatatgcgatggaaacttttacaggtttctgtggatgatcgccttaaacagcttcaggaagcccacagagattttggaccatcctctcagcattttctctctacgtcagtccagctgccgtggcaaagatccatttcacataataaagtgccctattacatcaaccatcaaacacagaccacctgttgggaccatcctaaaatgaccgaactctttcaatcccttgctgacctgaataatgtacgtttttctgcctaccgtacagcaatcaaaatccgaagactacaaaaagcactatgtttggatctcttagagttgagtacaacaaatgaaattttcaaacagcacaagttgaaccaaaatgaccagctcctcagtgttccagatgtcatcaactgtctgacaacaacttatgatggacttgagcaaatgcataaggacctggtcaacgttccactctgtgttgatatgtgtctcaattggttgctcaatgtctatgacacgggtcgaactggaaaaattagagtgcagagtctgaagattggattaatgtctctctccaaaggtctcttggaagaaaaatacagatatctctttaaggaagttgcggggccgacagaaatgtgtgaccagaggcagctgggcctgttacttcatgatgccatccagatcccccggcagctaggtgaagtagcagcttttggaggcagtaatattgagcctagtgttcgcagctgcttccaacagaataacaataaaccagaaataagtgtgaaagagtttatagattggatgcatttggaaccacagtccatggtttggctcccagttttacatcgagtggcagcagcggagactgcaaaacatcaggccaaatgcaacatctgtaaagaatgtccaattgtcgggttcaggtatagaagccttaagcattttaactatgatgtctgccagagttgtttcttttcgggtcgaacagcaaaaggtcacaaattacattacccaatggtggaatattgtatacctacaacatctggggaagatgtacgagacttcacaaaggtacttaagaacaagttcaggtcgaagaagtactttgccaaacaccctcgacttggttacctgcctgtccagacagttcttgaaggtgacaacttagagactcctatcacactcatcagtatgtggccagagcactatgacccctcacaatctcctcaactgtttcatgatgacacccattcaagaatagaacaatatgccacacgactggcccagatggaaaggactaatgggtcttttctcactgatagcagctccaccacaggaagtgtggaagacgagcacgccctcatccagcagtattgccaaacactcggaggagagtccccagtgagccagccgcagagcccagctcagatcctgaagtcagtagagagggaagaacgtggagaactggagaggatcattgctgacctggaggaagaacaaagaaatctacaggtggagtatgagcagctgaaggaccagcacctccgaagggggctccctgtcggttcaccgccagagtcgattatatctccccatcacacgtctgaggattcagaacttatagcagaagcaaaactcctcaggcagcacaaaggtcggctggaggctaggatgcagattttagaagatcacaataaacagctggagtctcagctccaccgccttcgtatcactgctggagcagcctgaatctgattcccgaatcaatggtgtttccccatgggcttctcctcagcattctgcactgagctactcgcttgatcccagacttccggcccacagttccaccaggcagcgggagaggacctgctggccccaccgcacgacaccagcacggatctcacggaggtcatggagcagattcacagcacgtttccatcttgctgcccaaatgttcccagcaggccacaggcaatgtgaagtattcatccggccaaccaatgtttcctgacgtacagtgttgcccttttcagcaaatgccaattccaagttccattaaatcagaagctccatggctccttggcccacgatgttgagtgctgactgtgtgttctactgaaagagtaaaacactgactatccaaagagaaatggatattttgtttttataataaccatatattattgttttcttcttccctttctatgcaagtgtaaattaatgaacagagaggtatttggaaatggtaatacatttgtcacgggtttgtataatgtatacagcattgggaaagtgggtgggggctttctaatatgataccgtctttttaataactatgacaaagcttacataa

SEQ ID NO: 18 - DNA, 740 bp, Homo sapiens
ttttaaaccacaaatggttgatttatttctgactctcagcccgtctctcacgaagacagagcctattgaccaaaaacttcaggatctgcatctgagcagatcccaggaaggggaagtcaaagggcccaggtcagaggcccaagttcagacttcagcagcagactagggtcagactttaccaaagtcagaactcgaggttcatgtaagtccttagatcccgctcccaagccctgtctttctcctccctccttccggtgtccctccagctcagtgtggccacccgagggggtctctccctcccagccacagctcgggtatcccaagctggggaaatgtgtcactcggggctggggtgctgatctgtagcctagtccttcctggtccctcttgaggacagtggggatgggattggcacggccctcaccccggggtcccagccccattcctggctcccagccccccctcagcagcagtttgaagcccgggctggagatgggcaccccaagtggaaggttgggaggctgaggaccctgcgacagtgacagcaggtgagcagtggatgtgcggtggttggaatcttggaagtgggtgtcacagttctcgcagtactggagggagggagtaggagaccggttttccgggctccttgtctctccatggctctccctgaccatgcgggctacctcagggaagccagcttcttcagcgagctgagccgcatccctgccactcagctcacc

SEQ ID NO: 19 - DNA, 1278 bp, Homo sapiens
tttacaaaccaggaatatatcactttattcatttccagattatgagtatgacacagcatatacatatatttagataatatataaaacatagaataaaccgcaggaagaaatattggtctggaattccttatgggccatctttaattctgtaagttcatggtaaaggtatctccccccacactggggcaggcggcggaataagctccagcgttcatgcgccactcacaggactgcttacccccactgcacttacaatgcagtcacagagttacggcatgttcaccggtgtccatgacaagcaacaccaagtataaataacagaactacagcagagcaaactaagataaatatgtttttgcatcgtcctccacatagtttccttttaaaaagaagagtcacatccaggggtctatccctcgagtcacaattccagttattgctttgccttgttctgaactgggagatacagtttgaactctgccggcagctcatcttctgagtagagtctgtctgagaagtaaacccgtcggatgcgacaatttgcatggatctgcactctgagggtctcgatgtaattggtgccgtatgctcgccgtgtgaagtctagcaagttgaactgaatctggttccagccgtcatccagccgcatgggcatggtgcagatgaagggtttgacccgggtggtgctctggtagttacttgcccgaaagcgacgacgcacattcttgtcatctagtacctgcacttcgaaggtaaaatacttcttcaggtttttgataatcatgacaaggaaaggaagtttaattcccagcgtcttcttggggtctgcagggcatgtgatatatgtggtgcttacatttgtcccttcaatctctagcacccagggactggatgtccattaatcagtgaattcttttgaatgtggccattccgtacctttttgtcccagatttgcagaggcttgcttgccgatgctgtagaggatggagaggaagccgctctggaacgtgtttttgaacatctcgccggcggccttctcctaagccgcccccggagccgacctaggccccggagtagatacaggcaccgagcgtcgagggcacagcagcaggccggccctgttccgaagaagggtggttgagctcctggcctccggatctgcagccactgatggccggactcggacgcggcaacgcctaagtccgcgatcttcagctcctaagctgcgagctcagaacggaaaccacagcaactaccgtccgcgccgcgggtatttcc

SEQ ID NO: 20 - DNA, 439 bp, Homo sapiens
  misc_feature (1)...(439): n = a,t,c or g
gcccgggaggtgctcacactgcagttgggacattttgccggtttcgtgggcgcgcactggtggaaccagcaggatgctgcgctgggccgagcgaccgattccaaggagcccccgggagagctgtgccccgacgtcctgtatcgtacgggccggacgctgcacggccaggagacctacacgccgcgactcatcctcatggatctgaagggtagtttgagctccctaaaagaggaaggtggactctacagggacaaacagttggatgctgcaatagcatggcaggggaagctcaccacacacaaagaggaactctatcccaagaacccttatctccaagactttctggagtgcagaggtgagggcctctgtctgaactttttaacccggttgccacaaccccgagggttttccattagggggcagggaattgntgagttag

SEQ ID NO: 21 - DNA, 408 bp, Homo sapiens
  misc_feature (1)...(408): n = a,t,c or g
aacactcttgttgatacaaagaaagatctagaattaaaaactttacaggaggaaagtgaaaaggctggaactaactcacccaaaatatttagcaagttaatcataaataagataatagattttgagtctttcggttttcagtggagaactttatatttgattttgcctaatgtgtgaaactgtataaagcatactctatagtatatgttcctgctgcctggaagcagacacatcatcaaagtgtgtgtgtgtgcaagagaaaacacattaatttctctttctcagtttgtcataagaggggagtgctataaaggatcttctgggctggggtgtgggtggctcaaacctgttaatccccagaactttggggagacccaggctgcagtgagctgtgattgcaccnctgca

SEQ ID NO: 22 - DNA, 997 bp, Homo sapiens
ttttcaaatcatatttaattatttcttgatctttactcaaagaattattctgcgctaaatttgcaacattaaacaataattaagcctggatccgataagttattgggtgactagaacctacaacacaatttatttttaatttaaactctcaagtctgattaaacttgggggaaaaactgaacattcaggtgatattttaaattttctttgtgactaaatagatgtcattaatatcatgcttcatcttactgtgcatagatgacccatggcacacaaagtatatgtataatattgcaatattgtacttccatctttaaaagtatgccaaagacttcataatgaattcaccatatttaaggaataaggcaaattaatgtttatccgaaatcaaaatgagattggataattcctggaatctgatttctgtaagtttcagtcctaaagggaccttaaatatctactagaacgaagtacagtgtatttctcagattacatgacattagtcaaccaatttagttgtaacacaaagtgagaaagccttaggtgttgaaggagtgtgaaaataaaaatctcttttcatgcagtttctgcttcattttccaaggattataatatgctgagtaaacttttggcactaaggaagccagctacaggccacgtaatgaaaactattcagaaaacagttcagcaaatactactatttgaatacagttcaaatcgtatttatataaatactctgcctacattatttaacccaaactggattattcaccattctttgaagatgccttgtgttttctgttatctacttctgctcgtgcagtttacttacaccttcaccctttcaaatcctaactcttcttcaaggcctgattcagattttaactttttaaaggctatctgaatcattcaaggagaagataccctttctcctcataaaaacacttagagcaaactaccactattaaatcactatgcatactgaaaaaaaaaaaaa

SEQ ID NO: 23 - DNA, 4856 bp, Homo sapiens
  misc_feature (1)...(4856): n = a,t,c or g
cggtcactataatcgctcctgtggcacagaggcatacccaggggaatctgcccagggggccactctgtgcccacgtgggaacccacacctgcttgtaaagcctcccctccctctgaccagcaaccaggacagtttgttgttccaagcagtgggctcatgtctgttttggctcagaacagggtggggagagcgggccagggacccgcaggaaggcttatccttgagattgcgtgggagacacaacaaggggtgggggcccgcaggcggggcgggggcgaagcaggtgatatcaagcccagagccccagcctctccccacagtctcaccatggcccgcaccgtggtgctcatcaccggctgttcctcgggcatcggcctgcacttggccgtacgtctggcttcagatccatcccagagcttcaaaggtatagataggcagggacagggagggagagaagggaggagcccttggaggctagaagggaagtcagatcttcctcctctcccaaaacctccagtgtatgccacgttgagggacctgaaaacacagggccggctgtgggaggcggcccgggccctggcatgccctccgggatccctggagacgttgcagctggacgtaagggactcaaaatccgtggccgctgcccgggaacgcgtgactgagggccgcgtggacgtgctgggtgagcctcctggaagcatatgggctcctaggagccttctccgccctgcgttgaaaccaacatgttcccaggcccagggagcacgaggggacaggccgtgctgagggtgatgctgaggcgggctggtcgggcctcttgtctccgcagtgtgtaacgcaggcctgggcctgctggggcccgctggaggcgctgggggaggacgccgtggcctctgtgctggacgtgaatgtagtagggactgtgcggatgctgcaggccttcctgccagacatgaagaggcgcggttcgggacgcgtgttggtgaccgggagcgtgggaggattgatgggtgagtggtagggagtggcctcggcagctccagattctttgtgtgcggagctgagccttgaaggcaggttccgcggggagggtggaggggggtgccgtcagcttggaggggcaccgtctgcccggggatgaccccctggccgctgcgcctcaggaacctcgtctccccacctaagggctgcctttcaatgacgtttattgcgccagcaagttcgcgctcgaaggcttatgcgagagtctggcggttctgctgctgccctttggggtccagtgagtcaacacccccgttccccgaaccctcttaactctgacctagagacgccgagcaccctgtcctgcgggagccgctctggggcgatctccctggccctctctgcccggctcacattagctgtgtgccaggcacttgggctgggcgcatggcacgcattgtgccacctgctgacctagctgctgaagtgttggtattgttatggggaagctccagcccagagaggttaggtgactggcccaaggtcacacagcggccagggaccccgctagattcgaatcctgacaccagggctcccttgtagcctcagatggatttgggagggctgctccggcaggaacccgcgtttcaaatgttctggttatcaccagcgccctttccgcctcacttcccagcgcagcggtgctgctcgcggtcgggggccgggacgtggttggggctgggactggggttggggctgggactggggcctggctggcgtccgccccctcccactcgttgctctccggccagcagcttgagcctgatcgagtgcggcccagtgcacaccgccttcatggagaaggtgttgggcagcccagaggaggtgctggaccgcacggacatccacaccttccaccgcttctaccaatacctcgcccacagcaagcaagtctttcgcgaggcggcgcagaaccctgaggaggtggcggaggtgagcgccgggctggactccaggagtgggggcggtgcgtcctccggcgcgcagcggtggccacagctctcctcccgccgccgcaggtcttcctcaccgctttgcgcgccccgaagccgaccctgcgctacttcaccaccgagcgcttcctgcccctgctgcggatgcgcctggacgaccccagcggctccaactacgtcaccgccatgcaccgggaagtgttcggcgacgttccggcaaaggccgaggctggggccgaggctgggggcggggccgggcctggggcagaggacgaggccgggcgcagtgcggtgggggaccctgagctcggcgatcctccggccgccccgcagtaaaggcttcctcagccgctgtctcccgcgcccttctttgtcccctgggtctgtgtggtccctggggatggggcggcggtagcagctgtgggtggctaattaagatagatcgcgttagccagttttaccagcgcannnnnnnnnnnnnnnnnnnnnnnnnnnnnnnnnnnnnnnnnnnnnnnnnnnnnnnnnnnnnnnnnnnnnnnnnnnnnnnnnnnnnnnnnnnnnnnnnnnnnnnnnnnnnnnatctctacaaaaataaagnnnnnnnnnnnnnnnnnnnnnnnnnnnnnnnnnnnnnnnnnnnnnnnnnnnnnnnnnnnnnnnnnnnnnnnnnnnnnnnnnnnnnnnnnnnnnnnnnnnnnnnnnnnnnnnnnnnttaatcaaatgaaccaaccaaccgaaaaactcagaaaccaaggtccagaaagaagccagcccaggatcacacctcaagtccatattaaaggccagacacagtctctggatacccaaggggcatctgcaggaggagttaggtgggaattggcttggggtagagtcaggttgtgacttggaccccattagccatgagacctcaggcaagttccttgctttctctcagtcnnnnnnnnnnnnnnnnnnnnnnnnnnnnnnnnnnnnnnnnnnnnnnnnnnnnnnnnnnnnnnnnnnnnnnnnnnnnnnnnnnnnnnnnnnnnnnnnnnnnnnnnnnnnnnnnnnnnnnnnnnnnnnnnnnnnnnnnnnnnnnnnnnnnnnnnnnnnnnnannnnnnnnnnnnnnnnnnnnnnnnnnnnnnnnnnnnnnnnnnnnnnnnnnnnnnnnnnnnnnnnnnnnnnnnnnnnnnnnnnnnnnnnnnnnnnnnnnnnnnnnnnnnggcatcggcatgagcaccgcgaccggccctctgagtctttcttatctgtaaaatgggtataataatacctatctaatcggttttagtaatggtggagataatgcctgaaagtgctagtatagaggtttaatagccagcaaggactgttattagaatgaatagtaatatgactactgtcacattttgcaaatgtgtaaagaagagggctaagtgaatcaaagggagacagccccactcaccctgttctgccccagaggactgagcgatccccaccatctggcaagctgcctcaccaggaggtccagctggggctacaggactggctactttgctacaatggcctgtctttcctgagcccagtggagggtcccaggggggcagaagtcattgataggggccagtagggttgtagagccactgtctgaacttctgtggaggtctggtgcaggggaggtgtgaacagataggaggctaggtgaggatgcagcagaggaaggggtcaggagtgccccaggagggggcggtaccgaggcagggattcagctgggtctgagagggaggcaaggctgagggggatggccctttggagtgggcagggacatgaccacagaaagcctgggaagtggaaacagacaggagcctgctggagctcttggagctttgtgtggggcactgggggaaggaggcaggcactccaccctgacctgcccctacctcggatgagggtcttctctgcctgttggatgatgtgctgcccctgctcttggaggaagaggcctcccagccaccccctcctgccagtcgccctgacctgctgacccagacagatctgctatccctacagcatccaggaaggccacagggagggggcccaggtggcatgggtttctgaggcctgggatctgctctcagtcccgctctcgccaaccccctttgcccctctgtgacagtgtgtgtacatatgcgtgcatgtgtgtacctgtgtggtgtggctcacaaggtcacccctgggggtgggataataagaggtaaagtgtgaccccctctcttccgtacattcattttttcaagcttgtgaatattcacattgttaatataatcttctgcagtcccatgacttcgaatagcacttagatgccgatgacccccccaccaaagaaaccccactgtctcccacagactccaggtctgtatctccaactgcctactcaatacaacacgtccacctgatgcaatgaacttaatgtgtctaaaccccaattccacatttccagtcctcctaccggctcctcccccagtcttctctactttactgtatgacaactccatttttcccaatactggttttaaaaaccctggagtagtccttgactccagtctctctcacctttcaaccaattcagcagcaaatactgacagctctacctttgctcatcaaagcatattccaaaatcaccctattcgagactgcacactgtcatctttcccttcaattacagcagtagcctcctaactagttttcttgattccactcttgcccatcagcagtaaaattagcacagtgcatttaaaatgatcttttaaaaatgacannnnnnnnnnnnnnnnnnnnnnnnnnnnnnnnnnnnnnnnnnnnnnnnnnnnnnnnacgt

SEQ ID NO: 24 - DNA, 497 bp, Homo sapiens
tttttttttttagaactgaaaaatctcaggtaactacaaaatgatagtttctccatttaaaccttaattagaaatgacaaagcttgaaagagaagacaggccacatcagtatgctattaagctgtctttagtccacaatttactaccatcacttcaacttttctttagaactgaaaacagtatatgactgaatgccaccttcttgaattatttggctagaggatggtattaaacagaagggcaatatctccaagtgagttcttatggaggaaaactgccccagagccatggtgtctccctgttcaagatgggcagatggttcagggcagactgagaggtgcccctcaagtgtcctgcctctatggctttatctttgcatatgtggcactgtcagctcaatggcacgacagggctggctctgctgctcttcgatgtagaggcttgccaggggaaataggcacacagatgcagcctccttcctaaccctcaactgcaat

SEQ ID NO: 25 - DNA, 409 bp, Homo sapiens
  misc_feature (1)...(409): n = a,t,c or g
ggcacccctagggtgcaggagggtaggtgttagctgaaaaaaggagtggaatgaaggagctttaagaagtagaaatatacctcattttacataattgtcatgtgggtttttaacaacattgtgacaattacagtaagttaaaaaaaaaaagctntggttatgggtatgaggactaattaaataccttgtaaacaggnggggcacggtgactcatgtctgtaatcccaaagngctgggattataggcggtgaaccaccanagttgccggtcgacgcggccgcnaattccagatntntgaatcganatnctgnaaaccccgnaagtcantttaactggngcatcgtgcccatntcaattctttcatttatacatcgnttgcctttttatggactatactccttangtttaa

SEQ ID NO: 26 - DNA, 254 bp, Homo sapiens
gtactaacctttggagagtggacttggtctcatcccagaatgatctcttaagacgttttttttaatcatttgagaagcatagtcgtcttctaaccaagagacattttcctttaattacttgaagtgggtttacttgctttaaagttacttaggagccattgcgtacttgatgctttaaggtgacaaataaacacaatttaagatgctcatgtttatgtaattcattctttagttccacaaaataaagatgtaag

SEQ ID NO: 27 - DNA, 736 bp, Homo sapiens
  misc_feature (1)...(736): n = a,t,c or g
tcaaggtcaagaaacatcctttaaaaagttaattcccttttctggagcctaagccagatcttatctaggccttgtgttgccatctgttagcattgatttctggaatggagcagctttctcaaagtttggtcttgctagtcatgaggtcatgtcagtgtcttaggtcactgctgctcaccttccttacccagggagtatactgcataggtttctgaacacctgttttcattattcactgttcctctcactgccaagaatggagggaccctcagttgaagatcaaattgactctgaagaaaaactggagatgtttctcttggagtttggatagagtattcacttgataacatgtttttcccctgccttgctcttcacaagaacatctgggccaggcattaacaattagtaaatttttttgcatatgaacagtatttttctggtcatgtagatgggtgcacatgacactaaacagcattgtttagtgttatccctcttaactggtgggttgtatttggggtggaggctgtagccgaggagaagacattcacctctgtactcgagaaactttgtgtaggaatttagnnnnnnnnnnnnnnnnnnnnnnnnnnnnnnnnnnnactacttttactgttagcacaatgctataattgagctaatctttgtagtttggtgcaggaccaccaagtttgtgtgacccttacctactttttccatgctcagccataccctgtccggg

SEQ ID NO: 28 - DNA, 425 bp, Homo sapiens
gaatgagttaaaatgtaatagcctaaaaaaacttatttaacctaacaggaggagggtaaaaaatttattatatctcctaactgtgttactttatacaatgttagcattattctttccaaatagaaatttgaatataatatgggaatgggaaacttttccctttttttttcccttctattgaggactactgacccacaggacagatcacttgcgccacccaagtgggaaatgttttaatttaatttttcaactgttttaaaatatgaattaaatacttttattattgggggaagagtaaatttgtttactaaatatatagttttttaagttaaagaaggaatggtggggaagaaggaaggaaaaaaattaaagtggtgagaggataaagaaaggtagaaaagatataggcatagcgctgtggctca

SEQ ID NO: 29 - DNA, 592 bp, Homo sapiens
ggggatgagggcggcgctcacggtgaggaagccccgagctcccgggacgcagacagggtgtgcagggccgtagctcgggcctgtgtatgcacctgtgcgtgtgtgtttgatgccaggacaaggcggcggtgtgcgcggcgaggaggctgcgacagctgtatagaccccagctgcagtgaaatggccatcaaaaagggaagggataatcgagtggtggaataaaatctgcaaacagaaaaaggacagacctgttttcggaacgaggcttttcgagttaccaccatgactgaaggctaagagcaacttgcttgcgcattaaagatcacttggagagagaggtccagtgagcaacaacggccagaaatttcagggagaccatcttgaaccatccagcctccaccaggccaacagctgacagctgtcacatgaatatgatcagcagaagaaccactcaggcaagccaagcccaaattgccaagccccccaaataataagctaattgttttttgttttaagccataaacttttgaggtggttatatagcaataaataactgaaacaggtgtttaactttctagactttttaaatgac

SEQ ID NO: 30 - DNA, 1813 bp, Homo sapiens
  misc_feature (1)...(1813): n = a,t,c or g
aagcctccggagcgcacgtcggcagtcggctccctcgttgaccgaatcaccgacctctctccccagctgtatttccaaaatgtcgctttctaacaaggctgacgctggacaagctggacgttaaagggaagcgggtcgttatgagagtcgacttcaatgttcctatgaagaacaaccagataacaaacaaccagaggattaaggctgctgtcccaagcatcaaattctgcttggacaatggagccaagtcggtagtccttatgagccacctaggcccggcctgatggtggtgnccatgcctgacaagtactccttagagccagttgctgtagaactcaaatctcttgctggggcaaggatgttctgttcttgaaggactgtgtaggcccagaagtgggagaaagcctgtgccaacccagctgctgggtctgtcatcctgctggagaacctccgctttcatgtggaggaagaagggaagggaaaagatgcttctgggaacaaggttaaagccgagccagccaaaatagaagctttccgagcttcactttccaagctaggggatgtctatgtcaatgatgcttttggcactgctcacagagcccacagctccatggtaggagtcaatctgccacagaaggctggtgggtttttgatgaagaaggagctgaactactttgcaaaggccttggagagcccagagcgacccttcctggccatcctgggcggagctaaagttgcagacaagatccagctcatcaataatatgctggacaaagtcaatgagatgattattggtggtggaatggcttttaccttccttaaggtgctcaacaacatggagattggcacttctctgtttgatgaagagggagccaagattgtcaaagacctaatgtccaaagctgagaagaatggtgtgaagattaccttgcctgttgactttgtcactgctgacaagtttgatgagaatgccaagactggccaagccactgtggcttctggcatacctgcctgggctgggatgggcttggacatgtggtcctgaaaaggcagcaagaagtatgctgaggctgtcactcgggcttaagcagattgtgtggaaatggtccctgtgggggtatttgaatgggaagcttttgcccggggaaccaaagctctcatggatgaggtggtgaaagccactttctaaggggctgcatcaccatcataggtggtggagacactgccacttgctgtgccaaatggaacacggaggataaagtcagccatgtgagcactgggggtggtgccagtttggagctcctggaaggtaaagtccttcctggggtggatgctctcagcaatatttagtactttcctgccttttagttcctgtgcacagcccctaagtcaacttagcattttctgcatctccacttgggcattagctaaaaccttccatgtcaagattcagcttagtggccaagagatgcagtgccaggaacccttaaacagttgcacagcatctcagctcatcttcactgcaccctggatttgcatacattcttcaagatcccatttgaattttttagtgactaaaccattgtgcattctagagtgcatatatttatattttgcctgttaaaaagaaagtgagcagtgttagcttagttctcttttgatgtaggttattatgattagctttgtcactgtttcactactcagcatggaaacaagatgaaattccatttgtaggtagtgagacaaaattgatgatccattaagtaaacaataaaagtgtccattgaaaccgtgatttttttttttttccggc

SEQ ID NO: 31 - DNA, 548 bp, Homo sapiens
  misc_feature (1)...(548): n = a,t,c or g
tctctctctgccaatgaaatgtattattttcagccacctctttttaaaaacaatattatcttcattcctgtaccattcattttgctttgtatttttgagagcgctggttgccttaaaatcagtatctcaaatctctggcaaagttccttctgtttctttgactctatgaccctgatattttctagaggtagctggtgtcaatttgagaagcatccagaggagtgaatagaaaagaggccttagcattaaaaagactaaatttaaatccttgttccnnnnnnnnnnnnnnnnnnnnnnnnnnnnnnnnnnatacacatgctgagcttggattaatcaatggaggcttgtaggacacctactgtgatggcaaattctgtttgtttctagcaggagagattttaaaaagaagttaaagaaaaaaatatgtgagactatgatattctcccatattatcaaaaacacttattttcctcaatgtaggggatagtgcaagcctgtcgacccagctattttaggaggctgaagtggggagcctcacatgagcccag

SEQ ID NO: 32 - DNA, 1123 bp, Homo sapiens
  misc_feature (1)...(1123): n = a,t,c or g
tttttttttttttttttaacaagccaaagttgtatttttttaaacaggaaaattatgtcaatataaaacagataaaaagacaaaaatcaaaacacacaacacagaaaagcacaacactcaagaccagtgcaaacccttcccaacccacttcccaggttttaaaaccttgattacagatccccaaggattagactgtatcggagaggtcacagtattgaatcagaaaaagaagacatgttttaaaaggtctgttacacaggtagtggtgtgtggggtgggggatgtacacttcatcactccaacatcaaaaaacatgatgcaaaaaggatttcagcgatgaccacagatttctagaaccctaccacgtatgctagcccccctccccatccacttttaaaagttgcttttaaaaaggataaaaagtgcacagacactttcgtaaggcacagacagattgtcacacaagtcgtttcattagggactcggataagacagcgagacagttaaataccgagaaatgccaggaggccgcatgttcctgagccggtgccccctgcccaggactggggcaggcgcagggccgaggcaatgggaggttattggcctctgcctcaactggacggactcaccggggttctcctggggccttggcgactgatttccagggcctgaaagcagcaattagccaacctcctcactgtgtctccctggcaggacctgaggggtgatcaccaaccggcggggccctctgggggttctacttaacgccgttttggcagcagctcactgactgcaatgtgccccagcatttccaatgaagaggaggttctgtgaagcgcacagcaggttctggtcaagaaggcagcctttgggcacccacctcaacagacccaaggcagcggatggccaagagagcccagtggattctgccccaaatatctcatttccctcttagtgtcacctctgccagcatcacagctggggcacagtcctctctgctctatcctcacagcacctcacacgtactaggtactcagcaaatgtttctggagtatctttgtgtgcgttatgtggtgctgttttatcaaacccctgaanactnataatctgatttctggtttac

SEQ ID NO: 33 - DNA, 401 bp, Homo sapiens
gctggaaataattatgttttttcattagtgaagaaattgtatagtacattaagatatgtattgctaaacaaagccggaaataaaatataaaccttaaaaattgttatccatttcttctcctcccacttcactttaaaagaaggaggattttttaaagatgaacttccgaagagactccaaattactgactttatagtaatttatttaaaaatgagtataaatacaaagcaaattttggtgatggtggtgaaagtgtgaggttagagagaagagagtccaagcaattttaaagaaatataaggaaataaaacactcagatcctaaaattacaatctattcctcctttgatagatgcttaaaactgttctctttaccgcttgagggtataatattgatgtttt

SEQ ID NO: 34 - DNA, 941 bp, Homo sapiens
gttgagttttctacaccaggaattttcaatatgtatattgatgaaaacaagctcaattcaaactggacagttttaagataatgttaaaatcagcacttttagagacaacgaaggccaagaatcagtacagtagtattccaaaatgattttctctagaaatttgaaagtagatcgaacagaatgttgtcaaccgcctaccagtacaatcttttgtggaagatactttgaaatcactttctactttgttagtaaagttctgtctttccagagctgcaagttttaaagtgttacttatacagaccaaccaagaatagtgctgaattaagtggcatttagtatctagaagccattttgatccaagaagctacttaagtgtccaaagtcagcatgcagcacatgtagcttttctgtaaacaagggtgtgatatgaaagctgcttttttaagaagagtaaaagcacattccatatacgtaagtgaattttaaaaataaattgaggcaaacagttaagttttatttttagagcaacaagttaactgtaaatattttaatgttagtttgctcatctatgatctgagatcatgccgaagtgagaaaaatctccccaaaatacaatttaatgcattgggaaaaaaaaactttaacagtaattccagccacaatctttagatcacccttgtaatgtgttacgggtccatttttcctggaatcgtttaatctaaagcagtttcccctgttctggagattttgtagttaattttaattttggctattgtttggaaaagatgagctgtctgtgtagatatgaagtatagttttttccataaaacagatgtttattttgtattaaaaaataccactgtacttgttttacaccatttgtatacatgtggtgatattaatgctaaactgtaaaattcaggaattaaaatgtgaccctg

SEQ ID NO: 35 - DNA, 426 bp, Homo sapiens
  misc_feature (1)...(426): n = a,t,c or g
gaccttttaggatttgcttatgaggccaaagtgctgctcgtgtcacaggacctagctgagcatcttggacattgttttttaatatgtcaaatcagtgttagtcttgttcagtataataaacatttattgaatgtttggaataatggaagacttggcttctgttcagggctcacagtccagtgaaggaatgtaaaacttgctttaatatacaagacatttggaagaaagcactgcaagaagtgagaaaaacagctggacgcggtggcttatgcctcggctcccaaagtgctnnnnnnnnnnnnnnnnnnnnnnnnnnnnnnnnnnttaaattgtatttatattttctttttccggctgccatgcctctacattactcttgcccttctttgagtttactggncttatatcccaaagctttaacagggg

SEQ ID NO: 36 - DNA, 362 bp, Homo sapiens
atgagacagaagcactaactactgagcaggacttctaggggagttctttaaaactcagaggagcaccacttttaccttctgctcttccctttttcctgcctggaacgcagaagtgatggctgaagctcctgaggctataagctctgtacgtaggagagtggtgaagaaaggagcttggttctgcaaggatgttgtagagctgccataccagtcctgcatggtattcctgtgcactactgttacgtgaacacacaaacacctaatttgtttaagccattaggccaggcctctattagccattcctgactgatacagaagacaaaaatggcatcacagactcctgaacttccaaagacactgct

SEQ ID NO: 37 - DNA, 432 bp, Homo sapiens
aaaccaggtcactatagtgaccctagtgacaggaagaaagggagatgggtgtggctgcccaggactttctccagtggaaaagggattccctctaggctgagcctcccctgggccttagggcctcacccttcccttcccccacacctgtcctggcaggtaaggctgcttcctgcttcctgggcccagatggcagccgcaccacccagctgatctccagcagccctccccctccccaagggtggcttccctgcagaagaatctgcatggcacgctgttgtcttctttctggggtccatctcctgtactggggagggagaacctcagaatctcctggaattctttaccattcagaaaccagcctcccctctgaagaatcccaaggcccagctgggctcaatttggatctgttctttgttttaaaaatgtgattgg

SEQ ID NO: 38 - DNA, 1326 bp, Homo sapiens
accaagcataaaagaacccatactggagaggaatctttaaatgtgatatatgtgggaagttatagtggcacatcccagaagagaacctatgagggagggaatgccctggatgggggcaggatgaggatgcctctgtagcaggcagagcttaccaagtctctccgaactcaaatggaagaaataccttatgaatgtaagaatgtagggggtcatggcttgtaatttacacagtgtaaatgaaaccatcctagaggattatgaggaatcctttctatgtgattttcaatcatagcaagcaagaaaggctccagtgtcaaggtagttcagctcttacaggatataaaacagtccatacttgagagaaaaacttagatctgagtgatggaatgtgaagcaaatcttcaaaatcagtagacatttctggacataaaacacagatgaggaaagggcttcaattagaagttacgtaatcaccatcagaaagttcatgtttggtaaattctgttactagaaatgtaggaaattcaggtatagctttgaatcccaattacacattggtcagtgggaaaactaagggcctccaacaggcaaattcagggaggataggtttcagggaatataaatttatttaatattagtggtctttaagtataaacttgatgtaattgggtttgggagggggcagtgatgatgacttctgaaacaaaatttggatttccttttaggaaaagtagaaagcatagacttacaagtctaacaggagataggagagagtcactcataaaaaatgcaaattgatgaacgtactattgtgatacattagttgaatggatgaaacttttttaaagtttcagatgaactcccataatgaatgatgaatttgtgatgagggataacctggaagtggtattcacacattatgctacaataaaaggttctacgtggagaggattttgacacattcagtaactaatggaacacaccgtcaacatgaattcgcaccttacatgacagaagtgattcagggattcctatgaatagaaatgctgagaaggaacgcattttattgcagaagctaaaaagctaaagtaccagtcatctagagagaaggaaattaatgtttcttaataatcctgttaaatgtttgattgtttttggaatgtgttattgtaaagatgtcatgcaggacatgtatatgttgtctgttgtaaaatgttaacgaatactttgttcagggctcactctctctttgtcatgaaagccagctccttgtggcgaggtaaagtggaattccaataaagaaattccttaaatcaaaaaaaaaaa

SEQ ID NO: 39 - DNA, 417 bp, Homo sapiens
  misc_feature (1)...(417): n = a,t,c or g
ctcaaacgcattagtgacactgcaagtgctcaacagccacatgtggtactggcttccacactggacagcacagataaaaaacattccaatcatttcagaaagttctactggatagttttgaattagattatggtaggaagaatgatattaagacaagtatctgtcatattctgcaagttaaccattaaaattcctcccattgtcaaggaagcataatatgtaaaagcaggttaagtacagatcattgcagctgcaaactgagtaagggtaatgagtaaaaactttgaataccaacagcatcctcaatttatgatttggtcagtcctatggcactgacctaagttaaaaaactacacaggaaggcaaggcctttctttttttttaggncagggtctcgctcttgttgggccgggctgg

SEQ ID NO: 40 - DNA, 683 bp, Homo sapiens
ttttttttttttttgactgaattgaaaatagttttatagcagaaaactgagaaacaagaaaacattaaaattgcaccacagaatctgaggtttcaaagatctgtttgaaatatcttcatttcattaatttgaaatttggggcaggatatgatcttaagagtctaaacattcaagagacgagggcaagaaagccagtcacatgtagaataccaagtccaaggcacgcgtcctgcggtcaggacagtgttctaggtgtgaactcacttaccgtggggcctatgaagcaggagtgtgtggccttcgaagttcgaatgtgttcatgtgggtgtgtagcatgtgaatcggacatggaaaaaaaaaatcccctatctgcccagtcaaaaataaatgtacacctgaaaatcagatgcaacactaacttgcaaagattcccacaacataaaaaagaagtgatgctttcatgtgctggccgtggacaatgtggaaaaactgaagcgtatacagcgctgttgtcagaacaactcatgtgcagacaggggtggatgtggcgtgccgggcagtgtggctatgcaatcagactgggatgaagagaatacgaatacttaccagagcctgagagtgaaaacagagattaaagaatcaatcattaaggtgaacgttcaccagtgaggtttacagctttg

SEQ ID NO: 41 - DNA, 580 bp, Homo sapiens
  misc_feature (1)...(580): n = a,t,c or g
gccttcctctattttctatgagaattggaaggcagcagggctgatgaatggatgtactccttggtttcattatgtgagtggggagttgggaagggcaactagagagagaggatggaggggtgtctgcatttagtccagacactgcttggctcgctccccgagtcctcctgtttctgacttcctgcataactgtgagctgaagggtttcctcatctccccatcttaccccatcatactgatttctttcttgggcactggtgctacttggtgccaagaatcatgttgtttgggatggagatgcctgcctcttgtctgtgtgtgttgtacttatatgtctatatggatgagcctggcatgaacagcagtgtgcctgggtcatttggacaaatctcctcccaccccccaatccactgcaactctgctgttcacacattacccttgggcagggggtggtggggggcagggacacactgaggcaatgaaaaatgtagaataaaaatgagtccaccccctactggatttgggggctccaacggctggtccctggtttagggagcgaagtttaatgtttgcancaggg

SEQ ID NO: 42 - DNA, 642 bp, Homo sapiens
actagtgaaaagacccatgaagattaagattaataggagggaactgaatctgcctaaaatgttggcacaagtttctataattcctgactgctgcaatgttgtttggccagagtttacaaaatttgtaactaattgctcctatagataacatcactattgtagaacatgagattggtcttttgagatgtttctcattcttttgcattctggcaaccggctgacctcattcatacctatgactaatggctcagccagtcatgtggtccctacctggaggcagattcgagcacaaacagatcatgtccccctgcccccatgattccatcaccaaacaatcagcagtacttatattttagtcctgtgctcctgaaactacccttgaatatctctaacccctgatccactggggaggctgatttgagaggccagaagaacttgcctggcaattatgagtggatggaggaactgcctatccctgtcccattgtcttgtccacaggtcagcctcacaaagggaaagagccctggatgggaatacagtggaagctcattctcttagtgacctggggacattggctcgagatgaaccctggcaggagtggcaactccaggttttggatgcctaagaagagaggttttgagc

SEQ ID NO: 43 - DNA, 423 bp, Homo sapiens
tcccagtcccgcccctgtccccaagtggctgcttgggggagaggcgtttgccatcactggtgttgtcacctccctgtttctccaccaagggcttgggcctctcggggctggggcctcccaggggatggggacccagaggtgcagtggccgcccacatccatggcctaggagctactgggcaggttcccggccacacatctggtgggctgttttgttttctttttttcctcttcccccagatgtcttgacgggatcactggggctctttgtgagtgagggtggccaaactaccgccggaggagatggggtctcagagcgagagctgcggagggggaggggaagaagaaggggccaagctgcagacacacacagtcattcatttctgtccacacccctgtgggtggcgggtgtgcgtgtgtgtgc

SEQ ID NO: 44 - DNA, 430 bp, Homo sapiens
tcctaggttattagtatttggttcttctgatactaagctgagtgatttttttttaaaacaatgtctctggtagtctgattgagatatgaaacttttgggaagaaaaccattatgtaacaagaatcctatgtaacaactgggtaaatgttttagaatgagagataggaaagaacatctaaatagtacttttttgtgggacgcatgagcctttatacagcctagctaatttgcaaggtaatgataaataaaagtgtattttgttactgtgcttaattcagaaattcaaattcatgtatttcctattggataatttgtaggcgggcagtttactttatagtcaggttagtttttgtgatccttagtgtttatatttgcattgcttttgtaataaggatgtatataagatcttaaacgcctttcaacttctgtt

SEQ ID NO: 45 - DNA, 1440 bp, Homo sapiens
tgcagcacgagttccgactgggcggtgggctgaaccctgggcttgtccgtgccctggccatcagccccagtggccgtagtgtcgtggccggcttctcctcaggcttcatggtgctcctggacacccgcacgggcctggttctgcgaggctggccagcccacgagggggacattctgcagatcaaggcggtggagggcagcgtcctgggtcagctcctcctctgaccattccttgaccgtctggaaggagctggagcagaagcccacccatcactacaagtcagcatccgaccccatccacacctttgacctgtacggcagcgaggtggtcactggcaccgtgtccaacaagattgggcgtctgctccctgcttgagccaccctcgcagggccaccacgaagctcagctctgagaacttccgcggcacgttcaccagcctgggccttgcttgcccactaaacgccacctcctgctgggctcagacaacggggttatccgcctcctggcaatagacttgaggcaaggaactgggcccgggcaaagggtgggaagacatctgcggggcgcgtgttcactcaaccctaattccctgagcagcagctccctccagggaggccctgggtcccacgccctgggtgcccacatggcctgccaactagggcctgcaaatggagtgggggagtcctggcccctgaatcaccagagccaccaagcctgccagaggggtctcattcatggcttggggacacagggctcctagcaagcaggaagttaagagcaggaggaagcgttgctaccttcacttctccccagctctgccctctgggtccacatgaggacagggaagctcgggaaggggaagggagactggccctgcccagccggtctctagcccctcagcccccgctgggcactctctgtcccatccctctaggacagggaagctggccctggtccagggcactgatggtgcttggattccagcctaaggaaggctggccgtggtccaggagttaagggcttgggtctggggtttaagtggccacccatccaggccctggccagtgtgggaccgggacgggaaggaagaaggaggctaggagcagggggaaaaggtgcacttggccagtggcgcctgccaggagtgagtccatgcgttgtctgcccacccctaccacagtgtttgtgccttcagctgagggggcagcctctgggccctgaacccctgctggggctccacgaccctgagagaaggggtgagaagaatcatctctgcacctcgggtctctgccagaggaagacttaagcatccctgcgacctcacattctagacagagatgaggtcccaggggttggcccctgctgccttctcacaatttgcaatagatgtaaataggaccaataaatcctttggaagagcaaaaaaaaaaaaaaaaaaaa

SEQ ID NO: 46 - DNA, 497 bp, Homo sapiens
tttttttttggtcacctatttgtcccagagcactcagtaattactttgttttgaaaagttagagtcgtttttcacaagacgtgttattcatgttaacatgaaatgggttcactactttaaaaaaataaattgataaaggtttacacttttgcttaatttttaaattgaaaatctcgtttctaatggcacatatggatatatgcataatagacatatccaaaagctttctgagctcctcagtcagtgaaaagtgtgaagcgtcctgagaccaaacagctgtcagaagaggagttccgctaccagagaagcaactcacatctaaaaatatgtgaaatctaactccacggaaacttcaagaatcagccaaactaaatttaaggcatcggttgttttggttttaaagacacaaattcttctgaccccacagtttagagtgaatgactctgataaatggggctcgtgcatgctctctgagcaccaggaggaagtgactgaac

SEQ ID NO: 47 - DNA, 1122 bp, Homo sapiens
tttttttttttttatttgaacaggggaagtttaatataaagatgaactctactcggagcatagagtttaaaaagagttctacacaacaccctagggatgaggaagaatgcctcagggaagaaagcacagaaaaggaggtgccctcccgaggctgggactgagacctcctcgctggagaaggtgtgggaggcccctgagggtgaagttccccgggttgctcgagccagagtctgcacagtcacagggcaagcagaaaattctttcgagagggtgggcgctcacagggaatcgggaagcagagcccacctgcctacacctgaaaggccacagccagtgctgggacctctctgaggtctgcagactccaggcagagcactcctggcagctgtgcagcaggagcaggaaggaaacgacatgaaagcccctttctccccagtgtcccagttcaacaccgtgcacgctaccaaggagaaacggcgcacgggccccacccacgactgcagagcaggcaggggagggggatctagagctgaaaggcaatacatggataacgcgcacgccccactcccacttttatttagcaagagtaaatgcagcctaatgacagggcgtgggaagacctcctgctcaccagtgtgggcagagtgtagcgtggcctgggctcctaatacaggtaaattgtctccaaaggactagtaaaggtgactgggtcatcctcctgccccagggacactgattagagaaaatccgtctgtgctggcaatacggcagtgctggacactcggaattcccttgaaggcaaaagcaaggaacagagcgtgattaggtactggacacctgccaagtgctgggctctctccagtttacagatgaggaaactgaggctcctcgagttggagctgggatgccagcccccatggacctggcagaacacgctcttgacagccccacagggcttctccctaggggcgtgcccttagaagattccaggcagcaggcggtaaggcactgcggcggtgtagcgctcccagtcccggccgtacttgctggcgcagcggtgctcgtcccggaggcagcggtgggtcagcaggatggccatgtagatgatgtcggacgcgtggg

SEQ ID NO: 48 - DNA, 355 bp, Homo sapiens
ggagcagtcaggcaggcgccagaggcacaagccctgtgagaggtgtgtttggaatcacttggtatccaaatcacatgtcatccctaggagcaaggagaccggttggatttggggctggtctggaatgaagaagcatctctcagcttccgaaggctgcatggctcacggcagtatctcaatcatgccctgcccgtttgcacatttggtcctgttggtagttacctctctggtgactggcaaagtcagcaaggatattggggtggagcaccctggctaagcaccctcttgattatagagctatggagtagaagacagatggagaatgagaggcctgtgagaacaatcagtcagttgc

SEQ ID NO: 49 - DNA, 464 bp, Homo sapiens
  misc_feature (1)...(464): n = a,t,c or g
ttctctttganatnattgatacccctnnnnnnnnnnnnnnnnnnnnnnnnnnnnnnnnnnnnnnnnnnnnnnnnnnnnnnnnnnnnnnnnnggcacgagcggaagatgagaggcaagccaccaactgcttgcatgtgacaagtgtctaaactctgttaatcctggagaaggtgtgcatgagaccctgtcacaccacaaaagtgggtcttatcggtggtatgggctgggtaccagtgtacccacgtagggttgccaaataaaacacagaatgccaggttaaattgggatctcagataaacgatgaatttttttttgagacnnnnnnnnnnnnnnnnnnnnnnnnnnnnnnnnnnnnnnnnnnnnnnnnnnnnnnnnnnnnnnnnnnnnnnnnnnnnnnnnnnnnnnnnnnnnnnnnnnnnnnnnnnnnnnnnnnnnnnnnnnnnnnnnacaactgcaggcctggc

SEQ ID NO: 50 - DNA, 1081 bp, Homo sapiens
tttttttttttttttaacagatactattttattatttacaaaatacatggtgatcataagagaacattttacaaattacaaatgggaaaagtacagggaaaagtagagacaaatgggttaaataacaaggtaaccatttgtaatgagtctgtttagaataaaatagttcttcacaaaagttagacaaggccatgagtaagtatatcactgtataaaaaatatcagtgacgtcaaaatatacctgtaccaaaaagtagaacagcaatggtagtgcatctaaatgtgtcctaaattaaattacagcacatacagtttcagtgttccacaatacaaccattgctctgaggcagcaatctgtgagacttgattgcctagctcactgaaagagcaaagccccaggactagttaacttccctaccttccataaggctttgttcaggtgactttggaatgtagtgtcaaaaaccccattcatttctgctgcaagctccccaagaacagacactgtggcctcatcattggcattcagaatccgcacaaagaatttattccacaattcaccatcttttagctcagaaatattttggctaagtttccagaaggacccatcccagaagacctgtaggtgttccttgaacaatagtaaatgtgctaaatctgctataccaaacaggtctacctggtagggagaagaacagttagccaggatcttttgtccttccaggatctgtacagtccgaaagccgctgagggtaaaaacatccagctgcaccctaaggtcaacactgtaggaaaagtccactatcttcaaagcttgattgttcttgttacaatcatagggatcgtggattctgtttctgagaatcagacaccttggactcaagtcaccatggactatttctgctttgtgtagcatctccactattgtcaaaaggttataaataatcaacactgttatttcatgggtaatatattcactgtgttggagaagatcctgaagggtgaagcagtttatatattggtgccaaacaatacagccatcttgatattgataacagctgcaaaaatgatcaaaatcttc

SEQ ID NO: 51 - DNA, 450 bp, Homo sapiens
  misc_feature (1)...(450): n = a,t,c or g
tcttgacnnnnnnnnnnnnnnnnnnnnnnnnnnnnnnnnnnnnnnnnnnnnnnnnnnnnnnnnnnggcacgagnnnnnnnnnnnnnnnnnnnnnnnnnnnnnnnnnnnnnnnnnnnnnnnnnntagaaaatagtcttctgagaggaaaccaccccaagagaaggactggaaagaaagggacaaggccagagagatagagatgaaagaagagattatttccatcatcctagtgggagatggacctggggagacattaaaaaaaacctctgcccctacacatacagagccatatttttatttctcaataaaggcatcctaatgtacatttttagccttgttccaagatgcacagagtttctatagagacagtcatatgtcctttcctgacttcattgatgtctgctctaaagatctctatcaaaactaatggcccatgcttcaggccctatg

SEQ ID NO: 52 - DNA, 468 bp, Homo sapiens
  misc_feature (1)...(468): n = a,t,c or g
attcagcccccctaacccaccttgaacattgaccaccacacactccctggcacgctcttctcaccctcaacttctgccacctctccctgggcaatactgccagcctttccctaatctcagagctgcagccctgccctgtcactcacctcaaacctgccatgtccctggggctactgaaattccaggcagtgggtgaagaggacgaggaggatgaggagggggagagcctggactctgtgaaggcactgacagccaagctgcagctgcagactcggcggccctcatatctggagtggacagcccaggtccagagccagggcctggcgcagggcccaagccaaacctggaccagggggacctgggggacatctgtggttttcggaattcaatggactccggcccttggagtggcttcgangggagntgtgggagatgcaggngtagggacagngtagcngcagggttagt

SEQ ID NO: 53 - DNA, 1427 bp, Homo sapiens
ggaacgcgcaccaccggccttcaccccttagggcgcgggaggggacgcaggggaaatcgaagctgccagatgcccacgaccacaacgtcaccctccagattgccctctcggaggggcccagtccgcgcaggtggctgctccctactgcctgagctgtggctgagcagcagattggggagaaacaggctctcgcaccttgtcctttattcgacgatttcttcaatggacagaattattagatcctacaaatgtgttcatttcagttgaaagtatagaaaactcgaggcaactattgtgcacaaatgaagatgtttccagccctgcctcggcgggaccaaaggatacaggaagcttggaagcggagtcttgcaacagtgcatcccgacaggcagcaacctgatccccaagctttttcgacctgcagcgttcctgcctttcatggcgcccacggtatttttgtcaatgacgccactgaaagggatcaagtccgtgattttacctcaggttttcctctgtgcctacatggcagcgttcaacagcatcaatggaaacagaagttacacttgtaagccactagaaagatcattactaatggcgggagccgttgcttcttcaactttcttaggagtaatccctcagtttgtccagatgaagtatggcctgactggcccttggattaaaagactcttacctgtgatcttcctcgtgcaagccagtggaatgaatgtctacatgtcccgaagtcttgaatccattaaggggattgcggtcatggacaaggaaggcaatgtcctgggtcattccagaattgctgggacaaaggctgttagagaaacgctagcatccagaatagtgctgtttgggacctcagctctgattcctgaagtcttcacctacttttttaaaaggacccagtatttcaggaaaaacccagggtcattgtggattttgaaactgtcttgtactgtcctggcaatgggactgatggtgccattttcttttagtatatttccacagattggacagatacagtactgtagtcttgaagagaaaattcagtctccaacagaagaaacagaaatcttttatcacagaggggtgtaggcgtgagttttaggtgaatttatgtggttcctgcttgaaaaccttcccctctccaggttcggtttagagaactttgccacaggtcttctggggaccccagaggtgtctgtgctgacaaggcgacttcagattccatactgagatcgttcccaggctggcgtctctggggtttttaaggctggctggagaagacagtgggagggtgccccgtctgacacccctggggttgctgagggaacggttggagtggggatcggcctgcgaaaggatactgtgaaatcactaattaactaataaacctgtctcaagttgaggatttgaag

SEQ ID NO: 54 - DNA, 512 bp, Homo sapiens
ggaagaccagcctgcctctggtcggttcctggcgctctgcgtttcgtgaccttgtccagtagaaggctatttaattttcacaactgcttgaattttgacatacaagatgaagcaagatgcctcaagaaatgctgcctacactgtggattgtgaagattatgtgcatgtggtagaatttaatccctttgagaatggggattcaggaaacctaattgcatatggtggcaataattatgtggtcattggcacgtgtacgtttcaggaagaagaagcagacgttgaaggcattcagtataaaacacttcgaacatttcaccatggagtcagggttgatggcatagcttgggagcccagagactagacttgattcattgcctccagtaatcaaattttgtacttcagctgctgatatgaaaattagattatttacttcagatcttcaggataaaaatgaatataaggttttagagggccataccgatttcattaatggtttggtgtttgatcccaag

SEQ ID NO: 55 - DNA, 647 bp, Homo sapiens
tcgagatctcatcatcaccttcactgcctccttcactaggaaggtcattcccttctttgggctctggggccgagggtccagtttctccctgagctcctgagaaggagcagttacctactctcctctaagtacaggactcatatcaacccaagtaccatgtggacttgatccctggctgaatcacctggatgacttggaatagaaatgactgctttagaagatgggatggggccgggtggtaagggatagaagagaggactctcaatctactgatcaagtcctttccccaatgcccagtggatggccagggtacctggggactcaggctgctgccagttctgctcaccaccatccgtgcttggcacagaagtagctgcatagaaagagcactggatttgaagtcagaagacctgggttcttgaaccagcctgtcaaccagttgtatgactttaaacaaggcatctcacctcttttcatcttgttttcttccaataatgttagagttcatgtaatcacattctctagaaccatttagtttgtgttaactatgaaccaagcagtgtggtggccactggtgacttgaaaatatagaggaaaaaaaaacctgctctatatctgaaagagctcttggggaagacagagaacat

SEQ ID NO: 56 - DNA, 508 bp, Homo sapiens
aattgttctgagtcagtttcctcatctacaaagtcaaagtggtgaatgagaccagtgatttttaaactttttttagccacagaccttttgttcaaaggaaaccttaaatggagatgtaacacgccagctgcttaaagacacaggctctgcaagagtgagtgtgggagtgggagggggctacagtctcgccagctgggccccctcgctgcttctgcccagctctccctgctgcagcactggcactgcagggaaccttcccagccacggcgggctgagcctgggcctgtcaagccctgactggacatcctcaacagagaatgtttatggagtcagcacgaagccatgagaaggggcagcccaggggccagccaccctcacaggtcctccagggagggggccctcagagcttctcagcagggacagcaggttcagagctgagacaccgggcacgtgggccagcacagatctgcagcacgcgcaccaggcgtgcgccatggtggccctaaag

SEQ ID NO: 57 - DNA, 486 bp, Homo sapiens
taaaacaacataaatttattcttacacagtgctggaggctagaagtctgagagcaaggtgtcactagggttggttcctactggaggctctgaggaatattattctatgcctcactcctagcttctgatataggccatcataggtaaacagccctgaggaattagcagcagtttcctggctgaatggttcatcatattctgtgttttctcatagaatggacgattttagtagaaaacaagtttgtaggcagacgtttcagaagaagttggcagaagtttctgataccagtattgtccacaatctttggcagtctttgtcttaaagatgtgtcactccactctctgccttcttcatcacacagcattctccttgtgtgactgcgtgtccaaatttccctcttcttagaaggacaccagtcagtggattagggcctgctctaatccagtgtggcctcgcttgtctttatcataactgtaaagaccctaa

SEQ ID NO: 58 - DNA, 448 bp, Homo sapiens
catttcatcaaaatttcaaactgagccagtatcaaaactaaagctagattctgaacagctgccccttagaccaaaatcagtagactttgattcacttacagtaaggacctccaaagaaacagatgttgtaaattttgatgacatagcttcctcagaaaacttgcttcatctcactgcaaatagaccaaagatgcctggaagaaggttgccgggccgtttcaatggtggacattctccaactcacagccccgaaaaaatcttgaagttaccaaaagaagaagacagtgccaacctgaagccatctgaattaaaaaaagatacatgctactctccaaagccatctgtgtacctttcaacaccttccagtgcttctaaagcaaatacaactgctttcctgactccattagaaatcaaagctaaagtggaaacagatgatgtgaaaaaaaaa

SEQ ID NO: 59 - DNA, 2875 bp, Homo sapiens
gaattccaaatttttgcatctatatccatcatagatattggtgtgtagttttcttgtggtttctttgcctggctttgatatcaggataattaccagcctcaagaattgagtttgtaaatgttccctcattttcttttttttttttttccaacagcacattgaaacaatattttactattatcgagtgcagtttatcccagggatgtaaagataatttgacacaggcacatcaataaatgtgatgcatgaaccccgcagcctgagccacctccgtcatctgggcccggggcctcaccgcgcaggagctgccaaggccatgtctgttccatcatcactgagccagtcggccattaatgccaacagccacggaggccccgcactgagcctacccctgcctctgcacgctgcccacaaccagctgctcaacgccaagctgcaggccacagctgtgggacccaaggacctgcgcagcgccatgggggagggtggtgggcctgagccaggccctgccaatgccaagtggctaaaagagggccagaaccagctccggcgggccgccacggcccaccgtgaccagaatcgcaatgtgaccttgaccttggcggaggaggccagccaggagcctgagatggcacccttgggccccaaaggcctgatacacctgtactctgagctggagctctcagctcacaacgcagccaaccgaggcctacgaggacctggcctgatcatcagcactcaagagcaggggccagatgagggagaggagaaggcggccggggaggccgaggaggaggaggaggatgatgatgatgaagaggaggaggaggacttatcttctcccccagggctgcctgagcccctggagagtgtggaggccccccccaggccccaagcccttacagatggcccccgggaacacagcaagagtgccagcctcctgtttggcatgcggaacagtgcagccagtgatgaggactcaagctgggctaccttatctcagggcagcccctcctatggctccccagaggacacagattccttctggaaccccaacgccttcgagacggattccgacctgccggctggatggatgagggtccaggacacctcagggacctattactggcacatcccaacagggaccacccagtgggaaccccccggccgggcctccccctcacaggggagcagcccccaagaggagtcccagctcacctggacaggttttgctcatggagaaggctttgaggatggagaattttggaaggatgaacccagtgatgaggccccaatggagctgggactgaaggaacctgaggaggggacgttgaccttcccagctcagagcctcagcccagagccgttgccccaagaggaggagaagcttcccccacggaataccaacccagggatcaagtgtttcgccgtgcgctccctaggctgggtagagatgaccgaggaggagctggcccctggacgcagcagtgtggcagtcaacaattgcatccgtcagctctcttaccacaaaaacaacctgcatgacccccatgtctgggggctggggggaaggaaaggatctgctactgcagctggaggatgagacactaaagctagtggagccacagagccaggcactgctgcacgcccaacccatcatcagcatccgcgtgtggggcgtcgggcgggacagtggaagagagagggactttgcctacgtagctcgtgataagctgacccagatgctcaagtgccacgtgtttcgctgtgaggcacctgccaagaacatcgccaccagcctgcatgagatctgctctaagatcatgggccgaacggcgtaatgcccgctgcttggtaaatggactctccctggaccactctaaacttgtggatgtccctttccaagtggaattcccagcgcctaagaatgagttggtccagaagttccaagtctattacctggggaatgtacctgttgctaaacctgttggggtagatgtgattaatggggccctcgagtcagtcctgtcctccagcagccgtgaaacaatgggaccccaagtcatgtcagtgtggcccctgctaccctcaccatcttgcaccagcagacagaggcagtgctgggagagtgtcgggtgcgtttcctctccttcctggccgtgggcagagatgttccacacgtttgcattcatcatggctgccggcccagcctccttctgctgccacatgttctggtgcgagcccaatgctgccagcctctcagaggctgtgcaggctgcgtgcatgcttcgctaccagaagtgtctggatgcccgttcccaggcctccacctcctgcctcccagcaccccctgctgagtctgtggcacggcgtgtagggtggactgtccgcaggggtgttcagtcgctgtggggctccctgaagcccaaacggctgggggcccataccccatgaagaagcccccaccttccctccacctgcttgtgttgggccccagggaactaaagggtgtgggtcagggaggggtctagaggctattcctaggcctcaggcctcccaaatatgcccctccccagtagctacggttccctgcctaggagctggggagggagagatctaatcccttcaaggaagtgataacactggagtggtaacaagaggagcaggaagcaaggccagccctggttctccatccccatgtgtttcaggtggaacaggaggaactggtccaggccaggcctcatcctcctggacccagcaggggcagaaggaggaagggactggtccaggcatgggtcccttccccctgctccatgggcacctctgctgtattgatatcactaataaagtctgtctgcactgcaaaaaaaaaaaa

SEQ ID NO: 60 - DNA, 719 bp, Homo sapiens
ttcggcacgcggggctccctctttcctcccaatcctaagcctcctgacaagtggccaggtggctctgggccctcctgccccgtgcctaggtcaggggtcctggaataccccgtagctctggcaccaccacactggcctctgatggcaagacttggcccctccacctgtccctaacggacggcaggtcaggaaagccaggactcaggggagaagcaaacccccaggattgaaggctagggttctagggcctttgggtggggagggcccgggccggacagcctcagctccgtcccctgccccacaagattcacctgggcctccagtcccacgctggccccaactgctgcagctctcggcttccgcccaacagcctctggaggtgaggcgggagcatgccctcagcgaggctgggcggcgggtcctgctgtgccatctccctgtgcgcctgagcagatcaatccaccagtgcaaaacagggctaacggcacctgcaggacagcagcacgctccatccctcatgctcagctgcctctgcggccacggacttctgcccttcatctgctctctcttactctcctgagcctagcccgtccgtaagctccctcccctgcctggttcccagggcaggctgactcagttgactgcttggtccaagcctggccctggcacttgtcagggtcagcctaaggagatgggaataaagaggccagagagcacca

SEQ ID NO: 61 - DNA, 286 bp, Homo sapiens
  misc_feature (1)...(286): n = a,t,c or g
gataccttnnnnnnnnnnnnnnnnnnnnnnnnnnnnnnnnnnnnnnnnnnnnnnnnnnnnnnnnnnnnnnnnnggcacgagcacatagatcttaaattttagtgcgaagagaaagacaatgactattttgaagttacgaaggggatttgctgatttgaatgcctacttaggagattcagaagtggttggatttaggtgcttagattaagtcatcaggaatttccaccttctacccataacagtgagcatctgaaacttacaaaacaatatttcctattttacttca

SEQ ID NO: 62 - DNA, 1100 bp, Homo sapiens
ggagcaagcccttgcccagctggcacaaaatcttcacccacacggcggtcccacgtgctgatcatcttccgggtcctcaccgggcttgtaccagttggtgagcgtcatcatgacgtgcagtgaggccagcaccaggcagaagtggaagaaggagtagctgtaggtgacgccgtcctgctcgttgtcaaaggcccggccctcacaggctgccacctgctgctgctgctgctgtgtggcgtctagcataggtgggcactcctcggtctgcatcaggctggttcacctgccggtggtctgaggagcgcagactgatgaagagggtgcacaggaggaagatgatgaggcccacaatgctcggggcatcccaccactgggtctcatagccctcggggcctgccacaactgtctcgttgcccagctgggttggcaaatgggggttgcatttctgttcagggatactggatagggctgaccaggtgacaaacatggtgtagagggtgatgaccgaggcctgcagcagacccgagttgggctgggcgtcctggaccttgggcaggacagcagcgatggacacgcagacacagaaggtgaggttgaggctgatgaagaccttgccctcgtggcagccgctgggctcagtgtagtacatgaacatcagcgccacggccgcgatcgacagcaagtagaagaggagagtgaagaagaagaggcctgcgtaccaggcactgggaatcgcactcctcggccttgcccagccaccgctggttccaggagtgcgcaaagtcgatgagcagcaccagctggatgaggatgaagaggaaggagcccacgacgccgaagtagaaccagatgttggtgaaggagccgtcagggatgtagaaggcacccacggtgaggcccaccaggatcaggaacttaaagaaccaaaacccattctggatggcagcccgggggtcccggctgctgtcacgcagagcatgagcagggtgaaaaagaagaagaaggccgccgtggcgaagcacatgcggtagacagcgcggtagccaagcagggagccacaggtcgacgcggccgcgaatttagtagtagtaggcggctgc

SEQ ID NO: 63 - DNA, 381 bp, Homo sapiens
  misc_feature (1)...(381): n = a,t,c or g
gcgtgaaatctctaactcctggtgagaactaaccagtgtttgtgtattcttgatcttcaaaaattattcacgttttcaaatttttgcattttctgagaagtttttgtgagaaatattcacagacattttcaactatatgaagggatatgattttattaaccagtgaagaaggttaaggcaaaaataaatacttatttaaaatacaggcatctactgtatatctccggtgaccttaaagtacatttctattataataaaggtgaaaaatatcactatcctatttttatgggtgggtgaacctgaaccccccgaggtgtgtgtccatactttatgtccaccaatcagaggaaaacaaggaatctancccagggctcccacttt

SEQ ID NO: 64 - DNA, 375 bp, Homo sapiens
  misc_feature (1)...(375): n = a,t,c or g
ggcacgaggaaaaaacattgagctaggagccaagacccatctcttcactattttggtattgtgcaagtcatcttacctctctggatctcagttgtctcatctgtaaaaaggagataaaaattatttacctgcctgaacatttctccttaaaaatatcagnnnnnnnnnnnnnnnnnnnnnnnnnnnnnnnnnnnnnnnnnnnnnnnnnnnnnnnnnnnnnnnnnnnnnnnnnnnnnnnnnnnnnnnnnnnnnnnnnnnnnnnnnnnnnnnnngaggaccatcctgctacagtattgctttctcttgattacatgtttacttactgctcttgaagctgtgcctattgacatagacaagacaagtacaaaatattcc

SEQ ID NO: 65 - DNA, 463 bp, Homo sapiens
  misc_feature (1)...(463): n = a,t,c or g
tttggaancctttnnnnnnnnnnnnnnnnnnnnnnnnnnnnnnnnnnnnnnnnnnnnnnnnnnnnnnnnnnnnnnnnnnnnnggcacgagatgatctannnnnnnnnnnnnnnnnnnnnnnnnnnnnnnnnnnnnnnnnnnnnnnnnnnnnnnnnnnnnnnnnnnnnnnnnnnnnnnnnnnnnnnnnnnnnnnnnnnnnnnnnnnnnnnnnnnnnnnnnnnnnnnnnnnnnnnnnnnnnnnnnnnnnnnnnnnnnnnnnnnnnnnnnnnnnnnnnnnnnnnnnnnnnnnnnnnnnnnnnnnnnnnnnnnnnnnnnnnnnnncttaatatggaattacnaaccacagtgatataacacacatgcatgaagatttctaacatgccatcctaaattaagtcactgtatcacgtcagagtccaagtataggaaacagtcnctacccatgcaaacctgaacagacctt

SEQ ID NO: 66 - DNA, 663 bp, Homo sapiens
ggtaagcacttctgaaaacagcacttcagctttagctgatgtatcatggacccaatttaacatcatcattttgacagtcatcatcattgttgtggtgctgctaatgggatttgtgggggctgtatatatgtaccgcgagtaccaaaaccggaaactcaatgcccccttttggaccatcgagctgaaagaagacaatatcagtttcagcagctaccatgacagcattcccaatgcagatgtttcgggattgttggaagatgatggcaatgaagtggctcccaatgggcagctgaccctgacgacgcccatacataactacaaagcctaaggagctagaactgttctgaattgttaaaccacagtgcttgctaagacagagtcagcccctgggccagacaaagcctggctagaatttgctgagaaagcaaaggcaaatagtgcatctgaaattttcaggtacaaatttgtaatgcgcttacctatctattgctcttagttttcccatgaagatctgaagcgttcactgtcattaggacttgaagtaaagtatatttttgtaccaaaccacatgggagtatggaaaggctgaaccccatagtgcagcccaaaaccactttgacctccagatagactcctggggaagcattcaccaagccagtggta

SEQ ID NO: 67 - DNA, 456 bp, Homo sapiens
gcaggcctggattcttttgagtggtgctactgcctaggaagtaacacgtggagaatttccatcttgggaccatgcacacagtgccttggggagtagattttgccctaatagcgatgaagaattttatcagtcagtggagttcctttttcagatcagggatgggaaagagccaaactgggtacctcccacgtgtgccccgtgaacagccctttgcagctgggctgtggggcttggctgctgccctgtcccatctggcagttaacgccttctccctgctctgccccccactccccaaaaccagttgcagcctcaacccacatggggatgtagaaagccgtaaagtccacgctgctgttgaaaatgtttacatctccgctctcaacctgccttgggttcgtgttaaatggtgttaaattctgcaaatggaggggaaaaaaatcaaattctaaatttcaa

SEQ ID NO: 68 - DNA, 931 bp, Homo sapiens
caaaaataaataaatagaaggaaataaatgtaaaaatgctgcaaattaaaaacctcaaagaagggaaataattgcaacaaatgggaattgatgttgaatatttaccttaaaaacctatacaacaataagaggagtgcgcccttcagcagcatgtatacaaaaattgcaacgatacagagattagcatggcccctgcacaaggatgactcgcaaattcataaagctttccataaatatatttattaaaaaccaataggaggagcacttcgagtcgagtgtaagggcccttcacaaaagcagaaggaacactggcccaaacccccagcaccccggaagcagaggtgagatgggagcagcttgggagccccccattggcgccgccctactggggaagccggtccgtacgtaggccttgcatctcgccacctccacttctgtcctcaagaacaagtcctaggtcaagggaaacagcacagcctgtttataattaggaaacacttaaaacagcctggcatttgggaacagccatgttaacgtgagcaaattcctctcatgaaatagcctgcagctattaagaagcacgtgtgtgcaggaagcggaggcgcaggacctcaccgcgccagcgtgaagttcccgggcatggtcatgaaagcgtggttctgtaagaaatcagagggagaaagggagagaagggggagggagacaacccaaacgttggagggtatttgttgtaaacttcaaacttttggcaggtttgaaatttttcataactccggggaggagcaagaggggtgaaaagaaacaagttctctacttgtgatcagcagctggtcatagtggttgcctggagtatatgcctttttgtatcctttgaatttccagccatgtaaatgtattatttattccaaaaataaagcagatttacatttta

SEQ ID NO: 69 - DNA, 379 bp, Homo sapiens
ttctgtgactaattcagacaatctatttgcttagaaaagctggcaaaaaaaaaaaaaagcacattacatgaatatgcttcatttaagtacatgctttcgagctgatttaaaaagaaaagttgaattatggtttccagagctttaggagtccatcttcactgtaggtagcaatcaggttctgatgagggtgatgtgcaataccaatcacatccttctcgtgcactgtcaaagttctctccagtttgccagtgactgtactgaaacagtagagcacaaagtcctcccctacacagtagatccattcaccacggggagagagggcacagcaaacaaagtccccaccttctcttttaccagaactgaagcttctgacaatctg

SEQ ID NO: 70 - DNA, 291 bp, Homo sapiens
ggcacgagccctgggcccagcaggacaggagcaaggtcaggagggctgctctgctctgcaaaacagaggctgatggatctgaagtttctgttactgggagaataaagggaggtgaaggagacacgtggtaggtcccctgggaaggtggtgggaatgcgtgtgaaatgctcggagaggcacagtaagaaccggcctgtttagaatccagtgttctacgcctgccccaggccccagcaattctgcttctagacatctccccatgagaaatgagcactgagcctcccaaacatg

SEQ ID NO: 71 - DNA, 412 bp, Homo sapiens
ctcctgtattccaggcactgtacgtggcactgagaatgcaaagcaaaacgagtcatggtctactggcaggagccttctcagcggagaaaagatcaacaagaaaagtgcctgctggagacctctcctagggcataaaccaatatagaggtggggcagctacgtcagcctgaggtgtccttaggcagaacagaaagtgagaatcagagcagtatctcatttctgaacacctggattgtagctttccctggactgactgtcaaaggaggtggttttaaaaagcaagccaaacaggtttccgtcctttaggaagaccctggaacgtgccagttgattctgacaatttctcatgaacagaaacacctaggaagggagaactggtgagtcttttcaagaggaggaagtccctcaaaag

SEQ ID NO: 72 - DNA, 539 bp, Homo sapiens
tttttttttttttttttgaagctattaaaacatctatttattagctcaaatttctacaggtcagaattctggcatggagtggctgcattctttgtttaagctgaaatcaaggtgttgtttggccgtgttctcacctgaagctcagagttcacttccaagctcatttttgtccttagcagaattgagtgtcttgcaattgtagaactgaggtcttggcttgctgtctgtcagcaggggactgctccctgcttctagaggccaccggtttccctcgttatgtggccccttccattttcaggccagcaataatgtgttgaatacttcctatgcttcaaatctctggcttctgctaccagctggagaaaaactctctgcttgtagagggctcatgtgatttacttagtctttgtcttaaggtcaatttatttggtacttgggattttaattgtatctgtatgtttccatcaaggcaataactgtattagtgtttgaataaataaccaggtaatctggtaatttaccatactggtaatctgacc

SEQ ID NO: 73 - DNA, 476 bp, Homo sapiens
  misc_feature (1)...(476): n = a,t,c or g
gaaaagcatcagctgaggtgatattagttcagtcacctaacaactcctagaagagatgaggaaagggaaccttctgctgagctggcttctggggcctgagcttccagagctgtccccaagggctaggaaggccgacctgaaggatgagaacctcaaattcagttgctggtgggagccaaggaagacggcgggtgttctaacgtggccctttctggctgagctggcggaagtgggcgttttggccgatgggatgtatctcggcgctgtgtctgtggcccagcaaaggtgcagggctggactggctgagccactgggttctacccgcaggctccccactggcactgggctttcacacagccatgctcttgggtttccctccttgtaagcagaagtcataataacncncgaatagctaacccttggnantctggcacaaaagnncctnggtcacangggtacngnaangggttttaacc

SEQ ID NO: 74 - DNA, 293 bp, Homo sapiens
gctaaagtaaaatcttgaattttaactattacttgacattgatttttttttcgtaacttatttaattctttggattaatttccatcagtaggtaactcttggtacccacccatgtgcgtagctttgtttttggtactgtggagcacaaaaggagtatgaatcatggtggtttggagataaacttgagttatttcaaagaaagcgaatcttatcaatctgaagaataaactttcatttatttaaaatgaaacttatctaagtggtatatattctatagagaacttgaaaactga

SEQ ID NO: 75 - DNA, 653 bp, Homo sapiens
tttttttttttttgcatgtatctccattgtttatggaagcctgggaaaacaacagaagtagatggtattcatagacaatttcagataacatttggcaaaaatttaaaggtcaatcatttcaaagatagtaaattgaagtgtttacaaagtggtgcagtagacacagtacaggcattggagtcaaatatcttagctcaagtcatagcacttttatttactggcattttagctttaaaaaaaatcattctcattacctggaagttataaacacaggtaaggggtagataattaactacttgatgtgattttcaaggcaccaggtaggtgtattcactcctatctgagtgccccaccatgcttaaaaaggttttctctccccaaatacagagtgtatgaatcttatcactaaaaataaattttcatttattcaacaaatatgtatgcatgtatcatcagtcaccctctgatcttttaaaacaaatcagggaagatatattaagtaaattatcttagttaataagtgtcagtttattttccttcaggaaggaagacttccctccactgtataaggggacacttaacatgtaccccagaactgtacctaccacaaataaagtttccttaacaggcagggattctaaaatatacttctg

SEQ ID NO: 76 - DNA, 1627 bp, Homo sapiens
gttcgtagcagaaatggcggctgcggcggctcgagtggtgttgtcatccgcggcggcggcggctctggggtttcagcgagagtcttctaatccgaggcgctgcgggacggtcattatattttggagagaacagattaagaagtacacaggctgctacccaagttgttctgaatgttcctgaaacaagagtaacatgtttagaaagtggactcagagtagcttcggaagactctgggctctcaacatgcacagttggactctggattgatgctggaagtagatacgaaaatgagaagaacaatggaacagcacactttctggagcatatggctttcaagggcaccaagaagagatcccagttagatctggaacttgagattgaaaatatgggtgctcatctcaatgcctatacctccagagagcagactgtatactatgccaaagcattctctaaagacttgccaagagctgtagaaattcttgctgatataatacaaaacagcacattgggagaagcagagattgaacgtgagcgtggagtaatccttagagagatgcaggaagttgaaaccaatttacaagaagttgtttttgattatcttcatgccacagcttatcaaaatactgcacttggacggacaattttgggaccaactgaaaatatcaaatctataagtcgtaaggacttagtggattatataaccacacattataaggggccaagaatagtgcttgctgctgcctggaggtgtttcccatgatgaattgcttgacttagcaaagtttcatttcggtgactctttatgcacacacaaaggagaaataccagctctgccctccctgcaaattcacaggaagtgagattcgtgtgagggatgacaagatgcctttggcgcaccttgcaatagctgttgaagctgttggttgggcacatccagatacaatctttctcatggttgcaaacacgctgattggcaactgggatcgctcttttgggggaggaatgaatttatctagcaagctggcccagctcacttgtcatggcaatctttgccatagctttcagtctttcaacacttcctacacagatacaggattatggggactgtatatggtttgtgaatcatccactgttgcagacatgctacatgttgttcaaaaagaatggatgcgactctgtacaagtgtcacagaaagtgaggttgcacgagccagaaatcttctgaaaacaaacatgttgttgcagcttgatggttcaactccaatttgtgaagatattggtaggcaaatgttatgctataatagaaggattcccatccctgagcttgaagcaagaattgatgctgtgaatgctgagacaattcgagaagtatgtaccaaatacatttataataggagtccagctattgctgctgttggtcccattaagcaactaccagattttaaacagatacgcagtaacatgtgttggcttcgtgattaaaatgctcctaatcaagattgtttgaacacatgtatttataaaacagagctagagaaaaataaaaatgaacatgtatatacatttggaaatttgaattaaatactgtatcatactttcaaaggataaaaagactacccctctgaa

SEQ ID NO: 77 - DNA, 357 bp, Homo sapiens
cacacctgtaatcccagtgtgagccaccgcacccagcctggattgttgaattcaatgcttgggtcacctccagattcattttcacagtctttcatgttttggtcatactacattgtattttgctgccatatgactgatctttttttgttaaatgtgagatacttgttaaaaaatatttagcaatgaattgaggcctagtagcatgttatcttgctgcagaagagatgggagtctacttctgggggatggtcacgggtcctccatacaggctgcaattgaggtcgtcggtgcagggctcagtccctacaaagggccagggtatttcctgtccacctctattctggatggcatggactc

SEQ ID NO: 78 - DNA, 939 bp, Homo sapiens
attttctacccctagttcttctaacagcacatcaaagctgcccaatgatctgcttgatttgcagcagccaacttttcacccatctgtacatcctatgtcaactgcttctcaggtagcaagtacatggggaggattcactccttctccagttgcacagccacacccttcagctggccttaatgttgactttgaatctgtgtttggaaataaatctacaaatgttattgtagattctgggggctttgatgaactaggtggacttctcaaaccaacagtggcctctcagaaccagaaccttcctgttgccaaactcccacctagcaagttagtatctgatgacttggattcatctttagccaaccttgtgggcaatcttggcatcggaaatggaaccactaagaatgatgtaaattggagtcaaccaggtgaaaagaagttaactgggggatctaactgggcaaccaaaggttgcaccaacaaccgcttggaatgcggcaacaatgaatggcatgcattttccacaatacgcaccccctgtaatggcctatcctgctactacaccaacaggcatgataggatatggaattcctccacaaatgggaagtgttcctgtaatgacgcaaccaaccttaatatacagccagcctgtcatgagacctccaaacccctttggccctgtatcaggagcacagatacagtttatgtaacttgatggaagaaaatggaattactccaaaaagacaagtggttcaagcagcaaaatccttacttccagcaaaatccaaactgctgtctcttaaatctcttaaactctcttcttccattagaatgctacaagtaactcagtgaaggcccatgaagggaattggggactagtttataggagaacgtatcaatacagtttataaaggccaggattgctattgatttaagactaag

SEQ ID NO: 79 - DNA, 1003 bp, Homo sapiens
cctggtgctgcttgtgtgctcgtttggtgcggacctggtacctcttttgtgaagcggcagctgacggagactccggcgctcgccatggcccgacgaaaagcccaaggaaggagtcaagactgagaacaacgatcatattaatttgaaggtggccggggcaggatggttctgtggtgcagtttaagattaagaggcatacaccacttagtaaactaatgaagcctattgtgaacgacagggattgtcaatgaggcagatcagattccgatttgacgggcaacccaatcaatgaaacagacacacctgcacagttggaaatggaggatgaagatacaattgatgtgttccaacagcagacgggaggtgtctactgaaaagggaacctgcttctttactccagaactctgttctttaaagaccaagattacattctcaattaggaaaacttgcaatttgggttccaccacatcctgactactaccgtatagttttctctattctttcatttcccccttccccattcctttattgtacataaagtaactgggtatatgtgcacaagcatattgcatttttttttttttttaactaaacagccaatggtatgttttgattgacatccaagtggagacgggatgggggaaaaatactgattctgtgaaaataccccctttctccattagtggcatgctcattcagctcttatctttatattccagtaagttattttgctctcactgttttaacaaaaaaaaaaaacaacaacataaaaatccttgcataccttgttcaattggagaattttaatgtttttcatttatcattgtaaaaccaaggacaattttataacttttttgtacgtagctgttacatgtagggcaatctgtctttaagtagggataaattactctaaaacaaaaaagaatcctagatagttttcccttcaagtcaagcgtcttgttgtttaaataaacttcttgtttaaaatgaaaaaaaaaaaaaa

SEQ ID NO: 80 - DNA, 1176 bp, Homo sapiens
ctgcatatttcaggtgttatcataaggttacagaactcaataatgtgaagaacgtagctcgattgccaaaaagcaccaagaaacatgccatagggatttatttcaatgacgatacctccaagacttttgcttgcgaatcagatcttgaggctgatgagtggtgcaaagtactccagatggagtgtgtaggaacacggatcaatgacatcagccttggagagcctgacttactggccactggggttgagagagaacagagtgagagattcaatgtgtatttgatgccatctcctaacttaggatgttacatgggcgaatgtgccttgcagattacatatgagtatatctgtctttgggacgtccagaatcccagagtcaaactcatctcttgggccgctaagcgccctgcgggcggaatggacgtgatactacgtggttcacttttgaggcagggaggatgtgtgagactggtgaagggctgtttatctttcagacccgagacggggagggccatctatcagaaagtccactctgctgccttggcccataggccgaggcaggcacgagcgcttgctacagagtgtgaaaaactcgatgctccagatgaagatgagtgagcgggccgcctcgctgagcaccatggtgcccttgcctcgcagcgcctactggagcacatcacacggcagcacagcacgggacagctctaccgcttgcaagatgtttccagccctctgaagcttcatcgaacagagacttttccagcctacagatctgagcactgacagtaactgccaagaattgttaacacacttgtgatgtgtcagccacagattcacccaggaggtcacagaatgacagcaagggaaatgacgaccaagagaagaagcttaaagtcctggctaattgtgtggtcattggaaaactctgcaatacaataattttctttatttcctttttcttttttaaattcttagtgtaattgaaacgtgctctatagatattgactctgtgttccctcttttacagctggacagaaagaagtcaatgtcacgaaatgattttctattgtagatactttgtcccttgcacttctctgaatctgtccttttgtggattcttgtgattttccttccaagtgtttcagttgtatgacagtcagtattgacaataaaatgg

SEQ ID NO: 81 - DNA, 486 bp, Homo sapiens
ggggaaatggtgagtatacggggttcggcatcccgagaggggagagcaggctggaaaccggcaggaccggcctccccacggttagctccgagtctcccgcagcttggccctcagtcccctgaggctgcaaagatggccgctgggccagcagcgaggacccccacatccggcctggcccatccggtgctgtccctgggcagcgccctgctctgcgcccacagccatgagttatttcccagattgttcagggaggcctggtgggtcatcagggaaaaactgccactgggtgtttgccgtgggaggagctgcggcccgtggggtccccagtctctcttgttaaaaattaacgggagtcctatgttaaaacgttaaccagtttatctggaacaaacagtgattggtgaaatggaaagcacccagccatgtatttctggtccaccagaggggtcataaaggaaaggctttcatgaagatgcatgagaaagc

SEQ ID NO: 82 - DNA, 175 bp, Homo sapiens
tctggcctcctttaacaaatggcgacttttggtcacacccactgccttccgctcctctgcctctaaaagtgatacttctccttggcttggggaggaagtgttgcgtggcctgcctcttccttcatgaagccacaaagtgccactgcgtgagttccgtggcacattggaacacagt

SEQ ID NO: 83 - DNA, 837 bp, Homo sapiens
ttttttttttcctaagccataaaataaattttattccaaaataacaaaataaataatctactgtacacaatctgaaaagaaagacgctctaactgctcagataggtgctgcggtccagcccccagctggaggagaccctgagtccaacccaggcctcccgagggggccagtgaagggatcccacacccaccgcccctatgtagggcagggaagaaattgcaaaggacttgggggatagatgggaatgggagggcaaactgcagcacttgttaaattaattaaagaaacaaaccagaagcacaaaaacggggaaggagaggggagaaggagcaggtccagtgttcccaggcccccaattctgggggcaaatgttgccacttttagctggaccttcccagggaagtccccctttcccccttgtccaaactgagtccaactgctcacaccactggtgcaaacctaaagagaatgggagtgtgttgtgtgagggaggggaaaaccccagatgccctggaggcagagtccttgccccctcgctctgggcaggggtgagggcaccacgcaccctccttgtgtcctctctccaggcctctgcttgttattgcttgaagccccacagtcttatgcccatggagcaggtggggaggcaggagaagggcagaggaaggatccagggttgtgactagattccggggatggagagcgtgggggtctgtgtgagccagaagtctgaggtcctgggtctgaagacaccagtccaaccctcactgccggctggcctcagcctccactttcacgctgctcctgcgaccctccaccagcgcgggatggggtcct

SEQ ID NO: 84 - DNA, 34 bp, Homo sapiens
ttcaggtttgcagttaagatcagaagttaaccga

SEQ ID NO: 85 - DNA, 495 bp, Homo sapiens
  misc_feature (1)...(495): n = a,t,c or g
gtttgtttatcacattacatctgggtgagattttgcatgtgaccaagaggaagaaatcattcagtcccggaaatagcaactgctatgtaaaaccacatccttgactagtacttcatctttccacagtcattcatctgctaatcaggtgaaatatcagctcagcagaacaaagcaagttatacacaaatttcccccacattcacactgatgccgtacttagtaattctggttctaccattcccttttgcactttttgcaagtcaaattcatgtggaaaaatgttctgtttgtagaactcatagtattcacttatagtgctcatgtcaggaatggcaagtgagtaagagcccctgataatctgcttttgttagaacgtaatgcanagataataaaacatgccacttcttttctagtctaatcagttttagacatcaagattatttactttgcatgagatttgttcctatatttgaatatgtgctataccctgaatta

SEQ ID NO: 86 - DNA, 6897 bp, Homo sapiens
tgccaagaggagagccaaccagcaggaaacagaaatgttttattttacaaaatttaaagagtatgtgaatggcagtaacctcatcaccaagctgcaggccaagcacgatttactcaagcagaccctgggcgaaggggaaagagcagaatgcggcaccaccagaggaagaagaaatgctcgaaccaggaaccaggattcaggacaagctataccgcttgtagtcgagagctgcatccgttacatcaatttatatggactccagcagcaggggatcttcagagtgccaggatctcaggtggaagtcaatgacatcaaaaattcctttgagagaggtgaagacccccttgtggacgatcaaaatgaacgagatatcaattcagtcgctggtgttttaaaactgtatttccgaggactggaaaacccactctttcctaaggaaaggtttcaagatttgatatctactattaaactggagaacccagccgagagggtgcaccagatccaacaaatcctcgtcacccttccccgcgtggtcattgtggtcatgagatacctcttcgctttcctcaaccacctctcccagtatagcgacgagaacatgatggatccctacaacctggccatctgcttcgggcctaccctcatgcacatccctgatgggcaggaccctgtgtcctgccaggcacacatcaatgaagtcatcaaaaccatcatcatccatcatgaagccatcttccccagcccccgggagctagagggacctgtgtatgaaaaatgcatggctggaggggaagaatattgtgacagcccacacagcgagccaggggccatcgatgaagttgaccatgacaatggcactgagcctcataccagcgatgaagaagtggagcagatcgaggctattgccaagtttgactacatggggcggtccccgcgtgagctatccttcaagaagggggcctcgctgctcctgtaccaccgcgcctcggaggactggtgggagggccggcacaacggcgtggatggactcatcccccatcagtacatagttgtacaggacatggatgatgccttctccgacagcctgagccagaaggctgacagcgaggccagcagtgggccattgctggatgacaaggcctcttccaaaaacgacctccagtcccccacggagcacatctcggattacggctttgggggggtgatgggccgagtgcggttacgatctgatggagcagccatccccagacgccgaagcgggggcgacacacacagcccgccccggggcctgggccccagcatagacacaccaccccgggctgctgcctgccccagcagcccccacaaaatccccctcacccgggggaggatcgagagccctgagaagcggaggatggcgacgttcgggagcgctggcagcatcaactaccctgacaagaaggcgctctccgaagggcactcgatgaggtcgacctgcggttccaccaggcacagcagcctaggggaccacaagtccctggaggccgaggccctggcagaagacatcgagaagaccatgagcacggctctgcacgagttgcgggaactcgagaggcagaacacggtcaagcaggcgccagatgtggtgctggacaccctggagcccctgaagaacccgccaggccccgtcagctcggagcccgccagtccccttcacaccatcgtcatccgcgaccccgatgccgccatgcgccgcagcagcagctcctccaccgagatgatgaccaccttcaagccagccctgtccgcccgcctggctggcgcccagctccgcccgccccccatgcggcccgtgcggccggtggtccagcaccggtccagcagcagcagcagctcgggcgtgggcagcccggccgtgacgcccaccgagaagatgttccccaacagctcagcggacaagtcgggcaccatgtgacctgcaggatgggccgcgccgccgtggcccgctgtggctcaccacggcccagggtggccttggtggcttccacgtgcttcccagtgaccctggccttggagggcagaggtccgtctgggagggtgtgtctgtgcagagctgaggcccgggcgctggctgcagctcacgtccagccatgggaatcccacggacctctcgcgtgtcaacagacgaccagaggagtgctggagctccagcagccccaaccacagcattccctaacatggaggcaaaataccacatggcttctcccgcatatcgtcactggaaacttcctctctcgacattctctctacatacgtatatgtgtgtgtatatcgatgtgtgcatatatacacatgtatacgtatgtacgtgtctgtaggtgtgtgtatatatatatatatttatgcatctatatacatatactagatctggacacacgcatactaagtgtatatagtatctcctttttctttttatgaaacttagatttacctcagatccatgccaccaaacatctcccaccgagttatttggtgggatttgcagggacttttctgggagaacttaaaggcccatagtaactgcgaatgaagcaatataccactaacctgcagaaaaacacaaacaaaaacagactcccactgtctccagaagtcgtggccttccagaacagtctgcccctcaaggaagggtggggcaggcagtacccccaagcaggctgctcccagaggtggggaacccttcataggaaatccccacccccgtccaccccagagaccctgcccttccacccggaggccaaaggccaactgtactcccaaaggcatgggagaaggttggcgagaagacccctgactaccacatccttgtgtttgtgtgtagagacgggggatagtgagaacctaagccccatcgtagcacagtattacatgtggttgggaaaaataaaaatacagtggtgtggaatactccaaaacctagaaatgctgtaggaataaatctgtggtaactatagaggtttaacttatatcattttcaaactatttaattttttcttttcctggttctactaattatactgtgtcagatttggaactaaacaggcaaggaggctttgagtcacatcgttttcattttaaatcaggctgtgatgcactgtggctggtgccgtcttgcatgaaacgcatgagccgtgagcgcccagttcagactggggccagggaggggcagtccttggcactttctgtcctagaggacactgtcagttgagttaatacaagtgacatagcttcccttccctcccccttcacccactccctccagaacatttagtgtagatgaaaatgtggtgatagaaatgggtgcatgatcttcacgtgtgacagccagggcctttgcctcttggccaagtaaagcccttccgggtcgctctccttcgattccattttacctcctcttctgatcacttccagagatgagctgtttctggataatggcacacgggcaaatctgtgtgccctgtgggccgctgttacttaccctctcctgcgagacccaggggcttttccctactgttcccacgcttcctctctctcgaggccactgaagtttggagtcaaaaggcccagagtctgagtcccagccctgagcacttaggagccttctgacttagggtttgtcactccacctcattgagcctgactgttctgctccataaaatagggtaataaaggtcaaacatcagtgagcaagctgtgtacactggaaaacactgaatcaatacaatgcgtttgtgattatcattagtaaggtaagtcttagatcagagccctccagcccttctttttgaaacctcccaatggcatttcagaagtgagcagtggaattttcctgccatcctaataagagccctggattccatcattaacatttcagcccattggatgaagtggtgccctctcctctggtcccccgcgaaaaggtaaatacacccaaagggagggacctagttaagtcactggcacctagataagttaggagggtaaagccactacctcgtctgaaggactggacttgacaccccacagtggaagggagcatcaggagaggaacaaaaaaagggatctcagggagaggccagtgtcaaacttgacctcccttgtttggcctagaatgaacccttctctttagctcctggatatgaaaggccatctgcttggagcacagaaagatattgccattttacagcttaagagagtaaggccttgggctgtgctgtgacctgcccaagatttgacactggctaggagcagaggctgcgtcaggctcttaaagtcatgtgtttgcatgctggatgctatactgtccagccaggacacaagacttctgatttctaccctcaagatactcccagatcctaaatccagtagcctcccaggcaaaatatagcaatctgccacaactgccagatgaaaagcaacaatcagagtagaaaaatctgttgcctgatatacataacaccaatcagaccgtgtggatttttctctgaattgactgattttgtttttttcttactgaaaatggacctgcctttcactgaattttctgagggcagagtcttagctgttttctttaagcaccttttttttttttttccattgggaaatggctgatgagttcacatttagggatgtacacacacagatggcagacgtctccccactcatccagccccagatctgagccttgacgcaggccaagtggaaaaatactttcccgcccccctcccctgttcccacttcctcatctggcactatgcatgtctcactcaccctccacagcactcagtcccatcgacgttcactgaacattggctttctctttctgactcctgcctgttttagtccactatatattgctgtatttgcttaaatgctggaaagtaactgttaaaatgtgaaattgtaatttttaaaaaggctacaattaaattttagccaatgccactcaccaaatctttgcacctagtagatatatcaatgtaaaaacaaatacctaactgtacagtgagtgtgggggaaatgtagtaacctagttagtagtcttcaatataaccaattgtacaaggggaagtggtgtttacctacttgttcatcaccattactgaaagccgtactgatcagttagttgacaacgggcatttttttttctttgcttcatggaatgatttcttttcttaaccttcgacttatcctgaggtcaagccttttgtctttatgtgtaaccgacgttcagtctattctaggaatgaaccagcaagttgttcatttaaaactgaccaaagacaattaattcctggtctagtttcctgggccttgtggctcagctgccactaaagagctttttggataaaattgagaacaagctgtgcttcctaccccactctccccggtccccttttattcccttttcctcttaaagagctgctctgagctgtgggattctatgaaaaattcttgcctttccttgtttcagtgctaacgatttctcacctcgaagcgccttttgaaccccggacagagtgcacaatcggagggaattgcgagcttgggaattagactttggagtcttttctctgaagtcaccaggccaggggtcaggagagagatggattcccaagggatgaaaggtttctattcaatgaagaaatcggagtggggaagagacacagggaaattgagccatattttggctatcggctgggaaccagcagtttcagagatctgccttataaacatttaaaaccggtttgtggtacacaaagaggaaccagtgtgggaaggggcctttatgtggggctttcttctctgttggagtcccttggagtgccttgttgggtatatttctctgtcattcaggaggcacgaatgtggaggacttctcgtgacctggtcgtgatgtggcattcagtgcatgtccacagctaatggaaaaacacgaggactcgggtaatggttcttcctctcagtctttctattcctaacttttcacacatccagatggttccacactagtgcaaatgcctcactctcctgagaaacccagaaagaagagtggctggctcacaaccatggggttagcccctgctgggctgggagtcggggtggcggccaggaggaaaggcagaaaggggtgagccgaggtgttgcctagctgattttctgctgtgcagagctaatgctgacatttcatgtcaacttccccggttctctggggtctcctctcctctgagcagccacatagaacattccccacatatccaaagctgcccaggggagccgagagaagggactttgctgtcaggtccaagccctcctgacctccctgagattgatctgccagtgtcctgctgtccctctgggactgggccacatggccatcgctgccccttgttgacacctcctttctgtgtgagttgtccccggccaataacaaagctgttccttgaaccagaacaaccagagtgcacttttccttccttagacggaagtagatcctggctagggtttctgcccaggcccttgttcccggcagtgtgactgtttacatggtttggcaataggtttgattctgattgcttcagagtggctggtctattttgtttcctttggtttccttcctccccaaattgtgacaggaaaaacagaccaaaaccaccctaggaaattgctggttgcctgtccccacgtgatgataaatgttgccctcttctggatatcgtttctctaccttacgaccaaacgcccgtcctatagagtgtctgattggatcctctgtcgcgtattctgatggtgcctgctggtttgacgtggagctatcctgtgaaataaaacagcttaacttttctcaaaaaaaaaaaa

SEQ ID NO: 87 - DNA, 531 bp, Homo sapiens
tgggattacaggggtgacccaccacacccagccagagtcaagtatttcaagtattagagttgtctgcctgcctccctgtctccctgccttccttccatctgtttgttatctgacttaatctttgaaataacccaatgatacatgatatgcattttctaggtagatagatgaagggttaggaagatgtaacttgtcctaaatcacgtgtcttctaagcggtggaactgattttctcactgactatagatgttgagcccattactgtgatacctactgccttttaattttaaaagttctcattgttttatcgttttcatcattatcatatgatttacctcttctcttgcgtcttataatccgattggtcatgctgacatactaaaccatatagtttgccactgggaaccaattcatctgtgaaaagtcatacagataggctcgaagaaagagcttgattgtgatgttgttgttgtgacaactgtctcgggggctggagttagagcaagggtcccagctgccacagttcatgta

SEQ ID NO: 88 - DNA, 470 bp, Homo sapiens
ctaaagtttaactaaagatgcagtttcctcttgtaaaatgttagtattaatactagtcttactagttttgcatagttagtagtgtatataatatatactaacatatactatatatgcatatgcacacatatatacacatacatatacacacacatacacacaagcatgtggtatatgtagcatatgccggggacatagtaaatgctaaaaaaaaaagttgcttaaaatatgattcatagaacatgaaaatcacgatgtaattataattaggtatattttatgaactcaaaatcacattacaggcgtgagccaccgcgcccatctcccctgcaatgtctttagttagaccttttccaccatcatgtctaactgggctacggtttggggaaagtgtccaaattagtccgtgttatcctaaaaggggtgtgccccggattagcagggccagggctagggtgagacaaatgaag

SEQ ID NO: 89 - DNA, 1122 bp, Homo sapiens
gaaagacatatgaaaggaattgtaattggcttaacagaaacagtctgtaaaaacctaacagtggtgcaatcatgttgtctgtgttgtgttatgtgagaattttctcctaagtcatgcaggtaatgacaatatactgtaaataccacatgtgagtttacctgaatctgtgcattttgtgccttattcatgagaatgatagaagtactaaaatctgtcaagtgttttcagtatagcacattatttactgagtgccagttgtaaatgtttttcaaccagcacctaaaaagactcttttcaaaaaatcacagaaacaacctaggacaattatttgttacataatccgacctcatagcagcattacattctttgccgtgataaacattccactcttgctttcctaaggatgaaacagtgataatgtgaactcaaatgaggtttcctgggtaatgtgacacctgcagaaactatagagcgtcatttatacgtagtttggcagaaaccacttacggctgatgatgcgcaaccctgctgactgtttcagttaatatgctgcacaccacacacttgtttagtgaaccaaatctagaaagtaccaaggcagaggtatgctcctgctgtaatcagggcaaatgagttcaactggatttcttttgacaatactgttggtacctattacttgggggaggacatgttgcggaagaccagatcatttttatacagaatgtgaaatactgatacagttattcttttttttaaagaacattgtttttataaagaacgtgatttccagtgatctctggaagcgctaaagctaaaatttctgttcttgaaacacttcagctttgcaactaaaatattacagattaataataaattaaaccaaccaatgataaacactactcagtccaccaacaacaaacgtgtttgaattcaccttaccaatattaatcccagcgtgtgtaaaacagaacagtaactctatggtgaccccagataacattttgtaacattgtgcttccttgtagtttgtaatgtgagttcaatcagtatttatgtttgaatttctaacattaaatctagtctctatcctgttaatttaattttaaatgctttatccatttg

SEQ ID NO: 90 - DNA, 1707 bp, Homo sapiens
cacgcacagggggcagcctggtggctcacatcaaagttggagagacctaccaccagcgcaaggagggcgttactcaccagcagtggtatctgttcaatgactttcttattgaacctattgataagcatgaagctgtgcagtttgacatgaattggaaagtacctgcaatcctttattatgtcaaacggaatctcaattccagatacaacctgaacatcaagaaccctattgaggcaagtgtcttgctggctgaagcctcgctggcacggaagcagcggaaaacacatactacctttattccactgatgctgaatgagatgccacagattggggacctggtgggtctggatgctgagtttgtcacccttaatgaggaggaagcagagttacgcagtgatggtaccaagtctaccattaaaccaagccagatgtcagtagccaggattacctgtgttcggggccagggacccaatgagggtatccccttcattgatgactacatctctacccaggagcaggtggtggattacttgactcaatactcgggtataaagcctggtgacctcgatgccaaaatttcctccaagcacctaacaactctcaagtctacctacttaaagcttcgttttctcattgacattggagtcaagtttgtgggtcatggcctgcagaaggacttccgggtcatcaacctgatggtgcccaaggaccaagtccttgacactgtctacctgttccatatgccccgaaaacgaatgatttccctgcgattccttgcttggtactttctggacctgaagattcaaggggaaacccatgacagtattgaggatgcccgcacagcccttcagctgtaccgaaagtatctgggagctaagcaaaaatggcactgagcctgagtctttccacaaggtgctcaagggtctttatgagaagggcagaaagatggactggaaggtgcctgagccctgagggccaaacaagtcccaagaatgcagctgtcttctcctcagtgctggcgctctgactacccttcccaaagaaccacggccctctccctttactgttctatagcccccagaactgggagatggcttcctaagttggctataccttgtccacttccagtactggacgtgctcagggtctagggtcacagatggtgctattaattgaactggaacacagcagaattgttgcaaaggttctaggagccagattcattccttcttcattctttgcaaaacagtggtacagacatggagtctagaattgacccagatggaaagtaattggtattcttaatatcctgggtgactaatatccaggcagagaagctcctggaaccataactgtaagttcctagctggctagggattgaagtcctggacagtgacagaggataccacagtagttcaagacttagcacaagtcaccaactgcttcagggatacctggaggggccagcaagtagagtgttggtggcccaagcaaaccagtgttgccaataccattgccaaaagggcctttggatcctggacaaagcttggctgccggcttcatttattcctgctgatggctgagaagcatctgtcttccatcccacttgcctgtcccaagttttgttccattttttaaaaatttgttgtaaactgcatgttttataaaataaaaataaaatatcgtttgttatttatctcattagag

SEQ ID NO: 91 - DNA, 313 bp, Homo sapiens
ctgcagtggacaaataaacatcctcaaagtagcaactgcaaatcagttacccttagaaaagcaagaccaaacactgtagttacactattagcagtgaccaaaaagggctaatattttctaagaatagtttaaattacagacatttgttatatttaccttatgtgaaatacatcactatttaattacattaattttaacatctgttgtgtggagttgtatagttcatgcaaaagcctgtgggtatgggtttttcaaaccagcagaaaggtcaaaggtacctgaatgctaaactgcctggctcccagctttttca

SEQ ID NO: 92 - DNA, 636 bp, Homo sapiens
tggagctgtatatggtccggagttatatgcagcatccagctttcaagcagatgtgtccctaggcaatgatgcagcagtgcccctatcaggaagagggggtatcaacacttacattcctttaatcattcctggcttcccttaccctactgcagccaccacggcagccgctttcagaggagcccatttgaggggcagagggcggacagtatatggtgcagtccgagcggtacctccaacagccatccccgcctatccaggtgtggtttaccaggacggattttacggtgctgacctctatggtggatatgcagcctacagatatgcacagcctgctactgcaaccgcagccaccgctgctgcagccgctgcagccgcttacagtgacggttatggcagggtgtacacagccgacccctaccatgcccttgcccctgccgctagctatggagttggcgctgtggcgagtttataccgaggtggctacagccgatttgccccctactgaagtgacgtgagacccctgcaaatgggacagccccccagttcatgaggcctggctattgcaatatttactagtagaggaactctatagcaagatgaagaggaaaaacaaacaaacaaacaaaaaaaaacaca

SEQ ID NO: 93 - DNA, 390 bp, Homo sapiens
  misc_feature (1)...(390): n = a,t,c or g
gagccacttgannnnnnnnnnnnnnnnnnnnnnnnnnnnnnnnnnnnnnnnnnnnnnnnnnnnnnnnnnnnnnnnnnnnnnnnnnnnnnnnnnnnnnnnnnnnnnnnnnnnnnnnnnnnnnnnnnnnnnnnnnnnnnngtaatacatactgtcgttttttcaatgcttgaaaataactttaacatttaattgtagctgacatacactgaattcatgtgtgcttacttaaattaggttattatttctttataaacctaatttttcatatgtcatgtttactattttatatgtaatatatacagcatatcacttcactggtaaagtaactggactgttataatcatcaagtgttttatattcttcactatgtgttttttttttgggggggga

SEQ ID NO: 94 - DNA, 458 bp, Homo sapiens
  misc_feature (1)...(458): n = a,t,c or g
ggtatttggaatcccttttgaanaccnttnnnnnnnnnnnnnnnnnnnnnnnnnnnnnnnnnnnnnnnnnnnnnnnnnnnnnnnnnnnnnnnnnggcacgagctgatgtttactaattattgtgatgagattattcatttttggcaagaataccacaaaaatgatgtgcccttctcagtgcatcatatcagggtgtgtgtcatgatgtcagtatcttattacnnnnnnnnnnnnnnnnnnnnnnnnnnnnnnnnnnnnnnnnnnnnnnnnnnnnnnnnnnnnnnnnnnnnnnnnnnnnnnnnnnnnnnnnnnnnnnnnnnaggtagatattttgagactctccgaatattcagtttcttctcaaccttttacctgttttttcagtactatcagtagagtttgcctgcagtggctattattgnacagttttaatggtgattttctcattcactcgttcg

SEQ ID NO: 95 - DNA, 2252 bp, Homo sapiens
aacaaagggaaacagatacttgatatgaaagccataatgacggtgacttgtgtcgtgggggaaaacataaggtcattttctccctctactcacaatactaaagggaaaaaaaatggattcaaagctaggatttcagggcccagcagtgttcctccatcagcatgttagacaactacacagtatgttgttagttttgaaagacattcactcaaggaaaacaccatctcaactttgcccgctcaccatgtcccttgcccccatgtagcccatttcccaggttatgctcttttctttctcagggtcctctttggtgggcagccactccccgagatgttgccatcagttttctgcagtccaaagagggtatggttaggtacgggtcttcctgcctcattcctcttcctctttgtgtaggtttcagccacaaaactgtcattcactctaggggacccctactaaagggtaacttcaggtgtgcagccctgagctccaaggctctgcaccatgccacacacttgctgtaaggctagaagtgaagaccttattaataggagcataattgcgagggagaatcatggttctgcagtctggtgtagacactggaataacagcacagaaaaatctatgactcccaatatcttctagaataaagaattttccctctttaacacaagggccctccttgtcattgaccttagctaaaccatggcaattcataaatagaggaaacattaatgaattaaaagcattccttattttttaactaatatttgtacattttcttagtctctttccaagtctttgcctcttttttttctttatttttattttttcctttgacagatggtatcccttcctggatcattcatttcaccttggtttctaactttaggtttactttcacttgttatttgacttagcaggtgcaacaaaaacaagaaacaaatgtgcccaccccactttccgcttaactgaaaagcttaaaataaatttctgaattatgtatcctgaagctttgaaatttctttattaatcgatgaaatatgaattctaaattctagcattgaagcttttcaccaaaagaagtctctccaaaataaatcttttgcagcaaagtgatatttattgagttatgtggaaaagatggcttgtatttttcagattattacaacacactgtgcagaattagacagatgttccgtggtgtttggtttccctttcttctctctcctgctcactctgcattatagcagcagcttatttctctaaggctgggacagctgggctctcggcagtgacgtcctccccacacctgggtcacaagtagtagtgggctgtgctatacccagcatcatgcttaacagcgtgttgcccttctgagcctgttgtactcactgatctctttaaaaacaaaaaatagctcttgtaaaaggtcacaataactctatgcacctgatactgcagtggttcctaggccattcttcatctgctctggacatctcagtcatacccaatgctcagtggatcatgaccaaactcctgtcatgtggatgcacgtgagtggggtagcagggagtcaggatcctgccttgttccagcaaccccttactgctgtataacttggcataagcctccgctggtgactcttgcaggaaccactccattgccctccaggttccccagccttctcagttataaacatgctgggccagatctcttagcctgcaaagagaactttccccagtcaccatagaccattctccttcctgaaggcttggggcagaccattcgtttatttagagaagagctatacattcttctttctggtcccatcttaaacgtcttctgttgtgctgcaccccagatggtgtctcagatgctttggggaatctttaacagctgaatttgagtcagtcctcttaggctgcacctccagcctctgcagatcccccctcatttcccatggatggtgggaccccattattctctcatctcggcattcagggaacagtttccttagcggcccctggtcacatgtcatcgggctgggcaggaagcgtccctgattgcgtgctccacttctccctctcaggaagcccagtttcatccttagtaccccccctcgtgcccgctgtcggctggttatagcacttccactgctactgtcagataggaagtgatcgaagcagggggcaaagagaaagcccaatatttgttctaagcagaaaagcaggaaaaaaaaaaaaaaaaaa

SEQ ID NO: 96 - DNA, 3653 bp, Homo sapiens
  misc_feature (1)...(3653): n = a,t,c or g
tgtttttcccaggttacaatggcctttatcctagttccattcttggtcaagtttttctctcaaatgatacagtcaggacacatcgttcgatttaagccatcatcagcttaatttaagtttgtagtttttgctgaaggattatatgtattaatacttacggttttaaatgtgttgctttggatacacacatagtttctttttttaatagaatatactgtcttgtctcactttggactgggacagtggatgcccatctaaaagttaagtgtcatttcttttagatgtttaccttcagccatagcttgattgctcagagaaatatgcagaaggcaggatcaaagacacacaggagtcctttcttttgaaatgccacgtgccattgtctttcctcccttctttgcttctttttcttaccctctctttcaattgcagatgccaaaaaagatgccaacagacactacattaccctaatggctgctacccagaacctttttataggttgttcttaatttttttgttgttgttgttcaagcttttcctttcttttttttcttagtgtttgggccacgattttaaaatgacttttattatgggtatgtgttgccaaagctggctttttgtcaaataaaatgaatacgaacttaaaaaataaaagctggtatcttaaaatgtaagagagtaagactgtgaagcctaaaatgactggccgaggaatgaaccagaaatgcctttgccaaacagttgtaactagaaatttgattctcacagtccattcttttctttgtccttaagatgacattgttagtgttcacgtcccatgttcagtgtccaaaccggcaatgtaaaaagtatcctgtgtggcttaacaggaaatctgtttatgtctctttatttgaaaccagttttactctcagtggttctttaagttcaatgaagtctgccaggaacattggttggtagtattattccgacacctttaatttccaaaatctgaagttcctgctacgtttaccaccttcatgatcttcttgaactggtaactgattaggttgaacttatggaagatttgtggacttaactcaaaagtaacctctcagtgttctatagaacatgtatttgtgtaactgaacctaccaggagaaatgtttggaattctatatgtgcaatttttcaacaaatgcaaaaaaaatacagcacatgtattgacaagcttctgtcaagcagcttgagttgaaatttgatttaagaaaataaatcatgattgttcaaagctgctgggacgttagaattaggccatgatactggtctcattttaactacagtggtatttggcactagtgtaaacttccatataaatcactcttttggaacaacaaagggggagggagaaaaatcacggcctgttaaatgagtaccaaagccgcccaacagtaatgagatgttctcatccttgattctcccagcctcaaacaacacagcttactttttttttcccttgctcagaaagtacctgtaatttaacaaacagactgcctgtaggtatagtgcaattacaaatgctctaatcattgtacatacatctctcttgatattgcagcatccatactggctttgtaatcattaattttttggcagattgaatgtgctgtattgatatgtatctatgtaattgtattgtatgtctatagctaattcacgttttgaataatgttattttatttacttttttaagagaggagaatgtaaatttgtcagtttatttctgactagggatattttctttccatttagaaaagaaaaaaaaaaaaaaaccttactgtcatacagagcggtactagcgtcgtgctgtataaaatcatttgcacattcctgagtagaggtatactgattataagacccaaaggtaatttcatagcaaaatacataaaatcagtcggagcttttatacaaacatggaaaccaactttgtagaacttttgccatttgatctaggattggaatatgagcttttatacaattcatattcttatttggcaaatgcacagtttagtattacctctctgatggcctttactagaaaggcagttttagaagctattgtgatccactaaggaaatgttttaacagctagagaccactgcttgcctgaaagggcgttcttaaatttggtgcagnnnnnnnnnnnnnnnnnnnnnnnnnnnnnnnnnnnnncaacatttgaaggcctacagtgtgtatagagaaaacctcatcacaagatcataagtgttacagttttagggaatcaagatattctatttaatagagctatagtaaatgtagtcaattaaacctgatctcaaagcttgaagaagctgagcaaaacagggaaagattgttatatttgtctttatgaaattgggatggaatttgctatgcagaattgaggtttgtggctttgctgttcctgtagggtgcatgacaagatcccttctcttggagaaagggaaaaaattggtcaccctagcagcagtggatgcatagaaacctaattttagccacaccagtcaatcgaagctaaaggattttcttttttgtttcttcggggttttattgaaggggctaggggcgggacgggattcttttcagttttgtataaaaacaaagtttactcatgctttatattatattgtgattgcaagcgttataagcgtgtgccactggcctcctattgttgatgcttaggtaatggaggcctgtggtgagttttatggtgacttgggcatgtcttattcaaaaacaaaaacataaaacacagaaacctttcttcagcataccaaggcaagcagccatttcatgactcacttaacacattgcagtgtaccagtttacagatgatttttccctttttgcgtgacatgggcagttctaacccccagaggaattccttatttgtaaattgggaagtttctactatggccttacagagcttaaaattcaggaagtttgtggcctcatatctggaaacaaaggggaaataacacacccatttcaaaagtaaataaatctcctagaagtttttgtttttaacatttccatataaagagctctgttgaatgtcatgaatagactggaaaaaaaaattttaagaacctgcatatgttgtttactagcagatgacaactacaaaaggaatctgaagaacacgtaaaacttgtatttttttttttttggtagattaactagcaggcctattttaaaaaggtaattcagctaaagggcaatttacttttttgtacttcagactatcttgattgtcaaagtgtacggaactgtaattttaaaatttatactgccacatgattgtaaattttagttgtcttaagttaggaattggtgaaaagctatttatgctggatttgggtcaaaatgacttatttgcaaaaaaataaataatgggaagaaagggctgtataatgaaatactgcaagactcacatattggttggaaatttccctcaaatcacctaccgattacccttgatttccctttgttttcagtttctcaaaacgaatgaaatgaaatatagcagaatgttaacccatataaaaataaagtgtacccaaatattgtaatgtatattgctgctcttcttcaaattaaataagggttta

SEQ ID NO: 97 - DNA, 950 bp, Homo sapiens
actgcaccactgcccaggtctcccggctggatgaagacgtggtccatgaggaagctggctagctcagactggagagtagcttcaggaaaaaagacaagtggcctaaggaaatcacggcccccaacaatcatctgagggctaaagcatgagaagtagatcacttaataagacaaaagcctgtagggggaaaagaaaggatgtttaaaaggacagaatgtttcccaaggtagaaatgacactgtcaatttctccttggaatgggggcagggatactcgccttgttgctcccacttgagtcagtactcacctgctcctggatctcagtatccacatctgagaggcaactctggcagagttcacagaaggccaccattctgtccctcaaactcgacagctgcttctggtgggcacagtggcttgaaggggaagaatgaagacacagactcctctgttcccattatcccatctaagacccacactcacctgggaagcatctgatttagaaatgtgggttagtgtccagagaatggaaaaatagacaagagtcaaggctggcaggataacctgtaacaacaaagggtttgaaaaaatgaggtttgggttaggagagggagagacagatagccagaaacacaccagtgaagaggagagaaaatgagtaaagggagagctaattccttttccagtggaaaatgagtgatattctggacattcttcagaggcatctacacgaagtagaaatgtcaccgctccctaatttactctacgtcttctagaatccctcaatattatccttggcttccaggaaatccaagaagaccctggaagtagagtccaccttctaagagaggaatgtaagaggtgacccccacccacctgatcttcctcgctttgtccactccacgcactgagacttgacacacctagtggccacctagaacgtaggtcct

SEQ ID NO: 98 - DNA, 507 bp, Homo sapiens
attagctgtaagaaatcagagcacaaatctgggcaagaggaagcaccccagcttggttactagagggagaagaggcttgccaccaggaggaataagtacaagaaggaaacagacagagaacagttcctagagatttattataatctgtttcttctttggctttttgctttgccccatatgcacacatagtagagatttctataatctgcattcttctttggcttttgttttgccacatacacacacatactcaaataatcaagtggcctaaacacagagattagaaaccaatcagtaagaaatcagaagccctaccagtctacccctccccgaccctgcatctgatgtggagccatagtcaagtgcctaggaggaagacaagcttgaaggacgacccttaataaagagcttctaggaaagttcagagatctcagaagaacttggtgcacagccaaagcgctgacaaaggcctaggcgctagctttctagaacaactggaaaatagcc

SEQ ID NO: 99 - DNA, 1041 bp, Homo sapiens
aaataaccgcagattgggctcagggacctgctaggcccactgagacagacctgagctaaaactccattgatcacttgacttcataagcccctactctgactgctggaccacagcgaagtttgggtcccctagaattagtgttagttcagaagccagtgtctagtaatccccaaaaaatcattgtttccccttctgcaaggcaaatagccataggtccctttggggaagggtaggagaaagataaacaggaaagtctcctcaagagggacacagcttcccttttcattaaggagattctgggtctgtaaactagcttcatttctggggaattgcttaaggggccatgactctcttcaggtgatttcaaattatacttctgttttaccagacctagaattcttctgcttatacagatcaagtaagagttagtagactgcccatctatttcttttttagggacaccatgatcaaccacccaatgctataggtctcagcaagtcagactattctgattactgctttggctccactatttattatggtaactatgcccaccttggatttggcatggtgctggcttacttggggccctgccacccccggggattcctttatccccattggcatttaggggatcccagttgatgggtaggcagttcccactgtaatttctgaccctacaaagagaagcaacccacagagcaaagatgcctgggccctcaccctcacaaattgatttcctcacagtggtggtgaagggtgcgtcctcctaaacccttcccagggtgacctgtcagttctttgctccttttttcttcttcctgctttcttttggattaataattttttattggccgagccaccgcacctggccggttttcaattgataatattttcctgtggtgtcagaaccttaaaagagtatgcatttattttgtatactccccatttttgctattgttgttatacattttactgctacatacattataaattcttgtatatattggtatatttgttttagataattatctcttaagg

SEQ ID NO: 100 - DNA, 378 bp, Homo sapiens
cggaatagtgggttttgctgcaaccggtttattttccttctgttttcacccattctggcacaatctggcgccatcgtccttcttgtgaggccaagcctgaaaatgcgaagcagaggaggcaggaccaaaattgaggcgaatccaggaacctgccaatgggtctccgggtgcggtctctgaaactggaggatatcgggaggaaaggctctccgatgcggagataatggggaagctcttggcatggttggctgtaggtatgtgataccggaggagcaggagtcaaataggatacgccgacttttaattcaaggaacccttttctgaaacactttgccacaatgaaggaaataaggaattgtactctcagagatgttgaga

SEQ ID NO: 101 - DNA, 959 bp, Homo sapiens
ttttttttttgaaattcaggcgatttattgtaaacaggataaccctagcactccaccatactggctgtgtcacatgctccctctttcacatcaactggtcaaaaaagaagactttcttaagaagcctcaggtaactaataacttagttccacaaatctcatttactaagcactgcgtaaactgcagtatctggggtagtctgttattgctcatggactgcagcttggacccatctaaatgaatccattagtatgcctgagtgatcaacagcagctctagatccaacctggaaattggaaaatgctgacgcataccaaacaattgcaggttcatggaagactacatgagattgctctcagatctcttcatgtgtcattctcataaaaaaaacacttaaatttcacccattttttaaaaaagagctaaaagttactcaatagcacataattttccacataaaaggtaggtggatttttatttactagtacagtggtggatcggaacactcaggcctaatttcagatctgtcttgtatatacttgcagtttaatgaaaagctgcatagtctacaaatacataaaaccagaaggaagtgatgatttcacacaccttctgatggataaagacaggcttcatataaggaggttcttgaaggtagggataaaaagatggttacagcaccacattgatctgacagtagaaatggagccccgcttttgaaagcagccccatagttgtgactatatcgttcttgcccaaaattgagatttggaaaatggcaaatgtaaaaacttaagatgtgaaaaggtatgactttacagaagaaagtcctagccaatcaaatcatatggggaggtaaaatgtccttcaaaaatgccattctttactttgcctgagttagtggatgacagggccacttactgttactagtgcttgtatatggaaatatattcacaatt

SEQ ID NO: 102 - DNA, 2722 bp, Homo sapiens
gcacgaggctgcttcattctgcctctagtaccagcggtttctctgttctgtgatcaatgtgattcacaggaactccttaagtaacaaacgaaatgagccaggggcgtggaaaatatgacttctatattggtctgggattggctatgagctccagcattttcattggaggaagtttcattttgaaaaaaaagggcctccttcgacttgccaggaaaggctctatgagagcaggtcaaggtggccatgcatatcttaaggaatggttgtggtgggctggactgctgtcaatgggagctggtgaggtggccaacttcgctgcgtatgcgtttgcaccagccactctagtggactccactaggagctctcagcgtgctagtaagtgccattctttcttcatactttctcaatgaaagacttaatcttcatgggaaaattgggtgtttgctaagtattctaggatctacagttatggtcattcatgctccaaaggaagaggagattgagactttaaatgaaatgtctcacaagctaggtgatccaggttttgtggtctttgcaacccttgtggtcattgtggccttgatattaatcttcgtggtgggtcctcgccatggacagacaaacattcttgtgtacataacaatctgctctgtaatcggcgcgttttcagtctcctgtgtgaagggcctgggcattgctatcaaggagctgtttgcagggaagcctgtgctgcggcatcccctgggcttggattctgctgctgagcctcatcgtctgtgtgagcacacagattaattacctaaatagggccctgggatatattcaacacttccattgtgactccaatatattatgtattctttacaacatcagttttaacttgttcagctattctttttaaggagtggcaagatatgcctgttgacgatgtcattggtactttgagtggcttctttacaatcattgtggggatattcttgttgcatgcctttaaagacgtcagctttagtctagcaagtctgcctgtgtcttttcgaaaagacgagaaagcaatgaatggcaatctctctaatatgtatgaagttcttaataataatgaagaaagcttaacctgtggaatcgaacaacacactggtgaaaatgtctcccgaagaaatggaaatctgacagctttttaagaaaggtgtaattaaaggttaatctgtgattgttatgaagtgaatttgaatatcatcagaatgtgtctgaaaaaacattgtcctcaaataatgttctttaaaggcaatctttttaaagatttcactaatttggaccaagaaattacttttcttgtatttaaacaaacaatggtagctcactaaaatgacctcagcacatgacgatttctattaacattttattgttgtagaagtattttacattttcatcccttctccaaaagccgaatgcactaatgacagttttaagtctatgaaaatgctttattttttcattggtgatgaaagtctgaaatgtgcatttgtcatccccactccatcaatccctgaccatgtaaggcttttttattttaaaaaaacagagttatcccaatacattatcctgtgatttaccttacctacaaaagtggctcctgtttgtttgatgatgattggttttatttttgaaatatttattaagggaaaactaagttactgaatgaaggaacctctttcttacaaaacaaaaaaaagggcagaaatcaccccaaggaacgatttctcaggttgagatgatcaccgtgaatccggcttcctctgagcattcgatggccttagcacctcatcaagccagcacatcctgcctgctgttgcagcctggctgggtttattcttcagttaccctaatcccatgatgcctggaaccttgattaccgttttacatcagctcttgtacttttcagtatattttcataatgagttatattgtcatttagactttgaacagctctgggaaatagaagactagggttgtttcttaaagtttagctcatgttataataaaaagttgaaatgaagttcttattctaaaagtctgaatgcttagaacaaacttaacatgtttatagaatatggtctctttgtaccaagtactttgcttaagagctcctttgggccactacatattttggtttctagaaaatgtttgtttatgaagaagtcgatggaaaactgcaaacatatgcagaaaaggtagaataataaaaaaggtctaatgaactccattcagctttgaacctatccactcataaccattgactggcctttaaaaaaaagtattggcagaattaatttccacctaggtgatgggaagaaagtgttcgcctgttccagcctgtggctcctgcctggaggttacccagtggtgcgccagcgccaagccatcactccccgagggcctcccctgccaatggtgctggtatcccatgcagctcaccactggctgcgtggaaactcccttttttccaactgtattattggccttctaaggagctgttttagatgttttttctaactgcctcctcccatgccattttaatactacagatgtactacgtatctgtttatatactgtacctacatctgtgctttgtacataaaagaaccagttttctcccccttgaggacagagactcatttgaacatgcataggttaataaataataaattcttatttaacattttgt

SEQ ID NO: 103 - DNA, 2007 bp, Homo sapiens
caggcgggcaaggacagctccgcgagccccctacaactcgtttccttccgttcaccttcgcagggcggcgactggcggcgcgatggacctgaccgggctcctgctggacgaagaaggcaccttctccctcgccggcttccaggacttcacgttcctcccaggacaccagaagctgagtgcccggatccgaacgacggctctactatggctgggactgggaagccgactgtagcctggaggagctctccagcccggtggcagacattgctgtcgaactgctccagaaggcagcccccagccctattcgccgactccagaagaaatatgtagctcatgtgtcccgggaggcatgcatctccccatgtgctatgatgctggctctggtgtacattgaacggctccggcaccgaaacccagactacttgcagcatgtgtcatcctctgacttgttcctgatctccatgatggtggccagtaagtacctctatgatgaaggggaggaggaggaggtcttcaacgacgaatggggagctgctgggggtgtggccgtgcccactctcaatgccttggagaggggcttcctgagtgccatggattggcatctctacactgaccctcgggagatctttgaggtgctgagctggttggagagctgtgtggctgagcagcagggacggtggcgaggctggtacacctacacagacctgtgtgtgctgctggagcagccgacctggcagttggccctgggctccctctgccagcggctggtaaagctgtcttgcctgttagctgtggcatatgtgagcagtgtggccctggctgtggcatcggtggccgtaatacatcagtctttggggctgtcctgcacccctacacctgggccgcctgaccttggactgacctcccgttgcctcctggagccctgcataccttctgtgccacaatgcctgccgtctcccgctaatgtctccagctgcctgggaaggcagcatggggctgcggtcactctggggcagtcttctggcctcactgactcctccaccattgcctcccccagacccccctgcccctcccactcttcttcataactgccacctttgccagaagctccagagagactccccaacctgccatgcctgcctccaccccaaccgtacagtccccactgcgctgtccagcccctggtaccatacctatggcctggctcccccctggccttggagcccggtgcccctttcacttcctcagcctcagcaatgttcccttttcagtgtcatggagctggctcgcctcaagtctttcgttttcccaggctaggtagggctgtgaggaatgcattaagagggtttgggagtttctgagaacctggaggagcaaagcttgattcagatcctgtctgcctcgctgggtccttggcaggtcccctgtcctcctgggtgggagcttatggggtggtggggcagaaggactgaaggtaattcactcctagatcgcagtggctggctgcttggccaggacagtgatgccaccagggagagcttccgcttggtgaccagggacatgtcccagatggacatagaagcccctctctgcctccctgggattttttagacttttacttttgatttccctaggatggaagagtataggtgggagataagggaagtggggtgagaggagaaaggaaatgttggcatgggcctgtgtgatgtccctgaggcagaagagccggggactgatgggttcaggtgggagctgctgggtgaggcagggaacccttttcactcccattccttagctttagtctaatggagccaaggactgctgggaccttcaaccctgatcttttgtcttccagtcttctcttagtgtcctgctcctaggtttccctctcttctggttcttctcccaggtattctcttcccagcctctctggccactgctttgtatcagggtttttcacgcttttgtagaactgaggtttcaataaacagtttcagttgcaaa

SEQ ID NO: 104 - DNA, 237 bp, Homo sapiens
gctaaacatttcaaatgttcatttctgtcactataaatatatatgtcctcaaaagcatttatatttatggaatgatcttgttcagaacccacgttttataggtttaggttgtaggatcattcattcaagcaactttgccagcacaacgtagaagtttcagattattttagatagttatgcctattactatgctatgggcgaggggttggggagcgaggcagcatctcagaataaaat

SEQ ID NO: 105 - DNA, 416 bp, Homo sapiens
ctctacataagaacagagggacaatgcaaagtgtcagaaatgtcccctgcccatatagggggaacagaattgggtgtgagtgcgtgccactaagacctcatgctagtactcaagccttaatgaaatctaacatccactgaaagtgccatggcaaatctgagaaatacatatctttattaagagagctataaagcaaaatttaaactctcgaatatgctagtctagtgggtttccctacctgtggatgtaagatttcattaaggcttgagtactagcatgaggtcttagtggcacgcactcacacccaattctgttccccctatatgggcaggggacattgctgacagctttgcattgtccctctgttcttatgtagactcaaggacgggacagaactctccatcctacctttctgg

SEQ ID NO: 106 - DNA, 519 bp, Homo sapiens
  misc_feature (1)...(519): n = a,t,c or g
ttcccgcgcgggttccccggtgcgctgcgggcaggcggtgaggctcncgcatgtgcttacgggcaagaacctgcacacgcaccacttcccgtcgccgctgtccaacaaccaggaggtgagtgcctttggggaagacggcgagggcgacgacctggacctatggacagtgcgctgctctggacagcactgggagcgtgaggctgctgtgcgcttccagcatgtgggcacctctgtgttcctgtcagtcacgggtgagcagtatggaagccccatccgtgggcagcatgaggtccacggcatgccccagtgccaacacgcacaatacgtggaaggccatggaaggcatcttcatcaagcctagtgtggagccctctgcaggtcacgatgaactctgagtgtgtggatggatgggtggatggagggtggcaggtggggcgtctgcagggccactcttggcagagactttgggtttgtaggggtcctcaagtgcctttgtgattaaagaatgttggtctatga

SEQ ID NO: 107 - DNA, 472 bp, Homo sapiens
agatgttgagtggtggtagatggttcagattaatgttgaaggattttcatattgcatttgccttactcagtttttaatcaagtactatgataagaaaatagatgtggtgattatattcatgggtgaaaaccagcctaaagatagcaaataatgccagaagaggggatctagaaatctagtgaaatggtgacagccctgatcttaggcccctgtaacaaaacaacacaaattaagtacaaagtaggagacagataacaggtacatccatgcagtatgtgcaagacctattgctgtcaacattattatttaataaaaaagatttctggaatgagggaaatgatcagtccattttagccagattagagttgcagtgctgtactttagtatgggtaaacagaaatgtatccagaaggagagaggggtgttcaggtcttctaagtagaagtcagacactcctcaaatattgtggacg

SEQ ID NO: 108 - DNA, 334 bp, Homo sapiens
gagtaattacatgtatcagagatacttatctctatactaattcacagacagctcctgatgtaaggatttagagggccttctgccctctgaatatatggtgaggagaatggggtatctggaaaaggaaaatgatctggataaatctgagacctggggggaagtttgttttatatgttcattattggttgttacatatcaaggctgttttggttatgtatcaatattgtggtttatttgagctggaagtgattttttctgtgtatgtatatgtatacacttcaataggttttaattttgaagtgaatatttgccatgactccattttccccatacc

SEQ ID NO: 109 - DNA, 942 bp, Homo sapiens
  misc_feature (1)...(942): n = a,t,c or g
tttaacaatttatagtccttttaatagtttttttttttttttcataatactactgaggggaattgttagatgtattatgtaaggcattcttaatttagttattaaagttacatttttaatatttttaaaccttttgtaaatgctggcttaattagaaaatgtttacagaaaagtaaaaaaattctagtaatatgggaaatccttgtaagcagcatggtttcagaaaaatctcaagatgatttatttcaccaaatgagtattttttaaaactaggaactccccaaccaaaaacacagacttgaataatatttgtgttattacctttattgtacattgagcaagcacccttgtatagaggaaatgcctctttcctcatctataatatctatagtatttaggccatggatgtaagagtgtttttattttactaatagttaatgtattaaatattaagttagttccctgatttcccattatntggttggcagacatactgagataattagaatgccttatttcaaaagaaactatagcacttattttgttagtaggcttattgctttgcaagtccaagaattttcgtgatgtgtgcttttaatttttataacagagtccagttggcaactttgtgggaagcaatgtagtatagtggaaagagcacgggctttcaagtaagannnnnnnnnnnnnnnnnnnnnnnnnnnnnnnnnnnnnnnnnnnnnnnagtgagtgagttactcaatttcctcatctataaaatggggatgataatatacctatttcatagggttgttgtgaggataaatgagataatgtatgtaaatcatctaagtacaatgcctggaatatagtaggcatttggtaattgttaattatttgttcagaatcaattaaaataattttcctaatgtaaatatagtaattctctttagacaaaaataa

SEQ ID NO: 110 - DNA, 1428 bp, Homo sapiens
  misc_feature (1)...(1428): n = a,t,c or g
aaactattattttcttgctaatgtaacatttgtctgttccagtgatgtaaggatattaagttattaagctaaatattaattttcaaaaatagtccttctttaacttagatatttcatagctggatttaggaagatctgttattctggaagtactaaaaagaataatacaacgtacaatgtctgcattcactaattcatgttccagaagaggaaataatgaagatatactcagtagagtactaggtgggaggatatggaaatttgctcataaaatctcttataaaacgtgcatataacaaaatgacacccagtaggcctgcattacatttacatgaccgtgtttatttgccatcaaataaactgagtactgacaccagacaaagactcccaaagtcataaaatagcctatgaccaactgcagcaagacaggaggtcagctcgcctataatggtgcttaaagtgtgattgatgtaattttctgtactcaccatttgaagttagttaaggagaactttatttttttaaaaaaagtaaatggcaaccactagtgtgctcatcctgaactgttactccaaatccactccgtttttaaagcaaaattatcttgtgattttaagaaaagagttttctatttatttaagaaagtaacaatgcagtctgcaagctttcagtagttttctagtgctatattcatcctgtaaaactcttactacgtaaccagtaatcacaaggaaagtgtcccctttgcatatttctttaaaattctttctttggaaagtatgatgttggataattaacttacccttatctgccaaaaccaggagcaaaatgctaaatacgttattgctaatcagtggtctcaaatcgatttgcctccctttggcctcgtctgaagggctgtaagcctgaagatagtggcaagcaccaagtcaggtttccaaaattggcccctcagctgctttaagtgactcagcaccctgcctcagcttcagcaggcgtaggctcaccctgggcggacaaagtatgggccagggagaactacagctacgaagacctgctgtcgagttgagaaaaggggagaatttatggtctgaattttctaactgtcctctttcttgggtctaaagctcataatacacaaaggcttccagacctgagccacacccaggccctatcctgaacaggagactaaacagaggcaaatcaaccctaggaaatacttgcattctgccctacggtttagtaccagggactgaggtcatttcttactggaaaagattgtggagatttgaacttattctggatcgcttgaggacttccttaattagggcaggagttcaagggccactaggataattgtncagtttaangagcccaaaagtttttttaaaattatggntactcttgaaaaattctcgtggaaggtgt

SEQ ID NO: 111 - DNA, 630 bp, Homo sapiens
cgatttctaaagaagtactgcaaccctaagaagattcagggcctggaactccagcaaataaaaacatatggacggcaaatattagaggtactgaagtttcttcatgacaagggattcccttatgggcatcttcacgcctccaatgtgatgctcgatggggacacttgtcggctgctggaccttgagaattccttattgggcctgccttccttctaccgatcttatttttcacaattcaggaaaatcaatacattggaaagtgtggatgtccactgctttggccacttactgtatgaaatgacttatggacgaccgccagactcggtgcctgtggactccttccctcctgccccgtccatggctgtggtggccgtgttggagtctacgctgtcttgtgaagcctgtaaaaatggcatgcctaccatctcccggctcttacagatgccattattcagcgatgttttactaaccacttctgaaaaaccacagtttaagatccctacaaagttaaaagaggcattgagaattgccaaagaatgtatagagaagagactaattgaggaacagaaacagattcaccagcatcgaagactgacaagagctcagtcccaccatggatctgaggaggaa

SEQ ID NO: 112 - DNA, 1106 bp, Homo sapiens
ggcgcgcgctctggagctggatgtccaggctgcgggcgctgctgggcctcgggctgctggttgcgggctcgcgcctgccgcgactcaaaagccagaccatcgcctgtcgctcgggacccacctggtggggaccgcagcggctgaactcgggtggccgctgggactcagaggtcatggcgagcacggtggtgaagtacctgagccaggaggaggcccaggccgtggaccaggagctatttaacgaataccagttcagcgtggaccaacttatggaactggccgggctgagctgtgctacagccatcgccaaggcatatccccccacgtccatgtccagggagcccccctactgtcctgggtcatctgtggcccggggaataatggaggagatggtctggtctgtgctcgacacctcaaactctttgggtaacgagccaaccatctattaccccaaaaggcctaacaagcccctcttcactgcattggtgacccagtgtcagaaaatggacatccctttccttggggaaatgcccgcagagcccatgacgattgatgaactgtatgagctggtggtggatgccatctttggcttcagcttcaagggcgatgttcgggaaccgttccacagcatcctgagtgtcctgaagggactcactgtgcccattgccagcatcgacattccctcaggatgggacgtggagaagggaaatgctggagggatccagccagacttgctcatctccctcacagcccccaaaaaatctgcaacccagtttaccggtcgctaccattacctggggggtcgttttgtgccacctgctctggaaaagaagtaccagctgaacctgccaccctaccctgacactgagtgtgtctatcgtctgcagtgagggaaggtgggtgggtattctccccaataaagacttagagcccctctcttccagaactgtggattcctgggagctcctctggcaataaaagtcagtgaatggtggaagtcagagagcaaccctggggattgggtgccatctctctaggggtaacacaaagggcaagaggttgctatggtatttggaaacaatgaaaatggactgttagatgccaaa

SEQ ID NO: 113 - DNA, 957 bp, Homo sapiens
gcggcagcaccagcaactccccttcaaataagcacatccactttgagtacaacatgtcgctcttcctctggtctgagagtcctaatgacctgccttccgatgcggcctgggtcagtgtggcaaaccggggtcagtttgccagtagcggcctctccatgaaagcacaagccatcagcccttgtgtacagaacttctgttctgccctggattctaagctgaaggttaaactagatgacctcctggcttacctcccctctgatgactcatcactgcccaaggacgtttctcccacacaggccaagagttctgcctttgacagatacgcagatgcggggaccgtgcaggagatgctgcggactcagtccgtggcatgcatcaagcacatcgtggactgcatccgggcagagctacagagcattgaagagggtgtgcaagggcaacaggatgccctcaacagtgccaagctgcactcagttcttttcatggccagactctgccagtccctgggagagctgtgcccccatctgaagcagtgcatcctgggaaaatcagagagctcagagaaaccagcaagggagtttagggctctgagaaaacagggaaaggtgaaaactcaggaaatcattcctacacaggccaagtggcaagaggttaaagaagtactcctccagcagagcgtgatgggctaccaggtctggagcagtgcagttgtgaaagttttgattcatggattcacccagtcattacttctagatgatgctggctcagttctggccacagccaccagctgggatgagctagaaattcaggaggaggcagagtctggcagcagtgtcacatccaagatccgactccctgcacagccgtcctggtatgtacagtccttcctgtttagtttatgccaggaaattaatcgggttggaggccatgccttgccaaaggtgacattacaggagg

SEQ ID NO: 114 - DNA, 593 bp, Homo sapiens
atggaaatgcccacggaacccagaaaacagacacaggcctgactcaaggactcctgaaagttttgcacaagcagtgtcaccacaagcggtatgtggaattaacagatcttgagcagaagtggaagaacttgtgcctgccgaagagaaaattcaaagcgctcttacaactggatccttgtgaaaacaaaatcaagtggataaactttttagcgcttggatgcagcatgcttggtgggtccttgaacactgcgctgaagcacctgtgcgagatcctcacggacgatccggagggcgggcccgctcgcatccccttcaagacgttttcctacgtttaccgctacttggccagattagactcagatgtgtctcccttggagacggaatcctaccttgcctctctaaaggaaaatatagacgccaggaagaacggcatgataggtctttcagatttcttctttccaaagaggaaacttttagaaagcattgaaaactctgaagatgtaggccattaatacagagaagaatacattttaatgtcaaaatagtgctctttaaaattctggcaccaaatacaacttaccctgaatcacaaa

SEQ ID NO: 115 - DNA, 449 bp, Homo sapiens
agctgactcaaagtaaaggctttgctagaggcagtcggcagagtatttttagcatctaaaatgctcttccacttcggcagtgaccatgcgatgtaatcaaaggagaatacgtaagtgtatggaccaggaatggtcactggagtgttgatgtaggcacaacacaagaagtagtcacagaaattgctaagtctaggtttatgtgtgcatgctgtggagtgtctctgtggtggatttctttttaagaggcagaaaaaaattctaatttaaatgtattaaattataagttctaatttaaatgtattaaaattaaattataagttgataggattattattgacacacaaggagctccaaaagagatcgtatttttattagagacaagccagttgggattgaaacaaaaatggaggggggtatagccctgtgtatgttgcacagaaaaagtatct

SEQ ID NO: 116 - DNA, 377 bp, Homo sapiens
gtcaagatgaaataaggagaaaccccataactttttagctctcttttaaaaataaatgtctccttctgtgttctgtaatatgaggataaataatctacttttgatagcatggctttgagatatttgtattcttaatttaatattgaaggaaggggttggttcccatagtacctgggccagagggttattataccatcctgtctctgggcccactgtgggtaattccacatccagggtaccaccgccatttcaggagttgtctcaccccttctcgtgccttttctctccttgagctttataaacagatttgtacctgagccccagtgctacactcatccttgctttccagccctaagccatctcagcctgatgtcaca

SEQ ID NO: 117 - DNA, 1091 bp, Homo sapiens
tttttttttttgacatacaaaaagacagatatttattttactcaagctttcctataagaagttaaacagaaacaatccctggttgaagactaccaaaaatgttaacattgtttcacatatcccttcagtgcccagatgaagggaaaaacttaactgaacgaaagaataagaattaccatcctgacactgggtttgcttaggtatgttaggaaaaaatccacataggctagacctaaaacagtaaatgagcctactaatttcccacaggggatgggaaatccactgatacagacacctccaagaggctcccaagaccctaggggatcacaaccaccacaggtattcccataaacttccttttccctccctttttccctcagctatttttactggttaaaggaggaggggtggggggacaaaaggttcactttccccacttcccaggcttgcatggactggtcagcatcaatgtttgttgggaatttcacagcatcctcttcatggccatctaaataggataacagtaaaaatggctagggggaggcatgggttttgcttcccagaattataaaatacctggaaagggaattaatctcattcctatacaggaaaaccaaatattctttctagagaacagcagaacaaagtagaacatctactacggctgtctcccagcctcaatctgacttcaagaataactttacatctgccattgtcatgaaccccagcttcctcagagaagccagggcacccatgccttcctacacggcccatggaagcagggttgccacttgtacccccaaaccctgtagagagtgagggtttccttatctccccctcccctaggagcaggaattgcaaatagcatcattgtattaatatgattggtaaatgtttgaacaacttggaaataaagttctcaagttcctaccagtaatatgagtctgtgtgtgaggagagaaatggggtgggggaaatgcctctcatttcccatacttctttaaatttgggggaagtaagagtagaggggatatatacggatatgttgtgtggataggtgagaatggaacccaatatatgccccccaaaag

SEQ ID NO: 118 - DNA, 326 bp, Homo sapiens
gggaataaacatagcttgctttctctctttccctcttttgagattcaatttctctcccttggacttctataccctagtagagccaaaagttccagtacaaaccagttttgagactccagcattagtcaactaagggatgttgtaggtcatccctgagaacgagggctgcttgctctggggaagctgggaaatggcaccaggtgtcaggccctgctgcccaggataggatgacagctgctggtgttaattacgtttctgggcagaacagggtaaagtccttgggggtgagagtttttgtttaggcactgtgttccctgtacctgttg

SEQ ID NO: 119 - DNA, 434 bp, Homo sapiens
tggcctgcagacagtgctctgtaaatagttgttttaatttagctgaatgttagcattttagtctttggcattttagcgtttgggaggtagattaataaagtatattccttcaagcctgctgttgataccatgaagactgggcgcctcagtcccagccctgtagctgtgtgtcttgggccaccagtggcctgcaggacgaaggtactgttccatcacctgcggtgtgcctcaggatcaccaggtgcaggcccccaccctcggagatgctgctgcagtgagtggttccactgcctggataacccttgaggaacacgtcagttactgtcacgatggggcaggtggagctccttcctattttttggggtgctccctgtttgtaaaggggagtttgttcattgggaaagacctgggtcttgacacggccctgccactta

SEQ ID NO: 120 - DNA, 386 bp, Homo sapiens
actccttgttgagctctcacagtgaactctcctgcctctgccctccttccccgcctcccctggtgcctagcgtcaggtctagccacttcctcctgggcccctctcccttttctgtggctggctgcctgcccgcctggcgctggacctttcatgtaacgggaatcagcatgtatattctggtctggtctgtttctacacttaattttgtttccagtagtatttccctgtaccggcagagttcacaaacacatttgaagaggctttttctcaggattcttaaccttcccaaaggaagtcccatggatgggtttctagaagtctataaatgctctgaaattgtatttttctgtggaaagcataactttcatctgcttgttcgtgctcag

SEQ ID NO: 121 - DNA, 367 bp, Homo sapiens
  misc_feature (1)...(367): n = a,t,c or g
accnnnnnnnnnnnnnnnnnnnnnnnnnnnnnnnnnnnnnnnnnnnnnnnnnnnnnnnnnnnnnnnnnnnggcacgagcctcaataaagatgacaggcaaattcgtttttcgataagtaaggtgtctacgaccatagagatgctctgaagaaattgtatatttgcatttcatgtacaaataagatctactcatcttcatgttattttaatggtgaacagtttgtgttgatatatgtttatttatgcttgactcctcagttaaattgatggtttcttccagttgtcatttcttttctcactcttgagttcaggcagaatgtttaagactaatgatgatcagaaataagattgaggcaacgtggcgaaa

SEQ ID NO: 122 - DNA, 370 bp, Homo sapiens
  misc_feature (1)...(370): n = a,t,c or g
ttggaanaccatttnnnnnnnnnnnnnnnnnnnnnnnnnnnnnnnnnnnnnnnnnnnnnnnnnnnnnnnnnnnnnnnggcacgagccannnnnnnnnnnnnnnnnnnnnnnnnnnnnnnnnnnnnnnnnnnnnnnnnnnnnnnnnnnnnnnnnnnnnnnnnnnnnnnnnnnnnnnnnnnnnnnnnnnnnnnnnnnnnnnnnnnnnnnnnnnnnnnnnnnnnnnnnnnnnnnnnnnnnnnnnnnnnnnnnnnnnnnnnnnnnnnnnnnnntactgcagttgttnnnnnnnnnnnnnnnnnnnnnnnnnnnnnnnnnnnnnntgagacaacatcttccagcaggttaataactacaactttttttttttttt

SEQ ID NO: 123 - DNA, 4502 bp, Homo sapiens
  misc_feature (1)...(4502): n = a,t,c or g
gaagagatagcagaagaggaagaaactgttttccccaaagctaaacaagttaaaaagaaagcagagccttctgaagttgacatgaattctcctaaatccaaaaaggcaaaaaagaaagaggagccatctcaaaatgacatttctcctaaaaccaaaagtttgagaaagaaaaaggagcccattgaaaagaaagtggtttcttctaaaaccaaaaaagtgacaaaaaatgaggagccttctgaggaagaaatagatgctcctaagcccaagaagatgaagaaagaaaaggaaatgaatggagaaactagagagaaaagccccaaactgaagaatggatttcctcatcctgaaccggactgtaaccccagtgaagctgccagtgaagaaagtaacagtgagatagagcaggaaatacctgtggaacaaaaagaaggcgctttctctaattttcccatatctgaagaaactattaaacttctcaaaggccgaggagtgaccttcctatttcctatacaagcaaagacattccatcatgtttacagcgggaaggacttaattgcacaggcacggacaggaactgggaagacattctcctttgccatccctttgattgagaaacttcatggggaactgcaagacaggaagagaggccgtgcccctcaggtactggttcttgcacctacaagagagttggcaaatcaagtaagcaaagacttcagtgacatcacaaaaaagctgtcagtggcttgtttttatggtggaactccctatggaggtcaatttgaacgcatgaggaatgggattgatatcctggttggaacaccaggtcgtatcaaagaccacatacagaatggcaaactagatctcaccaaacttaagcatgttgtcctggatgaagtggaccagatgttggatatgggatttgctgatcaagtggaagagattttaagtgtggcatacaagaaagattctgaagacaatccccaaacattgcttttttctgcaacttgccctcattgggtatttaatgttgccaagaaatacatgaaatctacatatgaacaggtggacctgattggtaaaaagactcagaaaacggcaataactgtggagcatctggctattaagtgccactggactcagagggcagcagttattggggatgtcatccgagtatatagtggtcatcaaggacgcactatcatcttttgtgaaaccaagaaagaagcccaggagctgtcccagaattcagctataaagcaggatgtcagtccttgcatggagacattccacagaagcaaagggaaatcaccctgaaaggttttagaaatggtagttttggagttttggtggcaaccaatgttgctgcacgtgggttagacatccctgaggttgatttggttatacaaagctctccaccaaaggatgtagagtcctacattcatcgatccgggcggacaggcagagctggaaggacgggggtgtgcatctgcttttatcagcacaaggaagaatatcagttagtacaagtggagcaaaaagcgggaattaagttcaaacgaataggtgttccttctgcaacagaaataataaaagcttccagcaaagatgccatcaggcttttggattccgtgcctcccactgccattagtcacttcaaacaatcagctgagaagctgatagaggagaagggagctgtggaagctctggcagcagcactggcccatatttcaggtgccacgtccgtagaccagcgctccttgatcaactcaaatgtgggttttgtgaccatgatcttgcagtgctcaattgaaatgccaaatattagttatgcttggaaagaacttaaagaagcagctgggcgaaggagattgattccaaagtgaagggaatggtttttctcaaaggaaagctgggtgtttgctttgatgtacctaccgcatcagtaacagaaatacaggagaaatgggcatgattcacgacgctggcagctctctgtggccacagagcaaccagaactggaaggaccacgggaaggatatggaggcttcaggggacagcgggaaggcagtcgaggcttcaggggacagcgggacggaaacagaagattcagaggacagcgggaaggcagtagaggcccgagaggacagcgatcaggaggtggcaacaaaagtaacagatcccaaaacaaaggccagaagcggagtttcagtaaagcatttggtcaataattagaaatagaagatttatatagcaaaaagagaatgatgtttggcaatatagaactgaacattatttttcatgcaaagttaaaagcacattgtgcctccttttgaccacttgccaagtccctgtctctttcagacacagacaagcttcatttaaattatttcatctgatcattatcatttataactttattgttacttcttcatcagtttttccttttgaaaggtgtatgaattcattacatttttattctaatgtattatctgtagattagaagataaaatcaagcatgtatctgcctatactttgtgagttcacctgtctttatactcaaaagtgtcccttaatagtgtccttccctgaaataaatacctaagggagtgtaaccngtctctggaggaccactttgagcctttggaagttaaggtttcctcagccacctgccgaacagtttctcatgtggtcctattatttgtctactgagacttaatactgagcaatgttttgaaacaagatttcaaactaatctgggttgtaatacagtttataccagtgtatgctctagacttggaagatgtagtatgtttgatgtggattacctatacttatgttcgttttgatacatttttagcttctcattataaggtgattcatgctttagtgaattcttatagatgatatataaaagtacattttaatagaagccagggtttaaggaatttcacatgtataaggtggctccatagctttatttgtaagtaggctggataaatggtgcttaaatggtaatgtactccacttcttcccattggaagattaacattatttaccaagaaggacttaagggagtaaggggcgcagattagcattgctcaagagtatgtaaaaaaaaaaaaaaaaaaaagaaccaaaccactggaaataatcaaatgcaaaaaggtaacaaattcataactggaaagcaaagagaagaacaagtatgatttggatgataaagcattgttttaatggtgaaaacttcacagatcactaatgtttctagaggttaacttcaagtgggcaagctggggtttttaggtagtcagtggcctagttcctaaagccacagtataggatctgttaaactgaatgtctgttgaaagtttgttttagctgcttggaggcttccttttaagacaaactgtatgtgattaagttgttttgagggaactgaagaacctgatgtagcccctgggccagataactgcctgatttctcaggatattatttctctgggaaacattctacatagcacaggagcttaagagtgggcattatcttctcgccttaatttccagagattatttctgtactgagaatcctggaactactatgctaggaaatttaaagctgcatggtctgtcttgttttcatttaattattgtgaatacctagaatctttcttggtcctgatttctcttgcttaatccagtctttatctctaactgccccttatttgatcaccatgtactaggagctctgatagccagctcagctcctaatccttgaggcaacattctttttctatttgaacttcagttctgtccttgaatcccgactaggatatttcttgccctctgggtctcaggaattctcttgggcttttattccttgatccacttgccagttttatcactttacccttgttcctcatggcttcccatcaagccatgggtattaggtgacagtgtaatttattagattctggttttgcccaaatactgggcatgctttaataataactgaaccatttcattatttggataggcatgggtaccttatcaagcagattaaaaggatatggtacccgtcctttagaaaagaacagctaaaaccttgttgtggattatggatttagcctaaagaaaaataatctggcataaattaagagtaagagagaagattaatagaaatttcacttcacataacttaaaacatggctatttcaataaaggactaaagtttctcctggatcccagaattcaacctgtatttataaatgtataatgtatttagctactttttggtttaaatgaacttgttgggttagcttggtaaatgttataatttttactattttctacaaagaaaatattttctaatttaagttggagctatctgtgcagcagtttctctacagttgtgcataaatgtttttactataaaatgagctaatgtataaaatactgctgtataccataataaagatagtaatacttgaaaaaaaaaaaaaa

SEQ ID NO: 124 - DNA, 460 bp, Homo sapiens
gatggcctagtaagtatataaaagggtaacgcaaatattaatttaataataaacatagatagcatttgaggtttggttatttcctttacatagtaaaagagtgcaactgattttatacatagttttaagaaacaacctattactaacataaaatgtatttattttcatttctggtaaatatctatggaaggaaaatgactagcagtctcagcgaagaaatgttgacttgtttatagccagaaatttctggcttgtaatatagtgtttgctaccaaaacttttaaaactaagcctttacatttggtaatttctaatatcttcttaaagaacatgtgtatacagtacctttatagtatgtaaatattagcaccatgatataaaaaatagaggatgtattgaaggaaggaacatttcaatcaaatgggcagggaattaaacaaggtaagggaaattcttccaa

SEQ ID NO: 125 - DNA, 388 bp, Homo sapiens
  misc_feature (1)...(388): n = a,t,c or g
ttgnaaaccnnnnnnnnnnnnnnnnnnnnnnnnnnnnnnnnnnnnnnnnnnnnnnnnnnnnnnnnnnnnnnnnnnggcacgagctggggctagaggaacgtgagggaacaaggtacagtgtaatggttagtcttatgtgtccaggcatggctagactatcacagtcaattacttaatcaaacactaatgcaggaattttgtagatattccttgaaggaattttgtagatattttgtatggttaacacctataatctcnnnnnnnnnnnnnnnnnnnnnnnnnnnnnnnnnnnnnnnnnnnnnnnnnnnnnnnnnnagcttaagagaaaaaataggttttctagagaggaaatgtttgcctcaaggctgcaacataaagtcctaggctg

SEQ ID NO: 126 - DNA, 411 bp, Homo sapiens
  misc_feature (1)...(411): n = a,t,c or g
aaacccnttttgatancncttgacnnnnnnnnnnnnnnnnnnnnnnnnnnnnnnnnnnnnnnnnnnnnnnnnnnnnnnnnnnggcacgagctctaaagcttgccctctgaagactctgatctcattaccccaaacccctattgtccataaaacagatcaggaatgagaattcagcttttgatcttaccttgtaagaaatatggaccgagacctggtatgaaagacatttgttttaaagcgtcatagaatctcatgtttagaatgagcttaaaaaccaactgctgttgaaagtcaggagnnnnnnnnnnnnnnnnnnnnnnnnnnnnnnnnnnnnnnnnnnnnnnnnnnnnnnnnnnnnnnnnnnnnnnnnnnnnnnnnnnnnnnnnnnnnnnnnnnnnnnnncaaacccca

SEQ ID NO: 127 - DNA, 412 bp, Homo sapiens
  misc_feature (1)...(412): n = a,t,c or g
gggaagaatacaggaacagaaatttttatgaactgagccctcacatctttgccctttcggatgaagcatacagatccctacgagatcaagataaggaccaatgtattctcattactggggaaagtggagcaggaaaaacagaggccagtaagcttgtcatgtcctatgtggcagctgtttgtggaaaaggagcagaagttaatcaagttaaagaacagcttttacagtccaacccggtcctggaagcttttggaaatgccaaaactgtaaggaatgacaactcctctagatttggcaaatatatggatattgaatttgactttaaaggcgatccactaggaggagtaataagtaactatcttttagagaaatctcgggttggtaaacagccnagaagtgaaagaaacttcct

SEQ ID NO: 128 - DNA, 961 bp, Homo sapiens
  misc_feature (1)...(961): n = a,t,c or g
gagccaccactcctagccttaatgcatattcttaaatatacaaaggtagatttgttatgaaaattgctttggggctctaataacctaccttttaagaatgagaaactgctgggcttaagggagttcagtatgaatcaagattgaaccattcaaatgtggctgtgatttctgcatatatcatagatgggatccttctgagaatactggaatagggaattaggacaccaagccaattcagctgtgaaccttattcttgtacttttctttcttgctggtaattttatggagcaggttaagaaggctgctctgtgttaggataaactgtataccaataatgttgacaacctgtaatgagtgttgcattttacttcttgtatcttttccttcctaccttgatgccagtaatctataagggatctttatagtttgaatgtatttgaataacttcagtatactttagttctacttttttatttgactcacaaccattcttaggtctcaagtattcccatgtgttttaaaagcctgaagtcagtgagatgaaattcaacatcaagaatttgaagtaacttgtaaggaaaaataatataaagataccattgggggcaaggtcgcacgcctgtaatcctcagcactttggggaggctgagggtggaagggatcacttgaagcccagagtttgagacnnnnnnnnnnnnnnnnnnnnnnnnnnnnnnnnnnnnnnnnnnnnnnnnnnnnnnnnnnnnnnnnnnnnnnnnnnnnnnnnnnnnnnnnnnnnnnnnnnnnnnnnnnnnnnnnnnnnnnnnnnnnnnnnnnnnnnnnnnnnnnnnnnnnnnnnnnnnnnnnnnnnnnnnnnnnnnnnnnnnnnnnnaaagaaaaagaaaacattacataatttggctagagcataataatttgattttctggtttttgaaaatttgagttgcaataaaaggatatt

SEQ ID NO: 129 - DNA, 236 bp, Homo sapiens
  misc_feature (1)...(236): n = a,t,c or g
ccagatcaattttttaaactaaaacaagataataaatcatttaatttaggctaaaacagggttattcagtttctttttatttaaggctcgtttggaacacatggattttggtgttatattatctcaatatggttatgaattggtcttaattccctgcgtgcaagatgatcatgtatgnttctgctgagtttgctgcctatactggggtaaaccatcagatccgggttatntaacct

SEQ ID NO: 130 - DNA, 1206 bp, Homo sapiens
  misc_feature (1)...(1206): n = a,t,c or g
tgtttttttttttttttttctaattgcatcactttatttcaccgacctccactctggctcccaccccacaagcctcagagcaggaaacaagcttggctgagatgcctcaggcctggtaacctgaggtgtagagcacccagaaggaagggtaaaagcagggggcaaagcggtggccctccctttctgggggtcacttctgggctggggccagctgaaacctgtgtccaagtagctttcagggctggccacaccctaagccttgcaaaagggcctcctgcaagggctggcccatggggtccccaccttcccagccagtgaggttagcatggttaggagtccacatgtgtgcaagtgcttgtgtggaggctcatgtatgcatgtgtgtatatgcaaagctgcacatgacaatgtgcatgccagtccagagttagatgtacctatgcagttgccctcaagcgaagggtcatatttggaaacaaggatggctctaaacatgtaagcgtgcatgtgggcatgtatgtatctggggcctaaggaggtggggaagtgggtgttggggtaagggctggccttcagggcatttgcagaaggaggagtgggtgggagggaaaggctgggcagagcaggggaaggagtgaaagcccaggcaggaaagtggaagaacaggagaagctcatgtaatggattaccctccacaggattatgttccttgattcctgagagttttttctcttgattttaccccctcagtctatcactgcaagagaaagaggtagaaaagacaaacagaccacaaaagacaagaacccagacatatagacagacgcacctgttgcatgtgcatgagccagagcctgggagagaagagagagcgtgcaagagagagctcagagcaggcaggcagcccaccccctgcagcagtgctgggcttcactggagcccctgcaggaagtccagcagccctgtatgccactcctctggtttgtccaggtaacaggggtgccccgcccccttcatgatcagcacccggtggttgggcagctgcttcaggtgctcaaagctggtctgacccatggggtcctggtctccatatacaatcagagctggagtcttcacactggcatagttggcagcattgattttgtcagtgcagatgggggccactggcaacaaagcccgggagctgggagccagggccgngtcgac

SEQ ID NO: 131 - DNA, 490 bp, Homo sapiens
gttggtttggttcatggtctcaataatcttgtcctttacctcagccatttacttccataccctagaacttgtttttaaaaattgataacccttccataatctcttaattccatgtgttatactttaaatatggtacaaggccaccataactagacttaggtcaacatggtgacccccaaacctttgtgaattctacatctcatttgatggaaactgcaatttctaaggcaaaatttaacattcatccttgatcaaatgcgtcaggaaaacgtactaagtaccttcattgtaaggtatggtcaggtactttatcagaaaaagtaaatataaggacagaggtcacgatcagttggcatatatgttatcttggatcttacaatgtcttactcagttgcccaggctggaatacagtgccatagtcatagctctgtaacttcaacctactggactcaagcaataatcctacctgcttcagcctccttagtagcaa

SEQ ID NO: 132 - DNA, 423 bp, Homo sapiens
caaggtcagaggagactatatattccatggctgccatctaagactaggaataggaatatctgaaaacagcatttctaagggtggtaaccacaggtcgattttaatacgagtcctttttcttgtagaggtaagtaaaatcttcctgacaaggtagtcctcttttcacggcacagacaatgggctttctgtttatgaggggtgagaagtgatgtttgttactatgttctccagcaagtaaacattcctctgctcacctcccaacaagactaacagtctttttagaagtaaatatattcaagacaaacgagaaaatcctggctacccaagtcgagtatatacaggaatacaaatcggtaaccagcagctgttcctcaggttgtgactcactgagcaccacttgtcctggaggctggatgatggagg

SEQ ID NO: 133 - DNA, 638 bp, Homo sapiens
ttttttttgaggttgatcaaaaacctttattctggtcctcatcattcaggaagccacttatgcagaacactttcttcatctctgctctaagcagcagcagctgcatccaggcttgatatggaagacagacagaaatagtggaagaccttgcagagaagagctaattgatgagatctctgcttatcccggcataggtgaaggcagaacaggaagagtgtgtgtaagtgcaaagactccgttcttcaaagctgaggcctgtgcagaggggtgaactgaaggcttcagatgaaggctcacaaaactgccccgctcggcaatcaatctaaagtaccttccagaaaagcaaattcatccacagcttctattgcattatccaagtctctcctctgaagggttttcctttttccctgctgagcgcaacagtaggcatcttttgcaatggtctccacaaacagttccgcggctcgtgccagaatgaagatggcttcctgtcccgctagcgtcacgtcgggatctgccttcaccaaggccttcactcgcgccagaggcaacctcgagagacgaagcccaggcacactcgttggggcctggggctgcgagccgctgcctccccagcaggtacctcctcctctcggggc

SEQ ID NO: 134 - DNA, 480 bp, Homo sapiens
tttttatttttttttttttttggatttgaagaaacctttatagatatagattccattttacaagaagggaaaattgaggcctggagcagaaggaagcagtggggtagagtcagaaccagcatccttaagccgggcagacttggccttagacagacatgccttacttaggtccagcagatgctaccaggaaggtatggctggcagtacctgcgtctgagctcaggacttcagaccaagatggaagtcccttagaccaataacataaaaatcactttttaactcaggtgctgtgggtagggagcaagggcagctatactgtcctttcagaagctctcctgggctgtggaaagtgcccacgagcctggcagatcacggaggaaggaggcagaagttccaggcccagaacctgggtcccaggctgcattcagagaggattccttgaggccctggcagccaggaaccctgttttatgtgccccaa

SEQ ID NO: 135 - DNA, 4077 bp, Homo sapiens
  misc_feature (1)...(4077): n = a,t,c or g
ggggtagaatccgccaagctttgagagaaggctgtgactgctgtgctctgggcgccagctcgctccagggagtgatgggaatcctgtcattcttacctgtccttgccactgagagtgactgggctgactgcaagtccccccagccttggggtcatatgcttctgtggacagctgtgctattcctggctcctgttgctgggacacctgcagctcccccaaaggctgtgctgaaactcgagccccagtggatcaacgtgctccagggaggactctgtgactctgacatgccgggggactcacagccctgaggagcgactccattcagtggttccacaatggggaatctcattcccacccacacgcagcccagctacaggttcaaggccaacaacaattgacagcggggagttacacgtgccagactggccagaccagcctcagcgaccctgtgcatctgactgtgctttccggtcagtggaggaaggccccagggtggacctgggagggccaggacggatgaaatctgctttcaggcagaggtttgcaggaaaggggggtggcctgcttactgggaagtatcgctgtgagttgcctcagcacatatcagtggttgtttttgcctcagttctgattgaacagaagaaggtttcaaggccaaaaacaggcagccaagtgtgagagaagcagaaggaaatccctactgcataaaacccatttccattttaatggcagaattgaaaagcacagaccacaactgaatcctagccctggaaatgactcactatacaacatgatgaattcatttaacccttgagtttccatttcttcacctgctccgtggggcactaacgcctccctcagaggcttctggtgagaatcagtgtttccctgcccccgccccgccctccatgccccttctccacgttctcactgtgctaggtgctcttctctgtctttctcttccaccagcctgtgggaaacctgagatgaaagtcgtgtcttacccatctttgtatttccagcatctgaaactgggcagagcttaataaatattttgctggagaggttgatgatcttacaaagctcccattgaaaggtggctctctgtaaagcaaagttacaatgagattgtgatgaacattgtccttgtggcttttcacttagtcccctcccttcacctgaagagcaaattttcctcaaaagtacacagcaaacgaatgacccactggtgacactgttgcctttagaccctgctggaaagaagctccacatttattaacattcccgaagtaaatttatcaggtagcattcatcaggtaacatttgttgcacattcatgacttttctactgtccacaaaggcatatgtccttatcatatgcggactcctcggtcacactggattcttccttccctcctcgacatggaagagatggcatcttagggtctcttgtgttcttcctgcagaggcctgtcgggcaggaaaaggctgcagctgccttcctgggagaaggaggagatgagtgtatcctgaacacctattatgtgctaggggctattgtagatacatgacactatcatgctcattttcacgaatgaggaaactgaggctcagaagacttaaattatttgcccaagagttataaatgacagagccagcattagagtccaggactgtctgatttcagacctaagctgttccctctgcacatcgtgtcccaccagtaaggaagatctgggtctcagagctgagccaagacctcccgggtcctctgcggttttttgtgtctttcagagtggctggtgctccagacccctcacctggagttccaggagggagaaaccatcgtgctgaggtgccacagctggaaggacaagcctctggtcaaggtcacattcttccagaatggaaaatccaagaaattttcccgttcggatcccaacttctccatcccacaagcaaaccacagtcacagtggtgattaccactgcacaggaaacataggctacacgctgtactcatccaagcctgtgaccatcactgtccaagctcccagctcttcaccgatggggatcattgtggctgtggtcactgggattgctgtagcggccattgttgctgctgtagtggccttgatctactgcaggaaaaagcggatttcagccaattccactgatcctgtgaaggctgcccaatttgagatgctttcctgcagccacctggacgtcaaatgattgccatcagaaagagacaacttgaagaaaccaacaatgactatgaaacagctgacggcggctacatgactctgaaccccagggcacctactgacgatgataaaaacatctacctgactcttcctcccaacgaccatgtcaacagtaataactaaagagtaacgttatgccatgtggtcacactctcagcttgctgagtggatgacaaaaagaggggaattgttaaaggaaaatttaaatggagactggaaaaattcctgagcaaacaaaaccacctggcccttagaaatagctttaactttgcttaaactacaaacacaagcaaaacttcacggggtcatactacatacaagcataagcaaaacttaacttggatcatttctggtaaatgcttatgttagaaataagacaaccccagccaatcacaagcagcctactaacatataattaggtgactagggactttctaagaagatacctacccccaaaaaacaattatgtaattgaaaaccaaccgattgcctttattttgcttccacattttcccaataaatacttgcctgtgacattttgccactggaacactaaacttcatgaattgcgcctcagatttttcctttaacatcnnnnnnnnnnnnnnnnnnnnnnnnnnnnnnnnnnnnnnnnnnnnnnnnnnnnnnnnnnnnnnnnnnnnnnnnnnnnnnnnnnnnnnnnnnnnnnnnnnnnnnnnnnnnnnnnnnnnnnnnnnnnnnnnnnnnnnnnnnnnnnnnnnnnnnnnnnnnnnnnnnnnnnnnnnnnnnnnnnnnnnnnnnnnnnnnnnnnnnnnnnnnnnnnnnnnnnnnnnnnnnnnnnnnnnnnnnnnnnnnnnnnnnnnnnnnnnnnnnnnnnnnnnnnnnngatgaccagcattcagccccaatgttccagcctctttaacatcttctttcctatgccctctctgtgggatccctactgctggtttctgccttctccatgctgagaacaaatcacctattcactgcttatgcagtcggaagctccagaagaacaaagagcccaattaccagaaccacattaagtctccattgttttgccttgggatttgagaagagaattagagaggtgggcatctggtatttcctgggtctaaattccccttgaggaagacgaagggatgctgcagttccaaaagagaaggactcttccagagtcatctacctgagtcccaaagctccctgtcctgaaagccacagacaatatggtcccaaatgactgactgcaccttctgtgcctcagccgttcttgacatcaagaatcttctgttccacatccacacagccaatacaattagtcaaaccactgttattaacagatgtagcaacatgagaaacgcttatgttacaggttacatgagagcaatcatgtaagtctatatgacttcagaaatgttaaaatagactaacctctaacaacaaattaaaagtgattgtttcaaggtgatgcaattattgatgacctattttatttttctataatgatcatatattacctttgtaataaaacattataaccaaaacattctgtttaccttttcagggctgtattgattggggtgtagactgaactatccggggtctgtttcttttcggtgatgaaagtcttgagaaggtagtaatggataagatgtgagggagaggagagagggagatttggagtgtagggtgagtgcccctcttcttagaactgaatactcttcttctaatgaacttgtattcttgtttccatgtcttcttccctttccttctatagcaaataaagcattcactttgttttggaaaaaaaa

SEQ ID NO: 136 - DNA, 541 bp, Homo sapiens
gggaactgctggacatgggcagtgggcagctgctggagaggaaggtcctaagtacagacagggtacatctgctagaaccgccagcccccggcatggaggatgaggaagagctggagacccgagggaatcttcgtctgctttcagccttgggtctgttttgtgtgggctgggaagccccacagggtgttgagttgccttcagccaaggatctggtgtttgaggaggcctgcgggtactaccagcggcggagcctgcggggtgcccagctcactccagaagaactgagacacagcagcacattccgggcacctcaggctctggcctccatcctccagggccacctgcccccatctgcactgctgaccatgttgaggaccgagcttcgggattaccgaggcttagaacagctgaaggcccagctggtggctggggatgatgaggaggctggttggactgagctggcggagcaggaagtggcacgcctgctgaggactgagttgataggagaccagctagcccagctcaacaccgttttccaagc

SEQ ID NO: 137 - DNA, 519 bp, Homo sapiens
gccgaagcctccagctatgctggtgaggggtatggggcagcccaggccagctcggaaacagacctcctcaacagattcatcctgctaaagccaaagcccagccagggggacagcagtgaggccaagaccccatcccagtgaccacagtgctggcgagcaccgatgactgctgggggctgcctgctgcggggctggctgcagtgtaccgtggacagcctcagggggctgtcggccaagagcctggagaaagggagcaagctgccccctccttgcccccaaggatgaggctggactgaggcaaagggctggccacaccacctgagcatgtgtgaggggttggagctaccgtgggactatatactgttaatgattttaatatatatggcttatgacatactctgtatcaatgagatcccctcaccctcaccccatccttccccaccaatacacacaaattttttaatcccatgaccaggccacggtcaaggctgtttttgagtatgagtgcagtcgtgtcca

SEQ ID NO: 138 - DNA, 597 bp, Homo sapiens
aaaccaccttattccagagcagcaatttagacgacgtagttaggagtttgtagggagatgtttaaccattaaggaattttccctattaaaatgaagatgaaaaaggggaatccctctgacttccacgattataggcatcagtgaccaaattttaacctggaaaaggcattcatggatcagttcatgctcctgggcagaattcaatattgaacatgattcctagctattgatttggtatctgttctgcagaaatgtttgaatttctcaaactcaatccaaagccattgcctgaagcaagcttcctatgtcagagactaagcacagatggtttccatcaacacacgtgatcattagtgctctccacaggtcacaggagagcaggactgcgctgggacacagggaatatcgaaatgaaaatctaggttagtgcatagttagtgctctcagtattccctggctcagtgctcctgtgccacctccagcggggccttcacgtctgctgcgcacttgtccggggtgggtttctttgagtaatcccgctctccaaaaatcgtgcttcctattcggacatttgtagatcctacttcaaccgcatgc

SEQ ID NO: 139 - DNA, 1068 bp, Homo sapiens
tttttttcagcagtgcaaaaattttatttctgtttcccctccccaccactttacaagatgtaaaattttacttaatccaccgtattctctttttttaattatctgttatcagtcatgtcaaatgtgaggaaaaaaacactaatcaattaaaaatatccgtccctcttccccactgctacagcaaatttaggataaatctacagcattcacttactttagctggttctgatactgaggaatacttttttatttgagaatcaacacctaaagacttggctaattgtacagcatttgaatcatcactgataagtgttccaagagccacaagaagtctaaaagtggcttctaggtcttgtactacttccaagattgtgctaattagtgacaaacattgggctttcccttcaatgttatggtctttatgaaaacaaacagaatagttcagggccaatgtagccagagcaatgtgaatgttcttattgctccctgatttcagttctattgcatgggacatcagtgattccctctgggacatcatgagtttttgtcctgcctggccaacaaaacaattgcaaaaagtcctgagagcaagcagctggtttgctggctttcctttagggttcagaagattgataagatgactgctgaactgagccccttccttttcattgcagaagttctcattcacactggggtgtttaattgacaaccgaagaatgtcaagtgcaggaaagacaatatcttcaggacagttaatagctttccacaaaatctgaagttgctggactgtgggtttttctgaagaactattacatattagagacagtatcttctcaagaagtatcaagtcatcctcagttaacttcttctcttcaggtgcagttccattaagttccttcagtttacctaatatttgtgtagggtttgcttggtcaaatgtgacagcctcttttttagggaaataaatattcattgttttagatgcagctgatcggtaggcactattccctgtaaatggatcaactccggccatggtagttcccatacttgcagaacctggtacataac

SEQ ID NO: 140 - DNA, 624 bp, Homo sapiens
  misc_feature (1)...(624): n = a,t,c or g
gtttttttgatagcgacagggtcttggccatattgcccagctggtcccaaacttctgggctcaagtagctcgcccaccctggcttcccaaggngctaggattacagatgtgagccactactcgtcaagaaccctatgtttttccattattcttgtttgaggctctccacaaatggtctccagcttgccttcctggctttgttttttttgataaagacacatattcctctgagttgctttattcaccttttccataccacactttgttccctacttcctttatcttgattcctgtcaattccccttcatctctgttttctagctccagtactctgttggggcatcctgcctgactcaggtaccagtccacttttaaagcttttcttgacccacttacgtctatagtgttctttttactgaatccctggggcttgccacagattatcttatagttgtggattttgtatatgtatctttcctaccttaggagggggccttaagggtaagtcccagactgatttacctgtttttccccaaatgttaaccatttgaaagaaagaactaaatggatatttctcaaatggcttttgatagatacatgtacaatacatctgttgtcatacct

SEQ ID NO: 141 - DNA, 420 bp, Homo sapiens
ggaccttgaggctgcatttctaaaagtgcactgaatattctttttaaaaattacttgaaagctgcttttagggctgtgtgacatggagtgcagtttgacagctgcaaaagtacaagttgtcaagttgttcattgagaagtgagagtggggaattgaaccttcagtctgttcctaaacccatcattgtggattgtttggctgcctgatccagagttctttctatttgttgaaacttaacgtcacctttaaaaatctgtccacacaagatggcaccagcagccactctggcctttgatgtggtggcagtggccctcactgacccaaaatttactaatgcaactgctgctttgccgcacagaactggcaaaggcttgtttctcatgactctttgatgactctgctttaggaataggggtgggt

SEQ ID NO: 142 - DNA, 798 bp, Homo sapiens
tgagaattttaattttactcttgagctttttcatgtcctttggagtaacacagcttagattgctcctagaccatctttggggctatgtatcctgcaacatttgagcagagccaatagaggaacccaaccagccctcagccatacagtccagcaccctaaagcgccacacacacaaatccagtgttctgccacttctaggtttatttcatcctcgcatgcataatgcagtcaagaggaccacttttcatgccaaagcaaaatttatacttttggataaaaatagaatgatggcaattttatcatttttattattataaccattattactgtcacaacaggaaaccacggagtcctggccaggcaccctaagcatcttacatgcgttacattacttaatggtttacaacaaaatattagtcagaaacgttcattaaagataaaacacagccaaagaatctgccgggaattaactgtgggctactcgcatggtactgtgaatagcacaccttctgcttttatgagctgaagggcaagtaagccttctccttaccatgcaaaaatgcggacacctggggcaggacaccaggctgctccccgacattaagacaatgaaacatgagggctgatgctctatagaagcaactgatgcagaggttggtgtacataacctgattacagtatccccttggtccggggccttggatcaaaagggttaaatggttcacaataatactgtaaatggtatttttttctaaaaatttactgtatctagtgtcataataaaactgtttagtaaaa

SEQ ID NO: 143 - DNA, 556 bp, Homo sapiens
gtgagttgaccagagaaggatgagagaattgccaagttgtactgaacgccaagctgagaatggtgattctgaagatagaatgcgtttgcaatggctgctactgtgaacttggaacttgatcccatttttttgaaagcactaggtttcttgcattcaaagagtaaagattctgctgaaaagctaaaagcactgcttgatgaatctttggctcggggcattgattccagttaccgtccatctcaaaaggatgtggagccacccaaaatttcaagcacaaaaaacatttccattaagcaagagcccaaaatatcatccagtcttccttctggtaataataatggcaaggtcctcacaactgaaaaggtaaagaaggaagctgaaaagagacctgctgataaaatgaaatcagacatcactgaaggagttgatattccaaagaaacctagattggagaaaccagaaacacagtcatctcccattactgttccaaagtagcaaggatttacctatggctgacctttccagttttgaggagaccagtgctgatgattttgcc

SEQ ID NO: 144 - DNA, 740 bp, Homo sapiens
atctaatgaaaacggatatattctgaatgtttttgttacctgaaatttatttttgagtaggttgaaaggaccaagatacttgagtgattaaaggactgtaagtgttctgcttatatgcaggagttacatgattttaaaagtcataataggggaagtagttttatcatctgattactcctattaacctaaaaagtatttctaacataacagattgagcagtggttttgttacacttaggcaagaatttattttcccattaaaatttgaaaaatacacttttctttgcttctacccttgcagtttcccttagttcccctaatttccaagtgatctgaactaaaattaatattacacttactaagaaactatttttgttaattatactgagcaaagtttgctccaaatgaaaagtcattacgaactatgtatagtacccaagaaaaggtcaaattgagtcagaagactcgtaagtaccacttttggcgctccagagataaaccttgtacacactgcagtagaacagtgagtagaaaatatgagctataaatagatattatttttagttttgatagctctgtgttgaaatacttttttaatgcagataaaaattatcaggaaattaaccttatggcacagaccaaatacttagtgcatggctgagtttctacaattcaaggagccaagaaaataggttcaagatggaatatagtacatgcatataaggcagatgcacacatgct

SEQ ID NO: 145 - DNA, 1238 bp, Homo sapiens
cacagtcaaagcaacagaaacaaaagcaggcaaatggagtcgttgggaatgaagctgcagtaaaggaagatgaagaagaagtttcagataagggcagtgattctgaagaagaagaaaccaatagagattcccaaagtgagaaagatgatggtagtgacagagactctgatagagagcaagatgaaaaacaaaacaaagatgatgaagcagagtggcaagaattacaacaaagcatacagcgaaaagagagagctctattggaaaccaaatcaaaaataacacatcctgtgtatagcctttactttcctgaggaaaaacaagaatggtggtggctttacattgcagataggaaggagcagacattaatatccatgccatatcatgtgtgtacgctgaaagatacagaggaggtagagctgaagtttcctgcaccaggcaagcctggaaattatcagtatactgtgtttctgagatcagactcctatatgggtttggatcagattaaaccattgaagttggaagttcatgaggctaagcctgtgccagaaaatcacccacagtgggatacagcaatagagggggatgaagaccaggaggacagtgagggctttgaagatagctttgaggaagaagaggaggaagaagaagatgatgactaagcagtactctgaatggaccacagtgtttgcacatatttgcaattttttgctgttttggaagtgtatcataaaccagaaacagtacagaactgatgttgagggaggtgtagtttttttactctagaaatgggtgcataatataactaggcagtggcggtgccttggtacaacctgaaaaatgttaaggcttattgaaacctttcaagtaggggatggtacatttatttcatctgcaaatgataataaatcctttgttattataactgtccagaagtgtgggctatgtattatctgatcagtctatggtcccagtaaaagtaaagatgcaggaaacacagtctgtaaatgagcgacttttctttgttcagctttagttttagcaaacaccacaaatatgttttaagtaacatcgctcaagtttaagtaacatcgctcaagttgataatctcttgataagctctgttgttgacattttgcagtgatacaacagctccactcatagatttaaacttttatttttacttatcttggtcataagttggcattctctcacattccacatgatatagagggctacgt

SEQ ID NO: 146 - DNA, 1441 bp, Homo sapiens
atctttgaaactcagaaatgccccacaccctgatgatgatgattcttgtagtatcaacagtgacccagaagccaagtgttttgctgtgcgttctctgggatgggtagagatggcagaagaggacctcgcccccggtaaaagtagtgttgcggtcaacaactgcatcaggcaactttcctactgcaaaaatgacatccgagacacagtcgggatttggggagaggggaaagacatgtacctgatcctggagaatgacatgctcagcctggtggaccccatggaccgcagcgtctggcactcgcagcccatcgtcagcatccgcgtgtggggcgtgggccgcgacaatggccgggattttgcttatgtagcaagagataaagatacaagaattttgaaatgtcatgtatttcgatgtgacacaccagcaaaagccattgccacaagtctccacgagatctgctccaagattatggctgaacggaagaatgccaaagcgctggcctgcagctccttacaggaaagggccaatgtgaacctcgatgtccctttgcaagtagattttccaacaccaaagactgagctggtccagaagttccacgtgcagtacttgggcatgttacctgtagacaaaccagtcggaatggatattttgaacagtgccatagaaaatcttatgacctcatccaacaaggaggactggctgtcagtgaacatgaacgtggctgatgccactgtgactgtcatcagtgaaaagaatgaagaggaagtcttagtggaatgtcgtgtgcgattcctgtccttcatgggtgttgggaaggacgtccacacatttgccttcatcatggacacggggaaccagcgctttgagtgccacgttttctggtgcgagcctaatgctggtaacgtgtctgaggcggtgcaggccgcctgcatgttacgatatcagaagtgcttggtagccaggccgccttctcagaaagttcgaccacctccaccgccagcagattcagtaaccagaagagtcacaaccaatgtaaaacgaggggtcttatccctcattgacactttgaaacagaaacgccctgtcaccgaaatgccatagctgcacatgcaaaaggactcggctatttacctgaagattgactagctacactaaagaaaatgaactccgccatccgaccttccatccagttgctgatgctttgtcttcagagaatttacccttaaccaagcagtgttagacaagcatgttctctcgtcttgccaccatcatgtgatatgaaaagaagcatgaataattttttttgctgtaagttacatcatgcgcagtggaaggtctttttcttattgtaaatattgtgaacattacttaacttcacacacacacagagaagagtgtggccccacccctcctagtgaactaacgctgcgtccttgggat

SEQ ID NO: 147 - DNA, 189 bp, Homo sapiens
gggctcccctgttttcccaaagcctctttggagaggaaggtgctctaaggctatgtgtggtatgtagtcgggtttctggggaagagaaggctttgaggctagagtgtctgtcccatcccccatcatttctaactagccccccagctctaggagttatctttctccgaaggccccaaatgattcagtctg

SEQ ID NO: 148 - DNA, 652 bp, Homo sapiens
ttttttttttttttttttggattgcaaaaatttattaaaattggagacactgttttaatcttcttgtgccatgagactccatcaggcagtctacaaagaccactgggaggctgaggatcacttgagcccagaagtttgaggctgtagtaagcttcaaaggccactgcactctagcttggggtgaggcaagaccctttcaaggcagtaagctgcatgcttgcttgttgtggtcattaaaaaccctagtttaggataacaggtctgccctgcatttcttcaatcatgaattctgagtcctttgcttctttaaaacttgcttccacacagtgtagtcaagccgactctccataccttttaaaaggtatgacaggaactgtcttcatgtccttacccaagcaagtcatccatggataaaaacgttaccaggagcagaaccattaagctggtccaggcaagttggactccaccatttcaacttccagctttctgtctaatgcctgtgtgccaatggcttgagttaggcttgctctttaggacttcagtagctattctcatccttccttggggacacaactgtccataaggtgctatccagagccacactgcatctgcacccagcaccatacctcacaggagtcgactcgtgccgaat

SEQ ID NO: 149 - DNA, 1107 bp, Homo sapiens
gaaggctttcgggagtgtgaggctgcatctgctggagcaaagggaaaccgtgggcttttccggccagatactcttgagctctgtgaccctgctcctgtcaccccaatttctccaagccagaggtagctttctcagagccccttggtggttctgtcctccaaatgctgctgttgggagcgggcttccagctcttcagtgggcagtgcacctcctcctaaatgcaggcacttgctagggaagagtgtgagctgggcgtcttctgtttcaccctgcctagcagttgtcaccattcacaagtggcattatttatgttgtgctgctgtccagctgctaagatcccttcatctgcacaagccctggctagatatgtgtgaatgtgtggcatcatttcacttcagccgcccaattccatctctcctctgcagccagattcactggctgatgctcactgctcactgtctatccccacgaaatttagttttatcagtagtcttaaagtgttgatctcaaacaagtacattagaaaaatcatgtttcttctctctcatcttacttttctcttctcagatttctcccttcctagaacattctctctgtttagcactaatgttcacctcgtattttttggaagtgcaaaaatctcaatttgtgtctgtttacagctctctctcctcactgctcacagcaaggggttctgtatcagtggatttcattttgtagctgctgagatgttaaggcaagcctcagcatctgcccccgctgggtgcacaatgctgcttcctcgaagagaagacacagagtccaagtggcaggacttgaggttggcttccactctgccttagaagttaattttccaaagtacattacaaatctctgaggccattaggggaaaaggaaggggtgtggtttgtctttgaaattacggttaatacttttagacagtaagtccggctggttgcagggctatttgccccgacagcatcagcctgtaacatttcttctctttcctttgtgccactgagtcgttccctggccagaggacataaatggtgctggtaggaggttatcagagtaaggaaggtagcagatataggtgcagggtgcctg

SEQ ID NO: 150 - DNA, 459 bp, Homo sapiens
  misc_feature (1)...(459): n = a,t,c or g
cccttgacnnnnnnnnnnnnnnnnnnnnnnnnnnnnnnnnnnnnnnnnnnnnnnnnnnnnnnnnnnggcacgagtgagaaatctgaaagaaaggtgataagaacattttatttatttatttaatgttatttatttatnnnnnnnnnnnnnnnnnnnnnnnnnnnnnnnnnnnnnnnnnnnnnnnnnnnnnnnnnnnnnnnnnnnnnnnnnnnnnnnnnnnnnnnnnnnnnnnnnnnnnnnnnnnnnnnnnnnnnnnnnnagaactacaggcatgccaccatgaccagctcttttttttttttnnnnnnnntataaaaagggggncncctacnggnagcaggggcacacncnnnnnnnnnnnnnnnnnnnnnnnnnnnnnnnnnnnnnnnnnnnnnnnnnnnnnnnnnnnnnnnnnnnnnnnnnnnnnnnnnannaancccttcctactaaaatncaaaa

SEQ ID NO: 151 - DNA, 341 bp, Homo sapiens
  misc_feature (1)...(341): n = a,t,c or g
tccaggggctaaaaagttaaacaacaacaataaaaaagctgaaactagagtagtatactagcagtgtgtttcctttgggggcatttggctgatagcagaagtagagcacaatcagggacaggtgacaggctgctctctacccaaagcagagagatagaattcatatccctgtaacctcccgggcacatgcttcaatgtcaatggggtgccattccatgggtaggttgagggtaaatgggtaccctgtgtttcaggggggtgatgttttcataggaataaagttaagtatttcccacttggaaattgtaccactcctggggtatttggnggaggcacccttg

SEQ ID NO: 152 - DNA, 875 bp, Homo sapiens
aaacccacgaggggacgcggccgaggagggtcgctgtccacccgggggcgtgggagtgaggtaccagattcagcccatttggccccgacgcctctgttctcggaatccgggtgctgcggattgaggtcccggttcctaacggtgggatcggtgtcctcgggatgagatttggcgtttcctcggggctttggtgggatcggtgtcctcaggatgagatttagggtttcctcggggctttcgggatcttcacctaatatccggactgcaagatggaggaaggcgggaacctaggaggcctgattaagatggtccatctactggtcttgtcaggtgcctggggcatgcaaatgtgggtgaccttcgtctcaggttcctgttttccgaagccttccccgacataccttcggactagtgcagagaaactcttccccttctacttccacatctccatgggctgtgccttcatcaacctctgcatcttggcttcacagcatgcttgggctcagctcacattctgggaggccagccagctttacctgctgttcctgagccttacgctggccactgtcaacgcccgctggctggaaccccgcaccacagctgccatgtgggccctgcaaaccgtggagaaggagcgaggcctgggtggggaggtaccaggcagccaccagggtcccgatccctaccgccagctgcgagagaaggaccccaagtacagtgctctccgccagaatttcttccgctaccatgggctgtcctctctttgcaatctgggctgcgtcctgagcaatgggctctgtctcgctggccttgccctggaaataaggagcctctagcatgggccctgcatgctaataaatgcttcttcagaaatg

SEQ ID NO: 153 - DNA, 1014 bp, Homo sapiens
taatcatagacagcactgtatttcagtaggaaatatgcaaggaggaggagaaacaactgtcttgctgagggctagacgtgtgctctgaagaatggtgttccattttcagaagaccacatgacacacataatttctctactcaaaaggaaagatgcgtaaagtatacacatccacacaaagatgaagaagctaagaatgaattcctaatgtagttatctgtaacaggcatatgtgggaacacctggtcaggacttactttccccatctttggataaggcaatataaaatcagatgaccaagttaactaaagtagttttgagctttgttctaactaaaacaaagtagtagttttacaatttttataatatacttaattgtactaaattaaatgttccataaagttcactgggaagagaaggttaagaggataattattttcaaatacctcagattttgacagaggattgcttgttaaggcactacacatcttctttggttaaatgattaactatttaaatcacttgaaaaaaagaggtaatacaaaatatacaagttgcattcttcttttcaaacacacacgattttcgtttttcaatttccagtactccagtgtctatatatctctgggacctttttaactcatcagaaagctgtatgggtagccatgatatttagatctaaaaatagagagcatccaactgaagaataatacaacaagtccaataccagccacacacattatctttcgctttccaatatccatgtcagaggtagcagcttcacataaaagcaccattcctaaggtaactccaccattaaacagaagaacaatgtgtgtttcagctacaaactgggcttgactgcttccatggatataattcacatgtcccgtgtggggattcttatgggcatatggtggtcctcttatatggttccacatttgaccagatgtcatagcaagcacaaaacacaaagctgcaaaagcccatccagttttattaaagagaaattcca

SEQ ID NO: 154 - DNA, 578 bp, Homo sapiens
ggctaactggtatcctccagagaagtgagttgttttacttctctttgaatgatttcacttccccttaattactctggttgagagcaaaaataaatttctgggcatcattccaaatactcacagaaagtgcttctatacccagccctttcatgtcccggggtagaaggtgtaagcaaacccacgggcagacacatcccacccattcctgccattccctgatctggaggtggaaccaaacctgttctaaacagtcactgactctgctctgtagccaaactggtattttggagcatcctttcttaaggcctatccttcaatgcctaattctaggatacaggtgggctttatatcctgaacctgaaaaataatgcccatttgggatcccttgaaaaggatattttttgttgtacttaacttactcctgcatctcacactagtcatggtattagcatttattgtgtccagtgtttaggaaccacccgcatccactccgtaatccactgtctcttctgtactcaagctgtaagcctttatcagtgaatctgaagcaataaaacatctcagggtttttctctgaa

SEQ ID NO: 155 - DNA, 1843 bp, Homo sapiens
gttcattcaagaagtatttattgataggtgctaggcaagatacaaagatgactcagacacagatcctgcccataaggagcttacagtctaataggggagagagaacacatacatggaatacatggtcagaactatgtttcagtaagatgaatctaacattgtgtataaagtaggctggagtaagaggttaagtgaagctgagagactactgaaattacataggtgaggaagaaagacgggaaagacttgaggtagaactgacaggacttagctgaagactggatgtggggaataacaaaaatggaagcagatgactcagactttagcatggatgatgtcatgaactgaaagaaggaacaagtttttgcaaagaaatgaaaatttcatataaaattcttctgcatagaaacaaactgtctgggatatactaggcacaatcaggaagaaatggctagttacccagaccaatggaagcacctcaaactggccagtgacttcctcccccttatatatccatccccccaaatttcccaacaattttctccactgaaatggtatagtgcctaaaatttattaaattcaaggtctatctccagacatggcctcccttgggaatgaaaacagaaatatattaagttattcaactcagtaagtttcatctaaagactctagttatgagtcactgtaccttctggtggaatacagagatgaactccctagtccttatcttctaggagcttacagtctagtaaagtagtaaaacagataatgtaattctaattctagactgaaggggtaagttatgaactatgagaaagacaaagtgctctagaacagtttcagaaatgaaggttggaacaggacctcaaacaagagggaaaatgtggaaagtagatgagaatggatttgttcctcactccaaattctggacagatcacgcccaaaacggggctactccccattcctgttgaaattttttcttaggaaaaaatatagctcttgtactgatcttttaaaaaattacttacatggcaagagatcagaggaaaggggggattgtagatctcagtggaccttcggggaagacagaaggcacttgaagccaaggaatcacaatgcctggcttatcgggaggaccctcagtgttttagcaaggctggagcatcacttccatgaagagtgggagaaataactcaaaagtaatattaagaccttgatataaacatggcattgccaggcactaaacagggtacacgcctaagaccaaattgctgccccctaggagcttacagttacaacaatacaaggtggaaaaagcaccacaatgtacagaatgcaaaatgctgaagtatttaggagaaattacagctgagtttcagctattaacacattaggatacccaatagctttctgcacagctagtagtaaacccatccctgaggggagcacaagttaatgtccttagacaacaagccctggtagagctgggccattaaagacagttcctaagaaaattgagaaaacaggggtatgaaaactacagaagcaactgggtgaacatacaaaaagtgataccttccctttttctcctgacaaactttaacagggctgcccttcctacagtgaatctaaactgatgatcaccatattacttctaaaagcagatttgggactctactaaccaattctctctgatcctttgtaaaatgaaggggttgtacaagtcacttcctagtcctttccagcactaacattctatgattcaaagaattctgagagtttctctgttccttttggtaataaccaaaatagaagaaaaaaatttaagtctgatgcttctcac

SEQ ID NO: 156 - DNA, 429 bp, Homo sapiens
gatgctgggccgggctcacatccactgagggtatagtgaccaagcatctaaaccagtcgttctcaaacttcggtgagtatcagaatcacctggaagggcttttacagattgctggccccaccccccagaatttctcatcaggagtgggcaagaccaatcatttgcatttctaacaagttcctaggagctgcagctgctggccctggaaccacactttgagaaccactgctttagaccaaacaccaaaggaagatgcagccaccctcctttacatgtcacaacgctcagggtccatgagtacctcaggctgtccagctgagctccacctgcagcagccgagattcccgactcgctccaccattggggggctagggagttgaaggcgtgttcaccatgggtcagcttcatggggccagccagggaaagcct

SEQ ID NO: 157 - DNA, 670 bp, Homo sapiens
gtgcccagctgcttttgacattttctttgggaggtttctggggtacaattagctgaaatctgaagtttggttttgcatggtcttgcccaagctgggtggttggtcattgtggccttctgatctggtgatcctaagaaacattctgaaaacatacccaaaaacacataaaaggcgtaccttaccatttaaaggttctttcagtaaaggcctatgagtaatttttcatggagggagcccattcttacgaagttttaaatggaccaacatatcattatctttaaattgtattattacgtggtcttttaatttttaaaaagctccatttttccccattatcaagataacatgttctagacagacaatttaggaaatgcatatgattatttttgttctaattttctgtaataccaccacatagagacagtagtttttaaaaactgtgtgatatttaatgtattgttttcatttcctttaagatgcaatttagagttttagccttgaactttagttttccttcctcttggagatttagtttgatgctaaagtgctatcttcttgtttcaacttttgcttaatttactccaacacttttagacagcaaattaggtaactttatactagtgttatctaacaatgttttgctaacttccattttaagatgttagctcac

SEQ ID NO: 158 - DNA, 433 bp, Homo sapiens
  misc_feature (1)...(433): n = a,t,c or g
tttgnanacnnnnnnnnnnnnnnnnnnnnnnnnnnnnnnnnnnnnnnnnnnnnnnnnnnnnnnnnnnnnnnnnnnnnnggcacgannnnnnnnnnnnnnnnnnnnnnnnnnnnnnnnnnnnnnnnnnnnnnnnnnnnnnnnnnnnnnnnnnnnnnnnnnnnnnnnnnnnnnnnnnnnnnnnnnnnnctgcgcctggctttatttttattttttatttttactctgccttgggagaatctagaaaacttttgccttttgtcccactcttcatccatgctttcagggctaccttgaattctttagcttttgtagacttttaggacccacatcaacttgttgttctctatctctagccccacaaatgttgaggtttctgctttctctagcctgttaagtgttggttactttttgccatgtactttttgtttcccaa

SEQ ID NO: 159 - DNA, 520 bp, Homo sapiens
gacttacactgacactgaccactctcacttctgctctttgtgcacaggagccattccttcctgagtgcctttgtcacagccacagcttcagtcagaggggtcagcatctgttggccttgacttgattttgcctatatgttgttaatgatgctttttaaaaactctgtaaagtcaggttatttccctcgctttatttctaggtaacaaacctgaatttggcaactggcatcataaacagaagcagtgcttcagctcccccaaccctccgacccatcatcagtcctagtggcccgacatggtctacacagtcagacccccaagctcccgagaatcactccagctctcctggaagcagtttcatataactgaactcaaacaacctcgctgaacaatgctcatttgggaagtgggaaggaaatttcctttatgtagttgagagatgtggctaaagataaaatccacgtagcttccggcaataatgtaagcagcttccaaattaaaaaagaaaccactgtattga

SEQ ID NO: 160 - DNA, 309 bp, Homo sapiens
gatttattgcttgctttgttcttggtcaagccttttcactttttggccatcagccattgcaaaacctccacaacaaagaagtggaaagtcatgcaatcagaaaagccataaactacagctggggccaggggaagagggaagttagctgaagactttgtaagcagaaacatcaggaaaccttctgacatgttaataaagatactctagagtcacatcttgtgtggaaactcaaatccgcattgttggggcggaagtcggagtcagtgactggccccagctgtcaccccgagccttcagataagacggtgg

SEQ ID NO: 161 - DNA, 720 bp, Homo sapiens
atttcggcacaggcgaagtatcacagggaatgttagagtgttttattaatttctttgtcagacaagtgtttaggaaactctcactccaggcctaatgctgtgctaggctctgcaaatgctaagagggggaagttactgtccctgcttccaaggagatcatggtctagtgggaaacccgacacgttcaggtaccttcagatgggcactcagaagagtaagcccttagttaatgtttaaagatgtttaaagatgtctgagactcataggtcaaagtcagatttcagttccaccttattagacctgcactgctaaggacgctgctttaggtaaggctgtgttcctaagtcaccagggtgttcaaacacaagtgctgggggcaatgtgggaatagccttcttttatttaggaagtaatgtgaagtcagtttcatgaatagatcttactttaatcattcattgaggttttttgcaagaatagagtacggtatatgaaggtgtttcctaatctccctgacaccaggaataatctagggctcattagagatgtcaaagatctgttctagtttcttaacctaaaacaagagtgttttagttccattttataggcggggagtctgagccaaacatgttatgtcactttccaagtctccatagcacagaagtcttctgtctccccatcctgactttcccagctcatagggactgtcaaaggcagcagctc

SEQ ID NO: 162 - DNA, 713 bp, Homo sapiens
ctaaatggaaggaattggaactgaaagggaaaggaaatggaaggaaggggaatttggaggagagaacacgcccacccttgggaagctgcctgtccccagaggagccccaccagggagcagctgccccctcatcagagacctgcagagtcaaccaagcacaggttagagtcccaggaccggaaaccaactgtgggctttctgtacttctcatagctttggagtctggctgtccatcaggaggtcccgagggctctctggggcctgaggctcccacaccagctctcccctggcctcaataaaaccaggtgcatgcctgttcttccatccacactccagggctgcccaccagctgacaggcaccatcaactggcagcaacagagcaggcgcaggtacaaagaaggcagctcactcctgctcttaggagatccaatcagatctgccctgtacagccatgtaggctgtgcgctgcataactccagggacatgagtcacacagacacaatgtgagtgtgctcccccgtcatgcaacatctggacacaactaacagagcatggtgaatacatgctgaattgcattcagtatggctgtgaactaggcctggggacaagaatgaattttacatggaaagaatttcctgtagcaggaacagaggggataacaacagcaataaataataataagaagaagctaccacttcttgagcatgtacca

SEQ ID NO: 163 - DNA, 1719 bp, Homo sapiens
gaggatggggaagagatagagccggagcatgagggcaggaaggtggtggttttcttcactcggaatggcaagatcattgggaagaaggatgctgttgttccttctggaggcttcttccccaccattggaatgctgagctgcggggagaaagtcaaagtagatctgcaccccttgagtggctagggcctcccctccagacctgctccttctccctgctcaccctctgctgggccaggcacccagttcctgacttcccagaggcttcgtttacccagcaggcccctggaggtgtgtagtcactctgcccccactgggctcaggcccctgtcacgcttctctgtgcccacgtttctgacctggtgctgccactgttgtcagtccctgggcctgagtccctggttggacaggaatggacccaaagaatggtgttggtatgtggggtggtcccactcgctttggtcagtgggcttctgggtccccctttccctcaccggccctgtgtgggtggagaggcgtgagcacgcctatctcagctgctattcgggcatgatgctttgtagagggtagagtagacagccccctcccctactcaccatggtatttctccttgaattcctctttcttgttttctttcctggttgtgtgaaccagttgctgctgtcatacccctggcagggccaggggacctgctctttggtcatctctgtcctttcactggctgctgccccaggaagactcctgttaggctctccatctttcccttgagagctggctccccaccccaacctgctcaggcaccacagaggatctaggtctctggctccccatacctgggacccacatgggtgggtgcctgttgcatgtttaagagagaggggctgtgaggtgacagggcactagggccttcactcctttctccccttccatcctttctttaccagtgccacccatgtccctagctcccgggtattggggctgaggctctggggcctgtttccctgccagcgtgagggcaagaccccagagccttagctgagcaagcccagaggggcagcgtggcccctccctccccttttcctgccccgtcccatgcctcagcttgctgcttgtgccagttgcctgtttcgcttcagtgtttgattctagcacttacatgtgtcctccccaccaagccctctatctccttctaatccttcaacccctggccccctccccgtaacagtgacttttccagggaggaagaggcagcaggagctgttggccttggtttgcacagagcgggtagggctgtagggaaagcgggtgagctgttgtgctgctgggcctccctttggccctcgcttcccaccctacgatgtatgaaatgtatgtacagaccagagatgtttatacagccgataaagatggagtttccgtatttatcagtatggccggaaccaggagcctttctagtccactgggctaggaacaggactgctggatgggggcagccgaaggcagcttgctcatggggagatgtggaccaatgttgggccagggatgggaatcatatgttccatgggcctggctacaggcctgagcacagatacgtcccctgggagatgaggctttgaccttcctgtgaataagtgttgactccaatttcggctaaagtttatagaaattctttattattagacaaaaatagactctcttttttcccctaaaaaaaaaaaaaaa

SEQ ID NO: 164 - DNA, 2408 bp, Homo sapiens
aattcggcacgagagaaaatatagcagatatggaaggtgcactggacattccagctacatcacacaccttgactggtccccagacaacaaatatataatgtctaactcgggagactatgaaatattgttctgggacattccaaatggctgcaaactagtcaggaatcgatcggattgtaaggacattgattggacgacatatacctgtgtgctaggatttcaactatttggtgtctggccagaaggatctgatgggacagatatcaatgcactggtgcgatcccacaatagaaaggtgatagctgttgccgatgacttttgtaaagtccatctgtttcagtatccctgctccaaagcaaagggctcccagtcacaagtacagtgcccacagcagccatgtcaccaatgtcagttttactcacaatgacagtcacctgatatcaactggtggaaaagacatgagcatcattcagtggaaacttgtggaaaagttatctttgcctcagaatgagactgtagcggatactactctaaccaaagcccccgtctcttccactgaaagtgtcatccaatctaatactcccacaccgcctccttctcagcccttaaatgagacagctgaagaggaaagtagaataagcagttctcccacacttctggagaacagcctggaacaaactgtggagccaagtgaagaccacagcgaggaggagagtgaagagggcagcggagaccttggtgagcctctttatgaagagccatgcaacgagataagcaaggagcaggccaaagccacccttctggaggaccagcaagacccttcgccctcgtcctaacaccctggcttcagtgcaactcttttccttcagctgcatgtgattttgtgataaagttcaggtaacaggatgggcagtgatggagaatcactgttgattgagattttggtttcccatgtgatttgttttcttcaatagtcttattttcagtctctcaaatacagccaacttaaagttttagtttggtgtttattgaaaattaaccaaacttaatactaggagaagactgaatcattaatgatgtctcacaaattactgtgtacctaagtggtgtgatgtaaatactggaaacaaaaacagcagttgcattgattttgaaaacaaacccccttgttatctgaacatgttttcttcaggaacaaccagaggtatcacaaacactgttactcatctactggctcagactgtactacttttttttttttttttcctgaaaaagaaaccagaaaaaaatgtactcttactgagataccctctcaccccaaatgtgtaatggaaaatttttaattaagaaaaacttcagttttgccaagtgcaatggtgttgccttctttaaaaaatgccgttttcttacactaccagtggatgtccagacatgctcttagtctactagagaggtgctgccttttctaagtcataatgaggaacagtcccttaatttcttgtgtgcaactctgttttatcctagaactaagagagcattggtttgttaaagagctttcaatgtatattaaaaccttcaatactcagaaatgatggattcctccaaggagtcctttactagcctaaacattctcaaatgtttgaggattcaagtgaatggaaggaaaaccacatgcctttaaaactaaactgtaataattacctgggctaatttcagctaagccttcatcataatttgttcccttcagtaataggagaaatataaatacagtaagtttagattattgaattggtgcttgaaatttattggttttgttgtaattttatacagattatatgagggataagatactcatcaaattgcaaattcttttttttacagaagtgtgggtaacagtcacagcagttttttttaccaacagcatacttaacagacttgctgtgtagcagtttttttctggtggagttgctgtaagtcttgtaagtctaatgtggctatcctactcttttgggcaatgcatgtattatgcattggaaaggtattttttttaagttctgttggctagctatggttttcagtacatttcctactttaagagtaattactgacaaatatgtatttcctatatgtttatactttgattataaaaaagtattttgttttgattttttaacttgctgcattgttttgatactttctatttttttggtcaaatcatgtttagaaactttggatgagttaagaagtcttaagtatgcaggcgtttacgtgattgtgccattccaaagtgcatcagaactgtcattcccttctaatatcttctcaggagtaatacaaatcaggtatttcatcatcatttggtaatatgaaaactccagtgaactcccaaggacatttacaacatttat

SEQ ID NO: 165 - DNA, 508 bp, Homo sapiens
cttaacgctctgtgtcttcggctccaagagtccaagcttctttgccctcgttaccttcaggtattggaaatccacagctaagacgccagacccaactggaagcctagaaatggtgagagtgccgggtccgacatcccgagagagggggcggggctggttggaaccggtgggaagtggctgtggcgggactcaggcctccccgcagtcagctccacaatctgctccctgagttctccttgcccagctcggcctcagtctccttcagccataagatggcgaatgcgccaacagccgggaccctgggcgacctgtctcctccctgcgcagtgactgtgccctggcctggagccctctctgggccgctctgcacaccgcatggccgcgtctctccgagattgtgcagggaccacgggaggggcgtcaggggagaatcctgatcttcggatgcgggttcatgaatgggaagagctttggtccagtgaggtttccagtccctcttttcttctgt

SEQ ID NO: 166 - DNA, 643 bp, Homo sapiens
  misc_feature (1)...(643): n = a,t,c or g
gaagactctatctcttaaaaaaaatccaaatgattctaatatgtcacaagggttgagaaccattgaacccttctcctagtctgttctttctgtcctcaaaaaatgtgtgcacatttctcttcctattaagactgtgagctccttgagagtaagaggatgagtcacttacacatccttatttcccctagagcaactagtacagtgcctcacacagggcaggtgctcagtaaatatttgctgaattgtacttgtagcttttagaaaactagaatctacaatgattcaatttgatagtatgaatttctaatgttagagatttcaaagaagtcagtgtggagaataatctttaacactgtaataatgaagaataagggaacaataaaggcaactcaattgtttttaggcaacaggtcaaattaaggatctatgatgatagttcattagattcaaatgtaagattnggaactngtggggactaagaataatggactaacttggttgttttagaattctcaatgttttctacaaagtcttaatatgatgggtcaaagcaattaactaaatggaataactaaggttaaaaggggtgctttaggaactgtgaggagcttctaaaacttacttttaaaaaggagggtaatat

SEQ ID NO: 167 - DNA, 363 bp, Homo sapiens
  misc_feature (1)...(363): n = a,t,c or g
ctgtgccgtctgcctttctagttaaagttgattttaaattaatttgggaaaaacggtgaacaagtggggaaaaacatcaccaaagactccaaacaggtggaacgatgaacttaatgttccctgcaccctccttacagatgcctggactttggcctgtgaatgagccccggggggctgggacagtaggggttttcatggaatggacatggggtagcaggaagtctcagccccagagggcttggcaggagccgccctctctgcggagttcttcccagcgggtgtgcgttggtggctggcggggaccccccacaggaactaggtctcaggctgtggaaagggagctgcccagggccncngagggcc

SEQ ID NO: 168 - DNA, 349 bp, Homo sapiens
  misc_feature (1)...(349): n = a,t,c or g
ggtgccctgcgcggtaactgaaattgaactgggctttcaacataattttgtcaaaatgggacgctgcatgagctaataagttgtgaaataaatagggttttattgtggagtaataagtaacacaaagaagggggtttgcagtatcttaggaagaagaacagacgttcttggtaaagtccctttaatatgaaaatagccatttttaaatacttggagtagtgagtgaagaagctttctctatgagagcacggttaggttcccaaagtgttangattacaggcatgagctaccacgcccggcccataaaatttatttttatcccagttgtgtgtacttatttacttatgta

SEQ ID NO: 169 - DNA, 1935 bp, Homo sapiens
  misc_feature (1)...(1935): n = a,t,c or g
gatgatgagtgctccagcgccagcgccagctcagccggggcaggcagcaactttggggctgggcctggtggggcgctggggagccctaagtccaatgcactgtatggtgctcctggaaacctggatgctctgctggaagagctacgggagatcaaggagggacagtctcacctggaggactccatggaaagacctgaagactcagctgcagagggactacacctacatgacccagtgcctgcaggaggagcgctacaggtacgagcggctggaggagcagctcaacgacctgactgagcttcatcagaacgagatgacgaacctgaagcaggagctggccagcatggaggagaaggtggcctaccagtcctatgagagggcacgggacatccaggaggccgtggagtcctgcctgacccgggtcaccaagctggagctgcagcagcaacagcagcaggtggtacagctggagggcgtggagaatgccaacgcgcgggcgctgctgggcaagttcatcaacgtgatcctggcgctcatggccgtgctgctggtgttcgtgtccaccatcgccaacttcatcacgcccctcatgaagacacgcctgcgcatcaccagcaccaccctcctggtcctcgtcctgttcctcctctggaagcactgggactccctcacctacctcctggagcacgtgttgctgcccagctgagtggccagccacaccaaccctgtgctctctggcccccagctggccacacttctccaggagggacccttggacttctttgtgtgtccagtttggcctcctgcccaaactgtccattccagcagctcctgcccccttctctgtacttgcttctgtctgacaccttctccctgttggcctgaagggagcttagaatgcagccctacctgggagatagtgcgggcacctgtggccaagtggagcagaggtggacatggggttggattgttttgattatttatagttacacaaggacttctcccagctgaccctcaggatgccccaagtcaggaagaccattaagaataggaggagagggctctgcctcaactttcctaggaaagagcccacctcggagatagctacggtttcctctggtggagatggtgaggatgaaggctggagagtgagggaggaggctctgctgggccgcagagaacacagggatgggagggtccctagccttcgggcacctccagggccagagagcaggctcagagcagctagtgtggagctcagcatccccaccccacccctcctccctgtagagctgatttgaggcctccttctggggctgggctctgcaggccaggtgggtgtggcctgtgttttcccttctgttctttctgcctgtactggatctgttattttcagggaaacaggccccagggcccccctgagcctcaccctaagcccttaggcctctgagagtgctgttgggttctatttatttatttatttgttcctttgttccctacccgtgcccccagtgtcttccctgctgagtaccaggagaggtcctgccccatcctctctctgaagccagggcccttccattccatttagcctttggatcatcctggctgggagaagtgggaccgagccacccagccccactatccccaagcagccctacagccgggatgggaggcacgtggcctctcttttatccgtctaattattttgtaagtgtattcgtgtggaggaggttgttgctttatttttttaaggctctggagtgttgtgtatggtttcttttcacatcccagcctcccatggggcacttctaagaagagaggggatttcttggaaaaggagagagggaatcccctagagcaggggaaaggcagtgcctgcccagctgttgttgcaccttcctgaggaantaaatattcctttaaattttcaaacca

SEQ ID NO: 170 - DNA, 1224 bp, Homo sapiens
  misc_feature (1)...(1224): n = a,t,c or g
ttttattttaacagaagttaacctttttactcggacatcccccatgaggaactcaagtcttaggataaagggactcctccttaattatggcccaaagggccagggcatacggcaagccctctcatgggtgggcatgattggacatcttcctgaaggaaggacaagcttgagagcgtcatgttttcaggcagctatggtgggaagccgggaggcacaaccgatttttccactgggagactaaccgagggctgcaactgcctcaaaatctcagtgcgagaagatgcacaggcaggacagtacacccccaaattcatgatcacagcagctggaatgtcagctctttttgcagatttcacagccgacactccccatcaggcaggttcttaagcacactgggtcatgacagtaaaggcctctnagagcnacacggaattcactggttaagcacgtacacattcatgacagcctacaaccgtgatgagtgtcaatgtcaacaggcagttagattaaaaaggggaaaaaaccacagctacaacaaataaaacctgttttctcccccccaggagacaacttggtttccaacccctcccataccacatttgattaagttaaatacagtgcggcttccaaatgtgccagccggctcttgctcacagcgacagcaccagcggtttgctgccctcaggtcttggttaccatgtgtcaggaacttcaaagagtgtggcagggctgttcttcgagatgcttcctgctggagaaagctccttcttcattctttttaatttcttggcctttttccttccctctgagaggggctctgcacaggaatcggtctgctcaagctcagtgtcggaaatctcccctgacactccgtcctccaggccagcttcctcttgactaggactcaaatttctctttcctactgtgctgggagctgtaaaactattgttgcggtaatagtgattctgcagggtgtagggtatgcactgggggtttaaccgtttgctgtcagcctccttccagctatcttcagtccactttcttttgatctgcttctcttcctgttttctccccatatattcagcataggtttggatccgatagctttctgcatatttgctggtattgacagcaatctttacttgctcgggctggctaagggaaacaaatgctgatgtgtcatcaatccaggatatctgaatgttaccaaaggcactgaaaagc

SEQ ID NO: 171 - DNA, 703 bp, Homo sapiens
  misc_feature (1)...(703): n = a,t,c or g
ttttttttttggttttgagctttataaaaatggcatcatactgtatgaactgtcttgctttttcatcccacgttgtttctgaaaggtgtttgtgatggagcacagggccacggtgcccatgcattcctcaatcatttctccagtcttctgaggatgggcttctgggttgtttgcagccttttgcttgtcccagtctcctagtttctccactgcacccgggagcatcacgtttgcaacaggcagggcaggtggtgcatcagatgtccaggacacagtcatttgacacccaagaaaggagggcctggggcctgcatcaggccatggctgagtgggactttgccaggctgtctccgcacccagcgacaggactgtgcgtgctgctgcttcttttgtttcctccacttctgttccctcatccagagagggcggaagagctggaaacagaggctttgtcagggaataaggaagcccacctgtgtggtcccaaatgtcgcaggggcaacgctcacaccagatacctccctcctcagtgtcaccatggccatcgttccctctgccacgctccctcctcagtgtcaccatggccatcgttccttctgccacgctcctcgtgccgctcgtgccnnnnnnnnnnnnnnnnnnnnnnnnnnnnnnnnnnnnnnnnnatattaaattcgtaatcatgtcatagcngntatcgaaa

SEQ ID NO: 172 - DNA, 524 bp, Homo sapiens
aggtgaaatcattagacttggagacacagcacacaccttttctctaagaagtaatggtgctcaatgtcctaatgaaatgctgtctaaaaaagccttagcctcaccaagttctaaatcacatgaagatatgttgtaccctcctagtgttttgtccaagagtaggacatcctttgttgaagacacggaaaccctttctgtgagtgggattccaaatgctaggaagctaggggagcctatccgagcagctattcctttacatccaccctaccacccttcagagcctcgagcaccctgccccataggaaaagaatacttgcattcaagtcactgctccccagccgtaaattctactggagagcatacggaattttctggggatctagatgatggacttttcttaatttccaagttgcctaaaggagcaaatgggaagtatatccagctcaggtccaagggcctaggacaagggaagcctccccaaagggaaaaagaaatgaaaaacagagctacagcctcatcctgca

SEQ ID NO: 173 - DNA, 438 bp, Homo sapiens
accagtatttcaaaccttttatgaggagctgaatctgccagcagcagaacttctgaaaaagacaaaaaatttgtttctccaattagcagaaaatgtaattttcttacttaatgttacttcttgttatgtacgtggaggaaccactatcggagacagatggccttgggaagcccgagagttggtgcctactgatccagctcctgatataattccagttcagaaggccgaagctagcaacctctaggtcctaaaaaccccaattattagacaatactgtagagctagagaagggaaagactttatcatccctgtaggaaagcttaattgtataggacagaggttgtataacagcacaacaaagacaattacttagtagggcctaaaccacactgaaaagaatccatttaataaattttctaaattaaaaaaaaaaaaaaa

SEQ ID NO: 174 - DNA, 1152 bp, Homo sapiens
tttttttaaagaaggaagaggtttttatttggccggtagcattggcagactcatgtcttaagagccaagctcccccaaaaagaaattcctagcccttttaagggcttacaactcctaaggggtcccacgtgaaagggtcatgatagatcaagtaagcatgaggaatgtgactggaggctacatatatcagctaacagaacaaaaagttttacagtgctttctcatacaatgtctggaatttacagatagtaccagtagtttttatcggtaataagaaaaaggatggcttaatagtgccaataacacaactgtctgcccattcattaggtaactgaatgtaggctctctgcccacatatccagtatagtccagcgagagccatccagtcctgatgagatcctggacaagcccccattatatcaggagctggatcagtgggcaccaactctcaggcttcccaaggccatcggtctctgatagtggttccccgcatatataacaagaagtaacattaagggaatgagctacattttctgctaattggagaaacaaattttttatctttttcagaagttctggtgctggcagatttaactcctcataaaaggtttgaaacactggtttgggagagtgcttgtggacctccccttgaactaaaatggcaacttgggggtttaaccctgtccctttggtccccagggttacacattctccctttttccaatggggatctaggggattggtaattattagttctagtgggttacagtgactggcagcacaggaggggttggcttcccctttctgaagatgaaccaagtcctttttgttctttttccaagtagcctaaataacacatggccaaaaggcacaattttcacaaacccctgactcatgacaaacatatttattttctactctgtagctcctttcccagttaagagaaccacatcctgttcctagcttgttactattaatggctgcacaagcgtcaaatcttaaagttacttgtttggggattcctttttcttctgttctagttattatttcacttgtatcacctaggaaaaggccagttcttaatcttatttcaaaactggtggttgtagggggctcagatgggttataacacacatcaggtcagtcatttcc

SEQ ID NO: 175 - DNA, 284 bp, Homo sapiens
ggagagagctacaccatgagcttcaataccctgaacactacctcttctcttccccagatctctgctggtaaacttctaagagtgctcaaatctcattttctcaacaaggcctatatgacttccctattcaacctccaatctccccagccctaagttcctgactccacttgctactctgctcatgttagagtcccatgcaggttggcagaagggctgtgctccatccatgcaggtgcccagcctcctccatctgaggacttctgcctcagccagttcctttggag

SEQ ID NO: 176 - DNA, 1459 bp, Homo sapiens
gagacaggtggccacatgttgactccccttcctggtgccacacccatgaaacccggttctgctactttcccattctttggtgtagctcctgcaatcctgaatgagtccggggaagagttggaaggtgaagctgaaggttatctggtgttcaagcagccctggccagggatcatgcgcacagtctatgggaaccacgaacgctttgagacaacctactttaagaagtttcctggatactatgttacaggagatggctgccagcgggaccaggatggctattactggatcactggcaggattgatgacatgctcaatgtatctggacacctgctgagtacagcagaggtggagtcagcacttgtggaacatgaggctgttgcagaggcagctgtggtgggccaccctcatcctgtgaagggtgaatgcctctactgctttgtcaccttgtgtgatggccacaccttcagccccaagctcaccgaggagctcaagaagcagattagagaaaagattggccccattgccacaccagactacatccagaatgcacctggcttgcctaaaacccgctcagggaaaatcatgaggcgagtgcttcggaagattgctcagaatgaccatgacctcggggacatgtctactgtggctgacccatctgtcatcagtcacctcttcagccaccgctgcctgaccatccagtgaacatgatcctgacctttacctaggattcctcctgctccaaactttgcccatcctctttgccccctcaggagtgctgagggccagtgttgacccacactaccctcccttgaccagctgtctgggaccggaaaccagctttgtctccaggtagagacaacatcctgtgactgccaggcagaaaggacagggcccaggtcagcctcagtctgctgtgcctccagactgcagagctctcagaacccagaacagagacgaaaaggctacctctcctacccaagttaagtgttcaaaggggatgtgagggcctccactgaagcagggaggcagctgtgtaatcctatgtcagctctcttaggaagccccagtacttatattgggcatgcacttgcccttaaaaacaatgatttgtgagtccaggaacaatttactatttttaaaatattttgctgcttctgttctgggtctgaattcccttttgtgccagatgccagtactgtctgcccattggctccaggggctgtatgggcagattcagtctccagagggtattcagatcatctgcttctttgaaggagtaaatgtgttttgttcctagggccagaggagcttgtcttccttgtcctctgttcccaccctcccctgaacagaacccagcccataagagacattctcagatgaaactctgttttcttgccccagtcaggctcaagccctgtggttgtaggaataaagcctgtgatctcaaaaaaaaaaaaaa

SEQ ID NO: 177 - DNA, 1790 bp, Homo sapiens
ccagatctcagaggagcctggctaagcaaaaccctgcagaacggctgcctaatttacagcaaccatgagtacaaatggtgatgatcatcaggtcaaggatagtctggagcaattgagatgtcactttacatgggagttatccattgatgacgatgaaatgcctgatttagaaaacagagtcttggatcagattgaattcctagacaccaaatacagtgtgggaatacacaacctactagcctatgtgaaacacctgaaaggccagaatgaggaagccctgaagagcttaaaagaagctgaaaacttaatgcaggaagaacatgacaaccaagcaaatgtgaggagtctggtgacctggggcaactttgcctggatgtattaccacatgggcagactggcagaagcccagacttacctggacaaggtggagaacatttgcaagaagctttcaaatcccttccgctatagaatggagtgtccagaaatagactgtgaggaaggatgggccttgctgaagtgtggaggaaagaattatgaacgggccaaggcctgctttgaaaaggtgcttgaagtggaccctgaaaaccctgaatccagcgctgggtatgcgatctctgcctatcgcctggatggctttaaattagccacaaaaaatcacaagccattttctttgcttcccctaaggcaggcctgtccgcttaaatccagacaatggatatattaaggttctccttgccctgaagcttcaggatgaaggacaggaagctgaaggagaaaagtacattgaagaagctctagccaacatgtcctcacagacctatgtctttcgatatgcagccaagttttaccgaagaaaaggctctgtggataaagctcttgagttattaaaaaaggccttgcaggaaacacccacttctgtcttactgcatcaccagatagggctttgctacaaggcacaaatgatccaaatcaaggaggctacaaaagggcagcctagagggcagaacagagaaaagctagacaaaatgataagatcagccatatttcattttgaatctgcagtggaaaaaaagcccacatttgaggtggctcatctagacctggcaagaatgtatatagaagccgggcattcacagaaaagctgaagagaattttcaaaaattgttatgcatgaaaccagtggtagaagaaacaatgcaagacatacatttctactatggtcggtttcaggaatttcaaaagaaatctgacgtcaatgcaattatccattatttaaaagctataaaaatagaacaggcatcattaacaagggataaaagtatcaattctttgaagaaattggttttaaggaaacttcggagaaaggcattagatctggaaagcttgagcctccttgggttcgtctacaaattggaaggaaatatgaatgaagccctggagtactatgagcgggccctgagactggctgctgactttgagaactctgtgagacaaggtccttaggcacccagatatcagccactttcacatttcatttcattttatgctaacatttactaatcatcttttctgcttactgttttcagaaacattataattcactgtaatgatgtaattcttgaataataaatctgacaaaatattagttgtgttcaacaattagtgaaacagaatgtgtgtatgcatgtaagaaagagaaatcatttgtatgagtgctatgtagtagagaaaaaatgttagttaactttgtaggaaataaaacattggacttacactaaaaaaaaaaaaaa

SEQ ID NO: 178 - DNA, 872 bp, Homo sapiens
tttttttttttttttttttgataacaattgtggttttattgtgtccaaccaatgcatcaataaatgaacttgaagcccaagcctgtgtgtgtcctaattccactcacccagccccgggcacctgccccactcacctctggctttgagaaggggcgtgtgtcggtggttgcctggctgcagtgtctcacctaggctaggtgtgcaccttagaagcacaaagcgggcacagttgtgggtaataagcttactctgcaggccgctgggtgtgtgcccaccctcctgagccccgaaagaggacctgtcagctcctgagaggctgctacgggtttgccttgttctgttcaggcatctgaggtaagaaggaggggccagaggagcaccttgtccagccttcaccatgagagcgggcatataaatataaatacaggtaacttataaatagaagtccagctctgagctgaaaaccacaggcaggataaagagcagcctccaagagcgaggctggcgggctgggcactgagcggccactctggtgactgacagcaggtagtgcactcctgccccctggtggctggagggagcggcagatcccagcctccagggctggttggcatagcaccttaaagagggagaagccattggctttacgaaatcaagagaactggaaaggatctaggagatcatctaagcaactctggtcatcttacagatgagaaactgatgcccagagaggggaaaggtcttgctgggtcacaaagtgggctggtgactcatagcccagttattctattccatctcaaccagtgaggcccatctgctccctgagcaggaagaggaagtaaaacaattggtaggggtggggaatttttttt

SEQ ID NO: 179 - DNA, 640 bp, Homo sapiens
tcattatggtggtagagccagattaggtacatttcagcgttgaaaagattttgtctagaaatgaaaaggcagctttcttaaagaccagagttatagagtcactcttgtatttttcatcttgttttagtggaccaaagctcagcttgttttagtggaccaaagctcagtaactcactcagattagaatctataattctgttgagtgttcaggaccacagaagtcctcctgggactttctatggaagtatgtgcagattttcctcatggagctgggcgtgatggtgaccgggcttggcaatgtctttccgctctgtctcctggaattgggtgtctgggatgacggacttcgtggagatggattctcagccttccgtttggctgccatggccaacaaccagtttttattctctggggaactattctctttgcctaccatttcagacccttctccacaaggtctcaaaggaagaggtagcgttccacagctttctgaagcatacggactgataggagacggaggctctgagatactggtaccagctccttcaattttgcttgatttggtaggacctagagagtccttactaaggtcttcctggttaccagcaaggcagcacagatccaaatgaagattttcaac

SEQ ID NO: 180 - DNA, 827 bp, Homo sapiens
cttcccagccttcagaaattgccggtctgggagttgggggcaaggagaagatcctgcaacccagtgattccatggaaagcagaaagaaggacataaagaaacggatacttggtgacatctttgactcactggatcaaaccttgcctgaagctcacatttctgaaatttccagatacaagaacaaatacttcctctttattgttttactagatttgagacaagctttaagtttctcagactcttcctcttcctaacagatttatcagaagctgaaagcttctgatcttgttgggatgcggatcgtgtcaggagaaggcttactttgcacgcttttcttagtctggttgcctaactcaagaacctcggcatggctctgttacttctctactcagacaagcatccctgcagacactcactaggctaactctgtctttatttttagaattagacctttacgagaagcacagttttgtcttcagtttcctctccccccacccggaatggcctgagccgaagccagctccctccgagaagtcattaccgcctgacttgcgtttgatatttagacaccttggtcacaacatcttgcattctctcgggatgctgatttttaactgctctttggcctttcctgcattggtcctcctcaggcaggggatccctgctcttctatattagtgagaaaaccaaggctcagagaaactgtggattttctaaggatgctggctccccgtcccctgtccaccatgagtcaaagcaatgtgagtccctcaccagatgcaactgcccagtcttggactttccagcgaccagaatcatgagccaaa

SEQ ID NO: 181 - DNA, 420 bp, Homo sapiens
gggaacctcaaattgatggaaaggtcatgtcatagagaaactaaacctgattcactattgcctggtaatgtcagatatagttataaatgaagtcagtttcattgaaagttaaatgaaggttaggaaaaataatgatgcttatttactagacaagaacaaaattaatatggattgtttcattagctgtttctttaaaaagatgttaaccaccctcatgttttcacattcaggtatccttagtctgttggagcatggagaagagtacacattttctctaccctgtgcatatgctcggtcaattttgacctgttccttgggtagaactgggtggcaaagtcagtgtcaactgtgcaaaaactggatattcagccagcatcacttttcataccaagccattttatggtggcaaactgcatcggg

SEQ ID NO: 182 - DNA, 554 bp, Homo sapiens
  misc_feature (1)...(554): n = a,t,c or g
gccactcggcgccccantccatcagcactaatgctccactccattggcactaacgccccaactccagcggcactaatgacccgctcctttgacattggtgccccactccatcagcactaacgccctgctccatcggcactggtgtcccactccattgtcactaacgtccggctccatcggcactggtgtcccgctccatcatcactatgtccagctccgtcggcactaccaccccgctccatcatcactatgtccagctccgtcggcactaccaccctgctccatcatcactacgtccagctccaacggcactggtgccccattccatcggcactaacgccccgctccaccggcaccagtgcctcgctccattggcaccaacgcccagctccaccggtactggctccctgctccatcggcactaacgccctgcttcattggcactttgctgctgcctcctgagcactgccttccatgaacagggacagaccagaggccgtgcaaggactccccctcagacctccaaagggcaacagaagagtattaataaacgt

SEQ ID NO: 183 - DNA, 388 bp, Homo sapiens
ctctttgtggtagagaagaagctcttcatacatgaatacatcagcggatactacagagtgtcatcttatttccttggaaaactgttatctgatttattacccatgaggatgttaccaagtattatatttacctgtatagtgtacttcatgttagattttttcaggtctgttggtcaatctcacaaccattgcatcttggctgtcatggcttcagtacttcagcattccacgatatggatttacggctttgcagcataatgaatttttgggacaaaacttctgcccaggactcaatgcaacaggaaacaatccttgtaactatgcaacatgtactggcgaagaatatttggtaaagcagggcatcgatctctcaccctggggcttgtgg

SEQ ID NO: 184 - DNA, 613 bp, Homo sapiens
  misc_feature (1)...(613): n = a,t,c or g
acctccccctcctcctccaccnnctcctccncctcctccttctcctcctctcacccaggatcacttccgaaaccacttggccttcagcccctgcctcggccagaggtttcatttttaactgaatatttacgaaagctgaaagcgtgcgaggggggtggggtggaaatagcggctgcttcttttccaaggatttatttaatggggatgtgttcaaggcaagaccgaattcagaaggatatcgacgtcgtgatccagaagtccagagctgaggactgcctgtttgcagttctgtttcatcaaatggaaatgggacatggacagtttctcctatcccatgcagaccatgctcctgaattaaaactgcagaatgtgttaaagcatcattcaacatcgtgagcacatttgagatactgtacaggacaacctgcttttcatattctctgtgaatttcaaagacgactgggattttcttcctcctctaccaccctgaacagcaagaccaatacatcctgtatttcctcctctttcagcctacttgtgaagacaagggtgaagacctccatgatgagccatctccacttaatgactgtctcacatgggccggcaacttgtt

SEQ ID NO: 185 - DNA, 596 bp, Homo sapiens
cggtcaggtccagcacttgggagctgactgtgctggaggtgacaggctttgcggggtccgcctgtgtgcaggagtcgcaaggtcgctgagcaggacccaaaggtggcccgaggcagccgggatgacagctctccccaggaatcctgctgcctgctgagaaacatggtcagcaagtcccgctggaagctcctggccatgttggctctggtcctggtcgtcatggtgtggtattccatctcccgggaagacaggtacatcgagcttttttattttcccatcccagagaagaaggagccgtgcctccagggtgaggcagagagcaagggcctctaagctctttggcaactactcccgggatcagcccatcttcctgcggcttgaggattatttctgggtcaagacgccatctgcttacgagctgccctatgggaccaaggggagtgaggatctgctcctccgggtgctaagccatcaccagctcctccatccccaagaacatccagagccttcaggtgccgccgctgtgtggtcgtggggaacgggcaccggctgcggaacagctcactgggagatgccatcaacaagttacgatgtgg

SEQ ID NO: 186 - DNA, 480 bp, Homo sapiens
gatcttggatctccgagtacgttgcgtaatggccacgttgcagcacacggcggaagaaataaagagattagctgaaaaagaagactggattgttgacaatgaaggactgacttctctaccatgtcagtttgaacagtgcatcgtgtgttctctgcagtcactgaagggggttctggagtgcaagccgggagaggccagtgtcttccaacaacctaaaacacaggaggaggtttgccagctaagcatcaatataatgcaggtttttatatactgtctggaacagttgagcaccaagcctgatgcagatatagatactacacatctctctgttgatgtttcttcccctgacttgtttggaagtatccatgaagacttcagcttgacctcagaacagcgcctttttgatagtcctaagtaattgctgctatctagaacgtcacaccttcctaaatatcgcagaacattttgaaaagcacaacg

SEQ ID NO: 187 - DNA, 456 bp, Homo sapiens
  misc_feature (1)...(456): n = a,t,c or g
actgacaaaattttattccttagtacttagtttatctcattgagcagcactgacagtgagttcatggaagatacacaaaatgtgtggaagatcagtgttacaaactatgacaagtagatggctgtggttagaggactttctctcaatcagttgctccatctcagagttatatggtgagaggtggcttgcaactgcctgttgcctgccattggctgctttgctagtgttacttatgtttgatcctcagtacttttgtgatttgaactttgagtattaaataaaaatagtttattttaaaattttatttatttatttttttgaaacaggggtcttgttctgttgcccagtctgggagtgtcatgggcatggatcataggttcactgaaggcctcaacttcccaggactcaaacggattcctcccacggtcaggcctcccaaggaggctggggnctatt

SEQ ID NO: 188 - DNA, 1822 bp, Homo sapiens
ccgagacggagccgctgtcaactctccaactcagctcagctgatcggttgccgccgccgccgccgccagattctggaggcgaagaacgcaaagctgagaacatggacgttaatatcgccccactccgcgcctgggacgatttcttcccgggttccgatcgctttgcccgggccggacttcagggacatttccaaatggaacaaccgcgtagtggggcaacctgctctattaccagaccaactacctggtggtggctgccatgatgatttccattgtggggtttctgagtcccttcaacatgatcctggggaggaatcgtggtggtgctggtgtttcacagggtttgtgtgggcagcccacaattaaagacgtcctttcgccggatgaagaagcgctaccccacgacgttcgttatggtggtcatgttggcgagctatttccttatctccatgtttggaggagtcatggtctttgtgtttggcattacttttcctttgctgttgatgtttatccatgcatcgttgagacttcggaacctcaagaacaaactggagaataaaatggaaggaataggtttgaagaggacaccgatgggcattgtcctggatgccctagaacagcaggaagaaggcatcaacagactcactgactatatcagcaaagtgaaggaataaacataacttacctgagctagggttgcagcagaaattgagttgcagcttgcccttgtccagacctatgttctgcttgcgtttttgaaacaggaggtgcacgtaccacccaattatctatggcagcatgcatgtataggccgaactattatcagctctgatgtttcagagagaagacctcagaaaccgaaagaaaaccaccaccctcctattgtgtctgaagtttcacgtgtgtttatgaaatctaatgggaaatggatcacacgatttctttaagggaattaaaaaaaataaaagaattacggcttttacagcaacaatacgattatcttataggaaaaaaaaaatcattgtaaagtatcaagacaatacgagtaaatgaaaaggctgttaaagtagatgacatcatgtgttagcctgttcctaatcccctagaattgtaatgtgtgggatataaattagtttttattattctcttaaaaatcaaagatgatctctatcactttgccacctgtttgatgtgcagtggaaactggttaagccagttgttcatacttcctttacaaatataaagatagctgtttaggatattttgttacatttttgtaaatttttgaaatgctagtaatgtgttttcaccagcaagtatttgttgcaaacttaatgtcattttccttaagatggttacagctatgtaacctgtattattctggacggacttattaaaatacaaacagacaaaaaataaaacaaaacttgagttctatttaccttgcacattttttgttgttacagtgaaaaaaatggtccaagaaaatgtttgccatttttgcattgtttcgtttttaactggaacatttagaaagaaggaaatgaatgtgcattttattaattccttaggggcacaaggaggacaataatagctgatcttttgaaatttgaaaaacgtctttagatgaccaagcaaaaagactttaaaaaatggtaatgaaaatggaatgcagctactgcagctaataaaaaattttagatagcaattgttacaaccatatgcctttatagctagacattagaattatgatagcatgagtttatacattctattatttttcctccctttctcatgtttttataaataggtaataaaaaaa

SEQ ID NO: 189 - DNA, 285 bp, Homo sapiens
ttctttagcttttataaatagattcataaagtatatactgtttggttttggtttctttcattcaacataatgttttttagatttatacatgatggtgagtttattcttttttattgctgtatagcatttcattgtgtaactatattatgctttatttttaccatttgttcgtgatcatttgggttgttcctagtttttggttataaatacattcttgtacatgtcttttggtagacatatacatgcatttactttgaagagcatacttaggagtataattgagta

SEQ ID NO: 190 - DNA, 929 bp, Homo sapiens
ttggcagaattattctttatttctggagacatttaatcagatgcagtaacactgattccaggcgagggcagggggcatgggtacccctgaagcaaccagtatcctgtggcccaaggtgtcccccatccccagacctgggatccccctcagttacagttaaatagagagaggaagatctccccagggggctttggggggagggtctgcctcctgcacccaccctctccacgcagaggagtctgagcacaagctatttacagtattcacatccactgtaccccaccaaatcaaggcaaatactacaggtggcccctccccaagggaagaggccagagaggctgtgagtgtatatgtgtgtatgggggagaagggatgtctgcgcgtgcgagcacacgaatgcactgaggggcagatctggctccggccaaagagacatcagtctataaggtgcagattaaaaacaacagagaggacccacccccaggggcccaggccacttccatctttgttctgtctttttctcctccagacatcctggtaggtgatgcagaggagccctcacaactgtgcccggatccaaggcaaaccctcttaaaggacttctgtgacctgcggggactgcagccacagctttcttgaggaaggcttctgcctctgcaaagggcaggagtgtctctggtgttcggctcagactcttgtccccagagggtccgttggtggagaagccattctcctggtgtgctgggagaggctgcaggccattcaccagggacgctggcaactccttgcttgggagactccactgaggctcctgtgggatgggctcctctttctgcacagcctccttctgcagccctggggaccgagcctccacagctttcacaggctctgggctggaaccgttggcgttggcctccttgctgtcctgc

SEQ ID NO: 191 - DNA, 696 bp, Homo sapiens
catttcaattctgacactaactacccagagttaacacaaactaccaggcacacaaagtgttcatccaccaggaagctccttgaactttgagtttgcagagttttattggccacatgattaacttccttctccagctcctcctttaatctctgaacatctgggggtgtggctaaaagttccaaccctctaaccatatgcttggtctgtctggcatggccagctcgtcctttcaaactatgtgagggcctaccttgagtcacccccaagtataaactcagatatagtccaaaggggcttcttatgaataacaaagacacttccattaatcaggaaattccaagcctctctaagctctgtaccaggaacaggagacaaagactagatttattcttcattatatgacagatacatttttatattttgcctctggttttagtaaagtttttgttgtgaagaacacaaatgccagatcaaatgagggggctgtaattagcaaggctgcaagggattgtgagcagtaagggagatagggattttactggaaatccaccaaaggaactggtatgtagctatgcctctcagtaaggggaactagaaagctattaggaaatcaaggcatctggagaaactatgtgtgtgtgcccaccaacatgttcatgtttgcgctgcatttttgctttgtcatcctcttgcctt

SEQ ID NO: 192 - DNA, 317 bp, Homo sapiens
ggctcgagataagaatggcccaaatccagaacattgacaacaccaaatgctggcaaggatgtggagcaacaggaactctcattcattgctgtgggaatgcaaaatggcacagctacttcagaagacggtttggcagtttcttacaaaactaaaacatacccttaccatacaccggcaatcacactctttggtattacccaaatgaattgaaaatttatgttcacacaaaaacctgcatgcaaatgtttagagcagttttatcataatgccaaacttgaaagcaactaagatgtccttcagtaggtgaatggataact

SEQ ID NO: 193 - DNA, 198 bp, Homo sapiens
gagaaaaaagtattgcattttttaaaaggaatattttataatggtctaaaaattcttgctcatagttttaaagtaggaataagttttaaattggattcttcccatccaactcttcacggttagcagctacgatattattctcctttgtagggaagtattaatacatcattctggattcccaggatgaccttaactgat

SEQ ID NO: 194 - DNA, 994 bp, Homo sapiens
tttttaagccacatacttagtttattataggcatgtctaattgaaatccatgaaaacagttacatttaaaacattctttatgcactatacttgaaaatgtaaaatataataccacttaagtacttcccacattaaactgatttttctttttttaaaaaaatttttcctagtcgttatttagctttcggacaccataatacaatagaacagaaagagtatgttaaaagaaaaatattaggtagaatgttgtaaaacttttaatttacccatcatatttaacatttccaagactattttcctgcgcctcatctgccctcagagagaatgatccccacagtgatgaggggtcagcactctgaaagccagttgacgccagacaagctgctggaacagctgggggcacagctccgcctctcctccagcccctcggtcccatgagccaaaaccaatgaggacagaggggctgaggggtgtgtccagggcccagtcccacctcagcaggaaggtggcgtcagcactcgcagtcccagcctcacgccgcatcgcagtcccaggggatcttcacacagggagggtgagctggttaagaaggcgggtgatcctccccccgggatgcttcggatacttagccatgtcttccggaaatactttagaaagttcttgaatcaacaggcttttaaatttcttcatggtgtcgatcttgcctttaacttgctcatttttagctagagccctctccaggcactctttggtgtagagctggggatttcgaccttgatctatatattcaaaaacttctaacggtacagtaatatcatgaagctgctgtctgcacttgtcaatatcctgtaagccagtaacaataaaattcagcttttggttgagcccggcctggctgctgggctggaagtcactgacgatgatgccgagctgccgaatgttctccacgaacttctccaggtgctcctctaggtggtcaaacttctccgccatc

SEQ ID NO: 195 - DNA, 894 bp, Homo sapiens
ttttttgggatacacattcgcttttaataaaaaagaaatttcctcctacaattgatcctgcacacgggggggccatgagccacgcctgctgactcattcctccaattctcaaacacaagcaacgattcaggtcctggtgagaaccattcacgactcctccgggacctgttccaccctccccgtcatgcacagatgatcttagtaaccagagtaagagtctgcctgagacacgagtcttttttcctggctccaagggctagtgccaaagttcctccctccaccggggagggaggtgagacttgagtccctgagtgggtgtctgggtgttcacgtgtcctgctgagcagcgcgaggcggctgcctccaggtcaccacacctggcacacccggatcacctccctcagcgcctttcagcccctccatgcttttgtccttcacgggccacggcgaggaggactgctctgtttccagcttcttgagacacaaacgctaccaggttctttgcaaagacatggatgagaggctcatcctgccccagaaggacttttgtggtgagcacaggcttgctgacgtcactggccacgctgctgggctccagggagaccagggtgcccatcttcccaaactgggtcaccaccaccaggatgtgactgctgaaggccgtacacaccacctgggtggggaccccgcacaccacctccgtcttctgcttcgatatcaccaacggcgtgtcttccatggcggggctctgcagtggcagctttaatttaggttaaaaagaaaggggaaaaaaaggagtcaatcaaacagtacagccttggggctcccaaaaaagtagcacggggcattgaaacggaaacgcaaggaggcccattcaaaagaaggggccaggcg

SEQ ID NO: 196 - DNA, 989 bp, Homo sapiens
cctcgtgccagcagcttgcagttgcagttaataaaatggatcaggttaattggcaacaagaaaggtttcaagagattactggaaaacttgggcaccttcttaagcaagcaggttttaaggagagtgatgtaggttttattcctacaagtggtctcagtggtgaaaatctaatcacaagatctcagtcaagtgaactcacaaaatggtataaaggactatgtttattagaacaaattgattcctttaagcctccccagcgatctattgacaaaccttttagattatgtgtgtccgatgttttcaaagatcaaggatctggattttgcataactggtaaaatagaagctggttatatccaaactggtgaccgactactggcaatgcctcctaatgaaacttgtaccgtgaaaggaatcactctgcatgatgaacctgtcgactgggcggcagcaggcgatcatgttagtcttactttggttgggatggatatcatcaaaatcaatgttggctgcatattttgtggccccaaagtacccattaaagcttgcactcgtttcagagcccgaatcctcatctttaatattgaaattcctatcactaaaggatttcctgtgctgttacactaccaaactgtcagtgaacccgccgttattaaacgattgattagtgtcttaaacaaaagcacgggtgaagtcacaaagaaaaagcctaagtttttgactaaaggccagaatgcattggtagagctacagacacaaagaccaatagctcttgagctatataaagacttcaaagagctggggaggttcatgctacgttacggtggttctacaatagctgctggtgttgtcactgagataaaagaatgatgggtcagaatttctaccacgtttctggatacagtgaaatagctaacctctgtttcaagaatgcagttattaagtcaattcctagaagttgagagagcaaataaagacctgagaaccttc

SEQ ID NO: 197 - DNA, 1195 bp, Homo sapiens
  misc_feature (1)...(1195): n = a,t,c or g
tttttttttttttaaaccatatttctgttcctaacacaaatgtgaatttattggttgatttgatatttaaaatagtacttttacaaaatcatctcagaaaatatactacatttattaaaattcctacaaaccattgcagaaaatattaaaccctctaaccaacctaacactcgctttcagaggcacttgtgatgattttcacagcttccatagttgcaaagaacaaagaaatcatcttccaacaggggtgggaattagataagaataatccaaaaaatatttatttctttacagactcacagattgcttgatgtttaggggctcttacctaggatacctaattattcaaggttttcctaatttagtagactttttcattgcctacaatctacaatattcagcaaagtattaaggaaaatgaacccaagaaccttaaccacctcaaatagttttatggatatactaaactgtcaagtacaatctttatcttaagacttgagaactggaatgcaggaaaacaaactttggtggaatactggaataaaagacataaagctgggcagaactaggtgtggcaaccttgtatgttaattctgaaagccagaccagtgacgctaagaataacaaatagattcagatttgtttttcagaaacttgagctatttcnnnnnnnnnnnnnnnnnnnnnnnnnnnnnnnnnnnnnnnnnnnnnnnnnnnnnnnnnnnnnnnnnnnnnnnnnnnnnnnnnnnnnnnnnnnnnnnnnnnnnnnnnnnnnnnnnnnnnnnnnnnnnncnnnnnnnnnnnnnnnnnnnnnnnnnnnnnnnnnnnnnnnnnnnnnnnnnnnnnncttagcattttaaatgtaaaactgaagctttaaattctttgagccattcagctcttaactgccagctcacactatttcacagcatatccatagatatgagggcgcaccaactcccaggacagtggggcctggatgtgctgcagcttcagcttagagaagctggcccgctccagggctttccagctctctctggtcaggttgcacccatcaaacagaaggtgccagggcaggatccaggacttgttgccagaagtaattccaagtcgaacacttcagcttgccacatgcttccatgaaataggaaagcccctcccggtcttcaggcattcttgcacacctcgcgggaga

SEQ ID NO: 198 - DNA, 2677 bp, Homo sapiens
agaacgcggtcggcccggtccccgccgcacccagcccagcaacatcatgacaacagagaagagtttagtgactgaggccgaaaattcacagcaccaacagaaggaagagggtgaggaagccataaactcaggccaacaagaacctcagcaggaggaatcttgtcaaacagcagctgaaggagataattggtgtgaacagaagctgaaagcttctaatggagacactcctacacatgaagacttgaccaagaacaaggagcggacatcagaaagcagaggactttcacgactattctcctcgtttctcaaaaggcccaaatctcaggtgtccgaggaagaaggcaaagaagtagagtcagataaagaaaaaggtgaaggaggtcagaaagagatagaatttggaaccagtcttgatgaagagatcattttaaaggccccaattgcagctcctgaaccggaactcaaaacagacccatctttggatcttcattcattaagcagtgcagaaacacagcctgctcaggaagaactcagagaagatccagattttgaaattaaggaaggagaaggacttgaagagtgctccaaaatagaagtaaaagaagaaagccctcaatcaaaagcagaaacagaattaaaagcttcccaaaaaccaatcagaaaacacaggaacatgcactgcaaggtttctttgttggatgacacagtttatgaatgtgttgtggagacatggctggattccgccaaagaaataaaaaagcaggttcgtggtgtcccttggaattttacatttaatgtaaagttttatccacctgacccagcacagttaacagaagacataacaagatattatttatgtcttcagcttcggcaggacatagttgcaggacgtctgccctgttcctttgcaaccttagcattattaggttcttacaccatccagtctgaactgggagactacgacccagaactccatggcgtggattatgttagtgattttaaactggccccgaatcagaccaaggaacttgaagagaaggtcatggaactgcataagtcatacaggtccatgactccagctcaggctgacttggagtttcttgagaatgccaaaaagttgtctatgtatggagttgatcttcataaagcaaaggacttggaaggagtagatatcatcctaggtgtctgctctagtggccttctggtttacaaagataagctgagaattaaccgcttcccttggcccaaagtgctgaagatttcttataaacgtagtagctttttcatcaagattcggcctggagagcaagagcagtatgaaagtaccatcggattcaaacttcccagttaccgagcagctaagaaattatggaaagtctgtgtagaacatcacacgtttttcagattgacatctacagacaccattcccaaaagcaaatttcttgcgctaggatccaaatttcgatacagtggccggactcaagctcagaccaggcaagctagtgctctaattgacaggcctgccccacacttcgagcgtacagcaagtaaacgggcgtcccggagcctcgatggagcagcagctgtcgattcggcagaccgaagtcctcggcccacttctgcacctgccattactcagggtcaggttgcagaaggtggcgtcctagatgcctctgctaaaaaaacagtggtccctaaagcacagaaggaaacagtgaaggctgaagtgaaaaaggaagacgagccacctgagcaagctgagccagagcccacagaagcatggaaggatttagacaagagtcaagaggagatcaaaaaacatcatgccagcatcagtgagctgaaaaagaacttcatggagtctgtaccagaaccacggcctagtgaatgggataaacgcttatccactcactcacccttccgaactcttaacatcaatgggcaaatccccacaggagaaggacctcccctggtgaagacacaaactgtcaccatctcagataatgccaatgctgtgaaaagtgaaatcccaaccaaagacgtccctattgtccacactgagaccaagaccatcacttatgaggctgcccagactgacgacaacagtggagacttggacccaggagtcttgctgacagctcaaactatcacatctgagaccccaagcagcaccaccacaactcaaattaccaagactgtaaaaggtgggatttcagagacacgtattgaaaagagaattgtgatcacaggagatgctgatattgaccatgatcaggtccttgtacaagccatcaaggaggcaaaggagcagcacccagacatgtcagtgaccaaggtggtcgtccaccaggagaccgagattgctgatgagtgagctcaggaactaacctaccccaactctgcccttctcccatccaagagaaaccagcaaaatgataaagaagctaacctgccatagtcagacttcagactttcaagattattctaaatcaccagaaaattaatttcagtttctattgggagtttataccaagagattcttctagatctcattgatccttttgaagagctttttctatattaggatatcagaattgttcaacttttcactctatagactgttttaagagttttggggttttttttaattgggtggtttgtaaccccttcagcctag

SEQ ID NO: 199 - DNA, 204 bp, Homo sapiens
  misc_feature (1)...(204): n = a,t,c or g
agatggaactgaaaggtagtttgagtgaagctaaaatcacaaggggtnnccttgagtgccatgttaggacatttgccttttactgttaaggtaatgagagangtactctgaagtttaagngnaangagacnttancatttgtgtctgtttttgaangatcnttcttntggcttntgtnnntnatcgtgttgtatagtctctctc

SEQ ID NO: 200 - DNA, 659 bp, Homo sapiens
gctaaaatgtacttagaaattttaaaagcacaaaacaaacgcattctctccccatcctcctatctccagctcttagagactggagctcagcacctaagctgttaatgaatggggacagctttcatctccactggaaaaaagcctgctctctcacttggggtccctctcccccttccacttgcattcaatcagcacccatgcaaccatcctccctgctctgagctctgtgagcccctgaaaatagagaaattgggtgtttgtgggagcaaaatatagctaagtaatttttcctgctcctttgaggccatgttctttcatggtgagggaggggcagagaaaatagaggctcacaaatcccttttcctgtgactcccacaacttaggccaggggccttcttgagcctcataatgtgtgtgtgtagataggggaaaggaggtccacttccagaattttccctgtgttcttattcctcacttatgctaccgttggctcagctggcccgaaccaagatccatagccaggtttccatcactggatgagctccccaaaacagggtgaccttcccctccttcgtgggggttaagggaaagcttttcattattcatttgggattttcagggcagggaaggggttcagtttggggaaaaggaaacctttt

SEQ ID NO: 201 - DNA, 3082 bp, Homo sapiens
  misc_feature (1)...(3082): n = a,t,c or g
agagaactagtcttgagttttttttttttttttttttattttctagtaagactagatttattcaataccctagtaaaagttttgattataagtatccaacagtataaaaagtacaaaacagatctgtagatttctaatatattaatacaaagtgcatgactacatacagtacatcctacaggcaaagagaggtggaaggggaaaaagaagactgtggttgaggtctagtaataaataaataaatacagaagtagagatgatccatattatagtatattctaccaccaatactgcagccaaaatgtacaaaaaaaatcatttcaaataactcaggaggatgataatggctggacttttgtaattcacctcaaagactgtgggagagccaactcaactcactgtatagtctgtgcatatggtggcttgtagcatgtaggttttttccaaaagaaggaaatataaaatgtttagattaagaactataaaactacagggtgcctataaaaggtggcttactccttattgttattatactatccaatttttaaaatgcagtttaaaaaataagcactgagtcttgttattacaaggcaggcaaatgtttctccctcattttgaaaagactgaactggcaatgcttttcctgaacatttagaaaagaggcagtaagagtactctggtttgggttcaagtgagaggcttttcatgaaaatcttaggattgaagagctctaagttcaggatatctcaatgttcagaaagcctgacttaaaagaagccaaaccaaaaccatttaatgtgaacacaaacctcttttcttttagtaagttttacttttaatacagagtgaaagaaaataaaaatttaataggctaaaacaagtcaaacacccattctacacagataaaaaccttcacaaaggtcaactgaagtaatccagagctgaaactgaattgtgcagattttcaatgaagtcacagaagtcatgtaacacaaacaaaagtcgattatatttacacactcagcaagccctctaagaaatgtgccccaagaagcattaaccctttggtttggtgccatcctgaagacttgcacattttatttttcagatagcttaacatttttaatcgagtgtgttctctaccatgcggtaatgctttggtactattcatacagggtcttgcctatcctaaagacttgccatttccccaagaggagctttgattctgctttagaagttttacataaattaaaatctttatcaaatattaatatgaagggaggcacaggatgcaacatatatagtcaagttacctctctgtatatttagaaattactttctcctccaaggtatttgcaacagaaagctcagtctgtcctgcttaataatcagtagtacaggtgtgaatcatcagaagcttggcaagaccttaatatttcaaaattattaacaactacctctaggggcaagttcatgttactgagttatgacaaatttattatcatgagggaaaacaagagtagccagccatcttaaaaatgccccaaccactgcttctcaaaacagaaagactaaaaactacatacagtttatcatacaacaaatcccatctctgtcccctgaaattcccctagtttcattcattagaaggggattaaaaaaaaaaaagacttaaagagcactttacagcagcattcagctttcctatgaaatactcagcatcttaaatattatatacaactctttttttagtaagctagacactggcttcagagtttgtgggagtgggggaaatcaacccattcaaaactactctagaaattgtcttttggcagaatagcaggtatccaagttaaaaataagagggtcatttaagaccagcnnnnnnnnnnnnnnnnnnnnnnnnnnnnnnnnnnnnnnnnnnnnnnnnnnnnnnnnnnnnnnnnnnnnnnnnnnnnnnnnnnnnnnnnnnnnnnnnnnnnnnnnnnnnnnnnnnnnnnnnnnnnnnnnnnnnnnnnnnnnnnnnnnnnnnnnnnnnnnnnnnnnnnnnnnnnnnnnnnnnnnnnnnnnnnnnnnnnnnnnnnnngagggtcagtttgtagctttgtggtttttcaaaattcagatatttttttttttgttccccttctacataaaaacctcagtcaccactcctgagtggagatgggcagaggctctggcccctgctcctctggcttctcagcagctgctttcttattgctgcagcaaggcttgaagagatgtgtgtcaatgaggacttccccaaaacggcctttatagatgatcccacaacatatcttctgtcttttccagtaagtgagatctaaaaaggaaaaaactggtgttctgttagaaccagaagccatctctgtatctgagccgtcatctgactggttactgtaacaaggagattgagctggggaggcacttgaggtggtactgtgagcatcagaattatgacgtttaaattccttctgcagtttactgatctggttgctttttatcctgttcccagatagagttttcactttctttggtttcaatgtagtctttagactgggtccagcccttgcatctaccacatgattccagtttttttttgatcctgctggcaacttcttccatcttttcacaagcaggacacaggcattgcagatgtctcctgaacggagtctcatgcaatccaaaacagctctggaagtccttttcatagcgtttactgtcagtgaatcgagaactggaggacttagctctgcaaatacagcagccctctatacttcggtacatctttggcttgtgaaaaccaaacatcttttcttctgggcaatagtaggcctggtctgaagtcttaggtcaattagctgtccactcagatgttgtcaacttctcgtcctggtttcaggggttgaagctgtttggtgaatcagagacagggatctttggtgggagtcatggtccattcaggaagttgtgccttccaaaagcagccgttccacgcgcaataatgtccccgaggtgcggagtgcacgccaggccagtccccctcaagcgctccctcctc

SEQ ID NO: 202 - DNA, 412 bp, Homo sapiens
  misc_feature (1)...(412): n = a,t,c or g
ggggaactctcccatttcaataggtgtactgaaagcctagatatgttcttcctaaatattcctattccagaaagtggagttctggaatacaaatgnnnnnnnnnnnnnnnnnnnnnnnnnnnnnnnnnnnnnnnnnnnnnnnnnnnnnnnnnnnnnnnnnnncccgcttcccaaggtcttcatttagaatgaagaccacttctagccaatcttgcctctatttaatacttattaaattacttgctgtgaataatatggaatttaagattttgtaaaatagagagccttaaaagcccttgggaacttaacctgtagggaagaaaggagttagaatattatcttacaatggagtgagccacggagtgaatagtgagcaaacactttcgaatcgcttactatgtgccaggtacta

SEQ ID NO: 203 - DNA, 983 bp, Homo sapiens
ctgaacttggccctgtgtttaagcagcaggagccaatccagattttgttaattttcctacaaaaaatggatttgctactaaccaaaacccctcctgatgagataaagaacagtgttctacccatggtttacagagcactagaagctccttccattcagatccaggagctctgtctaaacatcattccaacctttgcaaatcttatagactacccatccatgaaaaacgctttgataccaagaattaaaaatgcttgtctacaaacatcttcccttgcggttcgtgtaaattcattagtgtgcttaggaaagattttggaatacttggataagtggtttgtacttgatgatatcctacccttcttacaacaaattccatccaaggaacctgcggtcctcatgggaattttaggaaactgaggctcagagaggtaaaataagtgattcaagatcatataagtggtatttacaaatgtacttttactcataagaagttgggaatcaccaaagagcagctggccggaaaagtgttgcctcatcttattcccctgagtattgaaaacaatcttaatcttaatcagttcaattctttcatttccgtcataaaagaaatgcttaatagattggagtctgaacataagactaaactggagcaacttcatataatgcaagaacagcagaaatctttggatataggaaatcaaatgaatgtttctgaggagatgaaagttacaaatattgggaatcagcaaattgacaaagtttttaacaacattggagcagaccttctgactggcagtgagtccgaaaataaagaggacgggttacagaataaacataaaagagcatcacttacacttgaagaaaaacaaaaattagcaaaagaacaagagcaggcacagaagctgaaaagccagcagcctcttaaaccccaagtgcacacacctgttgctactgttaaacagactaaggacttgacagaca

SEQ ID NO: 204 - DNA, 339 bp, Homo sapiens
  misc_feature (1)...(339): n = a,t,c or g
ggtaaaatgcatatgttaatttataatatatgaggcttttttagctctaaaaggctattattcactagttgctgtgtgaatcagtatttctgggtgcagttagaaattattagagttgatgcccaagactcatctccatcagcacgggggaggcatctgctcgttttatggtcagtgactctgggcctcctgctgggctaagtcctgaggtgggtctgactcaggtcaaagctgtgcaccccggccctcctcctcaacgtgcatgaatgctctttaggatggagcttgacctngctttcaaaccacttggnccattacnggccttgaaaactgattggg

SEQ ID NO: 205 - DNA, 417 bp, Homo sapiens
  misc_feature (1)...(417): n = a,t,c or g
gcggcacgagaactgggtatggtctaagaaattttcagaattacctttaagtacttataaaatacctaaaatacttttattatgtttaaaaagtcattccagataatatataagatacaaatttgtatcnnnnnnnnnnnnnnnnnnnnnnnnnnnnnnnnnnnnnnnnnnnnnnnnnnnnnnnnnnnnnnnnnnnnnnnnnnnnnnnnnnnnnnnnnnnnnnnnnnnnnnnnnnnnnnnnnnnnnnnnnnnnnnnnnnnnnnnnnnnnnnnnnnnnnnnnnnnngaaaatttgtatcttatattcatatttcatatgtagaaattcaggtgctaaattactaggtaaaagtcacaaattactgacnaataattagaaataagatatttggatttttggatganccnttatataaac

SEQ ID NO: 206 - DNA, 156 bp, Homo sapiens
gggcataaggtaaggttagaggtttttgttttttgcatgaggatattcaattatttccagcatcatttgtggaaaagattattttgccattcaatttctttacatttgttaagaaattagttgactatatatttatgtgggtctatttttggtctt

SEQ ID NO: 207 - DNA, 393 bp, Homo sapiens
  misc_feature (1)...(393): n = a,t,c or g
attaggaggtgnnnnnnnnnnnnnnnnnnnnnnnnnnnnnnnnnnnnnnnnnnntggattctctatgatgcgattagtgcccttctgaaaaaaaggaatagataccagagctttctgtctcctgaccatatgaagatacaggagaagatggcccatctgcaagccaggaagggatccctcaccaactnnnnnnnnnnnnnnnnnnnnnnnnnnnnnnnnnnnnnnnnnnnnnnnnnnnnnnnnnnnnnnnnnnnnnnnnnnnnnnnnnnnnnatatgcttttatcaagttgagtaagtcgttttctgtcactgattggctgagagttttttatcatgaatggctattgagttttgtcaaatgccttttctgaattntttatcttattatgtta

SEQ ID NO: 208 - DNA, 647 bp, Homo sapiens
  misc_feature (1)...(647): n = a,t,c or g
ggcacgagggcaaaataaccctcaggcatctgagcatttggagaaacagcagagcttggattgtagtatttaaatgtcaagggatatgcaagcaaagaaaacataggtctctaagggagtatactgtcatattttaaattcattgcataagcatccaaacatagctctagattttattggtgatcttcatgattttttttataattttgagaataaaaaatatggatactttttttaaaatttagggaataaaaaaatataaggatcctagttctagctgaacattcctcctacccttaaccacctcccatacacactgcaagtgggagggctgcccagcctctcgattttcaccctgtgtccagtgggggtgaggtgcactcttgacgttggacaaggaagaaatcatgggaccgggggaaccaggaaggaagcttgttcatccgtgggaagattaaactttcattctgagcatatgactgcatcacagctttttgcttctgttcttcttgcagttaagatctttctattctacgtaatattttatggctgcctggctggcatcttnatcggaaccattcaagtgatgctgctcaccatcagtgaatttaagcccacatatcaggaccgagtggcccgccaggtaa

SEQ ID NO: 209 - DNA, 760 bp, Homo sapiens
aatatgttatttgagccttgaagtcaattcttgactgacagatattctgagggaaggtgctctgcagatgcaaatatagttgatttacacatagctggagtatatactgtatttccatgactttcacccattttaaaaaataaatgggcatccctttttcagcaatagcagcggtttaagatcccatgaacagtaacccatatttagtcacaggagacatttgtgcacacaatcgaacatatcttaatgatattgatgaatgattttgacacctattatgttcctttctcattgggcttggccattctgtggctgactatatgggcactgcatttcctaatcttagagagctctaacgccaagacatctgccttgtacatctcaggtggcctcctgtaacctgtgctgtctgtttcttgcagatttggacacctcccacactgagtccccaaccccccatgactcaaattcacaccgccctcaactgcaggcgtttataacagaagcaaagctaaatctaccgacaaggacaatgaccagacaagatggggaaactggagatggagccaaagaaaatattgtttacctctaattgtgttgtcatttttccaaacaaaacaaaacactggcacttttgggagaaactttttgtctccattccttatgtatgtgtgattgtctgtgtccaaattgctttaagaataatatttaatatttcctggaagctcatttttttggcatgagtctaattaaattattg

SEQ ID NO: 210 - DNA, 422 bp, Homo sapiens
gttgaggaaatgctacaggacactgatctgggcaaagattttttgggtaagacctcaaaaacacagcaaaataggcaaattggattacaaattggattacatcaagctaaaagctaaaaagcttcttcaccaaaaaggaaaccattaacaaagtgaaaagacaagctacacatactgctttctaacttacatgctttttaacttgaaatctgctggaagaagtctccatgaacatataggtcttacattacctatacatcagttaacttatactcatccttcagttctcagcttacaggctgcttcctctgagaagacttctaagtctgggtgagtagtcatgactggaatactgtactatatacttagaaatgcccaaaagcttcccaagggggtatacaggcataacagtcccaaaggaa

SEQ ID NO: 211 - DNA, 581 bp, Homo sapiens
  misc_feature (1)...(581): n = a,t,c or g
gataccctgccttgctgctaatacctgccttctagcctaactgccaccctcccaccccaggggcagacaggcaacctttccagcctggggtggggcagagctcacagcagggactctgcactctgcacgtagctcaggctctcattcttggttctgctcttaagactgggtccccaccctcttccccataagactacactgggctgggttcctttcagctcgaggaagccgtcttaggaactaggaactgggccctacacaggggcctcagccccgagcttcacataacttatctcctacaaattttaccacgtgcatggtgatctgggtttgcagtcccattttactgctgaagagacccagagacgatcacagctcttaaacggcatttgaacccaggctggctggtgacaaaatgtgggctttgccttgcatggccagatttctggatgtagggcatcctgggatttgcaagggacaaacggcataccctacccctccgaaaccgccttgagcgcaagcaggaaaagagcaggcactaagcatgtgataagancccaccgtgtggcgaagatgagcaa

SEQ ID NO: 212 - DNA, 1553 bp, Homo sapiens
  misc_feature (1)...(1553): n = a,t,c or g
gtgagtgacatcaaggcagtgaaagccaactggagcaaatggaatgatgactttgaaaaccactggcttacgcccaccatttccgaggtcctgtccacggcggggcctcagcagaactctctgactggggcccctgcgtgccccacccagccgacatgttttctttggcctgggtggtttataccctgagccaacctttaaaaattggtagatttcacataaaagtccagatccacagcttctcttgaagaatgaccacctggctacgccggctcttcggtggcaacactacctgggacactgcctccccagtcaccaagggccccagcctggcccgttctactcacctaagtgccgcctgacccttgtacactaggagctggcctcccacctctgcagggttatttcctgcacctcgaggccgctgcgggccaatctggagtgaaacacggggacctgaaggatggagaggctgggaccccgctttgaagagggtgcagcctgggaagggcgggccttgctggggactgcggtgggagtagagtgcccaggagagggtctgaggggtgggatgggggtcaggacaattttgcaaaagaagtagctggaagccatgggactggcgggagcctgtttgggggatctggatggttgactcctaggagtcaagttcagcatcttcgccgtggctgcagagctgcctgatgggcactagagggcacgccagccccacactccctgggtctggcttcctcccgcaacctcactctagtagagcctgtgcctgcctactagcactctggggttcggagagtttgggaatttctcagagccaactggctcaggcttgggaaggctggctgctgccctcagctccgcctcatcagctatgtgaaggggtgtgtgtggagtgatcctgccgccccctccctgggctggtccagagatctcaaactccgatgcccctggggccacgtatgttgtgtaaatggatgaaacaggcccttgagttgggagcctgcttcactttgacttttccactgtttgctggagacaaagacatcgtgatgagagaaagttcgcacaatctagtcggtaacagccactttccttgagaccaagagagtgcggtggggatgggggggagagcacgggtccccgtctgacagtggccgctgcccaaantcaggtgtagctaattgctctggtgtgggaatgcaggcctaatgacagaaatctggagaagccagaaatacagatttgtatgtgagatgtcctgattttttaagttgttggcagaaattaattcagaaatcaaatctgcaggccaaacaaggtgcaggacccagctttggccccatgcccctgctaggnccctctgggacagtcaccgctggggtcctggctgctctgtcattgagggatgctgggcactgctgccgggtggccagggtatggggcatgtgcccagcaatgtggctccttggccccgctggccagtgtcctgggcccctgacaggcgctggctgtgagtggtttgtacatgctacaat

SEQ ID NO: 213 - DNA, 1498 bp, Homo sapiens
  misc_feature (1)...(1498): n = a,t,c or g
ttttttttttttttaagaaaagtaaattcatcttgctcacagtcctttctggaagagtttagaaagcaaagaattcaccgactcagcaggaagcagaacgagctgttccttcttttgacacgcacaagctaatcccctagagagtggggatgtgggaaacggagggtaattaattctttggtcactggttcactgctgaatagccttggtcagttttggctctctcctattttagggggaaaaatatttttgtttcttttttttaaaaaataaaatgttcgcacaatgggagaaaattgctttaagtgttacaccttagccaacagagcccaaactccgtgtttccgttctttctctttcggtttctgctgagggctggtgacacactggcctcttgtcagtggctgccggcagggccaggaacagagtagaacctgcagcacagctcagtccagaaagcgctggcagggccntcttccgaccgcaggccgtgcaccactggtcccggtgctcgatgccatacaccttgcggcacttcttagcctcccctcgggctttcctggcaccactctgggcccggggtggagaagtgacgatcagatgagatttcatcgcaggtgctggctgctggggcttcgctgaagcttagcgaccggctccggaccggagagagagagcaggcggcggaggggcagcagcccagctgacactggtgtagatgtgtggtgagactgggatctggaaggaatgcagagcctggtatgcatgatctgcctgaatgtgccagaaggacccaggagctgacttgctgagagcccctgagggcagggaggactccgggccaggatgttctgggccggaggactgggctttgtgcagaggtggtggaagagcagacagaggcaggccagtcatgctgggggtgggagctggctcggaggtgggagtcccagggactgggggtctgcggcagcagcagcagcagcagcagcagattcctccttcagctgcacctctgtgtagtagaaatcctcctcccgcttgaactgatcagagtccactgtgtcccccagatggagggctttgacgtgtcgtttgatgcccacaatggagcgcagaactttgccacagtttggccacaggcacttgtacatcaccttcacagagttctttctttttcgtggagctggttcgtccagcaggaaagggtcaggatcggtctcaaagccatgatcagtttggggagaaccaaaagcatcccccaaatacttggggctggcctgggggtggggggacgagggggtggagacaccactgctcccactccagtgaccgctggtagtgctgtgccgctgtccgagatgtcaccactctccttccatgggtcgcaggccgcacgggaagcagagaagttggcctcggtcccgggaggactctgtacaacagggctgcaggacagggacgtcagcaccatggccgccatcatctcatccatttc

SEQ ID NO: 214 - DNA, 459 bp, Homo sapiens
ggtacaagtgctagtgtgggtggtactgtcagcagaagccgtgcttccctgtgggggccagtggggctgaaagggctgggctgggcaatggggaacggaacatctaagctgctcttgtgggtgcccaggaagcccaccctgctcccgtctgtcctctccctaattgctgctttgctgcacaagctggagagtttcgggggacctggaacgtcacttgtgtgtggtaggtgagggaggaccacggatgcatcagacccagggtcgagcaatttctgacgtgtcttatttgatcccagcgacttccctgcacagaggttctcaccatcacattgtgggtgatgaccgtggcccaggggatcccctggcccctaaagggcaggcaggagcactgtgctgttccccagtagccttcagaccccacaccctgggttttttctgcaatgctgtgcctgttcccac

SEQ ID NO: 215 - DNA, 460 bp, Homo sapiens
  misc_feature (1)...(460): n = a,t,c or g
gaaagcagactgggaaggacgaagcctgtggggctggtggggctgagtcccaaccagcttcatcagtggtgatccttttgaacttgtaccaaagtttccagaacagaggcggcatggatttacccttgtgtgatgctcgatctcagagatgggactctgtgattggcctttgttgaactgacaggtatttgaatgtgcacatcctacgtaggacatcgcattgagtgtaggcatagtgccagggcagcttgcctcatcgttaccaaacgcgtttcctgggatctatcattctgtccattgtgctttctcctgttactctagcagttcagtgaatgtaagattactactctgtatatggaactttgaaaacaagaatgaggcccattnnnnnnnnnnnnnnnnnnnnnnnnnnnnnnnnnnnnnnnnnnnnnnnnnnnnntaattggttaaggaccagctg

SEQ ID NO: 216 - DNA, 178 bp, Homo sapiens
tgttcagcccactcacctcttctttttggctctgtcataatccacccaatgtccttagcctcatttacccctggggcaatgttcctggttccgtctctcaacatctggtgcttcattgcccccaccctctccctcagaggcagaggcagacatacacgtcgacgcggccgcgaattcc

SEQ ID NO: 217 - DNA, 1063 bp, Homo sapiens
cgctgtccatccaggggcgcaggcagcggcttcacctgcttcacaggcggcggctcctgccacttgtcgaatttgcgctcgatctcatccttcagttcgtagcccaccttcccttctgtgctctcgtggaaactgtccacacgggctgccagtgtgcacttggcggccaccagccgggccgctttccgccgcagatccggtggcagggactgcacgatgtcactgtggtagatgtagccggtgtggggcagcactgaggtagacgagaagcccgacagcgtcttgcgctgggccccgagcagcatgatgttgcaggcgggcatcttggagaggttggtcaggccgccggccacacccatgatcttggcggccgtggatgccccgataatgatggacaggttgggtgcgatgaaggacatccgggactccacatactcgtagatgcggtgcttggaggcgttcagctccagcgccatgtcgcaggcctcctccagccgctccagctcctcctccgacagctgctgcccctgggtggtggaggcggtgacgctgacgaccatgatggtggcattggtgaggatctgctgcaggttctcattgttcttgcacttgtccaggctgttgcccagctccttgaccgtgcggatgtaatccagtgcattggggaccaaggactccagttcagggaatctctttgagtacttatcccggatgaacttatggatgatgttcagctcgttttcgatctccacggtcaggttgttggcatccacgatgacgcggtattcaggcgcggcctccactggtcccatcacttctgaagctttggcttgcttgctgatatactcctcaatcttcatcataatctcagcaaacatcttactatcccatagcttggcgatggtcttgactgaatccccggaaagatccagctgtgtctcctcctgcacatcctcgatcgctggctcctcttcttcctccccatagcttcctccttcctcctcttctgctgcctcttcgagatcagctaagagctcatctgccagagacatcccgaggcctc

SEQ ID NO: 218 - DNA, 1249 bp, Homo sapiens
tttttttttcaataacaaaaggcttaacattttatttaaaaaaattagaatatcattatttcattattgtaatgggacgaatcctccctcctttctgccctggttggagagaaaggagtgcagcccacttgccctcactaccttcagcctcctcagcagcttctggcgcctccacattcagaggtttcagcttccccgccattttccaacgcggggcctgcagcgcgagcctcgcttgatgactggttaaaaaagaaaccacgtgagggtgaaaggcttttcagcacgcatgctgagcaacccgcggttacgccagcggttaaatcaggagtcagctctgggcaggcgcagaacacactgcggccctgattgccagcacacatgctacaaccttgaggctgtaactccacaaacaagggcagaactagggtaatggccagttggggagtgagggtagtgtgcacacacacaaaaccctagggaggtctctcctgctttaggctgcttgtcttgtgcaggttgtcaaagtctgggacagaccgtgcatgtgctatgtggtggtacacaatagttcgagtctgttttcgtttacaaatcctcatcaaagagttcatgagagagggttacttatctctgtttcacagatgagtaaaacgaggcttagaggctaagtgcatctcctatgtaaaaatgctggatttcagccactgtgtgcagtcaggtgctgtgtcctgggttccacaggtggacactgaaggccaccttctcattaatgttagcagcagccagcattgagggcgggtcatttctggcagggtaaagatgaaaaaagtacaagaagggcaaaggaatatccttgtgggtcttacttttaggccttttatgtagtttttttctttaaaataccctcaggccagtcccaagcatagcctggccctgaagtgccaattccagcacccccgtgggccaccctagacaccttggccagatctggacactcagggctgagattcaactaggaggcagaccacggaagcaagtttggaggggacagtccctgacagaggctagagcatcatccaagtggaggagatgagacagagggaagggagagggaggcctaaggatttccccagaggggaaggtgcatgactgggcagggaaagcagcctgctcgcctgggcggctgccaccatctctctcatcggtgggccctcagaccttgccccatttgcttaggggagacaat

SEQ ID NO: 219 - DNA, 485 bp, Homo sapiens
ttttttttttttttgctttggtgagcttctgattttactagaaatacactctaagaacagtcgagacgccgcgcctggtggaggcgatgggtcatgttactggttctgcgatgatcttccagagctccagctgctggaggcgctcgtaaaccaggagctgtgggaaggaggcctccacgggctccaccacgaagcgcagcttgccatctgtgagctgctccagcgcgtgcaggcaggagcggaagtgatcgtaggcttcacatgtgacgtccaagtgtctcagtgtgaagttgagcctcttctccaccgacagtatggctgtgcaggcatttttcaatctgtgggcgagtcgggagagcgttttaaacacagcatcagtcaagtcgtcgtcgtaaaacacttcggctgcaaacaggatggtggtgtgatcgtacaggtcagaaatttcctcttgtgaccaactgaaggggaccttgggatctgtg

SEQ ID NO: 220 - DNA, 673 bp, Homo sapiens
gtcttcttgagggtcttgagatttctcttccttttcttccttctttgtttcttcttcggacacttttgccacatctactgacaccacggtttgatcctcttccacccagtcatgagccctcttcatggccttattgagtttgtcaggtgtggccgccacatgtaattcaaagagaagctctgtaagcatgcgagcaaattcttctcccttttcttctaagccttgttcttcttgattttcttcattctctaattctttggctgcaaagatgtctttaatggaaattaggtcattttttaagagttccagcttctctccatcaagtgatgctaaaaatgactgaaccttgctttcgctttcattggacagaatttccagggcttccaggtgtgacaagccttgatattcatcaaacagcatcccgtagtgcgcggttctctccatcgtgagctgctgtgccagtctctgcttctccttctccttagcttcccttaacatctgcagaaatacacaatgtttgtactctggatgtacatttaaaagcaccgtttcctgtgtaagacatgcgggaggccgggaggactgattttgtgttggcgacggggagattctggtcactttagaatttctaaaaaatgatttttttgattgatcctattgataacttttacat

SEQ ID NO: 221 - DNA, 549 bp, Homo sapiens
agcatttaccctgaaaaaactttgccatgaattatcttgtttttattattatttttggatcactctagtatattgactttggaaacaaaagatatcattctacttatagcattctggttttactagtggtatttccatttacaaaatatggaaattcttgatcattgaaaatgtcaaatcctggaaaatgtagtattcctacacgtgatgttaacatcgttctcaaacaattgttggccaaagattcatttgatgaatctgatttttctgaagtagatgattctggtgattcagatgattctgatgttagttctgtttagaaataactccaagaatagtttttatattttattttcacattgaaaatcagtcagatttgcttcagcctcaaaaagcatgtttatgtaaaattaaatgagcgctggcagtgagctgcacttttttttttctaaatgggaaaagggttaaactctgcttcttacaataaagctttgttaattttctccaaaaaggtcttgcatatttttattagatttatttctagaaact

SEQ ID NO: 222 - DNA, 441 bp, Homo sapiens
gttttttgaacagcgaaagagagacttttaatcgacagtcttgcaagatcaggtgtctggagtgcaggtacacctgggacagtttcaacaaactatttcttccctagtgtgcaagtcccttccccaattcctcattagctgagtactacggggttatagtcttcctgggcatcacctattggtagttgtattaagacttcaggtatgttctttagggtctttttgctgcattttttgctgcattttgttgcagccacccataatacatggcaactgtctcaagactctgagcatttgacttacggccttaagtgactgcacttaggtgatggcaagctagcccaaactaaattctttggtgaggtggggaggggggtcattgagggggccctgaccagtaggctcctggacactgggtcaaagggaaagcaggaaggaggg

SEQ ID NO: 223 - DNA, 1038 bp, Homo sapiens
gcgtaccgcccacgtctcagcttggagaaagacactcaaagacccccacgctcagctctcgggggctggcttcctgggccctttgtgctggctgctttcccggtggcttctcagcaccttgagcctctgatgccccgcctctgacctcaggtccaactacagcaggtggctgcttcggtgatcaaatccctccgtggcagccaaggacaccggccctccacaccagctaccaagagggctggtgcccacagggaggaccgggcgccaggagggctcgctgaaatctcggtcccatcctgttctgcaagtggctgagtccctagggtgggacgagcacaggggctgaagggcccaggctgctccaggagtgctgcagacggcgaccgggaagtggggtgaccagggagcatggccaaggccagagtgatgagcatggtggcagggaggagagcacctcacgtacaaactgcacgagcttcgggcgcatgcatggctggccaagactgagggtcacacagggcagacaagggagacgagtcacacgtggcagcacatcatccagtcctcggggaggtgagggttggcatgtggcgggcaccggtgtgcagggcagccccatcctggggctggagcttccctagacccaggcaccacgcacaggcatcccctgctcagctcctgaacccggcccctcctgcctggcccacgtcccgtatcgcaccctccctgccattccagccgagggcccaccctgcgctcctttttcttccagggtgttccaggatggtcaagttccagcactgagaacagctcaggtgtgggtgtggctattgtggaggccgtgtctggtgaacctggtgaacttggtggtgggacggtgctgatgcaggggagccacagagggttacgaccgacgcgggtctgacagcacaggcccaggcaggcgtggactcgggagccgagggtggtcggatggcagcgtgagcgccagtatcatttccagcatttccatctttaccactccagtcactctcttca

SEQ ID NO: 224 - DNA, 678 bp, Homo sapiens
ctgggacccggcaccagggaagtactgtggccgctgcggcctcagctccgactgggtcaggttgcggagactccaggccgcttccagggcgagtactcctgattgtgacatcacattcatcccctgggcgatggagcttgtcactgggaaggaatactcagtcggagaatagccaacaagatgggttactgggagaatctcttcagtggcactgagtggaggcatcagggggttggagccttgtgaacagggaacctgccccccaacacttggaaggacctgggtttcagtgatgagacatggggtatgatgtaacccgtttccagggggatgttgacgaagatcttatctgccctatttgcagtggagtcttggaggagccagtacaggcacctcattgtgaacatgctttctgcaacgcctgcatcacccagtggttctctcagcaacagacatgtccagtggaccgtagtgttgtgacggtcgcccatctgcgcccagtacctcggatcatgcggaacatgttgtcaaagctgcagattgcctgtgacaacgctgtgttcggctgtagtgccgttgtccggcttgacaacctcatgtctcacctcagcgactgtgagcacaacccgaagcggcctgtgacctgtgaacagggctgtggcctggagatgcccaaag

SEQ ID NO: 225 - DNA, 708 bp, Homo sapiens
cgtcgacttttttttttttttttttacacgtgaaaaaaataatttattacagactcttttacacattaacatggaacatttatacatatatcgatgtgctgatatgaaatactaaatttaaaggcaaacatttttacacaaaagtagttgcactctattttataaagatagatattaataagttatcagagacatttaagagctagaggccaattattccaacagtaatgcattctatgctgaaagtaaactaagttttctgaacatgatgtcctggatataatcacattcttctaagctaaggaaagggagctcatttctgggaatacaaggccaagaagggctctaacagcagtatcccagcagtgtgtttccagatttattcttggatgtggttggagcgcccaacatttagcctgaactaatgtaacagctcaatgtgaaacaatgcagctttctgtaacagctgcctgtggttaatgagatttaatacaggggatacagttacaaatgatagcattttagaagaattataattgccatatgatttgaattagtaatcaaatactttaataacagaaacgtgtattctatatttctgaaagggaagtagcatacttcaaaatagtcactattttcttagcatgatatgttaattcttactttgggagtctgaaaataaattgcattttttcccctaaaacttag

SEQ ID NO: 226 - DNA, 1494 bp, Homo sapiens
  misc_feature (1)...(1494): n = a,t,c or g
ttttttacaaaaaggatttttattaaagagaaatctgtttggtgggtcagatatgaaatagatttacagaaactttacatcaggtgtctccaagacataaaaggccgcccaggaaaagcaacgcccccttgccaggatgccagtgggaggacggcaggatggcagcccaggccacgtggcgtggaccctgcgtaggaggctgcaggaagctccaggctgcccgacagtcacggcgttccccggaaatgggttccctaggagggagcagcaggcggcgggggttccaggcatgtctgtgctgggctcggagctcgtgcacgcacactgtcctgcttaaactcctagtccatgtctgtgctgggctcggagctcgtgcacgcacactgtcctgcttaaactcctagtccatgtctcgtgggacccccaaagccgtcccctaaggaatgtgctctggtacacaaggggaaaacacaccaacccgccccttaccgagacagcgggcgcaccagcctgggccacgtgagcctctgctgagctctttggcacagcacacctgggcctttaacacctgtcacttacaaaagtagacattcctgtagtaaaacttcttaaaaacacctatttctgcaaaataatgtgtttctgtatgtggagctctgcaaatatacatgtcctttgggaagaaagcagcgtggaccgagactgagggctggtccggggacgtccgagtgctgctggaggtcggtcaggcttcagtccctgcccgctgcccgcgctcacatgaggtcgttgagctccgcctccagcgccttggccatctcgtcggcctcggagctgctgccctcgtcctcgttgctggactccctgctggactcgctggcggcgtcctcttcattcagcttcctcttgtggcctctggaccccggaccctgccgcgctcctctcgctggacgcaggtgccccgagcgtccganccctgcgggtccctggcttccggggctggggctcctcctcctgctcctcaggcctcctcttctcgctgtcgctgtcgtcgctgccttctccaaggatgtcgtccacctgaaggaagagggctcctggcggatgggtagggagctggagggtgctgggggcccccgggcgcccgtcctgatgagcttccccgtgttggagtcgtagatccgaacctcgggnccaggctgggccttgggaagnaccggcatcgggtggnacaaggcggtggggggnacaccctcccggtcggnnaagnnngcagggctgttctccctctgtgccttggtgtgatcgtccctgagcgggaagagctgctcctcnaccttgtcccagcgctccaggcagctccacagccagtcagggttgaccacgtgnaggtgtccgactcctggcctgcagcaccttctctgtgccagctncgcggcgatcaggtgcgtggcctgtcaggggcgtcggggctcagcaccagccgagtgagga

SEQ ID NO: 227 - DNA, 985 bp, Homo sapiens
tttttttttttttttagctcacgaaagaagttccaggatatggctataacaacaaactaatcttggtgatatctgtgactgtaatactaacgattttgattctaattttttgtcttattgaggtaaggacaataattaattcaggttttcagaaagcaatcctgtctttgtgtggattcagaacccacaaactgaaaaccaaagccacttccccacttgacattcttcttcagtcgtttaaggctgaggtatgctttgttcttttactgcagtgtatattccaggatttttaaaggatcctcgcttccaagagatctcaagtcacccttactctgccactaatttatttccttgttgctgaaatgatgagagatgtataatctccaccctcacggagttgtcatcaccctggcaacccctccgtagtcaaggccttcttctccatgaaattttatcattaatcgcttccagagatcttttggtctcattttcatgacctgtcaatatgattcccaaatataaacgtggacaatttatcaggggtaaatggtgaaggtaggataacgccgtgattccaattccttctcaaaccaaatacaagttctcctaaaacgggggtggcatgtccctgtcaggcgcacttcgacaggcccgttcctacggcctccgaggttagacatgctcctggcggctggggcggcgggcgggacgggggcgacggcgaggcgcggcggagtcaccacagcggccgggtggggcccgagcagccggcgacgcgactgcagcggcctgagggtcccggatgtgccaagcgtcgtcgccatgagccgcggagggagcggacgccacggcctttccctcctctaggcgaggcctagtagcggacagggctggtcagctgaggtgggctgctcggcggcaccggagcaggactgtggacttggccggttcctcctccacccgcccccttgtctgagtgacgccg

SEQ ID NO: 228 - DNA, 529 bp, Homo sapiens
ctctcggactcaccggatttataacgacagaagttgtgaacgagctctatgtcgatgacccagacaaggacagcggtggcaagatcgacgtcagtctgaacatcagtttacccaatctgcactgcgagttggttgggcttgacattcaggatgagatgggcaggcacgaagtgggccacatcgacaactccatgaagatcccgctgaacaatggggcaggctgccgcttcgaggggcagttcagcatcaacaaggtccccggcaacttccacgtgtccacacacagtgccacagcccagccacagaacccagacatgacgcatgtatccacaagctctcctttggggacacgctacaggtccagaacatccacggagctttcaatgctctcgggggagcagacagactcacctccaaccccctggcctcccacgactacatcctgaagattgtgcccacggtttatgaggacaagagtggcaagcagcggtactcctaccagtacacggtggccaacaaggtgcgcggg

SEQ ID NO: 229 - DNA, 216 bp, Homo sapiens
aagcttaacgaggagtttctgtgatgtgaagaggagtttttgtttttttgttttttggtctgtttttgttcatgtagatgtccccagaatagtgcctttaccacctccatatcatacttcttacattgctctttttttctcacagtgctattcaccttctgacattccatataacttacttattaagctgttttctcctccaaaaaaaaaaagctt

SEQ ID NO: 230 - DNA, 437 bp, Homo sapiens
ttttcacttagaggtctcaatacagggaggtggccaaggaacaacacttctcagtggccaccagttcatatatcccctcaaaaggctctacttttctccaccaaaccattgggttgcccaactgtgatggaaaaaacaagcagatgttggcccagaactccaggacctccccgtgggctgaggctcatgtggcatacaattcagtgtgaccagttttaatgttcagaaatatgtgaattagaatgacttttaacttcacacagcacaaaagagaaatggagtttaaactggatttgttttgttttgagtttcaagtcccttttcactacaacaccgtccaaaactatctacctatctcttcttttttatccatctgcccgctgtattttaatgtcaatcctaattcagacaaatccgcaacttcatgatactggtaa

SEQ ID NO: 231 - DNA, 357 bp, Homo sapiens
gccacttgttatagaaagcctgtcttttaaggtagctctggaccttttcagaggcagccaaattgcccctcatggttcgtcccccacatccccgcctgcctggcctaagtcctccttccccctccccaacagttaaataagtctttgtctccattacaaaacaaatctcagagctaccttcaaagaagagccagccctcagttggtgaatgaagatactttgacattttcctatgagcatggtgaaacaggtttaatttgtattaaatagcttgaagcaatccttattgggaattacaaggtggaattttagtcacaggaaaataaagcatttcacaagctacttactttcatgaac

SEQ ID NO: 232 - DNA, 1606 bp, Homo sapiens
aactgaaaacgcattgacataatcatttttatttgatttaattgataaataaatacaagagaactgttgtgaaaccactggcaatatagtaaattttaaagattttatttcaacttcactcacttatatttcttggaatggggatatatacattattcaccaataaatgctaatgctttaaatttacaattaccctatttgtagaaacctgaagatcattccaattaaatgaaaaaaaattgtacaaaaacgttcttttgctcttacaattcaaaatacattcaaattcacattcttacagcagccaaaacctttaacccaaaattcagaactgcagtcctacaagtgaacaaactagtgttttaatttaattatcatgattgttgttaacactgaaaaaaaaacatggtggctcctgaaacaagacaggttagcaactggtacagctttcccttctgggcactcaaagctttgcccttgattattatttttatttcatcttttcaaacacagacaattgctccaacttgaaagtttcaatggaattttggcatttaatattgctaatgcttgctaagatttaagatctcccaatgatgagaatcagaaaatgacgcacgactaaattaaaatcatcctaaaagacttactacatagtggtatctggtattcaatatcaatagtgtttttgaattacatgatatgtttttcacaaacatagcacctcatcaaatatctggtaaacactttgcaatcacaataagtgttgggagaccaagttccaaagacaattatgtgattcacttaaaggtaacattgtaagacaagtctcaggcataatgaagattaggaatgcagtctgctggttcccatgatctaaagggatgctcacctatatgggcaccatcctattaagacgtggtaatatgtttccaaaccaaaaaaagtcggtaagtgttaaaatggactcctgctttataaatgatctgttaaatgtacttgtaaaattaaaaaaatttccaaaatgtcaaaagagatatgattattgtatctcattattccaagtaattctgttaaaaagatactaaatgaagtccaattttatcttgtaaagttttagtgtaaaaactaatgtactgaaattcagtaaagtttaactttcatctaaatgtaacgaaacaactattcattttggtgagttttcacaagctgtactcctgacctgaagaatcactttttttatgccgaggagatggagtagtctttgtaggagatggggacgcagtaccaggtgagtcagttcctccatcgggaagtacttggtgatgacgccagatagggaactttctttcttccaaggaatcctcccccttcaaatcctcctttcttcctaaactctattttattttcattttcatcttctgatgaccttttcttggattctgaaaaaccttcagctattttatgcacttccaatccactatccaattctctcaaactttttatttctactccaggagactttctctcagatatattacattcccctgttgcccctttcacttcagcttgtattggacccaagttaccattttcagggacagct

SEQ ID NO: 233 - DNA, 520 bp, Homo sapiens
gttttgttgttgtgtttgttttgttttgacggtggattcattcggcaggctgtagtgattagttttcaagtctttcgcaatgccaattcccccaaaattaacaatgtctctcaaaatccaagaaataaaatgtgtactgtatttacaaatataaaatttaaaaattttaagattataaaaattgaagaattacatcatctgtcaggtgagagtgtcaacctgcaaaagcaattaacttatttttaaaaaaagaaattggagaatcaaccatttaagcatgattttaagttcaagaattttcagatgttattttcttacatggcttccaactaattttatacagtaagttcaagtccatagcaaaggtaataaaactgccagttgaccttgatagaaactatggaaatttataataaaatttcaagtcattttaaaaagaatatgaagccttgtttgctcctacaatgcaacaaaatctagattccttttcttgatataaatctctattattctgaaaatc

SEQ ID NO: 234 - DNA, 938 bp, Homo sapiens
attgggactaaagccaccaacagctaccaacttccatgccaccgttttatatagtcgtattgaaaaaaggttgcttcgtgtttcacatcttcattggttaacttgcaagagaatttgacagaactctcacttgactgtgaagtacttttagaaggcaactgtgaggtgctagtctgagaactactcttagaagccaactgggaacacacttgcctaaggaaatgccttttggaaaaccagaaaatcccactggtctgggaacctgctccttggaaagctagtaagtgaatgcagctacctgggaagtgctcttggaagttagcagcgatgtatttgttgaagagctgctcttgggagtcagtaaggatgtgcctgatgaggaactgtttttagcaactgatgatgaaacacttgcctctgcaactagttttggaagttaacccacttgaagctgtctctgaactaggtttggaagacaatagtggcaattctacctctgagcttcctgaggagcccaacaagggcacctcgatctctgagctgctttgagaagctgaggctgaagagccttccaaagcactctttttaggtgatccactttgttgtctagaatcagtggattgggtcatgtgactattcacactggatttcagcaaggaaacaaatgatgcagaaccgtgtttatctggagcttctgcttcagaagctttcccagatcctgccgttgttacctgagaggaaacgctgctgctgctttggctggaaacagatcgatctccatcacttgtagagctattctgactggagatgccagagctccgagctgagttcccactctctgatttgatggccgaccctatacacgttgaactgttttcctgctgagctgatgcacgttctgtcttggcagaggtttttgcgtgatcttgctcaactgc

SEQ ID NO: 235 - DNA, 514 bp, Homo sapiens
  misc_feature (1)...(514): n = a,t,c or g
ggagagtttaattctcaaaataaggtactttatgttaacatgaagaagtttagcaacaatttcattatctggaaagactgaattatataaagtatgtggaatgagggtaaaaaagagcttaaagaaaatagctccctctttgattttggtatttcctagccaagtactttgccaccttacctgtttttactatctatctggcattttgatgaacttttccccagctaaatcgacgaatcggctctcatgttgcatcccagtgtagcgtgggtgttgcctgctgctctgggagtcctttgtgactcacccctggtgattaggggtccacattgggtgggtcaaggtgtgtattgggatggggggaacactggggggaaggaaaactaacttttcaccngtttactcttttctttctgtttcccnttagggactaacttgttttattattaaagggggttttgaaattttgggantttaaaaaacnccaattgactttaaccaaantctttcccgg

SEQ ID NO: 236 - DNA, 1314 bp, Homo sapiens
  misc_feature (1)...(1314): n = a,t,c or g
aatgggcccaagaattactccaaacatgaggagttaactgtgagcccagctcctgctgtgcctaagggaagggaatcagaaggtggagagacttgaagttgcactcaaggaggccaaagaaagagtttcagattttgaaaagaaaacaagtaatcgttctgagattgaaacccagacagaggggagcacagagaaagagaatgatgaagagaaaggcccggagactgttggaagcgaagtggaagcactgaacctccaggtgacatctctgtttaaggagcttcaagaggctcatacaaaactcagcgaagctgagctaatgaagaagagacttcaagaaaagtgtcaggcccttgaaaggaaaaattctgcaattccatcagagttgaatgaaaagcaagagcttgtttatactaacaaaaagttagagctacaaagtggaaagcatgctatcagaaatcaaaatggaacaggctaaaacagaggatgaaaagtccaaattaactgtgctacagatgacacacaacaagcttcttcaagaacataataatgcattgaaaacaattgaggaactaacaagaaaagagtcagaaaaagtggacagggcagtgctgaaggaactgagtgaaaaactggaactggcagagaaggctctggcttccaaacagctgcaaatggatgaaatgaagcaaaccattgccaagcaggaagaggacctggaaaccatgaccatcctcagggctcagatggaagtttactgttctgattttcatgctgaaagagcagcgagagagaaaattcatgaggaaaaggagcaactggcattgcagctggcagttctgctgaaagagaatgatgctttcgaagacggaggcaggcagtccttgatggagatgcagagtcgtcatggggcgagaacaagtgactctgaccagcaggcttaccttgttcaaagaggagctgaggacagggactggcggcaacagcggaatattccgattcattcctgccccaagtgtggagaggttctgcctgacatagacacgttacagattcacgtgatggattgcatcatttaagtgttgatgtatcacctccccaaaactgttggtaaatgtcagattttttcctccaagagttgtgcttttgtgttatttgttttcactcaaatattttgcctcattattcttgttttaaaagaaaggaaaacagggccggggcacagtgggcttcntgcctgttantccccaggcantttgggggaggttcgaggttggggtgggtccactttgggggttcaggggtttttagacc

SEQ ID NO: 237 - DNA, 1684 bp, Homo sapiens
gccgtgtgacttcgggctgtgggctcgctcgcggctcttcggccatggttttctcaaacaatgatgaaggccttattaacaaaaagttacccaaagaacttctgttaagaatattttccttcttggatatagtaactttgtgccgatgtgcacagatttccaaggcttggaacatcttagccctggatggaagcaactggcaaagaatagatctttttaactttcaaatagatgtagagggtcgagtggtggaaaatatctcgaagcgatgcggttggattcctgaggaagctcagcttgcgaggctgcattggtgttggggattcctccttgaagacctttgcacagaactgccgaaacattgaacatttgaacctcaatggatgcacaaaaatcactgacagcacgtgttatagccttagcagattctgttccaagctgaaacatctgggatctgacctcctgtgtgtctattacaaacagctccttgaaggggatcagtgagggctgccgaaacctggagtacctgaacctctcttggtgtgatcagatcacgaaggatggcatcgaggcactggtggaggttgtcgaggcctgaaagccctgctcctgaggggctgcacacagttagaagatgaagctctgaaacacattcagaattactgccatgagcttgtgagcctcaacttgcagtcctgctcacgtatcacggatgaaggtgtggtgcagatatgcaggggctgtcaccggctacaggctctctgcctttcgggttgcagcaacctcacagatgcctctcttacagccctgggtttgaactgtccgcgactgcaaattttggaggctgcccgatgctcccatttgactgacgcaggttttacacttttagctcggaattgccacgaattgggagaagatggatcttgaagaatgcatcctgataaccgacagcacactcatccagctctccattcactgtcctaaactgcaagccctgagcctgtcccactgtgaactcatcacagatgatgggatcctgcacctgagcaacagtacctgtggccatgagaggctgcgggtactggagttggacaactgcctcctcatcactgatgtggccctggaacacctagagaactgccgaggcctggagcgcctcgagctgtacgactgccagcaggttacccgtgcaggcatcaagcggatgcgggctcagctccctcatgtcaaagtccacgcctactttgctcccgtcaccccaccgacagcagtggcaggaagtggacagcgactgtgcaggtgctgtgtcattctctgacagcagctgcctggcgcccaaggggtgatgaggcatcctttcctctagaagacctgagtcttcctgaccgactccaccatcacccaatctgttgattctccattgggaaaggcatttacagtttcccaacaggcacctatcaagatttaagaatggcgaagacaagaaaggatttataagcaacatctgacatcacattgtgacctgaaacatggctctgacctagctagtgctccttttgccctcttccctaatgagcagcctcaccagtacccatttgcttctctgatacctctaaaggttaataatcctcaagacagaccagacaggcccagcatcaaaatacatcaactgtgtacagtaaaa

SEQ ID NO: 238 - DNA, 783 bp, Homo sapiens
gcggccgcagcctggctcagatgctagacgaggacactgtggtgggtgtgtggcgcgtggccaagctcttccgcctggcgcggcttgaggaccagtgcactgagtacatggccaaggtcattgagaagctggtggagcgggaggacttcgtggaggcggtgaaggaggaggcagcggctgtggcagcccggcaggagacggactctatcccgctggtggacgacatccgcttccacgtggccagcacggtgcagacctacagcgccatagaggaggcgcagcagcgtctgcgggcactcgaggacctgctcgtgtccatcggtctggactgttgagcccctgggttgggcagccccaggggccaggagctctcttggagacaagcatgtgtatgcgtttgtgtgcagctcttcttcctgctccctgcacattgagggcttcatggggggtgcgaggggctcagtggggcttctcttccctccatgagcctggagaccccaggggaggatccatttgggatgagccccctccccccaatgcacaagccagcccccaagaccctgggggtggacaccactcagggaaacctggggtgggggtgggctttggtcttagcactttccttctccagatcccccctacccaccccagtcccaaatccagtcctctggcccttgcctagccctgaattgcttctctaagctggtgttcccatgcacagggccattcaggaagggctgggggagtgtgtgtggcaataaagcttgaaggcaccgtgaaaaa

SEQ ID NO: 239 - DNA, 720 bp, Homo sapiens
gggaaagaatgagcagaggagacggcctcaaaaggtggacagtgggggcgaggcaggaggcgtcgaggttggccctctggctctggcttaggtgactgggtgccttcctccaggccgtgtgtggaaatgcattgagccttctcagtgtgtcctgatgttgtaagtttccactttaatgcagctgcagagactgcgtcccacccgaccgcctcccaagatacagcgctcgaggcccgtgagtagctggtggttctgccctccccacctaacactgcctgagccattctccctcagcctgactaaacctccagagtttggaccctcctgcctgggcaaaagaaaactgggaattgggtttttcagcttccctctctgtgtggcatgaacttgagcttgcattctctgggcttctcttgctttttcgtgaataagtttgggtgacttgcagatcagagccataggtagcaagggggccactgtgtgctgcgtgtgctgcgtgtgcattatttgagcaagtctcctagggtgagcaatgggttggaagccttcctccagacgcctgttcctcacaaacgaagcagaagtccgggggcaagggtctcgttcccgccagatcttggtctggagatgcatttgtaccttcccaggggtggaggctatgtccagggagtatggagccagctcatatggatacaggtaccgctgccctgccaggccttc

SEQ ID NO: 240 - DNA, 429 bp, Homo sapiens
  misc_feature (1)...(429): n = a,t,c or g
gcttggaggctgtagtggggacctgctgtgtgttggacctttatacgtattgtaaagggagacccaaaggagtaaaggagcaagatgtgtacatctgtgattatcggcttgacaagtcagcacacctgttttacaagatccaccggaaccgctatcctgtctgcaccaaaccctatgcttttgatcacttccccaagaagctcactcccaaaaaagatttctcgcctcattacgtcccagacaactacaagaggaatggaggacgatcatcctggaagtctgagcgctcaaagccacccctaaaagacttgggccaggaggatgatgctctacccttgattgaagaggttctagccagtcaagagcaagcagccaatgagatacccagcctggaggagccagaacgggaaggggccactgntaaccgtc

SEQ ID NO: 241 - DNA, 2339 bp, Homo sapiens
cgctgtgtgagccgagaggagccgggtgccacgcttcgtgcagcagtgcatccgcgccgtcgaggccgcggtacgtgcgctgcgggggtgagggcggcaggcattggggtgcccgcagcctcctgccaggaccgcaggctggagacccctggatggacgcagggtccagggggaaagtacgggaggccccgagtgggagtcatagcagggacccgtagccccaccctatccccatccctgaacccgggatcagcgcctccctctggcccagggctggacatcgacgggctgtaccgcatcagtggaaacctggccaccatccagaagctacgctataaggtggaccacgatgagcgccttgacctggatgacgggcgctgggaggacgtccacgttatcaccggagccctgaagctcttctttcgggagctgcccgagcccctcttccccttctcgcacttccgccagttcattgcggccatcaagttgcaggaccaaggccgcgcgcagccgctgtgtgcgtgacttggtgcgcatgctgcccgctcccaaccacgacactctgcggatgctcttccagcacctctgccgggtgatcgagcacggcgagcagaaccgcatgtcggtgcagagcgtggccattgtgttcgggcccacgctgctgcggcccgaggtggaagagaccagcatgcccatgaccatggtgttccagaaccaggtggtggagctcatcctgcagcagtgcgcggacatcttcccgccgcactgactgctggcctgtgactggggcggcggccgcggtcctgccacacaagctgggcggcggaggccacgcagccgggccttcttctctctgggaccctccgccagcgcatagccgcacggcggtgtgacttctgcaccctcggttctgagggtacggtgacccctagtgggcagtttgcaaaatgtgattccttcttcccaactccccatccccccttcccttcccgtcacgtcctgtttgggggttaattcggttttttctctgttgcatcgcgcctactgtgcgtgtgcgatagcgtgtgtgggggtgagagtttgctttctggaatggtaggtgctgggaggaggagtttgatggagggcttcctggctgcttctggccctcacctcgtggaggccttcacagagaccctgtgggccctggccctgtgctggcactgtgccagtcatgaggcagctctgatcacttccccactgtggaaacaggactgacccagccttcagtgtgggctgctgaagctatcctcctcaggcctcagggatgacctcctgcctgagcctctcacaggctggctgtgggccagtttcatctgctttcctgttgggggtcccgggcctctgctgtccttgacccactggtgttctgtgcaagggtttcttcccattcaccaagtgcacaactttgcatctgccgctcggcatgcaccagttccacacaccatcccattttacagacaaggacgctgaggcctgcagcagcagtgtgacttgctcaaggtccagtgagtgacctcattccccagaaaaggctcctcccacaccagagtacagcctgggtagggggaaaatcagttctttcagctaccacccatccaacctttgggcctatgtgaaaagaaaggaactaagctgggtgtgttctgtctggacctggggaggcccctgaaggcaaagagggaaactgtcccagctgttctgtcctaggggagggggacatagccctagcaggagctcccagcccctcttgggcactcttgacacacaagtacacccatctgggggcccgctttgccacgaagagctgggcaggcctgcagggtgtggggaaggaggacacaacctcaagaaaggaagcgtgaaccccagggaacagcgggtcccttccctcctcagacacaagccacctcagcttgtggctcttggcccccagccccaccaacccacctgttcatttattcaacagacaatgacagctgatatttattggacatttgcaccatgccaagcattcggcttggattatcccatttgtttctcacagccggtatttattgtctgctcctctgtgccaggtgctgtgctctgggcaggggcactgcatgggctgcctgccctggtggagcttgtggtctgatgggtgaggctgacccaagcccaccccattgccaacagggccagggcaagagtacacacaggggcctcataccatatgtctaaatatttaaaagttatcaatcaagctaacaactgttaaataaaatatgttctattctcctactttgaaaaaaaaaaaa

SEQ ID NO: 242 - DNA, 424 bp, Homo sapiens
gaactgggggcaactgctgtaagtaattatgatcagcagcaaaagttcttaagttagtaagctgcccaatagatgaaggcaaagcttcaacttcattgaaactacaatccagttcttctactgatattaaccctcctatagagtctggcagatacattaactggttttcatctattttaagcgttgttatattcttcaacgaaccaatagtctcaggaagctgctgaagtgaattgcttgataataggaggtcttgaaggttttcacatgttgaaattccttcttcaaccatttcaatattatttttagaaacatccaaatatgtgagctgtttcaaactaccaataaaccctggaataaaagtcagtctattagcatccatccaaaactctttcaatccacttagttgctcaagtacttcagg

SEQ ID NO: 243 - DNA, 428 bp, Homo sapiens
  misc_feature (1)...(428): n = a,t,c or g
catttcctgagacccattgaagccctatagtaaaaaattgaataacctgtganataaatgagaaacnagttancctacgaaaatgtatattaatctcactgaatgcaacctgtgttttacttcccccaggttaaagatgcnctgttggtaaaanctgtgaagggacatttctgagcacattgaggcctatagtgaaaaaacgaatatcctgctataaaaactagaaacaagctatgtgtgaaaatgctttgccatgtgtggattcacctcacagatttaaacctttgttttgtttcaacaggttggaaanactctttttgtagttgaacgaagggacatttttgagtcccttgaggcctatagtaatgaacagaatatcctgcaataaaaattagaaagaagttatctgggaaaaaaaaaaaaaaaaa

SEQ ID NO: 244 - DNA, 1628 bp, Homo sapiens
tttcccattttgaatcctaacttcctagatgatctgtattttgaccttcaaaggggcccaaaatatttaaatcatgggtgaagctcatgttccattacctgtaaaggtctaatgcaacagaaaaatggtcattttacattggttagaatttttaactaggtctttcatattattttgtttagcacatgacagacttatacacatattttaaaaaatcaaacatggaatttctatatacatcaaacctttaacaatgtctgtctctgaattgctattatagtgttcaaaattatacaaacaaacatccagtaaacagcattttattttatgacactctgtgttaatacaataaatatacaaaacttccaacccactgaaacatgcaacattagagggacacatggagggcatttctgtagaaccatgacagtcaccatgatggcagcgcagtattagttactgacaaaatatacaaacatctctagataaataatccaagtcccaaattacaaatcactgagtaatgactttccggtgttcaaactttagtttgaaataaaattgccataatttaatattacaaaatgataaatgacacggatgactgctgtgtgaagaccattttatgactatgatttcatgactgtgattttagtactaaatatagaacacttaacaaatgccaatcttttgctgagtgaaaatttaacaatttactgagagaaaagtaaatataagaatttaaagttcctttcatacttgatcatactataagcattgccatcatttcaatgcacatatatttttaaaaaacaattttctctctcaaactcatattaaataactggattttaaaacattttccccatccacacaaaaaaagatatgtgggttctaattattctttgctatttaataatgctacctttgaagatttctacataatataaacattccaattctgaagcaaagtatttcagcatttttcaaaagtctctaatatatcttttgtttgtagtgtacaggaaaaaatggacttgggatataagttaatggtgaatataggtgcacttgctgtattttgtggttaatgttttgaatgtatgcaaaatccacactcaataaagcacactgataaaatagatttccaataagactacaggctctgaaaaacaaactggctaagttggttgagaacataggtagaaattatcgctgattagaaatatttacaaaaaatagctttaaattcatacgctgaagaataaaagaaatgtcttccaagtatacctgatgtcaataagatcccaaataaatcaaatgtaaacaccatctggatggatctgtgttacctagtgacatgcagcgctgcttcatggatagtgaaaacttggcatcccacctctagcataaaactttttctgtaactacaggtttggggagaatgaaagtgatttaactatttatgcctatctgattttttaaaaaataaggatttccagcctctaatatcacaatccttacttaaaatctaattgaataatcactatcattctgcaatcttaatttagttaaagactttcaaaacacagcagcatgacttacagatgtctttgagtcatttattt

SEQ ID NO: 245 - DNA, 4152 bp, Homo sapiens
  misc_feature (1)...(4152): n = a,t,c or g
ctgaggagaggagcgtcaacagcagcaccatggatttcttctgttggaatctggaacactggaatgatggaaatgtgttctttacaaagtagctcaacagaagaaccttgaaggctatgtgggatttgccaatctcccaaatcaagtatacagaaaatcggtgaagagaggttttgaattcacgcttatggtagtgggtgaatctggattgggaaagtcgacattaatcaactcattattcctcacagatttgtattctccagagtatccaggtccttctcatagaattaaaaagactgtacaggtggaacaatccaaagttttaatcaaagaaggtggtgttcagttgctgctcacaatagttgataccccaggatttggagatgcagtggataatagtaattgctggcagcctgttatcgactacattgatagtaaatttgaggactacctaaatgcagaatcacgagtgaacagacgtcagatgcctgataacaggggtgcagtgttgtttatacttcattgctccttcaggacatggacttaaaccattggatattgagtttatgaagcgtttgcatgaaaaagtgaatatcatcccacttattgccaaagcagacacactcacaccagaggaatgccaacagtttaaaaaacagataatgaaagaaatccaagaacataaaattaaaatatacgaatttccagaaacagatgatgaagaagaaaataaacttgttaaaaagataaaggaccgtttacctcttgctgtggtaggtagtaatactatcattgaagttaatggcaaaagggtcagaggaaggcagtatccttggggtattgctgaagttgaaaatggtgaacattgtgattttacaatcctaagaaatatgaagataagaacacacatgcaggacttgaaagatgttactaataatgtccactatgagaactacagaagcagaaaacttgcagctgtgacttataatggagttgataacaacaagaataaagggcagctgactaagagccctctggcacaaatggaagaagaaagaagggagcatgtagctaaaatgaagaagatggagatggagatggagcaggtgtttgagatgaaggtcaaagaaaaagttcaaaaactgaaggactctgaagctgagctccagcggcgccatgagcaaatgaaaaagaatttggaagcacagcacaaagaattggaggaaaaacgtcgtcagttcgaggatgagaaagcaaactgggaagctcaacaacgtattttagaacaacagaactcttcaagaaccttggaaaagaacaagaagaaagggaagatcttttaaactctctattgaccaccagttaacgtattagttgccaatatgccagcttggcacatcagtgtttgttggatccgtttgaccaatttgcaccagttttatccataatgatggatttaacagcatgacaaaaattatttttttttttgttcttgatggagattaagatgccttgaattgtctagggtgttctgtacttagaaagtaagagctctaagtacctttcctacattttctttttttattaaacagatatcttcagtttaatgcaagagaacattttactgttgtacaatcatgttctggtggtttgattgtttacaggatattccaaaataaaaggactctggaagattttcattgaggagaaattgccataatatgatgcaaactgtgcttctctatgataattacaatacaaaggttccattcagtgcagcatatacaataatgtaatttagtctaacacagttgaccctattttttgacacttccattgtttaaaaatacacatggaaaaaaaaaaaccctatatgcttactgtgcacctagagcttttttataacaaccgtctttttgtttgtttgttttggattctttaaatatatattattctcatttagtgccctctttagccagaatctcattactgcttcatttttgtaataacatttaatttagatattttccatatattggcactgctaaaatagaatatagcatctttcatatggtaggaaccaacaaggaaactttcctttaactccctttttacactttatggtaagtagcagggggggaaatgcatttatagatcatttctaggcaaaattgtgaagctaatgaccaacctgtttctacctatatgcagtctctttattttactagaaatgggaatcatggcctcttgaagagaaaaaagtcaccattctgcatttagctgtattcatatattgcatttctgtattttttgtttgtattgtaaaaaattcacataataaacgatgttgtgatgtaatattgtgtgaggtcttaaatatcctacagtcgatgtacaagagtagagtatgtttgggaagaaacttttcagcttaagtttgcctcctctacaatgacatcttttatatgcttgtctcatttagaatgcatatgtgctgattttctaatttaagagataccatatctctctattcatttctatctctcatttgtatgcttatttttctgagaacattttttttttcccccnnnnnnnnnnnnnnnnnnnnnnnnnnnnnnnnnnnnnnnnnnnaaaacacgactcgnnnnnnnnnnnnnnnnnnnnnnnnnnnnnnnnnnnnnnnnnnnnnnnnnnnnnnnnnnnnnnnnnnnnnnnnnnnnnnnnnnngtgctaatttttgtattttttgnnnnnnnnnnnnnnnnnnnnnnnnnnnnnnnnnnnntcatgctggcctctgagaacagtttctgactcattcagattaggtatactctcaagtccctggaaactgaaattttttttaactgtaaagagggtagtgcccatttcttttcttaaggtcaagtgacatagattttaatgtaatgcataatttaggtaagaaattaattaatgtagcctagtttattatcttgaaatgttttaccctatttactttttaaaattaatgacctaagcggagggaataattataagtcaatagcagagagattgttgtttgggtgtttatttttttcagtttttgttttgagagattgggttaacacctctagccaaaattgtttggttttagggaggctaacaataacctactgaatttggaaaatgcaaaggtaaaaaatgtatatagactgcctgctgaactggttaagtactactgcttctgggaaatactatttcaaaattctatgtattataataataaatttgtaagacattcattattctaccatcctaatgaaaactttcagaagtctttctttatccatggcatgcccagggttttacctgaatctgatacaggatctatataactttactaggacttttgattgttgactccaggcttaggtatatcagaaggttctttttgccatttggcctgtggatgtctgagaagatcattcacaatacatgtaaaattcaggtaggcctaaggaaaggccagcctgtagaaagcaaaatggcagtgtctgttctccactgttggagggcattatgtaatttaagtatcctgttagccactgtctttctgctaattaagtggggctgaacaagtaagcactaataataccagtgaaccacttgggcaccttgtgggtagagttttgctgcacctagtggaatgggatatcattgcttccatatcaggttcacaagcaagttaagtgggcacagtttatttctgtgtagctcaggctgtaatcttgaaagctgaggagatacccatgcctctcagactcattagctgggtgtcacattaccacctgcacattctgacccaccgcatcttaatatgttttgtcctcttggagaaactaggagtagaagtcaggatatggtaggtaagggggaaaaaggaaagacggcttgatagctatgaatgcatgaggagcgaaatgttgactcagttatctagatcatggtctccaaacctgatgctatttccttacaaaaatatttgttgagcatgtgtccataattatatgtattgaacaatgaaaatatgtgtcaacaaatgtactgctacactaatgtgaacattatggaacaaaatttgaaagagtgaaataaaaggtttacactttc

SEQ ID NO: 246 - DNA, 334 bp, Homo sapiens
  misc_feature (1)...(334): n = a,t,c or g
gaaagaagaactggcgggactcgagtgtggccgtgtcagacgtggcaagaaaaaccagcagttgccttttcatctcttttctgatgatctaaccatgaagtccccagtatttgagcatttaaggcagaatgtaaattcataatttaagaagattttttgttacgtggctagcccaggttgaagaaatatggagatcaacacaaaactgctcatcagtgttacctgtatcagctttttcacctttcagcttcttttctactttgtaagttactggttttcagcaaaagtttctccaggtttcaatagtctnagcttnaaaaagaagattgaatgg

SEQ ID NO: 247 - DNA, 365 bp, Homo sapiens
  misc_feature (1)...(365): n = a,t,c or g
caaatagtatcccagctttctgccagctactagctacctgtagaggtatatgaagttgaagaaatatggagatcaacacaaaactgctcatcagtgttacctgtatcagctttttcacctttcagcttcttttctactttgtaagttactggttttcagcaaaagtttctccaggtttcaatagtctcagcttcaaaaagaagattgaatggaactcaagggtagtatccacatgccattccttgggtggttgggaatttttgggcctggacattttcctantccgatgaaggctactaaaagctgatccactttnggggtgggncatcacttgcaaaccgggaataatggctaatggcctcaag

SEQ ID NO: 248 - DNA, 460 bp, Homo sapiens
  misc_feature (1)...(460): n = a,t,c or g
ggagnnnnntttggannccttgganaccnnnnnnnnnnnnnnnnnnnnnnnnnnnnnnnnnnnnnnnnnnnnnnnnnnnnnnnnnnnnnnnnnnnggcacgagaaataaaagcaaatctttcttgaggacaaggatcacaggctctagcaccatgccaaggcttttgcacgcctgggcatcactacgccttcaccacacccatgacccgtgcagcgttcctggctgcctttcctttatgaggccacaggtaaagcagctcgcccagggagccacagcctgtaagtgacagagacagcatcgccctcagcagtcagaatccaggaccatattcttaccaaatttctatgttgcttccagcgtattgatttaatcacttgtgagcctcttctttncataaaaacccaacttgaagacttatgtatgaatttgctagggctgataanaaacnccacagactga

SEQ ID NO: 249 - DNA, 1571 bp, Homo sapiens
  misc_feature (1)...(1571): n = a,t,c or g
tttttattgaaaaaaaattatattttggaagaactcactacataaggtgacagaattccaaaatcaaattacatgaaaatatacatcgcaatttctttgtacaataggtgagaaaaatctgcagtatagaagaatagaggcagagaaatatgaaggactaaggagaagggtatgagagtaaataggatttgtaatagcaaacccagaagttaagtagaaagcctgtagcccgngcatgcttcatttatccaaccttaataccaggcaactgaagagggaaaagtcagatttgctattgtttggggaaattttcagtaagttgaattaagaaccatctatttttagttctcaggggtaatgactgggatcaagagctcacaacggccaataaatgttattgctatatccaatccaagaggtgggtgcaactagaatacaaaaaggacaaagcacctagtgatgactccttcgaagtcatcattaaaaatcaagtaattgctcattaagtatttcagtatttgaactaaatcatttgagaacattctggcaggtaagagataaaagcaaaggggagtgtgtcaaaacaaagaagatacaaaagtttagtaagtgaaaagagtttaatgaagcctcaagggtttaagggaaattaaatggaaacttttaatcctaattgcttttcatctgacatgcttaaaggaatccttttaaactgataagaaacaatgaataggaaagaaaacctgctaaaatctcttagaatttacacgattcttattctactacaagaaagcattatttggtacaaggtgtatttgtggatgtacatgaacagtatatatattatccggatcatgttgtgctatgtacaggtctttacaattcttcctgaaggttaaaacagttcattagaattcaaaatgcgtaatcatctgtaagttggcacttgttaggctcttgtcagcattgataactggcatgttttattgcagcccagttccagccagtgtttgccaacttgtacaacagaagtccagcaataggtgggtagagtgcaggaaaaacagtgccatgtttctcaattggagaccctgaaataagtgaagttactagctgctaaataaatgtcactcaaaagcagtctcttggctttttcttacacagcgggcaacttttcttttaaattctccatttctatcttccctccattctttcgcagcatcaacattagcaggtgagtctccattagggtctgccagcatagaaatgacactaatcatgatggtttccacagtgtggatagggagccagcgttcctctggcttttcataaccatacttatcttccccaggctcatgaagaatagaaatgcacacatcaccatttttatcaacatttgggtgccagatttctgtaatgaatttcattttaggaggtcggaggggataatcttttgggaaagtaagatgagccttaaaaacaccaccttcataaagtgtatctggagggccaataataaggacttcccatcggtagagatcattgtcatctattaaacctgcagaaaagcc

SEQ ID NO: 250 - DNA, 86 bp, Homo sapiens
aacaccaaaaacccatggccaataatggagagccaaatcaggagagcattcagcaaagccaatttcttgcttgtagaaggaacagc

SEQ ID NO: 251 - DNA, 846 bp, Homo sapiens
gggagctaattatttttggagaggaagaggggcagtgagacagccagcctgggcatgtggggaccaccacaaccacctcccccatgcactgacctatgaggcatgcagcactgataaatggccctgatgacaaagcaggacagaggcctggcagtgtgatgctcaccactcctgcctgtcaactccaggctgaagatgccaaccccgttatgacagactcacttgccagcctgtgccatttgtattcctcatggcagttactcagtagctggcatttataggtctataaagaatataaggttatgaaaaacctgcttctaattttccatgcttttccctacgtcccatgttacagttgcccccccaaataatcaggccaccagggtggcatggcctattaacagtcctgaggtgcacacttcaattaaagttctctctgcccttcagtttaaatccctagccccttccacttacccagctgtgtgaacttttgggaaagttcttaatctttctgtgccttaatttctaattagtaaagtgggagtataataggaccctccctcatagggatgatatgaggattgaatgggttaataggaagcatgtaaaacagtatgtggtctctggtgagggcacttaagtgttggctgtaattatgttactattaatttgtgagttgagatttgaaggataaaaagatgcagccacagattcttacagacactaactctgtaaaccgataggaaaaacatcggcattaaaggagagtcattaacattaagtggaagaatgtccacttcttccctgcctgccctctccctgaaataaagaacagcttgacagaaa

SEQ ID NO: 252 - DNA, 338 bp, Homo sapiens
  misc_feature (1)...(338): n = a,t,c or g
gcggcacgagtctttataagcttaacatagtaggtatttacccagttaacttgaaaatttatgtctacacagaaaccctcacatgactatttataacagctttattcatgattgccaaaaaatggaagcagttgagatatcttttaataggtgaatggataaacagtggtatatccatacaatggcacattgtataaaatgaaataatgaaaagacatagctgtcaagtcacaaaaagacatagatatatctcaatgtataccatnnnnnnnnnnnnnnnnnnnnnnnnnnnnnnnnnnnnnnnnnnnnnnnnnnnnnnnnnnntatctgtaaaaggt

SEQ ID NO: 253 - DNA, 2550 bp, Homo sapiens
  misc_feature (1)...(2550): n = a,t,c or g
gtttgcttgaaggaacagctcaaagcaccttcacaagttgccttgacttaccctaggtgggtgtgaaagagcacccgtagcaaggaaaattttctctattagtgtgttcttctgcctcttcccccttgattcagctttcagaggtactatggcagttttgcctcaggtgctgaacatttctcagccctggctaaaagggagcagcacagggagagaaacaggataggaaagcagaatggcgagcagcctatggcccagggcctgtaatcccttcccaagactagctgctcagggtggtgcagggacaggaccagaccctgcgcctatttcctgccttctttcccctatagggaactctgtaggctgagccactgtcctgctcttatgacattatatcttgtgcctttctcctcagcagtgagcagtgagctactcctggcccaggccctaggggaaatggatcagtctttgaggtttctatttggggaggggagtacttaagatgagtcaaaagacactttcctctgttccattccccatctcagggactcctgaatattcagcctctccaggctggtgtcttctagtttcccccactgggaatgctggctgggagagccatgactaccagacttttcctcaggctccttggcatgttagtctgaattgttcttgagcactgtactactgacccaacaactgtgactagctggccacgccattcagggctggtgtggcatttatgtgtgtgtgtgtgtgtgtgtgtttttcctgtttgcccagcagtgcattgtgggttccaagagtgggtagtgtgtgtatgtgtgtgtgtcagagggagacctggcaggcacctctttgagagtagctgtggtcagagctgtttggtcagtgcattatgttgaatgaggtccaggaacccagagccacccagcagacaccactgtggcttgccagccngccaagatggagaagcatgtgcccctgtagagcgtctccccagaaccagaccccgagccactcgcttcctctgtgctgtgacaacattggtgccaggggagatggtgtttttcaaagggacctactgtagccactttaatttacaattaagagccttagtttgacttaacacttttgtaggcttttcattgtgtatttttgtgtatgtgtgcatatagcagctactctgtagcagaggtgggtagagacacttaatagtatcatgtcgcatgcagatgtcacatcggcctctgcaaaaactgtactgtcttgtttctgcattagacttaagtagtcatgtgaatatactgctatgtcacttttaatattacgagttttatacttggaaaatggtacttgcttcttttaaatctctgtcttctctaacctcccccttcccatttcaatgctcccttcctaatttcagcaataatctcaaaaagcaattaaatagttaaatgaccctaattgtaattactgtggatggttgcattcatttgattacttgggcacacacgagatgacaaatggggcagtggccatgcttgaatgggctcctggtgagagattgccccctggtggtgaaacaatcgtgtgtgcccactgataccaagaccaatgaaagagacacagttaagcagcaatccatctcatttccaggcacttcaataggtcgctgattggtccttgcaccagcagtggtagtcgtacctatttcagagaggtctgaaattcaggttcttagtttgccagggacaggccctatcttatatttttttccatcttcatcatccacttctgcttacagtttgctgcttacaataacttaatgatggattgagttatctgggtggtctctagccatctgggcagtgtggttctgtctaaccaaagggcattggcctcaaaccctgcatttggtttaggggctaacagagctcctcagataatcttcacacacatgtaactgctggagatcttattctattatgaataagaaacgagaagtttttccaaagtgttagtcaggatctgaaggctgtcattcagataacccagcttttccttttgggcttttagcccattcagactttgccagagtcaagccaagggattggcttttttgctacagttttctgccaaatggcctagttcctgagtacccnggaaaccagagagaaagaggatccaggatgtacttggatgaggaggccctggccttatctaggaagtcgtgtctggggtgcttattgctgctccatacagctgtacgtcagccccttggccttctctgtaggttcttggcagcaatgagcagctttcactcagtgacacaagtaattactgagtcctaatttgatagccaccaactgtacctgggtaggcaaagtcagatttttgagaacctttttcctgatttgaagttttaattaccttattttcttttatgctttcctctgtcttgtaatcttttctcttcttaatatccttccctataatttcaattatttggattaattttagaataaacctatttatttctaaaaaaaa

SEQ ID NO: 254 - DNA, 920 bp, Homo sapiens
ctggtttggatcccggtcagtcgggtgccgagatttgggagagacggtctgaactgactgccccgcatcaccggagcgtcccagctgcgaggagtgtaaacaggaacatcgataagtagtgtaaaaacttgcacaatgaaatccgaagccaaggatggagaggaggagagtctacagactgctttcaaaaaattaagagtggatgcatcagggtctgtagcatctctgtctgttggagaaggcacaggtgtcagagcaccagtcagaacagcaacagatgataccaaacctaaaaccacatgtgcatctaaagacagttggcacgggtctacaaggaagtcttcacgaggagcagtgagaactcagcgtcgtcgacgtttcttaagtctcctgtccttcatcctccaaagttttatacattgcagtacaatagcgtcttcttccagcagtcaactcaagcacaaaagccagactgactcacctgatggcaggcagtgggctgggaatttcatcccctaaagagttcagtgcaggagaaagctctacttctctcgatgctaatcacacaggggcagtcgttgagcctttgagaacttctgttccaaggctcccatcagagagtaagaaggaagactcctctgacgctacccaagtcccccaagcaagtctcaaagccagtgatctctctgactttcaatcagtttccaagctaaaccagggcaagccatgcacatgcataggcaaggaatgccacgtgtaagagatggcatgatatggaagtgtattccttttcaggcctgcagagtgtccctcccttggctccagaacgaagatccacactttgaggacttactctcagtcgctgcacgccagaactctgtctggctctccccgatcctgttcctgagcaagctcgagtc

SEQ ID NO: 255 - DNA, 627 bp, Homo sapiens
ttttttttttccaagaaatcttaatttctttattgtttgactttttgactcaacaatttttttaaaactttttgtttttttctgaaacgttcttgttgttatgagccttttgttttgttctcgttaaatgcactcgacccaaaattggtttggcatatcgaaaaggagaccaaggagggaggggctggggcgtgggaggtggggaggaggcccgaatggacagaaagttgaggataagagaagaggaacatagagacagccagaaagacatggggaaagagtgttggagacagagaaaggggaaggcaagggaaagccaaaagaaaccaaaatccagagaaaaagaattaacaagatttaggagcaaacgagttcaggagcctaaggaagggagtaggagaggaaaccaagacccttctctgtaccgtcccagctggggtgggggcgtcaaggcaccaggtctggttaggttggggggacacctgggcttgggggcggctttgcactggactgcagtgatgtccagccccagcagggggccctgccacacagctctgaggcctggaagccacccggcgatgccggctggaacaggacccgatacaccctctctccctttgattgtcc

SEQ ID NO: 256 - DNA, 1258 bp, Homo sapiens
gcaaaataaaatagttgaactctctgtcttcatgtggaaggtttagagcagttgtgagatgttgttatgctgagaaaccctgactttgttagtgttggaaaaaagtcttacaagtctataatttaaagatgtgatggtggggaggggaggatggggaagctttttatatatgcatacattacatacctatatataaacttgtggtataaccatagaccatagctgcaggttaaccaattagttactatcgtagagtaatatatattcagaataataaactcaagctggagaaatgagtcctgatagactgaaaattgagcaaatggaagaagatacagtattgtttagatcagaatcattaaaaaatatttttgtttagtaagtttgaagatttctggcttttaggccttttctattttgttccatttatttttgcaggcaatcttttccatggagggcagggtatccattctttaccatgggtgtacctgcttaggttaaaaatcataccaaggcctcatacttccaggtttcatgttgcgtcttgttgagggagggagagcaggttacttggcaaccatattgtcacctgtacctgtcacacatcttgaaaaataaaaccgataatagaactaagtgactaattttcccttacagttcctgcttggtcccacccactgaagtagctcatccgtagtgcgggccgtattagaggcagtggggtacgttagactccagatggaaaaagtattctaggtgccagtgttaaggatgtcagttttacaaaataatgaagcaattaagctatgtgattgagagttattgtttggggatgtgtgttgtggttttgctttttttttttagactgtattaataaacatacaacacaagctggccttgtgttgctggttcctattcagtatttcctggggattgtttgctttttaagtaaaacacttctgacccatagctcagtatgtctgaattccagaggtcacatcagcatctttctgctttgaaaactctcacagctgtggctgcttcacttagatgcagtgagacacatagttggtgttccgattttcacatccttccatgtatttatcttgaagagataagcacagaagagaaggtgctcactaacagaggtacattactgcaatgttctcttaacagttaaacaagctgtttacagtttaaactgctgaatattatttgagctatttaaagcttattatattttagtatgaactaaatg

SEQ ID NO: 257 - DNA, 1164 bp, Homo sapiens
  misc_feature (1)...(1164): n = a,t,c or g
ggcctgcgcctccacgtggatttggtagagaaaccccggactgggatcatggcagccgagactcggaacgtggccggagcagaggccccaccgccccagaagcgctactaccggcaacgtgctcactccaaccccatggcggaccacacgctgcgctaccctgtgaagccagaggagatggactggtctgagctatacccagagttcttcgctccactcactcaaaatcagagccacgatgacccaaaggataagaaagaaaagagagctcaggcccaagtggagtttgcagacataggctgtggctatggtggcctgttagtggaactgtcaccgctgttcccagacacacttattctgggtctggagatccgggtgaaggtctcagactatgtacaagaccggattcgggccctacgcgcagctcctgcaggtggcttccagaacatcgcctgtctccgtagcaatgccatgaagcaccttcctaacttcttctacaagggccagctgacaaagatgttcttcctcttccccgacccacatttcaagcggacaaagcacaagtggcgaatcatcagtcccaccctgctagcagaatatgcctacgtgctaagagttggggggctggtgtataccataaccgatgtgctggagctacacgactggatgtgcactcatttcgaagagcacccactgtttgagcgtgtgcctctggaggacctgagtgaagaccccgttgtgggacatctaggcacctcaactgaggaggggaagaaagttctacgtaatggaggggaagaatttcccagccatcttccgaagaatacaagatccctgtcctccaggcagtgacctcccaaaccagcctgcctggtcactgactgcttactctaccttagctggacctcggtctcccagggattaagagaaaagagcaggagtcctgggtcttcccagttgagactgctggagcctgagacacagtactctcttaaagaaggtggggagctgcccagggagaaacccactggtgttcatgactaccccttggctcctctcaccttgtccctccactggcnaacaagaaaacaaagcaagctgactgagatggtcaaaggacttttggaccataggggaatcnttggaaaggcttgtgggggcttt

SEQ ID NO: 258 - DNA, 371 bp, Homo sapiens
ggaagggtcatgagtgccttccaaaagtgttaaatagcaatcctccccccatcataaagtatttagccttgcaggacctgatgttgctttctcaatattctccttcacgaagacaagaagttttcagcctcagccaaccaggtggacatccccacaattggacagccatttcaagggagtgtttgaatcttttaaatggtatgactcagaaactgattctctatcaagaagctgctgctacgaatgggagagtgtcttcatcttacccagtggaacctaagaaattaaattctccagaagaaactgcttttcagacaccaaaatctagccagatgcctcggccttcagtgccaccattagttaaaacatcg

SEQ ID NO: 259 - DNA, 426 bp, Homo sapiens
  misc_feature (1)...(426): n = a,t,c or g
ccagacactgttctggaagatagctagatgaaaatctttgcactcacagagcttacatgccagtgagtgaagatcgatgataaataaagcaaatgcatcatatgttcacatttgataagtatatgccaaaaaatgaagccgggaaggaggacaaggcccatgggtgggtgttgaggtttttaaagtgtggtcaggaaaggccccactgataaggtaacatttgagcaagtctgaaaaaggcaaggggatctttggggctaacttcgggatccctgcactttatgtaagaatgtaaacctggagtctcatttaagaatgatcagcaatacgtttagaaccatatgaactgaatgaaatggacattttttccttaatttacggtataaatcccatatgattatacntaaagttctgatgcattaataa

SEQ ID NO: 260 - DNA, 718 bp, Homo sapiens
agcaggatgaggaaggccaaggagagtccttgcacccgtgagcgtcaggatgaggaaatgacaggaggaagacgtgggtttgggttagtggctgctggcgttttggcccttggtgtttctggagcctccagggatctaggggagcctgggctgcgtgcatgtcgataagcagagctgttcttggggagaaggagggaggtctcgggagtgtagcaccatgccaaccagccctgcgcgaagacagagtgagccacgcccggatggcagggcatgtttctgttttggtgtctcactttcctcccagcgtgacttatttggggattcctcagggcctactggaatgtgactgcccactgcccagctgcctcgggtacaagtcctggccctatgtcccagctgtcaggggctcagggaatcctacccagccacctgtcctgggatggagtgtcagcatccaccccttggttgtcatcgaggccgccctcccagtcctgggtgaagatatttgggccaccagggctcccttggccccttcacgtaggaaatagacacgtgctttttaatgcaggacactttgagtgttacaaaatctgtagacctggcagtagggtcatgatgttgggaagggtgtagtgccctaggttggtgacagaagggacagacacttgtgcacaggtgtctttggtgatggggtttttttttttataacttagtaaaa

SEQ ID NO: 261 - DNA, 455 bp, Homo sapiens
cctttttgtccctttccccaagccaccaattggatggatgaatgtttgacggggaagaggaagggtaggaggatgcatggatgagtggatgagtggatcgatggatgtattgataaatagatagaaccagtcatctgaagcaacttaagaattgtagccttgactccttgagactgtagatttcgatccaggaaacatttatttagcacctgccagatgccagaaatttataccatttaaaactcagtaagtcttttaaatatcaggaaggagagaagcgacatcatgatacatcctatgggtattaaaaagccaatagaatattatgaataattttatgctaataaatttaacaacttcaacatcataaacaaattccttgaaaaataaaaagtaccaaaattcattcaagaagaaatagataccagcctgagcaacatggcaaaatcccatct

SEQ ID NO: 262 - DNA, 1616 bp, Homo sapiens
tgaggacccggagctggaagctatcaaagctcgagtcagggagatggaggaagaagctgagaagctaaaggagctacagaacgaggtagagaagcagatgaatatgagtccacctccaggcaatgctggcccggtgatcatgtccattgaggagaagatggaggctgatgcccgttccatctatgttggcaatgtggactatggtgcaacagcagaagagctggaagctcactttcatggctgtggttcagtcaaccgtgttaccatactgtgtgacaaatttagtggccatcccaaagggtttgcgtatatagagttctcagacaaagagtcagtgaggacttccttggccttagatgagtccctatttagaggaaggcaaatcaaggtgatcccaaaacgaaccaacagaccaggcatcagcacaacagaccggggttttccacgagcccgctaccgcgcccggaccaccaactacaacagctcccgctctcgattctacagtggttttaacagcaggccccggggtcgcgtctacaggtcaggatagatgggctgctcctctttcccccgcctcccgtgagccccgtatgcttcctcctctctggtctgaggaacctccctccccccacccctccccgtggtcttcaggaactttgtctcctgcctgtgcaggttgaggaaggtagttgcaggccaggccagaaggccagcctcatcatcttttctgcagtagaaattggtgataagggctgcatccctcccttggttcaaagaggcttccacccccagccttttttttcttgggagttggtggcatttgaaggtgtttgcggacaaaactgggaggaacagggcctccaggcagtgaaagcactgcttggacatttgttacttttttcggagttagggagggattgaagactgaacctcccttggaagaataccagaggctagctagttgatcctccccaacagccttgtgggaggattttgagatacttattctttatttgagccagtcttgcaaggttaacttctcactgggcctagtgtggtgcccaggtttttgccttgcttcacttctgtctctacatttaaatagacgggttaggcatataaaccttggcttttcataagctctacctgcctatccccaggagttagggaggatctatttgtgatggcctagggtttaagagctgtggaggactgaaaactggataaaaagggggtccttttccttgcccctgtctctcactcagatgcgcttctttttcgccactgtttggcaaagttttctgttaagcccccctccccctgccccagttctccagggtgcgttactatttctggggatcatggggtcggttttaggacacttgaacacttcttttccccccttcccttcacagtaactggggcaggggcctacggggaggggcttgtactgaactatctagtgatcacgttaacacctaactctccttctttcttccaggggccgggctagagcgacatcatggtattccccttactaaaaaaagtgtgtattaggaggagagagaggaaaaaaagaggaaagaaggaaaaaaaaaagaattaaaaaaaaaaaa

SEQ ID NO: 263 - DNA, 579 bp, Homo sapiens
ctgacattagaatcataagatttttgtttaagacttgcttaagatgtttttcagatcctgaattccagcaaaacagccgacaccaaccagtttgaagacccccacagaggaatgtgatcagcatgaaaatacagcttcgtctccctctcccatgactccaccctgcacacttcgaccaatcaaccatctccacactccagtctccactcccaaacccttaaaaaccccagccccaaactcctcagggagatggatttgacgtttcctcccatttcctccttcggtggccctacgatgaaacctctttctctgctacaaccctatgcctcggcgtattcactttctggtcccatccagcgatggacccatcgtggttaccgtggctggccaagcctgctgtgcttcacagaccccactcaggatcatcatcacttcgttccactgtttggagatgccatgtttgcttatcccttcatcagctgatgagcatttgtgctgttttcactttttggctattacgaaaatgttgctacgagcatccatgatattcgcccatttaaaaaagtgtttttcaccatt

SEQ ID NO: 264 - DNA, 521 bp, Homo sapiens
gaaagagaaaaagacaaaaaacgggaccgagaagaagatgaagaagatgcatacgaacgaagaaaacttgaaagaaaactccgagagaaagaagctgcttatcaagagcgccttaagaattgggaaatcagagaacgaaagaaaacccgggaatatgagaaagaagctgaaagagaagaagaaagaagaagagaaatggccaaagaagctaaacgactaaaagaattcttagaagactatgatgatgatagagatgaccccaaatattacagaggaagtgctcttcagaaaaggttgcgtgatagagaaaaggaaatggaagcagatgaacgagataggaagagagagaaggaggagcttgaggaaatcaggcagcgccttctggcagaagggcatccagatccagatgcagagctccagaggatggaacaagaggctgagaggcgcaggcagccacaaataaagcaagagccagaatcagaagaggaggaagaagaaaagcaaaaaaaaaaaaaaagtcg

SEQ ID NO: 265 - DNA, 1100 bp, Homo sapiens
  misc_feature (1)...(1100): n = a,t,c or g
ggcagtgggtgccacccacagtgccagcatccaggaggaaactgaggaggtggtgaactcacagctcccgctgctcctctccctgctggcattgttgctgcttctgttggtgggggcctccctgctagcctggaggatgtttcagaaatggatcaaagctggtgaccattcagagctgtcccagaaccccaagcaggctgccacgcagagtgagctgcactacgcaaatctggagctgctgatgtggcctctgcaggaaaagccagcaccaccaagggaggttggaggtggaatacagcactgtggcctcccccagggaagaacttcactatgcctcggtggtgtttgattctaacaccaacaggatagctgctcagaggcctcgggaggaggaaccagattcagattacagtgtgataaggaagacataggcttttgtcctgcctcgccatcggagctctcatgggccccagggaagtccagggacagctcccttatacctggcccacgtccttctcagcctgccctcgacaacagtgaccaacagacaggcagctgggtttcccagggccatccctctgttgccatcagcttgattggcttccccgagggccagcagggctgggggctccggggagcagcaggaagcactcccagccaccagtgcctgtcgcctctttcccctttgcccctgcttcatcccagctctgtgtgtggaggacaaagcttcttcctgcgtggctccaggaaaagatgtggctcacgtaggtggcacctgccaatagctttgtcaatcacagccccataggaacgtctggaattgcttgggagttggggagaactgtcaagaagagtgaagagagtgccaaagcggagatctgttcacctgggggccatggaggggggacccactaaagatcaagatcaaagattctccccatctcacagacaaggaaactgaggccagagggaggagagaattgctcatggctccagaactggtggcaagtttctctggactcttaggtttatttttaatatgaaatataaaaacagtttcaaatatcttattgagggagaagtaaaaatnntatttaaac

SEQ ID NO: 266 - DNA, 800 bp, Homo sapiens
aactcggtttcacatgattttgttctagtttttgtgtatatatgtgtttattagacatggcatgctaagaaggttttgttttttttttttaatgttgcatctgtctaatttgtctttgaacaattatgtcgggaggcatttttaagaacaagcaggctggcactttttatttctctttacaaatgatggaatttttttgcacttgtacatttattttctctgtattgattttatatcagtatgttaaactttattgccacatttaaaggactgtattttcatacttttttggcattttacctttcatctaccaatcccagtggcatgggattgcacactaagatgtattttcttacgaaatagttctgtgtttattttttaattatagaaattccaaagaacagcacatcagaatgctcctctcttttcagtaattgttttagttcagagatcttcccgctcagcctccataaatctaatgtcattttttttttaataagtcctaggagctgggcttcattcctccagcgggagtccagtcagggtcctgaagtttgctggttcaggaaagaacaggaaagagaaaagccttctgtgcccaggctaaagctgttacatttccacagtgtggatgcagtcagaatccctgcacattctggtcataaggattagagtcaccagatgaggctctaaacagatcgcatcccttggaattagaaagcagtggagaccgggcgcagtgactcacacctgtgatcggcacttcggaaggccgaggcgggcagatcactgaagctcag

SEQ ID NO: 267 - DNA, 560 bp, Homo sapiens
ccttcttcattgatcataacacaaagactacaacctgggaagatccacgtttgaaatttccagtacatatgcggtcaaagacatctttaaaccccaatgaccttggcccccttcctcctggctgggaagaaagaattcacttggatggccgaacgttttatattgatcataatagcaaaattactcagtgggaagacccaagactgcagaacccagctattactggtccggctgtcccttactccagagaatttaagcagaaatatgactacttcaggaagaaattaaagaaacctgctgatatccccaataggtttgaaatgaaacttcacagaaataacatatttgaagagtcctatcggagaattatgtccgtgaaaagaccagatgtcctaaaagctagactgtggattgagtttgaatcagagaaaggtcttgactatgggggtgtggccagagaatggttcttcttactgtccaaagagatgttcaacccctactacggcctctttgagtactctgccacggacaactacacccttcagatgaaccctaattcc

SEQ ID NO: 268 - DNA, 499 bp, Homo sapiens
  misc_feature (1)...(499): n = a,t,c or g
cttganntttgaanccctnnnnnnnnnnnnnnnnnnnnnnnnnnnnnnnnnnnnnnnnnnnnnnnnnnnnnnnnnnnnnnnnnnnggcacgagnnnnnnnnnnnnnnnnnnnnnnnnnnnnnnnnnnnnnnnnnnnnnnnnnnnnnnnnnnnnnnnnnnnnnnnnnnnnnnnnnnnnnnnnnnnnnnnnnnnnnnnnnnnnnnnnnnnnnnnnnnnnnnnnnnnnnnnnnnnnnnncttgcccagatgagtaagttaacagatggaaatcaaatctttgctttcatggtccattgttctctctgtgacctgctgtcacgtaattcatatatatatactgacatggagattgtttccctctgcaatctaaactgatggccactctttattcccagtggtctttagtgaagtacatttcctgcctcctcctctgatgcccagacatcgttgacaaggaagaatgcaaacatgcgacaagagcaactttaaccaaaatataa

SEQ ID NO: 269 - DNA, 315 bp, Homo sapiens
  misc_feature (1)...(315): n = a,t,c or g
gtcacattcaaaatataacccccactcattagcagtcattcaccattctctctctctccagaagtccctattaactactttaatcacccnnnnnnnnnnnnnnnnnnnnnnnnnnnnnnnnnnnnnnnnnnnnnnnnnnnnnnnnnnnnnnnnnnnnnnnnnnnnnnnnnnnnnnnnnnnnnnnnnnnnnnnnnnnnnnnnnnnnnnnnnnnnnnnnnnnnnnnnnnnnnnnnnnnnnnnnnnnnnnnnnnnnnnnnnnnnnnnnnnnnnnnnnnnnnnnnnnnnnnnnnnntcactgatgggcatttgggctgt

SEQ ID NO: 270 - DNA, 657 bp, Homo sapiens
tttttttttttatcaacaatcctttaattttttatttttatttttttccctgggatttcgaaccaatatactcctagcctgaacaacatagaacatttcctttccattttggtagaaattattttttaatgtaaattatattgtgttctatttgtttccaatgtcttgaaaagttcaatcacttctccaaattctccgaataaacataagaaaatatctctccccagcactacccggtcccccagtatcaccatcctaaaggcacttccacttcctctatcatcagggaaggagtgtgcagttctgatttagctcctcagtggagtaaagggaatttagaggaagggggatttctgcagaaattgtcagttacacaagtaagttcctcttggttccccgtttcatcaaaagtgaaaaactgttcacaggagtgcccatggtcccctgtttccctatgcatcactagagccaagaggggactccgccagcaaggcaccctctgctctgtcccgcagatcacagtccccgactttcaccccattgtttgtgcaatgtgcaaaactggagcccaaagcagcgggcttaggatcactcatcacagcccggcgggcccatagactccttccttggctgggaagaggggctttcgtgaaagca

SEQ ID NO: 271 - DNA, 510 bp, Homo sapiens
  misc_feature (1)...(510): n = a,t,c or g
gcggcacgagggattctatactcaggactaaatgccatctagctagtcctcagccctggaggggttagccctcttttcaatttaaacatactagaagaatgaaactcttgcccctgacatggaggatcaggtcttgctttaataggcccatggttttcaagaccagggagattgacaccaaggaggaactgatgaggaaggactgacttcaccgcccagggaagggtaacaatcaccgtatacttctcttaagaccataagacctaacaggaaattgtgtgaaccttcaagtaacacacttcttactaagaccctccgctccgtcattctaaagtacacacctggtaaaacctcagactgcctcagtctaaacattttcctgttccctctcacaactggctgttactgtgtaatactcaagggaatcacnggcgccggggntcaagcccgttaanccaaanctttggaaggctaaggcggtggntcacctgaattcaggattcaaaccac

SEQ ID NO: 272 - DNA, 2417 bp, Homo sapiens
  misc_feature (1)...(2417): n = a,t,c or g
tttttttttttttaaaaaaaaggttggaaaaattactttatgaagccttaagcactaagaataattaattaaactgtaatccaggattagatacaatttaataatagttcaattccaaaataaaagttattgtaggtaagaccatgaaatttcctaacacttgattttaatacattgcgctaattttctaaaacaactcagaggaacccatatttacagtaggcagaatatttatgaaaaaaatctggcatcaggtatatttatatnnnnnnnnnnnnnnnnnnnnnnnnnnnnnnnnnnnnnnnnnnnnnnnnnnnnnnnnatcccgagattatatgaactaagaaacaagttgtgtatcttaacagcagtactagagcgcagagtttcagacttggatttataaatgctttcaacgtgtggtgtttggaaaaggagaagacatcatctgattttcaaaacctgaagtttttctcaggactgaagtcaaaatcgtaactgccacagagggaaaagggaagcttttccccttaattgttcatctgcgtcagaaagtccagtatccctgagataggaaccactgtaattagaagattggaatgaacaggtttctcccaaaggaagattgtttgttgctgaattatgcctactgccctgatcatcaggtataaactttgcatcttccaacctaatgcttggcagcaccaagacgtttcagtaatggttcatcataaacccagcattctccatcttcatgaaataaccttgtctcccactgaatttccttctccttcctttctcgggcttctgctctttgtctttcttcaagcctgtgctttgcttcagttgctgcatcaatgtctctgatttttaagttgaaagtgacatccttccaaaggctgcgggattcatactcgttctgatcttccaacttcctcactttcttcttgattataggcaacttcttggtatctacaaagactgtattttcccctgttgcatattttgcatacatcacaccattccattccccttcaattgagcaaaaagacttcttgtcatttggagaaaaaatctcggcagtaattctgtgcttcttgcccccatagaagggtttagtgtggaagatgatatttgcactatagcctgttttggaacaattaatattgcattctcctcctaattccacccagggcactgtgaggatagaccttccatagccattggggaatgtgagaatgtaatgttcatcatagtctagacatgagacacagccctgccctatgttgtgcaccccaattgacatcccaaggaattttgatttggtccagatatgagcattgaattgtatcttcttgttaaaacactcagcataaaaggctgaaatgggtggatgatgggaaacctgctcagcccacaaatgttacactgtttttggaaaccccgggaactggtccttctgaactagttctgtgttctcttcagtatcatttggtaatgtccaatgacactgaaaaatctcgcccaaaatgggattgtatggctttttggcaactgatcctttccttcccgcatgaaaggctgagaggtaccatttcacaacctgaaccattcgatccttgggatccttctggtcactaatgctcacaaacaggtccggatgtgcaaaaaagtctgcatacatttctaaaagagatcttctttcaagaataaacgttggaagaactaccttagtaagatccatccccagcctgacttgtgataagaggtgcatgataacgctcttgtgctcctccactgacccagcctccgcatcatcatctctgtcatcatgtgaatcaaacaggtcagcatcacttgttccattggacaaggaagaattaagtgattctgtggtatctgggcgttttagactatttcccgagctgctgtgtgtcaggactgaggcagatccagaagaatctattaagcgctttggggatgagccactttgatggaattcatcagcatcataaaattcatcttcactgctggagtaagagaactctgggactgtatttggagacaagttcacgtggcttggagaagtgagactgctgctaggtggtgagttcccactgcctgtactatttggtgtaggagtctgatgatgtcccaaggtagccaacacaggtccaactggtagggaagatggacgctgctctgacttacacaactgagcgggttctggaggtaacacagtctgggaaggcattgtgctgatcacaggttccaaaggactaggttgatatattgcatctacgggattaatagtacttataattccatctgcgtggcntccgcattactctggtctttagcaatctgtagcaacacaatgcagtgtttaattgattctaccatgctatttgttgtgt

SEQ ID NO: 273 - DNA, 334 bp, Homo sapiens
  misc_feature (1)...(334): n = a,t,c or g
ggaacatcagttagctcatgataccactgtgccaaatggataagtgtcctaagagaggctttaatacacacatggttaagtcacagattgaaatgcctgtctgagaagaactgtttgtaactgggatttcctttattgtggtaaaatatacatnnnnnnnnnnnnnnnnnnnnnnnnnnnnnnnnnnnnnnnnnnnnnnnnnnnnnnnnnnnnnnnnnnnnnnnnnnnnaattttcattatctatacccaaaacattttcattatccccaacaaaaactctgtgcccattaaataataattttccctttcttcctcccatcagccccaggtaga

SEQ ID NO: 274 - DNA, 1006 bp, Homo sapiens
tttttttttttaggtgctaaaacttggttttgaaattttattaaaaaaatatatttgcaaacatataaaatttaagatgaaaaacgctcattttaaaacatgtaataacttaatatttgcaaacatacacagatgctataaaatccataccgttaaaaatgttaatgatacagtattgcgctcatggaacaaaaatcttgctgtaattccagagcttctcgtccccatgtttcagggagctgagaatctggtacaatgaaagtcatgagagccacatggccaaagcagtaatacagaataaaaaaccatttagaacacatattttaaaaacatgtttcttaaggaatcacacagataaaaaggaaacacaattctggcattttcccccactttgaagtgaatgatattgcatcttagcattttaaatgaaggtgtcaaatacaaaacggagggaatcactgcacacatctgttgaatttgctgaaaaacaggctcctcaaggccctggtccactcggaaatgttctcaagcacagctgtaaaaaagccctagtgtaagctgcttgactttgctcagatcttagcattttagagacttgagaacacagggcactattggttccagaagatacactgaacgcaactgaagaaaactgaagggaggcaagaaagaaaaacatactctgcagcaaacgtgcagccaggatgcaggatgcgcaccctaggattcctcagttctcctcactcaccacgggctgagccccactcgtgcctgtgccacctctcattcctctcagagttacagtatgatggctgattttgttttttgagcagttaggcaccttcaatttcatgttgcattattagtaatacaatggcagttagggcctctactatggaaatgagaaaatttcaaactacattctttgggggaggagagtaataaagctgcatggtttaaaaatttacctagtagtggatttgatagggtttatataatttctaca

SEQ ID NO: 275 - DNA, 496 bp, Homo sapiens
  misc_feature (1)...(496): n = a,t,c or g
gagtaaatagaacttgtccctaaaaggatctagtaaaagaattgaaatctagtttgtagactgttagttattactgcattgctaggagtttatcacctaagtccagggatggaagcctgtggcatttatcattactttttggtaaggtactgttttgttgtagcgttgttcttttctttttttcttttcttttctcttttctctttctctccctcgcgctctctccctctctctttcntcacactctttcnttttcnttcctttttaaacactnnnnnnnnnnnnnnnnnnnnnnnnnnnnnnnnnnnnnnnnnnnnnnnnnnnnnnnnnnnnnnngnaccgggctcaagagacccaaccaactcancctcccaagtnactgggaacacngangcataccatcatgccangctaattttggantttggnanaaaacgggttcacaagttgccaagcngnctcnactcccgaantcaagnctncgccccgctcgggc

SEQ ID NO: 276 - DNA, 377 bp, Homo sapiens
atgtctaggatgagtgatatcaggcctgtcatgaataatcaccgttctcctttcgtctcgctcccctcgtacttctcgcctgtctgattctctaagttcatttcttggtggtggaggctcatttcttctggagtcactgaaatttttgggatatctttcgaagcttggatcttcccttcgtgcagtaggtcgtgcttttttcccctcactttgaccaacaaagcgatcccgcctttcaaaagatgaagactgtactgctgaactctcaggaaacctgcccctctctcggtgatcaaagtcattaaatctgttctgttggcgagagtagttcggatcccatggccaaatcgtgcatctgtatctagagacaacttttc

SEQ ID NO: 277 - DNA, 1098 bp, Homo sapiens
ttttttttttttattgacagaagaagtattttatttatttataatatcattttgtaaacaatcacactgtgcactttttaattcaacaataagaacaatttttttctagggatttatagcaaaccctatataaagtgaatgacttaatacacgagtgaagatgactagggtagaataatttctgaaaatgtcaaattacagcacttgatacaaagactgatgataactatctgtaccataaaaatttacatgccacgaaaacattaatttataattttaaatatacagtaaaacatagttataaaaagagtattacatttattataaaccagtgaattactcagagaaatatttattaaaacctactaaaaaccagtaaatattgcaactgaggtaaaaatttataagtaaacaaaactatcatttataaggaccaagaagtaaacaaaagggcagacattttctgatgactgtgtctactccttgatattttgaagcagcttcaacaaatgtgactcaataacctgttgaacacttctatagcctagggctacagctagatccatagaattatatccagagtcagtttcaattgttggatcagccccactttctaagagcatctttacacatttcacatgatttccatgtacagcataaagcagaggtgttcctccattccaatcatattcatttacatcaactccacaatcaagcagcattttgacaatatctgtgtagcctttactacaggccaacgacagtgcactttctcgaccttttcctaaaagttggggatcagcaccattctgaagtaggaactctaccacagctatttgcccgtgtgctgcagcccacatcagaggagtaaatccttcttcatccgtgtgattgataacattttcttgttcgatacgagtagccagatagagcatctctccctgagcagccaactggtgaacagacaaagaatttgctaacagaggtgtggtagagacctcatttcctctgtgtttgttggttaaagtggttgactgttttatgggtgagaaatgctttgttgtagagggggtgtagacatgccttacttgaattccc

SEQ ID NO: 278 - DNA, 562 bp, Homo sapiens
ggctgtacctaaggctgagggaaaagtgaaaaaggaaggaacttagagctccacaaggcctgagattcagacctcagaggagagtatggctgctgtggcagtatgctgcttgttgcctgtggtgaagaagaaacctggctggagggcactcacctcagaacctggagagtcgctgctttgaaatgtaccaagattcccctgcacactgatctacttgctactttgtgaaaaacttgagcattgcaactggctttgtattctccttccagcaccctctatcggcagaacctaatagccactcgctccactgggaaaggagaaatgtagtcagcctaggttagtctcgtatcacagagcaaggcaatgaagaattggtttggaactgtaaggcaataatttaacttctgtattataattgtctgtttttgatatgtcttccttattgcaccatgaacttggtagtgtctggaacagtctgatttgtctccatatctgcattgtcccagaagtgactttggcactaaaaagttgatcattaattactgtttgggccaggtgtggt

SEQ ID NO: 279 - DNA, 274 bp, Homo sapiens
caggtggtatgcattcttataagtgaaatattaatatatcaaaattactcattttggcaaatcagtatattttctgtatataattatagaaagttcacattgttcttcaaatttacttgtaaaaaattattttccatttggcactaaagtttattctcaaggtgttcaatctatgtcagtttttatttgaagttgtgtgatctctctaaaataaacattagtaattacttacaaaatggctccttaggaatctgcaatctggtgggattgtttt

SEQ ID NO: 280 - DNA, 1556 bp, Homo sapiens
agaaaacaggaaaacaattccacgaggccaatctaaagggaaaaaatcctacactacttttactacttttgattatttctcatttttgggaaaagaattcctaatgtgctactagaattccttcttcagttttaacgagtaattggataaaccctgaggaaaacggaggtagattcagcacctaacaatcctgtatgcttttgagatcacgtttagtgctatgtcctagtctagaatattttcatataccttgcagtaaaacgactttgtgggcaggacagtctcttgaggggttttgtttctgtttcctaaatactcctaaataatatttctaatcagccattatgctggggcatctctgatcccagtagggtacctctggaatataccagggtgtctgggagttaggaagcccatagccctttcccagcctttttgggtttttttaattgaacacatttcatcttaagtaaagcttcagttctttatcacaatttactgaccaaataccttagcaccagttcctgctgccactttttaaagtgccatatgactttctacgaacaggtaccttgctgtcttgacaaatcctaatgtcacgcctacagccccaacacaagctccagtcttcctcttcggccatgccgtggaagcttcttggcctcagctccccttccccgctcagcaccctgttatggatcagtgtgtgtggatgggatagccctgggatggaaaggactagcctctactgatgcaaaaaaacaaaaagcaacacaaacgtttccttcttatagcacatgcacttccttacaatgacatgatttgtattatcctcacatgtgtttactactgctggggccttccttcatcctctgagggctattttgtactttctgcagcaatcagcttaataacaacacttattgcacctgtctctctctgagaacacggtgtgtctcgacacgttaccacgtacgtggaaacacaagagcccaccacttgaatttctaagaccatttcattctgaaacttcttatcaattacctaaatctcaacgaaaaacaatttactgaagccgactcccctccccatctccctctcaacctcaacccacctgcatgcatctcccccagaggaaacactgagggtaggggacaggaggctcaggacgcgccctctgaatcgagtgtttcttcttcacaagtcaccaagagaggacatgagggggaaagtccttttttgcccttctccaaaaaataaccttccacagagacaaactgtccttctatccacttttatcttttaataaatatcaaaaggaaaaagctgcaagggtgcaaagggcctgtgcccagaagaaaacacacacagggaaaccgctttttttaatcaattgtagagaatagtcatttttaatctaaattagagaattgtgatacaatggcagtcctcaaaggcgtaacgagttcatctttctttcaccataggggttatagttggcttgtgctactctggaatcattttactgtttgtttttattatcttaagtgctaatt

SEQ ID NO: 281 - DNA, 407 bp, Homo sapiens
ggccaagtacccgcgtgcatacggctgccggcatggcacattacaacttcaagaaaattacggtggtgccgtccgccaaggacttcatagacctcacgttgtcgaagactcaacgaaagactccaaccgttattcataaacattaccaaatacatcgcattagacatttttacatgagaaaagtcaaatttactcaacagaattaccatgatagactttcacaaattctaacagatttccccaaattggatgatattcatccgttctatgctgatttgatgaatattctctacgacaaggatcattacaagttggctctggggcaaataaatattgccaaaaatttagtggacaatgttgctgtttatttcctggtttggcacagtatggtttcatgaaattggagc

SEQ ID NO: 282 - DNA, 1032 bp, Homo sapiens
  misc_feature (1)...(1032): n = a,t,c or g
ggtccgacgctgtgtcaagctctgcaccggccatgagtatgcagccaagatcatcaacaccaagaagctgtcagccagagatcaccagaagctggagagagaggctcggatctgccgccttctgaagcattccaacatcgtgcgtctccacgacagcatcttcgaggagggcttccactacctggtcttcgatctggtcactggtggggagctctttgaagacattgtggcgagagagtactacagcgaggctgatgccagtcactgtatccagcagatcctgggaggccgttctccattgtcaccaaatgggggtcgtccacagagacctcaagcctgagaatttgcttttagctagcaaatccaagggagcagctgtgaaattggcagactttggcttagccatagaagttcaaggggaccagcaggcgtggtttggttttgctggcacacctggatatctttctccagaagttttacgtaaagatccttatggaaagccagtggatatgtgggcatgtggtgtcattctctatattctacttgtggggtatccacccttctgggatgaagaccaacacagactctatcagcagatcaaggctggagcttatgattttccatcaccagaatgggacacggtgactcctgaagccaaagacctcatcaataaaatgcttactatcaaccctgccaaacgcatcacagcctcagaggcactgaagcacccatggatctgtcaacgttctactgttgcttccatgatgcacagacaggagactgtagactgcttgaagaaatttaatgctagaagaaaactaaagggtgccatcttgacaactatgctggctacaaggaatttctcagcagccaagagtttgttgaagaaaccagatggagtaaaggagtcaactgagagttcaaatacaacaattgaggatgaattcagcttggacttaaccaggttgactcannnngggggnnnnnncnnnnnnnnnnnnnccnnnnnnnnnnnnnncnnnnnnnnnnccc

SEQ ID NO: 283 - DNA, 382 bp, Homo sapiens
aggagctgttttagtagcttgggctacaaatgcagttgtagccctttaatttctcatttaattcctcaagcacccacctggccatcttagcaagaagcccagcatcttgctcttactgcaggtaattccccatcttccccaaactctcagggggcttacttagtcctcagggccagtgctgcttccagacctctgggaggaaggctgctggggtcctggatcagtccaccagagggctctggttttgagctgctgctctttctgctcctgctatgctgcgtctccatgttctccagctgtttctatccactgtgcacaggtgcccttgctggtccacatcccacacagatcagagcgatgcaagactgcatcacttgaggct

SEQ ID NO: 284 - DNA, 1225 bp, Homo sapiens
ggggacggcgatggcgacggggacgcggacggacggcgaggacgacccggggcactgggacgcggacgctgccgaagccgccaccgccttcggggccagcgcggagggccgccgcatcccccgggcgctggctggcgaggagatccgacagatgctacagggcaagccgctggccgacacgatgcgtcctgacacgctgcaggattacttcgggcagagcaaggccgtgggccaggatacgctgctgcgctcgctcctggagaccaacgaaatcccctcgcttatcctgtgggggccgccgggctgcggcaagaccactctggctcacatcatagccagcaacagcaagaaacatagcataaggtttgtgacattatctgcaacaaatgccaagacaaatgatgtgcgagatgtcataaaacaagctcaaaatgaaaagagctttttcaaaaggaaaaccatcctttttattgatgagattcatcggttcaataaatctcagcaggacactttccttcctcacgtggaatgtgggacgatcactctgattggggcaaccactgaaaacccttccttccaggtcaacgctgctcttctgagccgctgtcgagtgattgttcttgagaagcttccagtagaggcaatggtgactattttaatgcgagcgatcaactccctgggaatccacgtcctagactctagccgtcccactgaccctctgagccacagcagcaacagcagctcagagcccgccatgttcatagaggataaagcagtagacaccctggcttacctcagtgacggtgacgcccgagctgggttgaacggactgcagctggcggtgctggctaggttaagctctaggaagatgttctgtaagaagagtgggcaatcctattctcccagtagagttctgatcacagagaatgacgtgaaggagggcctacagcgatcccacattttatatgaccgggcaggtgaggagcattacaactgcatctccgccctgcacaagtccatgcggggctcagaccagaacgcctccctctactggctggctcgcatgctcgagggaggagaggacccactctacgtggcacggaggcttgtcaggtttgccagcgaggacataggtctgggcagacccgtctgcgtttaacacaagcggttgctgccttaccaaggctgttcattttattagggcatgcctgaatgttgaggtgct

SEQ ID NO: 285 - DNA, 591 bp, Homo sapiens
  misc_feature (1)...(591): n = a,t,c or g
gagaagcccagaggtcgtttgaaaatgcagtcatgattacgagttgcatgcctggccttgttattgggttgtatgagctcttttggcaaggcaccagaatggtgcaccctgcagctgcagcttatctactgattgagaccctaggacacaaggctgcctgcctcatgttccccatgcctagggattaggtaccccatgaggatcttttccaacattccttgcttaaagaattgcaatgttctcacttcttgaaactctctgagctctgtatgatttacctccgttccacccaccatataactttcaaganacagcagttctattgctatggtcctgggactttaagttgcttttttctacttaagcttcagtggcaanttgggaaaagaagggaggaattcnatggactcctttggggcccaaattccnggnaatttngaaggttggctnaacnccttggnccttnaanccggcaattggattccccaanagggggnaaccncancctnanttcgncttcccntcccnagatnnnntcaannaagggtcgnnacaacntnccacanaatttnagaaacnaangggtntccc

SEQ ID NO: 286 - DNA, 1872 bp, Homo sapiens
  misc_feature (1)...(1872): n = a,t,c or g
cattaacctaggaaagtagttttcaaatcatgctccttagaaggatgtggagtagagggaagggaaggattggtgatagcagagctccaggcctcccttccagtcagaacagttgagcagtttacaaattagtgtcctgcctctttgctagcaaatgcttttagacactgtggcagtgagtcatcctctaatttctatgactgcattttaagggaaaagataaaattcttccccttaaaattcgttaaagtttttgaataatctggggtcctaatgtgttctggtcatccctgattgatgctatctgaataaagttataagctcctataagccataatttacttttaaacattttatttttttcaaaacatttgagaacctttcttaaagcggttacattcaagctacagaaatatcgaagaattaatgattgttcaccaagcagcatgctgtacatgaagctattacaaatgcttacaatcccactgaaatgccagtgtcttcatctcttcataaaggtgcctaacacgaggtatacagtatgttcagtacactggaatagcatgctcgattggaaacaaagcatctatctctgaaagctgtttggcgatgaaggagattcttcgtgttgtgttcaaagatgagtccctctcccttggtccagaaaaatgccacttgtatcaactttactgcctttgtcggcagaattggtacttaaccttattctcatttgagcggggaggcccgaaatcatattatgtagatttaacagtgttgattctccaaaattcagaaccacgataaagattctgtcgatgccatccagctctcttgtgtacacaacatagtggctgtcattcctcaaatggcaaaaccagcccctgttgaggagtagctcattggcatgaagtagacttaaatcttgatataacttcaaagccgatctgggctgagtcttttggacctatttttttaaaaaagtatttacgtaagtgtttgattctaagaattgtttgtaagtatttttaatatattgtaaggagttatttacccaaaacacttgctccaattttgccccttataattgccaaattgtaagcatcaataagtaggtaagaacaatttatataaaaactgatagaaatgacaaattcggggtttcggcttgtccgggagtcaataagtacgcacagtgctctgctacattgtagagtttctgtagagatcaaatttgactccactttaggagtcccaaagcaaatgtccatgtctaagatgaatatttaacttgcatagtcattctgtgctatattgtaactgccagatggccagaaagaaggcaacagtggactcagacttctgaggaatttgggtttgttcccctttgtagactaatgtgtaggttgctgttgtgcgaagatcgtgtaactttagcagacatgtatttcttgcacagctaatagaagacaaagttgaaaaaaaggatgcaaaataaaaagctgcctaaggtgaaagttagaaattggtagacttttttttaccataatagtatgtgttcattaaagatgatttggggtttattttacagctatataaaacataatttgatgatgtactttctaacccttcaagcattttctgttattgactatataatatagcctccataaatgtttttaatgacaatattctgttgaacggttgtaccatactcagccatgccctttcattttgacgatagtgtttctaatattttgtatttttattcccctccccccatttttgtattacttaagggtaggattatccggaagacagttactttgtcaagggtatgggggcacttngatacanaatggccaaattattctt

SEQ ID NO: 287 - DNA, 1324 bp, Homo sapiens
  misc_feature (1)...(1324): n = a,t,c or g
gcggttcagagctgtgactgcggctgcactcagagaagctgcccttggtgctcgtagcgccgggccttctctcctcgtcatcatccagagcagccagtgtccgggaggcagaaggtaccggggcagctactggaggactgtgcgggcctgcctgggctgccccctccgccgtggggccctgttgctgctgtccatctatttctactactccctcccaaatgcggtcggcccgcccttcacttggatgcttgccctcctggcctctcgcaggcactgaacatcctcctgggcctcaagggcctggccccagctgagatctctgcagtgtgtgaaaaagggaatttcaacgtggcccatgggctggcatggtcatattacatcggatatctgcggctgatcctgccagagctccaggcccggattcnaacttanaatcagnattacaacaacctgctacggggtgcagtgagccagcggctgtatattctcctcccattggactgtggggtgcctgataacctgagtatggctgaccccaacattcgcttcctggataaactgccccagcagaccggtgaccgtgctggcatcaaggatcgggtttacagcaacagcatctatgagcttctggagaacgggcagcgggcgggcacctgtgtcctggagtacgccacccccttgcagactttgtttgccatgtcacaatacagtcaagctggctttagccgggaggataggcttgagcaggccaaactcttctgccggacacttgaggacatcctggcagatgcccctgagtctcaggaacaactgccgcctcattgcctaccaggaacctgcagatgacagcagcttctcgctgtcccaggaggttctccgggcacctgcggcaggaggaaaaggaagaggttactgtgggcagcttgaagacctcagcggtgcccagtacctccacgatgtcccaagagcctgagctcctcatcagtggaatggaaaagcccctccctctccgcacggatttctcttgagacccagggtcaccaggccagagcctccagtggtctccaagcctctggactgggggctctcttcagtggctgaatgtccagcagagctatttccttccacagggggccttgcagggaagggtccaggacttgacatcttaagatgcgtcttgtcccttgggccagtcatttcccctctctgagcctcggtgtcttcaacctgtgaaatgggatcataatcactgccttacctccctcacggttgttgtgaggactgagtgtgtggaagtttttcataaactttggatgctagtgta

SEQ ID NO: 288 - DNA, 174 bp, Homo sapiens
aaatggaacacacatgcaaacatacacacttgtgagtgtgtgtgcccatgctgtagtattttaaactatgggcaacataacagtagtatttaccagggtccagtcacttgagacttcccttctggaattctgtcatacacccccacctcctgcaataaaatagtagcatcggca

SEQ ID NO: 289 - DNA, 1269 bp, Homo sapiens
  misc_feature (1)...(1269): n = a,t,c or g
acttgcgctccacagcacttgtaatgccagtggttggaattgctaaattatggactacaaccaagtcaactgttttggacgtttatcttctaaactgctgtgttgaaagtattgatgactggctttcatctaaaaagaagagaccaatacgagcacagtatatgaaggtttctcatacttaagttccaggtttttatctggtaaaatgttacacttactcggttgtaactgaagatatggtatgtttgaatatttactataagtctttcagtttgacttaaaaatgtggaaagttggaatttagtaggatgatcttcacagttccatatgtataatgtgccaggtaactcacctgccccttaagaaggggnaccctgganttacataagccgtacctttgatgtgcctaatagtttcagatgtcttagttttttataaccatagttgattaggccaagaggcattcatttcttatttaagctggcaaaattagcaggaattagagaagtttaaaaagataaatggttttatgataatgttaaccatcttttgttagtaaatatgcgttctattattttaatcattgatgccttacaaaagaaaacatcttttctaataccctgaatatgtgctgttcttagaatcatctatggattcttttaaaggttgtttgtgaaattagttttccctttttagaatctcaggagtagtggggtaaagacatttcctgctgtcagtggataagacagagcttgttaactgttttggcagtagttaaaatcaaattgtacacttctcagcctgggttcatgcttcatcattaatacacctcacagtgcctaaggaacatttacttactggtcagaaggtattttggaagagtttcatattaaggaggaacaaataataattttaagttcttaaaaattacctaaaacaccccaaatataaaaagaagccttcacacctattctgtctttaggatgtcttaaattattagcagtactcctttttttaaaaacactgtaaaagtaaccacaaatatgtgaggacttactattttaaatggaatggaatgagctccatagattagttttgaatataaagtatataaaagtgcatcagtggtttatataggctttaaaaacatgttatcttacagtcctttaaagcagccatagagtttgtatcatttttcaagccaatttcagtcagggatttgaattgtttgattatggatgataaatgtgtcatatcttaaaaaaaaaa

SEQ ID NO: 290 - DNA, 774 bp, Homo sapiens
gctgggcaggagtcatgtcagccattgagttggtgcctgaacaccaaacagtgcctgtgtcaataggggtccctgccaccctcaggtgctccatgaaaggagaagcgatcggtaactactatatcaactggtacaggaagacccaaggtaacacaatgactttcatataccgagaaaaggacatctatggccctggtttcaaagacaatttccaaggtgacattgatattgcaaagaacctggctgtacttaagatacttgcaccatcagagagagatgaagggtcttactactgtgcctgtgacaccgcggggttcagctcctgggacacccgacagatgtttttcggaactggcatcaaactcttcgtggagccccgaagtcagcctcataccaaaccatccgtttttgtcatgaaaaatggaacaaatgtcgcttgtctggtgaaggaattctaccccaaggatataagaataaatctcgtgtcatccaagaagataacagagtttgatcctgctattgtcatctctcccagtgggaagtacaatgctgtcaagcttggtaaatatgaagattcaaattcagtgacatgttcagttcaacacgacaataaaactgtgcactccactgactttgaagtgaagacagattctacaggtaggccatttctagcttcaaggagcttagccaggtttcttcatctctctgggcctgggtttttgcatctgtcttgagaaatgtcagcctccagacctgaaagcttcttgtgatttg

SEQ ID NO: 291 - DNA, 392 bp, Homo sapiens
  misc_feature (1)...(392): n = a,t,c or g
ggataaccctgtgtccccttccccagacagaaaaatgcctcaacgtcgtgactgggnnagagnggaggctggtggcctgaaggagctggagatctcntgggggctacaccanatngtgntgaggtggggggcantggtgatgagagcagggatggggggttgnnggtgctggggcgtgatggctccttttgcccccagaaagncctnannttcctggtcaacgactgcngcctcattnacaacaatgtntgcatggncgcngtgttngnggaccnanctggcaagtggaancttgggggcctggactacntgnattcggcccaggnnaacggtgggggacctncccgcagggggatccctacttgacagntgaccccccggagntggntgaa

SEQ ID NO: 292 - DNA, 702 bp, Homo sapiens
gcgaccgcaagaaggccacagcagccccgtgtccatcttcgtctatgatgtgaagcctggcgcggaagagcagacccaggtggccaaagctgccttcaagcgcttcaaaactctacggcaccccaacatcctggcttacatcgatggactggagacagaaaaatgcctccacgtcgtgacagaggctgtgaccccgttgggaatatacctcaaggcgagagtggaggctggtggcctgaaggagctggagatctcctgggggctacaccagatcgtgaaagccctcagcttcctggtcaacgactgcagcctcatccacaacaatgtctgcatggccgccgtgttcgtggaccgagctggcgagtggaagcttgggggcctggactacatgtattcggcccagggcaacggtgggggacctccccgcaagggattccccgagcttgagcagtatgaccccccggagttggctgacagcagtggcagagtggtcagagagaagtggtgggtgactgggggcagcgcgccccaacctgccctgtcctggaggcccctgcagcctcaggactcctagactagttggcactcccctgttcctgctgcctggctggggagggatcagtgtccaggagttagggacactctctccccccagggtcctcagggcggtagggcgggatggacaaagcattcggggttggg

SEQ ID NO: 293 - DNA, 1210 bp, Homo sapiens
  misc_feature (1)...(1210): n = a,t,c or g
gctaagaaggtctatgtctactgaaggcaataaacgaggaatgatccagcttattgttgcaaggagaataagcaagtgcaatgagctgaagtcacctgggagcccccctgggacctgagctgcccattgaaacagcgttggatgatagagaacgaagaatttcccattccctctacagtgggattgaggggcttgatgaatcgcccagcagaaatgctgccctcagtaggataatgggtgagtcaggtaaataccagctgtcccctacagtgaatatgccccaagatgacactgtcattatagaagatgacaggttgccagtgcttcctccacatctctctgaccagtcctcttccagctcccatgatgatgtggggtttgtgacggcagatgctggtacttgggccaaggctgcaatcagtgattcagccgactgctctttgagtccagatgttgatccagttcttgcttttcaacgagaaggatttggacgtcagagtatgtcagaaaaacgcacaaagcaattttcagatgccagtcaattggatttcgttaaaacacgaaaatcaaaaagcatggatttagtagctgacgagactaaactcaatacagtggatgaccagaaagcaggttctcccagcagagatgtgggtccttccctgggtctgaagaagtcaagctcattggagagtctgcagaccgcagttgccgaggtgactttgaatggggatattcctttccagcgtccccggccgctnataatcagaggcaggggatgcaatgagagcttcagagctgccatcgacaaatcttatgataaacccgcggtagatgatgatgatgaaggcatggagaccttggaagaagacacagaagaaagttcaagatcagggagagagtctgtatccacagccagtgatcagccttcccactctctggagagacaaatgaatggaaaccaagagaaaggtgataagactgatagaaaaaaggataaaactggaaaagaaaagaagaaagatagagataaggagaaggataaaatgaaagccaagaagggaatgctgaagggcttgggagacatgttcagccttgccaaactgaagcccgagaagagatgaacaacaaagcgattcaaaacatgtcttgaacagcacatattgcacagttgttgttttttttaaacaaacaataaatttacttttaatga

SEQ ID NO: 294 - DNA, 2127 bp, Homo sapiens
tttttttttggtttctacaaattattttattagaatgtcagactcaaaagaactaccaggaacatgcctgaaaatgctatatatgatttatgcttgacccatgacacctgctgtcactggatccagagtgagcaagggaaaggaagtggaggtaggcggggacagcaccagccctggctggccagacctgaggcccacagacctggtccccacaaccaggattcctacaatgtacacattcctaattcaggctcaactctcctttacccaaaagtaaatgcctcaggactcaatctgaatcactgtctgtctcagcttctttcacatccacgctgaatttgtactcctggtcacatcccatgtaagcgtcactcatgaagtacagagtgtagttgtgggcaccagtggctggggccacaaagtccaacttcaccttggccttctgctgcaaggtcagcctcttgatggagatgaggctattggacttggcatctccaatcaccacccaccagccctcttcacgtttctgcgggaagagaggcgcaatgagcagggcctgtgacttcctcctctcggtccagctgcaccaagcacataaactggcccgccactgcggatgcctgtccttatctaccacctcataagatagttcgatattaggggtaggggttacaaaagcgagccacatctgacaatctggcttgtagtcagctgaaggaacgggtccggtgctttcatctccatctcaatgatgtcgaaaaaattttcagtcccttggctggtggacgttttgatatgatcagaggtgaagtgtgggcagctgcttcaggtatgagtccttggaccacatggcttgggtgaccatctgggccagttccatagctgccagagcagggctgagccacccattgctggaaaggacatccacgcaggcctggatgagccggattgccttactaaggatttcctccgtatctgactgcaactcagcactcagctgcatgcgagacaagtgagcctgcaggagcaggttggtcttgacgtgcggatcattgaacttagggttaattcagcttgtgggggaccttctgagccaactgcctcaggagattgtcttcatggtgccggatgggaatgttctcatactctgctgcattggagatgatctcgataagccctcgcaccttggtcttggcattgagggacatgctgaagagctcaatggtggtgtagttgatgtaatagtaggcggcgatcatgcctaggttcagaggcgccacgtccatctcgtcctcgatgctgatgcacttggactgctccaggtcactcagggtctgctccaccagctctgacaagtggtccgacaagtgacgatgggagatgccctgcaggttgtagtaattggggttctgtgtcatgcggcggtacagaaaggtccaggtgaggtagtccacagcatcctgcttgttctcaatggtcttggtgacgatctcagcattgaagtggtcatgcatacagtggtccaggtgagattctactggcaatggctcatataagaacttcttgaagaaatccttcttggagccctgacacatgatgacacagcgcccctcatcgtcctgcaaagggcggttggcgtggcccaccatctgaagcacgtcatagatggggtaatccacataggcgtggatcttgccattgtagtactgggtatccatgatgattaccaggtgggcagccacgttcatgccccagcagagactccgagaagccaccaccacctggatagcccctgagctgaagagctgctccaccaggcgtcgctccatggggctgagcccctcagtgcaggtagcccaccccatttagcagcgtttccttgagcgtgctgtcacttagcttctccaggtacggaatcagatccttctcggtgcagtgcaagaacctctgccgttggatgtctgctgcacaggtggtgaggatgtcaatggcagtgaggcgggtctgcttgcgagacggcacaaagacaatgacaggcttcttgggcgagtgcttggtgatagcatggtacacaggcttggctatggagagcaggctggtttgtgtatggctgatgttgaagccctg

SEQ ID NO: 295 - DNA, 1304 bp, Homo sapiens
ttaactaaaatgtctctagcttctttccatttatgataatcctgcccttttcgacccacagtgtagctcagaggaggaggaccttaagaaaaactgagattcgttattcagggcccatggtaccttaatctagaaacacatatcccaagaaatattttctttttaaaattatacatcaactttatgccttattgtttaaaaatcttctatcaaaagtatcatcgataagacaatttatcttgcttttgtacctcataattaccctaaaatgtgaagtttctagtctcactgatttcagatgaatatttaaaataatttgataagtttaatcaattggaactctactgtgtggggtgaggggagagaaagggagttatttttgtgttttgaagaaaagttgacaggatggaagatctgaaattatggctggggattgtagtgatagctggtagctgaaaccacccaaaaaaagctagaaaagtgttctcttatgcctccagagatacctagaaaatatgaagaatgtggaaaagagcaagatggaaccctcagagtgtttcagataaggtctgttggtatctccataagcttttctcctatttggagaaaatagactctcactgaaactcttcaatgtttttaccctccatccttttcttagcaatctaaactcaatggcctcctgttccccaacactgcagtctgggcatctgactttgtcttccctctgcactcatttctgtgaatcatgaccagggatgaaactgatatccctagttcctcttccccatttcttctcacactcccctgcctgaggaatcagttgagttcccaatacctcttccttcagtctctattcattatatggtctaggttgagacttccttggaagcagaacctgagtaccaggaactcatattttataaagtatatttattccttttagctgcaaactaacccagccatgttttagtgaatgctttaatctgaagatgactttgagctcattgaccatattaatctttcatcaaacaaactggatgttgtttcattaacaaaaaactcctccacaccaaggagtgtttagtaacttctgcacagaggactcatccatctcttgcttatgtttgggacagaaagacacttctctggctttttactggcttgaacccaatgggacagagactctctagaaagtttcagggctcacattcacttgtttgtccaaaaaatatttttgagtgtctcccaagtgccaaaccctggctactcccacctttgcctgagcccatgagcggtagtct

SEQ ID NO: 296 - DNA, 593 bp, Homo sapiens
gaaattgactggatacccattgcccactccaaaccaactggtgggaatgttgttcaatatttattgcctgggggtattcctaaaagcccaggcctttatgccattggctatgaagaatgtattgagaggcccctctcaccacacatggagcaaagttccctggacccagggaaaagagggccgggttgacctggaaaccctttcagcacaagcctcattacaggtggaaatagaacccacccgaattatctattgctacctcgggattgctgaggtcaggactctacagcagtgcttatttttacatttccaagcgaataccaaaaccttcagcaaagattgggttggtattaacgggtttttgtctcagaactgtattgtggatcccggagtttcccccaaatccatctacatcaaatttgtagaagtagagagggattttctttccgcaggctctttagttgagtgcctggaaaaagccattggataccccttaaaatttaacaactgaatgtcatccttcataaggatttgggcttctaagctccttcttctctactcactttcccattacccggaccacccctcatcca

SEQ ID NO: 297 - DNA, 1554 bp, Homo sapiens
gattaccagcctcacggagtgacttccagaaatatcctgacccacaaggacgtaacagaaaatctggagacccaagtggtagagtccagactgagggagccacctggagccaaggatgcaaatggctcaacaaggacactgcttgagaagatgggagggaagccaagacccagtgggcgcatccggtccgtgctgcatgcagatgagatgtgagctggaacagaccttcctggcccacttcctgatcacaaggaatcctgggcttccttatggcctttgcgttcccactgggattcctacttaggtgtctgccctcaggggtccaaatcacttcaggacaccccaagagatgtcctttagtctctgcctgaggcctagtctgcatttgtttgcatatatgagagggtacctcaaatacttctgttatgtatctgtgattttatttcttctttgggtatagggttgaggggaaataagttttgagtgagaaataaacgttttagctgaaattgtatcccagaagtttgaaataagtagtagaagagggggaaaacaagggagaagtggtggggaagacttggtagattggggccttaagtaaccacctcctttccctctctgcccccatgacttcctgctccaagttacagaagggaaggaaaccattttactctttttattctgctcattaatgatctgaaagaagaagatggggaaaaggggattccaccacaaggctccaaagaaccaagagtgcaaatcagtccatttcactttcactgtctgagatagggtctctaagacccaggatacaagggtggaatgtagctatatggactcgatttgcttccggaccttttccagagcctttctgtccaattgtcgctgacgaatgatgacaagacaagcgaagatcagggccacacacacgacagccccttcgaacttccaaaataagcgttgttccatcaaagctgagcggcagcttttgaactcatttctcttagatgagctgcatgtgattttctctacatatcctgtgggaccacactcaggggtagttttagcccggaaattagagcatggagagcactcttctgctaccacaaactcttccaccagccagcatggcaaatttgaggtgcttgctgacagcttctcttcctgcacgggagcctctgcttggcagagctttaaggtgaaagcacagagcaaccagcagaggtggcggccctggcgggaggcccaggcctcccggcacccgcaagcatggagcgccaagtgtcgcacctgtcggaacagagggacctactccacaggcctcgtgcctccgtcggagcgcagaggcggcacttactctgcagccctcccagaggttccaggtcagggcagggaaggccggagttgcctattggagcagaggatctatcaggacgtccccgttgccacagcgagaaaaatcgatatgtttttgcgggctagggaggcgagcgccttctgcggggtcgcagggcgctggaggaagggccggcgggggctccggccctagcgccc

SEQ ID NO: 298 - DNA, 161 bp, Homo sapiens
gacagacataaaccctacctttacggaagttaccacattccacttggggagatgacacctattgtaggataaggaataaaatggttagtaacataaggaaaatgaattttaaaaccataggcattcacatgcaaaaacaaaacaaccaaaaaaaaaaaaaa

SEQ ID NO: 299 - DNA, 1383 bp, Homo sapiens
aatctctcatcggtttgctgaggaaattttctaagatgaaaatagaaaggcacatgacgccctgtgaaggacgtggcccagccgcctactctctgttgctgtctcccgctacgacctctcacacaggtaggaagcccctgcggacagcggggcccagcgaaaggacagctcagacggccaccacacttgagttctgtgctttcctgggcatgggaggagctacaaactttacttaaaaaaaaaaaaaatcacacagtttttcaacaggaagagtgaagtagaagaacagatcatttaattatacaaacaaaatcgctttcctttgctccagcgagtccaggcaacctttcaagttcatttgctgcctgaaagaaaggtttttagtatcagaaagaacctcgctgtcctccaatatccacagggaaaacaagatcagaaacaaaagtccaccatggaagaaatcccagagcgatccaatttggaaagaatttaattaacaaaataaaacggagggaaaatggtccaggtggggccctagggagatcggacttctgtccccagctgaagtctgccccagcacacctggtgggcagcccctgggcctgtcactgcagaactggccttgacaagcagacccactgtgcgcgacgccacggtttccttacgcactcggcattatgtacagatatgaaaaaaacccaacggcaggtggctggaaagtggcttctagctcccctatgctggcttggcacgttcatgcatgcaaagcgaggaggttttgcgggcttcaccaaacagttaattttggcaaaaagagaaaacaaacaaacaaaaagctaaaattcataagcaggatttaaaagccactgaagtgaaaatgatgtatttcctcagcgttatggagttagactaccactacaatctttttttttttttaataaagtctctgccatcctctcccccgactcaggtcaaagttcatagcagcaatgcacaaagtcctctgtgaagccagtgttctctgctccccgggtcagaggtcacaggtcaagttcagtcagtccgaagaatcatgggcgggtgctcgctgtcctcatccaggcgcagggcgctggcctcgtcctccaggcaggcgccacccacagcacccaggtcgtctgtgtaggcaagtctcgttggggatgaaggcacgtaagtaccttttcctgcagctgcgccgtatgtctgagtgactaaggggcagtcgtgagaggcagagtccaagatctcattggtcgtttccagactgccgtccagccggtgctgcttcatcagggcacactcgccgccctcctgggggtccaggttgtacatgtacaggtacccgtcggcggcacccaccaa

SEQ ID NO: 300 - DNA, 139 bp, Homo sapiens
gcatttttataggtgccatgtatgcctctgcctgaatttttttaattgacttttgagcttttgagattgcacgagggagaacaaggcctttgctgttgtggataggaaagacttaacctaaaattaaaccagcatccag

SEQ ID NO: 301 - DNA, 603 bp, Homo sapiens
  misc_feature (1)...(603): n = a,t,c or g
ctctggaggccctcatctgggtggaggagtacgggcagccactcctgaccatgctctgcgcccantgcacagtggcctggtgaccggcagggcccagtggcggccgggaagtccgtaactggactggaaacagaaagggccagccccagcacgggcttgcgacaggatggctggccctgcctctgccgctttagcaagtgggccaagtctcagcctcttcaactctgacaaggagcaaagaacatctacttccaggtcactctgtttttagggggaatgaaaggagaaatgtgcttagagagcctggcctagagcctggcccaggaacaggtgcttagaacatgggagtccctcttgtcctctcaccgacctgcaattcctttacgtgaaccccactgggttctcatctctccaagtggcggaggacgtggctggcatttgttcttggacttggggtgggaagaaaggccttaattatacatttgcaagggagactgcagcaaagcacctgctccttatcacctttgtgccatttccaaggcctttggagatacttcaactttccagagagaaaggggaggcggtggggacagtgtgctctgc

SEQ ID NO: 302 - DNA, 1543 bp, Homo sapiens
ctcaggtgtaaagaatattttatttcaatacttcaatattgaaatcagctatcacacatatccaccaactgatatttcattgtccatctctcaggagatattcaaagtgagattaatttaatgaagccttctcagcaaacctagaacactgtacttcatcttcaaatttaagtcatagcctttaataagttacttcctagtcattattttatagtatttatgaaatagtgcaatatatcaatgaggtatcatttaagaggcaaatactctatagatttggatttgtcatcccaattccttggcattcaataatataagtatctttagcggcgtcttcttcatcttctgatttcttcacaataaatttagcctttgctatttgttcagcaaaatgtatcgcggtttgcgtatggagtgtaaactggtcctgtttttattctggaaactccattgggctaatgcccatgaaaacaatcagctggtcttgcagatactcatccacagtaccaccatgtctaagatttgctaatagcatttcggcagcttcaattccaactttgtctgcatttacacctcgtttaccaagcgatgatccagcaaacaaacagccagtggaggtctcagcaataattattattccatttccattgccaaatgcttggtctttaggttcttgaacaggctggatgttaacatacaaatcccggatctcctttctgatgcatctaagctgctgccgctgccatatcttttgctactttaaatggcaaaacaccagcaacgaaagctcttccatatatcttagtcacacagccacgctcagttaaatttatagggttcaattgtttaactggtgacattcgaacaatcacttcaccacccccttttgggtaatatccccttgttttaatgtcacaattaaatatgaaaccaaatttttcaacaattggcttgaagaccatcactgtataatcgatctgtggtgccatttcagcattagttccacctttcaaatgaagttctgatggagaagcagcaaagagaacacacggcattgagacctgcatcaagaggcacacactccctgctgtcttggtatctgctgtgtggattccacctttgatcttctctggtgtaaaggttatttctgttgagccaatttctgccccctccagttgcccatcacacaaatctcgaatcatttccagtccagataaatgttgaggcctcaggcctggcgtgctccggccggctcggatcttctgcacccgcaaggggaggcctaggagacagctcaaggccgtagagactctcaggatctggccgcccccttccatgatgctgccatcgacctccacccgcggccccgccatgggggacaccctggggcccagcccgcagcgacaaagcctccgccagagcgggagaaagaagagacgttggctcccgcccagtagttcagaaaccttggttcatgcctggggttgcaggagcctgacgagaaagcggaagaagcggcgcctctcgggacactggagtcagc

SEQ ID NO: 303 - DNA, 236 bp, Homo sapiens
gcactcagcccagggcctgttgttttcttcagtcaatgtttattgaacattgccagggactaatgttggctctgggaatatgagcatgaacgaaacaaagttgctgctctcatggagcttccattctattaaggggagaaagaaattgtggagggggagggagaagtcaagtagtgataaccgctatataaaaaaaaataaagcaggataaatttagggcaggaaggtaaggcctc

SEQ ID NO: 304 - DNA, 5525 bp, Homo sapiens
gttgtttcagccattttaatacattcaagaatatttactagaacaacatttaaacgtatcgtcggtccgcagaagcctgggatcgagagaaatagaaacgcgactggcccttttgcagtaaagcttgtgcttgaagggagaagaggcaaagtggcttcttggagacttcgtgccagatgccacaggactgagagcatctccaaatgtcactttaaacacgtgtgagcatctatagtcattcctaaagcccacagtgtcctaaggatcctattagacgaggcaaaaggcaatgcttctggaaccctctcccttgcagctctgcacgcaaaccttccccaaggaggggcccgaggcaagcctctagataggcggggccaagccatccccgtaaccaccctctttccctgttgctgacctcaggcctgatgctggacccatgagactcccagagggaaaacacagatacagcccatccatccatggccaccttcctccagaagatcctggggaccccctacccccccatcccatgaggcaccagggctgggctcgcatggcccagcaagggataaagttgggaactgcagaccaggggaagcccccctcattcttagggcaaaacagcccctgaaggacaaaataaataaaccaaaccatgaccagacagctggatccggacaggtggagtggcctctgtgaaggcaaatgagagcaaaagtgggaactgaggacacctaagtggagagacacttaaaaacagtaattctcacatgaacatcagtggctcatgccaacagcagagctggccatcaacagaggaacagcaacaaaaacacaactcagacggggggcgggacggggccaggagtctgcgggggtctctgatatgctttgtggcatgactttgcttgcctggcctctcctttcttagctgaaaacaggcatttcaccaaagggcatccagccagcggcagcagcctgagctcccaggctgacatctgggcagggctgatgggcagcttctggccatctggtgaccaggtgtgccgccagctgcacccacatgcacagcccctttcctaataaccacattctaggttacgtagacacgttaaactcctattctagaacatcgtgcttgaatgcagacccctcagcccacaatcgggctggctgggcctcctgtgagcccctcattgcatccagtctgtggggcagtgaccccgcttccactggtggctggtcttcctcatggtgctatgccaggtgcccaaacacagttatattctcaaaaggtacaggtcttgtctggacattgttcaaaccaatagctactgcgttaggcacacgggagatccctattcccaaaaatagctgttgagttctggcctgagagcatctccagtgaccacctttaaataaggctttggttcaaacagcatggacccagcaccctggggagggtgggcacacgggggcatggacccagtaccctggggagggcgggcatggtggtaggagacaactcaaccactgagtcttggaggtcctgccttggccaatggagggcagtggctgccctcacaagaagagttaaggcactttctttaactctggcctaggagaattatgtcttagtgactcagtgagtttaaatgacactgcctgggctccctaaagttgtttacttttctcctatttcctgctttattccttgctctcaccatgctaatgtacagatgttgtttagatttctatgcttattgaaacaatgtaactttggtactaacagaacaggagcgaccttttccagcattgctcgtaacaaaacaaaaatgttaactagaaaaactccttatgatgaagaaatctaaagccagagctgggactccaaaccccttccaggctggaagacaggtcgctgagtccaggcaaggggcccccgtaactgcttcccgccagaaagcccagccgcgtgagtgcagcagcagcaccccagccctggcgtgcccgcaccacgccctctagatactctcctagctcaggctgaacacgcctggattgtgtcggccgggacagccccgtcaggtgtggggcagctgacccacgtctgtggtgaacatgctcctccaaactaggacggtgaagggcccagggcgctgggaactgccaggcgctgactctccttctgggttctcaccagcaccggaacccaccccagccaatagtcaggaagtgccgcggccgagccttcatcaaccctagtgagtttcccacagaactgaatcccttttcccaaattcagctgtgcatgagccctttttgtttggtgccctggagcactagtgtagttcaatattctcttcagaaggaaaactccagcagccaccggcctgcaggatgtgtgctgagcccacatgacctgaatggacgggtcatgtgggaggggccctggtgggagctgtgggccacacggctgagttcttccaatacggaagccccgagctggaggctcacacgctgtggggcagcccagagttgctggaagctttacaggggtgcgtagctaatggcgtcggtgtcgctcggtcgctgtggaggggtacccccgctattggggcggctcctcccggcatgctcaggtctcaaagtacttgtagatcgccgtcacatacagcatcacgttctgccagtcgggtcgttcagtccgtaccatttcattaatgtccagtgtggatttgatgccgacactttcagctgcctggaaagccagcatgaagttccttctcttatcctggctgttcagttcttgatatggaatgtgggcagggagatatgtatgcaggagggcacagaaggccagcccatcatttccagctgctgctgaagtttgtaatgtcaatattctgatagccttctgttttcttctgacaccacttcagcaaggcgttcctctttgatcctccatattctctggccaatgctgagagagggtctttcctttcttctcttattcggcttcgggtggtgggagtcacagatgccgttggagaagaggacagggaaagctgtggagacgtggttcccatagccatcagagaggctggcgacgctccctcctgtgcagaaatgtcccgtttcatttcttcactacttcgtcgagacactgagagggtcttggcactttccatcgcaggcactcttggcagggaagcaggccggctggctgaagatgttcttaacagatgctcttgaacagggatttccccatagtttggtctcttatctgacagggctgtcaggggtttggatgttgagattggtccacttatggaatgtctctgcataggggacacagctgctgcaggaggggttttcataggacttgggctcaggggcgttcgaggaattgcagctgcagcagggtttggtacttgagatgcactgtcaaaggacttgatgagggtttttactgtaggagttggctctgaggaagtcgaggaccttctactcagtcccattccctgccttaaggctgccaaatctctctcaacggcattcatgtaattgtatacccggcctcgctcctcctcttgcttgcgtgactttatttcctccaattcttttgtgagtttctcatttttttcttgagcctcatgtaaccggcgctttagatcaccaatctcctcttgggcttcagatttaatgtcatttgcaatgactactgcagtctggagatcagcctgaaactgccgccattccgcagattcttcccgaagtcttctgtggagtgtctttatttctctttccatgtcgtgcttttggtcctggagttttttaactgtattctctagatcagaaataatgaggttgtcatgaagtttcacagcacgatgttgttctacttcatcttcaagttcaaagatggtttctttcatgtcactcctttctgtttctttttcatccaggtctgatcttaatttttctaacgtcatattcaaatcttcaatttgtttcttagcttcttcttggaaggctcggtattcatcctctaccttagcaatggcatcctgtaatcgattggcatcatttcgggtatgagccagatcttcctgcaagctactagccaaagtctctgctttttctttgtccagcctgacactctccaggaggtcctgaatatcagatttgtctccagagttatggatagaatacagctctgccactttctgcttttcattctccagctgagccttcaggcgattcatctctatctggtcactggccactgtggctttgtattcctctaacgtggctgccaaggctgcttttcctttctgctcagactcaataattcgctccatatggtgactgcgttctttgagtgcccctatcatttcttgagcttccttattgtcttgttctgccattttcaaagtattgcttaaatgctgctggacaccaagaagctgctcccgttcaaaacgggcattctcagcgaggtccatgtaacgttgctctaattccatatagcgcccactttttacatcttcatctatgacataagaaatgtgatgctcatctagaagagagcggaagtattcaatctgtcgactaaagtgttccaacttatcgctctgctgacataaagactccatcagaataaccttctcttctccaagcctttcgttttcactattcagttcctgggtaatctgctgtaaatcagctagctcttgcagggttgcctggagttcctcacttgtactgtgttggttctcttccatctggtgtatccgttcagtcaggcaagccacggacacttcactggcattcccgctgctccccttccgggagcgctctatgctggggatgccttccgactctgaggaggatggtgcatccagcgcatcatcgctcgatgtgaggggctggtagacctcactgcactcactgtctaaattgtccatggagttactgtgctgatggtccattagtgtattttcatcctgactcaagagatcctccactgagccaggggcagagccttccactgaagaagtcagagttcctcctccatcgctctggttaccaggggtgatttctgggctcagggactgatagccaaacagtttttcagaattgtctaacctctgctctagggaaaagcccaatgcattcaacctgtcctttaacattctgttttcatttttcagctggttgagttcttcacggatggcagtattctgttcctgcaactgcaataaagtggactccacatcagtcggctggtgagccataatagtttccttctcagatttttcatcaccctcagaatgatcctcattaatgcccagctgggcacgcatgtctcgcagttcatttctcaaatgtaaaatttctacgtctttggtttttgccagcgtgagaagatccttcactttggcctccaaagcagctctgtcactgatctgattgtctgacttagacttgctcatacgaacgtcacattctgtagcagttcg

SEQ ID NO: 305 - DNA, 375 bp, Homo sapiens
  misc_feature (1)...(375): n = a,t,c or g
ttccagtccagattcaaccaacctagattaaaaattttaaatcaaaaatttaaaaccaataaaaaacagtgannnnnnnnnnnnnnnnnnnnnnnnnnnnnnnnnnnnnnnnnnnnnnnnnnnnnnncannnnnnnnnnnnnnnnnnnnnnnnnnnnnnnnnnnnnnnnnnnnnnnnnnnnnnnnnnnnnnnnnnnnnnnnnnnnnnnnnnnnnnnnnnnnnnnnnnnnananaccaaatttaaaanacagctgaacatctaanntcaaagcatttacattctattaggtatctggncgnaantctanacatanngnaccaggggaagatgcgcttagagcnnnagaatntnttnnntanntcagnntgnctggg

SEQ ID NO: 306 - DNA, 551 bp, Homo sapiens
gcgtaccgtgcggtcccatgtagttggaggacgggcggtcgcgcggcctttcccactagccggagtagcctctagttcgttagtcaaaacgtgaaaaaaaagacctgctttgccctgggaaatagtaaccctgccaaatacatcagcttgtaggagacagaggatgtgatggagctgcttgaagaagatctcacatgccctatttgttgtagtctgtttgatgatccacgggttttgccttgctcccacaacttctgcaaaaaatgcttagaaggtatcttagaagggagtgtgcggaattccttgtggagaccagctccattcaagtgtcctacatgccgtaaggaaacttcagctactggaattaatagcctgcaggttaattactccctgaagggtattgtggaaaagtataacaagatcaagatctctcccaaaatgccagtatgcaaaggacacttggggcagcctctcaacattttctgcctgactgatatgcagctgatttgtggggatctgtgctactcgtggggagcacaccaaacatgtct

SEQ ID NO: 307 - DNA, 1363 bp, Homo sapiens
tggttaaataactttaattacaccactgtaagtagattctgcctctgaccctcccacaggacacaaccggatgtgattcttgtcacttctattttaaacatgcatactgggaaaaacagaaacacaagagtgctatgggtacacgcgacgtgtgagaagaaaggaaccccctggagacacggacgcggtgtgcggtgacagccaggcctcactgacaacagggcagcgaatcgcagccgggacgcctctgaggcggaagcagtcttgggatttcctgtcacgctctcgatgcttctgcccactctggtttgtcacggggatgcttcattttggacagtataaaaccggtgattaatgcatatcttgctcttcagcaaaatactattcaagtagttttaacttaaatattttaaaagtaatctttacattattgaagattgttaaaaaatacagaatctgacaacttttcactcaatctgatgctctgaaactcttcacttctgttttatcataatttagaaggcaatccctggcctctataaaactctctgcaggattagcttcaagatccatctttcccccactggttcgagtttaaaaaggctttcagaaccttttgccactgcattataaagagaacatgaaccccttcccattacttcctttagctacacatgctatgactgagagtgtgctggaagctaaacaagccccagctgatttctgccacataaaagggcgccgtgaagaatttccctgttgaaaccttaatgaagacgatgatcccaagtgaagctttatgaagagacggcacagcagagtgaaatgtttggcaatcaacagttaattagaattacatccttgatcagggatgatgctatctccgcgaactcagtcgttagaaaagttggtttctgctgtgacgaggctcacagtggccactcgaggaagtccagcctcgtcagcctccggtcccgggccccaggcccctccaggccctcagtagatatctgggcagtcggagaaattccgctcaaagtaatcccctgcatacaaccagtcgggggtcccagtgtaggggttattgcctgggtagaaccacctcgtctgccactctgcctcctccttggcccgctccctccgtgcttctctctgcttctcctccagccgctccttctcctggctggccagatccatgttgccattctccatgccgcggatgtcagggcgcaggcggcagtccgtgggtggcagggtcttctccatgcctgtctccagctcgttgaggctcacagtgaaactggtgaaattatacatctgggcagagttggggggccgggtgttgatcctccagagcagcttg

SEQ ID NO: 308 - DNA, 4148 bp, Homo sapiens
  misc_feature (1)...(4148): n = a,t,c or g
tttttttttttttttttttaaagaactaagccagaggtgagatctttattgacttattgtaattttttggcatacaaattacttaagtatatttacaattcttacataatgtacattttagaagataatgtactttgctccatttacaatgacaaactactgtaaaactacattcatgaattagatacaaatcctctacatactaataaaaagtaaatggactgttggttatacattctttaaaatataccttttcacaggtagcaagaaatagtacatgtaataagtctttatgactggaatgatccagaaatatcacaaagcatgagtaaacacatatataaaagtagctcatcatttccaaaagttaacctttagcctttgtgtaaaataaatggtgccaacaatctttataatgtagcaagctttccctgtttaatatccaaaaaatggagggtggggaggttgaagaaaaataagaaaagttagcaaataagatagtgaaaagaccaatgcagagaaaagtttatgtaatcaaatcttgctttgtctccacattatcacattttaagtggataaatttatgtaaacagaaaaagatgtccacaaaaccatatctgtagatgtcatttggaagcatcaagaaattgataagtatgtggtgaattaaaattacttttataatgttttgctttcattaatgtttgttattgcaaaaatgtaagatttcctacaattttgtcttcaaatcccaatctagcccttcaaacttttatccaggttctccagaatatttggagtctttgttatcaaagcacaaggaaagctggcattcattatcagacttcgctgctttacaatgatttcaaatcatttcatgatacaaataaagtgcctctgactggtggtcagtcagacctgggtaatggtgccaattctgccaccagctaggcaaatcaaggtgaccctgctctgtaaaacaaaaggagcaccctaggatcaaaaaagtagacaactttggagcttagattaagatctcagaaatcctaccatgagaatccagtgagataaagcaatgcccaagtacactgtaagtagcaaaacagtatacaaagggatgcttctatattttcaccttgtttcattacactcattttaattgtgaggagccctgaatccaaaaagggtagtgacgactagtccagtgctccttccaccgtatcatgcggttctaaagtcattctggacatacaatctacaaaaatacatcatttttccagctcatgtccatgatccaaagtgatattatacacaagtgttatctgacaatataagaatgatctgggaatgtctgttcaaaacggtagtaaatttagtcttaaacacaatttcatttactgcgaccatacttaacatgcataaaatatttttaaaatacaaacttaaattggccagattctgaatgtgtactttttttctttttcaaaatgcactcatgaagaaccaaagttcatattccaaattaaatctgtatgtctggaaaagtaaccaatcaaagttcattaaaatatacagtgaaaaccggtataaattaggcaaacaccataatctaatgaatatcaggaaatttctgagtttctaaggattgtattaaaggtaactttttaaaaccttagaaatcttaagcacataaatgttataatgaagcatttgcaaatgactgctcaattacttttattctagctctaacatgaaattgcattttattaactcttcatagtgctgctattcttattttgatattaatctaactttcaagttagtaagctaatgataatgagctaacagattaataataaggaataagaaactaataatagcagataagttatggaaagaaaataaaaggccaatcacattgactaatgaagcccaaaagcatgattaactaagatttcttataatgcactgaataattcacagcataacataattcagatttgttacataccatataaaagctattagttgacatggctaaattcacctaagagccaacctaccttgtaactattaatttaatttaaagccttgctgtttactccatgatttctgccaaatgtagtccaaattgggtctcagcatattcaagaaatcaagccacagaaatgtgtatttgtattgctaggctccctgcaatattaaagattttgctttctctgaagatattctgaaccatgatcatctttaaggcacttcaaatacatttctgaccactaaatttaagtagatactaattaattactgccatattaacaattcatcacgtaagccacaggaggcaagagtctcataaggaattgccttcacaaccacagagattccagaggtgatctgaatgaaacacgcaccaatggccagatccaaaaggaaaactacctagacttcctcagataaaagtcaggatctttaggaattaaaacaggaagggacactataaaggaaaagtgaggttttttctttttctttaacgtacttcttttctttgagcttcttggtcaaataatttcaaggtacatgctaataaaaactacaaatcagatttttgcctttagtgaaggtgcctaaaaagccagatgatctatgactttgaggtgaaacagcaaagataaagatttaatgttcctgttattgttataattaaatacaatgctgtggaagttagcatttcctcagaagtaattcacaaatatatttttatccttatctaacatacagtgaccattactaaataagcattacatgcatggcagtttggccaaattatggaaccttttctgtaatgtgaacttatttcaatataattcctgcttgggctagattctgatttgatgtttaatcaacttataaaaccctagtgactgggaaatgttagaaaatttatctataattggatcataaagtttttatatattttaaaacctcttatttagaaagagtatcaataatatcatttacatataatttctaaaagaagaatagacttaatttttgacaacaatgggaaggaatcaaaaggcnnnnnnnnnnnnnnnnnnnnnnnnnnnnnnnnnnnnnnnnnnnnnnnnnnnnnnnnnnnnnnnnnnnnnnnnnnnnnnnnnnnnnnnnnnnnnnnnnnnnnnnnnnnnnnnnnnnnnnnnnnnnnnnnnnnnnnnnnnnnnnnnnnnnnnnnnnnnnnnnnnnnnnnnnnnnnnnnnnnnnnnnnnnnnnnnnnnnnnnnnnnnnnnnnnnnnnnnnnnnnnnnnnnnnnnnnnnnnnnnnnnnnnnnnnnnnnnnnnnnnnnnnnnnnnnnnnnnnnnnnnnnnnnnnnnnnnnnnnnnnnnnnncaaattaattattttatactttaagacattttcaaagatggaatcagactaatttgtagcatataaatggtaatgtttatccataatattttggaattcaggggtctgtgaatcatgtaaccgaatactaaagctatatacacgatataatttaaaagaatgtacactgtgtacaagtacacaaaatagatgtagaaaaaataaacagcaatttattgctatatattttagtattaactaagaataagtggggttctttttctcctttgtacagagatttttctttcactaggagcaacagcaaaactatctttaaaaggacaaatttcaaatataaaaatggcctacatgattttataaattgatttttcctttaaagttttgatgaaggcataattttgtgacattcaagtaacctttaaaacatacttttattccatcgatacatctgtcaaggttttggggaatcaacccaacaatgaagaactacacattttgaactggggtttttttttgtgattaaaaaaaaaaagagcttctttttgctgcataaaataaatctaaaggactgaattatggtctacctgtacagccattatacatacatacattaaagtactggacaataacctgtcacctaagaagtataaccgaccgcatttatgaacaaacggggaaaacacattctctagttctaataaatcatatattatgtgtatgaaagctaggttaccaaaaacacatcaacacacacacctattt

SEQ ID NO: 309 - DNA, 530 bp, Homo sapiens
  misc_feature (1)...(530): n = a,t,c or g
ggcgcggtgagtcactggtatggaacgtgaagtagcagagtgaattctctggatctttgtcaggctatgtggttcatctgcaagtttttttcaaattgttgcaaatctccaaaaaaattttcaagtgaactcgtgcagttcaaacctgtgctgtgcaagagtcaactgtatttgcttattttctcaaaaaggaatgcctaaaggataatcaagaaactaatgaaactnnnnnnnnnnnnnnnnnnnnnnnnnnnnnnnnnnnnnnnnnnnnnnnnnnnnnnnnnnnnnnnnnnnnnnnnnnnnnnnnnnnnnnnnnnnnnnnnnnnnnnnnnnnnnnnnnnnnnnnnnnnnnnacgaatttttttttagaagaagttaatgaaattgatcacatggccatgctcaatggtgacacctggtgacccaacacntttngaaggcccaggggggagggccatttnnggncggaattcaanacaacctggtcaanatggtgaaaccccaccctactanaaatgcaaaaaatactg

SEQ ID NO: 310 - DNA, 598 bp, Homo sapiens
ctggagttgcgcgggctgacgcgccactatgtagcgggtttcgggcgggccacgcgtgcgggacaggaacccaaccccagccgaccttgagctccaggagttcgtctcttacgtctgcggaagtgcagctgcctcatttcttagcgcaggttgacaactacaggcacaagccattgaagctggaatgtcctgttgctggtatttcaattgacttaagccaactatcccttcagttacaataggaaagtgcctctaataaggccaaatatgcgtactaacttgtagcaaccacgtgtccgtgcagtgccacaggagctagagcagtgacaatgctggtggcaacagggcagtgtagcaggtgcttcatgttcaccttttcaaccttttcatttaattgtcacaactcggaggtggattctgttagggacaggctgccccaggaccactccgcccccgctaactcaatgcagctgacccttaccctgaatactctgcagctgcattcctgaaccgttatctaggcgctatagcaaggtcaccagacttgctacaccgaagccctctgggtggcacgggggaggtcatgagaaacgtggat

SEQ ID NO: 311 - DNA, 2202 bp, Homo sapiens
  misc_feature (1)...(2202): n = a,t,c or g
gccggtttatcctggttgtggtcaagactggatgatgtaactggctctctaggaagcctcacttggccgtaacctcaggaaggttctctttgaccccatctcatttcgaagccacttctgaagccacttgagaaaaatgatgtgacagttcctatcaaaaaggattcagaaacatataccatctgtgaagaaagtggccctttctcccgcttgcaaaatagacattctcaaattccaaaatgccagccaagaccccaatttacctgaaagcagccaataacaagaaaggaaagaaatttaaactgagggacattctgtctcctgatatgatcagtcccccgcttggagactttcgccacaccatccacattggcaaagagggccagcacgatgtctttggagatatttcctttcttcaagggaactacgagcttttacctggaaaccaggagaaagcacacctgggccagttccctggggcataatgagttcttccgggccaacagcacctcggactctgtgttcacagaaacgccctccccggtgctcaaaaatgccatctccctcccgaccattgggaggatcccaagctctcatgttgcccttattgtcaccagtgacatttaattccaaacaggagtccttcgggccagcaaagctgccgcagggtttagctgcggagcccgtcatggaggaaaaagctcaggagaaaagcagtctgttggagaatgggacagtccaccagggagacacctcgtggggctccagcggttctgcatctcagtccagccaaggcagagacagccactcctccagcctgtccgaacagtaccccgactggccagccgaggacatgtttgaccatcccaccccatgcgagctcatcaagggaaagactaagtcagaggagtccctctctgaccttacaggttccctcctctccctgcagcttgatcttgggccctcacttttggatgaggtgctgaatgtaatggataaaaataagtaacaagatgccaacttttttcctttggggtaaaaggtacaaaaacaaactaaccacagttgaagagaagggcttccggagctgtatttgcagttttgtgttgggttttctaaaataatattcttacaaagtatttttttacctgttatgccctgtttgcaaaaacaatttagaaaaaaacaacaaagcaaaacctatcttggcaaaaaaaggaagtgagtcagagcccattttcaggaggcattggtgatgttcggctcacatattgtttgcagacacacaagaaatctggcttggccaggattggcactagctatgaagggctgagcgagtcacattaaggaacttcacggaactttatagcactccgacattttctgagcaagaggaagtcaaaatttatttaacacctaagcctttttgtagactcttttctatatattgcttaggctcaccatagcgaattctccagtgttaaaacttttctgttttcacatttgaactttatgggttttggggattttcttgtagttcttatatatccctatatattatatctatattgcaaaattttgactgtcagctacatgttggtaagacacaggcaaagtattactgtaactaagttatttttaaagttaaaatatatttttacgtgcctttggctttttattgcagagtctacattttatagattctacatcagatgttgtcacttatttccattgggattccattgtaagctgtgtatgtgcgtgtttggaaaagtgtattcatacttagtttttttttcttcatctgttatcatacttttaacagcaaccaataacggattgtaaagtgtaaaggcacaggttactcatgatgcttctgcagagactgtgggctacaccacatatgttatttggaaatataggtattttagtacagtacatacttgcattacataggtacttcaagcaacacaataaaaagtaaatgataaagtgaacttgcttgtttatagtaataaacaagaccataagagaataagtatagctagagaaattgcttctctgaaatgtacatgagcccttaaggtaagagatgatttccatctactctcattttgattacttccttatggtttgngaggctaagaaactgagcctctctacttttggaaaaaatgaacatgtganggtcaganttttttt

SEQ ID NO: 312 - DNA, 376 bp, Homo sapiens
tgagccaccacacccggccaaaactgtttattcttgagaagttccatcttcatttctgccacagttggaacttcccgaggaaggaaggaggcctgaggttttgcacaatctgtttcagagcctgtttagactcaaacctatgcttcccttggcagcagaatacacttaacctaaagcagtatttggagttgagaaaaacctggtggggtaagtgaatatgtactgtttggtagggtaggtagagaagctgtgctttgaccctgtgattccatctttttctaccttctatgatggtgatgaagctagatacccctagggaagaaagaaggactgggtttagcaaaaatgatttggtaattaaagtttatttgaacac

SEQ ID NO: 313 - DNA, 449 bp, Homo sapiens
  misc_feature (1)...(449): n = a,t,c or g
acgaacacgccactgtgtgctgcaaagatgagaacggctggcacgagatccaccaggcctgcaggtacgggcacgtgcagcacctggagcacctgctgttctacggggcagacatgagtgcccagaatgcctcggggaacacggccttgcacatctgcgccctctacaaccaggacagctgtgcaagagtgcttctgtttcgaggcggaaataaggagttaaaaaactacaacagccagactccatttcaggtggccataatagcaggcaactttgagctggcagaatacatcaagaaccacaaggaaacagacattggtgagtaggcacgtggagaaactgtgttgggatttggtttggagatnctctgaggaatcagttcactnaccagctttttaaaattctcctnagattgggttanaancngcntttaacaaaaacttaacata

SEQ ID NO: 314 - DNA, 1445 bp, Homo sapiens
gcacagagacggacacaggatgagctctaagtacccgcggtctgtccggcgctgcctgcccctctgcgccctaacactggaagcagctctcattctcctcttctatttttttacccactatgacgcttccttagaggatcaaaaggggctcgtggcatcctatcaagtcggccaaggtctgaccgtgatggcggccctttgcttgggcttcctcacctcaaatttccggagacacagctggagcagtgtggccttcaacctcttcatgctggcgcttggtgtgcagtgggcaatcctgctggacggcttcctgagccagttccctcctgggaaggtggtcatcacactgttcagtattcggctggccaccatgagtgctatgtcggtgctgatctcagcgggtgctgtcttggggaaggtcaacttggcgcagttggtggtgatggtgctggtggaggtgacagctttaggcaccctgaggatggtcatcagtaatatcttcaacacagactaccacatgaacctgaggcacttctacgtgttcgcagcctattttgggctgactgtggcctggtgcctgccaaagcctctacccaagggaacggaggataatgatcagagagcaacgatacccagtttgtctgccatgctgggcgccctcttcttgtggatgttctggccaagtgtcaactctgctctgctgagaagtccaatccaaaggaagaatgccatgttcaacacctactatgctgtagcagtcagtgtggtgacagccatctcagggtcatccttggctcacccccaaaggaagatcagcatgacttatgtgcacagtgcggtgttggccaggaggcgtggctgtgggtacctcgtgtcacctgatcccttctccgtggcttgccatggtgctgggtcttgtggctgggctgatctccatcgggggagccaagtgcctgccggattggcttccaggtcctcctcagcattggggaactcagcttggccatcgtgatagctctcacgtctggtctcctgacaggtttgctcctaaatctcaaaatatggaaagcacctcatgtggctaaatattttgatgaccaagttttctggaagtttcctcatttggctgttggattttaagcaaaagcatccaagaaaaacaaggcctgttcaaaaacaagacaacttcctctcactgttgcctgcatttgtacgtgagaaacgctcatgacagcaaagtctccaatgttcgcgcaggcactggagtcagagaaaatggagttgaatcctttctctgccactctttgaggagaatctcaccatttattatgcactgtagaatacaacaataaaatacagccatgtaccacataacaacatctggtaaacaacagactgcatatatgatggtggtcatccagtaagctaaggttaatttattatta

SEQ ID NO: 315 - DNA, 631 bp, Homo sapiens
cggtggttcaacagcctgggtctacagcgcgggacccgtctggggtgaagaccttggggctgttgtgagtcggtggcaggaacgtgggctctagactgtgcattcaggctctcctacttggcagaatgatcttggggaaacgacttcatctgaacttcagatatttcacatgtgaagcggggacaaaaccatgcagctcagaggtccctgtgggggctgggggagctgccctgcaggtcttggcacatgcacagcaggctccccatagctttgtcaccacaaagggcactgttctattcacagcacctcctgcttctgcctggcaactgtgtctccctgtgctatatttaattccaccagcaaagctggccgaggcagggcccagccctgaaggagatctccttgcctgacccctgggacctgggaaatggaggcttcatgtgcccgccttggcttttaaagcctgctggctttggcagtgccatgggtgagccgagcagctgtgaggtgggtggggcagggctgtagccacggccgggtgctattccaggctctaggggctggtgttcatcccacccccagcgatttccgtccttacctgggcatgtttcagccttttgccggttttggt

SEQ ID NO: 316 - DNA, 2620 bp, Homo sapiens
gactcctaggggcttgcagacctagtgggagagaaagaacatcgcagcagccaggcagaaccaggacaggtgaggtgcaggctggctttcctctcgcagcgcggtgtggagtcctgtcctgcctcagggcttttcggagcctggatcctcaaggaacaagtagacctggccgcggggagtggggagggaaggggtgtctattgggcaacagggcggcaaagccctgaataaaggggcgcagggcaggcgcaagtggcagagccttcgtttgccaagtcgcctccagaccgcagacatgaaacttgtcttcctcgtcctgctgttcctcggggccctcggactgtgtctggctggccgtaggagaaggagtgttcagtggtgcgccgtatcccaacccgaggccacaaaatgcttccaatggcaaaggaatatgagaaaagtgcgtggccctcctgtcagctgcataaagagagactcccccatccagtgtatccaggccattgcggaaaacagggccgatgctgtgacccttgatggtggtttcatatacgaggcaggcctggccccctacaaactgcgacctgtagcggcggaagtctacgggaccgaaagacagccacgaactcactattatgccgtggctgtggtgaagaagggcggcagctttcagctgaacgaactgcaaggtctgaagtcctgccacacaggccttcgcaggaccgctggatggaatgtccctacagggacacttcgtccattcttgaattggacgggtccacctgagcccattgaggcagctgtggccaggttcttctcagccagctgtgttcccggtgcagataaaggacagttccccaacctgtgtcgcctgtgtgcggggacaggggaaaacaaatgtgccttctcctcccaggaaccgtacttcagctactctggtgccttcaagtgtctgagagacggggctggagacgtggcttttatcagagagagcacagtgtttgaggacctgtcagacgaggctgaaagggacgagtatgagttactctgcccagacaacactcggaagccagtggacaagttcaaagactgccatctggcccgggtcccttctcatgccgttgtggcacgaagtgtgaatggcaaggaggatgccatctggaatcttctccgccaggcacaggaaaagtttggaaaggacaagtcaccgaaattccagctctttggctcccctagtgggcagaaagatctgctgttcaaggactctgccattgggttttcgagggtgcccccgaggatagattctgggctgtaccttggctccggctacttcactgccatccagaacttgaggaaaagtgaggaggaagtggctgcccggcgtgcgcgggtcgtgtggtgtgcggtgggcgagcaggagctgcgcaagtgtaaccagtggagtggcttgagcgaaggcagcgtgacctgctcctcggcctccaccacagaggactgcatcgccctggtgctgaaaggagaagctgatgccatgagtttggatggaggatatgtgtacactgcatgcaaatgtggtttggtgcctgtcctggcagagaactacaaatcccaacaaagcagtgaccctgatcctaactgtgtggatagacctgtggaaggatatcttgctgtggcggtggttaggagatcagacactagccttacctggaactctgtgaaaggcaagaagtcctgccacaccgccgtggacaggactgcaggctggaatatccccatgggcctgctcttcaaccagacgggctcctgcaaatttgatgaatatttcagtcaaagctgtgcccctgggtctgacccgagatctaatctctgtgctctgtgtattggcgacgagcagggtgagaataagtgcgtgcccaacagcaacgagagatactacggctacactggggctttccggtgcctggctgagaatgctggagacgttgcatttgtgaaagatgtcactgtcttgcagaacactgatggaaataacaatgaggcatgggctaaggatttgaagctggcagactttgcgctgctgtgcctcgatggcaaacggaagcctgtgactgaggctagaagctgccatcttgccatggccccgaatcatgccgtggtgtctcggatggataaggtggaacgcctgaaacaggtgctgctccaccaacaggctaaatttgggagaaatggatctgactgcccggacaagttttgcttattccagtctgaaaccaaaaaccttctgttcaatgacaacactgagtgtctggccagactccatggcaaaacaacatatgaaaaatatttgggaccacagtatgtcgcaggcattactaatctgaaaaagtgctcaacctcccccctcctggaagcctgtgaattcctcaggaagtaaaaccgaagaagatggcccagctccccaagaaagcctcagccattcactgcccccagctcttctccccaggtgtgttgggccttggcctcccctgctgaaggtggggattgcccatccatctgcttacaattccctgctgtcgtcttagcaagaagtaaaatgagaaattttgttgatattctctcctta

SEQ ID NO: 317 - DNA, 606 bp, Homo sapiens
ttttatgtggaagaatacagaaatatgtttaatacttagtatcaaactaaaaagtaatataaaattacaaaacttcttttttttcatgcacaggctttttctggtaaggaccgctgggattgaacagaagcttccggtaaataagggccccgtcggcaagacagcatactgctgtcacaagtgcaaacacccctccaccaactgtcaatgttgtggtttctggtatcagtgccaacacagatacgatgagcatgaatactgttgttaccagtgagttgataatatcaagcaaaggccaaaataaccacttcattaatcgatcaagtctgagtacatataaaagtatgaaaaataagataacggtgacttcaaatccagtgataacaatatatggttcaggggcttgtgcgatgataaaaaaggtcatagatgtcacagttagtgccagccgcagcatcttcacgtggcctttcacactgaagcagaaggggcgatgttttattttcggctgcacgttatccatcgcgtctgcagacccagcagcagcactttccctcaactcttctcagctggctgcctgagtaggttctgcgaagcgatagcaac

SEQ ID NO: 318 - DNA, 564 bp, Homo sapiens
ttttttttttcacagttaacataatttattgagtgttctccctataaaatataaattaacttttccaaaaacattcctcaaagatactataaacaaaagaaataagggtatattttataacagaagagtgtaatagatgaccattatggtaaaactaaggtgccataaaaaatttggcccagctatgaatttcagaccctatgaatttttatgttgaatacatttggctatattgctaagtgggaaaaggaggaaagtaataccaaaattattgtgaccaccaatttataaaatcattattttaaagctaatcgtaaaacttcaaatgtttagaaaacagtaatttgtgggtactaatcgcatcttactatgtaactgtaaaaggctattttctctttggtgcccaggccagcattttgaatacattgccaaaacatttgcactccctagctctgacaattcaaatacataggattttatctattttacattcctgtttgatagaaatttgaggcaaattttacccacacagcctgaaaaataccttgaaagcaaacctcggtc

SEQ ID NO: 319 - DNA, 462 bp, Homo sapiens
tgactgtttagaaaaatttatttgaacatatgaaaggaaatttagacacccccaataaaactgagaagttcctttccgaggtgaggggaattcctgacagcctccctgagcagtgctgcacataagcttgtggtcactacgcagcctgggctcagctcacggggctgcagaaggagcccactttttctggcggggacacatcgtcttcacgaggaaagaggccagacacacgggcttgcacccgtggctcctgccgtcacactcctcgccacacaggctgtgtctgaaatgcgcagagaacagaggctcccaggatcggcatcttttaaaaatgcacgcagcaggctctcggcagaggctggactcttccctccaccatccaatctgcatgtcaaagaatgcgaccgggtgggaagcacctggactccgtgacaccaagacggttctgccggcggggagggg

SEQ ID NO: 320 - DNA, 492 bp, Homo sapiens
ccttgcctcttcctctgccccgcttcggccgcctcccgcctctcagggtcggggttgtctgtccccttcgctgtcacatcctccgcacccagcgcttggaaggtgctccatcacggtgacagacaggtgccaagcaggctggcgtctgggaggaacttcggagccggctctccctaggccccgagcttggccgcatccgtccttactctgggtgaccctgggcaggtcactgactcttcgggcgctttggcatcctcgtttgaaaggggctgttatcctgcagccttgctgggtcggtgagggtgagggtgagagggatctgtgcacctagcaccgtgcatggcacgtggtaggcgtttggtacatgggaatcgctgttggggtgtcacctccccagaaagttctcggcttcagtaagcgcgtcccctgccaggcgccctggcaatgcagaggagtcaccgagctccgcctttgaccagcgtgcagctggca

SEQ ID NO: 321 - DNA, 371 bp, Homo sapiens
  misc_feature (1)...(371): n = a,t,c or g
tgtgttagccactgggatttttggtttgtgtattactttagcatattatctcattttgaatgctatagtttaggacactagtttaaactactgaagttaaaatgttcnccttatttcagaggagagaaggatcttacagtgacagacatccattagtaagaattaatttctagagactccatgattaactaagagccaccaaacatttcccatgtagactattttgaccatgctgactctactgacactgtggttactgaattcactttatctctagaaattaattcttactaatggatgtctgtcactgtaagatccttctctcctctgaaataaggagaacattttaacttcagtagtttaaactagtg

SEQ ID NO: 322 - DNA, 527 bp, Homo sapiens
tgttagtggaggcggtgtcatcacttgtctttctttctttcagaccggaacatgaacattttgcagtactgcccctcttccgacatgtggacgctctttgaaacatgtgacgtccacattcgcaagcagcagatggtgtctgtggaagagaccatctacatcgtgggggggtgtctccacgagctggggcccaaccgcaggagcagccagagcgaggacatgctcaccgtgcagtcctacaacaccgtcacccgccagtggctctacctcaaggagaacacgtccaaatcgggtcttaacttgacttgtgcgctccataacgacggcatctacatcatgagcagagacgtcaccctgtcgaccagcttggaacaccgagtgttcctcaagtacaacatcttttcagatagttgggaagcatttcggcgttttccagcttttggacataacttgctggtttcttctctttatctgcccaataaagcagaaacatgactgaattgaattggtagatgaaaaaaaaaaat

SEQ ID NO: 323 - DNA, 513 bp, Homo sapiens
gccctgatcaaatcaggggctggggagggaaagtgggtccattgaggtggccctgctccatcagccccctagggacttgtgttcattacagtgagggggtgctcccactgtctcccggcctccctaatgctccctctgctgcagggagaagggttccaagatcacaaaatgtcaacaatgctggcctcctggaccagaccccgaggctctaacaatgcactctgagatccctacccttgccgttggtctctgtcgctgactcgaggcacctaacatccattcacacccaacacaggccagcgacttctggggctcagccacagacatggtttgtcactgttgagcttctgttcctagagaatcctagaggcttgattggcccaggctgctgtgtgtgctggaggcaaagaatccctacctcctaggggtgaaaggaaatgaaaatggaaagttcttgtagcgcaaggcctgacatgggtagctgctcaataaatgctagtgtgttatttcaaa

SEQ ID NO: 324 - DNA, 810 bp, Homo sapiens
ggccgaacgcgggccgggtgtgccgggggcctacgggtcccggccccggtcactatggacagtttttttcttcggctgtgagctctccggccacacccgctccttcacctttaaggtagaggaagaggatgatgcggcagcacgtgctggcactaaccatgctctgcctcaccgagggagccaaagacgagtgtaatgtggtagaagttgtggcccggaaccatgaccatcaggagatcgcagtccctgtggccaacctcaagctgtcctgccaacccatgctcagtctggatgacttccagctccaaccacctgtaaccttccgcctgaagtcgggctctggccctgtgcggatcactgggcggcaccagattgttacgatgagcaatgatgtttctgaggaggagagcgaggaagaggaagaggacagtgatgaggaagaagttgagctgtgccccatccttcctgccaaaaagcaggggggcaggccctagccctcctaggtcagctccatgtgccatgcaccgccatgcaccctgttccctgacaagtttcaacaattgtaaatatttcttccttgaagaggagagcttgggtgggggttgggtgggagggacttgggtctttggtgctaggagagggcctgtgctccacacagccgtggttttctgattttcaccatgcccggggcctcccttcccacctgcctgtgagaattggaggttagtgcctgaagctcagagctacacatttttaatagtttttacatttttggataaaggttgaaataaagtggtgtggagtttttgc

SEQ ID NO: 325 - DNA, 484 bp, Homo sapiens
  misc_feature (1)...(484): n = a,t,c or g
tttnnnttnttgantaacngancncttttgatttgacccccgnnnnnnnnnnnnnnnnnnnnnnnnnnnnnnnnnnnnnnnnnnnnnnnnnnnnnnnnnnnnnnnnnnggcacgagccggaagacaatttttcaatgggtcaannnnnnnnnnnnnnnnnnnnnnnnnnnnnnnnnnnnnnnnnnnnnnnnnnnnnnnnnnnnnnnnnnnnnnnnnnnnnnnnnnnnnnnnnnnnnnnnnnnnnnnnnnnnnnnnnnnnnnnnnngtaannnnnnnnnnnnnnnnnnnnnnnnnnnnnnnnnnnnnnnnnnnnnnnnnnnnnnnnnnnnnnnnnnnnnnnnnnnnnnnnnnnnnnnnnnaatctgtaacaggcctccgactggcagcagtccatatatatatacacacacacaatggaacattattcatccttaaagaaggaaattctataacgttgacaacatggatgaaccttaagaacatt

SEQ ID NO: 326 - DNA, 667 bp, Homo sapiens
cttcatccatatgcctattctccttatacccttgactccacacagaatgtttactcagtgcctggctcccagtatctttataaccaacccagttgttaccgaggttttcaaacagtgaagcatcgaaatgagaacacatgccctctcccacaagaaatgaaagctctgtttaagaagaaaacctatgatgagaaaaaaacgtatgatcagcaaaagtttgacagtgaaagggctgatggaactatatcatctgagataaaatcagctagaggttcacatcatttgtccatttacgctgagaatagtttgaaatcagatggttaccataagcgaacagacaggaaatccagaatcattgcaaaaaatgtatctacctccaaacctgagtttgaatttaccacactggactttcctgaactgcaaggtgcagagaacaatatgtcagagatacagaagcaacccaagtggggacctgtccactctgtctctaccgacatttctcttctaagagaagtagtaaaaccagctgcagtgttatcaaagggtgaaatagtggtgaaaaataacccaaatgaatctgtaactgctaatgccgctaccaattctccttcatgtacaagagagttatcttggacaccaatgggttatgttgttcgacagacattat

SEQ ID NO: 327 - DNA, 1505 bp, Homo sapiens
ggtgggtttccgcatgggccggaccgtggtcgtgctgggcggaggcatcagcggcttggccgccagttaccacctgagccgggccccctgcccccctaaggtggtcctagtggagagcagtgagcgtctgggaggctggattcgctccgttcgaggccctaatggtgctatctttgagcttggacctcggggaattaggccagcgggagccctaggggcccggaccttgctcctggtttctgagcttggcttggattcagaagtgctgcctgtccggggagaccacccagctgcccagaacaggttcctctacgtgggcggtgccctgcatgccctacccactggcctcagggggctactccgcccttcaccccccttctccaaacctctgttttgggctgggctgagggagctgaccaagccccggggcaaagagcctgatgagactgtgcacagttttgcccagcgccgccttggacctgaggtggcgtctctagccatggacagtctctgccgtggagtgtttgcaggcaacagccgtgagctcagcatcaggtcctgctttcccagtctcttccaagctgagcaaacccatcgttccatattactgggcctgttgctgggggcagggcggaccccacagccagactcagcactcattcgccaggccttggctgagcgctggagccagtggtcacttcgtggaggtctagagatgttgcctcaggcccttgaaacccacctgactagtaggggggtcagtgttctcagaggccagccggtctgtgggctcagcctccaggcagaagggcgctggaaggtatctctaagggacagcagtctggaggctgaccacgttattagtgccattccagcttcagtgctcagtgagctgctccctgctgaggctgcccctctggctcgtgccctgagtgccatcactgcagtgtctgtagctgtggtgaatctgcagtaccaaggagcccatctgcctgtccagggatttggacatttggtgccatcttcagaagatccaggagtcctgggaatcgtgtatgactcagttgctttccctgagcaggacgggagcccccctggcctcagagtgactgtgatgctgggaggttcctggttacagacactggaggctagtggctgtgtcttatctcaggagctgtttcaacagcggggcccaggaagcagctgcctacacaattaggactgaaggagatgccgagccactgcttggtccatctacacaagaactgcattccccagtatacactaggtcactggcaaaaactagagtcagctaggcaattcctgactgctcacaggttgcccctgactctggctggagcctcctatgagggagttgctgttaatgactgtatagagagtgggcgccaggcagcagtcagtgtcctgggcacagaacctaacagctgatccccaactctcattcatgaaaataaaaattgctggagctcccgaatcccgaattc

SEQ ID NO: 328 - DNA, 915 bp, Homo sapiens
gcgcaactgcagatcggtagccggaggccgccacggataaaggctcactgatggctcagttgggagcagttgtggctgtggcttccagtttcttttgtgcatctctcttctcagctgtgcacaagatagaagagggacatattgggcaatagagcaaggctccgtctcaagaaaagaaggtcatttcccaagactagcatagggagtatccatttaaaatacattcatcttcctcccatttccgtgctattaatcacttgttagagcaacatgacatgcccagcatcccacttcccgaaaatgtctactccttctactctgagctcttgttgcctaggaccttcaggaaaacaccaatttcaccacagtaggaaccgggaggcagggataggttcagcttctctgaatagcacactttgctcaggtcttaacttgagggcctctccggtactaacatcctgcgatagttggtcccatgagcacagaagagcctcagtagagtcaagtcctgctgcagctgccccaccccaagtttctatcatttcctctttaaacaaaaaatatgttatcctacacattagtgtcaatccaatggttgtctcttatctgtctaaatagcaaaatcatgaaaatcagctgttttatttgcataggacaacgtaacctgtctgtggtaactttgtttttattttaactcttactaagaaaaatctaatcctaaaacatttggattctaaacatgtaaaatgtgacagcctgcaattttgtagacagtgaagtaatggctgctatttataaatggaacatctatcaaaataagtaactgtttataaaattcagtttttgtagggttttccaaggaaaaatcaccttggttgaatgtttctcactcattaaactttgcagaagtgattc

SEQ ID NO: 329 - DNA, 740 bp, Homo sapiens
gtaatcccagaatttagggaggcgtgacgtgcctgtgcccagctcatccagattcttgctggttctctttctcagcctaaatgtcttgtttgcgtggagaaattatcaaatgaagcaggagtgccaaacaagcctcataggctcttcaccctacaacatctatgttaggtagaaaagtatgtggatttttaaaaatcatctggtataaagagtttttaagaactatcttcatcatcttagtatcagattgtgcttgagaagttaggtacaatgtaatgtgattcattgctaaaaacaaaaatgcctcccacaattgcagactcactcattttcccaaactatggaatttgtcaacaccttttcttgggaccaaggaagcaaagtcagtggataccgtgtcctgtagacatgtcacttgtgataaggcacggacaacatgaactggcaaaaacattggcatttggtcaaatgcttatgagctaaggatagaagggaaaaaatagttgtgtgaatgattttacctcttagttcttaccaaggatggttatcgggctggaaaaatgtttattggactgatgctttggagcctctcaatgaatgtaataccccaaatgtgtagtgagcacaaatgtatggatttgcagcacaatccaactttgaaaatgtgaaaataagtgagttagtgatatgtttggttggtgttaatttgagtcctaaataaaatcgagaactggtaaaag

SEQ ID NO: 330 - DNA, 233 bp, Homo sapiens
  misc_feature (1)...(233): n = a,t,c or g
cccagtgtataagagttcccttttctccgcatccttgccatcttctgttgnnnnnnnnnnnnnnnnnnnnnnnnnnnnnnnnnnnnnnnnnnnnnnnnnnnnnnnnnnnnnnnnnnnnnnnnnnnnnnnnnnnnnnnnnnnnnnnnnnnnnnnnnnnnnnnnnnnnnnnnnnnnnntttttgatgtcctttgcccactttttagtgggattattattattattttttaattgc

SEQ ID NO: 331 - DNA, 737 bp, Homo sapiens
ggcgtggtcacgtatgaaggatattttaagataacagaaaaaaaaataaaatagcatgcaattaactaccagctggcattaaaatgtcaccctaaacacagcagtcactcaatgaatgtggtttatgaacaatcttccttgacattccactctcttctgtggggaaacttgccatacttttctctgattccaaggaaaaagccaggaactaaataaaagggccaccgagaaggcagccttttattggctttagttttgcaaatactttgaacaaaaatgacattcacttcctacaagtctttctttggtctctatcacgtcccaaattcaattcctgttcagcactctaaaaaagcagtccactttcaactacttggacaggaataatccaggtatatccattcttagaccttacatcagccaggtccaaacaaatcaaacagtggctgccccagcatttccagagagtgggctgcagcaggagaacaaaactgcaaccaacaggtaactcagagctcgacagttgcatttctgtgtgtttgtagccgatattttcgcaaacagtagaaatcttgatccaatatgtttcttcatacaattgtgataacatagataattcaactactagcagtagaacttgttcccatgagaaatcctctgaaagaagagctctgtggggattatgggtatgtgtttcaacagaacttgggtggttgcctttaaagagtacccacagt

SEQ ID NO: 332 - DNA, 1840 bp, Homo sapiens
gctcgacaaccaagtgattcattccaaggacaggcagcctagtctggtgtttggaatgacgacagtatgttctaatacccgatttacaattacattgaactacaaggatcccctcactggagatgaagagaccttggcttcatatgggattgtttctggggacttgatatgtttgattcttcaagatgacattccagcgcctaatataccttcatccacagattcagagcattcttcactccagaataatgagcaaccctctttggccaccagctccaatcagactagcatgcaggatgaacaaccaagtgattcattccaaggacaggcagcccagtctggtgtttggaatgacgacagtatgttagggcctagtcaaaattttgaagctgagtcaattcaagataatgcgcatatggcagagggcacaggtttctatccctcagaacccatgctctgtagtgaatcggtggaagggcaagtgccacattcattagagaccttgtatcaatcagctgactgttctgatgccaatgatgccttgatagtgttgatacatcttctcatgttggagtcaggttacatacctcagggcacccgaagccaaagcactgtccatgccggagaagtggaagttgagcggggtgtataagctgcagtacatgcatcctctctgcgagggcagctccgctactctcacctgtgtgcctttgggaaacctgattgttgtaaatgctacactaaaaatcaacaatgagattagaagtgtgaaaagattgcagctgctaccagaatcttttatttgcaaagagaaactaggggaaaatgtagccaacatatacaaagatcttcagaaactctctcgcctctttaaagaccagctggtgtatcctcttttggcttttacccgacaagcactggaacctaccagatgtatttgggttggtcgtcctcccattggaactgaaactacggatcttccgacttctggatgttcgttccgtcttgtctttgtcctgcggtttgtcgtgacctctttactgcttcaaatgacccactcctgtggaggtttttatatctgcgtgattttcgagacaatactgtcagagttcaagacacagattgggaaagaactgtacaggaagaggcacatacaaagaaaagaatccccgaaagggcggtttgtgatgctcctgccatcgtcaactcacaccattccattctatcccaaccccttgcaccctaggccatttcctagctcccgccttcctccaggaattatcgggggtgaatatgaccaaagaccaacacttccctatgttggagacccaatcagttcactcattcctggtcctggggagacgcccagccagtttcctccactgagaccacgctttgatccagttggcccacttccaggacctaaccccatcttgcccagggcgaggcggccccaatgacagatttccctttagacccagcaggggtcggccaactgatggccggctgtcattcatgtgattgatttgtaatttcatttctggagctccatttgtttttgtttctaaactacagatgtcaactccttggggtgctgatctcgagtgttattttctgattgtggtgttgagagttgcactcccagaaaccttttaagagatacatttatagccctaggggtggtatgacccaaaggttcctctgtgacaaggttggccttgggaatagttggctgccaatctccctgctcttggttctcctctagattgaagtttgttttctgatgctgttcttaccagattaaaaaaaagtgtaaattaaaaaaaaaaaaaacaaaaaa

SEQ ID NO: 333 - DNA, 1042 bp, Homo sapiens
  misc_feature (1)...(1042): n = a,t,c or g
aattcggaacgaggcagctcggcagcatggcgtccgtgacgctgagcgagggcgnagaaggtgtacatcgtgcatggcgtccaggaagacctccgtgtggatggccgtggctgtgaggactaccgatgtgtcgaagtggaaactgatgtggtgtccaacactagtgggtccgccagggtcaagctgggttcacacagacatcttggtgggagtgaaagcagaaatggggacgccgaagctggagaaaccaaatgaaggctacttggagttctttgttgactgttcagccagtgctacccctgaatttgaaggtagaggaggtgatgaccttggcaccgagatcgctaacaccctctatcggatatttaacaataaaagcagtgttcgacttaaagaccctctgcattagtcctcgggagcactgctgggttctctatgtggatgtgctgcttctggaatgtggtggaaatttgtttgatgccatttccattgctgtaaaggctgctctcttcaatacaaggataccaagggttcgagttttggaggatgaagaggggtcgaaggacattgaattgtcagatgacccttatgactgcatacgactaagtgtggagaatgtcccctgcattgtcactctgtgcaagattggctatcggcatgtggtggatgctactcttcaggaggaggcctgctcgctggccagcttgctggtgtcggtgaccagcaagggagttgtgacgtgcatgaggaaagtggggaagggcagcctggacccagagagcatcttcgagatgatggagactggcaagcgtgtgggcaaggtactgcatgcctccttgcagagtgttctgcacaaggaagaaagcctggggcccaagagacagaaagttggattcctgggatgatttgcacatcaactgctcaactgtggattgttttttacttttccttttaaaccggttcgtatatatttttcttcgctgttacgaatttacagcagcatttgtacatgtaaaattaaaggctattttctggtctggtt

SEQ ID NO: 334 - DNA, 1274 bp, Homo sapiens
ttttttttttacataaaatttataacatttatttaggcaaaaaaaatcccaaaacaaaaatctgtacacacaacattaatacttaagtgatgtcctgatttaaaatacagcatgattcatgtacagaatactcccattcatctggccatagtgagaacagtgccttcagtccagataattgagagtctttgaaatatacacactttccaatgaattttttatatccttaggaaaggagttaaactgttctatcagaattcaaacaaaagataacttctctcacactcataagtcagtgaggaatttgacagtgggaattcctacaaaagtcagggatttctttaatttttgttgttgcagattatctgagagtagtaaagtttttaaggaaaaacaatgctcgttaagatcctgcttttattaaagtgtctcagctttcattagctaagtaggcttcttccttctaggctgcttaaaataagcttaaaaggacccaatttgaacagtttttcccaaaataagtccaaaattaaacacataacattaataaaatagattgatgatttcccacaaaataattttgataaacttggattttggaaatattcttaatggccattctgtctagctgtaaagttaggctgtgctatccaaaaggctttactttagagtcatgagaagcagcactgatctttgcaaaacttaccccaaaaaatggggagagagaaaaacaggaagaaaagtctctttcttaggctaccagtcagttaacaaagtatcttagattaagatttggaaaccaaagaatgcataattaggagtgtaccatatcatgcaaagtctatgaaatactaaataaggtaaaacagttaatcatttaaagcacgatgagcaaattctcttatcatacggctattctcatcaccggacgaaggttggttttgcattattcctaaaataaaacagttcgtgagtgaatactgcaaattaaaaactgtcaaaacacagcaaatgataaggactaaacatccattatccacaaactcatttgaaactactaccatggatttgagagggaaaccaaaagtttgcaaacctctctgggagctgtgtcaaagttagtattctgaagccctagcaatacaaagtccccaaataagtaaaatacagataaaagtggaagagcctacatcagctcaaagtaacatacttcctttaacttatgccttcagtttaataatactgtttataccactacattgtataataacgaa

SEQ ID NO: 335 - DNA, 1363 bp, Homo sapiens
tttttttttttttattgtcagcttgctgtgaacaatttttgctttaatatatgaattacattaatacctcacgttacatatatgaagccaaattacactaacttagtttgcttacaacctcaaatcttactcccagtacacattccaataaatttattctgtaaaaacaatacatttttttgtttttgatttttttacagtaaacttttcaactacaaaccgtgaatacgcgaaagatgttccaaggacaagcattaacaggattgataaaacccaaactgactaaatgtgttctcacaatataagctggcataaaaataaataaaattctctattatcacaatagcaacaataatgtacacataataatggtttaaggatgaatattaactattctaattgtagttccaaaagaaaacagtttattttaaaagtctacatttaaaagtcaatgctttgtctggtttcccatagggctgttgctgattccagctttaaaatgtaaagtatccaccttgagtgcttagctcaaaattgtattggcactgggaaaaaaataaatcattgcctttattttggagtaacacaaaaagactcactaacttcacatatagaaacttagtttgtgtacataacaatatgaattttgagaagtataagctgtcaactagctatttctaatacggaatagatattttacaatatggttaaactttacacatggcctcaaaactgaaggacaattttaatttcgtcttcaatataccaacgttatgtatttaggaattaattcctgggttctgtcacagagaggaaattccattcttaagcattatgttgagtggtcatctaaaaaatgttaatttatatttaactgagtgtttgatgatggtggggtcaaggcaggaaaacgatgatcataactgccttgataaaaggatcctagacatgtataagtctgcgcaaaaatcttgataatccttagtggttaagggcaacttcatgcaaccaaataacatgaaattaaatcagtaacttttaaaaaaggctaaaatgtcttttccccccgaaacacaacagagaggaatatgaataatgtacatacaaactggggttctgtcaatgacaacaaggactatgtgttggttcatatcaaatccaagaatattagacaaccaaacatataaccttcttgtggtttctcttaatatgcagcattcattatggtagttaggtcccttcactggttttctgcaagtctgaagttgtgtttcttgtgtcgttgcccgcatctccaccctcagagctgcttttgttttcctcttctttgcagtctttgtcatcttcatctcctggagatttc

SEQ ID NO: 336 - DNA, 1741 bp, Homo sapiens
ttttttttctgcattttgaatagtttattaaaggaaaggtgaagcatcagtttcaaattgtacaaaaggaaaaaaaacctcatattgcaaatgtacaatttacagaattactagcaaaaccaatcaaggagacaccgaaaatacaaaaatttgattgacttcaaactgaactggaaacccattggagtagatatttagcctttttgtgtggcatggtagtctacaattctgtcagcatctgttttccatacaagactgtcacgcaaaggatcaatttgtgcatgtgccagggcacctcatggcttgctccctggccaaaaccacaggcaggcagggctggggtggacagtccagtcattcctgcaccttcacttccagtgaagcccacaattctgggagaaagtgaggccccagctcccctaactggagcccaagaattgctgaattagcagagaagatatttttggtgaccaggtttttttcagaactgtacaaatgttgagaaaaatgttttgtgtctttactaaaaggatgaataaaatcatccatcatcatcttgctttcccgcacaaaagatgatcactgggtgtgcagaattttaaaaaatgtttttcgtatttgataaaaagggaaagcctcatgattctgttgcagctactttaaaaaccagcccagaaacagctgtggatgaattggtttggaaattctgaggcttactttagaaatcagaaaggaagagactaagtggggtttttaaaacaatagcagcaagtcataaaagtctaggcagaatgtaactctaaaccattgtagactgtcctgaagattcataatttctttccccaaaagaattattcttaatatgcacatttaacactgaaatgtagctgtaattcaaggtaagcttaggaacttcaccctctaagcacagacttctatgcagcacatacttctataatcagtaaacttaattcacaaaattagcgcataagggtattaagtgcatgggaagtaaacacagttatgttacacttaaaattacttttgaatgattgataaaggatttcttcatgattgattatcttaagaaaatggaagtctgtgtaacttgaatttggcagggcatgaaataagtggtaaaaacagcaaactgataacttgagaatcattttcgttttactgagaatactttatttgctggtagaagttgctaaaaatgcacagaacaaataccaatagaaaatgcactgtatttgaatctccctagtctatataaaatgaacggtgtacagcatctgttggaaaaatggctgcatggacatttcttattttatgcccacttataaataaaaataaaccttttattcaagagtatataaaatctgggaattcatatccatatccacagagggtgtgtggtttttggcagagatgtactatgtcagaatttcatcttagcttgtcaatgttctgctccttcattatttgtgttccacaaaggtcaaccaaatccagtgaactccaaaacactcttcgcaattaggatgagctgcttactcataggtttaataaaaatggttagcttttaaaacataaaaaggcaaaatgttaaaacggtttttaaattgtacaacaggaaaataaagttaaaaatatgtttttttttactcaatgttgagttttcataaaacaggtgtataacagtgtttatcttgacagctgttttaaaaatttaaaattt

SEQ ID NO: 337 - DNA, 2003 bp, Homo sapiens
aacaaacatgaggcaaaagaaaaaatacatgtttttaagaaaacattgagcagagaactgcagccaggatgcgctcagcagacattcactctggctgctgggacatcagaaaacaaagtcttcatctctctctccagtttcacccaccccaccctttgctttcatttcaggtgtgttggtctatatgacagggaggagagtaaaggagagcaggagcaattggctgcctgcaaagccagctggaggtgaagtgcaggaaaggaaaggtcaccccattctactccatggcctctctgctcccagctgtggtaggctcacatagccagtgtgatcggtttttaagaggcagtgcttttcagcttttctccctgatatatccattttgcttcccagcactttttagggagtagtgagagcacttcctgcccttgttggaagccccagggtgggacactcagcacgaaggtctctcccttaactgctgcccttccaagacttgctcccgagatggagtgggcgtggtcttccaggctggcccttccttctcctcaccgccaccttccctgccccagccccagcagccatgggtacatgggtccccagctcacctatggattcccgccagtctgcccagctgcagtactcacgccccatggggattcttggtctgtttttcttgtgggagcctagtggagagcagacgtggctttttatgtgtcttgttggggaggtgacttgcatggtggggacaaggctgtcgtggcaaccttgggatcgagtttgagactaaaggatgtcatgagatccctggcttctccccatgttgttcccggacaagggcagaagggaggcatggcaagggacctctgctgtccttactcaacagtggtcctcatccctccccacctcccactgcttcctgcaagggcaccagttgtatgagaaagttggcctttggacttaggatttcttattgtagctaagagccatctgaagcagcaggttgcaggacaaatgcttcagtccgccgagagcagtaccgtgtggccaagaggtggactcagagccttccttgagctaaactcggccaaccaaggcacgcagcatgtcccctcaggtctccagtcagtccaggttgaccctcagttctggacgtgtgtatatagctgtatttaatacctcaaggtcattgtggctctggggatgccggggcaggaggacgagggtgcgctgtggacacagcagtccgcggaattccgttctgggaagccaatggtcgccggcaccccttgcttcctccctctgttgtctgcctgtgtgacacacatcaatggcaataacttcttccaactcctcgcagaagtgggagaggccggcagcctgcaccgagaggggctttcctctctcttgctccccgcttcgttctgttttggctgcagagagtggttcatccatactctcattccctcgcctccccttgtggacgggggtcttgccttttcaattcctgtgttttggtgtcttcccttatctgctaccctgaatcacctgtcctggtcttgctgtgtgatgggaacatgcttgtaaactgcgtaacaaatctactttgtgtatgtgtctgtttatgggggtggtttattatttttgctggtccctagaccactttgtatgaccgtttgcagtctgagcaggccaggggctgacagctaatgtcaggaccctcagcggtggagcctgctggggggacccagctgctcttggacaagtggctgagctcctatctggcctcctctttttttttttttcaagtaatttgtgtgtatttctaactgattgtattgaaaaaattcctagtatttcagtaaaaatgcctgttgtgagatgaacctcctgtaacttctatctgttcttttttgaggctcagggagaaactagcatttttttttttccaaactactttttgtcactgtgacagttgtaaataaagtttgaaaatgctttcc

SEQ ID NO: 338 - DNA, 755 bp, Homo sapiens
catatgagaacacagagaaaacaactaaaatgatggataactcgctttaaaaacaattcctcaaagcgtcagagaactgagaaaaacagtaagaaaccaccagtcccacaccgtggtgcaggacacagcaatggaaactgaattgtttcagaccagccgcctcctgagagcaaccatcagaactggagagcgctgcacggaaccgtccagggcactgggagctctgaggagcctctgaggcctcggggctctgcagggacaagccgggagagggccggggcgctattggggcggcgactccacacccctgcagcgtatcccagccacacaagacatggcgacactctgctgcgttcgttcctcacactgtggccacaggacagaagtcgaggctcaggcggggggcctggtaaagactttgggtttttcttgggaccccaaagttctatcccctaaaagcaaaggtaaaccagcaacagaattgtctttgtggggactgaaagcccagccttaaatcaccctcaagccctgagagaattaaggtgagccgctcaccgggacacctgtggacagaaaagtacaccttcccctggaggaaggtaaaacaaaacaaaaacagacagaagtcctcactgcacggtgctggaatggatccgggtcaggaaaaattattacaaagtgcatgatggggacattcacaatttggaatatgccttgtacattgtgcaacaaaattctaccaatgataaactcca

SEQ ID NO: 339 - DNA, 617 bp, Homo sapiens
tttttttttttttagactgcagaggaactactcatttatttgggatccaaggcccccaacccacagtaccgtccccaataaactgcagccgagctccccacatgctggactatcaccccatataagggttgcggtcagtgggcaggggtctgggtccaaggccgcagcaggaggaactggacagcggaggaagtagctagggcatgtgcttggcccactgcctccagcaccccaaatccctgcctgaggctggggagagaccttctgccggcggctcctcaggccttcccggacccggcctaaggaggccaagcggtttctcttggcggagggctcgggtaagtcctcccggatcttcttccaggttgctgagggtcttcttgcccagctctgtctcgatctgctcctcgaggtctcgaacctcccgcatgatggtgcctgtgtcctcgatggtctggatgagctggctgcagttctcgtgcagagcagctagatacttataggccttccgaacagcatcgtccttcttggcatccttgaacacaagctcatcagtcaccgcaaacgtccggtccagcttcccagatagggagttgatttccttctgaagctccttc

SEQ ID NO: 340 - DNA, 1943 bp, Homo sapiens
gaattccggatcatcttaacctcctccccccccccccccgtccgtactgcagagccgctgccggagggtcgttttaaagggcccgcgcgttgccgccccctcggccgccatgctgctatccgtgccgttgctgctcggcctcctcggcctggccgtcgccgagcctgccgtctacttcaaggagcagtttctggacggagacgggtggacttcccgctggatcgaatccaaacacaagtcagattttggcaaattcgttctcagttccggcaagttctacggtgacgaggagaaagataaaggtttgcagacaagccaggatgcacgcttttatgctctgtcggccagtttcgagcctttcagcaacaaaggccagacgctggtggtgcagttcacggtgaaacatgagcagaacatcgactgtgggggcggctatgtgaagctgtttcctaatagtttggaccagacagacatgcacggagactcagaatacaacatcatgtttggtcccgacatctgtggccctggcaccaagaaggttcatgtcatcttcaactacaagggcaagaacgtgctgatcaacaaggacatccgttgcaaggatgatgagtttacacacctgtacacactgattgtgcggccagacaacacctatgaggtgaagattgacaacagccaggtggagtccggctccttggaagacgattgggacttcctgccacccaagaagataaaggatcctgatgcttcaaaaccggaagactgggatgagcgggccaagatcgatgatcccacagactccaagcctgaggactgggacaagcccgagcatatccctgaccctgatgctaagaagcccgaggactgggatgaagagatggacggagagtgggaacccccagtgattcagaaccctgagtacaagggtgagtggaagccccggcagatcgacaacccagattacaagggcacttggatccacccagaaattgacaaccccgagtattctcccgatcccagtatctatgcctatgataactttggcgtgctgggcctggacctctggcaggtcaagtctggcaccatctttgacaacttcctcatcaccaacgatgaggcatacgctgaggagtttggcaacgagacgtggggcgtaacaaaggcagcagagaaacaaatgaaggacaaacaggacgaggagcagaggcttaaggaggaggaagaagacaagaaacgcaaagaggaggaggaggcagaggacaaggaggatgatgaggacaaagatgaggatgaggaggatgaggaggacaaggaggaagatgaggaggaagatgtccccggccaggccaaggacgagctgtagagaggcctgcctccagggctggactgaggcctgagcgctcctgccgcagagcttgccgcgccaaataatgtctctgtgagactcgagaactttcatttttttccaggctggttcggatttggggtggattttggttttgttcccctcctccactctcccccaccccctccccgcccttttttttttttttttttaaactggtattttatctttgattctccttcagccctcacccctgggttctcatctttcttgatcaacatcttttcttgcctctgtccccttctctcatctcttagctcccctccaacctggggggcagtggtgtggagaagccacaggcctgagatttcatctgctctccttcctggagcccagaggagggcagcagaagggggtggtgtctccaaccccccagcactgaggaagaacggggctcttctcatttcacccctccctttctcccctgcccccaggactgggccacttctgggtggggcagtgggtcccagattggctcacactgagaatgtaagaactacaaacaaaatttctattaaattaaattttgtgtctcaaa

SEQ ID NO: 341 - DNA, 559 bp, Homo sapiens
aacaggtaccattttctccagatacttccccttcatctgtcctgaaattattaattattgacttctacttaaataagatcttattttcatctgctggaaaactttttctgataaccatacatatcttcaatgtctacaatttgaatggagagccctttcaatgtggcgtttctgtttcttccataacctcacaacgatatgtggtggccccgcagtcattatggtcttgttaaataattagatttgtgtaaactatattttagagtcttccaaaacgcctctccttccaaaatggctaaaagggcaaaggcgtcagtaattctgtagacatgcttcatgcatgttctgaataggagctatggtataatgagatgctatctctggaaaaaaatgaatagattttcaagattgtgagtcctgacatgagttctctagaattttcccctttgataaattttcctttacctagctgttgccaaattgctcttctagaagaatgcccagattttttttcagttccaaagttatcaaaatcccaggaatatttcacagaaaagag

SEQ ID NO: 342 - DNA, 276 bp, Homo sapiens
tttatggaaataatagtttcattttagtcttattcattgattattttatcatttcccttttacctattgattgatagtctgtgtttctaggctcagcttgtcaatcggaaacagaaattagagtctgtggaactttctagccaatcagaaattcaacacttaagcagtaaactggagcgggctaatgacactatctgtgccaatgagttggaaatagagcgcctcaccatgagggtcaatgacttggttggaaccagtatgactgtcctacaggag

SEQ ID NO: 343 - DNA, 1262 bp, Homo sapiens
cagcatggcggcgggggcggctgaggcagctgtagcggccgtggaggaggtcggctcagccgggcactttgaggagctgctgcgcctcaaagccaagtccctccttgtggtccatttctgggcaccatgggctccacaggtgtgcacagatgaacgaagttattggcagagttagctaaagaactccctcaagtttcatttgtgaagttggaagctgaaggtgttcctgaagtatctgaaaaatatgaaattagctctgttcccacttttctgtttttcaagaattctcagaaaatcgaccgattagatggtgcacatgccccagagttgaccaaaaaagtttcagcgacatgcatctagtggctccttcctacccaggcgctaatggaacatcttaaagaagatctcaaccttcgcttggaaggaaatttgactcatgctgccccctgcatggctggtttatgaaaggaactcctcaagaaccacgctgtggtttcagcaagcagatggtggaaattcttcacaaacataatattcagtttagcagttttgatatcttctcagatgaagaggttcgacagggactcaaagcctattccagttggcctacctatcctcagctctatgtttctggagagctcataggaggacttgatataattaaggagctagaagcatctgaagaactagatacaatttgtcccaaagctcccaaattagaggaaaggctcaaagtgctgacaaataaagcttctgtgatgctctttatgaaaggaaacaaacaggaagcaaaatgtggattcagcaaacaaattctggaaatactaaatagtactggtgttgaatatgaaacattcgatatattggaggatgaagaagttcggcaaggattaaaagcttactcaaattggccaacataccctcagctgtatgtgaaaggggagctggtgggaggattggatattgtgaaggaactgaaagaaaatggtgaattgctgcctatactgagaggagaaaattaataaatcttaaacttggtgcccaactattgtaagaaatatttaattacattgggagcagttcatgatttagtcctcagaaatggactaggaatagaaaattcctgctttctcagttacatgttttgtgtatttcacaatgtcgtgctaaataaatgtatgttacatttttttcccaccaaaaatagaatgcaataaacatcttcaaattattaacaaaaaaaaaagaaaaagaaaaataaa

SEQ ID NO: 344 - DNA, 894 bp, Homo sapiens
gcggcgagactgcacctcccagcatgccattgcagccaggactggagtcggtacttaagagtgatggggttccctagatactttaggccgtcgcatcgattatagagattgaggtggaacccggggcctgggaactggacgcacgcggagggcgaagatggaagcctggcgctgtgtgaggaagggctacggcacctgtgtgttgggaagaggccggtgtgataaagcggaattgggaatatatatgtagccatgataaagaaaaaacgaagatcctaggagacaaaaatgttgatcccaaatgtgaagacagtgagaacaagtttgacttttcagtgatgtcctataatatactttcacaagatttactggaagataactctcacctttatagacattgccggcggcagtattacactggagttttaggtttcccaatattctgaaagaaattaaacattttgatgcagacgtactttgtttgcaagaagttcaagaagatcattatggagcagagatcaggccaagtttggaatcactgggttatcactgtgaatataagatgcggacaggaaggaaacctgatggctgtgctatttgcttcaaacattccaaattttcactcttgtcagtgaacccagtggaattcttccgccctgatatttctctgttggacagagacaatgttggattagttttactcttacagcccaaaattccatatgctgcctgccctgcaatctggcgtagcaaatacgcatctgttgtataatccaaggcgaggtgatattaagctgacgcaattggcaatgctactggcagagatttccagtgttgcccaccagaaagatggcagcttctgccctattgttatgtgtggtgactttaattctg

SEQ ID NO: 345 - DNA, 379 bp, Homo sapiens
ttcggcacagaatttctcttctatttttgtctctgccattttatttttttttctaggaaatttctttattatccagtgaatttttatttgttataattttatttccaagttatcttctatatggatgttcatttttatagcaatcattcttttaagtatgcagtattttttcacctctgaagctatttaagtttttaatgtgtttttagctccctgcattttttgttattctgttgtcattcacattagaggccttcctcaagcattctgtgactcttggctgtgaattcatatttaaaagtaagtgccttaaacacttactagaagctggagttgagagcttgttaactggtctccctttgaagggtgtttgtagggg

SEQ ID NO: 346 - DNA, 437 bp, Homo sapiens
gctggatggtctataaatccttttagttatgaattttcattatatgggtattaccccaattacctattaaagtatgttatggacacctggcatgggtgcaaagcagggacttcccagtgcggatgttgaggttggccagggctaagggagggaaacgatgtgtcgatgttgccttctgttcctttgatgggaattaaaagggaatcatgagaactctcattctgcagtgcctcttcctgtccagggtcctgctatgaggagtcatcctcttgggcagaggaaaaaagcgccttttggataagggagaatttaattgtctaaatcaatagttactaactggccatctatggtttaggtgtagcctgccaacgtgttttattgggaccccacagttaaaaatatatagtactggtatttaaaaataccctattttggct

SEQ ID NO: 347 - DNA, 635 bp, Homo sapiens
caggggataattataactgcaatcgatgggcagaagacaaatggtgtccacaaaatacacagtactgtttgacagttcatcacttcaccagccacggaagaagcacatccatcaccaaaaagtgtgcctccagaagtgaatgtcattttgtcggttgccaccacagccgagattctgaacatacggagtgtaggtcttgctgtgaaggaatgatctgcaatgtagaattacccaccaatcacactaatgcagtgtttgccgtaatgcacgctcagagaacatctggcagcagtgcccccacactctacctaccagtgcttgcctgggtctttgtgcttccattgctgtgatgccaccattcctaggagaggcagagaccagcctctaaagcacaagccaaaaactgtgtgaacggtgaactttggagtgaagatcaatcttgcacttggtgaagagtgcacattggacctcaaggcgaaacaggtaggtttgcttggataaaatgttcccgcatgaggccacaggactgaggatgggaatttggcagggcctgagaagatggtctgacttccaggcttcctggtcaaagagagctacgtttgggcagttctgcagagaggatcctggcaactagt

SEQ ID NO: 348 - DNA, 400 bp, Homo sapiens
gccattagggtaaaataccaaaggtaccagaagaagacacagctctgactgcaagtattatcagagcctttcccaccctccccaaggaaccccatcctgttgcagttgctagaatggtgaggccagtgtgtcacccaaggagagatattggggctgcttagtcaagtggatgtcagccagctgtgtcatgtgggacagctctgtactttctgcagacattagggctagtgctcagactgccctctatttatatcccttagtaattctgaggcatgggatacaattgctcctctaagaactcttgagcaaataaagagggtagttaacatcaatggacccaactgggggtaggaccttcaagtgttcaggcaaaactttgtaactggctgctacccatgcc

SEQ ID NO: 349 - DNA, 304 bp, Homo sapiens
ggtgaaatacagctcctgcttctgagaacctataacccgaataaggaaatagtgcatacatttctaaaaaaaaaattaggcaactatgacaggatccataagcaggaattcaaaggaaacaaaggttaagaaaaaatagtcaaaagttgctatgatcggtatggaaattaaagtagtagattttaaggggatgctgggtggaggatatcccagctgcaatggggaatgggcttggcatatttacaggatcatgagtagtcagcctgaaaggtgaggaggtattttgaaaagtcaaaagagactg

SEQ ID NO: 350 - DNA, 374 bp, Homo sapiens
aaagttacaactttggcaccaactcaggcctaagtgtcatcttccctgaattactcctgtgcttctgcatgcatctatctcttctctattatctctttggatgtctatgtccccttccaaactctactgtattaaatgtcctgttatgatggtcactcacaccctctcaggtgtttaggaagcccaataacatcaattgaggacgtaagtaagagatccagtcctcagcctgtaatcacacctttctgccccctgaaaagatttaccaccataatctgaagcatgtcctcctaaatggacccataactaatcatagttcactcattagctttcatatattggatgtctaggggggggggggggggggggaattc

SEQ ID NO: 351 - DNA, 886 bp, Homo sapiens
ttttttttttactttcaatatttaataggaatttgtgttagttgtaacaatgtgtgtattggatccaaaacatgttatattttaagcaatggcttggagagaactaatcaattcatattctgcatttccagccaaagggacataggcacaactgactggtggcaccttcctgtgggaagcctcttccatccatctacagcattgatacttttataaagtatgaatttatcttgcttgaagagttaagtctcattttccatggttaatgcaggattgctcataccagctttgcattttcctgggtttatgctgctctccgtccaagactgagaatcagtaagaaggtggctctgggactctctcaatggctttgcaggaaactgatggttttcgagatttttagctgtggaattcagcccctgccaggagtagatgcttgttccaggatcctggttaacaaggcaagttggaaaggagcagccatcacctagacttgaaaaaatgggtagcaaccagtacttcttctcatcaccaaaaacttgtcgcatgtttttactgaaacccaagctgaatccattcttatctgttccatgtcgaaatactggacttctgaatgcctctaatgtagatttatttttgctgactagccaacaatgatagccaaacagagaagacaagctgacagaaaacatagctgcagcaaagaataaaaacataatatggaacttggcttgagtatcaggtaggccatttgtccaaaatttgataaaatactgtaaatctgttgccgcaataaaaaggcagtagagcagagaataagccaagaaaaggagaaagaacttataatttgaaaatccaacacaattgttcacccatggacaatgat

SEQ ID NO: 352 - DNA, 508 bp, Homo sapiens
cctaccttgctatagaagacctgggacagaggactgctgtctgccctctctggtcaccctgcctagctagaggatctgtgaccccagccatgaggaccctcgccatccttgctgccattctcctggtggccctgcaggcccaggctgagccactccaggcaagagctgatgaggttgctgcagccccggagcagattgcagcggacatcccagaagtggttgtttcccttgcatgggacgaaagcttggctccaaagcatccaggctcaaggaaaaacatggactgctattgcagaataccagcgtgcattgcaggagaacgtcgctatggaacctgcatctaccagggaagactctgggcattctgctgctgagcttgcagaaaaagaaaaatgagctcaaaatttgctttgagagctacagggaattgctattactcctgtaccttctgctcaatttcctttcctcatcccaaataaatgccttgttacaagaaaaaaaaaaaaaa

SEQ ID NO: 353 - DNA, 349 bp, Homo sapiens
  misc_feature (1)...(349): n = a,t,c or g
ccttgagtggaggcagcctgaggctcccaccgaaagcagatgctggtannnnnnnnnnnnnnnnnnnnnnnnnnnnnnnnnnnnnnnnnnnnnnnnnnnnnnnnnnnnnnnnnnnnnnnnnnnnnnnnnnnnnnnnnnacaagtggattaagataaactccaaataaaaactggtgaaaactataaaacgaaaactccaagtatttaaagaccaaatgaagaaactatcctccctacactatgaaattttgatgactatggtttgtgaactgactgctcccttccccaccttcagaactcagtaaggtagaactccacactactgcaaccaagaacagcaggctctctt

SEQ ID NO: 354 - DNA, 705 bp, Homo sapiens
tttttttttaacttggcaaagaggcttttactggaagttcaggaaatacaaatgcaaaggcaaatggccaagccagcagtacgtagttggtgctaatggacgaagccataaggtagccatgatgtggcaggggagggagggaggctgaggctggtgggctggaagctgcctgtgacctcctcccggccccactgtgtccctgtccccccaggtgctgcggctgctcatcacggcctgggagagaagactcatcttcactatcggcacgtccaacaccacgggcgagtcggacaccgtggtgtggaacgagatccaccacaagaccgagtttggatccaacctcacgggccacggctacccggacgctagctacctagacaacgtgctggctgagctcacagcccagggcgtatccgaggctgcagccaaggcttgaggcccaaggctgcccaccttccctcctgctttgcccctggtccggcaaatgcctccttcgccaggtgtgtcctggtagcccaggttcagggctggggaggagcctgcggaaggggccgcagccattcaggggacctgcctggtggcagctgggatgaagagagatggcatgtcaggctggccccgaatcatagctccctgagagggccaagcagagagtactggaaacctccctaccaaaaagacagagacccgcccctcacacacaaa

SEQ ID NO: 355 - DNA, 1053 bp, Homo sapiens
gtccagttactttcaggctcggggagtgaaggcctcgttgagagaaggtctcattcggtgttttgggaagagagtcgtgtgggcccaggtatcgtagcggcgacacgagagagacgggcggtgtgacagccttccactacctgcacgagtgtattggtaacgttggggtctgtctgctatcagctatgccgctgccccgttgcgctgcagacccgcttggccaagagaggcatcctcaaacatctggagcctgaaccagaggaagagatcattgccgaggactatgacgatgatcctgtggactacgaggccaccaggttggaagggcctaccaccaagctggtacaaggtgttcgacccttcctgccggggctcccttactactgggaatgcagacacagaccttgtatcctggctctccccacatgaccccaactccgtggttaccaaatcggccaagaagctcagaagcagtaatgcagatgctgaagaaaagttggaccggagccatgacaagtcggacaggggccatgacaagtcggaccgcagccatgagaaactagacaggggccacgacaagtcagaccggggccacgacaagtctgacagggatcgagagcgtggctatgacaaggtagacagagagagagagcgagacagggaacgggatcgggaccgcgggtatgacaaggcagaccgggaagagggcaaagaacggcgccaccatcgccgggaggagctggctccctatcccaagagcaagaaggcagtaagccgaaaggatgaagagttagaccccatggaccctagctcatactcagacgccccccggggcacgtggtcaacaggactccccaagcggaatgaggccaagactggcgctgacaccacagcagctgggcccctcttccagcagcggccgtatccatccccaggggctgtgctccgggccaatgcagaggcctcccgaaccaagcagcaggattgaagcttcggcctccctggccctgggttaaaataaaagctttctggtgatcctgcccaccaaaaaaa

SEQ ID NO: 356 - DNA, 192 bp, Homo sapiens
gatttcagggaactgcttggctagagtgaagacactggtttaagttcaatggtgaacatgttggtgaggactttctgtctgctgaagaattaaccataagtggtctcaaactaaaacaaagacacagaggtattcaacccaagaagaatggatgatctgtaggatggtagtgtctgccccagctctgtctct

SEQ ID NO: 357 - DNA, 494 bp, Homo sapiens
  misc_feature (1)...(494): n = a,t,c or g
atcgttnaccgtnatgactgattacnantnttnnnnnnnnnnnnnnnnnnnnnnnnnnnnnnnnnnnnnnnnnnnggcacgagaggatagaaaatcatcaaagacatagttcaaagaaattttatattgaaggacagaactttctagattgaaagggcctgttgnnnnnnnnnnnnnnnnnnnnnnnnnnnnnnnnnnnnnnnnnnnnnnnnnnnnnnnnnnnnnnnnnnnnnnnnnnnnnnnnnnnnnnnnnnnnnnnnnnnnnnnnnnnnnnnnnnnnnnnncgaagataaaagaaagggactgccaagtgcctaacgtattgaaggaaggcagaccccataattgtgaaatttcagaatacacaataaaccattaaccctaaacatttccagagaggaaaaactaggtcacacacaaaggatctggaattaaaattgtttgcttctcattagcacaccggatgcaaaagggaccagcaccttcaaggttgg

SEQ ID NO: 358 - DNA, 2142 bp, Homo sapiens
atgtctggggtctctgcccgctggtgctgctgtctcccactcggtcatcctgagaacacagcctgagcgtctctgtcactcggggtagaccacgcggggaggcgagcaagatggcgcagacgcagggcacccggaggaaagtctgttactactacgacggggatgttggaaattactattatggacaaggccacccaatgaagcctcaccgaatccgcatgactcataatttgctgctcaactatggtctctaccgaaaaatggaaatctatcgccctcacaaagccaatgctgaggagatgaccaagtaccacagcgatgactacattaaattcttgcgctccatccgtccagataacatgtcggagtacagcaagcagatgcagagattcaacgttggtgaggactgtccagtattcgatggcctgtttgagttctgtcagttgtctactggtggttctgtggcaagtgcctgtgaaacttaataagcagcagacggacatcgctgtgaattgggctgggggcctgcaccatgcaaagaagtccgaggcatctggcttctgttacgtcaatgatatcgtcttggccatcctggaactgctaaagtatcaccagagggtgctgtacattgacattgatattcaccatggtgacggcgtggaagaggccttctacaccacggaccgggtcatgactgtgtcctttcataagtatggagagtacttcccaggaactggggacctacgggatatcggggctggcaaaggcaagtattatgctgttaactacccgctccgagacgggattgatgacgagtcctatgaggccattttcaagccggtcatgtccaaagtaatggagatgttccagcctagtgcggtggtcttacagtgtggctcagactccctatctggggatcggttaggttgcttcaatctaactatcaaaggacacgccaagtgtgtggaatttgtcaagagctttaacctgcctatgctgatgctgggaggcggtggttacaccattcgtaacgttgcccggtgctggacatatgagacagctgtggccctggatacggagatccctaatgagcttccatacaatgactactttgaatactttggaccagatttcaagctccacatcagtccttccaatatgactaaccagaacacgaatgagtacctggagaagatcaaacagcgactgtttgagaaccttagaatgctgccgcacgcacctggggtccaaatgcaggcgattcctgaggacgccatccctgaggagagtggcgatgaggacgaagacgaccctgacaagcgcatctcgatctgctcctctgacaaacgaattgcctgtgaggaagagttctccgattctgaagaggagggagaggggggccgcaagaactcttccaacttcaaaaaagccaagagagtcaaaacagaggatgaaaaagagaaagacccagaggagaagaaagaagtcaccgaagaggagaaaaccaaggaggagaagccagaagccaaaggggtcaaggaggaggtcaagttggcctgaatggacctctccagctctggcttcctgctgagtccctcacgtttcttccccaacccctcagattttatattttctatttctctgtgtatttatataaaaatttattaaatataaatatccccagggacagaaaccaaggccccgagctcagggcagctgtgctgggtgagctcttccaggagccaccttgccacccattcttcccgttcttaactttgaaccataaagggtgccaggtctgggtgaaagggatacttttatgcaaccataagacaaactcctgaaatgccaagtgcctgcttagtagctttggaaaggtgcccttattgaacattctagaaggggtggctgggtcttcaaggatctcctgtttttttcaggctcctaaagtaacatcagccatttttagattggttctgttttcgtaccttcccactggcctcaagtgagccaagaaacactgcctgccctctgtctgtcttctcctaattctgcaggtggaggttgctagtctagtttcctttttgagatactattttcatttttgtgagcctctttgtaataaaatggtacatttctata

SEQ ID NO: 359 - DNA, 4075 bp, Homo sapiens
cggccacataagatattatctacacaaaagcttatttaggaatgaccaatgagctcaacttaaatttattagaaatctgattagcattataaatcaactgacttttaggagcataggctttggcgctacagggatctggcttgaacctcattgaggccactgattggtgagtgaccttaagcaagtctctttaccttgttagggcacaatttcctctcggaattgtgaaatgggtttaattacaccagcttacatcccaaccatcagcaagtcctcttgtatgtaaccatctccaacacagaaaggggatctgcccatgttctaccatcctcacctttctccaagccactacaacctctcacaacagccttccaattggtctccctaaactcttatcccccctacaccccgttctcagtcctcagtccttgccctaggctggtagcccactccttgcccgccccccgccttcctcccatctccccctcctctccccggcccccagcaccttctgcatcccagcctacctagcctactcctcctcttcctggccctcttccccaggctccaggctggggggtgctcgcgtctcccctgtaggccagagcagccccaagttctgggggcggtggggctgctgctttatccccatggcgctgccatcacttctgctgttggtggcagccctggcaggtggggtgcgtcctcccggggcgcggaacctgacgctggcggtggtgctgccagaacacaacctgagctatgcctgggcctggccacgggtgggacccgctgtggcactagctgtggaggctctgggccgggcactgcccgtggacctgcggtttgtcagctccgaactggaaggcgcctgctctgagtacctggcaccgctgagcgctgtggacctcaagctgtaccatgaccccgacctgctgttaggtcccggttgcgtgtaccctgctgcctctgtggcccgctttgcctcccactggcgccttcccctgctgactgcgggtgctgtggcctctggtttttcggctaagaatgaccattatcgtaccctggttcgcactggcccctctgctcccaagctgggtgagtttgtggtgacactacacgggcacttcaattggactgcccgtgctgccttgctctacctggatgctcgcacagatgaccggcctcactacttcaccatcgagggcgtctttgaggccctgcagggcagcaacctcagtgtgcagcaccaggtgtatgcccgagagccagggggccccgagcaggccacccacttcatccgggccaacgggcgcattgtgtatatctgcggccctctggagatgctgcatgagatcctgcttcaggcccagagggagaatctgaccaatggggattatgtcttcttttacctggatgtctttggggagagtctccgtgcaggccccacaagtgatacaggccggccctggcaggacaatcgcacccgggaacaggcccaggccctcagagaggcctttcagactgtattggtgatcacgtaccgagaacccccaaatcctgagtatcaggaattccagaatcgtctgctgataagagcccgggaagactttggtgtggagctgggcccttccctgatgaacctcatcgctggctgcttctatgatgggatcctgctatatgctgaagtcctgaatgagacaatacaggaaggaggcacccgggaggatggacttcgaattgtggaaaagatgcagggacgaagatatcacggtgtaactgggctggttgtcatggacaagaacaatgaccgagagactgactttgtcctctgggccatgggagacctggattctggggactttcagcctgcagcccactactcgggagctgagaagcagatttggtggacgggacggcctattccctgggtgaagggggctcctccctcggacaatcccccctgtgcctttgacttggacgacccatcctgtgataaaactccactttcaaccctggcaattgtggctctgggcacaggaatcaccttcatcatgtttggtgtttccagcttcctaattttccgaaacctgatgctggagaaggagctggctagcatgttgtggcgtattcgctgggaagaactgcagtttggcaactcagagcgttatcacaaaggtgcaggcagtcgcctcacactgtcgctgcggggatccagttacggctcgctcatgacagcccatgggaaataccagatctttgccaacaccggtcacttcaagggaaatgttgtcgccatcaaacatgtgaataagaagcgcattgagctgacccggcaggttctgtttgaactcaaacatatgagagatgttcagttcaaccatctcactcgcttcattggcgcctgcatagaccctcccaacatttgcattgtcactgaatactgtcctcgtgggagtttacaggatattctagaaaatgacagcatcaacttggactggatgtttcgttattcactcattaatgaccttgttaaggggcatgggcctttctccacaacagcattatttcatcgcatgggagtctcaagtcctccaactgtgtggtggatagtcgttttgtgctcaaaatcacagactatgggcctggccagcttccgatgcaactgctgaacctgatgacagccatgccctctatggccaaggaagctgtgggactgccccaggaactggctcagtggggaaccccttgccaaccacaggcatgcagaaggctgacgtctatagctttgggatcatcctgcaggagatagcacttcgcagtggtcctttctacttggagggcctggacctcagccccaaagagattgtccagaaggtacgaaatggtcagcggccatatttccggccaagcattgaccggacccaactgaatgaagagctagttttgctgatggagcgatgttgggctcaggacccagctgagcggccagactttggacagattaagggcttcattcggcgctttaacaaggagggtggcaccagcatattggacaacctcctgctgcgcatggaacagtatgccaataacttggagaagctggtggaggaacgcacacaggcctatctggaggaaaaacgcaaggctgaagctctgctctaccaaatcctaccccattcagtggcagagcagttaaaacggggagagactgtacaggctgaggcctttgacagtgttaccatctacttcagtgacattgttggcttcacagcattgtcagcagagagcacccccatgcaggtagtgacacttcttaatgacctgtatacctgctttgatgccataattgacaactttgatgtctacaaggtggagacgattggggatgcttacatggtggtatctgggcctcccagggccgaaatggtcaacgccatgcaccagaaattgctcgtatggccctagcattactagatgcagtttcttcctttcgcatccgccaccgaccccatgaccagctgaggctacgcataggggtccatactgggccagtctgtgctggggttgttggcctgaagatgccccgttattgtctttttggagacacagtgaacactgcttctcgaatggagtctaatggtcaagcgctgaagatccatgtctcctctaccaccaaggatgccctagatgagctaggatgcttccagctagagcttcggggggatgtggaaatgaagggaaaaggaaagatgcgaacatactggctcttaggagagcggaaaggacctcctggactcctgtaaacccccattctttccaagtcagatagtcttctgctgctggtacctgggtgggcaatggccaccatgtctgcacacaccagaaatggacattttcatatgcaatggaaaacagccacaaaaaaacctaccttatatggaagttgtagccctctgcagctcagccctgtacatatacctgtccctctctggcttggtccccttcctccctactttctgtaaatatctgtatctaaaccagaatattttggtcaaatataaaacaataataa

SEQ ID NO: 360 - DNA, 621 bp, Homo sapiens
caaaggtggcttctgggcaaccttgccaccaaccaggacagcagcgacagtgacaatgaagcagatgaggccagtgatgatgaagataatgatggcaacgaaggtgacaatgagggcagtgatgatgatggcaatgaaggtgacaatgaaggcagcgatgatgacgacagagacattgagtactatgagaaagttattgaagactttgacaaggatcaggctgactacgaggacgtgatagagatcatctcagacgaatcagtggaagaagagggcattgaggaaggcatccagcaagatgaggacatctatgaggaaggaaactatgaggaggaaggaagtgaagatgtctgggaagaaggggaagattcggacgactctgacctagaggatgtgcttcaggtcccaaacggttgggccaatccggggaagagggggaaaaccggataagggttttccccttttggggatcacctctctgtatcccccacccactatcccatttgccctcctcctcagctagggccacgcggccccacattgcacttctggggggtgaccgacttcgtacacgggtttaaagtttatttttatggtttagtcattgcagagttcttattt

SEQ ID NO: 361 - DNA, 321 bp, Homo sapiens
  misc_feature (1)...(321): n = a,t,c or g
agatttgtatttttnnnnnnnnnnnnnnnnnnnnnnnnnnnnnnnnnnnnnnnnnnnnnnnnnnnnnnnnnnnnnnnnnnnnnnnnnnnnnnnnnnnnnnnnnnnnnnntagacatgggtcactgtgattggcccaatctgagcgaaattctttttctgtgagatagccatcatcgtctggtattaattgatcacctaccaggatgaaggaaggtgtgctttatgcaaattggtattttaccataaaatcttttatacaacctaatacaacctatttatgagggaataggtttcacaattaatggataaaaaatgatgatg

SEQ ID NO: 362 - DNA, 350 bp, Homo sapiens
  misc_feature (1)...(350): n = a,t,c or g
gtggngnnncttnggctantttatagcccttacnattnaacgtacggccagggaatttggcnancgaggccaagaattcngcacnaggatggaaatgttcaattgtggttcttatatgagtgtatacatttgtcaaaatgaatanacacatacccttacaatagactaaccttattgtatgtaaattatataacaatttagttaatttttaaaatcagcaattctaataggtctcatgtgaatcttgattcaaattgtgaaggaaaaggtagaattttttacaactgagaatataagggaaattgaatgctatttccgtacaagaaattactcttggggagaccgaggca

SEQ ID NO: 363 - DNA, 88 bp, Homo sapiens
ggttcacggccgacatcatgtccataggggtgaattgtacacagatcacagcaggtctcatgggggtgacaagctttttttttttttt

SEQ ID NO: 364 - DNA, 469 bp, Homo sapiens
ggaatgagagaagagaagaatggacttcacttctcgtaaccattaaaaaactcttcatccagtatccagtgttggtgcgactggaacaggcagagggctttcctcagggagataattctacctcagcacaaggaaactacctggaggccatcaatctgtcattcaatgtgtttgataagcactacatcaaccgcaactttgaccgaactgggcagatgtcagtggtgatcacgcccggggtgggtgtctttgaagtggaccgcctactcatgatcctgaccaagcagcggatgatagataatggaattggtgtggatttggtgtgcatgggagagcaaccgttacatgctgtcccattgttcaagctccataatcggagtgctccccgtgattctcgtctgggcgatgactataatatccctcactggataaaccacagtttctacacatccaaaagccagctcttttg

SEQ ID NO: 365 - DNA, 890 bp, Homo sapiens
tttttttttttttttttttcactagacaaaaatctatttttaattgtataaaattatacatataaaatacatagaatgtactaagaagatgagtaaaatctttgacaccagaagtggacagatcaggaaacaatttttctcaagttatttgggatcttactggttggtatttgagaaaaataataaatccaggaggtacgagggcaattcttcccacaactcacaccccttaatccacacgtcccagagaaaggagaaacaggagtgttgatgagtgccagcttataaatgtcaaacagacacacctggtgtgtctagctgtttttgcctttactccaacccgacgtgtttcatggaatacaaacatggggcttctaccccagctctcttctgattagtaagaaaaaaaaaatgatagggcctggagaattcaaggaagcccgtttcaagcactaataaaattgtagctggattccttacctcttacccaacatgatttcaaaagccaagaaagttgcctttcatcttgcccctatcaaatccaaaagagccaattatagcctgtttcataatctatttttattgttgttggttacacttgaactttctgtttggaacctaatctatttctaaaagcaaagtctgtataattgttaagtgggaagtccaattgcaggaatactaaatgttcccaagctcagtttagaaagtacatgggacaataatatagtataaataagagatcacagagacaagggggaaatatatattagagacctccaaaaaaattctctgaaaggagaatactttagctgctgtactacaggttatttctctcttatgtcacccaggagagaagtgggggagaatggtgttaaaaacacaaatag

SEQ ID NO: 366 - DNA, 362 bp, Homo sapiens
ttttttttttttttaattgcagtcacgtttatttgcagtttctatacacactttctaggtaatcaaacttttctgatacattttttttgagaggggttcacaatgaaactgtcaccatttttactaaaaataaatacaagacttaaagtgttgcacagctctaaaatatacaaaggcttggattgaatgtaaacgttgaaaacatcttacaaaagaaaccatctttgcagcaatttaaaaagttcatatttacaaatattacaaaaatacaaaatggatgcaagtccataaaccattgtcgtttcggccagcatgaactggttctagtaccaaaatagttacactgtaaccttcttcatagt

SEQ ID NO: 367 - DNA, 594 bp, Homo sapiens
  misc_feature (1)...(594): n = a,t,c or g
tggggaaaagctacaaaatgtatttttggtattccagatattctacaccaaaaagtgtattaatttcagaaaaatatagatggcctattttgtacgtttgaaatgaatccctttttcgtttattattcaaaatacttcattttaaaaaggatacctttaggcccggtgtggtggcttacacctgtaannnnnnnnnnnnnnnnnnnnnnnnnnnnnnnnnnnnnnnnnnnngaggttagaccttattaaagaaaatgacatttgagcgaagatttgaaggaggtggaggaaatagccatatggacatctaaatgaaagttttccattccactcttgtgaattagaaggtaaatggcaaaaatacacagtgaaattctgaacagagggggataatatccaataatttgttaacagctgcattgcttgtcttgtgtttagtctggttaatattaagattctctagagaacacacactacacagtcaaagaaggtggcttggaattntccacnacaangggtttaggaaatntaanccnactgtaaaacagagtccagntacattcncaaangatattaaatacattgtacatgaaa

SEQ ID NO: 368 - DNA, 346 bp, Homo sapiens
ttttttttgcaacagcataatacatctgtttatttagttaatattacaatggtaacaagttaagagcactaaatttgtatcctcttagaaggataatgattaagattttgatttgtaaatttcacagttcttaaccattaaaaatctattttccaaaggagtagtaatatatatttttattaagggacagatctaaactttctgatttatgacccaaagcatatttgttcattagtttaagcaaaacattagggatatcttaactcttgggttactgctttcaggaaagcacaaagttgttgaagcaaatatacacaaaacgtatttttcaatagtgattttaacc

SEQ ID NO: 369 - DNA, 517 bp, Homo sapiens
gaaactacattttgcaaagtcattgaactctgagctcagttgcagtactcgggaagccatgcaggatgaagatggatacatcaccttaaatattaaaactcggaaaccagctctcgtctccgttggccctgcatcctcctcctggtggcgtgtgatggctttgattctgctgatcctgtgcgtggggatggttgtcgggctggtggctctggggatttggtctgtcatgcagcgcaattacctacaagatgagaatgaaaatcgcacaggaactctgcaacaattagcaaagcgcttctgtcaatatgtggtaaaacaatcagaactaaagggcactttcaaaggtcataaatgcagcccctgtgacacaaactggagatattatggagatagctgctatgggttcttcaggcacaacttaacatgggaagagagtaagcagtactgcactgacatgaatgctactctcctgaagattgacaaccggaacattgtggagtacatcaaagccaggacc

SEQ ID NO: 370 - DNA, 396 bp, Homo sapiens
gcgtttcatccgtacataaaagggagagtattggaagttttcatggagtgtttgtggtaaaatctagatttcaaggaattgagtgaaggagtgaagattacagagtgggtgaacgtggcttttgagaagtatggtgtccatgaaagaagaggtgattctgggatgttagtggagttaaagaataaattctttttaggtagcagaatctggagcagataatagtctcagaaaaggaatatcttagaaggggagaaactgaaaaccagtacatagcatatttttagatggtatgagggcactgaattaatatagaaagtggataacactttctactccaaacacagggaaaagaggagaggtaaggttgaaatataaacattatgcaatggagaagaa

SEQ ID NO: 371 - DNA, 1513 bp, Homo sapiens
gccgcgctgcgccggagtcccgagctagccccggcggccgccgccgcccagaccggacgacaggccacctcgtcggcgtccgcccgagtccccgcctcgccgccaacgccacaaccaccgcgcacggccccctgactccgtccagtattgatcgggagagccggagcgagctcttcggggagcagcgatgcgaccctccgggacggccggggcagcgctcctggcgctgctggctgcgcttctgcccggcgagtcgggctctggaggaaaagaaagtttgccaaggcacgagtaacaagctcacgccagttgggcacttttgaagatcatttttctcagcctccagaggatgttcaataactgtgaggtggtccttgggaatttggaaattacctatgtgcagaggaattatgatctttccttcttaaagaccatccaggaggtggctggttatgtcctcattgccctcaacacagtggagcgaattcctttggaaaacctgcagatcatcagaggaaatatgtactacgaaaattcctatgccttagcagtcttatctaactatgatgcaaataaaaccggactgaaggagctgcccatgagaaatttacaggaaatcctgcatggcgccgtgcggttcagcaacaaccctgccctgtgcaacgtggagagcatccagtggcgggacatagtcagcagtgactttctcagcaacatgtcgatggacttccagaaccacctgggcagctgccaaaagtgtgatccaagctgtcccaatgggagctgctggggtgcaggagaggagaactgccagaaactgaccaaaatcatctgtgcccagcagtgctccgggcgctgccgtggcaagtcccccagtgactgctgccacaaccagtgtgctgcaggctgcacaggcccccgggagagcgactgcctggtctgccgcaaattccgagacgaagccacgtgcaaggacacctgccccccactcatgctctacaaccccaccacgtaccagatggatgtgaaccccgagggcaaatacagctttggtgccacctgcgtgaagaagtgtccccgtaattatgtggtgacagatcacgggctcgtgcgtccgagcctgtggggccgacagctatgagatggaggaagacggcgtccgcaagtgtaagaagtgcgaagggccttgccgcaaagtgtgtaacggaataggtattggtgaatttaaagactcactctccataaatgctacgaatattaaacacttcaaaaactgcacctccatcagtggcgatctccacatcctgccggtggcatttaggggtgactccttcacacatactccccctctggatccacaggaactggatattctgaaaaccgtaaaggaaatcacaggtttgagctgaattatcacatgaatataaatgggaaatcagtgttttagagagagaacttttcgacatatttcctgttcccttggaataaaaacatttcttctgaaattttaccg

SEQ ID NO: 372 - DNA, 534 bp, Homo sapiens
tttttttttaaattaaggttattacatccatgtatctttctgtatctactcctaaagtacttgtgacattaagttacagggttttgactcctgggtctaacaaggacaccaaggtctgctaaatcttaagcactgacagcaattaaaacctcatcttcaggcctggtagaagatgccaatcaaaataaactgcattcctgagacacagggccagaagtaaaagctattcaactcctcaaggctcaggaactaccacagaagaggtaggcatgtgagattgtaagggctgattttgagagacaaaataagttcagtttctctgcaagttaataattgatgtcaaaggcacactgatgcaataccagcatacgggcccctgcatcagattaacaaggttttcttgaagtgttaaccgaccccttaataaaggttataaaggttaaaaaaggcttatggaagctgtatcttatggtcaagattaaaattttaaagattgataataaaatttcaaaaaacaaaaaaaaaaaaaaaaaa

SEQ ID NO: 373 - DNA, 378 bp, Homo sapiens
gcatgaagacaagtgaagaagattccagagctcgagcttgtgccgtggagaggaaattcatcgtccgaaccaagaaacagggctcttccagggctggaaatctggaggaaccatcggaccaagaaccaaggttgctgcttgctgttagatcaccaacaggccaaaggtttgtacgccatttccggccaacagatgatttgcaaaccattgttgctgtggccgaacagaaaaacaaaacctcctaccgacactgcagcattgaaacaatggaggtgcccaggaggcgattttctgacctcaccaaatctctgcaagagtgcagaatcccccacaagtctgtgctgggcatctcactggaagatggggaagggtggccct

SEQ ID NO: 374 - DNA, 1224 bp, Homo sapiens
  misc_feature (1)...(1224): n = a,t,c or g
gcggccgccctggtccaccgtgtacacgtacaccaagttgtcgtgggagcccacggccagggtacgccccgtctggggagaagctgaccactgagatctgttcattgccgtctgtgtggatagccaccaggtcatgggtctccgtgtccagcagcagccatctgccagtcactgtacccacagccaggacagagccactggggtggaagccggctgagcgggcagggtcctcgatgatcctgctccacaggggctggtgggaatctgagctccatagatgcaccagcttatcctgcccgcaggtcacaaactgggcccgactggggtgtgtggccaggccccacagctcttccacatggccctggaccagcagtgagaagcctgtgtgcacggagccctgcaggatggaattgcgggtggtcccacgtacagtgtctccgtggccctctgccacgggtgggncaagggccaaagtcctcagggacctccacttcctgcagcttgctgtagtcagaaccccagaggaccaccgccgatcacggccccctccagacaccagcgtcccgtcccgcagggcgcagagcccaaacacgccgccgtcgtgggcgcccagcaccgcctgtgtgatacggttcccacctttgccccaaacatagaggttccccccagagtcccccgtgaccacgtcgccaccttccaaaaaggtcacacacagcacatacttcggtttctcatgtttctcaaagaggccttgccgcttgctcaagctgcccccctccaaggtccagaagtagatgtgagatttcccgcaggtgataagcacagtggggtccgtggggtggaaggtggccaccaatacagcctcattggagcacttgacatccaccaccttggtctccttggcccagtcccacaccgagagcatgtgatcattggattcatccactgcacacagcaggttgcctccattagatttggagaagcccacacagcacacggctctgtcaaacacccccaagcccagcacgtgtaaggtggagagggaaactgagtcccagatgcgcacgtggggcggcagcggcttcccttccttagtggttcccgccacctgtcccgtggcgatggtgaccatatctgggtggatggccaagcatttgatgtcatcgttgtgtcccaggtagtgtcgcatacctctgctcctccacgctgtatagcacgtcgacc

SEQ ID NO: 375 - DNA, 605 bp, Homo sapiens
ccgccacacgcacgccgggccgtgccagtttataaagggagagagcaagcagcgagtcttgaagctctgtttggtgctttggatccatttccatcggtccttacagccgctcgtcagactccagcagccaagatggtgaagcagatcgagagcaagactgcttttcaggaagccttggacgctgcaggtgataaacttgtagtagttgacttctcagccacgtggtgtgggccttgcaaaatgatcaagcctttctttcattccctctctgaaaagtattccaacgtgatattccttgaagtagatgtggatgactgtcaggatgttgcttcagagtgtgaagtcaaatgcatgccaacattccagttttttaagaagggacaaaaggtgggtgaattttctggagccaataaggaaaagcttgaagccaccattaatgaattagtctaatcatgttttctgaaaatataaccagccattggctatttaaaacttgtaatttttttaatttacaaaaatataaaatatgaagacataaacccagttgccatctgcgtgacaataaaacattaatgctaacactttttaaaaaaaaaaaaaaaaaa

SEQ ID NO: 376 - DNA, 1531 bp, Homo sapiens
  misc_feature (1)...(1531): n = a,t,c or g
tttttttttttttttttaacataaaaaaataaatttattttgagtctgaaatactgaagaacaagcatacagataaatagtacaaagaacaaaaattagaacatgagtaatgacttaagacacaggcatttttctagctattgcatacagacacatttttacacacaaacatattttttaaagacatctctccaacattctcaaaagggcaagagctgtatttgtgacatttgtaataaatgcaacagcttttggaaacatccagtttctttcctaaggtcatttgattaaaattcacacaagtgatgattacctattccattttctgaaaatacgacatacagtcatgtttcgatcaacaattgaccacatatgacagagatcctataagattataatggaactggaaaaattcctattcacctagtgatggccacagccattgttacattgtagcacaatgtattatctgttctatgtttagattacacagataccattgtggttacagttggcctacagtattcnatacngtaccatggcggtacaggtctgtagcccagaagcggacagactttgccatctagcccaggtgtgcaggtagggctctaccacctagggtttgtgtaagtacacttcatgatgttcacacaatgatgaaatcacctaatgacaaatttctcagaatgtagctctgtcatgaagtcacacattactgtagaattataacattcttgcttgacatattacagacaactttcactcaaaatacagaaaaattatcaattcattttgcattgtcacatattccatcacctttcttatcaacaaggaaaaataaacataacatatatgtatatgcttttcagaaataaagtattctaaattttatgtgtaatttgttccaaacctcaggaactcaacaagtacatgattattttaaaacaacattgatagtttaaaaataaaaacaattatttgggggaagagacccttaaaataatatttttgggcccgtttttaccctgtaatgtaaatatcaaaggaagctaatgattggacatactctgcttgagttaccctcaactgactaaaaaggctaaaaagaaatgtaaaagtccgttgtatcccataaggtagcaatcacatttgtttatccaattgtcccagggaatttttctctggctggattcaagttcctgtgatataataatttggtctattccatgattaatggcatttaatattttggaaagatctttgagatcaaattgaacacattcatttcatggatgaggaaaatgctgcccagagaggtttaatgatttgtccagagttataggaacatacagaaatacatccaggacatggacacagaattcctgattcttagtcaaattctttagataacacattccccagggtcagattcgacataatttacagtcacctgaattatagagaatgttataatttcaatatatatcaatgcatatattctgcctgatatagttgggatacttgtccctcc

SEQ ID NO: 377 - DNA, 488 bp, Homo sapiens
  misc_feature (1)...(488): n = a,t,c or g
gtaggttgtttatatcaagtccttttattctgataccacagaattaccttgtcacaatacagggggagggacactgaagtaccacgagttctcacagagcacagaaggacagcacacaattcacaaggtcatgtggaggactcgggtcattgcacttacaactgtaaacttgtttgtttgactttgtacagcactcttcccccctcaaataaagaaggagagaaggaaagaaagggagagagggaggaggaaggggaaagcaaaaacaagacatgaaagctagaggaaaaggtattgagtggccaccactctccagggtagtgcacttggagagaaggagctgatttgaccccagaaactgaatgaggcagnnnnnnnnnnnnnnnnnnnnnnnnnnnnnnnnnnnnnnnnnnnnnngatcatgtgcatacacatacaatatctcacgactgccatggctctccagtgccaccccagtgcacatggca

SEQ ID NO: 378 - DNA, 130 bp, Homo sapiens
  misc_feature (1)...(130): n = a,t,c or g
ccatagacatactgccaatgtggtatgtctgtaccacattttacttaactgttaattatgttttattnnnnnnnnnnnnnnnnnnnnnnnnnnnnnnnnnnnnnnnnnnnctttggagactctgcttctg

SEQ ID NO: 379 - DNA, 1732 bp, Homo sapiens
tttttttttttgtaatgaagaaaataaatctgtatcattttatttaacattcattctttaagttacagttaacacaatctgcttctaatccaagaaatcctagtataatctgaaatacatgcatatacatttagtaagacctacatttctaaataaattacatgcatgatatacaataaagaatactaatatgagaattcaggacatttatttttctgcatggaaatttaactactgtataacacacgcacatacaaaacaaacccacaaagcaacagtgtgtaataggtagtgagagacacacaaaataagcatatttaaaacgcctacaaacagccttttttttttaggcaacaaaatacgtccagtccttgacatcttctcatactcacctagcaccacagatgcaaggacctaacagtaaacatgtacaatctcatgcttaacacctaaagcatgcactgaattgaatttgtatgttgtgatctattctactaagtatgcaatacatactttttcttactaatattttatacattaaattaccctgcagcattttgaaattttaacattgatgtaaaacaacttttgaaagatttatgaaacaagtttcgaggttcaccttcaggctggtttggttaagtggaaaaatggcagcagcctcaaggttcatactgaatgaaaatggtgttgtgtgcatgtcaacccatgtaaaaaatacctatatacaagatggcacaaagatttgtgcagttggaatcaccagtgcaaatgcatgcatttgaggtacttatttttttcatggtcaggtataattatgcatagtcattttccttaagtgctaaagatttcagacctgatcaaatgaaaagctgtaagtgtaaatatgagctatttatatagttaatttcaaagtgctatgcttttaatgaacatatgtttaacattatagatttatatatttagtttaaaatatttatattactaaccaataaattttctcactataaagagactgactggcaattatacctggccaagtaatttaaatagcatacttgcaagaactgtagtgaaagagttaaatacttcattattgcttcattgaactgagaagcccaaaaggcatagatcaacaatgctcagtgatgaaaaatgaatacccagaacagcggtgcacgcccccaaaatgacctctgtgcaataaaaactaagcattctccacgttatcaatgccgttggcatccacatggatatcagactccccacacaaagatgagggaacaaagcggctaacagtgggacacaaacagctcttaagctctggcaattcctgcttcaggcgttccaattgctccacttggaatatatttggttgttcaggcatccaatcatatatcctatcataaattagaccattaactccaagttccttcaatttccttctgttttcaggatcattggtatcatcaccccagcagaatatgactagtcccttagcttttgcctcttgaatataggatgggtttctgagcaagtcttcagtatgtacatttatccccagtagattttcaaactgtgcaaagctcattgcaatgggggttgtccgagatctgaggtccatgagttcaggataaatctcagattttccttgagttaaaaatagtatcggatatttgttctgcttttgccgaaccattgtgcaaatatctgcatcaaatgaagaaaacac

SEQ ID NO: 380 - DNA, 564 bp, Homo sapiens
  misc_feature (1)...(564): n = a,t,c or g
tgaaggcagtatcacccaaataaaaataactttatatttttttccagatataactaataaatgttcatgttacaaggttcagggctcatcctaacactttagaaggcctaggtggtaggatgacctgagtccagggagcttgagaccagcctggggcaacgtgggtgagaccccatctctaaaattagaaaaattggnnnnnnnnnnnnnnnnnnnnnnnnnnnnnnnnncttcgagtgtagactcaggaaatctgtgtttctaacccctgctccagggggcattctgatgccgtagctctgctccagtgagtagggaaggccagccagtgaaggctcacattgctgtgggtgggcagaagaggacagcaggagattctgaccaggtagatctttgaagacagcagcagcttgacaaatggaggtttccaggtagagggagcagcttgcacaaaggcacagaggtgagaaagttaggggtatgttctggagatggcaaatagagtgggtgaaggtctggggtatggaaggggctgtgcaagatgaagcctggnaaagattccaa

SEQ ID NO: 381 - DNA, 402 bp, Homo sapiens
ggtcgacccgccatcgtggtgtgttcttgactccgctgctcgccatgtcttctcacaagactttcaggattaagcgattcctggccaagaaacaaaagcaaaatcgtcccattccccagtggattcggatgaaaactggaaataaaatcaggtacaactccaaaaggagacattggagaagaaccaagctgggtctataaggaattgcacatgagatggcacacatatttatgctgtctgaaggtcacgatcatgttaccatatcaagctgaaaatgtcaccactatctggagatttcgacgtgttttcctctctgaatctgttatgaacacgttggttggctggattcagtaataaatatgtaaggcctttctttttaaaaaaaaaaaaaaaaagtcgacc

SEQ ID NO: 382 - DNA, 519 bp, Homo sapiens
  misc_feature (1)...(519): n = a,t,c or g
gcgtgaattgcttgctgaaacataaatgatcatcacctccagcctgggatatagaatgagactcctcaaaaataaaaataaaaaattggggacaatatcgggtagacaaattttagtttctaaagtagctgaagggtctttattcaggtggtttctgcctttcagctttgacctttatcttgttgcanccttgttgcagcccatgcatactcttcctcttccaatattcatacatccacaaatgtccctctcccttcaacacatacacccttcttcaccaacacacacacacacacacacacccttcctcttaaagcttattctcaagaaaggtttaagtttgtcctttcagttcaatagccatctttcctcatggagtttgtcaggtcccttcttttgtaattctcctacttgtactctccatccactttatttccctttttttttgnaacggngtccactctggtctcccatgctggantanngtggngnganctggnncaanggaaccccggcccg

SEQ ID NO: 383 - DNA, 531 bp, Homo sapiens
gagcgtctccacccagtaagtgggcaagaggcggcaggaagtgggtacgcaggggcgcaaggcgcacagcctctagacgactcgctttccctccggccaacctctgaagccgcgtcctactttgacagctgcagggccgcggcctggtcttctgtgcttcaccatctacataatgaatcccagtatgaagcagaaacaagaagaaatcaaagagaatataaagaatagttctgtcccaagaagaactctgaagatgattcagccttctgcatctggatctcttgttggaagagaaaatgagctgtccgcaggcttgtccaaaaggaaacatcggaatgaccacttaacatctacaacttccagccctggggttattgtcccagaatctagtgaaaataaaaatcttggaggagtcacccaggagtcatttgatcttatgattaaagaaaatccatcctctcagtattggaaggaagtggcagaaaaacggagaaaggcgctgtatgaagcacttaaggaaaatgagaaact

SEQ ID NO: 384 - DNA, 610 bp, Homo sapiens
attttacaaatccaatatttattttatcttgtatgtacaaaaagtaaactccaagtgaacatccaatcaaatctaatccttttggccacatgactggttgttctttatctcatagttacaatgaatcatataaactgtagactgccactaccacgatacttctgtgacacagaaggaatgtcctatttgcctatctatctgaggaatgttaaatagagaaaaatagattataaaacaacctggaggtcacaggattctgagataatccctctgttaaaaaacatctgaacagcaaatgtccaatctgtaataaaatagttaaaggtccaagtcaagtccacttctacttggctggcccagcacaagaaatctaacagcactttgtaatcattttgcttttctaattttcccggaggacatgggccattgacatataaggaaaaaaaacaaaaacaaaaaacgattaagtaagttgtgtgatccctaacctgtgagttccagagggaagattttgcagggcaccattatttccatagaagattcttttaacagagatgtcatttcaaatctaacatagcaatggtggtgtcaggatccccaggatggaatg

SEQ ID NO: 385 - DNA, 426 bp, Homo sapiens
ggtgagatgataacagtgttataatgcagcttccttgagccatcagagagagtgtatgttcaccctatctggctgtatcccattggcagtggacagattgaggaaattcctagatcactgagagctaagcaccatgcatagacaacagtttgttcttgcctgtgttgcttttagggactttgactaccacatgttcttttcttggggtgatttaatcacctgggagcatctgagtctgctcctaagtggctttgcaactgggcctaagttctgtttcctttatggatctcaaattttcatctgcacaatgaggctgttgaaaggaaaaaagtgagcctctaggaattattcaaaaaaagtctgtgatacattccttttcctgccaaagttctgtctctgctttggcttctgccaggcaaagctaaa

SEQ ID NO: 386 - DNA, 1126 bp, Homo sapiens
aggaggacataaggtatagccataaatcataacccagggaccacactcaaccctagggaaattgtcttcctgatcagttgattaccatctgaggtcaagaaatgagatagtgggagcaaatgggtcacaaatagctcagctgtgggctcacgaaactgctaggtaaaagaattccagaaggaggccagggcataagttggatgacctatgaactttagtctaaagaattgagactaccgtaattgagactactgtagtgacatctgagaaatgggatggaagagtgaccatgttttattttcttgttcttgtcactattgtattttattttgcataatcatgcccttcactgacagtctccttaacatcatctgtttactctgctcagtgtaaactacaatgctctgtcatctccctactgggtctcctgggaggaggggagccatccagggtgcaaactcaaaggcagagggcacagcgtgcttaggcccaagcttagaattcaattgagaagttctgttgttcatccttacctcagcaggtagaaaagaggtggagatcagaagccagggattagagattgaattgctttccctgggagtgtgcagtatctcattaaaatgttgtatattcaaaaaaatacagacacacacaagtgcctatataatgataaaacatatccaaagcacccaaacctgtgattccagaaaagtagatcctatttttgtttatttttattggctttagctgtgtcttttgaaaggactattatcctctaaaatgtatgtgtatgaagatcctggcttgcagctcgggagctttacacaccttgtgtcactttatcttggtaacgagccaagatcatgcaaccagttcatccatgtctgacccaagagctcttaactgctatgctgcactgcctcattcagagatagatgcctgcatgggtcctggcgattattttaatgctggctacacccccacaggtgacttggattcagaaatacaatttatatttcttctttttaaattgttttattttatttttcttttaatagttatatgtcagtgagaacaatttatatgtcttacactgagaaataaaactgctcataagtgaaaataa

SEQ ID NO: 387 - DNA, 227 bp, Homo sapiens
aggggaacacagttctgaccataacactctgccctctgcacccccaaaattcatgtcctcctcacagcaaaatacattcacctgcattcaacaacctaagccttaacccattctagcatcaattctaagtcccaaatctcatctaaatatcatctacatcaaagtgagagagactcaagtatatgattcatcttgaggcaaaaattcttctccagctgtgaacccgg

SEQ ID NO: 388 - DNA, 1227 bp, Homo sapiens
  misc_feature (1)...(1227): n = a,t,c or g
cccccacatgttacattcctttacagtgttaacaggcatggctcactctttgcaatggtaagaaaaattttgttttattgtttttggtggccatgggcaataattggaagaaaacccattggggtaattccactaagtaaacctaacattgttagtttccttggttccagcaggtaatacactgggttccgtcaccctggagatggctacggggaggctgagtgacttcccaaagtaataaagagtttggaatcagaattccaggtctgactcccagcagactgttctatttccttacacacctgcactttcatcaatcttctccagctccaatttcttgtgccccttcaacagcatctgcagggcagggatgatctttccgataaaaaccagttgcagaagttcctgttgcttccctttggtttttcctcagggtagggagaacagagcagctgcattcacatggccccatttccctctgcttccccttcccacttgattattcaggcaagtgggattgtaacatcatggccatcgccatagtaacggagcttganngatgctacactgccctggaacagacgtcttgcctggcnaccaggagagagccagtgatgccaagccaaggggaaagtcctggtttggtggcaacacaggggcgaatgtcctgaatctacggcggggccagggggaaggggacatgttaatactggctgacagggaggtggctacaaagctcctccatttctcctggggcttgcatggtaatctgcccactagccacacagattgctttctctgtaatgccattggcgccagcctgttgtgctgaggttgacaataagagaacagacttgggaggaggaatagggcaggcaagattctggtggcttctgcgtggtcacctgtgccatctcatgccagatttcagagcagggaacatttcagaggtggagaagtggctctgtcatagagatcacagaagcacagatggttacggtgctccatgccactaccctggttggtggaaacatccataacataggttgtccctgtttgctctgaaggctacccagaggggatggcaatgtccacaggagcttctgacaggcctgagacttaagtgagggagatgacagaataggaagaggagaaagacataaagacaggagaccaaggggtaaccacatctgggccaaagctgacctttcnttctttccttccagt

SEQ ID NO: 389 - DNA, 1487 bp, Homo sapiens
ctggtctaacagacccgcgagaacgaaggacgcttgcctttttccggtcggggaagggggaagaaggtaacttccggtgacggggttgcatcacttcctctcaagcttggcgtttgtttggtggggttacacgcgggttcaacatgcgtatcgaaaagtgttatttctgttcggggcccatctatcctggacacggcatgatgttcgtccgcaacgattgcaaggtgttcagattttgcaaatctaaatgtcataaaaactttaaaaagaagcgcaatcctcgcaaagttaggtggaccaaagcattccggaaagcagctggtaagagcttacagtggataattcatttgaatttgaaaaacgtaggaaatgaacctatcaaataccagcgagagctatggaataaaactattgatgcgatgaagagagttgaagaaatcaaacagaagcgccaagctaaatttataatgaacagattgaagaaaaataaagagctacagaaagttcaggatatcaaagaagtcaagcaaaacatccatcttatccgagcccctcttgcaggcaaagggaaacagttggaagagaaaatggtacagcagttacaagaggatgtggacatggaagatgctccttaaaaatctctgtaaccatttcttttatgtacatttgaaaatgccctttggatacttggaactgctaaattattttattttttacataaggtcacttaaatgaaaagcgattaaaagacatctttcctgcattgccatctacataatatcagatattacggatgttagattgcatctcagtgttaaatctttactgatagatgtacttaagtaaatcatgaaaattctacttgtaactatagaagtgaattgtggacgtaaaatggttgtgctatttggataatggcactaggcagcatttgtatagtaactaatggcaaaaattcatggctagtgatgtataaaataaaatattctttgcagtaaaatattccctttgttaatgttatagaaggggggatacaaaaaggaactaacaatttgtatggcagtgtcagatatttttattttagtatttcctgttttggtttatttgcatcttagaagagcataatggacattgtttggatgaagcctaattatgctggactgttttgacctggtttaacccttctgataggtagttgtggatgctggggatgagaactgaataatctttgcctggagtgacactacactctagaatttccactttggagaatactcagttccaacttgtgattcctgatagaacagactttacttttctagcccagcattgatctagaagcagaggaatcccagcgccttttaaaagttgttatgtggttttcttttaaaaagctcctgtttttggaaagtagaatttatgggtacaacgtatgttcattatttgtacataaaataaaaccatttaaaaagtaaaaaaaaaaaaaa

SEQ ID NO: 390 - DNA, 552 bp, Homo sapiens
ggataaacacagatcatggaggactgttttatctgtttgtgatctgccgtcctctgtgagcctcaggatggatgtttgccagccgattccatggttacaagctctatagctgcatctatgtgttaggagcatgaagaccaatgtgggtaatcgttaatgctccttcttgttttgaccattttaaaatgttatttgctatattattaaaaagtattaaacacaataaaagaaggggaaatatgcaatatttaaaatctggattaaaaactttaggttaattaatgcatatgtgaaacattgagctcagttaatgaaagaaatatggtcttcgtggaaatgattatatggatgaatgttagggatattcaagaatcatattctttttttgaagacttaggtgtatttccttgttagtgaattagtcaacaaacaaatttagatggtaatagagaaagagggctgatcctggaccagtgatggtgactggtggtgtgtgagtcatgcacagtgaatatcatgtgtctggaactctgaggtccaaaaaaaaaaaaa

SEQ ID NO: 391 - DNA, 12604 bp, Homo sapiens
tttttttttttttttttttatacacatccaattttattaacattcacttataaattatctgcccttgtcatatattggaatcgtgttttttaggcaaatataacaatcctctactgcaggagagaaagtcttcttggtgatatgagaaatactggtgtgataatttcataaattattcaagtctgtggaaacactccagttcagagaagggtacctggggatttgttttcagctttctcgattttcacatgcacgttagggctatctgggttttgatagtgcgtgttttcttctattaagtgagatagctttctcaataattatatcagaaacagcagcagtgagtgactagagggcctctactggcctcaggcattttctaaaaaccggaattagctgtcaaattttgagaatacagagcttcccacggcctcccccatccctgcatttggtgtgcacctcacaatttcatgcaatttagtgacttgcccaagctcctgcaggcatctgtgtttgtgctgaagatgtctgtctcctctgcggtgcaccgtgtcgtgtatcacagcatattggaatgggtctgtaggtaggaatagctgatttgttattcaggatggctttaacagccgctggaaggaacacaccatcttatggtagttgctcttccacacagctttgttctctgcatgggtgaggggtatctctggggtccatcaactattacatcatgatgcctgtgcaatatttacttgcttacgtccaatctactgggtccctgaagaataagcttttttcttcttcttagctaatatttacccctccttttctctaatgatagagtactgggaagcagaaatccctatctccaccttctctcaccaactccccagcctccccactcattctcagtcctggggactgggggctagtggctgagtgtgggctatactgccttgctgtttgcaatgaaacaattgtaaaataaagagagcagcccaaaacagggagttatgagctgagaatatgggaataagcacacaattagttctgacgaaagaaatatcttcctgatgttattaacaatctactagaaattgtgtcctctttaccaacagaaaaatattgatgtgcaagaaaataagcttatttctaacttaattttttaaggggtagaaaatatgataaattttgcatacatacaatttatttatttatattatagccctgtatgatacaagcattttctcatctaaaagtgttattttaactcagaaaacatacttgcattaagctcttgagcctcagaatggagcacagagggaacaaaacccttttgaaattaaaaatattattcagcagaaactgatacttttgaaccaatatgaatttgaaataactaaatattttttcaaaatctcccttaacatcaaagttcaagatgattgcatttattttgatgtcactatataaatacaaggatgttaactgatactcacctaagtcaaatattccagttgcattaacaaacatacacataacaaatataaatttatatcaaatgtcaaatttccccattatcttctcctcttcttcattaggaatttgatgttctgaaaagtgccttttttgtctgcttcgattttttgttgctgtttttttttttttttttgctttataatttctaagcatttaggcagaaaagaaagaggcattaaaaatacaactcagaaatatttaaattttgatgaaataagagtcttgttagttgcagtctcttttgaatactttccttgggagaaaatatgctgtgaaaacagtgatctgcccactacacagtggttggggacattaggtcatttctagaaagcaattatatacacctaatggcttattccctacaaaatgaactattatggtgtcagaaaaggctagatactttatcatctgaaagacaggttgctcagatgtatacaaatgaatttattctcttgacctctagttcagatgtcagaaatattttgtactaaaacagagataggttcctatattggaatatgttcaatatttactacctttctcttctattctctatccataaaactctgcctgattaaaatattttaaagtgtactttttacctgatactgttaatagcattgatgatcctggatttaaagatggctgctttagtctactttgattttgggaaagccattttaaacaaacaaatatgtggtatcatttaaagttttataaagaattaagagtaactgaatgacagctcgaatttctcatgtatttattgactgcctcctaggttcaaagttctgtgctgcatgcagacatatcaaaatttcttatatctttggatcatgaatgtcagggtctttcagctcctggtcagaaaaaatactgtcatgtcagagtgaggaattcttagtatgaggtggtgctggggagtaccagtagcttcagttcaaaaattcattgctctgggtcccaacagctttgttccaagtctacatcttaacagtatgtggaaggattggttcaggcttcctttatattctacatagatcttgatttgggatttttaggaaccaatagcttaagctatgttagaacaatccaaaagctttaaaaattgtcagagcaaaccctatagcaaaccctatctagaccttaaaccttggcgttgataactgagaatttaaagactctggaggcagtgttttgttcctgtgggggagaggccaggtcaacttgcagagtatctcccagagtctggtatcaagtgtcttcactccctgtcacatcacttttttcccaacactttcattatccatattttgctctgctattccaaatgtgtagtctctaagaataacctgaacacaccaggttattctctccctcgacaaattctgagtgcatgatttaatacaaaaacaatttgaataagagatttttatcttgctacattttgaaaagcccttacagatacagttttaaatatgtaattgaaatgtggcattttcttgagtattcaatacatttcttggatttttttttcctaactgcaggaacagcatacataaaaacgctcgggtcctgaagcaattctttaagcacagcaaacgttgagtcaaatggctttcactccatgtttataaaaggcaatgccaccatcataagtttctcaataattcctatcacttttaagcattttcatgtattaatctcaatatattttaatagcatacatatggtctcaaaaaaccctttcctggggcttactgttggctttttattcccccagatcttcttaaaatcttagcctatacatgacttagaacatgtttttaacaagttatatgaaaatctccttttgtgctccacattgacagagcctgtctgaatcccagagaaggcaatcacatcctgttatgttgtcagtgtgagaggcaaaagctccaaagtactaagttcctagagctgtaaatccattgtgcttcatgttataaataaagaaattgccctgtgacagctacagtttggaagcattatcatttctcttttcagctctcacttttaatcttttcagttattttccttagtaaaacttagccaccaaagtatgacttcttgtgtcacaaacctatatgccacaattaaaagaagaaattccagccaaccatgtcagtggctgtagtcagcatttaagacaaaactgactcctatcgatttagcagaagagagttctccctgccccgtgtctccttccatcctgccgctccctgccctctccagccttttgggcaagccttttcttcctgatgcattgcgaatgtgtgatgtacgctttctagcagatgcatttgaggttaggtcttcgcaaccatgaaaacacagttataaattgttctcggagctaacccactcaacatcttggcacttggttgtttttaacttttcaacaataggcactgttcactcccctccatctcagttctttattcagtgatcaggcaggacactgatgaaaggctagtcacggcttccccccatggtatcagtgtggtggcatgtgatgattcacatggggtgtgtttgatccgaggaagcccagtctctgcttattcttcctttgttctgtcatctgctccttgagctccgccagctgacccgacagctgtttgaccagactcatggtcgattccaacttctcctgaaggctccgaatttcattttgctcactgtcgccttcattgctaacgagggacatggctcgcatccgaggaaaccaatccaaattcttctccacaatcatttgagccacataactttcaggtccagtgtattctgttgggtctttaacttttcacccaggactatggaagtacaaataatgccacatattggtgttctggacttaatgtgctcctcaaatgaaacccgttttattatcaaacttgtcttctctcaagtccacagatgaaacaagttgtctttagaatttcttcttttttctgtttttcgcttctgagatcagcaaaagtatcgatgataacaccaaaaatcaagttcagaacaataatgataacaatgaaataaaaaagaaggtcataaaccactcgggcagcaaacaagggctcatctttcgatggccttcttagcacatcccccacaccaccgccattcctgaggccctggttcagcacggtgacaatgcacataaggagagtgtcacacgtcctttcaattccatcttcatactcttcatcagctgtatttgaagctggaattgtgggtgaacagttctccttggcacatgcttccatcatggtagttaaagtcatagtaggcacttgatgactgcctgtaacaggagttcggtttttcagcctatcaacttccatagtgaagtcatccttcaaaaaaaggaacccaataatggaaaacaggtagacgaggatgagagccaggactgcagttagaataatagagcggccatttcgtgtgacactttttatgacattcagcaaagtctcttccctgtacaccaaatcaaaaagcaggaagctatagaagaattcatggacaaaaaggcccagcatgcaaaccaggacatacgccacgtgatagagaaaggccatatccaggatgactgctcggtacccacgggtgaacgtgccacgatttccaacaaaactcaccagaaaaacaattttattacaaagattagctgcaccaagaagtattaatgtaggcccaagacctattgtatatattgatctgagcattattgatacaagaaacggccgaatacccacaggcttggagaagaaaaacagcatagatgtgcagatcgcaactgctatccaaagaagaaccgagaacaatggagaaagtgtaccttcatctccatcatccccaaatgggtagaagagagcaacagctaaattgatgaacacagccaggttgaaggaaatgctcccccagagagagatgtgcctcgagaaccagaacagtgcagggttattcctgattttcttctgccacttcatttcattgtagagatcttctgtttgctggaaaaagtcattcactttacttccttgttcatccctttcagttgtattgaacacacggcacttggattctcgagtgaggtattcacatatattggggacaggaaaaactatttgttccatggtcctatcatgccggacaatctcaatctgtgcagtgtggttggcataatactttaaggcttcatctccttcatctggatccgatcctggtttgagcatctgctgcaacagtttattgtggcgggccaactgatgggccagaatatagatattgtgtccaacatcttttggagaaacaccatcatctccaccctcatcatccccatggtcacattccaatccttggttataggcattcttcatcacatccaccagttctctgggtctcatgttaaaaagaattctttctgcattctcactgtcatgtctgctttccataatggccagcaaaagtttagatgcattgttctttagctggagcaccaggtccattcggtatttaccaagagggtttatgtcattcagaatcaaagcaatgatgatatcaatcccattagactcatgtgtagcgatacaggtctgattttcatggcaagggccctggcaatactcagtcaagctctccaggttctggttgaccagcgctacattcttctcattgatgtagagacccaacaggcccaggccaccggttgtacttccacaaatgcagtccagaaactgaagggtctcacagactaggttgtaatttgttttgttgttttgattcctcaagaagttctgcaattcccggttgtgattctcacacagtaactgaagaaatctcagtattggctgcatgatggcaattgcgggactcattgttacttcctctgcggatttttcctcagtgtttcccgcttctggtcctgtgcacataatgtctatttctggatccatttctcttctgtatacacaatatgctttggatgttgctgaagaagcttctgttaattgccctttcattccctcttttaaatgtagtgttgaatctcttactctcattcgtggaccagatgtcatcaattcattgtcatcgtccctttttttgttacctaaatctatggtattaactgtcactgttgatcttatttctttctgagcagccttcattcgatcatagagaactttaaagaatttttctgactttttttgttcatgcaactgctggtagaaagaatactgtgtttgtgtatttcctccttcaagcaaggcaatgccgaggaaaatgccttctgaaaaaattctgtcatttttggtgttcactataacatcgatgacaagttctgatgcaccttctttatccagcagacactgaatgtctgacattgatatccccatcttatctgaatcttgtccagaaaagcttcctcccacctgtgcagttttggagtaggctcctgataggtgtccattcacaccaatactataatcacctttaaagtatcgattcagaagtatctttcttaatgtgttaccctcttccacaaagctgtctttcttctctaacatttctcgtaatgtctgaagaattttaatgcacagtttttcttctttctccattagtttctttgtatgattaatcaacttcgacatgaaagcgccacatcttattcttgcatcgcttccctcagggaacagcagttctggactgtacaatacatcaaccaacactgagaattcagcctgcatcattgggctgaactggtgctccaaggaggccactacatcctgtaacttttcaataatatttctgtaatcccaagcaggccctccaagagcttccttaaagcgtggcccagagcgagctgatagtctccaacccattgctgctctctgcaccatatttgaatggctcttcatgaaaagagtattaacttggctgtccaaatccactggaatggcaattccacgattttttgccacttcagccaaagttctgatacaggattccactgaggctttctgcgctgggtttggccaggtgcaattgtaaattctgaaggcagattgcagtagctgaataaaaactggctgatgtgtctggaggctggtactattgtctgaaaagggagaattaaagaagccgctcacaatattcattattgactcagtaacacacttttccaaaaagatgtctgcatgtttcctgtctgtagttgtgttgcaaacccttgccatatccaccaagaagttctcaaataatttccaaatgtggttacttgtatagatttctttcatttccacttcagtgtcaacataacagtgattaacaaagttcacataagcaattttaacctcagggatgcagtcgtcatgggtcaccaccctcactatgtcgtccagcgggagaagggaattacacttgatttcagtgtagacatttttcccctctgtgcatgctgccagcaactccaccagggtgatgtggtaggctaaggggccactctcatcccctcggtctctctctgaacacatcatatggagaaggattggaaatgatgctctatcattgtaaaatatcagcacgtcttcacccccatttatcaactctgtcattaccatatcctggcatttcttcacatatttaccatctgcttttacaattgtttgcaaaaacctcaggtactccacgtggcggccatgtgtctcaatgcagtgcacaaagtgttgtacaactctctcgctaatttcgttgcacagatggtaattgttcatgaagatgtgccgcatggtttctgcttcaaggagacctggagttaaaaacaaattcagatgtttatgaagaagaacttgattctgtggatttcctcgacagaaattctgcagaaatgtatgggctagattcattacttcattcatcttttcatcattcttttcatagggtatctgcagaagatccaacaccaccgaatgcgcccccatatttttcagtaatcgttgatgttgattccgacactttttattctgcacacagagtttacttagcctgatcaaaatctcctttacaatccggtacttattgctcttgttgctgtcaatctgaggtttctttgttccatcctgcactggacttaaaatgtttgattcctcaattggctcttcaccacctttcacttgactttcccctatttctccattctcatagttgctgctcttctccacccatagctcagacttttctactgtcagtcgaagctggtctagatctgccttgatttgcttgtagttatctacgtcttgattagacaccagtaattgcacctgcttaaatgcctgtaaaacctctgccctctggctgaagtgcttaaacaacagctgcagggctccagacagcaaaggcgcgtagtcgtgcatgatcagatgaatgaggacccgtaaaaacgtcctgcctccttcatcgtcaagttgaactggatttttttcttttcttcccgcaaacatagtttctgcctgagctgcaatttcatctatatcaggaacaatagctgatggtagtaaagtgtctggagatccactggcagatgtctccgcattgtcattgtcctctccaaactccttcttatatattgacagcatatatgagatcctataatccagtctgacactcaggataaactgcaaaatctcaatgatcttcagcttggtgtccatcacagtcacatcctcatgctcggtggggctcccttgcttgctcgggtggatgctgggtggcacatccggcacgctcatggggaagatggagcctctactgagtaccatctgggtcatcatctctcccaccccatgaatggttctcatcacattgtttcctccatcttgaaatttgcttaatctttcaaagtatgatgacatgggggcctgtacaatgtctaaaatagccagaagtgttcttgttagccttaataactcactgaaactataaaatccaaagtatataagattccgagccaagtggaccacctcaaatgtcagtttatttttttctttatccccaaaaggaaagggctggtttacaacttctttcaaatattcttcaacaaattccattgtcagggcaaatttcctcttcatatcatttctggaagagtctgttatagaatcatattcatgaattgtgatctttgtggggatttctgtccagagcctggcatagcgaacaggcaccacggactcctggggatcccggtcaacgtgcatgtggagcatgaggcgacagaaggacgctcggaggtcgaacggcaggctctcatccgacacacaccgcaggatcaggtctacagacagctgtgtagaaatctggtttatggccagatactggcgatccaagcacatccttgcaaagaggtttagctggtacctgtaataggtaagaacttctaagtcagctttggtgccttcttttgcctcttgagcaaggtgcctgatagctttgccatgaggttccttgttgctgtcaatccaatagagccaaacttcttcatcatcaatgtcatctgaaaggatggagctctccatggggttgtctgcttgcattgagaccaccttagtttgaatgagaatgtctgcattgcctggactcaacataaatttacagatgagttcttgagttacagggatagcagtggtattagacacacacagatctgacaaataatccaaaaaccttggctcccgatttctcctgagtaaactgacaaatgtttctatttcttttgctgtgatatgtttctctagtagttttctgttgttgtgcaacaaaggtgtgatagtatcttctgccaaaatatcatagccaatctgggactgcatgacacagaaattcttagcaatatattcctgatttttccggtaatcctgctgcgagtgtctcaggacgcggtaacagagccgcagcatgtacttgtagggtgcatatctttgatcccccagatcttcaagtctcagcatcgagccttctcctgctttctctttaaagggtgctttaagaattccaaatacctgtgccagtatgttttgttccctcatcaatttttgacgctctcggtttggcttagtgataaccacatccagaacttcttgtccattattaggcacatcagcaacaaagaatatgagatcttccaataatttggttacaaacctcctttcattctgagttattgtgccgttttctagctttttaactgtggtcgctagtactttattggcatcattggcaaagtctaagtctcgaacttcagacagtggaacagacacgattgcgaacgcttctttatcttctttggtttggcaggttccaatctttaacataacaggcctctcttcatctgtgtctatggggatactagtactggttacccatgtgttggtgcataaatgccttaaccgaacatatgagttccttggaaccaggcagtcagctctctgaagagttgtggcatctagttcaaaaagggatgcaatgtcattgccatgcgggactgaaaccaaagtatacatgatcttctcccctgcctggcgttttttctttgaagttggagggactccatctctcacattttttccttcattttgggcatctcgataatcaggattaagcctctgcagctaaatagtttccagttgcaagatgcttaaatctgaacaagctgttccactgtcctgcacccccacggcatgggtcatgatgaaccacctctatttcccagagtgctttagaactagtagcagaagtagctgattggcgcaaggtcgtacgaaggaaaatgtgctgttttttctcatattcatcacaagtcaaaaacttctcttgttccgcatgaaataatctaacaacgtcccctccttttaatacatcctctcgataggaactatatttcatgaataaagtgattttccagctggtgttgcaattgacagcattcacctctttacaccctgggttatcaagaagctctatgttgctggcatgtagtggctgccctgcattcacaggcatcaaaacaactttatctcctacaacaatattgtcaccctcgcttctcagtttccagaatggatgaatataaaaccaagacccttcatttcctgcagcatccaaggacacacgcatggcattcttctccagtaaagcaggtaatctcttgttgacagtaagatatttgttgctttttatatgcagtagttgtataacattactgtattttacaatttctcccaacagtttcttattctccgattcattttgtttttgttccagttctgcagcgtgctgtagtttcttcagcaaggctgcctcggtgtggttcccttgtttggcttgctttgctttccaatattgcttctgggcagaatatctgttcatagggcacaccttgaaaaggcagtctctgaacttcttgggagggttggcaaggtccccggcctctgggtgcaccacacatctgtcatccactaaccccaaggtgctgatgaagccgttgaccgagccctccgcgtacagggacacgatgtcccctatgtagaggaagctggacattttctcagtcatgctgcttcatgctgcttcatgttccacagtggacgtccctcttcttccctgcgccctcgccgccctctctccagggagccgccgcggcagaagcggatcggatcgcgggactacagcggccaagagccacggcggaggcacggcccgagccactgagcgtcgcgctcagccgtggtgcgcgccggggaagccagaccggggccaagcgccagctcgggacaccccgcgaagaggcagcccaggcgcccagagaagccgcagccgccgcccgctccccggcaggtttcctgttcctttctgaagttttctctccaacacctttgctcctcctcctcctccttccctctccgctcccacctcgtgtccactccctgctctgcgaccgctcggccgtcacagcgccggcgggagctggaag

SEQ ID NO: 392 - DNA, 204 bp, Homo sapiens
gtgggcatgagctgctgcacttggccggaagcctatctatttcaattttagtatcctaaatagtccacaaaaacaaactgtcaccaagagtatgaactgaattaaaacacaatttcactgtacatttttaatctttctgattataacttacataaaactgaaaacatttctagctaaaactcaggatctcctttaagtactgaa

SEQ ID NO: 393 - DNA, 2970 bp, Homo sapiens
ccccctgactgtaacgtatgatctcgtgaaaccttgagagaaactgaatgacgaatgaaactattgttcctgtttcacacagaagaaaactgaggttggcactcatgatgagccgctgttctcattctgcaaatggtgaagctctctattgtcctgaccccacagttcctgtcgcatgaccagagccagctcaccaaggagctgcagcagcatgtaaagtcagtgacatgcccatgcgagtacctgaggaaggttatcaatagtctggctgtctatcgtcatcgtgagactgactttggtgtaggagttcgagaccaccctgggccaacatggcaaaaccccatctccacaaaaattggataatttgataattatcattattgggtttctgagacgttacacatttaacattctcttctgcacaagttgcctttgtgtgtctttcctgaagactatcttcccgtctcaaaatggacatgatggatccacggatgtacagcagagagccaggaggtccaactgccgtagacaggaaggaaataaaattggcctgaaagacgtcattactctatggagacatgtggaaacaaaagttagagctaaaatccgtaagatgaaggtgacaacaaaagtcaaccgtcatgacaaaatcaatggaaagaggaagaccgccaaagaacatctgaggaaactaagcatgaaagaacgtgagcacggagaaaaggagaggcaggtgtcagaggcagaggaaaatgggaaattggatatgaaagaaatacacacctacatggaaatgtttcaacgtgcgcaagcgttgcggcggcgggcagaggactactacagatgcaaaatcaccccttctgcaagaaagcctctttgcaaccgggtaagtttgcttgttttccttgcttttggacatagtctgccaggtcaggacatggatacatttttctccctacggctctgtgctcaagccctgcagagggagatggcagagaggaaggctgcctacaagcatcacagtcccatccctgttggtaaccgtgttgcgcaaaaacaccttcatccccacccagtggggcccctgatctaatattcaaagtgtcagaggttccatatttgtaatagcaaatgggccctgactgtaaattagtgaagagtgaatgtaacttattacccacagggacaattcccaaatgagggccttaaatgatgctcagctaagctggttcttgtgtggcctctgtaccttcaaaagctgccgagtcctatgattgcacgcgatgggacttgtacacttgaagtgaaacacagttttaaaacttgctttgtttagaattcccacctcatttttccatggacaaaagtattctttatgtcctagtgcacttacaatttggtattacctgggagtgaaaagaaatattacagccatgcctaactgacttcttgaggtaagattgttctgtcagaaaaccctctcccagttcccctgcagctcttcaggaatccacatctctccagagctctttgttctcatgggtggcacctccagagtgaagaagatcctttgtcaagaagggaaacagaggggaaatgagagggtcctgcaggcagagctggaatcaacttccactctgcctcttgcaagctgtgtgaccctgggcacaatttctccttcctctggaaacctctgttttcttagatttggagcagggtggtcacactgaccttgcagagttctgagaatcagagacagaacataaaaggcctggaaaacattctccaaaaagaagctgcaacatgtgtggacaatgggcttttcatgcctctcttactgtctcttactgtctgttgacctggtgcaagaaacatgctctggtgatggctgtgagggaggaatgaggatagacatagacactcctgtgtctcaaacatgcctctttattactctgttatgactctgtcttccctggggcaggaccccagcctgcctacatttgcagacagacacagtggcatgtggagacaacagtgtgtcccaatgacttttctttactccccagctgtcggcagtactcagtggaagggtgatattatgacactgatactgctattttgaaacctggaggatggaaaggtgcaaaaatctatcaccagcaacagaaggtgcagaccgtgttggtggcggtaattttgtccatcaaatgaatatgtgtgaaaacattcccttcttcggccctacaggtcagaatggcggcagtggagcatcgtcattcttcaggattgccctactggccctacctcacagctgaaactttaaaaaacaggatgggccgccagccacctcctccaactcaacaacattctataactgataactccctgagcctcaagacacctcccgaatgtctccttcatccccttccaccctcagtggatgataatatcaaggagtgtcctcttgctcctcttccaccctcagtggatgataatctgaaggagtgtctcctggtccctcttccaccctctcctcttccaccctcagtggatgataatctgaaggactgtctctttgtccctcttccaccctctcctcttccaccctcagtggatgataatctcaagactcctcccttagctactcaggagggccgaggcggaaaaacccaccccaaaccccaagaggtggagggtggatgaggtggaacaatcaccgaaacccaagaggcggagggcggatgaggtggaacaatcgcccaagcccaagaggcagagggaggccgaggcacaacaattacccaaacccaagaggcggaggttgagtaagctgagaacacgccattgcacttcaagcctgggcaataagaataaatccgtgggtcggaaaaaaagaaaaaaatcaaaaaacaaaacaaaacccacgctccaaaaacaaactaacgaagaataaataaataatataaaaat

SEQ ID NO: 394 - DNA, 6153 bp, Homo sapiens
agaggctgcggtgagtccgccagccccagctgctcctcctcaagcccccaaggcccttcggcgggcccctgctgaaagaccggcatgccctattctgtgggcttccgcgaagccgatgctgctaccagctttctgagagcagcaagatcaggtaacttggacaaagctttggatcacctgcggaatggggtagatattaacacctgtaaccagaatgggttgaatggcttgcatctggcttctaaggaaggccatgtgaaaatggtggttgaacttctgcacaaagaaatcattctagaaacgacaaccaagaaggggaacacggccctgcacatcgctgctctagccgggcaggatgaggtggtccgggagcttgtcaactatggagccaacgtcaatgcccagtcacagaaaggttttacacccctgtacatggcagcacaagagaaccacttggaagtggttaagtttttactggaaaatggagctaaccagaatgtagccacagaagacggcttcacgcctctggcggtagccctgcagcagggccatgagaacgtcgtcgcgcacctcatcaactacggcaccaaggggaaggtgcgcctcccggccctgcacatcgcggcccgcaacgacgacacgcgcacggctgcggtgctgctgcagaacgaccccaacccggacgtgctttccaagacgggattcacgcccctgcacattgcggctcactacgagaacctcaacgtggcccagttgctcctcaacagaggagccagcgtcaatttcacaccacagaacggcatcacgccactgcacatcgcctcccgcaggggcaacgtgatcatggtgcggctgctgctggatcggggagcccagatagaaaccaagaccaaggacgaattgacacctctccactgtgcagctcgaaatgggcacgtgcgaatctcagagatcctgctggaccacggggcaccaatccaagccaaaaccaagaacggcctgtccccaattcacatggcggctcagggagaccacctcgactgtgtccggctcctgttgcaatacgacgcagagatagacgacatcaccctggaccacctgaccccactccacgtggctgcccactgtggacaccacagggtggctaaggtccttctggataaaggggccaaacccaactccagagccctgaatggctttacccccttacacatcgcctgcaaaaagaaccacgtccgtgtcatggagctgctgctgaagacgggagcctcgatcgacgcggtcaccgagtctggcctgacacctctccacgtggcctccttcatggggcaccttcccatcgtgaagaacctcctgcagcggggggcgtcgcccaacgtctccaacgtgaaagtggagaccccgctacacatggcagccagagccgggcacacggaagtggccaaatatttactccagaacaaagccaaagtcaatgccaaggccaaggatgaccagaccccacttcactgtgcagctcgcatcggccacacaaacatggtgaagctcctgctggaaaataacgccaaccccaacctggccaccaccgccgggcacacccccctgcacattgcagcccgtgagggccatgtggaaacagtcctggcccttctggaaaaggaagcatcccaggcctgcatgaccaagaaaggatttacccctctgcacgtggcggccaagtacgggaaggtgcgggtggcagagctgctgctggagcgggacgcacacccgaatgctgccggaaaaaatggcctgacccccctgcacgtggccgtccatcacaacaacctggacatcgtcaagctgctgcttccccggggcggctccccgcacagccctgcctggaatggctacacccctttgcacatcgctgccaagcagaaccaggtggaggtggcccgtagtctgctgcagtatgggggctcagcaaacgccgagtcggtgcaaggtgtgacgccccttcacctggccgcccaggagggccacgcagagatggtggctctgctgctctcgaaacaagccaatggcaacctggggaacaagagcggactcactcccctccatctggtagcacaagaaggccacgttccagtggcagatgtgctgatcaaacacggtgtcatggtggacgccaccacccggatgggctacactcccctccatgtggccagtcactatggaaacatcaagctggtgaagtttctgctgcagcaccaggcagatgtcaatgccaagaccaagctaggatacagccccctgcaccaggcagcccagcagggacacacagacatcgtgactctgcttctgaaaaacggtgcttccccaaacgaggtcagctcggatggaaccacacctctggccatagccaagcgcttgggctacatttctgtcaccgacgtgctcaaggtcgtcacggatgaaaccagtttcgtgttagtcagtgataagcatcgaatgagtttccctgagacagttgatgagatcctggatgtctcggaagatgaaggggaagaactcatcagcttcaaggctgagaggcgggattccagggatgttgatgaagagaaggagctgctggattttgtgccgaagctagaccaagtggtggaatctccagccatccccaggattccctgtgccatgcctgagacagtggtgatcaggtcagaagagcaggagcaggcatctaaagagtatgatgaggactccctcatccccagcagcccggccaccgagacctcagacaacatcagcccggtggccagcccggtgcatacagggtttctggtgagcttcatggttgacgcccggggtggttccatgagaggaagtcgccacaacggcctgcgagtggtgatcccgccacggacgtgcgcagcgcccacccgcatcacctgccgcctggtcaagccccagaagctcagcacgccgcccccactggccgaggaggagggcctggccagcaggatcatagcactggggcccacgggggcacagttcctgagccctgtaatcgtggagatcccgcactttgcctcccatggccgtggagaccgcgagctcgtggttctgaggagcgaaaacggctccgtgtggaaggagcacaggagccgctatggagagagctacctggatcagatcctcaacgggatggacgaagagctggggagcctggaggagctagagaagaagagggtgtgccgaatcatcaccaccgacttcccgctgtacttcgtgatcatgtcacggctctgccaggactacgacatcatcggtcccgaagggggctccctgaagagcaagctggtgcccctggtacaggcaacgttcccggagaatgccgtcaccaagagagtgaagctggctctgcaggcccagcctgtcccggatgagcttgtcactaagctcctgggcaaccaggccacattcagccccattgtcaccgtggagccccggcgccggaagttccaccgccccattgggcttcggatcccactacctccttcctggaccgacaacccgagggacagtggggagggagacaccaccagcctgcgcctgctttgcagcgtcattggaggaacagaccaagcccagtgggaagacataacaggaaccaccaaacttgtatatgccaacgagtgcgccaacttcaccaccaatgtctctgccaggttttggctgtcggactgtcctcggactgctgaggctgtgaactttgccaccctgctgtacaaagagctcactgcagtgccctacatggccaaattcgtcatctttgccaagatgaatgacccccgagaggggcgcctgcgctgctactgcatgacagatgataaagtggacaagaccctggagcagcatgagaacttcgtggaggtggcccggagcagggacatagaggtgttggaaggaatgtccctgtttgcagaactctctgggaacctggtgcctgtgaagaaagctgcccagcagcggagcttccacttccagtcatttcgggagaaccgtctggccatgcctgtaaaggtgagggacagcagtcgagagccgggagggtccctgtcgtttctgcgcaaggcgatgaagtacgaggacacccagcacattctctgccacctgaacatcaccatgcccccctgcgctaagggaagtggagccgaagataggagaaggaccccgacgcccctggccctgcgatacagcattctcagtgagtccacaccaggttctctcagtgggacagagcaggcagagatgaagatggctgttatctcagagcacctcggtctcagctgggcagagttggcccgggagctgcagttcagtgtggaagacatcaacaggatccgagtggaaaatcccaactccctgttggagcagagtgtggccttgctgaacctctgggtcatccgtgaaggccaaaacgcaaacatggagaatctgttacacagccctgcagagcattgaccgtggcgagatcgtgaacatgctggagggttccggccgacagagccgcaacttgaagccagacaggcggcacaccgaccgcgactactcgctgtcaccctcccagatgaatggttactcctcactgcaggacgagctgctgtcccctgcctccctgggctgtgcactttcctctccgctacgtgcagaccagtactggaatgaggtggccgtcctagacgccatccccttggcggccacggagcatgacaccatgctggagatgtctgacatgcaggtgtggtctgcgggcctcacgccttctctggtcactgctgaggactcctctctggagtgtagcaaggctgaggactctgatgccacaggtcacgagtggaagttggagggggcactctcagaggaaccgcggggccccgagttgggctctctggaacttgtggaggacgacacagtggattcagatgccacaaatggccttatcgatttgcttgaacaggaggaaggtcagaggtcagaagagaagctgccaggttctaagaggcaggatgacgcgacaggtgcagggcaggactcagagaatgaagtgtctcttgtttcaggccatcagagggggcaagcccgaatcacacattcccccaccgtgagtcaggtgacggagaggagtcaggacagactgcaggactgggatgcagacggctcgattgtctcatacctgcaagatgctgcacaaggttcctggcaagaggaggtcacgcaaggtccacactcattccagggaacaagtaccatgactgaagggctagagcccggtggatctcaggagtacgagaaggtcctggtgtctgtaagtgagcacacgtggacagaacagcccgaggctgagagctcccaggccgacagggaccggaggcagcaaggccaagaagagcaggtgcaggaggccaagaacaccttcacccaagtggtgcaggggaatgagtttcagaatattccaggggagcaggtgacagaggagcaattcacggatgagcagggcaacattgtcaccaagaagatcattcgcaaggtggttcgacagatagacttgtccagcgccgatgccgcccaggagcacgaggaggtgactgtagaggggcccctgggaggatcccagtgagctggaggtcgatattgattactttatgaaacactccaaggatcacacctcgacacccaacccctgaaccccacacactctgccatgcacacaggaggagagctggacctgagggccaccgcagcggtgcacacattcctctgggctgacggcatgacctctgtaagggactcctgctagtcccctcttggcatgaatgactgactgtagacgcatgacctccaggcttcaatcctgcctcttgcaatgacagctgatctgtcggaaccaggacacaaaagcagcaagaagcggggagagagagggatagaaaacaagcgcaggagagcctgcgaacgcaaaagtgaatgagggctttttgtggctggggatgggttttggttttggggttttttttttaaattgttttgacttcgtacagggtactttttcccaacctcatctgtcagaaatccatgtgggcttcctggaaagaaaaaaaaaaaaaa

SEQ ID NO: 395 - DNA, 2443 bp, Homo sapiens
gaattccggtgcagtgagaggcatgcttccttagaccaggcaacatttcatttgttgcatttccagtttccaataccaactcacctacaaagattttaccaaaaaccttaggaccaataaatgtgaatgttggaccccaaatgattataagcacaccacagagactaaccagttcaggaagtgttctgattgggagtccatatacccctgcaccagcaatggttactcagacacacatagcagaagctactggctgggtccctggtgatagaaaacgggctagaaaatttatagactctgatttttcagaaagtaaacgaagcaaaaaaggagataaaaatgggaaaggcttgagacacttttcaatgaaagtgtgtgagaaagttcaacgaaaaggtacaacatcgtacaatgaagtcgctgatgagctggtgtcagagttcaccaattcaaataaccatttggctgctgattcgcaggcttatgatcagaagaacattaggcgaagagtttatgatgctttaaatgtgctaatggcaatgaacataatttcaaaggaaaaaaaagaaatcaagtggattggcctgcctaccaattctgctcaggaatgtcagaatctggagatagagaagcagaggcggatagaacggataaagcagaagcgggcccagctgcaagaacttctcctacagcaaatcgctttcaaaaacctggtacagagaaatcgacaaaatgagcagcaaaaccagggcccgccggctctgaactctaccattcagctgccattcataatcatcaatacaagcagaaaaacagtcatagattgcagcatctccagtgacaagtttgagtatcttttcaattttgacaacacctttgagatccatgatgacatagaagtactaaagcggatgggaatgtcgtttggcctggagtcaggcaaatgctctctggaggatctgaaacttgcgaaatccctggtgccaaaggctttagaaggttatatcacagatatctccacaggaccttcttggttaaatcagggactacttctgaactctacccaatcagtttcaaatttagacctgaccactggtgccaccttaccccagtcaagtgtaaaccaagggttatgcttggatgcagaagtggccttagcaactgggcagttcctggccccaaacagtcaccagtccagcagtgcggcctctcactgctccgagtcccgaggcgagaccccctgttcgttcaatgatgaagatgaggaagatgatgaggaggattcctcctccccagaataaagacaagagaaagcctacgtttcaatatgtgatgctcatgtgtgtttgtagtgtgagctcttgtttttgaaatgattgcttcagtctttgcctttgtttgcactgtgtgtttcagtggaaaactaggaggaaacacaataagcaaatcacatgaaggctgagatgattgagatgaaagttaacatagtgtgaatgaaagtctggccaacagagcagtagatgatataacaaagaaagcatgctttctgaggagatagtggggataatccctgaagagttggcagtgtgagtgcaactcatttatcttctgtgaggtgggatttttgtgttcctcacacccatgtaattattcttagaattgagattgctacacggagcagtccttgacgatcgtgtttctgacgtttctcttccttgcctggactgcctttgacaaggcagaaatgaacatgaaaagtccccaggagaggggagctgtgtagtgagggatactgagggcagtcctgtggctgaggggcacagattgaactgctgaactagttggaggtctagatgaggtgctttacgcatcagctgccttagacagcttctagaaaggagcgagcgctacttcttaagtacttaagtgacatttagataatttatagtaaaactgaaattattattagccaatgcattggtgcatagaatttactagggctacttctggaagccaaaatagaatagcatttccatgtgcattaaatactttgccagcactgcctttgccagcatcctaaatctggagttttacaaagaaggaaactgtatctttaggttaatcaaagctatgcatttcatatagctttttcatttaaaacaagacaaagaaacaaattcctatgaccaaattgcttgcctacagttccctgcagtaattgtatgatctcacccagtgtgcaatttgtgaaaatgaaccaaatgtcattacttttgtcttaaagaaaagtctatttcaagaatatgaacagcagtgtttccttgtacatgtcaccttttttcacattttcattaatcagaatgaccttattgagcctactcctggggtcaattgcatttcaaactaatccaatatttagtgtttcacagaaacactagaaaac

SEQ ID NO: 396 - DNA, 536 bp, Homo sapiens
tttttttttttttttttgccacacacagcactgggtggacttttattttaaagtcaaaggcacagcctggctgggctgaggcagtgaccatggatgcccagcccagacccccaaggccccacccccagccaggagtagctgtgccaaagaggaaggggtgggtgagaagatggcctcctcttttaggagccacctatctccttccttagccccaacaggggagaagcagatgacataaagtgaggcagaaatgcttcagagggtcccccagggcctctccttcagtacccccaacacgggtctttggtggacgtaattgcacagacagtccataaagtgacagttgaggggtgcccctcccaggaacggggcctcaggggagaacagggtagggggtcccagtttaggagttagcactcctaactcagtgcttagaagtgggggaggggctctttcctgttggagcagtccccctggaggggccttctgcccagaagaggcagtgtcctgggagagggccccccaaaccccactcc

SEQ ID NO: 397 - DNA, 679 bp, Homo sapiens
  misc_feature (1)...(679): n = a,t,c or g
ccaccaaggtgcctgcattggaccctaggggcctcctgggcttcaaggacggacagttgttttcctctggttactgatgaaggcatacatcagttgggtccattgctcattcacgttctgtctgttttttgcatcttctccaggaaagaaagaaatctcgttttgggaatgctttccacctgtgtcgggaagttctgcgtttgactaagctggtggtggatagtcacgtgcagtatcggctgggcaatgtggatgccttccagctggcagatggattgcagtatatatttgcccatgttgggcagttgacgggcatgtatcgatacaaatacaagctgatgcgacagattcgcatgtgcaaggacctgaagcatctcatctattatcgtttcaacacggtgagaccttgactttactgactttcttttttttgagacagagtcttactcttgtctcttgggnnnnnnnnnnnnnnnnnnnnnnnnnnnnnnnnnnnnnnnnnnnnnnnnnnnnnnnnnnnnnnnnnntaggtaattgatgancaaaggtgcaaanggtctccctanggatagaataaagagcaagcanaggaaaatcctctgaacctgacaggaaaaangtctggaaaatntggtanaaataggtnntgggaactntacaggntttgngttttcacttt

SEQ ID NO: 398 - DNA, 773 bp, Homo sapiens
actgcatcatctcggtgagcaagtgcgcaagcagtccagggcgctgacctgggcactcggcagctccaggcctggggacttctccctggagtcttccaaagtgtctcatcacacacacacagccacgagtacacacgcacggccacacatacacagcaggtgccctgtcctctgaagagtcacatttcaaggagtatgcaaaataagcgtgttataaaatttatttgtgtaagcattcagacatttttaggtgggaaagatgatatgcagaatccactacaaggtgcaacagaaaatcgtattggaaaggacggtacatctggcgcagaccagcagtggcacgattccaaacaaatgtcagacgagagcgcttcatggggagaaactgaaaattataatttaaagcttcatgaggcaagatatgttccaatttaaaacactaagaaatagtaccatcgatgaaaaaggaaatcaacctctaggtgtaccaaaaggggcgtagggcaaacggggaaaatttgcatttgttgaggtacaaataggagtgttctgtaagagaggggcattaattattaatgacaaaccctgcaaatacaaaattaaaacccaaatcactggtcacagaattcaaaatgtacatgtaataaaggcaaggcaatagactcaagttatggcctgtcgaatatttactccactgacgttatctacagaagcacttggccagtttgtacacagtgattccttatgcacgcccgaaaggggttcccgtaaaa

SEQ ID NO: 399 - DNA, 417 bp, Homo sapiens
  misc_feature (1)...(417): n = a,t,c or g
gcggcacgaggttgaattaacaagtccttgtcatatattagacactcagatgggctttgtaatcccacaagtttttttgaaaaataatacttcagaggaaaaacttttaatatacagcgccctttttnnnnnnnnnnnnnnnnnnnnnnnnnnnnnnnnnnnnnnnnnnnnnnnnnnnnnnnnnnnnnnnnnnnnnnnnnnnnnnnnnnnnnnnnnnnnnnnnnnnnnnnnnnnnnnnnnnnnnnnnnnnnnnnnnnnnnnnnnnnnnnnnnnnctantaaanatgacgtcttgctatgttgcccaagctaaactttaacttctttaggctgggcannnnnnnnnnnnnnnnnnnnnnnnnnnnnnnnnnnnnnnnnnnnnnnnnnnnnnnnnnnnnnnnnnnnnnnnnnnnncacc

SEQ ID NO: 400 - DNA, 4968 bp, Homo sapiens
  misc_feature (1)...(4968): n = a,t,c or g
ccgaatgtgaccgcctcccgctccctcacccgccgcggggaggaggagcgggcgagaagctgccgccgaacgacaggacgttggggcggcctggctccctcaggtttaagaattgtttaagctgcatcaatggagcacatacagggagcttggaagacgatcagcaatggttttggattcaaagatgccgtgtttgatggctccagctgcatctctcctacaatagttcagcagtttggctatcagcgccgggcatcagatgatggcaaactcacagatccttctaagacaagcaacactatccgtgttttcttgccgaacaagcaaagaacagtggtcaatgtgcgaaatggaatgagcttgcatgactgccttatgaaagcactcaaggtgaggggcctgcaaccagagtgctgtgcagtgttcagacttctccacgaacacaaaggtaaaaaagcacgcttagattggaatactgatgctgcgtctttgattggagaagaacttcaagtagatttcctggatcatgttcccctcacaacacacaactttgctcggaagacgttcctgaagcttgccttctgtgacatctgtcagaaattcctgctcaatggatttcgatgtcagacttgtggctacaaatttcatgagcactgtagcaccaaagtacctactatgtgtgtggactggagtaacatcagacaactcttattgtttccaaattccactattggtgatagtggagtcccagcactaccttctttgactatgcgtcgtatgcgagagtctgtttccaggatgcctgttagttctcagcacagatattctacacctcacgccttcacctttaacacctccagtccctcatctgaaggttccctctcccagaggcagaggtcgacatccacacctaatgtccacatggtcagcaccacgctgcctgtggacagcaggatgattgaggatgcaattcgaagtcacagcgaatcagcctcaccttcagccctgtccagtagccccaacaatctgagcccaacaggctggtcacagccgaaaacccccgtgccagcacaaagagagcgggcaccagtatctgggacccaggagaaaaacaaaattaggcctcgtggacagagagattcaagctattattgggaaatagaagccagtgaagtgatgctgttccactcggattgggtcaggctcttttggaactgtttataagggtaaatggcacggagatgttgcagtaaagatcctaaaggttgtcgacccaaccccagagcaattccaggccttcaggaatgaggtggctgttctgcgcaaaacacggcatgtgaacattctgcttttcatggggtacatgacaaaggacaacctggcaattgtgacccagtggtgcgagggcagcagcctctacaaacacctgcatgtccaggagaccaagtttcagatgttccagctaattgacattgcccggcagacggctcagggaatggactatttgcatgcaaagaacatcatccatagagacatgaaatccaacaatatatttctccatgaaggcttaacagtgaaaattggagattttggtttggcaacagtaaagtcacgctggagtggttctcagcaggttgaacaacctactggctctgtcctctggatggccccagaggtgatccgaatgcaggataacaacccattcagtttccagtcggatgtctactcctatggcatcgtattgtatgaactgatgacgggggagcttccttattctcacatcaacaaccgagatcagatcatcttcatggtgggccgaggatatgcctccccagatcttagtaagctatataagaactgccccaaagcaatgaagaggctggtagctgactgtgtgaagaaagtaaaggaagagaggcctctttttccccagatcctggccttccattgagctgctccaacactctctaccgaagatcaaccggagcgcttccgagccatccttgcatcgggcagcccacactgaggatatcaatgcttgcacgctgaccacgtccccgaggctgcctgtcttctagttgactttgcacctgtcttcaggctgccaggggaggaggagaagccagcaggaccacttttcttgctcccttttctccagaggcagaacacatgttttcagagaagctgctgctaaggaccttctagactgctcacagggccttaacttcatgttgccttcttttctatccctttggccctgggagaaggaagccatttgcagtgctggtgtgtcctgctccctccccacattccccatgctcaagggccccagccttctgtagatgtgcaagtggatgttgatggtagtacaaaaagcaggggcccagcccaagctgttggctacatgagtatttagaggaagtaaggtagcagggcagtccagccctgatgtggagacacatgggattttggaaatcagcttctggagaattgcatgtcacaggcgggactttcttcagagagtggtgcagcgcccanaaaatttgcacataaggcaccaaacgcccaggactgccgagactctggccgcccgaagggagccctgctttggctactatggaacttttcttaggggacaccgtccctcctttcacagcttctaaggtgtccagtgcattgggatggttttccagggcaaggcactcggccaatccgcatctcagccctctcaggggagcagtcttccatcatgctgaattttgtcttccaggaggcttccctagtgggcgtggggccgcagggcccagccttgtttctctaacaaacaaacaaacaaacagccttgtttctctagtcacatcatgtgtatacaaggaagccaggaatacaggttttcttgatgatttgggttttaattttgtttttattgcacctgacaaaatacagttatctgatggtccctcaattatgttattttaataaaataaattaaatttaggtgtaatggctgggctgttacctccctttttaaagtaattctgagctcacaacttggaatgcccccatttgttcaccctcttcaggagcagaattcaagaacaggaaatgtgcccagagcctaggctgggaatgaatttgtaatttaacctttgtactctttgtaaacctctactgaagagttaagtataaaaattaattaagcagaaagtactctaaactcagctaataccttaagtaatacattttataaactatttatttatttggtaggtacagcttttttaaacacaaaaatagattagataaattccagcttggaacaagctagtgctggttcacaaggttgtgctcacccttcaattaaaatcaaaatgactacaagacttgccatcagctctcttcaggaccactgctgggtcagaatcagaaaccttgggtgccatgaaatttttacaaaatttcaaatcaaagccaggctttgcagctagataatagatcacttgagtacgaaccacacatgtaagtgcacgtatatttgagttctcaatacaattaccctgatgggcaagaacccacaggtgagagcagaggcttggttcccctagagggccctggctggaggccccaacaccaaccagacgacaggagggccagactgctacccagtactgtacctcctgctccttcaagagcctccctaagggagaagaagatctatacttccactttgtttgctgcacatgtggcaacaagattgctaccctgatttgggacacttgagagaacttgaaaaaaatgaccacccttaaagccctagaaaaaagttgtatgtttgttaacagctatgctgcgctcactttgcattgtgtgttcttgaaagctctgtataaatcaaaattttgacgacacactaaatacactagagaaatacactatagaggaatccttttatagggctgaagactcctttggtaagaaaaatatgctgcattaggggcagctgcaagtttactatttctggggaagaaaagatcaaagataagagccaggtttgttttttaaagcaatcaatccaaacagtttgggtgtttgttagttgttacccctgaggggcttgaggtgtaactatatcagctataaaaatagcaattccatacatttaattaggttactttatatctttcactcttccccatggctgtaataatggagattgaatgagactaaggctaagcccaactccactcaaatccaagtcacacgtcaccttggctgcagtacagggaagctccgcacaccctggcttgggaaagtttcggccgatggagcccaagatgcagggcaaccatctactctttagggttctgatgattccactccagaaaggtgcatgaagaggtccccgagctctgtcatgtcgacatcttcattgttggggacatgccggctttctcggttctcgatgaaatcccagagccgcactgaattaaagaacctcacagtgccttgagaactgagctgtttccgaggtttctcaggctctgctagccgcccatcggggtaagcatggcgataaagacatttgcttccaaatgggcaggtccccttgccttgctcaaagtatttacaggcttttttccccatcccctgtttgaaagcttcaatcaactcgttctttttattctgatcttccacccaatacacacttggaattacaaactctgatatcacacggcattctggacaagacttaatgattgggttttcaaactgtttggcacaccgccactgccggatgcaggacaaacagtacgtgtgattgcaattggagagaatcccaaatctcctctcagaagcagaggccttctccaggatcacttccatgcagatactgcacactttgtcctggcttgctggaaggcaaaggccttttccatctcgtgttcgaacgtcaacatgcagatcttt

SEQ ID NO: 401 - DNA, 352 bp, Homo sapiens
  misc_feature (1)...(352): n = a,t,c or g
ggtaatatatagctttctcaatggtgataacatgctaggctatcacatatatgacaaagatgaagctgaggcaggagannnnnnnnnnnnnnnnnnnnnnnnnnnnnnnnnnnnnnnnnnnnnnnnnngtggggaaagttttttgcatatcttcaaatatagtcaaatgcctttttattttttaattaaaaaatcctttgtaaacaacaatgagataccagtgtaccttttagaatggccagatccaaaacactgacaacaccaaatgccaaggaggatgtggagcaatgggaattcattgctggtgagaatgcanaataatatagctaatctggaagacagtttggcagtt

SEQ ID NO: 402 - DNA, 572 bp, Homo sapiens
  misc_feature (1)...(572): n = a,t,c or g
ggaacaatttcaaacannnnnnnnnnnnnnnnnnnnnnnnnnnnnnnnnnnnnnnnnnnnnnnnnnnnnnnnnnngcttgaaccatggatagtactaagccctatttatgcnnnnnnnnnnnnnnnnnnnnnnnnnnnnnnnnnnnnnnnnnnnnnnnnnnnnnnnnnnnnnnnnnnnnnngcaataactaagagnnnnnnnnnnnnnnnnnnnnnnnnnnnnnnnnnnnnnnnnnnnnnnnnnnnnnnnnnnnnnnnntctcaaaatgtcttagtatctttcannnnnnnnnnnnnnnnnnnnnnnnnnnnnnnnnnnnnnnnnnnnnnnnnnnnnnnatatcctgttctattctaaaatgttaaaacctagtgttgagactcatcacaatttgttatgtctgtgatacttttattaccagcgtgtgtgtgttgggtcaaggnccaaagatgagattttattttantatnagaaaaaccaatccaagnacagtggtcacncctgcaatcccancantttgggaggcaagggggcaaatcacaanaccaggggttccanaccangggngcca

SEQ ID NO: 403 - DNA, 1467 bp, Homo sapiens
aattcggcacgaggtggtgcttgtctgcagagtcatgacctctttccgcttggccctcatccagcttcagatttcttccatcaaatcagataacgtcactcgcgcttgtagcttcatccgggaggcagcaacgcaaggagccaaaatagtttctttgccggaatgctttaattctccatatggagcgaaatattttcctgaatatgcagagaaaattcctggtgaatccacacagaagctttctgaagtagcaaaggaatgcagcatatatctcattggaggtaacttcctacccacaaggctctatccctgaagaggatgctgggaaattatataacacctgtgctgtgtttgggcctgatggaactttactagcaaagtatagaaagatccatctgtttttgacattggatgttcctggaaaaattacatttcaagaatctaaaacattgagtccgggtgatagtttctccacatttgatactcgtatgtaccagataagtttgcctctttaggcaatctcagtagaagacaatcaggtatttatttcttttttgtctctctccgatttcttcacataacctaactgaaagaccataagtgagaaaggcagagaatcatcacagatctggaaagttcgggcttatttgagaactaaggatttgacacgattttgccctttgatttgattgtagcttcctgttacggcttccagagtatacctattaggctacagttgagtacctcccatctagataataagcattcaattagaatgaatttctcatctttactccgctgatgtaaatgatgtctttatgagatgaagtccaagtaggaatgagcttgtaaattatctctgtcctcaggtcctgtgttaatttatccctgtcagtgttttgtgatcattatgtcatggaggatttcccctgccacaccatgctgtagggagttaacttttcatttgtggcattttctgtttggaaacagcttactgcagagtgggtctgggcatctgctacgacatgcggtttgcagagcttgcacaaatctacgcacagagaggctgccagctgttggtatatccaggagcttttaatctgaccactggaccagcccattgggagttacttcagcgaagcccgggctgttgataatcaggtgtatgtggccacagcctctcctgcccgggatgacaaagcctcctatgttgcctggggacacagcaccgtggtgaacccttggggggaggttctagccaaagctggcacagaagaagcaatcgtgtattcagacatagacctgaagaagctggctgaaatacgccagcaaatccccgtttttagacagaagcgatcagacctctatgctgtggagatgaaaaagccctaaagtttatgtttctaatgtgtcacagaataggacgatatgattctacaacataatcaactccctattaaattcttt

SEQ ID NO: 404 - DNA, 572 bp, Homo sapiens
aaacttcctctaagtacagggggtaaaagaagaaggaaattaagaaaagcagcccatttggaagtacatagggaaggagatggttctagtaccacagataacacacaagagggagcagttcagaaccacggtacaagcacctctcacagcgttggcactgtcttcagagatctctggcatgctgctttctttttatcaggatcaaagaaagcaaagaattcaattgataaatcaactgaaactgacaatgggctatgtatcccttgatggggaagaagactgttaaaagcggtgaagatggaatacaaaaccatgaacctcagtgtgaaactattcgaccagaagagacagcctggaacacaggaacactgaggaatggtcctagcaaagatacccaaaggacaataacaaatgtctctgatgaagtctccagtgaggaaggtcctgaaacaggatactcattacgtcgtcatgtggacaggacttctgaaggtgttcttcggaatagaaagtcacaccattataagaaacattaccctaatgaggacgcccctaaatcgggtactagttgc

SEQ ID NO: 405 - DNA, 1171 bp, Homo sapiens
ttttttttttttttttttgaaaaataaatgattttattgcagggccaatgataggtagtcacaagggcatgaaatggcagatctcttgtctgaagcagagaaggcacactggcagactccatgtgtgtcaaacgctgtgcatgaatcaggtttttagaaggaaggtaggagaggaaaactactcactagcagaactgaactgctgtaaaataggttaaattctttgaaaagtgaaaaatgatagtagcaaaatcatgaagttgtatctgaaccagagccgtgatgtaaccaagtaagatggaagtttccatccagaggagttaattccgaacaagtcacagaaaggtgagagctgccggttccggcacgctgtcttctggagtgccagtgaccgggcaagaaatttgattctttcctttgatactcttgggaaagaacacatttcccaagcccctggagacccacagggtttggcactgtccgtgaggctgtgctcctgaggacggacgttcaggaggccgtggaggagcagcgctgcaggagcagggtgtggcagctgtcgcacactcgcaccggcttggggtaggagggcagggccagctcgttgctggagcaggtgttgcagaagatgtggccacagttccggcagtggtgctttctccgggaaatggagaactccttctcacactgcctacagtgtgtcgcttcgtcatctttcagccaggcgtggccctgaagaggaaaggacattctagaatcccctttctgtctaagcccctgatgagtgggtagctgcgttctggccacatccattgtccctcatagcacctgtttcctagtgaggcactgtttctccatcagatggggcctcacaggactgtcatcaaggggctctttccccgtctggccgcagccgggatttctgcatcctagctccgtgctccacttcttggcctctgcaggctgccctggggcctccaggcggtctccagcatctgctcactcaggcacactcccactttcaatcagttccctttggctgaagtaagcagagtgagcttctggtgcctgcaaccctagaccctgcctgagacactggccgaagtgctagctgaactggcaggcgcggaagaagggccaaatctgagtgagactaagacacttgttgacg

SEQ ID NO: 406 - DNA, 309 bp, Homo sapiens
ggagctgaggagatcaaatgcccggagctcgggagatcagatgacctggggtgtctggagccagtggtggcctcatctgcagcatcttcctctgtcctgcccaccacagagtccctgctggccccggggggcccctcctccgccacagggcccctgagcattgctgcgtttgtttctccagctcctccttcctgcagaagcagttcccagaggggcaatttctccagcctgcctggtcgcgtctccttcttcacctcggggtccgagaacctacaccgcgtggagaaggtccactggggcacccggttc

SEQ ID NO: 407 - DNA, 1136 bp, Homo sapiens
  misc_feature (1)...(1136): n = a,t,c or g
gaggtcgtggcagggagattcatcgaggtgccctgctcatgaggactacgacagtcaccgcaggttcagaaggctgcactccccgaaagtgcggcagaggtgtcaccgatgtcgtcatcaccagggaggaagcggagcggattcgcagcgtagctgaaaaggggctctccctgggaggatctgacggaggggcatccattctggacttgcactcaggggccctgtcctgtcgggaagcactttgtgaacctgtacagatacttcggggataaaatacagaacatcttctcagaggaggacttcccggttataccggaaggtgcggcagaaggtccagctcaccattgctgaggcttttggcatcancgcatcctcgctgcatctgaccaagcccaccttcttctcccgcataaacagcacggaagcgcggacggcncngaacgagtactggcatgcgcacgtggacaaggtgacctacggctccttcgactacacctcgctgctgtacctctccaactacctggaggacttcggcggagggcggttcatgttcatggaggagggtgccaacaagacggtggagccgagagctggatgtttttgtttccggatgatgtcttgtgggttccaagaagttaatggaccgagagccagtgaagctgctggtgcgaaggctggagtcaggtgtcctccggggactcaccacccgcccgagagggaagaagacacatgcgattctgggaagctgagagcattgctttattgttgattcccttggttgcccgtgctgagtcctgcttttaaggaagcaggtcgcgtctccttcttcacctcggggtccgagaacctacaccgcgtggagaaggtccactggggcacccgttacgccatcaccatcgccttcagctgcaaccccgaccatggcatcgaggacccagcgttcccgtagccagcagccgggccaaggtaacttcaggagggcccgtgtggaggcagccgcgccagtcgtgcacccacccccacgtccacccgctcctgttcacagagtgccttaggaattctctgattttgatttgctgacgtgttaatcttttcatctgtgagtaaatgaagggaaccagcaaaaaaaaaaaaaa

SEQ ID NO: 408 - DNA, 6707 bp, Homo sapiens
gagagagtaagttggagggaaaggcggctcaggacatcaaagatgaggagcctggagacttgggccgaccgaagcctgaatgtgagggttacgaccccaacgccctgtattgcatttgccgccagcctcacaacaacaggtttatgatttgctgtgaccgctgtgaagaatggtttcatggcgattgtgtgggcatttctgaggctcgagggaggcttttggaaaggaatggggaagactatatctgcccaaactgcaccattctgcaagtgcaggatgagactcattcagaaacggcagatcagcaggaagctaaatggagacctggagatgctgatggcaccgattgtacaagtataggaacaatagagcagaagtctagcgaagaccaagggataaagggtagaattgagaaagctgcaaatccaagtggcaagaagaaactcaagatcttccagcctggtcccgggcctgtccccacccagctgcctgtcctctggcaggtattggaaattgctgtgtctagaagcatctctgccttcacactcttgcactgcattagctgcaaggtgatagaggcgcctggtgcctcaaaatgtattggccccgggtgctgtcacgtggcgcagcccgactcggtgtactgcagtaatgactgtatcctcaaacacgccgcagcgacaatgaagtttctaagctcaggtaaagaacagaagccaaagcctaaagaaaagatgaagatgaagccagagaagcccagtcttccgaaatgcggtgctcaggcaggtattaaaatctcttctgtgcacaagagaccagctccagaaaaaaaagagaccacagtgaagaaggcagtggtggtccctgcgcggagtgaagcactcgggaaggaagcagcttgtgagagcagcacgccgtcgtggggagcgatcacaattacaatgcagtaaagccagaaaagactgctgctccctcgccgtcactgttgtataaatccacgaaggaagacaggaggtccgaggagaaagcggcagccacggcagcctcaaagaaaacagcccctccaggctccacggtgggcaagcagcctgcacctagaaacctcgtgccaaagaagtcttcttttgctagatggcagcagccacaccagccattaaaaagccaccctcaggtttcaagggcaccatccccaagaggccatggctctccgctaccccatcgagtggtgcttcagctgccaggcaggccggaccggcacctgcagcggcgacggctgcctccaagaagttccctggctccgctgctttggtgggagccgtaaggaagccagtggtaccttctgttccaatggcctcgccaaccccagggacccttggggctatgagtcgtgcaccatcgcagccaaattcacaaattcggcaaaatatcagacgctccttaaaagagattttgtggaaaagagtcaatgacagcgatgacttaatcatgacagaaaacgaagtaggaaaaattgccctccatattgagaaggagatgtttaacttgtttcaagttacagataatcgctacaagagtaaatatcgcagcatcatgttcaacctgaaggaccctaaaaatcagggactcttccatcgtgttctgcgtgaggaaatctctttggcgaaacttgtgagactgaagccagaagaacttgtatctaaagagctttccacgtggaaagagaggccagcgagatctgtgatggagtccagaactaaactgcacaatgaaagcaagaagacggcccccaggcaggaggccatccccgatctggaggactctccgccagtgtcggattcagaggaacagcaagagtcagcacgtgctgtccctgagaagagcacagcgccgcttctcgacgtcttcagcagcatgttgaaagacaccaccagtcagcaccgcgcacacctcttcgatctcaactgtaaaatttgcacaggccaggttccctccgcagaagatgagccagctccgaaaaaacaaaaattgtcagcttctgttaagaaagaagacttaaaatcaaagcatgacagctctgcacctgacccagctccggattcagctgatgaggtgatgccggaggctgtgcctgaagttgcctctgagccaggcctagaaagtgcttctcatccaaatgtggacagaacgtatttccctgggcctccaggagatggccatcccgagccctccccgctggaagacctgtccccctgcccagcctcctgtgggagcggggtggtcaccaccgtcacagtgtccggccgggaccccaggaccgctccaagcagttcatgcacagccgtggcctccgcagcatcccgcccagacagcacccacatggtggaagccagacaggatgtgccgaagcctgtcttgacttctgtgatggtgcccaagtccatactagctaagccatcctcatctcctgacccaagatacctgtcagttcctccgtcaccaaatatcagcacttcagaatcacgttcccctccagagggagacacgaccctctttttgtctcgactcagcaccatttggaaaggatttattaacatgcagagtgtggcaaaatttgtcactaaggcgtatcctgtctctgggtgttttgattacctcagtgaggatttgcctgacacaattcacattggtgggaggatcgcaccgaagacagtttgggattatgttggcaaactcaagtcttctgtgtctaaggagctctgtctgatccgcttccaccccgccacagaggaagaggaggtcgcctatatctctctctactcctatttcagcagccgtggccgctttggtgttgtagctaataacaacaggcacgtcaaggacctctacctgatcccgctgagcgcccaggaccctgttccatccaaactcttgccctttgagggaccaggtaagcgccggctttctgggtggaggtgaggcccacctgcacctgcacccctcctcccactgacatgccctgctgagtcctgaccagcccagggctctctgggagcaggagttaggagcacagacgcagcggttagcaataggattcatctttgagggcgtaggactgtggcacgagaagtacccctgattcacagcataaattgtcttaggagagttttttagagagggaaaaacccacagcctgcaaccagctcatcttggcctcaggtcagagaagactcagtgcccaggagcccaaggctcagccagaaagggaggtgacactcccagcggccctgctctttcctctagacagactcgggagccagcacacaccgggaagtggctccatcagggatcacttctctaacagggatggatttccaggagacttaacaataatgacatagaaaactatttctagaaataattattttaaaatctgcagctcaaattgtaatagttcattcatctttggcaagctattttgtgtttgcacgttccttggaaagtactgtatttaaacgattatttacaaatagcctaaaatacatctttgtcaagggttgagggtgattccaggggccacgtgctctgttagtgaccagctctttcatagccccttagaagaagctgatgtgacttcagttaggggttagtatctgatgcccaactgaagtgtctccgtggccatgcagtccccagaggattggtgttctctcaaagcgggtgtgtggatcacacagtgtcctctaaagtgcttcgtcataaaggcaggtgctgtctggaccctgtgcctcagtgccctctgtccctgtcaccaggcctcggcgggtgttcctgccatagctgtgcagggtgttcccacccacacccctcatgccgcaccctagctagctggggtcctgtaggggccactccacatcttgggcgggacttctgtcgccccaggcacagcccacgttcctactggagcccattcttcacagctggagtgggctcagcctatgcctgtgttgtggaattatatgtccataaagggattggttggtatcagtaatttcagggttaaatatttgctggcgtagtgcattaaattattttagtgccagataaatttttaaaagcaaagtgctttagtgtgtcccctcaaatcctacttgggataaagagatgccacctaatgggtggcagaaaggaccctggtagaggttcttggtgttgcttgtgaagagctctggccagctccacgtgaccagggagaggaaaagcccggccctcctggaggtgaagaccgagaagctggcctctccgcacctgtgaagacccactggtcagttgcaagtgcgacagtgtgtgcactcagtgcagacactgcagcacctcagcacctccctaccggggtggaaagagcactttttctttacagaaacatgattcttagatagcgagcctcccctttttaaaacaattgaagcgatatttcatcctttcttgagcttctctccctgctcatctccaaacttggagctgtcaggtgagcacaggttgtagggtgttgagcgagcccccggcgcatgccgggcaccgggttccccacactgggcagtgacggggcccagggaggccaccagaggagcggcgcctccattctccccacagcaagggctggctgtgcaggtgcagccccggggccagagggaaaggacaggtctcccagcacctcccggatggcaccgggacaaggagggcctgggctggggtcactcaccttgtctgctgagtgcgatggcacccaaccacccacactgtcagctccgcgaccagctgggggaacgtcacactcgcccaccaaggcacttgctgaggccacgacgccgcctgacggggacacacaaaagccccagggactttgatccacgataaagagcagaggcgtctgggtaaagtaacacagggcaagggactttagaaaagtaacagctagtgaaacctttccatacacttcagaaatgttttaacttaagacttcagtataatgttaacttctcctgatgtccttgttgacatgaatgcgtgtgcgtgaaatctcacacacttccatggtcactaaacagccttcaccccgggccaggccatcgggtactcggcccgcttcacgtactgattacttgacttggcgttttctagatataaacatgtacatgtgtgtcctggctttgtggtgtaaatgtgtagtgcgtgtgcatgtgcgcgcgtgtgtgtgtgtaaggctaggtcctggcacgtttcccctgtctcagcgggaccctgtcctcacggagatagcccagaagcccttggacagcacaggccacacctgagggtgctgatggtggtgactccacagagctgtggtcaggggtgagcgtgtgctgcgcagcttggagtcacgcccccagaagtgctgggtgagggtctgcaggacccagctccattccacagcctcagttctctgcggcacatgcagcacaggcctgaaggagacctggcgccccagccttgagctgcccgtctgcatcagggcactgatgtgggagcatcttcccctggggatgttaaggagaaggtcctgttgggggtagagattcacgcagaaaagagtgactgactcgtccatgtgcctcagtttataccacacaattgcaggtgtccatgccttccacacatggggacctagtgggttttgacagcgtggtgtccagtcctagccccctcagtgcttgctgttcacacttaagcaagtgaaggcctgaaggtgcccagctgtgccctcaggggaaacttaagtcacccgccctgtcagcacttggcccttgtcgggcagtgagagtggagctgcccccgcagcaccctcaggagccatgcagttcacagcagtagctggatctccctgaggacatttgtccttgcatatcttaatgatttgtccacagaaacaccgggttgtcttcctctgcccctctgccccgcagtgggggcactctctgtaactcagcatcacagtggggggcagctgggaggcctggttccaggtgaccttctccacctagatgttcaccccactcagttccagctttaccaacagggccccccgcaggaacttggggtcgcagagtcccggcctgtctcagggccttgttcatggaagggagatgagtcaggttgaaagctcatcgtgtagggttctgtgcggggcccttacaggactggaccgcagccaagatgccctgcctgttaaccatgccccagccccccgtcatttccgcgtgaagccgcaggccctcggagccttggtctgaaatgcctgtggagtaacctcggtccataaacatgggtgcacagtctgttctccccaagtacagggcaggaggaaacaccgccctctgtagctgctcgaatggaaagggctcttttctctgaggtctttatacattagaaagctcttctgggaagaatgtttgaatccatagtgtctttctgtattcacttttaattgctttctaaattagctgagaaattctgacttgaaatattgtcaggtaagcatttcttcagttttcatgtgtgtatgtaacagtagctttgcatggaaattgtaatcagagtcaaatacagtattgaatggaatgtactgccttctcctcctaaatcaataaacatctttcatggataaaaaa

SEQ ID NO: 409 - DNA, 601 bp, Homo sapiens
gtggcagaaacattttaattgtaaacagcaaggctctctgccaggcagcccagatgaacaggggtggcactgtgctggggtgaggtgctttctttgtgggaacgaaagcagacggcccaccctcgtctagccctgggcccctgtccccaaggccagctcgctgagcctgcgctcctcctggaagcggatgagggcatctctctggttgaccaaatccaccagcttcctcaggacctggtcctcagcctgccgatcagcagctgtctttaggttttcttcccggttcatgtagcctcgtagctcctggtccagctgccactgtttctcctccagattcaattcctgcaccgtgatcatgagctcggcctcctcagccaccaggctgtttttcttgtcaacgagctgtagcagctgtcctacccatagtttcttttgctgttctggggaactgctctggcgcctcaaggccagctccagcttcacgccctcggcctctagctccctcaaggcagcctcaatctcatttagtcgcctgtggatggtctgggccttgcagaacctctgtcgaccggccgggaatttagtagtagtaggcggctgc

SEQ ID NO: 410 - DNA, 1241 bp, Homo sapiens
gctggtgccttaactgagtcatcttttttccattccattcatgaaagcaacataagaaagccaagagtgaaaggggtaaaagatcacagtataaaggtcttcggtgtgtccttcaaagatttacacaacattgtcctaaagggaagtcacagcagcttagctgtttctcacagatcagagaggatggtggggcagccaggagtcatcagtaaacccaggtgagcagtgcaggactgaatgtcgctgtccacttgcaggtgggagtccatgtggagggtgctccttcttgtttctcattgggacggtgactgtgtatagtggaaagcacagagccaatgagggacaggatggctgtggtggagggaaaacagtgcagggctgctctgtctctctgtcctgtcccgttaggactggtgggccaccacaggtttcgcgaaggtgtggctggccattcctttcctcgcgttggggtttctctgtgtcagcgagcctcggtacactgatttccgatcaaaagaatcatcatctttaccttgacttttcagggaattactgaactttcttctcagaagatagggcacagccattgccttggcctcacttgaagggtctgcatttgggtcctctggtctcttgccaagtttcccagccactcgagggagaaatatcgggaggtttgacttcctccggggctttcccgagggcttcaccgtgagccctgcggccctcagggctgcaatcctggattcaatgtctgaaacctcgctctctgcctgctggacttctgaggccgtcactgccactctgtcctccagctctgacagctcctcatctgtggtcctgttgtactggacggggtccccagggtcctgggggcttttttcctgtctgttggtttgatgggcagccgtgcccacctccgggtccgcctgggggagaggcccaactgatttgtccctgttgggctctgccttttcgtccttggcctcctcctcctcggacgaggtctcctggtcactgacgttgctggtcagctcctccagcttcctcctcagggcctcctcctctacatcggcctccgtgcgcactccagcacctagaccctgaccctcagaagacgcccggcctctccgcttggaatggtgggaggccatcacgtgagcccggatgctttcctcatcagaggtgtccacatcggccaagtactgcaggggcagctgctcattcctgatgacattcga

SEQ ID NO: 411 - DNA, 237 bp, Homo sapiens
ggactttggtctgccaattcagttcgattatttcagaacatttttcttgccttagatttctaattctctcttttgggttgtacactttatggacatcaataatctttctgaactttttttagtctaacatatctctgatcttttcatctttttcctgtcactgagagtatctccagtcttttcctccatgccaatgattcacttttcatttggggttgtattcaagggaagaccact

SEQ ID NO: 412 - DNA, 670 bp, Homo sapiens
gcatgtaaaggagccagtcttcagatgattccagcctcagccttcaggccactcagctggtgccaaatagagtagggatgagctgtccccacagagacctgcccagtgcacattgtgagaaagttcaggccaggtcttcctcctatagtggagagtatggaagtggtggtggaaagcgattctctcattctggcaaccagttggacggccccatcaccgccctccgggtccgagtcaacacatactacatcgtaggtcttcaggtgcgctatggcaaggtgtggagcgactatgtgggtggtcgcaacggagacctggaggagatctttctgcaccctggggaatcagtgatccaggtttctgggaagtacaagtggtacctgaagaagctggtatttgtgacagacaagggccgctatctgtcttttgggaaagacagtggcacaagtttcaatgccgtccccttgcaccccaacaccgtgctccgcttcatcagtggccggtctggttctctcatcgatgccattggcctgcactgggatgtttaccccactagctgcagcagatgctgagcctcctctccttggcaggggcactgtgatgaggagtaagaactcccttatcactaacccccatccaaatggctcaataaaaaaatatggttaaggct

SEQ ID NO: 413 - DNA, 1254 bp, Homo sapiens
tccactttcatgagtttcctttactgtattctcaacttgggccttgcttcaagcaggcaaacatacattgaagaatgcactttggtactgtttaaataacaacacatcagcccacttgattccatgccatgtccttgctgacagaaacatccccaacagggcatgccctggtccaagtcctctgtctttgtcaaaatgctcttctgatgagttggagaggaggcagccagcagtggcagtccacaaggatccaggtaccttctccaatcctaaagcagacagcaggttgaataaaaccaatacacaacctattttctaggcaggaggggaaaaggcccttaggacaataatatttgtacaaagagttgagagtaaacaaacagtatatcaggttcaaaaaaaaaaaaactattcgttggcatttaaatttttttcccttgcatagtatctattctctcactaggacttttaagtgctctgctggaggctcagcgttggtaataccatgtttgatgcaaacttgaacccaatgctctcattggtggcacagctttggagggtggtggccccaagaaggggcaatctgcctgctgctatattaatctggaaccagggccaacagctactcttgaactatggtatttgaagagcgagttcattgcctgttttaccttaaatgacaggaaaggaagatgaacaaaccttgctttgccttggcttcaaactagttcttgatttaagacaccagaaagggagagagggagtctgcttagagtttgaggttgcctctcacaagatgacagttaaaagttgccaccttacttaaaaggcattaaggaggcatttactcacaaaggagagagagtaaatttttttcttaagaggaaaaaaatactgataatacatagaacaatctgcacatccagtcttggcactttttccaatttgactgatctctaaactggtgacccttgcatatatcttagtctcttttctacaatcttcttcagaaagctacagcagctaacaatcatgtataaagatgcatttcctagatcatcttcagaagaaaatctcttcagcactttccctagaatctgtctcctgaccaccccgccccagacctgctttctcttttgagaattcataaccaggtatgtttagataccagttcaaaagaccactctatgggttgatgaggaaaaggctgcctgaggacaatttaagaccataatgagtttccaatttttaaag

SEQ ID NO: 414 - DNA, 702 bp, Homo sapiens
gctccgggtgtcccgagattgtcctgcgccggtgttcccacgtgcggcctgaacgtgagcgcataatgttatgaggagatgggagcactagtgattcgcggtatcaggaatttcaacctagagaaccgagcggaacgggaaatcagcaagatgaagccctctgtcgctcccagacacccctctaccaacagcctcctgcgagagcagattagtctctatccagaagttaaaggagagattgctcgtaaagatgaaaagctgctgtcgtttctaaaagatgtgtatgttgattccaaagatcctgtgtcttccttgcaggtaaaagctgctgaaacatgtcaagagccgaaggaattcagattgccgaaagaccatcattttgatatgataaatattaagagcattcccaaaggcaaaatttccattgtagaagcattgacacttctcaataatcataagcttttcccagaaacctggactgctgagaaaataatgcaagaataccagctagaacagaaagatgtgaattctcttcttaaatattttgttacttttgaagtcgaaatcttccctcctgaagacaagaaagcaatacgatcaaaatgaagaaaatcacagaaatttcctatgtgtactcctcatccctcctgctgtatattttctcattttttgcgtaataaattatgttaattaccaaaaaat

SEQ ID NO: 415 - DNA, 460 bp, Homo sapiens
  misc_feature (1)...(460): n = a,t,c or g
gctgctataaaaattcttacataagtctttttgtgcacaggtggttttatttctcttaggaaatacctaggagtanatttattgggtcanaaggtaagtgaatgtgttatgagaaactgctgagcctttttccaaagtggttgtaccattttatacttcatcngcagtgtatgggagttccanttgctccacatcctaccaacttttggtgttgtcagtcttttacatntagctgttgggtgtgcantggtatcccagtnnggctttaatttgcntngctctgnggactancgnngcgccncancttgntncntgcngtantgnncantggcntatatccccttgnnagnnnatnncncnnttncagccgatttnaaanattcgcngctttagnnttcnggntcccngncccggttnanattcagncannnnnggnccntgtgtaggnnccngtnctgtg

SEQ ID NO: 416 - DNA, 460 bp, Homo sapiens
ttaacaatgcagtatttattttatacagctgacctgggcacattgtgaagtaagctataaaaattccaaataattatctctaaagcaaatcctttgttagttacatggctttacatattaattactctggaaagtttttgaactctgtttagtagcagatctcctttcttgatagtttcttggtactgccagttcttgctatcaggtctataaataaattcaagaaaaaatgaattatttaccagtcacattattccatgacaatagttgacctacttttaaaatttaggaatgccccttattctgagaaatgagagtacctgttggtttctactatttcattcactttatctattttgcagtgtagtctcccggcagcaataaacctggacagttccctaatttagagacaaaaaataacagaaattagccttaatagaaaattcttagaaaatgcaac

SEQ ID NO: 417 - DNA, 673 bp, Homo sapiens
gagttagtgaaaatatatatttgccaccagaattcactgggaccccagagccagcagatgtggttggaaagatcctctgctctgtcctctggcctcctgctgcatctgggccatcagttggactggaggagctggacgggcacatagttttcctcagaggcaccatcctcatcctccttgggaggggaagccaggacagggttctcgagagttcctgtaaacagatggcaagcactgtagcttaacccttgagtgtgtccccaggaagcaggcaccagggaaacggggccacagtcatgaaaacacgtcatgccgtggggacagcctcagcgatcctgggaggcccagcaatccttctccctgcttccctcactcccacaagcatttcccaatcccctgcccataatcaggggcttccccctgcccctgcccaccccccaggagcttaaagtgccctggaggtgacagacttgtgtgtcagagatcagaacacctgagacatgctgggggagctcagaggagagaggggacctgtcctgcaggggcggtggcagatttggacatccagaggggaggaagagcacttccgacagagacgaatccagagatgaaccaaggaaagcaaagaacaaggagtactgcagacatgtggatggaggtgtggggagtgagt

SEQ ID NO: 418 - DNA, 431 bp, Homo sapiens
  misc_feature (1)...(431): n = a,t,c or g
gattgatcagtgaattcagttggtgacaatatgatccattgtgaaatttaccattactttttctcctgatggggtttttaggattgatgatttttgcctatttatgtcatttcttttgttcttcttagttgaaatttttctttaaaggagtagctttcagtactttggtccctttgcctaccttgaaatacagtttgacaggccagtcaaggaaaatgctttgtaaatttcctgttannnnnnnnnnnnnnnnnnnnnnnnnnnnnnnnnnnnnnnnnnnnnnnnnnnnnnnnnnnnnntcanattgtggaatatttatagantacttttcaagngagtancccgaanatctgaaatctgaaatgctcctttgaggggcatgncattgntcaatagtgncntantttggancntttcnnantnngggtctt

SEQ ID NO: 419 - DNA, 1085 bp, Homo sapiens
attacaggctctttctttttaaacataaaagttttaaattggtattaactctgtactctgccctagattgttttagcttctgttctgtaatcatgagtttggttggagatattctccatagatgatcttctactgaaatgcctaaagaagtcacaggctggcttctgttttattcagggatttttttaaaaagtcaatcagaaaagggatactggagcttcttcatgtatgtaacagcatattaaactggagacagtgatgaatcagctacaaaggtaatattgtattaaaatcatgtttaagatagctgcttttatgtgtattttatattgcatgcttttgtaaaaacatgctgggtgatgaaagattagttttagagagaaaatgttcatctgtgcagaggatgcattttcttccattaattctggaaaaaacgttcacagttatatatatggtattttgcaaaaggactattaatagaaccttttgagatgaattaatgtaagaatattttttaaataggcttactgtcaaattgcaactttttttttagatacagagtggaaaacagtgctaagtcatttggcacctccttacaaatatttttcatggtcacatttattaaatgttactacatttctgaatttttgaaaaatgtattttatcattaaatggcattattttaaagggtgaaaaactgacacagtcaattcagaaaatggactgaagtctgaataaggtcattgcatttaaaaagcatataactgtacttgactgatgagggaggtgttactttcattgtatataggtcttatttcataaacagatatcctgtatcaaataaaagtatttgttatatatttgaagttatgcatggaaaggagtgtgtttaaattgttacaaacaataatgcgtcattaaaggccatgctgatcttgcataactataagtactatgaatgaatttggttggttttggtgttgtacagctcacatgtttacacactcagtgccctaatttcccctgagggaatcgctttttaagtgatccttacagtggtgttttatgttactttattacagagc

SEQ ID NO: 420 - DNA, 211 bp, Homo sapiens
gacattctctctcagtcagagaccctggcgtcgcaagacctcagtggggacttcaagaagccagctctgccggtgtccccagcggcgcggagtaaggccccggccagcagttcttcaaaccctgaggaggtacagaaggaagggcccactgcgttgcaggacctccaatttcttgggagcccgacatccctcctcctcaggcggacttcgg

SEQ ID NO: 421 - DNA, 1986 bp, Homo sapiens
gaattcccttgcggcctcaggaattttttttttttttttttttttcttgtgaatttgtttttattgggaacacgggcacagggtgggaaatgtcaccttgggctatggtatgccccacctcccagagaatgtccatttgcattctaatcttcctgggatgctttatggaactttttcttcttcttggagctgctcttgccaaccgcctcttcaggcccactgctgaccggctcctctttggagaatttcctctttttcttggaccgacttctgtggcctgcctcctcagggtcattaactgtttcctccttgggtgtagacttcttcctcttgggaatactggtgctgccagcggtctcttcaagatcgctactcatcaactcctccttggaaaaagatttctttttcttgggtttggagaaagagatagatgggtcttccaatccaatctcctgaggaacctcctgggggcttttgctttttcttctttttgggtttttcactcatctcctcacactcctctggagtactactgctgttttctgaagacgcgagggcaagtgcagccagccgtttcttttccttctttaagcgtttcttctcctgtttctccagcttcctagtaatctcagcagccgcttcctctgcctgaaccattgcttccttcatgacatccagattctttcgtggtatctctccagtctcatagaaggacagtcgctcttcaacttgttctcgaagcttctccccgaatacactcgtgggcacctcagagaagcaatcgattcgtgaggcaatactgcatttgtttgccaggtatcgggagatgcggcctttgttcttggcagctgctcggccaatgaaggtggagtggaaaatgagtccatattttggggtgttaccccttgtcttcagggctctgaacagggccttttcagccccaaggatctgcactgtggatgctggatacttggccaggttggtgaggctgccagcatgtgcgatgagacgtgcacctaccgcttccccaattagggctgacaggctgggggctacttggctcatcttggagcgcaggtaagtgtgtaggctctggcggtattcagataaagacaccacacgactggagaagctctcgatgtttatcaagtcaatggcagatatgtccatgcccatggaggaccgtgaggcatccagaatagccttagccttggccccatccattgtcagctcctccagcttctccagcttgtcctcattcaagtctccttcggtttccaataaactgggcaagacggcagtatgtggcattgtcgttgatgatcttcaccagctccggaaagtgatacccgtaccactccctgacacgcatagagaaggtattgatgtccttatccacgctggtccaggaggctaatggactggatgatcatattgtccacccggttcacattaaacttaactttggcacgggaatagctgtgtcccagccccagctgtgctttacaagctgacagatcggtcagacccttcaccagattgtggaagtgcagacgaactcctcgcaggatctcagctatgactcctccagtctggcagttgtaccctaactcctcctgtattgcggcaccaatcttgggatccccaactcccaagagtactttcttctttttggacggcaggtgggtctccaagagcaggcggaggtcctcatgaacaaccccttcagacacggcgttggcattttccaaggcaacctgggatgaggcaaagggacaaaaggccaccagacgaacgatgctgtggaatttgcccaggttgagcacggactcctccacctgcggctgcagcagactgatctcctccacttccttcagcgccagcagcgcgtagccgaccgcgtgctcaaacagcacgtgcaacagcaccatggcgccagctgccgggttcggctcgcaatgcggctagcgcgctccggcgcgcggc

SEQ ID NO: 422 - DNA, 1373 bp, Homo sapiens
atgaatttcttttcatgctaccttcaatcttcaactaaagatttctaaaaggggtaagaaatgaggcagtagtttattaaatacatagaagtacacagctattatatgctgtggctttgagaagttaacttttgtggaatatgaaaccaaaggaagaatttccatgtagataaattaagaatagggaaaaacatctacctaaaagatggttgtccctaaaaaactggaaacatctgaaatgctctatttatgttattattcctgggagcttatagcccattatttttactttttttttttaattcagaagactagaacagaacttaaattttacaaacttttgatcataatgcttttgcccatactgtctcgtccttagccccagtgacatgtgctgatcctcctgcctttagttctaaatggttctgaatagctttaaaagatgaataagaaaaaagatcaagctcttttgaggctagagggctcatatggagatctaaaaccctccatgttcatttccagacttggtcaggcacatacatagtaaattataatcaatcatgggaattacataaggataatgaggcccaactgaaaccaagtttcagtctgccttacctttacccgtccttgagaacagcggtccaggagaatcaggcagtctgtggcctcctgtagcagggcgctcttaacagactcaggtgtaaggtttggatcccttgctacatcacaaatcagtttcaagagggccttcagtaagaccacaagtctgcaggaaactctggaatcaggaagaaaagctatgttcatactctaaatctggatattaaaattggaagagacttcaaagactgtcaagtggaaagctatcatttcctaaattaaggaacttaggtcaaagttaaatgaaaaagacctaaaaacagaaccaaagacagcctctagatttcttaccctcaagtctcctgttaggcatactgcctatacacacagacacaccctctgccacactgctctcttccttccagaagcttggttctactgtaagcaacagctccttcatgggctgagaaggggaaaccaggatctccccaaccaagggcctatacttttatttttcaactctattaactgaactatgcttggagagagccctgaatcctttaactttaatgccatcttaggcctggaagttagagtgagggaaatgagcttggcttctgggactgtgtcaagttgaattttctgtcatttaatttcagatcctagctcatcatcagtggagtccagcctacttacttggtactaataaacctttcctaaaagttttcatcgccttgggtaaagctccagaaatggacaatgctagtgac

SEQ ID NO: 423 - DNA, 495 bp, Homo sapiens
  misc_feature (1)...(495): n = a,t,c or g
aggnnnnntnnnctttgactangatccattnnnnnnnnnnnnnnnnnnnnnnnnnnnnnnnnnnnnnnnnnnnnnnnnnnnnnnnnnnnnnnnnnnnggcacgagnnnnnnnnnnnnnnnnnnnnnnnnnnnnnnnnnnnnnnnnnnnnnnnnnnnnnnnnnnnnnnnnnnnnnnnnnnnnnnnnnnnnnnnnnnnnnnnnnnnnnnnnnnnnnnnnnntaaatcagattagagacctgcaaagttaaaggacagtctacaagaccactctcacttttgacatgaacggcagagtttgggggtgcccaaattcaccctcagtttcaataaattgctagaagaactcacagaacttactgaaagctgttatactcaccattacagtttattacggtgaaaggatacagagttaaatcagccaagggaagagatgcatggggaaagtccagaaaagttctactcacgaagcttccagtggtcttctcccttgggagc

SEQ ID NO: 424 - DNA, 1212 bp, Homo sapiens
tacaagtataagtgttaccttacatggaaacgaagaaacaaaattcataaatttaaattcataaatttagctgaaagatactgattcaatttgtatacagtgaatataaatgagacgacagcaaaattttcatgaaatgtaaaatatttttatagtttgttcatactatatgaggttctattttaaatgactttctggattttaaaaaatttctttaaatacaatcatttttgtaatatttattttatgcttatgatctagataattgcagaatatcattttatctgactctgtcttcataagagagctgtggccgaattttgaacatctgttatagggagtgatcaaattagaaggcaatgtggaaaaacaattctgggaaagatttctttatatgaagtccctgccactagccagccatcctaattgatgaaagttatctgttcacaggcctgcagtgatggtgaggaatgttctgaaatttgcgaaggcatttgagtagtgaaatgtaagcacaaaacctcctggaacccagagtgtggtatacacagggaataaaccttatgacatttatgtatttttaaaaaactttgtatcgttataaaaaggctagtcattctttcaggagaacatctaggatcatagatgaaaaatcaagccccgatttagaactgtcttctccaggatggtctctaaggaaatttacatttggttctttcctactcagaactactcagaaacaactatatatttcaggttatttgagcacagtgaaagcagagtactatggttgtccaacacaggcctctcagatacaaggggaacacaattacatattgggctagattttgccccagttcaaaatagtatttgttatcaacttactttgttacttgtatcatgaattttaaaaccctaccactttaagaagacagggatgggttattcttttttggcaggtaggctatataactatgtgattttgaaatttaactgctctggattagggagcagtgaatcaaggcagacttatgaaatctgtattatatttgtaacagaatataggaaatttaacataattgatgagctcaaatcctgaaaaatgaaagaatccaaattatttcagaattatctaggttaaatattgatgtattatgatggttgcaaagtttttttgtgtgtccaataaacacattgtaaaaaaaaaaaaaa

SEQ ID NO: 425 - DNA, 486 bp, Homo sapiens
gatctcagtttttccatcaaaattataatatgctcatgaaaataatattaatttgccttccctttgcaaacaccggcagttgaaaggaaaaggacggggaatgtgatggaaaagagaccgcctggaataaatgtccccctatgattctttaaggcagtggttctcgagcttgaattttcattaggaaattctgtgaggagcttgtaaccagatttctgggtctgccacatgcacctatctcttgctgaattgctttaatagaataatgagagcaagtttgtctaactaataccaacctgacaacttgaataacaataaatgcaatttggtacataaattataatgctgcaaaagtttgtcattcacctcagtggagtgacttgatattaggtggtaaccgtagatgatggttaatatgaaaatggacaggaaagaagcattttctgaaagttatattcttttgaaccacgttctaaaccaagtttt

SEQ ID NO: 426 - DNA, 621 bp, Homo sapiens
gccgctggcacctttactctcgccggccgcgcgaacccgtttgagctcggtatcctagtgcacacgccttgcaagcgacggcgccatgagtctgacttccagttccagcgtacgagttgaatggatcgcagcagttaccattgctgctgggacagctgcaattggttatctagcttacaaaagattttatgttaaagatcatcgaaataaagctatgataaaccttcacatccagaaagacaaccccaagatagtacatgcttttgacatggaggatttgggagataaagctgtgtactgccgttgttggaggtccaaaaagttcccattctgtgatggggctcacacaaaacataacgaagagactggagacaatgtgggccctctgatcatcaagaaaaaagaaacttaaatggacacttttgatgctgcaaatcagcttgtcgtgaagttacctgattgtttaattagaatgactaccacctctgtctgattcaccttcgctggattctaaatgtggtatattgcaaactgcagctttcacatttatggcatttgtcttgttgaaacatcgtggtgcacatttgtttaaacaaaaaaaaaaaaaaaaaggaaaaacca

SEQ ID NO: 427 - DNA, 657 bp, Homo sapiens
  misc_feature (1)...(657): n = a,t,c or g
ggaagcaggcccaggctggcaggcatctcggcttgcaggaggccaactgctgagacctcttctccatcccccttattcagtggaagatgacgggggatctgaggctgtgtctctgccttgtctttagaggacttcagcgtccaagactggggcccacccttctcaccagcactaaatgcactaacaaggactccagacctgcagccccagacccgccgtagtataagcctaacaagcaacacgtagcaccttagtctttgttccaggagagctgagcaagctggtgaaacccactctccttcctttaaacaccgtttcaaccaacctctccctggagccaacctgtaaaaagtgggttgattgctgacagcatggtcttccctccctgcatttcagacataccagttactgaaagcaaatcagttttaagtgatttctcagtgctgaaaagcctgtccaggtttccttccctttcccaagcctctctctgtaatactccctttgggcgaagctaacatnggtgcctccccgaccttgctgactaggcacatgggacgcaaaggagggagggaagcaagccttgcctggcgagttgtcatgtggttggtggtgactgttttattttttttaataaaaataaagatgagagaaattaaa

SEQ ID NO: 428 - DNA, 193 bp, Homo sapiens
tgtttttgtattacatattcatgttaagaaccccgtcttcccttaaaatacattaaaattatgacatttttgctttgtgattgaatttcaaatagcagtatggtatccttttatctagttaatatatgaaagtggcttgaatatagtcaaatccattttaggtactctactgactttttccttcacttgccaa

SEQ ID NO: 429 - DNA, 841 bp, Homo sapiens
ttttttttttttttaaaacccgaaggcattaaaatttattaaatgatgcaataacaacagaattctttatttacaatagcattatttaacatcaaataagcaaatagcatcagcaaagcaatattaacttgcataaatgtatttaaaatttctctgaatatatctacctttgcataaactgctcacactagaaatacaaacatcaatgcaggtgaacaaagtgatgttcagagtcaactccattttgaaaataaatcacaacctgaaacactgtaagctttctcctgaagaaccatagttaatatattgcttaattttacccttgtataatcttttcatatacacacatctcagatgcaacttcatgaggaactgtacaaataaaactcacaaatgacaaaggaaaaaaatgacagttaaatgtctgaagaaatgtatcatcatcactattcaaacaacataaaggttaagtgatgatgcacttattcaaaaattgtacacaattcactatacaaatataatacatcggacagctatgtaggaatatacaagacttaaaaacagatctaaggcattatgcctagattttagcattttgaggttcttgcacatagcttttacctgtagtaagaaacttaaaagattttgctttagtctataaagaaacaccagggagaaaattctaattaaaatcgaagccactacagtaattttcttttgtgcagaggatgctttgctcttaggcagcataccaccatacaaacactagaaaattttaaattcacaccaacaattaatggcttaagttgcatttcaaaactgattgtgtatctttgggttc

SEQ ID NO: 430 - DNA, 1345 bp, Homo sapiens
ggattttaatgtatgatggtctttatttacaactttattggcaaaaaagaaaagggaaacttttaaacaatttaacacagggcattgtagctgatcctgtcagataaagaagttccattttaaatgtccatctaattgtccaaagatacacaatactgaatctgcatacgcagtttcctttatgaagtacagtgctcatgttttaggcagtcttctaaacatacaaatacagaggaaattaaatcactcattaaaaactgtgtcaaatgaagggtattttaaatataagtttgttgtttctggtaataggcacatgccccaaatgaaaaccaaaagatggaaaggcagatacacttcttacttgggtggacagttacaacatcaatcattttctgcaatgaccattatattttcaatttatcatgaactactctgaacttactatgagatgtagccaaagtcagaagagaagatgtagggacaagatgccttttttgcaggaggttaactcctccagaatcagcataggaaataaacatcctgttgattctaggtggaaagaaattaatgtagtcaatttcaactcgtgctgagctgacttaattttttcagcgatgtgtttggtgtcattcttctaaatcaagtgtatttaattcttcttctagttcatcccaaatcctctcccagggaaaagattttcatcaacaggaacagcatcaatggctccattttccgttccctccctctcgttgtcctcttccaagtcacttctttcaccattttcagccctacctccagaagcttcacttaatttgttttcatctttatctgaagtatatgtgctgaatctttcaagactggctacagtaatacctgtttcatctacatctcttgggatgtacaggcttaaatctatgtcatttacactcactgaatcatcaacctcatcaccacctgttccctggggtgtagcgggtatcatctgcttcctcatcatcatcattgaccagttcaggacgaaattcaaacacttcacgaccactgatcactagtgctttccctgctttgaagtcagctttccttctttccatatcttgttcaagtttatcaatcttttcttgtcttttccttttcttccaggcaagaaaagattctagagtgattttggtaacatttggacctagggcagaacgctctctctcaattagatcttctaatgaaatttcatcttctttctcttctttctttttatcttttttcaacacaaatccaggaggaagtgcatgacgatacatgcaaatatcacccctccagggcatacccaaaaccagccatacttgttgtt

SEQ ID NO: 431 - DNA, 638 bp, Homo sapiens
gcctttgtagtgggttgaatctaggaaaagggtcttgtccaatataattaaggatctcaagatgaagcatcctgtatcgtcacgggtacgtcctaaatccaatgacaagtgttcttataaaagacaagagaaggcacaaagacaaagaaaaagccacgtgaaacacaatagaaggcataaataaaaagccacgtgaaagcaaaggcagaaactagagcaatgcagctacaaagaatgctgacagctaccaaaagctgaaaaagacaagaaaccattctcctctcttgtcttcagagggattgtggccctgccaacaccttgattttgtacttctgtcctccagaaccatgacagaatgaatttctgttattttaagccaagtaggtggtacagcagccacgggaaactaatatatgtggtttgctttatatttatgttggacagcattctcttagatcctacaaccaattcacagaaaacacagggctgaggaaccagttaaacttcaccagggaatacagttcacaaaatttagcccatgggaaattccacagagtaaactatctaatctccacaaataaattgaaatggaagccttctatggatgaaaagagacttagacatatcaaccagtcaca

SEQ ID NO: 432 - DNA, 1122 bp, Homo sapiens
  misc_feature (1)...(1122): n = a,t,c or g
caaacacatataattcctccaagaaatttcccagatgtcctcatgctgcataggggcaggagcctgaaaagctaatttgagaagataataagtaggatttttgttttgttttgcattttgcagtacaaaggagaaatgattagaacttaggaagtgccagtgggttggtgaacatgccatcagtaaaagccctggaaacaaggtcatactagagattggttgtgccttgtcacaactgcaaacaatacctgagtggagtattcaaaaacttgcttagaaagaaaactctaggaacagatggcttcactgaagttattccaaatatttaagaaataataccaggcttttataaacttttctagaagaaaaaagatggaacttttccaattcagtttttgaggccagtacaaccttgataacaaaacctaaaaaaaaaacaacaaaaaaacccataaagctatagaccaaagtctcatagatttagatgcaaaatcctaaaattgaaaaaaaaagtctagtcatatccataaactgtatcatcaccaagagatgtttattagggcaatcaaaagatttattattttaaaaaaatcagtgtggacttccattcctctttcttttgattcccccctttgacttttcatgtatctctcctgccttccttccccagagtggaggagttagacctgcattgtgggatgagaggagttgtggctatgtgtctgctggcaccaagagggctgagggtgaggtgtggaagggacagggggaggagatgggcagcattgttaagagattggtaccactgagcaaatatgttgagaatgatgatggcaaggtttctccctgttagagaaggtatttgtagaaataggaatgaggagagctagaaaacctggagtgtgggattagaatagaactcatatcttttaaatacataggaacaatagagaaattgttgggtgtgcccatatacatatattttgtgattcattctaccgagaggacataaatgcagtcacagctcagtaacagtaaacacaccaactgccaagttattatttcctaaatactatccacaaaaaaggggaccagggatgattcctagtcggagantgggag

SEQ ID NO: 433 - DNA, 215 bp, Homo sapiens
  misc_feature (1)...(215): n = a,t,c or g
gaatcatatttttgctggtggagggtcttgtgttagtatnnnnnnnnnnnnnnnnnnnnnnnnnnnnnnnnnnnnnnnnnnnnnnnnnnnnnnnnnnnnnnnnnnnnnnnnnnnnactttcaactcttccttttatgaaagatatctctgagcatgtgatgctgtttaatagcattttactcaccagtagaacttctttgaaaatctttgaaaac

SEQ ID NO: 434 - DNA, 962 bp, Homo sapiens
  misc_feature (1)...(962): n = a,t,c or g
tttttttttaatatcacaatgtgtaatgccaccatttattacttctttactacattaaaaaagtgaccctgtttctagagaccaaacagcaccacagaggcattcttggaagagaattccttttgttcccaagcctttgtgactgactttaaatcctctcacctgcagaacagagatggcttcaaagtggggagtgagggagtgagcgaggaccctggggctgagacctgtttttcttccatttctgctgtggcttcccacagctccctgggttccacaccagggccctgctctggccgcagagaaatggattcccaggccacagagctgtcaggcctttgactttgcagagaccaagcaccccagaggctgtgcgacanggctagtccctggtgggccnggtctggggcatggggggcagggagactgggagatggggagggcgtggagaatccggggggtcctggatactgacaaaatggctcaggtctgagctctggctgccccactgattgtgtggcttggccaaggtgcaagtctctcggcctgcttcctctgaaacaggagtggcaatcctggccgacagccctggtggcaccccctccccactgaaggcagagaacatgtgggaaatagtctaactcaggccctgggctgggctggcccgacccttctcctatgcctcccagggtactgtgtctcaaagaacctcttccctcctggaaccattttccactcctctttctttcaaacaagtcccccagcctgactcacaacccctgcttgctaccctcagccggcagaggcccctcatcagtggtaaagacagttcatctcagctgcctgccagcctatggtcttcacagcaccagaaggaaaatgcaaggcaggcaccagctcaccctgggctcaggcctgacgacagcggcccctgcctcagcccaccggggccagtcctcacc

SEQ ID NO: 435 - DNA, 800 bp, Homo sapiens
  misc_feature (1)...(800): n = a,t,c or g
ggcgcaaacttagcctgtctgaagggaaggtgaagaagaacatgggagaaggaaagaagagggtgtcttcaggctcttcagagagaggctccaaatcccctctgaaaagagcccaagagcaaagtccccggaagcggggtcggcccccaaaggatgagaaggatctcaccatcccggagtctagtaccgtgaaggggatgatggccggaccgatggccgcgtttaaatggcagccnaaccgcaagcgagcctgttaaagatgcagatcctcatttccatcatttcctgctaagccaaacagagaagccagctgtctgttaccaggcaatcacgaagaagttgaaaatatgtgaagaggaaactggctccacctccatccaggcagctgacagcacagccgtgaatggcagcatcacacccacagacaaaaagataggatttttgggccttggtctcatgggaagtggaatcgtctccaacttgctaaaaatgggtcacacagtgactgtctggaaccgcactgcagagaaatgtgatttgttcatccaggagggggcccgtctgggaagaacccccgctgaagtcgtctcaacctgcgacatcactttcgcctgcgtgtcggatcccaaggcggccaaggacctggtgctgggccccagtggtgtgctgcaagggatccgccctgggaagtgctacgtggacatgtcaacagtggacgcttgacaccgtcacttgagcttggcccaggtgattgtntccagggggggggcgcttttctggaagcccccgtcttcagggga

SEQ ID NO: 436 - DNA, 509 bp, Homo sapiens
  misc_feature (1)...(509): n = a,t,c or g
cggaggcggaggcagaggtggaggcgctttgaaagaagcttaagtgaaaatgatacatgttagaagacatgaaacaaggagaaattctaaagagtcacgtgcctgagcagaaatctcgagttgattggaggcgaactaaaagaagtagtatctcacaattacttgatagtgatgaagagcttgatagtgaagaatttgatagtgatgaagagcttgatagtgatgaaagttttgaaaatgatgaagagcttgatagtaacaagggacctgattgtaataaaacaccaggaagctgaaagagagctcaacttaagtaaaattcaaagtgaaggaaatgactgtaagtgtctcattaactctggcaacggttcaacatatgaagaagaaacgaacaaaatcaatcataggaatattgacttacaagatcaggaaaaacatttaagtcaagaggataatgatctcaacaaacaaactggacaaataatagaggatgtcangaaaaactttta

SEQ ID NO: 437 - DNA, 1845 bp, Homo sapiens
ttttttttttttttctctggtaaaacaatttattaccaaagcacagaggagtcaagggtaggaggggtcccccctcgtgggccggcccaaccccatccagctttgctaggacactggctgaagggcaggccaccaagatggggaacttcacattcacgggagggaaactggggccctccggaggctaatcaggactgatgagtatcctgaaaccagtggcaggaatgcacattccagggcttgttctagaagcttatctgtgattaaacagcaggccttgagtcacattgcttcatttttttttctgttgcacactgcaaatggaaagttctggattccacctagggcaccatcgggaggccaatggggtcatatggagacacacgcagatcctgcagcaaagcttctaggttgttcctcagcatggcgtagggcggcttctcctcatacgtgagggccatcaccaccttcaggtacttctgcagggtctctgagggcctgatccagtgaccgcaggtcccacggaagggccccggcttatcaacaaacttctgtttttgcttcatgatgtcctcagtgttgggaaggcaatttgtccatggcagaaacccgtagagccacttcagcatgcagtagcccaggctctggaggtcgctgccgcgggagggcccgcatcccttgtgcaggtccatgctaatgaactcaaggtccccctcgtgagggctcctgctgccttccacgtaggccacgtgtttgccacttgggcaatagcggaaggcgaagccatagcctgccaaagtcacctgactctggtcctctggatccacaaagatattttcagctgtcacatttccatgaacatactcattctcatggaggaactccagggcatccagcagccggcaggccacctgcagcacagacctctctgacagcacatgctttgggcttgacatccagggccgactgaaggttccttcccccaggctgggtaacaccaagaacctgtatttgtccttggtgaacaccgaaacccatgcaggtagggatggccagcagtggggtcgagtacagcttcttccacttgttgacttgcagaggcttggcggcccgctggaagaagttctgctcattgaacaagcgcccatccttggcatccagtttgagtgagaacttttgcttctgtggtcctgagtcacaggtgagggtggaggtgggtgcagcttcatagagaatgccctggttgtccctggtctggaaggacttcagcttccactgtcgcccactcttgtctgtcagcactgtccctgtgggcaaagcttcaagtgaggtggtcactcggctccgcttcagcgtctgagggctctgcctggtcttctgagggctacagctggtcttctgagggctacccctggtcacctgagggctcttcctggtcttctgagggctgcttttgggggttgggggtctgctcccggagcctttggatctctcagaggaactcagagtatcttcagactcagaactgtcaccatctgagaagagggataatcggggagaggtgacggtgctggaccatttcactttcttaggagaggtttcaaaactggagttcagccctctctttgagccttggaaggatgacacatgtggattgacaaaggtctgggaccctacatgctcctctacaggcaaagaatttccacagtaggggcagaatttgaatgccgcttggatacttttgccacagtctggacagaaggagatcatgctttatgaggtcacggtctggcccttggatttactgggttggaaactccatcttgacagcgaccttctcagttg

SEQ ID NO: 438 - DNA, 673 bp, Homo sapiens
ttcccgagctggcggggtccgtggtgcgggatcgagattgcgggctatggcgccgaagtttttcgtcagtactgggatatccccgatggcaccgattgccaccgcaaagcctacagcaccaccagtattgccagcgtcgctgtaagggactgaaggttggagaagcatattaactgctccagggtcatttgaagctgggctgcaagtccaggtcggctgacctgctcctaggggtctctgaagcaaggaatgttcccatcaggcctgaccgccgctgcctacagagtcacactcaatcctccgggcaccttccttgaaggagtggctaaggttggacaatacacgttcactgcagctgctgtcggggccgtgtttggcctcaccacctgcatcagcgcccatgtccgcgagaagcccgacgaccccctgaactacttcctcgcgtggctgcgccggaggcctgactctgggagcacgcacgcacaactacgggattggcgccgccgcctgcgtgtactttggcatagcggcctccctggtcaagatgggccggctggagggctgggaggtgtttgcaaaacccaaggtgtgagccctgtgcctgccgggacctccagcctgcagaatgcgtccagaaataaattctgtgtctgtgtgtgaaaaaaaaaaaaaa

SEQ ID NO: 439 - DNA, 767 bp, Homo sapiens
ggggggaggggggcgcttgtgctggtgaggcacttggtatacatactgatgctgcaagttcaggggatttttcttactcttaggtttaaccaagaacactgagcagggaaaaaccctgcctttcctaactgcatgtattttttcctttttggaaaggtggtagagactcagaagctttccttgttttcttcaggcctgctcccagttttcttaacagtttcttttgttgctttctctctcccttgttgctttccatggcagtaatcctcctagagtccaagcagtctgttgtatggagcagggtgtgtgggttttctgggcccatcattatggctgcttcagagtcagaagaaagccatagggcagtaggggagctcctattgcctagcccctctccctttggtgggctcccactctagctgcctatttttgctcatcagctggtgagtcagtatgggccagcagttctccctccctaagcccttgctactttatgggttagctttgcaggtttggtggcttgaggggtgggggcaactcaccactgccaggtaactccctgaagggtgggagtggattatcttctaggctcttacccgcggtagggaaagggcatcaacactgtcttccttccattctcctttcccccatcccatttaagtgctgcccacagggcagaaagcacacaaaccaaccacacagtctctgacttctcctaagcactttgagttgttgaatggggctcaggggcaagagtttttgctgcc

SEQ ID NO: 440 - DNA, 784 bp, Homo sapiens
atttcccctgggcacgtaaggcaaaatattgccggttgggatttcaaggtcagtgacgacgcatttcctcccagtacagaccccccagccccccttgctggacatggggaggcagagagtcacttgaccatccagaaatacatgactacaagtcctttatgactgtttgccattttttttaatggtacttagtattttgatcaaactttagtctccagaactaaacaagtccctaagtttccttattttaatttactgtgactagatttgaagcaaataaatactccagatccatgcagctagaacacacttgcttccactactaaatatacagggtatgtcctaacatggagttaactggaatagcagtacactagcaagtatctgtgaatccttagcactgacgggttaacagaaatgctttggtaatacctacttagttaattggaggaagtagtaaataaacattaggtaatctgcagattacttcaaatgggaaaaatctttttgtagactctatagtaccctctctattcactagcttctgaaaagggaggagtatttttagtttgacaatttaataatttaaaaacaagacatctccaggtaggaaaaaatgaaagctatttcatgcaaacattatctaatttagcttaaaagtgaaagtggtaatactgttggtttctgtaaatgttgcagggttttaaactttataattactttaatatttttgataactagaatctagtattgccataaagggaaactaagtgcccatccaaag

SEQ ID NO: 441 - DNA, 587 bp, Homo sapiens
agttattagagatgatggaggttaaaaggatgctgcttaacaaagataaaagctcacttagactagtaatctttttttctttttaaagaaacataggattacagaaatatttaatgaattaataaggtacttctcaacacatttttttcattgccaactagtttttccaggttatgtacataattgaaaaagtgttgtgttgcgtgttatgctttgatgcagtcttgttttgtaatccattgctttcaaatttctatcatcatcttctaattatcttaaatttgcactgtgctactagaatagaatgatggtattattactattattactggcagcagaattgaaacctggagtataagtggggtttgcagaccattcatagattcatgtaaccgtagagattcatggttgagtagttgagcacctgacttctatgggaaaagcagcgctcttcaagttactgcctaattaacaaacacacttcatggattgaggatttaaaggggaagaatggtcatgcttagtacaattgaatgcatatttgctactaattacatatacctcacattttctcttagagaccaact

SEQ ID NO: 442 - DNA, 2872 bp, Homo sapiens
  misc_feature (1)...(2872): n = a,t,c or g
gctccccagaacactgctcgacatggacaccggtgtgattgaaggtggattaaatgtcactctcaccatccggctacttatgcatggaaaggaagttggcagtatcatcggaaagaaaggagaatcagttaagaagatgcgcgaggagagtggtgcacgtatcaacatctcagaagggaattgtcctgagagaattatcactttggctggacccactaatgccatcttcaaagcctttgctatgatcattgacaaactggaagaggacataagcagctctatgaccaatagcacagctgccagtagacccccggtcaccctgaggctggtggtccctgctagtcagtgtggctctctcattggaaaaggtggatgcaagatcaaggaaatacgagagagtacaggggctcaggtccaggtggcaggggatatgctacccaactcaactgagcgggccatcactattgctgggcattccacaatccatcattgagtgtgtcaaacagatctgcgtggtcatgttgggagactctctcccagtcccccccgaagggcgtgaccatcccgtaccggcccaagccgtccagctctccggtcatctttgcaggtggtcaggacaggtacagcacaggcagcgacagtgcgaggctttccccacaccaccccgtccatgtgcctcaaccctgacctggagggaccacctctagaggcctataccattcaaggacagtatgccattccacagccagatttgaccaagctgcaccagttgggcaatgcaacagtctcattttcccatgacggcatgggcaacaccggattcagtggcattgaatccagctctccagaggtgaaaggctattggggtttggatgcatctgcctcagactacttctcatgaactcaccattccaaacgatttgattggctgcataatcgggcgtcaaggcgcaaaatcaatgagatccgtcagatgtctggggcgcagatcaaaattgcgaacccagtggaaggatctactgataggcaggttaccatcactggatctgctgccagcattagcctggctcaatatctaatcaatgtcaggctttcctcggagacgggtggcatggggagcagctagaacaatgcagattcatccataatccctttctgctgttcaccaccacccatgatccatctgtgtagtttctgaacagtcagcgattccaggttttaaatagtttgtaaattttcagtttctacacactttatcatccactcgtgattttttaattaaagcgttttaattcctttctctgttcagctgttgatgctgagatccatatttagttttataagcttctccctggttttttttttttttggttttttttttttggctcatgaatttttctgtttgtcatggaaatgtaagagtggaatattaatacatttcagtttagttctgtaatgtcaggaatttttcaaaaaaattaaaagatggactggagctttttctttgtgaatagaaactggatgccacagtgattcatgtgggttttattcctcttgtcttgctgttatttttgtaccttttatccctcaaaggacccttcttgggttttgaatggaagcctttattccggttaagatgttttcttctattttaccacttccatctttttttgtggccctcgatcctatttttccctgactccatgcttggttggcccttataaaacttgtgcccaaaagattgaggattagactttccgaggacttacctgtcctaggggagtaggcaagcacttccactagggnatggggtgggggaaaggaatgacacatgacatacatggcatacacattaagcagttgatcatatgtctgactgggttccagtttcttgggaatgttggtccccttgttcaggcttgcatattttaaactaaaaatttcagtctattgtttttagtaacttcatttatagtcctccataacaagttagaaggatgtatctgctaccatttattcctataattttagaaagttggggcttgacattatactcatttagtgagagtagatgcaaaaaagtggaggggcaggagaacttctccagacacctcagataaagtccggagcccaaggctttatcttaaccatgtatggtaccccattcattcatcaagaaaaccctcaacagctgggcctgcatggagtgttatatttcaaggtttttcacaggggttacagtaggacagtccccaccccaatcaggcaccaggataaaagcagggacttaaacagcaccccggttcttcagcctgagccatcacatgctatcagtctcctaacctccccctgggccttaagacagggcttgggcagagaagataaatggtgggacaaaaaaatgagttacattgccacctgagaaacctcagaggggaggacccagccttagcctccctcctcccaagtgcaaaatgtgtaaacagagtaaacggaacagaaaagtgcagtctaagtggttttctctcctgcccctcccaccgcccctccccccaccccctattatttggggataaagaatataaagacaaccctggcttttctattgccttgttgcttgctgaatataaggaatggggtggggcaggaaggggcttgcccttagccacagctctacggctgtgcctcgatgcatgtccacagctgccagtgtccctagagtttatcaggtgaattggtcaggggatcagtctccctcgagcctgacttacggctgggacagccccatctttctgttgattatgtggcgcatatatatatatatatgtatatatatataatttatataaatatttctctatgtaaaaaaaaa

SEQ ID NO: 443 - DNA, 3672 bp, Homo sapiens
gtggtcttcccgcgcctgaggcggcggcggcaggagctgaggggagttgtagggaactgaggggagctgctgtgtcccccgcctcctcctccccatttccgggctcccgggaccatgtccgcgctggcgggtgaagatgtctggaggtgtccaggctgtggggaccacattgctccaagccagatatggtacaggactgtcaacgaaacctggcacggctcttgcttccggtgttcagaatgccaggattccctcaccaactggtactatgagaaggatgggaagctctactgccccaaggactactgggggaagtttggggagttctgtcatgggtgctccctgctgatgacagggccttttatggtggctggggagttcaagtaccacccagagtgctttgcctgtatgagctgcaaggtgatcattgaggatggggatgcatatgcactggtgcagcatgccaccctctactgtgggaagtgccacaatgaggtggtgctggcacccatgtttgagagactctccacagagtctgttcaggagcagctgccctactctgtcacgctcatctccatgccggccaccactgaaggcaggcggggcttctccgtgtccgtggagagtgcctgctccaactacgccaccactgtgcaagtgaaagaggtcaaccggatgcacatcagtcccaacaatcgaaacgccatccaccctggggaccgcatcctggagatcaatgggacccccgtccgcacacttcgagtggaggaggtggaggatgcaattagccagacgagccagacacttcagctgttgattgaacatgaccccgtctcccaacgcctggaccagctgcggctggaggcccggctcgctcctcacatgcagaatgccggacacccccacgccctcagcaccctggacaccaaggagaatctggaggggacactgaggagacgttccctaaggcgcagtaacagtatctccaagtcccctggccccagctccccaaaggagcccctgctgttcagccgtgacatcagccgctcagaatcccttcgttgttccagcagctattcacagcagatcttccggccctgtgacctaatccatggggaggtcctggggaagggcttctttgggcaggctatcaaggtgacacacaaagccacgggcaaagtgatggtcatgaaagagttaattcgatgtgatgaggagacccagaaaacttttctgactgaggtgaaagtgatgcgcagctgggaccaccccaatgtgctcaagttcattggtgtgctgtacaaggataagaagctgaacctgctgacagagtacattgaggggggcacactgaaggactttctgcgcagtatggatccgttcccctggcagcagaaggtcaggtttgccaaaggaatcgcctccggaatggcctatttgcactctatgtgcatcatccaccgggatctgaactcgcacaactgcctcatcaagttggacaagactgtggtggtggcagactttgggctgtcacggctcatagtggaagagaggaaaagggcccccatggagaaggccaccaccaagaaacgcaccttgcgcaagaacgaccgcaagaagcgctacacggtggtgggaaacccctactggatggcccctgagatgctgaacggaaagagctatgatgagacggtggatatcttctcctttgggatcgttctctgtgagatcattgggcaggtgtatgcagatcctgactgccttccccgaacactggactttggcctcaacgtgaagcttttctgggagaagtttgttcccacagattgtcccccggccttcttcccgctggccgccatctgctgcagactggagcctgagagcagaccagcattctcgaaattggaggactcctttgaggccctctccctgtacctgggggagctgggcatcccgctgcctgcagagctggaggagttggaccacactgtgagcatgcagtacggcctgacccgggactcacctccctagccctggcccagccccctgcaggggggtgttctacagccagcattgcccctctgtgccccattcctgctgtgagcagggccgtccgggcttcctgtggattggcggaatgtttagaagcagaacaagccattcctattacctccccagggaggcaagtgggcgcagcaccagggaaatgtatctccacaggttctggggcctagttactgtctgtaaatccaatacttgcctgaaagctgtgaagaagaaaaaaacccctggcctttgggccaggaggaatctgttactcgaatccacccaggaactccctggcagtggattgtgggaggctcttgcttacactaatcagcgtgacctggacctgctgggcaggatcccagggtgaacctgcctgtgaactctgaagtcactagtccagcctgggtgcaggaggacttcaagtgtgtggacgaaagaaagactgatggctcaaagggtgtgaaaaagtcagtgatgctccccctttctactccagatcctgtccttcctggagcaaggttgagggagtaggttttgaagagtcccttaatatgtggtggaacaggccaggagttagagaaagggctggcttctgtttacctgctcactggctctagccagcccaggggaccacatcaatgtgagaggaagcctccacctcatgttttcaaacttaatactggagactggctgagaacttacggacaacatcctttctgtctgaaacaaacagtcacaagcacaggaagaggctgggggactagaaagaggccctgccctctagaaagctcagatcttggcttctgttactcatactcgggtgggctccttagtcagatgcctaaaacattttgcctaaagctcgatgggttctggaggacagtgtggcttgtcacaggcctagagtctgagggaggggagtgggagtctcagcaatctcttggtcttggcttcatggcaaccactgctcacccttcaacatgcctggtttagggcagcagcttgggctgggaagaggtggtggcagagtctcaaagctgagatgctgagagagatagctccctgagctgggccatctgacttctacctcccatgtttgctctcccaactcattagctcctgggcagcatcctcctgagccacatgtgcaggtactggaaaacctccatcttggctcccagagctctaggaactcttcatcacaactagatttgcctcttctaagtgtctatgagcttgcaccatatttaataaattgggaatgggtttggggtattaatgcaatgtgtggtggttgtattggagcagggggaattgataaaggagagtggttgctgttaatattatcttatctattgggtggtatgtgaaatattgtacatagacctgatgagttgtgggaccagatgtcatctctggtcagagtttacttgctatatagactgtacttatgtgtgaagtttgcaagcttgctttagggctgagccctggactcccagcagcagcacagttcagcattgtgtggctggttgtttcctggctgtccccagcaagtgtaggagtggtgggcctgaactgggccattgatcagactaaataaattaagcagttaacataactggc

SEQ ID NO: 444 - DNA, 1229 bp, Homo sapiens
tttttttttttttttttttagagatttcccttttatacatattgcaacaagttctccataaaacattcatctgaaataaattaaaaagtccttttgccactgcctccaaacataaaaaggagcctgtgccctagccccagcccgggccacccatggccttgattgtccatggaagaaagttaaggattgaggggcccacagcctgagatgagagggccagatccttcctctgaagtctccaacaagaaaggcgaggtgacggcatgagcctgggagatggcagccaactccttgagaaattcagggaaaatgactgcacagtagacagcattcttgactcgaagagcctcaccttggcgttcaggggccccgccccgggtgagtagaactggagttgaagccccaggggagcccccacttaggccaagtcctgctccgtctcgcccaggctgaaggaccaattgtgccgcctgccgggccctggttggactgtgtgcatgccgcaggagtaactcccccaaggatggcctccggctcttcactaggggatcagaacggcgtggggcaggtcctgctgcagggccctcagcccagtccaacttgccacgggcaatgaggtacttcttggctttggacagcagtgctgggaagtcctcctgggaagccgcaaagttctcaatcttattcttcacagagcccagcacctgcagcagggacttgacactgggctggaagaccatgttggtgttgagcaggaaagagcggagcaggggctgggggtgacaggccagctggccaccagccccgtcagcaggaagttgacatagacggagttctgcagcatgttctcgagtttggcaaagagcacagccatgaaggggccagtgaagggctggcttggcagctggttgagagtccgcaaagggctgctgaggaaggggccagggggctcagggggacaggtgaagctctcgtaggcctcctcctcctcaaggggcagtggaggttctaagggggactctgagccagttcccccattgctcaatgccacctctagctcccggagctcctgcccaaagccctctagtcctgccatgccctcggagatgccctctagcagttccccagctccctcctttggcaccagacgaaccttcttggccccctcaggccatgatcctggcactccattgagctggggagggggcaggtgaccagggccctccccc

SEQ ID NO: 445 - DNA, 307 bp, Homo sapiens
tgcaacatggtggctgaggtggctgtggacagccctgctgggagacagcaactgctccagcggggttatttgtccccagatattctccttgagggctcagcccgcacaactgggcctcctcccaagccccgccgctccaagaaagctgagtcggaaggccctgcccagccctgtccaggcccccctaagctggtcccctctgctgacctgaaagctccccactccatggtgggctgcatttgactacaacccccagggagagttcccccaatatgggacgtgggagggcagagttgcccttccggga

SEQ ID NO: 446 - DNA, 1046 bp, Homo sapiens
ctggagggtctatgagactcaggttggtgccttaataaatgtggagctagctctgaggagaggcctacaaatgaaatgtgtcttctgtcacaagacgggtgccactagtggatgccacagatttcgatgcaccaacatttatcacttcacttgcgccattaaagcacaatgcatgttttttaaggacaaaactatgctttgccccatgcacaaaccaaagggaattcatgagcaagaattaagttactttgcagtcttcaggagggtctatgttcagcgtgatgaggtgcgacagattgctagcatcgtgcaacgaggagaacgggaccatacctttcgcgtgggtagcctcatcttccacacaattggtcagctgcttccacagcaggatgcaagcattccattctcctaaaggcactcttccctgtgggctatgaagccaggccggctgtactggagcactcgctatgccaataggcgctgccgctacctgtgctccattgagggaggaagggatggggcgcccagtgtttgtcatcaggattgtggaacaaggccatgaagacctggttctaagtgacatctcacctaaaggtgtctgggataaaattttggagccgtggcatgtgtgagaaaaaagtctgaaatgctccagcttttcccagcgtatttaaaaggagaggatctgtttggcctgaccgtctctgcagtggcacgcatagcggaatcacttcctggggttgaggcatgtgaaaattataccttccgatacggccgaaatcctctcatggaacttcctcttgccgttaaccccacaggttgtgcccgttctgaacctaaaatgagtgcccatgtcaagaggtttgtgttaaggcctcacaccttaaacagcaccagcacctcaaagtcatttcagagcacagtcactggagaactgaacgcaccttatagtaaacagtttgttcactccaagtcatcgcagtaccggaagatgaaaactgaatggaaatccaatgtgtatctggcacggtctcggattcaggggc

SEQ ID NO: 447 - DNA, 1276 bp, Homo sapiens
gtaagaactccaacactgtctattgttaagctgggagagcttgcccctcccggggttcagggtaaaccatcatgatttttggaggtgggttgtacctcctgaacttctagctttcaagttgtggctgttttttgtttttgtttttgtttttgttttctttagaatttttccctgtttcccaccttctcttcccctgttgccaaggtctaactcatggatttttctctttcctcatggatgatcttcagcaagagtggactgggaagctgcacctggctcccactttcaacaagagcctctgccatccacttgagggtattgagagccagtgggcttttgtgtagcctttttgttctgcaagcaactttctaaagttgtgtacatgaacatacacccacatccagactacagtgatttagagttgttttgattgggtaccgtgggagcagggaaattggttttttaaaaagcaactgtttaattgcttaaataagctatgtattaaatctgtctccagttagggctatcttcctagcataggccccttaagtagcatgggggatatattttttgctataacgtaaaaattttcctttaaccactgccctctccttctttctccttcaaggttctttccccctcagttttgttgttgtcttactctggagatgccaagtgtattttttctttctatgtaattttagattcgccttacaatgtaaatcttcacattgggagataatattggttggaccttgcccatcttcactctagccttcgtatttgtgaaggactcagccaccttccttcttcaccccatgcttctcaccaaatttttgttgtcattgagggcacttggataactcaagttgatatttatagctgatcaatctatatgtgtcacagaactatgctgcctaaagtgatcttggctccttaatggtccttttggccccttggatagttaacagctgagtaattctaatctcttctgtgttttccttgccttaaccacaaattgtggtgctttttgtatattttatgtataaatcacaaagttgaattctgactatttttaagacaaaagtctgttaaacttttttattgtaaagaatatttattatgcgaatctctattattttatggtatttattgcaaaagactgttgaaatggtactcatgtttgaatataacaaaatatcaatacttaacggaaaataaggtgacacgaagaaagtacatatggttaactataatgcagaaaatatattaatta

SEQ ID NO: 448 - DNA, 837 bp, Homo sapiens
tttttttttttttttatacccaacatccattgatctttatttgatttgacaaaatctgcatttttaaaagacaggtaacaaaatctgaggttatactgaatctgacaaattgagttctatagtatctagaatatcatataagaaatatcaactgagggaaaagagaagtaccacatgcagatgctcctggcaaggggggaactgtatctgcaggtgaggtccagagtgtgcagtgcataagaaaatcctacagaaaatgccgttaacttacttggatgaaatgtttttcctttgagggggaggaagaggtggtaaagaggggcaggaattcaaaggcatatgcagaatggcttctccatttcaaaatggtaataaaaatatttaaatcatggcactagggcacctttgaggaaaagaacatcttaaccagagtaggctcattgcataattctttagtaatatgtacaattttcaagtaattaagcagacttaaaggataattttgttttaacagcagctatctatttttcttctcccccctctggggcttgatctgtttcagcatcacagggacacttttccacacattttctagggaacccaaccccttattcttgaaacaccttctataaaggaatcatcaagaattttgtctccatataaccagtatcgtaaacctcttgtggctaaaatgaattcccctttttgcagctgtattcgaggctcttcggtgcagggacttgtgaagaaggttttgattcctttattcagagggcagcaggcaccactataatcttctattactttatagcgaacacttctgaccccacgcgtccg

SEQ ID NO: 449 - DNA, 916 bp, Homo sapiens
gactggagaggtggtcatgggtgtttacagcgtatcttttacgggatacgtctttatcccagcagacagtctaatgcctaagcatcctatccattaccaggtgtccctctcataggaaactcatttacactggcagtacccctgtggttcttgtctgacctacatctagtctattcctgccaagatagccattctctaggagatccctgaccaggaaagaagttcaattcaagtgtgttggtcaggtgagacacagaggaagcaactcaacaaaacacatgaaatgaaacaacagaagcagtttattacttacagatcctgcatgcctcacagggccagcgggaaggggaaagcctgtattgcaggctatggcatttcccaagcaggtttcctgcagagagttctcactggtgcatttagagcaagccagtatatctgtgtggtccacataggctgtggggtcagtgtatctagctgttttttagggaggcagtatcctggaggtggctgtacaaggcagttatctggatctaacatattaagaacttggaggaggtggataactgcaaactgtgtccaagggtgactaagcctgcttctggaatgagaaagttaaacttaggttaaaaacggatgctgaagctacataaaaagaatttacgacaatgagatatgatcacctttgtcccatgtttgccctctcttgttttattcatgtgtttgttcattcattcatttactcatttatgaacacccttaaacaactctccagccaagatttaacaacatcaactattaattacattttctttaagtaccttatctacccaagtaagagtcaacattctcataaatactgcatgactatataaactatgatttgtccattctgtgcaacaaacagcaactattagaa

SEQ ID NO: 450 - DNA, 3399 bp, Homo sapiens
  misc_feature (1)...(3399): n = a,t,c or g
gattttaatgattaaaataaatgttaaaaaagatttggataattctaaggcattggttgagactaatggtatattgactgatttgctaaatgcattttactttttattgtggaaaatttcaaatacatagaaaagttaggagaatggcatagtgaaaccccatgtatctgtcacccagttattacatagagtagcgtgtttcgttctagtttcatttttaaccactactgttctcccttctagataattttgaatcaaatagaaatatcacttcatttgtatgtatttcagtataaatatgttgcctattatgtttttttctcatctcatgcacatctcctaattgcagcaataaaatatacaggtcaggtcgtgaaagatttggggtactgatgctttgcattgttaggttttgagtttcagctttttggcataatgacttaaatttgaagatagttgatttcttactttaagcttgctagcgtgcgtatttccttacattatagatcttccttggaaacagaattgttctacaaaggtatcccgccctgcaattaacgttggtctgtctgtatctcgtgtcggatccgctgcccaaaccagggctatgaagccaggtaattttgcatcactttggcagtaagggggctatcattagattagcatcttaaggtattaatatattaactatatttgtatagtgctctgtgtcactgagttacagtacagtaatttctgtattgcaggtagcaggtaccatgaagctggaattggctcagtatcgtgaggttgctgcttttgcccagttcggttctgacctcgatgctgccactcaacaacttttgagtcgtggcgtgcgtctaactgagttgctgaagcaaggacagtattgtaagttgttcttttcttcatttggtcaggttcctattgtgtatcagggtcttcccaggcctacagagctgcatcacatatcacggcctgtactacgtgttgttatctgttatctttcatcaaaggcacttttacttaaactacatttgttttttgatttttgannnnnnnnnnnnnnnnnnnnnnnnnnnnnnnnnnnnnnnnnnnnnnnnnnnnnnnnnnnnnnnnnnnnnnnnnnnnnnnnnnnnnnnnnnnnnnnnnnnnnnnnnnnnnnnnnnnnnnnnnnnnnnnnnnnnnnnnnnnnnnnnnnnnnnnnnnnnnnnnnnnnnnnnnnnnnnnnnnnnnnnnnnnnnnnnnnnnnnnnnnnnnnnnnnnnnnnnnnnnnnnnnnnnnnnnnnnnnnnnnnnnnnnnnnnnnnnnnnnnnnnnnnnnnnnnnnnnnnnnnnnnnnnnnnnnnnnnnnnnnnnnnnnnnnnnnntaaannnnnnnnnnnnnnnnnnnnnnnnnnnnnnnnnnnnnnnnnnnnnnnnnnnnnnnnnnnnnnnnnnnnnnnnnnnnnnnnnnnnnnnnnnnnnnnnnnnnnnnnnnnnnnnnnnnnnnnnnnnnnnnnnnnnnnnnnnnnnnnnnnnnnnnnnnnnnnnnnnnnnnnnnnnnnnnnnnnnnnnnnnnnnnnnnnnnnnnnnnnnnnnnnnnnnnnnnnnnnnnnnnnnnnnnnnnnnnnnnnnnnnnnnnnnnnnnnnnnnnnnnnnnnnnnnnnnnnncaaactannnnnnnnnnnnnnnnnnnnnnnnnnnnnnnnnnnnnnnnnnnnnnnnnnnnnnnnnnnnnnnnnnnnnnnnnntatttttagtagaaatggtaaaacctctnnnnnnnnnnnnnnnnnnnnnnnnnnnnnnnnnnnnnnnnnnnnnnnnnnnnnnnnnnnnnnnnnnnnnnnnnnnnnnnnnnnnnnnnnnnnnnnnnnnnnnnnnnnntacatttcttattatcatttgagtgtaaatgataggggcttcacaaccaggaaaacttaagtatatttaatgtccttctttcaggaattaaggcctgttagagtcccctcccccacttggctatatgaatatgtaatttggcagatttaaaagaaagttaatacgtttttattttgtcaagtcatttcagcaaaatatttatactcaaaacagtattaacactgtcagattataaacagtgcttatggctatactgaaagattatgcctcaagccttgaaaatataagaaataactgttttctgtcaggggtgggaggaaggattattaagtggagttctaggtcattgatattgtgaagaatagataatttacagggacatgttaggaattggagaaaaagtaagttttcctgaccttggtaacatggcattcatttctttgagcaactcacttggcattcttcttgtatcttttcagctcccatggctattgaagaacaagtggctgttatctatgcgggtgtaaggggatatcttgataaactggagcccagcaagattacaaagtttgagaatgctttcttgtctcatgtcgtcagccagcaccaagccttgttgggcactatcaggtatgaatgcaattgttggcatctttttttaaagttatgtttaagatatgaagttaaaattattttcaaatctgtagttaggctagtcattaaaactttttccaggtcagaacttacgacctgcttttatttccaaatagggctgatggaaagatctcagaacaatcagatgcaaagctgaaagagattgtaacaaatttcttggctggatttgaagcttaaactcctgtggattcacatcaaataccagttcagttttgtcattgttctagtaaattagttccatttgtaaaagggttactctcatactccttatgtacagaaatcacatgaaaaataaaggttccataatgcatagttgttttctgtcatttgtgttattctttaaaaccaagatcaaattgagaaattggtaagcaaatgcttcttgatctattttacttgaatattggtacagtcaactgggctagataattcaaggctgagctctttgtaannnnnnnnnnnnnnnnnnnnnnnnnnnnnnnnnnnnnnnnnnnnnnnnnnnnnnnnnnnnnnnnnnnnnnnnnnnnnnnnnnnnnnnnnnnnnnnnnnnnnnnnnnnnnnnnnnnnnnnnnnnnnnnnnnnnnnnnnnnnnnnnnnnnnnnnnnnnnnnnnnnnnnnnnnnnnnnnnnnnnnnnnnnnnnnnnnnnnnnnnnnnnnnnnnnnnnnnnnnnnnnnnnnnnnnnnnnnnnnnnnnnnnnnnnnnnnnnnnnnnnnnnnnnnnnnnnnnnnnnnnnnnnnnnnnnnnnnnnnnnnnnnnnnnnngctctttgtaagtttctagagtactttgtgtttaagagaaattcctaaactggaatatgtggcaggctgacaatactgaagaggatagctggc

SEQ ID NO: 451 - DNA, 345 bp, Homo sapiens
cggacgcgtgggttcagaaaagaagagccagaaggatggaaattacttcagaaagatgaataccagctttgaaggaataaaagctgacgaggaattgaaggagttgaggcacgagcttgaacagggttgcatgtttggcccttgattgtaaatgcccattgctgcacctgttcctgttacttggggagttgcagcagaaggaacagcggcctgggactccagagaactgggttccctctcatccctccagggccaccacttcttgtgggcccttgggcaaagtcacttgtactttctgagtctcagtttccccatttgcagaatggaaataactacccccgttta

SEQ ID NO: 452 - DNA, 848 bp, Homo sapiens
gctcacaggtcactcaacacctcgtaacctccacatagcaaaagccccaggctctgctcctgctgccttatgttctgaatcccagtcacctgcttttcttggtacatcttcttccacacttacttcaagcccacactctggcacttccaaaagaagaagagtaacagatgaacgtgaactgcgtattccattggaatatggctggcagagagagacaagaataagaaactttggagggcgccttcaaggagaagtagcatattatgctccatgtggaaagaaacttaggcagtaccctgaagtaataaagtatctcagcagaaatggaataatggatatctcaagggacaatttcagcttcagtgcaaaaataagagtgggtgacttctatgaagccagagatggaccgcagggaatgcagtggtgtcttttgaaagaagaggatgtcattcctccgtatcagggcaatggaaggtcgtagaggaagaccaccaaatccagatagacaacgagcaagagaggaatccaggatgagacgtcggaaaggtcgacctccaaatgttggcaatgctgaattcctagataacgcagatgcaaagttgctaagaaaactgcaagctcaagaaatagccaggcaagcagcacaaataaagcttttgagaaaacttcaaaagcaggaacaggctcgggttgctaaagaagccaaaaaacaacaagcaataatggctgctgaggagaagcggaagcaaaaagaacagataaagattatgaaacagcaggaaaaaattaagagaatacagcaaatcagaatggaaaaagaacttcgagctcagcaaattctagaggct

SEQ ID NO: 453 - DNA, 891 bp, Homo sapiens
tcaaagtataaattcatattttgtaggaaatgtagtttacaaaacagtatcaattgctacccccaattcagatgacccactttccccggaagggggatgtttaggtcctattccactgggcaagggtaaaatgattcagtagtcttccaggttaacagtaaattcttctcccaaggctggggccatcaaggcacagtctgtatgaggctcaccctgtctgaccctaggctggggctgcttgcttggtaggcaggaattggggtgggggtgggggctcagggaagggtctggaccctgagacttctgcttacaggagggtgctgggaaaaccctgccttgggctggggaatcccctctttcccacctttggggaacagggtggggagggggtaagtgggaccctgctgcctggagggctcaggtctgagcagcagggagccctcagcgcccactccagcagacctattgggaatttactacctgaagacaaattataggtctagggtcttctttgtgattttgggggagtcgaggcattggggggtgagaggtatggtctaaggtcacagtctgggagaggagtccttgggatcagaggttgtgcagaagcaccttccccacctcctgcctcatgagataaggttgccaggattccattatcacggtgaatttctctgggctcatgggttaggggtcatagtggagccaccaaggtagacatcacaaatggaatgcatatgtgttaactgacagtggcctggccagaggtcagggggcactagatccttggcaagaaagctaagggatcaacaggtgagatgtgagacgccaggcgcatggcagctcacacatacatggcccgggacatgacaaagcctttgccctggtagg

SEQ ID NO: 454 - DNA, 634 bp, Homo sapiens
atttttcaacaacttcatcctttattaaatgtaaccccctttatccccgtctgcttgaggagacccatgaggaaatcggggttttttatattaaccatgtcagggcacatcccgggagcaccgccagctgtgatactggcctcctccagtccatcccaaagtctccacccgccggtagctgtcacagcccctggttccgctgcctgcccacgccgggctcagagcctggagtttctcgtctctctgccaaggcaccagggctcagcagtattcagaataatcttcctccacgtagttggcagggaaccagccaacccggccatagatctcccctcgccaccagccttgctgtcccttcttgttaaggatcttgatgatgtcaccctccttgagcgacagctctgatcggtctcgggcgcagaagtcatagcgggctttggctgtgccaaaatactttgtgcttcccactgctggcctgctgatggttctcttttcaggctccttgaaggggaactgcaaggtggtgtccagagacttgaagcaatcctttagagagttctgctggtaaaactccaccagctccgtaagcccccggaaagcctttttctctgtgatccggtacagtccttctgcc

SEQ ID NO: 455 - DNA, 2886 bp, Homo sapiens
cgacccacgcgtccgaacatggcgacctaggagaaagggaagaacaattttttctcctcttttgggaaggtttgcgtctagtagtgcctgtgcccctgggcagattggagagaagagggacgactggagaatcgtcgagaaccagcggagaaaagaaaaagcaacgtttaattctagaaggcctcctgtccctgcctgctctgggtgctcatggaatcagctgctgccctgcacttctcccggccagcctccctcctcctcctcctcctcagcctgtgtgcactggtctcagcccagtttattgtcgtggggcccactgatcccatcttggccacggttggagaaaacactacgttacgctgccatctgtcacccgagaaaaatgctgaggacatggaggtgcggtggttccggtctcagttctcccccgcagtgtttgtgtataaaggtggcagagagagaacagaggagcagatggaggagtaccgaggaagaaccacctttgtgagcaaagacatcagcaggggcagcgtggccctggtcatacacaacatcacagcccaggaaaacggcacctaccgctgttacttccaagaaggcaggtcctacgatgaggccatcctgcacctcgtagtggcaggactaggctctaagcccctcatttcaatgaggggccatgaagacgggggcatccggctggagtgcatatctagagggtggtacccaaagcccctcacagtgtggagggacccctacggtggggttgcgcctgccctgaaagaggtctccatgcctgatgcagacggcctcttcatggtcaccacggctgtgatcatcagagacaagtctgtgaggaacatgtcctgctctatcaacaacaccctgctcggccagaagaaagaaagtgtcatttttattccagaatcctttatgcccagtgtgtctccctgtgcagtggccctgcctatcattgtggttattctgatgatacccattgccgtatgcatctattggatcaacaaactccaaaaggaaaaaaagattctgtcaggggaaaaggagtttgaacgggaaacaagagaaattgctctaaaggaactggagaaagaacgtgtgcaaaaagaggaagaacttcaagtaaaagagaaacttcaagaagaattgcgatggagaagaacattcttacatgctgttgatgtggtcctggatccagacaccgctcatcccgatctcttcctgtcagaggaccggagaagtgtgagaaggtgccccttcaggcacctaggggagagcgtgcctgacaacccagagagattcgacagtcagccttgtgtcctaggccgggagagcttcgcttcagggaaacattactgggaggtggaggtggaaaacgtgattgagtggactgtgggggtctgtagagacagtgttgagaggaaaggggaggtcctgctgattcctcagaatggcttctggaccttggagatgcataaagggcaataccgggccgtgtcctcccctgataggattctccctttgaaggagtccctttgccgggtgggcgtcttcctggactatgaagctgggagatgtctccttctacaacatgagggacagatcgcacatctacacatgtccccgttcagccttttccgtgcctgtgaggcccttcttcaggttggggtgtgaggacagccccatcttcatctgccctgcactcacaggagccaatggggtcacggtgccctgaagagggcctgacacttcacagagtgggggacccaccagagcctatagaatcaattccttggtctcacagccatgtagacaagccctggtcatctcagcagccaccgcacaacacccctggtggaagacacgccctcctcccctctggtcacacaagagaacatcttccagctgcctctttcacacccactacagacctcagccccagttttctcctcctcactaggctgtgtttttagtagttcctttgcttgtaactatgggatgggatccaggcatagggaactagttgtttacacagctcccagccaagaagaaagtgtgagaagttgatgggcagcaaacctgctgtttaacatcagggtgaccacattaagcccagtattccagttggcaccagaagatatggacttggaatgaggcctacagggttcaccaggatgtaagaggagagaggaatccacaggaccaccagagaggagagggaaccagatatgcagatcagagatagaggaagtggaaccagagagctgggagggaccaaggttgtaagggtggctaagtcccaccataacagctaaggggacctgggagatgatggctcatttccacccagccccaggatttccagagcgcacatccacaggcctggacctgggatgaagatgaatgaagaacatggatgcacgtggatgtagtttggctcaggtgtccctgcagttggcaaggagtcagtactcagtccctgagtgtggctgaaatttgaggtcctggctgagccaaggagtaatggaccagatctacctcagtattcaagttcagtggggacaccagtggcttcaaacttcctggtttcatgatatcttgagacgccttacaaatgatggaggattccaaagagtttttgtttatttgggttaatatttgttggtatttatggcatttgagattgaaactaagaaatgttttaatttattacctttacaacatttatttacattacatacatacatttacaacatttattaatttatattaaaatagcatgaataagccaattataggttaatataagtagaatgtttgtgaaaaataagtatggtatccaaagcaaaataaattttattgtgaagtgtg

SEQ ID NO: 456 - DNA, 414 bp, Homo sapiens
  misc_feature (1)...(414): n = a,t,c or g
ggcacgagctttgaagtattcttaataataaatgggtaaatataagtgnnnnnnnnnnnnnnnnnnnnnnnnnnnnnnnnnnnnnnnnnactcaaagaagaggtcatgggaacccctgctttatagccagtcagtcggaagaaaaggtaacaacctgtggcttgtgattggcatctgaagtgagtgtcagtcttgtgggactgagcccttaccctaagttatctccaggtaaataatgtgagaattgaatagaattccaggacacccctctggtgtctgctggagattttcttgatgtgtggggaacccctccctcacatctggtcacagaagcattctgtgccgtattgaatgagtgttaaagaaggaaaaacacttttttttcctggctggatcagatcctacttacacttc

SEQ ID NO: 457 - DNA, 390 bp, Homo sapiens
  misc_feature (1)...(390): n = a,t,c or g
gcatagagagacactctctgtctctcgattacaannnnnnnnnnnnnnnnnnnnnnnnnnnnnnnnnnnnnnnnnnnnnnnnnnnnnnnnnnnnnnnnnnngncnctaacngcaanccntggaaattcnctaangatnttgaagncanacngaaaatcntattngggggngttnaaaagnnttaaananncancctctaactnnatncttnnngttcntgnaatannanggnaaacnannnncnacaaannggcctgntcttagggtgcctgnngnaanccactnttcctttcaaaacattctttctcttctntttgctccttncctaggggacacatctttctggaaggactgcatatnatnaggcntgngaggggacntcctgataaa

SEQ ID NO: 458 - DNA, 1836 bp, Homo sapiens
cttttttttaaatatcattttgggaagggaagacagggttaaggaactttatttaaaaaaaaaatatttttttcctaaaaactataaaagaggaagggtttcttgtcccgggaagcaacggacataatctgttcccagccatggccttccagcttgtgtccctgattcagggagctctcccttcctcctcctcctcctcctccggaggtgggatcccagagcctgccagtggaggcttatctgttgggaggaagacagctcttcacagaagcaaagaacaaaatggcatggagatcagctgcctgagcacctgcgctgtagcttatctgacaacgctgaggccacgagctcctgggtagctgtgatcagggacatgataatctgagctatgcagaggagcaaatctgttgtcaactgctgtacccagaaatctagaactctgccgacagcctctcctggtgagtcgggactcagctgaggacacatccccaccctgcctcccatctggccctttggacaactggccctttgtgacagggctgactcaagtgttaggcagggtctcaggcctttgattgctcacccctgctccccaggccctgccctcacttttaccaaaggttctccctcggcgggagggcatctgtgttggaggtgatttgtctgggttcttccttttggttccagaaggaactgtcagtcatcagcatctgcgttgttagcagtcagtaccacccccgccccacaatgacagtcaaggctgacttgttgactgaagcctttttcccagaccccttatttcgaatccccaagcttcagtccctcttgggggtggagacaagaggacatgtgggaagccacggaagcaggttctttatgtcctctcctctgtggctggcaaggctcacctggccttatccacccacttatggaacctcaggagaggagggctcctcctaaaggcatgcagcttgcagcccctctttctcacacgtgtgatcctagcgtgagaggtcatcctgcccttgctgaagttagtagtactgtactaagagctctgccctcatgtgaattcctgccctggcgcctcttccctgaggctgaatcaggccctgctgcaaaactccaggcttcccagggttggggaggctgtgggaccaaggtccatgttggtccttccactgggtgcagcaggagctgggtcccgagagcctggcaggtgaaactctgcaggccttccgctgattattatttattcactcctttcctcaccccaagtgccctgctctccaggtgcctagagtatcctaactcttaggaccagggattgtcttgcaccaagtatgcctacccctggccagtctgaggtctcctagccatagaactgactcctggaagcctggagagaaggtggtgacacccatgggttctcaactgtaaggaaaaaagacaccagacttttgttccctagtgggggaaagcccttagtcttgtacaggagcagcttgctcccaagtccttttggaagctggcagagctatattcctgacagccctgactgccaggtagagcaaaagacattggtgggggtatgtgaagcaaaaggggcaggtgcacacacctccacagtgacctctgtgcacacggttaccaccaactggctggcccctcctcctcttccctggcccattgatcatcccttcctcacagagggtcatcattatttccaaatattgtttgtctgatgacttcctcttcccagtgcaatttttcccttcctatttcaacctctggttcctgggatgagccataccctggaactggccacccactgtg

SEQ ID NO: 459 - DNA, 566 bp, Homo sapiens
ttttttttttttttcatgtttataaacactttatttaggtgattacagtgggtaagttcccagctaagtgcacagatagaagcgaggtatttctgggttaatgcaggagccagtgggttacatgggtctgggcactgtggccaaggggcgagtaccaaggtttctgagtcagacccggccagagaccctgcgctgaaggtggactaatgtcctaacactgccagctgctttctcctcacagctggccacaccgcaaggcatctcttcaacagtaaatcatttcagcgatgttaagggaacagacgttaaagaaatggaagctgtgtcctggtgcgcctcagctgttgctgctttataagtcataatagcatgtgaacaagagttttagaatattccagtaacaatgagccacagagcgataaagtctgtgtctttctccctcagtgcctccttgcctgttttctttcatacctgaattcccatctttaagctgtggatcctgatgttgagtctcatgcatacaagaaaagtttttccgatgacaaagtttctgcttccagcattcc

SEQ ID NO: 460 - DNA, 2483 bp, Homo sapiens
  misc_feature (1)...(2483): n = a,t,c or g
tttggcctcaccacacttgcaggctaccagaccctgggggaggagtacgtcagcatcatccaggtggacccatcgcggatacatgtgccctcctcgctgcgccgtggtgtgctggtgacgctgcatgccgtcctgccctacctgctggacaaggccctgctccccctggagcaggagctgcaggctgaccccgacagtgggcgacccttgcaggggagcctggggccaggtgggcgtggctgctcaggggcgcggcgctggatgcgtcaccacacggccaccctgactgagcagcagaggagggcgctgctgcgggcggtcttcgtcctcagacagggcctcgcctgcctccagcggctacatgttgcctggttttacatccacggtgtcttctaccacctggccaagaggctcacggggatcacgtacctccgtgtccgcagcctgcccggagaggacctgagggcccgtgttagctacaggctgctgggggtcatctcactgctgcacctggtgctgtccatggggctgcagctgtacggtttcaggcagcggcaggaggccaggaaggagtggaggctgcaccgcggcctgtttcaccgcaggcctccttggaggagagagccgtttccagaaaccccctgtgcaacctgtncctggaggagcgcaggcacccaacagccacgccctgcggccacctgttctgctgggagtgcatcaccgcgtggtgcagcagcaaggcggagtgtcccctctgccgggagaagttccctccccagaagctcatctaccttcggcactaccgctgagccggcgcccgggtgggccctggacacagatgacctctacgggagtctgaacgccaagatttagtctcaggattaaccttgcttgcacagaagttagaacactctcagttttttgtcatgtaagatactaacctagccaccctgggagagaacagaaagctgtccctggctgcactttctcagccctgggagggcgcgcctgaacccagaacatttccctaaccccaacctggtaggactcagccacttcttcaggaatttcacttatttggacgggattttaggtttccctcccttccccaaaccatacagttgagaagtaattcagaagtaggccagaagacactttattcgtttatattgtgagaaaacagccccatcaggcttgtgttaaggcaatggactgaatgagtgcgtgctgggtggggtggggcacggaggctggcgggttgcttcagccagtgcagtgagaacagcagccccacggccccatgggaggcggcgctgctctccccgagggcggctgggcagagcacatcccccaggacttgatgaccacacggggcagagagaaaccaaccaaggccagcacctccgtcggaagcatttggcacacacaccttcaatacacgtcaaggtcgcttccagttttagaaaacagaaatctgcatctcagcctgagacgcacagagaggtctcttcctgacccagacgcactcacgagccaggtcctgggggtatgggggctgccaggggcgcccgagccctctcctgggggggcctggctgggcagggcgacctgctgacccacggtcactgctgtgttcagcccctcagcctcggccccagcctatttcccgcctccatttgatgtttccaggttttcaaaactgcatttaacctgcgccagagagttcaccgtaggcatctttaataaactaactccagcaaaatgtgggtacgttactaacacaagatggaacttgagatttcctgaagcgcagtgttaaaatgcctcgagggcgtgtgccacatttccctgctgacgtaaaacacctggccagcaggaccggcttccggcaaagacccgcgcaaaccatgtcttgctgtttgacttacttaggaatgaggatgaccctgtattcctgggttagtcaaggtcagcttgccagagacggaggagggcgggggggccgtgaccctctagactgggaggaccaccaggagaggcactgggggctgcggccgggtgggcagatgccgccgtggctccatccatcagcacccagtcctttgcttcactgtgctctggccaagcgccgtgcgacttcctgtcacaccttaggcctgagcgcttattaagaaaacagtatgaaaaatgacaaacactcctgtccacagtctgagaatcccaagtgtctcaacacggtaccagaagtaccacctgggagcagcactggctatcttgggtcagggacacacaagcttgaacgtggcctcttagaggagctcgatgtcagatatgtaaacactggcacaagaaaatccagacactaagcattcaccgtgtcaattctgagacaggaaacaccgcccagagtgaggagcctgcgcagcccggggcccaggaggagaggccttcactcgcatgtcagtgtctcatctgggaccaca

SEQ ID NO: 461 - DNA, 1254 bp, Homo sapiens
taaaaatcagatggggactttattgtgatggtggcaggtccaccagcagatgcaaatgtggggtgctgagagtggcaacacaggccaccccaaaccaacttcactccctcccctgtcctcagccagtacagaagccaaatgtagccccagccctagactccagcccaggcagagtccaagggaggggtgtcagggtcagaagtcacagggagcccagtgactatcaaggtggctgagagcaaggctagggtagggatggggcagagaaagggcagggggtgcagccccaggtggcccaaagcaacacagaggagcaagggctggcattcaagtcagcaggtccctggggagaacagatggtgcctggagtcccacatggtggtacaggtgggggagctcttggtggcaggcagcaccccaggaggagtgggactcctgccgaggctgaccccaacttcaaggctgccaagttctgatgggagtgtcctcctccaggaacatctcccagccccggacgagcagagccctggaggagtgggactcctgccctgaggctgaccccagttttggggctgccaggttctgatgggagtgtcctccaggaatgtcttcaggcccccagacgcagagcccagaagggtctgagggcatgatgggcatcagtgggattttggttgtgccccaggggtgggcagggcccacccgtgagcaaaggccgcaggggtgggggctatgctgccaccaagcccctgggggaggggtgtggaggcggcctctgcatacgcccaggccaaattccaggaaagcgggaccagccgctggaaggggggtgagccccggagcatcaggagatgccccgaggagcacagacaggagaggtgcagctgctggcccagccaggacccagggcctccctatttgcagttctccttccggaaccctttgtctaggtcgatgtacttggcaggcagggggctgtgggcacagccgccctctccttcaggatgttgtttttgtaatctgtgggaggagaggaggctgaggtccccgctcccaggatgcacttcccagcccgggacggagccgcgcctgtgccctcgtgtcccagcactgcctcacctagctggatgtcctcactcctgtaaagcatctggtcccctgcagccacagcgaaccgcgtccccggtcgccaccgcggatgagcagcgagaagttgccgtcgtcgaagccgaggccgagagctccaggcggccc

SEQ ID NO: 462 - DNA, 1521 bp, Homo sapiens
tttaagtgtcatgtcatactaaatatttattttctgcagactgacttcggagtaattcttgagccaggaggggagaggttagtgttcaaattgctgagatcttaggtcaaaaagctacagaaaagaaatcactttgaaaaacacaatgactcagaggcagtcaccccttgccagcaattccaagagctgaggaggcttcatgcctcaggacatggtgactagttgagtgaaccagagattgaggcagtggtttttacaggggaagaaacaagccttgggtgtatgggagcaggaaaggagggtgacagactggagaaatgataaaggccattttggaagcccacagggaagtggtcttgggaaacctgaagacactgggatattcagaaggccaaggggatccagcttatcctgttgggcaaggtgctgggagtgaaggcaggtaagccatgtcaagggcctgggaagcaaggggaaaactggaaggggtaccccaggtgaagaagggtatggaatggggtgcagaagtccatggagatgaccggcagatctcagggcggtttctggcacatcagaagttgggcttatgcttcttgagctccaccataaggtggtgaatgttgatgagctcagcccgggcagggagggctcggagctgcggctgggacagccacccggtggaagcgatgatagagctggatcagctgggtcagcgctccctgaatgatactggtgccatttctgaagttggtgaaactccgcattacatcctgactcagagattccactgatgatttccaggaactaccaaagccacggatcagctgagttacccgggcttcttcccctcgaagtcgctcagcctgtccacgctcaatcaaagcctcagcctccttcacaaatgccactaaaaccccaaaagggggagacagcaactcttcaatgaattcctgtgtccgagcattgagcagctgctggaagctctcaacctctttgctgtcatctgcagcccgctccatcagcacacccagcatcatgtcatagttgttgatcagaaacacaagctgctccttccttgaggagaactcagctgccactcggaggacaaaattctccacctccacctgcagctgtcccagcaattgcatggtccgttcattaggaattgtctggttgatactgacaagagcggaggagaactctgcatagcggcgtgtgatatagtggggccgagtatccaacccccctaggcgctgggggtcagtgcttcggacgctctgaacattcatctccaggatcagttcaaaccgtggccatagcaaggcaagcacctgttcccagtacctgtccagggcaggaacatccctctttgctgcaatgttacggaaccggagaacaatgtggatacagagaaaaacagcaatggcatcgtagcagtcagctagataagaatccaggtgtttcagggtcatgctgagtgtacggcccatgacagcatggaacaggtcgtgtgcagctggg

SEQ ID NO: 463 - DNA, 1138 bp, Homo sapiens
atcgtttttgaaggagatctttttaaaacctacaagagacatctctctatgccttcttaaaccgagtttactccatttcagcctgttctgaattgggtgactctgtcacaataacgactgcggagaactgtagcgtgcagatgtgttgcccctcccttttaaaattttattttcgtttttctattgggtatttgttttgtttcttgtactttttctctctctccttgcccccctcccgccctccccgccccataccttttctcccctggattttcaccctttgggctgccttgctcatctttatgccccagcactaggtacggggcccaacacgtggtaggcactccatcagtgtttgctgaattgaaaacattgttgactgtggcttctatcagagtgtctaccttttgcagctcttcccctccctcatttaatttgctgcttttaatctacgtggtctgagaatttgtgaaaccagtgttgttagaagtgtatataatctgaatcaataagctctgaatggtgggccaagggcctctcttaatggcacaaagatgcatggacttcatgacagctcttttggtgggctcagaagccattttttatagaatcatggaatctagaatattcctgctggaaagaacctgagagttggtttggaccaattccctggttttccaggcagatgaaacaggcccaaagaggttaaatgactgggtgaaaatcacatagctgtctggtgccagagccagcctatagtagagtcccctgaccccaagcccggtgctcattccactacctctcacacttcacaacaatttcctcaacacttgagggcccagaaagtctgatctctccagaatgatcagcccagaggaatgctgagaaatcacctggaggagggagcagaaagagaaggtttttaaggaggggcttctgaatacttgggagatacggaacggaccaaggaccacactccagggtgcattcgttgctccctggggcaccacttctggattacagtgtgccaggtcctttggaggccctaccccttccccattcattgccaccagtgagaaatggggggtgcccctgtgtaaagaaacctaccaaaggtttacatttgcaccttagcctc

SEQ ID NO: 464 - DNA, 847 bp, Homo sapiens
ggcaggaggacgaggcagggcgggcgggcgctctaagggttctgctctgactccaggttgggacagcgtcttcgctgctgctggatagtcgtgttttcggggatcgaggatactcaccagaaaccgaaaatgccgaaaccaatcaatgtccgagttaccaccatggatgcagagctggagtttgcaatccagccaaatacaactggaaaacagctttttgatcaggtggtaaagactatcggcctccgggaagtgtggtactttggcctccactatgtggataataaaggatttcctacctggctgaagctggataagaaggcaagtcaggattaactatttacaggctgtggattgggtgttggtctgcttcatcgataaggaaactggagcaactcaccctgtcttttgttttctgttcctttttgtttgtgtaaaagtttttacagacaaaaaggttgcaggtttccagtaaatggagatatcgattggaaatcagatctggcatttctccatagtgctcactcattggagcatatgatggttaattgcatagcttttagttgaccttagttttttcaatgagattgttaatcttataaactgtgaatcatccaccatcttgtaagaacctgttattgctttgtttgaacctgtgacagattatcttccaactttaaagagtggataattccattaaccaaccaaaaagaaaagtagtaagataaacattttcttcaaactctgaaaattatcctttttttttttgaaacccccactgtcctcccaagtcacagcaacaagttaaaaagataatgggaggtggggaagagtggaggacgtcgac

SEQ ID NO: 465 - DNA, 482 bp, Homo sapiens
  misc_feature (1)...(482): n = a,t,c or g
tttggacacntnnnnnnnnnnnnnnnnnnnnnnnnnnnnnnnnnnnnnnnnnnnnnnnnnnnnnnnnnnnnnnnnnnggcacgagcattattttcctaactgggtgtattcaagctcatttgtacgggagcagtagggggaaaggaaataatcaaaacctaaaagcgacctttactagaaggagcacaaacagcaaacctgtcttcccgaaagtctcgcttttaatattctatccagtcatctccatcagccatcaaaaaggcctcagaaattctgctcctttggcaagtaagagttgaataactccattccatagcattgccagaaaatataactggttatacaagattgagggcnnnnnnnnnnnnnnnnnnnnnnnnnnnnnnnnnnnnnnnnnnnnnnnnnnnnnnnnnnnnnnnnnnnnnnnnnnnnnnnnnnnnnnnnnnnnnnnnnnnnnnnnnnnnnnntggggaggctccaga

SEQ ID NO: 466 - DNA, 402 bp, Homo sapiens
gggttgacccacatttagctccatcctccatcctcaccctggcgcgtgggcgcagctgcaatgaccctcacaggccacgactgctctcttcaccctcatttcggtggcttagcagcaggctgggtgcagccctcagccaggagctggaaacacgcctcccccacctcccaacagtgggaccctcactccctcacctgcctgtgctcactgggcccagtgctgagcaaacaaagatgagttttcagtcccggggccacagtgcctctggcccaggtgaggcccctcctatacagcctcattacctcaggccctgagagccaggccatcccagatgaccagggtcccacaggcaccaccgcccactgggccgggacccgtcgttcccccatgtgcaaacaccaa

SEQ ID NO: 467 - DNA, 1694 bp, Homo sapiens
  misc_feature (1)...(1694): n = a,t,c or g
atgaattaattccagttcttttcatgtatctttgaacctaagattatgaagtaatttccctattagggactagaatgacttcagttttttcatttgataaaaatcagaactgctacctttcccttttttaatgatgcaaaatgtagatgagtgcattaaggtttgtaagatctttatcattttatgtcattcattgaaaattgaaatgttcattctttttaatgttttcctatttccttttgcctaggcatttgactttggtgttttaagttctgtagttccatgacatcattgtttgctgttgtgttacagagagagaaggaacctcacctgtgggcncagctcaccccacatccgtttctcattacgtgtaaataaactgtcagagctgatgttacagcttttacagtttaaagcattcccctcgtctctagttccttttttcttgtttacatgttttgggcactttccctcattcaccaccttccagggtttcatagaaaataacttgttacaaaatcagttcaattctaatgtggacatagtggcatgttcataattagaccccatataggggacactgagctttaaatcgttgattcctaaactcctatacattaaaaaaattcaggccccaggccccctcaaagccctgagaaaatttaatttgctcttaatttaatgttccaaaactcactcttggaaaaatgcctgttggaaaactacaggtgggtcacatgtgggggctgtctccgtgacactcaggattccagtcagaacctaatcctcatatctattgcctacaaaaatagaccaagaatgttgctgctcttttataatcctttaaatatttaacattcaagttttctttgtcttaaattcagcctcttcctaaaagcaaaaaagaaaaaaaaaacctcacagaattgtgttgagatccaccgctcacacgccgtacaccacccagtggcttcattctggcttagccgcagaggcaagaaagggaccccacttgctcccatgcccacctcaagaaaaaacataaaacaattttttttaaaaaagaaaagaaatctacctcagttgacaggattccacctttagggtttcttcaactttttaagtcttacctgttgagtgtaacttttgtaggcatcttgcttttccaagcaagctagtgaggcatgacagagcagaagtctgtaaatgtccctgtgatggacctctttctagcatgttgcagttttatttttaataaattggtaagtgaaatgaacgtaaaggtaattgtgtacgttttagacatgaccaatgaaaatttaaaatgtagcttccatacttgtgcataattccgaaagtattttattttttatcaatcagtgttaaatagctttttgtacaggcttcaatccatttttcgaagtgtgctgttttttaatgaaagtaacgtataatcgttttcacatcccatgggaactgccgtttacacattgcaactttttaaacttaaccatatttttcaaaattaacgtttttggagggagaaaaatccccgcttgctaaatgatactaaaccgttgtttgggctcttataattaggtcctgagattttataaaaatttagtctgtagctttttaggttcttcactagagttggttgtacataaaaataataaagaatataaagtatcccg

SEQ ID NO: 468 - DNA, 530 bp, Homo sapiens
tggaactgggcgatgtgcaagcactttcactgtggcaaaaatttcgggacttgagcattgaagagtacattcgggtttacaagcgtctgggagtatattttgatgaatattcaggagaatcattttatcgtgaaaaatctcaagaggtcttaaagttgctggagagtaaaggactcctactgaaaacaataaaaggaacggctgtagtagatctctctgggaatggcgacccctcctcaatttgtactgtaatgcgaagtgatgggacttctctctatgcaaccagagatcttgcagctgctatagatcgaatggacaagtataattttgatacaatgatatatgtgacagataaaggacaaaaaaagcattttcagcaagtattccaaatgctgaagatcatgggatatgactgggcagaaaggtgccagcacgtgccctttgggagtagtacagggaatgaagactcgaagaggaagatgtcactttcctgggaagatgttttaaatgagattcaattaagggatgct

SEQ ID NO: 469 - DNA, 510 bp, Homo sapiens
cagactttgacacatctcttttgccaccaaatcttatctgctcctttgagtctctcttgcccagtctatagaaggggcatatgtgtggagagtctaatatgcaagttgttgtttaaataatattttctgataatattgatccattgagctcttttagatcatgctgggccaagcactgtcagccatctggtgggaagaccttccagatgacaagcatggcgctcattggttgaactgagaggggtcttttccttggccacttctccttgccccctcgactcttagcttgagctccagtctttttgagagcaccagtggtttctagttgtttagttggccatatgtgacgctatattggaaaggaagagaaagagagtatcagttgagtgctaggcatcacacatacattattttagttaaccttcccagctctgtgaaatgcagataacatctctaggctccaggaagatcagtaacttgcctaggttacacagatgccagaacaggaat

SEQ ID NO: 470 - DNA, 320 bp, Homo sapiens
  misc_feature (1)...(320): n = a,t,c or g
ggagaggagcttcaataccctgtttcaaaaaaaacaaagaagaatgttggactgggaagaggtattaaatgttgagagaccagagagctgtaatatcaggtcacacaggtaatgagaagctaagacaaatcacttaacctgagtatcgatttcttcatctataaaataaaataggccaggtgtagtannnnnnnnnnnnnnnnnnnnnnnnnnnnnnnnnnnnnnnnnnnnnnnnnnnnnnnnnnnnnnnnnnnnnnnnnnnnnnnnnnnnnnnnnnnnnnnnnnnnnnnnnnnnnaaaacttatcaaaaaaaaaaaaaa

SEQ ID NO: 471 - DNA, 491 bp, Homo sapiens
  misc_feature (1)...(491): n = a,t,c or g
tgctggcagaactgaaatataaactgtaaggggatttcgtcagttgctcccagtatacaatatcctccaggacatagccagaaatctccattccacacatgactgagttcctatccctgcactggtactggctcttttctcctctttccttgcctcagggttcgtgctacccactgattccctttacccttagtaataattttggatcattttctttcctttaaaggggaacaaagcctttttttttttgaggacggagtgttgctctgtcacccaagctgggagtgcagtgggcacgaatcttgnnnnnnnnnnnnnnnnnnnnnnnnnnnnnnnnnnnnnnnnnnnnnnnnnnnnnnnnnnnnnnnnnnnnngactacggggcacggnaccaccacgtttgggctaaattttgtatttttagtaggagtnggggttttcaccctattnggtcaaggtnggtctttgaattcccnaactcagggncatcc

SEQ ID NO: 472 - DNA, 368 bp, Homo sapiens
  misc_feature (1)...(368): n = a,t,c or g
gggaccaatctagactgatgctgagaatcttctgtcaagacctgggccttaaacctggccatgaagaattagagacccctgttaattcaggatctcacatggcagtaaaacatctcacccagcagcttacaccacacctccctgttacatcttttattcttagcatatgtaataacagattcttgttagggagtagggcactggaatttttattcaaggatatttttaggggcatctatttaaagggatcatatagttttcttctttacttttggggaagttgtgattaatacaacttaccttgtttattatatttaataggatattcttaatgctgagacattgttgcctttccggntttagggttt

SEQ ID NO: 473 - DNA, 1430 bp, Homo sapiens
  misc_feature (1)...(1430): n = a,t,c or g
ttttttttttttttttataaaaaggtcactttattttgccttttgtttggtatgctatcaatgccctttaaaatcctactattcaagtacaaatgctgatgtttacaaagtatttacaattttagtcttgttcctttctatcttaaaacacaaccagctaactggttacaacagttaacaaaataataataataaaggtcacaaaaagagaaacccctgtcttatcaggcaccaaatctgaacaagggcttggatccaaccttctgcttcccgccaggtgctttaaaaacagtctggctaactgtttttatcatcagaataaacgtctttctttaaagaataggcaggggcaactgtttcccaggggtcgccaattagagtctgacagtgttcgggctgctgcctttatagtctgtgttctccaaagtttcccaactcttacttgcccgtattggaatgaaccccagattcaccaaggggaaggccttagacaaccagctttcctgaacgcgtacttaattcttaggttagaaacttttaaccctttaaaagggaaggccaagaaaataacacactaaaaggagagtttttacgtacacgactaaatgaatttaactcaggtcaacggtagcatctagaagttactaaattgagtgctacgagtaaaaatatgtccgtgttttgtattagggaacagccaaaggaaacacacttgagagacaggagancnccactgacgtgagatcggggcggaaactccacattgcaaatattcagaatcccattaagctctccaaaaaagcatttgagagatggtgttaaattctcttgtagtgttttagattaatagagcgcttttacttagacagttatgtctaggatattctaaaataaggcactcaacattttatcttcaactataaggagactaccaagatttgggaaagacaaaaaaaatgaacagggcacacaaattaaaacaaatgacaaaggcagaattcctagatacttcagttctatcacatctgcggatgaggaggagtaaaagtttccactgggagccagatgtgaggcgcacacagcggccctccctccggcaagctgcgctctcacggcacgtgccaagccagggagaacgggttggttagaacaaacagattccagtcctctgctttggtatgttcaactaactaaaagattaatttcttctgtttcttcaaagcttggtttttacttttctccacatttcttatcaagagctcaagtgagctccccagttgatttcactgactcctgctgtatcgctgtccacagaaacctgtgggacagaataccttcctcaatgtcacttaaagtgagagaatggggaggaagcagatgaaatacaatttaaaaacagaaaatctttattgtgccataactgattttta

SEQ ID NO: 474 - DNA, 305 bp, Homo sapiens
cctttcagacttcctataaggcccacttaagttgggaaagattaaggtgagtgaagcagcgttcttgaagcagttactaaaccagaaaggaggtacacagcaatagattgtttcttggcactcgtatttggaagggggctcattagtcttccctaacagttgtaggaaggtggacttgggttatttcagactttttttagtttgacattttagaactggttcacgttgcatactggtaactagcagtggtgattaactgcatttttagtggcgaacaagagtgaacttaaaagtcaagggaaatt

SEQ ID NO: 475 - DNA, 2249 bp, Homo sapiens
gggcaccttctgcctgcatcctggtgggcagacccagttctttcattgcagtcaacttgttcacaggggaaaccctgtggaaccacagcagcagcttcagcgggaatgcgtccatcctgagccctctgctgcaggtgcctgatgtggacggcgatggggccccagacctgctggttctcacccaggagcgggaggaggttagtggccacctctactccggcagcaccgggcaccagattggcctcagaggcagccttggtgtggacggggaaagtggcttcctccttcacgtcaccaggacaggtgcccactacatcctctttccctgcgcaaagctccctctgcggctgctctgtgaagggtctctacgagaaggtgaccgggagcggcggcccgttcaagagtgacccgcactgggagagcatgctcaatgccaccacccgcaggattgctttcccacagctctggagcagtgcgctacctgatgcatgtcccagggaacgccggtgcagatgtgcttcttgtgggctcagaggccttcgtgctgctggacgggcaggagctgacgcctcgctggacacccaaggcagcccatgtcctgagaaaacccatcttcggccgctacaaaccagacaccttggctgtagccgttgaaaacggaactggcaccgacagacagatcctgtttctggaccttggcactggagccgtcctgtgtagcctagccctcccgagcctccctgggggtccactgtccgccagcctgccgaccgcagaccaccgctcagccttcttcttctggggcctccacgagctggggagcaccagcgagacggagaccggggaggcccggcacagcctgtacatgttccaccccaccctgccgcgcgtgctgctggagctggccaatgtctctacccacattgtcgcctttgacgccgtcctgtttgagccaagccgccacgccgcctacatccttctgacaggcccggcagactcagaggcacccggcctggtctctgtgatcaagcacaaggtgcgggaccttgtcccaagcagcagggtggtccgcctgggtgagggtgggccagacagtgaccaagccatcagggaccggttctcccttctgcggtaccagagtgaggcgtagaggcacgccagccagagcctgtggagagactccgcctgctgacactaaacgtcctgggaagtgggcccttccctgggtctctgcactgactcccccactcctgaccctggtgatggtcgccactgggcagcagcagccttaccagtcctccatgatcacacccagggacctgcatgggtgaggggacaccctgggcctctctcccgcccagcatcctccctgagtccccacacagggcctcactctgcaccccaccagggtcccgctcacaccaggcagccttcatagtggtctccctggccaccttgggcagagctgggtcatgcagcaccccatccttacccggtgccctctccttgccagcttctccccaggccagagcgggccatcgcgtagaaagaaccagggtgtccccgggacaggccgtcccccaccccatcctgtagaagtccattccccttttccctcctgtgctctgtcccccaaggagtcatggaactcagggtactggggcctcaacgggaacctgagacagctccagcttcgcagcccttcccggagctacagggggatcctctagcatggggggtgtgacttggttcctttgaccaggtcctgtgaggaagcctggagcaagggtctcccccagcaggatgggtggggcctgctctggagctgagcccgtggccgctcacaggtgtccttagtggtgttgcagctgtctactggctgcatgtgctgtgaatatcccaaggaactggctgtggaatgcgtgtttgggtcagtctgtgccctctcagtagacactggagctgctctgtccctgaagaggccccgtgccccaggcatggcaagcgcctgcctctccccttccggtgctcacacgcccacgccgtgccacccgatgcaggactcacctctgtgccttgctgctcctgaggcccaagggcagccatggtgctctgtactgctcgggccgcccaggtcacagagcctgagcttcgtagccaaagcagcctgatgacccacccaccaaggaagaaagcagaataaacatttttgcactgcctgaaaaaccccggtggtcaggcgtgagcct

SEQ ID NO: 476 - DNA, 725 bp, Homo sapiens
ttttttttttttttaatttttttagtttgtcaacatgtaatgccctgggtttattttgtgagaattctatcacaatttttccaggtgggattaaaaaccttaaggataatgtatgccattggactgggcattcagacttcggtactgacaaagcactagtagtagtctgttaagtaccattctcttcacagaagagaggtcaaatatttccaaaggaaggcacccgatatttgtggttctggccttgcagccttctggagaatcttaaaaggaaaaaagctggctggctgtttttagaaactggaatgatgatacacgtacagcaattactgcattcttctcccttatatccttttcgtaagaacaagtaaagaatgaagtcttttaaacaattcgacaataaaaaagtacaattttttttgtgctaaaaaaagggcaagacaacataaactccagttgtaaggactccatttgcatacttgatttaacactttttggtgtggaaggaaatgggactactgggctgttcgcagagcagcaacataatattagtgctttaagtaccagaaaccacccacagctttgtgggcaagttggggatggaaagattcaagagacttcatttttagcttgttacttgtcctaatgatagtagaccaggaagatccccatttaatagtacattcccccatttttaaaaaaactgatgccttttttttttttgc

SEQ ID NO: 477 - DNA, 436 bp, Homo sapiens
  misc_feature (1)...(436): n = a,t,c or g
ttttttttttgttttgaaagaaagtttattggccctagtaaagttttgaggagctggcaagttctgattggtgtgtgacagtggtgggtaaaaccagttttgcagtcacagtaggttgttttaatagctgttagataaaactggttttaggttacaacaggtagttttagcaactaggtttgtagagaattatattttgaagcaatgctgtgtgccctgagtgcctttttcccctgggcctgtctaccctgttttagttgcatatgacaagaatgaccccatttgtttgatcaacttgtacagatcaaagaaagtttaattttcttttggggtaaagccagttaggcaaacacatacggtgtgtgatctcctcctcaccttcacttctttaaagccccacccccctttgtttttgacaggntttcagtttcagact

SEQ ID NO: 478 - DNA, 1262 bp, Homo sapiens
cccagctggacctgcaaacaggccacctgagcctcacacccaggttcagagggcacaagcagaaacaggcccgacttccttcccctcccctgtgtctgtctccatgaagcctgaccttccagtctctcttcccactcagactgccccaaaacagccgttgtttgtcccaacaacctctggccccagcaccccaccaggactggttctgccacacactgaattccagccagcccccaaacaagattcctctccacacctgacttcccagagacccgtggatatggttcaacttctgaagaagtaccccatcgtgtggcagggcctgcttggctccaaagaaatgacacagctgctgtgcagtagccacttcgtctctggcaacaacgtcctggcccatcggtccctgcccctttctgaaggagggcccccactaaggatcgcccagaggatgcggctggaggcaacgcagctggaaggggttgcccgaaggatgacggtggagacagattactgtctgctgctggctctgccctgtggccgtgaccaagaggatgttgtgagccagaccgagtccctcaaggctgccttcatcacttacctgcaggccaagcaggcggcagggatcatcaacgttcccaaccctggctccaatcagcctgcctacgtgctgcagatcttcccgccctgtgagttctctgagagtcacctgtcccgcctggcccctgacctccttgccagcatctccaacatctctccccacctcatgattgtcattgcctccgtgtgagccactgagtggttatcacctcagtgaatcttcccagggctctgcagtaaaaacaaaggacaacccagccaagcagaggaagaagctgccgaaggggacagactccactgccagacggccagccgtttgctgtcctgccgcccggctcagtcggccagacttcctctaggagtggtgctgctaccttgtatgtttacataatgctttagcccaaggacacatcaccaacccatggactcgcagacaccggggctgggtttctctttcctctttttggagaaaaggaacagggcagtggaatgaaaattttttgtttgtttgtttttaagaaacaagaaaacagaactgcctttgcactaaattagtgacttggacttttgcccagtgaagacaggctgtgacactctggatgtcttggtgtgtgtagacacacattgcagactcttaacgcaggaaggacttcaaacttctgctg

SEQ ID NO: 479 - DNA, 1872 bp, Homo sapiens
ttttttttttcaaattttagggatgatttttatttacaaaacagattggtacttttgttttacaaaaattacaaaaaatgactcttaaaaatagaaatagcttctcagactcttgggaactacttttaagcaaccaaggagttagaactcaggatggttttcttctttgtaacagcaacaatgaccacggctctgtgccatggcaatcactgctgagtgtcttctcctacaattacacaggcccgagctgtgtctgggtgggaaaggtctccactcagggtcagagtctgaagggggcaaggatcttcttcattaatgcaggaacctgtgcagaaccaccatcagattctctccacagcgggagacctggcgctccatggccaggcgaaagtcctccttcacgcctttggtgatgcctcgagttacagtgtggtgcttgatcagcattccttgattgggtagtaattccagatgaattttcccaccttcctgagttctcaagtaggcaaattcctccagcatatcaatatttgtaacgtaattgaaaaaattctcatattggaaatttccttgttggcaaattttattgacagctttcaggaaaagattctcgccccgtggccactcttgctgaagcaacacaatcacatgccccaatgccatgtcgtctctgttgtctgtgaaagctctaagcttaaaacaggctaacattaaatggaggcagtatggcatgatagccttgctggtacaaggcaggagcttcagatccgaaccttttctaaatttgggctttactttcgagggttcctcctgggatttgcctccatcttgaatggggagtaccatgtagcacatcaaatcaaggactttttcacatgtcattctgtactcccctagcgcaaagtggcacgtcgccagctggatgagcgccctctgatgctccagggtcccctgccctgtgatctgtggctgagaaatggatccctggagagctgctaagtgatgcaggctggctatcgcctttttatattgaccctgatagatgatcatatcagtgaggaagattcttaaccaaagccaagtatccgtcttccaggccaagcaaatccttgtaaattctttgtcaaggaattctagggaatagagcaactcccagctctccctggccaatttaaagctttctaacacttcagtggagttagcaagttcggctttattgactacaatgtgacgatttcttcctttcgccgaacagtcttcatcgtctgaactcatggttttttctcttccttcagctagtttcctctttttatggatgtgtttattacgatcaatttctacatcaccatacacattcgatacatcttcaagaagaaccagtggaacttggctcggggcattaggaccttggaagagagatggctgtatgctgttgacatactggaatgcattcttaaagaagaccagcatggtggaatacaccacttggtttttatattttgcatgtgcttcactatcaaagttgttcatgtatctgcagagatccttcattctatgcaaaatatctccatagcttcgtcttcctttatccatctgccattcacatctcattccaacaacattcaaaatcttaaacaacctctcccaagggtccacgatctgggatgatttttccgtcagcccttctattatgtacttctgagagctacgtttgctaggtgacattaaatcagatgtatcctgggcgccttgatgctgattttctatttgagtagacctagtgacataattgatataaaattcagctgctttgttcaagtacttatacaataaattggcaggtaatcgaacatcatggttgttaattattag

SEQ ID NO: 480 - DNA, 445 bp, Homo sapiens
cttttctgtatgctttttttacaaaactgtgagccacagaggttgaccacttagccaatttgttgctagaagggagaaaaaaatctccaactagcctccagacaaaacatactcaaattcaaacagcagttagttttaattaacatacagaagtaattttagactttcagatttctatgctgactagaacactttgcaggctgaagctgacattattaccaaatacttcatttaagtacatactctgaagtgtcaggcttccagtatatatagcaacgctctgagagacaaactgggctcatatgacggggttgcattttattttcttaacaggtcttcaaattgggcagttctgaaattctgtttggtcagttctagatggtacgtcatgtgaatgcaaccaagcactgtagttgaaattgtgttatgccagtactcatatgtg

SEQ ID NO: 481 - DNA, 570 bp, Homo sapiens
ttttgaaagatgtgaaggggagaaacacatttactccccaataattgtacgggaggtgatcgaggaagaagaaccaagtgaaaaatcagaggccacctacatgaccatgcacccagtttggccttctctgaggtcagatcggaacaactcacttgaaaaaaagtcaggtgggggaatgccaaaaacacagcaagccttttgagaagaatggagagtcccttcatctcagcagcggtggagactctctcctgtgtgtgtcctgggccactctaccagtgatttcagactcccgctctcccagctgtcctcctgtctcattgtttggtcaatacactgaagatggagaatttggagcctggcagagagactggacagctctggaggaacaggcctgctgaggggaggggagcatggacttggcctctggagtgggacactggccctgggaaccaggctgagctgagtggcctcaaaccccccgttggatcagaccctcctgtgggcagggttcttagtggatgagttactgggaagaatcagagataaaaaccaacccaaatcaaaaaaaaa

SEQ ID NO: 482 - DNA, 339 bp, Homo sapiens
tgtgtgtgtgtgtgtatcttcctctgtttctgcaaagacaagggttggagggatctacacttatttattgatgatgcttatctctaggttgtagactcgggtaattctctctctctctctcttttttttccttctttcctatatttatttctgcattcctctgcagtttctaaagtttctttttcacattgaatgtgttttgaagcaaacaaataactgtaaacaaacaagcaaatcaccaatatggaaggactgaaggaggcacaatccaggatgaatttcagagtgggacccactcttgctggggtggtagggaaggctgctctgggagtgacagct

SEQ ID NO: 483 - DNA, 1526 bp, Homo sapiens
actagttgaaagttttatttttataaaattaacataaaagattgtttaaaaatctgcagttatttacagcagtattgcacaagtaaagtggcaattaccctgtcaaaattcatcagtgcaaaacacaagtaagccagggaaactgcaatacaaatgctacatacgctgggtcctagaaaacaggttatttacagcagtattgcacaagtaaagtggcaattaccctgtcaaaattcatcagtgcaaaacacaagtaagccagggaaactgcaatacaaatgctacatacgctgggtcctagaaaacaggttagtgatggatcagtatacagccagatcagtgctatttataagtgggtacctgatgagttctgatacagtaactagtggtcacagaatctggacataaaacataagagagcttctatagtctgaaattcccaaataaaagtagtcaagttacttaactgggagcttgaggatgcttcttacacacaatgctgtttagagtagaccccaactgatttagcgtcatctgtagacacgtttcccccaccccacgtgtacgtgagtggacacacacaggcaccaggctaaatcagcagggatggcagaaccacctgcatggaaccaccatgaagtctccttaaagctcccataagctttcacatcttgacacccagtccagtggggccccaacctcccctgaaggagatggagtatcagaaggagggcatcgacctgaagaagcaggctgaccaaatgcagtgaccgtatgggtggggcgtggggagggctgtacagttaattagctcctgaagacaagttagtccaacctcaaagcacaggaagttgcacagcaggtgggggaaaacccagctactcacagttgttccacaaggggttagtggcctgaggtggtccttaggcaggagccacctgtcccacccattcacttgtcctgcctggccctagccctgaacaactgcaatgccagcacctctggaagtggcacattttatttcttttctaaacgcctgagttgtcagggataaattttcaatagaaaaatctttcccacctgctgataatactttggtttttttgttttcctaaagataaagcctggagtcagcaaaatttgcttgcatgataagctagttgctttggaacaaacagaaggttgctgggtatttcttggagtagaattttgtagcctgccagactgagtttctcactggcatcaaacacacacttcatcataagggcggcaaagccccaagaattgaaacccacttgactggaaataccaggacccgaaggtggagagccaccctggaggaccacgtggtctgcaatgagctctccagtcacccccgacaactctcaggagttaacttcatgggacggcaggggagtgggagacagggatgttaatacttttcagaaattaagacattaaataagcagaaaataaatatacaatatttctacaagttacagcattatgaaacagtaggacacatc

SEQ ID NO: 484 - DNA, 670 bp, Homo sapiens
ggcctctttgcacctccacgtgccttcagtgcaatctgacgagctgcttcacagtaaacactcccacccacttgactcaaatcagacttcagatgtcctcaggtttgttttggaacagtacaatgcactctcctggctaacctgtgaccctgcaacccaggacagacgctcatgtctcccaattcattttgtggtgctgaatcagttatataactttattatgaatatgctgtgatcttcatttgatggaactgtgcaagaaaagaacaaggaaaaatggatgtttcgctgcaggattaagttacaattatcttctcagtgaaggtcatttgtgatggggtctaattcttattacttcaacaaatattgttttgacttggggggaggggctataaccctgctatttttcattgactctattgaactctttaggatgatgactgatcatacaaaacgtattatcacattttcgtagcaaaattaacctttttttttttcagtcacagtatttgtgaaaagtaatgagccatagtacccagtcatgttaaatgaatattaaaagcatggagaggaaacatgaggaacaatgaatttcaacatatggcttcagaacatgaagatgttcttgtatggattatagtatctagtattcaaaaatgcctgcatctct

SEQ ID NO: 485 - DNA, 1509 bp, Homo sapiens
tttttttttttctgtttcaaattctttattatacatcatggttgcacaatttgaggctggttaaatacaattggttttcaaaatctctttgaatattttctggcttactacatgcaaatgaccatgaaaatatttggcattttaaaattctgaaactctgaataggcacttacatgaaggaaaacattaccattcatagatatccacatgtagaacagatgctccagcacatggtggtacatggacccttttgccagtaaagttggttcctgaccattttatcaaagtgccatagtagtaaaacaggtttaaagaaatgtaatttgggttatttagcttactcataaagtaaggttaactgacaagacttgcactgaagtgcataaaaaatattggtacaaaaaccaatgaaccataagtgaaagtagtttccatacagcaggtttcattttggttcctacactccacatttagtgtatttgcgatcagaccccatgcatatgaatggatgactgcaatcttcttttttagagacttaaaacaaatgacttgaatttagtgttaaaaaattaagagactagatgaagtttcaatatgagtttaactagccaaagttcgagtttaataaacatgaaattacccagatctagataactacatgcttcacaggtcctcctgagtcccccatcccaaaattttcccctgaaaagaaaatgaatgtatgaagaaaataatatttgcatacacatggcaaaaagattccttaaattgaaatatataaatacgtttcaaagtatttatggaaaaaatagttttaacaaatctaaaatgccaagctaagtcaactccacattgcagaaaacacacaacggtactactggaatatagcaaaactgttacttaatatggccaaaaaaaagaaggccataatgacctgccacataatcccttggggaaagaaatctaatattcatagcacagaagacctcaaagaggataaaattctggaagccatggaatggtactcagaagtgcctgcggtgaaacactccatatgcttttctcaaacacatatgttaaaaacaaatgtagttctcaaaaatattgagatgccatgttttaaatctctgcaggacacaagaggccactcaagttttctaattttatttgaacacaaaatatttaattttttgcatgtagagaataagaggtaatcattagcctgaaaagagaggatttataatcaacattatgcagaaagaaagcaaaattacaaataccagcctactcacatgaaaatttttcatgtttacgctgatatatatctgagtgcttatcatcaaagtaggaagttaaaaaaaaaaaaggcagcttaacaaagttccagtgtttcaaagaaagcacttttaaaaatgtatatacatgaacgaacatttcattatatcataaaataaatgctgcgctgtaagataaaggaagactaacatatatggagttttgggctttttc

SEQ ID NO: 486 - DNA, 11677 bp, Homo sapiens
  misc_feature (1)...(11677): n = a,t,c or g
tcctagttcctgcattttttcctctggttcttattagctttttcactttaaaaagtaaaaatacgtattacagttgccaagtttaaattattgggataaaatgccctaccacagaattaaaaccaaaataatgctcatgtgatgtcccttaaggtggtgagtgggttcaggaccctcagcccacctgctcagcagggagaaggcagggggggaggggtccctactcgcacaggacagcgggggacaggccagggcatccattcgagtccatcacagaagtggctcggcagactctcttttggaataagtagaaataagttttgtatctgaagttggttaagtttctctgaaattcgcatcagtcaacacccaggtcacagcttccttatcctctcttggagaggatcagggaaagggttgagagagccctgccttctcagagggcggccgagcgggctgccccatctgccatggaggcaggtacaggctcatggcgtggcgtccacagctcctaccatatccttcttgcttctctgcagagaatctggacgaggctagagaacagaaagaaaagagtcctccagaccagcctgcggtcccccacccgcctcccagcactcccatcaagctggaggaaggtgagctctgggtggcagcggccgccactgtgggagggtgcacggctcgtgcgcgctgtggcggaatgtggcgggagtcgtgttaacagcaacacggaagtgtgtgcttgcatcagcgccaggacgtgacacctttctcctcctatattgcttctgtcctgggtaactccaggcaaaacagatttgtatgtgagctgtgaccaggtaggaaggccggcctcgggggtcggaacccaccatggttgctggtgtccacgttgcccattgctcgcacaccctcgtgctgtgttgtcatgcagatgccaccttcggaggtgccctccgctgtgtgagccacacgccggctgcctctcagccaccgtgtgtctgtggtgtgtgatcccgggtgtctgtccctcggtctcgtacatccatgtctctcgtgaagcccgtgccctgcctttcttcttctgtaacctgatggctgtgactgaatgcatagattctctccttgtgcttttttctccctgtggctgcgtcacaagcaggagacggatgcgctagagagtacctgttaccctagtaagtaccgcgctgcctccgctctccaccggtgccctgcgctttgcctcattctcctgcttctttgttgtttattaagttttgttttctgtttatttaaaataaaaacagaagccccccttttttgtacccagtcccttggaggccttcctggaagtggttcagtcacctgagtgctgtcgtgccttcagcggcagcgggtacctccaccgacctaggtgccatggagcactctgggcctcaggagttcctacctccagcctttgagggtctctttggattgcttggtgggagggttttgccacactggatcagatgtaagtgcagcctcggttcagacagggtggggttctgccacctgccgtgtggggtcagattgccttggacctttgctgaagctggtccaaaggaggtgggcagaggagcggatattggaccctcgtaaagcagtgtgatgttcactcagatgatggcagctctccagagcgagtgccctggggcagcctccgtcctagcatcagccacaccatgcccagcagagcgggccccatctcctcagggggagcggcgcctgtgtgcccatagccctttcccggttctcatgaagcgtggcctggaatcagcctggggcagctggcagggtgggggtgcttccagcttcccaaaggtaagcactgagagtttggggcctgggcctcctgtgctgctcctaaccactcagctgactcccctggccctgatgtgtggcttgatttttaaacactaaacagcttgtggtgcctaacctgtcagttgctggtaactttgtaggccgtttacgaatggacagagcgggtgcccgggaagtgcaaggaaggcgcccccaggctgtgtcctcagggcgctgtgctccttcacagatggccactcctgatgctgggtggagtttttgcccccactccttgccttacaggccatctctttccttttaattaacttccagcctaaacggctttgttcttttggatgttgacgtcacacaacgtgctgtgggagttatgcacgattttctactggctgttttgggggagaccaggtgttgtagacccaaatttagacttaatttcagtactactagtacatgcccttagggtgacagggcagacttctcgtcacataatgaaagcgggacgtcgctcctttagtcgtcctcagcttgtgctgcagtctgtctttccggcggggggacccaggcctgggacggagtctggtgttgtcagcacactgcccaccagaaggagctaaaaactaccccgagactgagtctgtattttatgatattagctccatccagccgtacagtagagtagaccatattttaagtttcttgtcttggtaaaaatctgtagagtaaaataaaatggcagtttcgtgtgtggggctcccccatctcaagctgccctttgagatctgggcaggaacccttaatcccatctctcacctcacccactagaccttgtgccggagccgactactggagatgacagtgatgctgccacctttaagccaactctccccgatctgtcccctgatgaaccttcagaagcactcggcttcccaatgttagagaaggaggaggaagcccatagacccccaagccccactgaggcccctactgaggccagccccgagccagccccagacccagccccggtggctgaagaggctgccccctcagctgtcgaggagggggccgccgcggaccctggcagcgatgggtctccaggcaagtccccgtccaaaaagaagaagaagttccgtaccccgtcctttctgaagaagagcaagaagaagagtgactcctgaaagccctgcgctaacactgtcctgtccggagcgaccctggctctgccagcgtccccggccacgtctgtgctctgtccttgtgtaatggaatgcaaaaaagccaagccctccgcctagaggtcccctcacgtgaccagccccgtgtagccccgggctgacccagtgtgtgctcagcagccccaccccaccctgccccttgtcctctcagagcctcagcttctgggggagacatgctctccccacaggggggaggcactaagtcatggtcctggctggaaggtactgaaggcttctgcagctttggctgcacgtcaccctcctgagcctcacctttcctgccgtccctcctgttgtgaaatcaccacattctgtctctgcttggcttcccctccaccctaaagtctcaggtgacggactcagactcctggcttcatgtggcattctctctgctcagtgatctcacttaaatctatatacaaagccttggtcccgtgaaaacactcgtgtgcccaccagcggccttgaagaggcaggtctgggccagatgctgggcaggaaaccccagcggcagatgggcctgtgtgcacccaacgtgatgctatgcatgtctgaccgacgatccctcgaccagaatcagattcaggagctcagtttctttttcacttgggtctctggattcctgtcatagggaaggtatatcaggaggggaagaggcctttctagaattttctttgagcaggtttacaatttagcttacatttttcgactgtgaacgtgaataggctgctttttgctttcttctttccagaccccacagtagagcacttttcacttatttgggggaggcttcaggggactgttctcaccttaactcagccagaaagatgccctagttgtgatcaaaggtaactcgaggtggagggtagccctggggcccctcgacatcaccgtcattgatggagcctgaaccgtgtgctcctcggcagatgctgttgttgttacttccctccaagaggctggaaaagggctcagagctgctgagcaggaaccggagggtgacccatttcaggaggtgccggtaccagcctgactaggtacaggcaagcttgtgtgggcccaacaggcccttggtagagctggtgccagatgtgggctcagatcctgggcatgatgggccgagccacctcggatcccactgattggccagccgagcgagaaccaggctgctgcatggcactgaccgccgcttccagcttcctctgagccgcagggcctgctacgcgggcaagcgtgctgcctctcttctgtgtcgttttgttgccaaggcagaatgaaaagtccttaaccgtggactcttcctttatcccctcctttaccccacatatgcaatgacttttaattttcacttttgtagtttaatcctttgtattacaacatgaaatatagttgcatatatggacaccgacttgggaggacaggtcctgaatgtcctttctccagtgtaacatgttttactcacaaataaaattctttcagcaagttccttgtctaaatctgggaagcagttttatattttaatttctttgttcccatgtttgtctcgtgctgaaaagagacctcctaatgttcatgtcttgataaaatgtcacctgcagccacgcgtgcggcaggacgtgccacccagcactcctggtgtccctctccacgggaactcagggtgtccagggaactgctggcctgtccttgtccccatggtcccagtctcactgtcactgtgtgctcatgtttgatggggagggctctgtgctggggacatcctgccagggtgcggggcacactgccagataccacctggccagggctgaccccagccttggaggagcctgcctgagtgagtccccaggctgccactgtgcagagggggaaactgagggtctcaaagagccttggacccttccggtcagtggagccattcattcagctccagctgcctttcctggtgtgggtagaagcacggctatatatggcgaaaggcacttggtataaaacaaacaggtgctttatttcatcatcagaaacctggtgcatagtttaaaaaacaaacagaagccctgacagccttggagtgctgcagctcggagtcactgaaggagtaagtaagtctggaggagctgcctgagcttcctgcttaggggccggcccccacccacagggtctccctggactggcggggggtgggggtcaggcagtgggcaggggcctgacctaggctcccactctgcctggtgcccacagcctgggcacagtggctcagctactcagccttgagcgtctgtgccgggtaactcagcttctgcaggaggaagaaggggagcaaaaagagcccggaccacgtggtgaagcaggcctgggccccggccagccagtacactgcggagagacggtggcgtcacccagtccccgagggggctggcacttgggaggcgagggcaggtgcttggcccccagcctgccccagcaccatcccgcgccctcacctgaagcggccaccaggggccccgcggccctggccagagcacctaggctgcgcagtgtacccatgaccgtgcccttctgccctggtgagcctgtgggaagaggcacagtcaggcaccactgcccttctcccgctcaggtggcttcggccgagggaagggggctcaccatagccagcgaccacggaggacaggcagggcaccacaacggcggcggctggtgggagacatcgaggaggtgcccgtcagcccaggggagggtgcatcacccagcccctgctgcccatcggatcccctgccagggcagggccactcaccaaaggagtagagcagcagccccaggcccagcacgggcagagaacgtccccagccgatgaggaggaaggcgggcaccagcagcaggagggcctgcaggtgggcacggcagcctcagcacagcccgtgccctgcaggactcaggggactgcctgccacccgctttggaggaagccccctacccgcttcacggcagcaacttccccgccagggtggatccgccgggcataggcaccctggatggtggccatggtgaggccgatgaggaaaaacatcttcccctgctgtaggctgggagcgggtgtgttagtgcagggcacccggggcagggccacccagggcagggccagggcgagagtggctgccaaggcttcctggggatgggggttgcttccctgaagcaggggcgttatttcagggagacagcaggccgtcgccagatggggacccacctactgaactggaagcgctggtgtgtgaggaagctcagcgtgtactccaggcccgagaacaggaagaggtagaggaagtagactaggcccaggcggcgcaggctgctgagccctggggagaggtggcgcgtgctgagaaggcgaccacagcagggaagggcgccgcccggggaagcccaggggagagcaggctccacgcttgggttggtcgagtccttactgtctccagagggtgggtcctggccacgagcgacagccgagaagcgcagcagggccagggggctgagcagatcagccgcatcacggaaccccagggcgatagagggcgcctgtggggatggcattggagagcctgcaggagcggctgctggcctggcaacccacggactgtggcctcaagggtcccaacaccaagagagcggcccagcctccctggcatctggggctggcacacaggggcactttacatcgctatggaatcaagcctccagcccctaggcctgtgggtcccagaccacagccctacccgtttctccaggggcagcgtctctggcaggaagcagaagatgaacagcaggtcggaggctgcgaagagcagggcaaaccagggtgccatttccaggggcagggaggctccgagcatagggcccagggtgaagcccagtgagaaggccaccccaatgaccgcctagggaaaagaccacccgagctgcacagggagacccaggcccagaagtcaccaccaggaccccaaagacccagcctgtgcacttaccatgccttgactgcgggccagaggcgagcccaggtcagcaacgatggccgtggagaggctgacgttccctttgctgatgcccccaatcagcctggaggccaggaaggccgcaaagctccgagaggtggcccagactgcatatgaggtggccacacccatctgcccaggggcaggggccaagaggcaggggcggtcgcttaaggccaggagtggctcagagtagggcttggcaacccagacaacacccctcaaccctgccctatttcgaagcatctgagggccacttgcgttctcagtgccttcctaggggccaggagcagctccttgaaagcctggctctggaacaggagccactggtcccccgagaaccccctccaggatgcgatgagggccaaccagtggccatgaggggcccacagccacctccctctccccacctaaccccatggggctactggctgggtgggaggaggcttccccatgggcacccaggcccaggaacataccaggcacagcagcatcaccgggcgcctccccaagcagtcagaggtggccccagtgagtggcgcacacagaaactgcaggacagagaatgccgagccaatgagacctgagagacagatgtcaccatcatggggctgcctggcaccatgagctgtggtcttggggccctcaaggccaatgtccagccccgtcctgagggtccagtcatgctgggccctacactcacaggccatggcccttgagccgagggggccccaatggagagatgaggaaggatctgaacgtgacacgcggaggcaagggatcatgcccagaagccaggacatgtgggcaagggcaccagacatgccagcccagggagtgggaaggcaaggaccgagaattggggaggggcctgggctggaccacgtccaccaaacaaaggaccgtagagagcccgccaagggcacagagccagccatacctccgaacaggacactgttgtacctcttctccactggcatcccgatggcggtggcaaaccagtccaccccgccctgccaggagccatagagggggtcctaggggatgaggaatcacgataagggctggggaggtctgatgggcctggggggcagggggcactgtgggccgcagggcaaggactcacgtgggcacggccgtggctctccaacagcccgggcagcaggggcagcagcagcgtgaaggccaggaggtccagcaggaggccgagaaagacaacggtgaccacgcggcgctccggcggctgctggtggatgggtgggcgcggggtgcagcctccaccccctccccatcccatggtgggctgctctgacctggcctgggtggggtgcggcgggtcgggttagcggggaagccgagtcctccggggcctggcatacccccacacccgacagccggcgagcaccctaaaggggctgatggcaggggctctggctacggacgcaggggccgttctggcctgcgcgatgcccccgccccgaacccaggcagcaggaaacgcaggcttcggggattgcacaaaaaatagccgcaaaggcaacggtcctgagagaccagggtgagcacatcgcggacctggccccaccccaccccacggccgcgcctcccacgccctcgtaacagcgagagaaaacttgaagccgcggggaacccggatcccgatcccgatcccgatcccgatcccaaccccaaccccagccccggcccgcgccccgcgattccggcccctggcccggactcggtctccctggcgggggccatggggtgcacaccggacgcaggagcacccccaaccccgcgcgcctcccactccgccatcccgcgtgcgtcccggtccccgcccccaccccgcgcgcccccggtcccgccccccaccctgcgcgtccccggtcccgtcccccaccctgcgcgccctctaacccccacgccgcgcgcctcccaccgcccccaccccgcgcgcccctggtccagccccacaccccgcgcgccccctactcccctaccctgcgcacctctcacccgccccacccccgcgtaccccgggtcccgtctcctcccccaccccgcgcgtcccctgtcccacccccaacccgagcgccccctacgccccccaccccgggcgcccccgtcccgccccgcacctgccgcggctgcgcgctcgggacggacggtcgcacagacgcggaacagggcaccaggcacgccgccaggggcgggacggccacgcccggccacgccacgccccggaagtgacgtacatctctgcacgttctcttccggccggaggcagtggcggggttctcgccggtcctgcgggtcgctgctcggctgtgggttagcagcaccctgagcggagcggaagagctgcccgccgccgcgtaaccccgaggccgagactcctggcctggcctccttgggcccacgacgcctgccccgcggagcggacccatgggcctgaggtttgtgtgcggggcctcaggcgagcgctggcgcagcctgtcccccatcgtctgcgccctgcgggcctggccctccccgtggaaggaccgcgggcttcggggccccacgctggggggctgactcctgccacacacacagcggtggccgcgggcctggggcggcagcacagccattctgctcgggctgcgtgagctgaccccgctctctgtgcacctacttttgctgcgtttggtgctgagcctgaagtcccaggacaggcggctgagggggaaagatggtgtgaattgggtgggcagagacaactgaaagccacaggacccggttggcacctttttggccgcctgcgcctttgcctgcagccccgctccctgggtcacccgaaggaggagctggcgctctttccgggcgcagaagcacccgacccacgctggaggaaacggtccctctgggcaggagaagctttgggcctggctggagcacactcacggaaccacgccaacgcctggcctgtagccagctcccacctcccctcccaccttctaaaatgcttgcggatctcacgtggccgaccctaaccagatacacatggggaaaggaatcaggtggcacacataccgcctttactccatagagaacttccaattgtgggtaagaacaaagccccacctctgcctaatagatgcagttttccacctgcagccaaaaagacaacctgttattagcttttttcccagaggacaggcatctctatgaaactgccattgcaaaatttgccgacagtgagataaccagctccattttgcttctaacctccatgccctccttgtttactgctgcacgcaggttgaactgtgggaggaacttagtttaaaacaaagatgataacagccctttcccaaaggaaacctttcctggggattagcctgcttttgtgggaccaacagattagccacaagattagaaactacggttgaagagtcacgcagcgggaggctacaggattctgaccctccccaaactgctcctggcgataacatcaccatcgtaaagcctaagatcagcacttggtgggtcacctggcaccacccaggctcatctgatgttgtggcacccaggaactgactcagtgcgaaaacagcttcgactccctgtgatttcatctctgannnnnnnnnnnnnnnnnnnnnnnnnnnnnnnnnnnnnnnnnnnnnnnnnnnnnnnnnnnnnnnnncaaaccccagatgctcagggagaccnnnnnnnnnnnnnnnnnnnnnnnnnnnnnnnnnnnnnnnnnnnnnnnnnnnnnnnnnnnnnnnnnnnnnnnnnnnnnnnnnnnnnnnnnnngtctaggtaacagggaaggtgaacccactgggcagttacacttttatccacccttccagctggatcacgcgccctcttcaatgacatgacacgcagctagagtgtatgagcttgctgccggcaccttccgtcctggatcgcatagcaaggcctcaatggacagccaggtgcctggtccggtcccacttttttttctgtcctgttctcgtttcctctttgcttggccaaagagggttgggccagggtcctgagtgcaagggcttggcttggtgaattaaagtggcagtagccgtgtggcagagaaaatttgtagatgggtgaaatcctgggcctacacagtgacaaagtgtatatagacagccagcctagttggtggatgtgacaaccccagactcttctagatttgtggatccgtgcacctgccagacctgtctctgagccatctggggaggctgggtaagatttcccccgtcagggcctgagcctcatatccaagctgctggcttcagcccagctgccaccagcgctgtctctgtcttgcgctttccagagagagactgactcattttgagctccaggcctaccaggcagcccaaccgcggcagtaactgcctctcacactgaggatggctcatgctctggtccagccatggcttgaacacctcccaacaagaacaaagccagactcattctccctagcatcttcttccttgctcaaagatc

SEQ ID NO: 487 - DNA, 784 bp, Homo sapiens
gattacaggacatgaaaaagaactaatgtttgatgccaattttacatttaaggaaggtgaaattgttgaagtggatgaagaaacagcagctatcttgaagaattcaagatttgctcaagattttctgatcagaccaattggagagaagttgccaacatctggaggctgttctgctttggagttaaaggatataatcacagatccatttaagcttgcagaagagtctgacagtatgaagtccagatgtgtccctgatgctgctggaggctgctgtggcacaaagaaaagctgctaaatctatagccaaccaggggaccacagtagtgggcaagagtgatctgcatgttttttaacctgcttttccccactgcgcccggccataaatgaattatttttaagaggcattgattaaagattcacagcaaatcactagttaagcagattttttttctatttcctactgcaaagttctggtgccacatagtggtcagaaatggaagagagaagctgtcttaagccttgttcaagaagcaggaaaggcatcagaagaagtaacagttggcagaggggtctcaggaaaaacatcttccttctgatcttttgcatagcaccttttggaattttcatcatgtttgcttattaaacaaagctcctactgccatcatactaatcatgcaaaaagattgccaaatcatgtttggtaggaggacttttgaggtagcttttgaacaaatgtttttttcttttttctttttttttgcaataaagaaaacaaattaatcat

SEQ ID NO: 488 - DNA, 209 bp, Homo sapiens
ggtaggttttataatggctctatttcttgagtttgtatatatttgagaattatgttataaatatgttattatttcattgtctttgctatctatttgaaccaattttttagtaattgttaccgctcttttacttttttttttgttcctttgaggactgagtctcgctccagccgggggcaacagtggcaagcctccgtctgcaggaaaaa

SEQ ID NO: 489 - DNA, 1035 bp, Homo sapiens
  misc_feature (1)...(1035): n = a,t,c or g
gagagcacaactccaaatcatcttttattaatataaaaagggcatatttagcaaaagacacacagataaaagagtcactatggctcaggacacaaggcagggaggtgccaggcctgtgcccctgctgggggagaaggaggctcgggacaaagtgggagaagtgctgggaagggctgagcggtaggggccacaaaagttccggtgggcaacactgtcggcaggtcatgggtgggactcatgngggacctcgctgctaactcttgttgtgggggggtgtccttagtgctgccacctggagggccactccttggttcctgggagggggaccccaccaaggggacacaggacaggaagcccaggatggttagtgcaactcggggatgaaggccagggagaagcgggtgctcctgcagtggccggataggtccagacgctgaggccgaggcgcttcctgttacgtgcgggcgttccgctctgtctctgccaggcactctctgactagggcccgggcatggatgatacctctcttcaggcgctccatggcgctcttgctgccagcataggtaggccggatctctttgcccatctcctctatgactgacagcaggtccgtgtaggtgctctgggagccgatgggcgccgggtggcttcatcgcctgcacgtagcccatggaaggcggtccaaagtcgttaaacagcggtctgaaaggagcgccggctccctggcactgagcccgacggcgacgggacgcttcctgtagggaccggggtgcccggcccaggggtgctggagccaggggtgctgctgggagcaggggcgatgggtttgtaggacatccccaactcctgggcgcggcggacgccagccggccgctcctcgggggttggctgcggggccgctcagccgcgctctgattggcaagcgggctgcacgcccctgctcgtgccnnnnnnnnnnnnnnnnnnnnnnnnnnnnnnnnnnnnnnnnnnnnnnnncngtcttncncctagcgccggcaagggntcaannnnccc

SEQ ID NO: 490 - DNA, 1045 bp, Homo sapiens
ggaaacgtcaaaattgggatagtcggcagttctggcccctgcagctggaggtaccctgagttctgagggtcgtagtgctgtttctggtattctcatcgcggtcacctctaccggtgtggacaagtaaagtttgaatcagcttctccatggcctgggcaccagttcccggctgagccattttccttttggctaaaagtccccgcccagaggccaattcgtcgcggcggcggtggagatcgcaggtcgctcaggcttgcagatgggtcaagggttgtggagagtggtcagaaaccagcagctgcaacaagaaggctacagtgagcaaggctacctcaccagagagcagagcaggagaatggctgcgagcaacatttctaacaccaatcatcgtaaacaagtccaaggaggcattgacatatatcatcttttgaaggcaaggaaatcgaaagaacaggaaggattcattaatttggaaatgttgcctcctgagctaagctttaccatcttgtcctacctgaatgcaactgacctttgcttggcttcatgtgtttggcaggaccttgcgaatgatgaacttctctggcaagggttgtgcaaatccacttggggtcactgttccatatacaataagaacccacctttaggattttcttttagaaaattgtatatgcagctggatgaaggcagcctcacctttaatgccaacccagatgagggagtgaactactttatgtccaagggtatcctggatgattcgccaaaggaaataggcaaagtttatcttctgttacaagaacactaaattggaaaaaactgagaatctatcttgatgaaaggagagatgtcttggatgaccttgtaacattgcataattttagaaatcagttcttgccaaatgcactgagagaattttttcgtcatatccatgcccctgaagagcgtggagagtatcttgaaactcttataacaaagttctcacatagattctgtgcttgcaaccctgatttaatgcgaggaacttggccttaggtcctgatgctgtcta

SEQ ID NO: 491 - DNA, 103 bp, Homo sapiens
ggtatgttattgttttttttaaactagctcattgagatataacatatatatataaaataaaccgcatatatttaaagtatacaaattgatttttttttttttt

SEQ ID NO: 492 - DNA, 441 bp, Homo sapiens
  misc_feature (1)...(441): n = a,t,c or g
agggtgtccccttganttggagnccatctatgactgannnnnnnnnnnnnnnnnnnnnnnnnnnnnnnnnnnnnnnnnnnnnnnnnnnnnnggcacgaggcccactttcaccgctcctattcagcatagtactttaagttctagccagagaaatcaggcaagagaaagaaaaggcatccaaattggaaaagagaaaaattgtccctttttgcagatgacatgatctgatacttagaaaaaccaaaaatgctccaccaaaactcttaaagctggaaagcaaattcagcacagtggcaggatataaagttaacgtacaaaaatcagagtttctatacaccaataataaaatagctgaaaaagaaatcaagaaggtaatctgatttacaatagctaccaaaaataaaaaaagatacttacgaataaatttaatcaaggaagggg

SEQ ID NO: 493 - DNA, 1112 bp, Homo sapiens
gtgagggccgaggagaggcagggactccccggagaggtttgggaggaagcgactccaagtctgagggaagagctccagtgcgccagggccagcccactagcgaggaggaggaagcctcctcggtgggagttggctgaggggtaaacggcaccgacgtggatgcagcacctactgtgctccctcgcggttgctgtgtggctggggcgggcaaggaccccggtttcttcgtcggaggtccgcgcagggctcttgtcctggggagttctttggctcagggcatgacttttcgagttggacaagggaagggccactcagggactttaggtttacaatggggaaaagtaaacttgtgggttgtaagcggtaatgaaaggagggggtcctcgtgtgtaccaaccactcttagatagaaatgagatggaagaggtcccaacagcctggcaaaagcaatacagtatttttaaaatggtgtggccttaagaaacgcagcggttcgggggaggagacttttagaattatctttcaaacacttaagggaggagctgggtggttgggtggagtgacagaaggaaagcttttgtgcggaagaggaaactctggaaaaggcttttctggcttagtgtctagccctggtcggcttagtaaagggcaattagtgttgaaggttgtgcgtccacacctacttagtggctcagtggaaagcacgtcgcattatttaaatcctcttttaaagtaaaataactggaacaacgtttgacggtgttggggggtgctgtacattggctgataacacttagcaaacactgatcttactgtgtgaagtaataattagctgcggccgctgagcagagagcatttacattttcctactcttgaagtgaatgtgtgcctttactaagtacaaggaggagttatttctagagaagggaagaggctgaagtaaccaaaacgcgcactattttgtatgtgggtgaatttttatatctagaaacagctgttttagaattctggacttttgttgtcttagggatgattgattaggaagggactttaaccctggttttaataaccattttcaaagatacaaacacagaaaaaaaaaaaagtcgacc

SEQ ID NO: 494 - DNA, 660 bp, Homo sapiens
gtggggtgtggggaggcggaggcaccaactaagagcgacctaggcatcgcaaagccgccctcggggcgctcatggcgggacgcctcctgggaaaggctttagccgcggtgtctctctctctgggccttggcctctgtgactatcaggtcctcgcggctgccgcggcatccaggcgttcagaaactcgttttcatcttcttggtttcatcttaataccaacgtcatgtctggttctaatggttccaaagaaaattctcacaataaggctcggacgtctccttacccaggttcaaaagttgaacgaagccaggttcctaatgagaaagtgggctggcttgttgagtggcaagactataagcctgtggaatacactgcagtctctgtcttggctggacccaggtgggcagatcctcagatcagtgaaagtaatttttctcccaagtttaacgaaaaggatgggcatgttgagagaaagagcaagaatggcctgtatgagattgaaaatggaagaccgagaaatcctgcaggacggactggactggtgggccgggggcttttggggcgatggggcccaaatcacgctgcagatccaattataaccagatggaaaagggatagcagtggaaataaaatcatgcatcctgtttctgggaagcatat

SEQ ID NO: 495 - DNA, 1367 bp, Homo sapiens
agagaagacgtgcagggaccccgcgcacaggagctgccctcgcgacatgggtcacccgccgctgctgccgctgctgctgctgctccacacctgcgtcccagcctcttggggcctgcggtgcatgcagtgtaagaccaacggggattgccgtgtggaagagtgcgccctgggacaggacctctgcaggaccacgatcgtgcgcttgtgggaagaaggagaagagctggagctggtggagaaaagctgtacccactcagagaagaccaacaggaccctgagctatcggactggcttgaagatcaccagccttaccgaggttgtgtgtgggttagacttgtgcaaccagggcaactctggccgggctgtcacctattcccgaagccgttacctcgaatgcatttcctgtggctcatcagacatgagctgtgagaggggccggcaccagagcctgcagtgccgcagccctgaagaacagtgcctggatgtggtgacccactggatccaggaaggtgaagaagggcgtccaaaggatgaccgccacctccgtggctgtggctaccttcccggctgcccgggctccaatggtttccacaacaacgacaccttccacttcctgaaatgctgcaacaccaccaaatgcaacgagggcccaatcctggagcttgaaaatctgccgcagaatggccgccagtgttacagctgcaaggggaacagcacccatggatgctcctctgaagagactttcctcattgactgccgaggccccatgaatcaatgtctggtagccaccggcactcacgaaccgaaaaaccaaagctatatggtaagaggctgtgcaaccgcctcaatgtgccaacatgcccacctgggtgacgccttcagcatgaaccacattgatgtctcctgctgtactaaaagtggctgtaaccacccagacctggatgtccagtaccgcagtggggctgctcctcagcctggccctgcccatctcagcctcaccatcaccctgctaatgactgccagactgtgggggaggcactctcctctgggacctaaacctgaaatccccctctctgccctggctggatccgggggacccctttgcccttccctcgggcttccagccctacagacttgctgtgtgacctcaggccagtgtgccgacctctctgggcctcagttttcccagctatgaaaacagctatctcacaaagttgtgtgaagcagaagagaaaagctggaggaaggccgtgggccaatgggagagctcttgttattattaatattgttgccgctgttgtgttgttgttattaattaatattcatattatttattttatacttacataaagattttgtaccagtgg

SEQ ID NO: 496 - DNA, 1009 bp, Homo sapiens
tttgcaaaaaaaaaaacaaaaataagtgcattttatttaaacaacggaacaaacatcagagagcatcccctgcaaagcccccaccccagagcctgctgatggaagcggggctgcaggacgctctgccacaacggcagcatctccaactgcacaaagaccccttgctgccagggccaggcaccggcctagctccttgcctgcctgcctgaggatgccgtggaatcagggcaggggtggcacaggtagaaaagacagatggaaaacaaatgcccccatgaaatataccccaaagtgtcccaggaggataaaagcccatcatgaggacccagaagcccaaccccagtctttttttggccctcctggagaagttgtttttgagacctgagactcccagctgaaatggctccctgaggagccccagggagcaggaggggtgttctgaggacagcccctgaggaaaacacagtgcctgcagagggacagcccccagcaccctccggcagggctctggacagctaagcccagtcctgagagggtcaaaaagagagatggaatgctcaagaaaagaggcatttaaaaattaagagaagaaagacaaaaaagaaagggtctgatctgaggctgaggtattggagatagatgtgggcccagagaaatcgggtcccagggtacacacatgcttgggggtctttgtcctgatgaattaagaaccatacacacaacctccttgggagccccgagcagtgcgctgcagggccaaggaaacaaccagctccaaagggactccctgagcctccgaaggcagctcctctaacgcctcccttcctcccaaagggctcccggccctgataccccgcagccaccgcacgccatcagcttgccatgtcaatgacaagagctcgtacgagtccacacattttagcctgagataggttatatagtcacagaatgtgtggctttactgttccactcaaccccctggtccctggtgtgctcctgcaagtcaaag

SEQ ID NO: 497 - DNA, 1667 bp, Homo sapiens
tttttttttttttttgctttttcacattttactacagaggtatttgatagacatatttattattagttaatatgtaaacttgtaaactgctaattcatatcctacttgtacaaaatcattttacaaaaactctttaaaaactaatagagaatgtattctctggtgggcatcactggaaggcatacctgggcaggtcctcccctgaaggctatcagcacctgcaaccagctcagctactgctgcctttgcagccgacactccaccctcctgctacctcttcattcccaagttcactgtgtcctgattcgtcgccttttctcccctcttttgtggacgccttctcacctgacaccaccacttcacagatgattgtacaggataaatgaataacagtattgtatcttcgtacctttctaccttggacgagaacaactctggttctctcagacattcagcagtcttatttcctgtggccttttatcccataatatattacttcaaatttaaataaatctccttcaaccagagtcctcaaatagcgttcattttatcctttgagtcatccttttatataaagtccttcaagtatccatattacaatatttaaccctcatgatcaaaatgactaagaaagctgtcttgttacaactgttttatactctacatcaccaggagctctgctaagaaaatacaaaaaggaaaaattcagctcaacaatgagctgtaacaggttcttaatgtgtgctactatttgaagtctctaggccaaaattattgcaaacaaagaatcagttcttccaaacatcaccaaaagatccagggtcatgcaccaaaccagaaatccactgtgatgttgatatataaaggattgtgttccacagatactaatttataagaacaactactcaacccatctgttctccagactcgtgacacttggtgtaagagcttcatccgttctgcgttcacctcattgcctttgtctctagtgtggaagaccattgtatatttacccacttcaggcaggggccgggaaattttcattctttggagctcaaccctgagtctgaggtcatcgtcttcgcctccccatccccagtagttgttagagaatccattcaccttgaaaaactgctctctgcttagggcagtaacacccccaaaatatccactgtaacgtaacctgtacccagtgctgttcctgccaaccaccagatgcttgggatgctcctcacacttgtaaaggttaaagtcattctcgggtaccaggtccacatcgtggaatataaagcagtcccaattttcttccttgagggcttctagatagcccacattcaagagtttggctcgattaaactttttaccttcagcctggtggatgacgtagatgccataatccagctgctgcctctgcaggaagggatgcagatgttccagcaggtacatcaggtgtttctctctgttccggtggggaacgaggatggcgaccctctgtaaagctttacattcctgagggcgataccggcctctggacactttgggattttctgcctgtacctcttccaaagtgagatctggtttgaaaatgagcttgctctggcctctgaggtaaggagacacagaagggcagttgtcaagttctaccttcttcgtggatgcttcattag

SEQ ID NO: 498 - DNA, 490 bp, Homo sapiens
agagagaatgctaacgagctgtgaaatgaccaaagatctggcagcagaagggaaaagaaaaaataatgggaagaagaggatttatctgactcaactggagatggctcccttcccttatttattgttgcatcctgaagcttcccccatgctgggctcagtgtgaacaaacagcgcgggagaatgcaaccactgcagaggcatatgtttgagatacctggccactggaggtcatctcgtctactatattcaccgcagataaagaatgaaaagagaatacacaaccttgtgattgctagcagtgaaagctcagagttatgacataacaagtggttgatcatactgtaaaactcaaatgtgaaggggaaggctggaacctactggaaactgaagatctaacgaaaagaaggaacttttaggaactagcagagacttcaaaatgttgagaactctcttttttcataagagaagataaaaactctgatgggtcaca

SEQ ID NO: 499 - DNA, 4101 bp, Homo sapiens
tttttttttaaatacatttattaaccaatgttaacacattaaatgaatctatatattgctagtcagagcagcttacaaaatgccagaatgcatcatagaactggacagccacaatgaataattacaatgtgcatagtggctaagctcaacacctcgatatagctttatgatttgcagaaaatttttaataatgattcctaaaacaatcaattgtaattttacctaaaacttttacaaaaccaggccacaatctctttttttaattttgtttttttttaaacacacagttttcacgctgtagtaacttggaaatgtgcaacccgtgtcaacagagacagaaaagccaaagtaacacgaatctcactttcatgcagctatcagttaaatattacatactctggaatgattttacaccaaaaatatttccacaattacttgctctcataggggtggatcgaagtcttaaaacttgaaaaacaatcaaagaaggttaagtgttctcggttctgacatctccatcagcgccacacactgtggcaacactgactaattacacagcaacaaggagggaacgatgatgccaagttactgcataatttaggtacattgtatgaaatggggctactgggtactttttacaaaatattgtgcaccatttggcagtagtttgtcaattaacttgtgtcaccaccatctgcaacagcatcaagattagatggatgatatttcacagaagacttagttacatttttatctttagagtgaccctgacaaacctggagaatactttttaaaaggcttttctcctgattctttcacttccattgtgagtaattgctttaataaatatcaaaggtctaaataaatatgtacaaattattctctaacctcaaaaaataactaaatgataaatgggaatttgacttggtctaagatcagtctttaaaaataccacataaattgtgagatattttaaaagaaaagtaatttaagttttcctggctgtattttatatatctatgtataaaaaatcattattcaactatcgatccattcctattggtaatgcttcttaatccagacattccgcaaaatacagactttttacaaatcacggcatctttaatacaagaaaattaacatgcattattcttcattctgtgtacagtgatggagttcattagtaggcaatgacccattactacaaacataacggcttctgtgaaacttaagtgctttctcttcttttagtattaacttacgatacatgaggtgacaccagataataggcagtgagatgatatgtgggaagggaagggaagcattaaacaaattcgtatgcctcatctataatttcacatatggataaaggtagtttttggctttgtttttgttgtttattttgttacaagcactcatgttaggacaaagatgaaatgtgcaaactttaaaatttaaatattcattttctctaagatccagctcagtaaaagattacccccagttccctgcaattttaaactacaagatcaaagctaataatttgttataaaagttatatattgaaaagaaataatgaaaaacacaattgggaaatatttaagaaaaaatatgcaggactagccctgctgtgtcaaccctgttccctaaattcaatcatatacccactggtgtgaccaacagataatgcctttgaacagtaaattaagctgaacaaaaccagctcaacaaggttaagaaaaaaatgtcacatcaaggtagtatgttttatttctgaaacagttctgtagttcttacattcagatctattctaaatgtttctttgttaaactcacttgtattcacctgttttttaaagatctgttgtttaaaggttaaaatctctgtaaaacctaaaaatgttttaaaatttgctgaaaatgcaacaaattctcaattaaaatttatttaaaataataccctccactgatgttacttttaccccctgaaaaacttcggaggagcattaacaaaagatttaaactactgtgcaaaatttcttcacgaaaagtgtttaaaggctggtgcaaaatgggaagcaaattctaaacaattttggcttcttggaaacaaaaaccgctgtgtctgaaaagagtaatcatcggggtgactccgggaagggccagcttcatcttttccggcggcaggtgcgcttgtgctccgcgtgccagtgctcctgctggcacttgatggagcagtaggatgtgttccagcagcagtggtacatggcctcctcctcacagttgtagcaccactgcttcttcttggtctgagaaatcagttgcttgtgctgtgttgccagcttcttgatttcttctacaaattcctccttacacttttcctttacttgcttacattttctgtccatctcaccctgcatgttggctacagctttatttacagcttgtctcttttcttcttccatttcagaacgcagcttctccagagcttctcggacaacacgctctgtctcccgcttgtggtccgacttcatccggtctttgaagtcattgaagatcttggtgtatttgtcatggcacatgctctgacacacgccgtcgtttgtggtctgggtgctccgatgcagcattcttggtgaagaggcacttaacttctttgtctgagttgacacggagactttttcgatgggctgaggcatcgtgggtatttcctggctagaacttactgcttctgtttcaggctctggttcttcctttttgggctccacactttgattacgtcgtcctttctttgctcttggttcttgagtgacctttagctgctcattactggtggaggagatactggattctgcctcttcctcacctcggtcctcattcttagatttccaaaatctcccttctcgtaggaaacgctgatgcagctccagctcatcacaggcctttttccaacccatactgcgcttcacgtgcagccgatgaatgttgactgtgatatcttgaatgttttcagaaggaatccaggccctctggtggtggtggccaaagaagcgaacgtcgacttgattgtcttctttctgcatgactttggctggccaaaacccaaaacctttcattttagcccaaaccagctcatgattaggtatacaaggataacagaaccagttgtcaggacgagcatttgacaagtaaaagcaattcttgcaaagctgcagttcatccaagctcatgacatgtgcctttatatagcatcctcgcaatgtcagcttgctcactgtctgctccatagaaaatcacggtattgtggagaagcaattgggcatcagctttgaactcttcataacttcggtatttcccttcattcactttctcttgaatggtgggaacgtccacagctgagtgcaccagcctcctgtacatcgggtgtttattgtccttcccctttttattaagatctatagccctctccttcatgcgggagacaatgaatctgaggtatgtgcccatctcctgtttgtttgtattcttcttcttaatgctcctgcaaactgggcactgccagggactactgctgtctctaagcctgaactcatcagacaaacacttggaatgatacacacgaaaacacaggtcacatatcaacacctctccaggcaaatggcattcaaaacaataccagtcatgattttctgtttcccagtcaatctcatctcctggcaaccaatatccttcttgttcaataccagcttttgaacctttgcagcccactgttagagtttcgacaataagaccatctttcacagctaagctcagctgacgggtggtctctttagggtgcataccgtggactcgagacatataccagtttataacaatgatacaactaatgaaaatgacatatctgtgtaatgatgtaaaaatcaccataggttcaagaataatgtagttgtttcacattttgtaatacggtcaatgttggcaatctgcttctggttccgtataatctcaatggctgcccaaagatgctggatagcttttgtatcgcctgtcgtctttttgttaaacgtgccatgacctgtttacttctttagcattatgctcc

SEQ ID NO: 500 - DNA, 559 bp, Homo sapiens
  misc_feature (1)...(559): n = a,t,c or g
gtcggggcgtctgggcagcctacgctttccggataaaaatggcagaatgaaagaattatgagtggaactagagaataggaaagacatgaaccaacgcccaaaatgagaaagaaggacatataaagaaaaagacaaatacaagtgaaaaaaatagactaatggattaacgtccctgtcgtgtgacattttccgactggaatcagccattttaccaagaaagttgggtttcttttactggcaaatagtacttcaagagcacagtcttatgtaagaagtacagtctatataaagactgtccaggacaaaaactggccactccattcagcattgacagcagtatttaaagctggtgcatggtgaggtgaagtttctcaagggcaaagacaatgccttcatgcatgttcagtgtcttgcccccgtgggcttttggaaatgatccgctggacaatgggggggatctggcagtgactttctctggcctcttgcccaaagcccagggggtgctgctccctaaattcttaagggttctaatgagattcagagcaggtnttaacacagg

SEQ ID NO: 501 - DNA, 984 bp, Homo sapiens
gcccataggtagaaaaaaatagcttactggatttatatctgcttcataagagacttttatctgccagcctgacccctcttaaaacttttttttttcttttttggtttgatatactcaataggcactggcttttttttgtgatgtggctttttttgtgatgtggctttccacactattgtagaagtccagaatcccatttaataagatgcatgagctattagtcaatgaactttagggctggatggatcaacgaagtgtttttcactgccccagcttccttatgaaccagattactgaccagcggtgaactacaataaattcgaagacacaactaacaaaaacttaggaaggcctggaagagaggtgccaaactggcactggcaaatacaaaataaaatattttcatgttcttgataaatatttataaaaaaatatacatataatgaataggccattttataatgctagttaaaactttgaagagctgttaaatctgtaggtccatcaatatcctggcttcaaatcaatatgtagaaatatttttaattaaatttcaataaatacaccagagggatttaaatatgataaaaacagtaatttcaatctctgtttttaccaacaatatgtttaattagttcgtgatgggcttgaactaatcaataaactacagtctacaaaaaggtttttgtaaaaatgcattcatttctgataataaataaatgcagattgattctgtacagtcagaaaaaccaggatggtggcaaatagcaaaatagagagatgataaatcttggatccaaaatcaaatgatcaaagaagacagttaaagatattttcagactgcccacattagagtcatgtaatctgcatcattctttctcaaggtctctcaattgggcaccagaataacatcagatctaaaaccttgttcaatatttcctctggttcaccttttgattatgtaacaaatactttttgcaaaag

SEQ ID NO: 502 - DNA, 772 bp, Homo sapiens
gagctggttgccgtggtcaatgaacaccctcatggacctgttgacacccttcaggtactgtgtgcggtagaggtgctggcggtctttgtcccaggccactgcatgctctggccgggccccaggacaggagatgatgagtccatggcccagtctctgctggtggaactgaatgggcacctggggcacccagggccggctgcccactttggacacatagttaatgatggccagcacgccctcccggatggtctttgtcttctcacagggtactaagcagctccgaaccagcacctcaggcgtgtggtccctggccttggtccgcagcttccttggcacagcccttgagccacaagacaccacatcgggcacggccttgaggtagcgtgggggagaggtcttggggctctgcaggtagcagaggccgatgcgccactgctccccacgcactccgcagcggtcacagggggtccattcccagaaggtggtgaagacatggaggtgcccatagtattcatctgcaaaggctcctggccctcgtcctggaaagtggccaccattccctcactgttctggatgtccacatcgtaggcgtaaaagtagtcccccttcgggtgccgcagaagtacaggcctgagtcctcagactgagccctgaaaaccaacaagctgaacatgcggatgctgaagcgggtcagcatgtcgctgcccacacgtacactggcggcctccgtcagcacccgccccatcaaagtccgtcagcactttggtgtggc

SEQ ID NO: 503 - DNA, 390 bp, Homo sapiens
tggtccgctaaaagtttctctttatcatcatgacgtcttcgaataaattcttccgtggattccaagtaatcagctggtataaaatgtcttggcgattctgaatctttagtggaagcagagctggatggtcgcttgagcccactcaggccctgaagagggatgtcaccaccttccaagacacttttataaatttgtctctcattctccaagctagtgagatccccaggagccccgtctgattccctcttcactgcatggaagttggaagaatatatatatccaggagtctctgaagaaatttccggagtagggctgatggctgagctcatcttttcgttggtcagaacggaagacttgccaggctgatattcgtaaatgctcttgggctct

SEQ ID NO: 504 - DNA, 727 bp, Homo sapiens
cgtcgactttttttttttttttttctgtagaaaacatttaataatagggaggtgacagggaaaacaaagcaagggcagtgttggggcatcagaccagggcagggctggaactagggagaagcaaccagttaagaggcaggctactacaggtagcaaatggagagccctctcacccagccaactccaagagttcctcttgtcccttgtgctctaccccaaactttagccccagcacctgttcctcatctccagcaaagaacagcagggcaggacctgaactggtctcttttcaggggctgtcttgaagatggctgttttagcagacatgaggctgcccaaaggtttctacaagccacctgcgtggactttgggggttgttgaacacatgccctgataaccatgaattggagacctggatctaaacatgggctagctacccatcctggcatctttggctaatacccttagcttgggtgcccctatctgagaatgatactttgggctgttcaagatcctgtctgaggagcctcacatgggtttcctagttaagttgtaaagtcactctgccagagaaggttatcaccgcaaaaggcaggacctggtgggctgggctctccatacacttccagctctgactgcctggtataaatgttcctcttgagatggatgtgtgttgaggtggatagtgagagcactgggcggtggctagggatagggcaggcaggat

SEQ ID NO: 505 - DNA, 382 bp, Homo sapiens
ggacaattgtcacacgaagaatagtgtcacttatctgctcttgacacacagaactggcctggcatatagctttccagattttactcaaacttggtactccagtttgaaaatttaaattttgactgctgattagctggaaagcctagttttaatggaaagaaagtttgcttttaaaactgaaagtagtttctttttgctaacaaatctaacttcatacataattggccatattagtaaaacacctcatgatagcagtgtatatatagtcttgtttgtagttggaagtcatcttttaggagttattctcaaatatatataatagctacccatgcatcattattaaaatccccaaattcaaaaaacctctgatatatatatataa

SEQ ID NO: 506 - DNA, 348 bp, Homo sapiens
gcgacgtggcaacaatggtccacccaaatcaggaaggaatttctcaggtcctagaaatgaaaggagaagtggcccaccatcaaaaagtgggaagagagggccatttgatgaccagcctgcaggcacaactggggttgacctcatcaatggcagctctgcacaccatcaggaaggagtacctaatggtacaggacaaaagaactccaaagattgtactgggaaaaaaagagaagaccccaaaccaggccctaaaaaaccaaaagagaaagtggatgctctatcacagtttgatctcaacaattatgcaagtatgtcttaggtttctttcattttatttatttatttatt

SEQ ID NO: 507 - DNA, 1007 bp, Homo sapiens
tttttttttattagaaatgacgttgttactaaaaagccacacaatatctcatttagagaatatgcttaacaaaatatacatcttaaaaattcagcactccagaatgctttttcaggtgtttccatttgagaaataaagaataaaaattggtaataattatagacacaacttcatacaataatctggataatatgcaagaagcatcatgttgactttcagatatttctctttgtggctaacgaaccacacatcaaaggatggaccaaagttcagatgtacacagtccagggcacctccgagcacagtggcagtgcccttggggattttctttccctcagtgagagacacgggggatggggaggagcccaggagtgtcaccagaaagtacacaacccagcttcttacccagcctgctgccatcatcaactatcaaaccatttgctcctctttgcaagaggtgctcctttagaaggtcccaataatttctgcttatattgttcgaccagctggttgaagcgggtttccgtcttatttcccttagcttttttcctagatacctgctcggacgataattgctgcttctcctgcttccactggtttatctgtggctttggctttttgggatggacgggcttcactttgcctttgtcccgcaacctgattttggggcctcggtgtgaggggagcgccaggacctttcttctcttctttccatcaggcagctccacctgctccacttcagccttggtctggaacccggtccatgaggtagagcccgcctttctcttctgctctgggggcaccttgctttgttcctctgtgtggtgttgagctgccttctgttgctggtcttttgcaggctctggttgccccttctgaggctcaccagttgcaggcttggatctcattttttgcaacgtgcgctggatccttaattccttcattttaagttttcttcgatcttactaaagagaactccactattggtctcttcagaggcccaaaga

SEQ ID NO: 508 - DNA, 1021 bp, Homo sapiens
  misc_feature (1)...(1021): n = a,t,c or g
caatactgtatcactgggggctgggagtgggggcttagaatcatactgaaattgtttaaaagcagcccaggtagtttctgtcctcaggtgaataacagactatataacttccccgaaaggtaaaacgatagccactgcagagacgaggtgtcttccttccaccaaatactttctgagatggtggtaggagtagtatttttaccgtggtttaaaaagtagtcagttacatagaaagtgtattggtatgtatttgaacctgctcttcattaaacaaacagattagatgtaccctcgactggcaataattgtatctattttcaagtacagctagctgtcaaagcatgaagctcttgtgtatacacactgacacttggttcacgcatgaagaacagtgcctatgcactttgtgtagctataatgtaggtatctaggtgtaatttcagtgaaatggtgtatagatgtattgtaatttaaatgtatatgttatttttggctattcatctaaatgcagtagacatgttgatcggtgttttgcaaacatttctttttccttcttagataactagtcgtgaatcatttctcctctttctcagtgtggcttgggaatatatatgagtgaagaatttatctgtgaatcctttgtactgatgattgtttgaaagtctgtgtgtgtccagcacctttgtaaatacacaattcagagcagggatgggctgggtgtgtgtcctggttcttagtgaaaggtcatctcatgtctgtttaatacatggtgaatgcaactgtggaacttttgattacctagacttaggtaggtttagaatgagaacatccatctacagtcctcctttgcttggtggattgggctcagaggaacaaaaagttagtctgactctgtgcatattagcatcatgtctttaggaggaaaggtcagcctctctgggttgccaaatacttcatccatggatgctccnggacttaaaggttcttgagggagcctttgttntccctttgggattttttg

SEQ ID NO: 509 - DNA, 433 bp, Homo sapiens
accggctaaaatggcgtctaccacattacgtcaggcgtcagatccgcgcacgactagagggcgggaaagatttgagctacgcctgcgcagagttgagaagctgatgtctcctcgacttccaactggaaccttgaacccccacatttctggaccttgatcattcctcaagtaggaagatgtaatgcaccttgacctctttctaaataagacacttccccaaataaggggagttgagagtgaacagtcttcacgtctccacccacttccagatcccagaggagacagacatcggatggctgataatcttccaatggaaatccatggttcaagtgccacctcttcaggaaagccatctgacttcaatcaggcagcagtggatggtgcaggggaaagaggtgggaaggaggtcctgggagggacactggatgtctta

SEQ ID NO: 510 - DNA, 885 bp, Homo sapiens
ccgcagctccccctgaggtgcccgccggaaccaatgtgccctggtccactgggccgtgagcagccaccgactgggggcaacttggcacttagaaccgcagcagggacgtcggtttgctatcgggactcggcgaggacgatggaaatcctgtatgaatgtggaagccattagcagagtaattgctgtctgttaccatgacaaccagccgctgcagtcacctgcccgaagtcctgccagactgcaccagctcagctgcacccgtggtgaagacggtggaggattgtggcagcctagtgaatgggcagccgcagtatgtcatgcaagtttcagccaaggacgggcagctgctgtcaacagtagtgcggactcttgccacccagagccccttcaatgaccggccgatgtgcaggatctgccacgaaggggcagcagccaagaggacttgctctctccatgtgaatgtacagggaccttggggacaattcatcggagctgcctggagcactggctgtcatcctcaaacaccagctactgtgaactctgccacttcaggtttgcagtcgagcgcaaacccaggccgttagtggaggtgcagcagatttgggggaagataagaaaacacccctgtcaggtcttcaggctttgccgtcctcctcattcttcatggaatgtatgtttctgtggcgtgcctcaccactgcccgcctcctttcttgaagagataggaacgctgtgagattgtttgggataaagcggtttctttgcaatccatcattacagagttagagggatagatttacactgtgatggatatgtgagaagaagggtatgttggtgcttgtaaaacacgaaagagaaataatatgcttttgaagcttttaatttg

SEQ ID NO: 511 - DNA, 1161 bp, Homo sapiens
gcacaaacccggttctttgtccctcctaatatcaaacagtggattgccttgctgcagaggggaaactgcacgtttaaagagaaaatatcacgggccgctttccacaatgcagttgctgtagtcatctacaataataaatccaaagaggagccagttaccatgactcatccaggcactggagatattattgctgtcatgataacagaattgaggggtaaggatattttgagttatctggagaaaaacatctctgtacaaatgacaatagctgttggaactcgaatgccaccgaagaacttcagccgtggctctctagtcttcgtgtcaatatcctttattgttttgatgattatttcttcagcatggctcatattctacttcattcagaagatcaggtacacaaatgcacgcgacaggaaccagcgtcgtctcggagatgcagccaagaaagccatcagtaaattgacaaccagggacagtaaagaagggtgacaaggaaactgacccagactttgatcattgtgcagtctgcatagagagctataagcagaatgatgtcgtccgaattctcccctgcaagcatgttttccacaaatcctgcgtggatccctggcttagtgaacattgtacctgtcctatgtgcaaacttaatatattgaaggccctgggaattgtgccgaatttgccatgtactgataacgtagcattcgatatggaaaggctcaccagaacccaagctgttaaccgaagatcagccctcggcgacctcgccggcgacaactcccttggccttgagccacttcgaacttcggggatctcacctcttcctcaggatggggagctcactccgagaacaggagaaatcaacattgcagtaacaaaagaatggtttattattgccagttttggcctcctcagtgccctcacactctgctacatgatcatcagagccacagctagcttgaatgctaatgaggtagaatggttttgaagaagaaaaaacctgctttctgactgattttgccttgaaggaaaaaagaacctatttttgtgcatcatttaccaatcatgccacacaagcatttatttttagtacattttattttttcataaaattgctaatgccaaagctttgtattaaaagaaataaataataaaata

SEQ ID NO: 512 - DNA, 608 bp, Homo sapiens
aacggcagtggcagcagcgtccggagcagccgcagccttctggaagctccaggcggtctttctgccgagcctcggtcccggcccccatcctccccgccccatcggttgttgtctgggcggatttaaacagtcaagtaaaatcaagctgggtaatcatggcagaaggtggatttgatccctgtgaatgtgtttgctctcatgaacatgcaatgagaagactgatcaatctgttacggcagtcccagtcctactgcacagacacagagtgtcttcaggaattaccgggaccctctggtgataatggcatcagtgttacaatgatcttggtagcctggatggttattgcattgatcttgttcttactgagacctcctaatctaagaggatccagcctacctggaaagccaaccagtcctcataatggacaagatccaccagctcctcctgtggactaactttgtgatatgggaagtgaaaatagttaacaccttgcacgaccaaacgaacgaagatgaccagagtactcttaaccccattagaactgtttttccttttgtatctgcaatatgggatggtattgttttcatgagcttctagaaatttcaaaa

SEQ ID NO: 513 - DNA, 1905 bp, Homo sapiens
gtaaacagctcctcatggtcaatgaacatgttcaggaagcgatcaccttgatgcttgaacccaaccccagacagtggacaattctactttgaaatatccgtgaatatttactgtgggatccaatttaaacttctttcttctctagcctttaaattacacaactttgaactgacacggatctcttacaaagaacaatgcggcactgaaggaagagatgattcctttactcaaacctgcaggaatcagcctattaacaggcaggggaaacggtactttccaatgaatggtaactgatccaggctcattatcacacttcctagtcatctccacctttcctgtattgcctgtggcttgttgtttaagattaagaatcaaagagattaagaagtatcacttcaagtcttgctctgctcacttctatgtttgcagtcaaattattccttatgttggtgacctaaagagaattactttcattcatttcatttcccccgtagcagatggaagtgagaaacctctgagaaaatgaaaacatccttaaccactatctttcccttttatttgattattttatgtcagaaatttgcaaaagtttttttctcctccttctcttccttgttgcttaactttttaattcatgccatatgcagatatccaattatgtgcatcctgtgaataaaccacgtcttggtcactgtcatattttgaaccatctcatcagagatgaataatatctttttaccagagagagaacgaatgttagccacatgcccaagttaacaaagaaaaaatgttctcaaggttgtccttttgggttaaatctggcccttccttgggcaaaagcaaaaattctccctgtgagagctcaacatctcaaatacaaccacaggaaaaatggcccaatctgccagtttagggcttaccagcatataatttttaatatctttacttctatcatcccaaatcaaagaactcttctctattatgtttaatcaattgcaagcaaatagatttttctttgtaacaatttgttctgcagaaggctgtttttcacttttcctttcttttgcttctttctgtctttccttctcttttgtctggagaaatcacttagactctgtgtgcctcttctacattgcattctgctctgctatgttacctgctagggctgggcttctttggactccctatatgattgatgatgtgaaaacctaaattacttgcagcatagtattacttctttgatgttctcattagcataatgttatttttgaaaaggaaagatactatcacataagttttcctcatctgttgtgatatacaccaatggataaactaacggaaactgctttttgacattaaaagacaggagaaattatatttaactaagtaaaagttaagtcagaattacttgggtgatgtgattcaatttagttaaaggatgatatagagaaaatacattatttagcattatttcttcagctataatgaattgctatagaaatcaggcagatctttctaatgtgtattgattggtcttttcagctactctgaacagattactaaggccatctcctcatctctaagggagaaaaatagtctgtagatgaataatgtaaggtaaagagttgcatgtcagtctttgtaattatttacactttaactttctccagaactcagacatgatttcaacatggtgttagatttgtgcattttattttcctgaccacctcattccagccaatgtatggttatccactctgtgtgccaaaaccaatcatgcctttcacggccctttagttcagagaagttctgcactgatttttagtctcttgatgtctcaatcttacatgtataccaatcacaatggaataaagtgttgagttgtactgtgaaaaaaaaaaaaaa

SEQ ID NO: 514 - DNA, 235 bp, Homo sapiens
  misc_feature (1)...(235): n = a,t,c or g
caaagttggagatggtggtgagcctgcagaggaaaagaaacagacactgttggtgggaaagcaaacttgttcagccgctatgggaaagcagtttgggagatttctccaaggaacttaaaataggaactaccattcaagcctggcaatcccactactcggggatatatccncaggggaaaggatttcatttttttcccaaaaggncacctgcacccatttggttcattncagtggc

SEQ ID NO: 515 - DNA, 8657 bp, Homo sapiens
  misc_feature (1)...(8657): n = a,t,c or g
gcggccgcagctgcacctttgcctccgcggttccgcagccgagccccgggaggaggcgctcccctgcgtcgtccgcacttgcgccctttcccaccgcaacaggtcaggggagggcggaggtgacgagggcgcccgacccgggactagaggacggaagggtctggaagatgaacagactagccactttgcattgactggaaacaatggcatttacagaaagagtcaacagcagtggcaacagtttgtacaatgacgacagaaacctgcttcgaattagagagaaggaaagacgcaaccaggaagcccaccaagagaaagaggcatttcctgaaaagattcccctttttggagagccctacaagacagcaaaaggtgatgagctgtctagtcgaatacagaacatgttgggaaactacgaagaagtgaaggagttccttagtactaagtctcacactcatcgcctggatgcttctgaaaataggttgggaaagccgaaatatcctttaattcctgacaaagggagcagcattccatccagctccttccacactagtgtccaccaccagtccattcacactcctgcgtctggaccactttctgttggcaacattagccacaatccaaagatggcgcagccaagaactgaaccaatgccaagtctccatgccaaaagctgcggcccaccggacagccagcacctgacccaggatcgccttggtcaggaggggttcggctctagtcatcacaagaaaggtgaccgaagagctgacggagaccactgtgcttcggtgacagattcggctccagagagggagctttctcccttaatctctttgccttccccagttccccctttgtcacctatacattccaaccagcaaactcttccccggacgcaaggaagcagcaaggttcatggcagcagcaataacagtaaaggctattgcccagccaaatctcccaaggacctagcagtgaaagtccatgataaagagacccctcaagacagtttggtggcccctgcccagccgccttctcagacatttccacctccctccctcccctcaaaaagtgttgcaatgcagcagaagcccacggcttatgtccggcccatggatggtcaagatcaggcccctagtgaatcccctgaactgaaaccactgccggaggactatcgacagcagacctttgaaaaaacagacttgaaagtgcctgccaaagccaagctcaccaaactgaagatgccttctcagtcagttgagcagacctactccaatgaagtccattgtgttgaagagattctgaaggaaatgacccattcatggccgcctcctttgacagcaatacatacgcctagtacagctgagccatccaagtttcctttccctacaaaggactctcagcatgtcagttctgtaacccaaaaccaaaaacaatatgatacatcttcaaaaactcactcaaattctcagcaaggaacgtcatccatgctcgaagacgaccttcagctcagtgacagtgaggacagtgacagtgaacaaaccccagagaagcctccctcctcatctgcacctccaagtgctccacagtcccttccagaaccagtggcatcagcacattccagcagtgcagagtcagaaagcaccagtgactcagacagttcctcagactcagagagcgagagcagttcaagtgacagcgaagaaaatgagcccctagaaaccccagctccggagcctgagcctccaacaacaaacaaatggcagctggacaactggctgaccaaagtcagccagccagctgcgccaccagagggccccaggagcacagagcccccacggcggcacccagagagtaagggcagcagcgacagtgccacgagtcaggagcattctgaatccaaagatcctccccctaaaagctccagcaaagccccccgggccccacccgaagccccccaccccggaaagaggagctgtcagaagtctccggcacagcaggagcccccacaaaggcaaaccgttggaaccaaacaacccaaaaaacctgtcaaggcctctgcccgggcaggttcacggaccagcctgcagggggaaagggagccagggcttcttccctatggctcccgagaccagacttccaaagacaagcccaaggtgaagacgaaaggacggccccgggccgcagcaagcaacgaacccaagccagcagtgcccccctccagtgagaagaagaagcacaagagctccctccctgccccctctaaggctctctcaggcccagaacccgcgaaggacaatgtggaggacaggacccctgagcactttgctcttgttcccctgactgagagccagggcccaccccacagtggcagcggcagcaggactagtggctgccgccaagccgtggtggtccaggaggacagccgcaaagacagactcccattgcctttgagagacaccaagctgctctcaccgctcagggacactcctcccccacaaagcttgatggtgaagatcaccctagacctgctctctcggataccccagcctcccgggaaggggagccgccagaggaaagcagaagataaacagccgcccgcagggaagaagcacagctctgagaagaggagctcagacagctcaagcaagttggccaaaaagagaaagggtgaagcagaaagagactgtgataacaagaaaatcagactggagaaggaaatcaaatcacagtcatcttcatcttcatcctcccacaaagaatcttctaaaacaaagccctccaggccctcctcacagtcctcaaagaaggaaatgctccccccgccacccgtgtcctcgtcctcccagaagccagccaagcctgcacttaagaggtcaaggcgggaagcagacacctgtggccaggaccctcccaaaagtgccagcagtaccaagagcaaccacaaagactcttccattcccaagcagagaagagtagaggggaagggctccagaagctcctcggagcacaagggttcttccggagatactgcaaatccttttccagtgccttctttgccaaatggtaactctaaaccagggaagcctcaagtgaagtttgacaaacaacaagcagaccttcacatgagggaggcaaaaaagatgaagcagaaagcagagttaatgacggacagggttggaaaggcttttaagtacctggaagccgtcttgtccttcattgagtgcggaattgccacagagtctgaaagccagtcatccaagtcagcttactctgtctactcagaaactgtagatctcattaaattcataatgtcattaaaatccttctcagatgccacagcgccaacacaagagaaaatatttgctgttttatgcatgcgttgccagtccattttgaacatggcgatgtttcgttgtaaaaaagacatagcaataaagtattctcgtactcttaataaacacttcgagagttcttccaaagtcgcccaggcaccttctccatgcattgcaagcacaggcacaccatcccctctttccccaatgccttctcctgccagctccgtagggtcccagtcaagtgctggcagtgtggggagcagtggggtggctgccactatcagcaccccagtcaccatccagaatatgacatcttcctatgtcaccatcacatcccatgttcttaccgcctttgacctttgggaacaggccgaggccctcacgaggaagaataaagaattctttgctcggctcagcacaaatgtgtgcaccttggccctcaacagcagtttggtggacctggtgcactatacacgacagggttttcagcagctacaagaattaaccaaaacaccttaatggagccccaggttgattcaatgccttgggaactatttttgcacattggaagcctcaaaaacagtccagacgtttgtttcatcaggacaccaaactctaaaaaagaagcaccacgagatggccaggacatttgtccacttaaactctcaacaacagtgtgatcattggttggacactgtggttatgcagaagcagagatgaggaggctggccccagagatgatcttgcccttcctaactaaaggacagaagtgcaatttagcttaaatgggtgtatgaatggtctagaaacatttctattttttttttaaaccagcaggatacaagttgcaaatgaaatgaggagaaacagtttcaactctgaaagtgaatttcacgtcatctcagtagccacgctagtccattcccagaaggaaatttttttttttaacaatgacttttggtaaagggttttgtggatgattttttttcttttgagttttgggagaaatatttgtttaataacttctaatggccatctgtaaaccataagtaatgaaggactccactgtgccccactttctgccaatgaacagtggcttgataataccaagtattgttgtaatttataaaattgaaggcaacccccgctcctgccgcccccaatctccccattgcctagagcgctgcacattgaccccagctctgacttctcattactgtgctgaaagtcagcccacgtcggagcggtgaggaggagccacagcacatggggtgccacctcgaggtctgcacaggaggacttggcgctgccatttcctacccctgccatttcccacccctggnttaagggaaagggactctctaacagggcagtcactgttgactctattctgaatttcctcccttggggaagaagggaaccaacatttatacctgaccagatggctaaagtgcttttaaagttttgtttaagtagagctggaatttgaggtgctgatctgtggtctacagttatgtggtaactcatgttgtccagccaactcagagtttcgtcagtgaacaagaaacatgaaatctgcttcttagagaggctatatttttctgctacaaatattttatatttatagcaaaactagactttcagagtccttgattgtctaggggaagttaactccctgagaggatgtagagatttggggtggttgattagacttttgaaaaactcatcaccacatgccttcactccagagtgttctcagctagatttgatttggttgaggaggaactgtggccctccgtaagttattgccatagtgtatgcattaaaccaagtccattttgaatgacctaaaatgaagtaacacaatcagaaatcccatgtgcccataagcacagatttttctttttcattgaaactttaaaggttattattggaaacattactttgagtgcagtgtttttaaaagccaattcttttttatcccttttagaagtagaatttgcacacttactacaattgaggagtgtcatctctataactttttctccgcctttgtcccattctgcccctggacatgtttcctaccaagcatgtttcacattttcctattagtggaggagggagaaccatatttatttataatgaagacatctaagatccctatgatgaatgcaggaactctcttggtagtttgtaaatacacaaagggatgtgtcgagggatgggagcgatgcttatctctcacagtgtgagtggtctgtgtgaggctgttccttcagttcttctccagactgttctttggttgtcacttaagtcagaggtctggtccctcatgtttaggtgaaagccagagaatgacagctgtagtcatatctgagcataagaccttgatgtgtgattcctgatgaccggtttcatttattcatgtaataaagcaaaggccctggtcctttttaaactactagttttaaaaacctgtgttaaatgaacagtaattgcctggtaggtttggtgtgtgtgtagcattgtgtgtccatctgttatatgtaaaggacaaggcaccagaatcaggctttatttcgatattgaagatgttatttaacatctttcttttttccttactcccttagccatcccctccccttttgtcctatcattccctagaacaagccacctgtcaattgtgaagggttgtgttctttatggcaggttctatgcagattgtgccagagcatgtgcgtgttctgttggcaagccacagtgctcccttgactgaagacatttccaggtagatttctcagccagctctaaaacagattgctttttcagtggccttactctttgtgggtttttttttttctctgaacttgatataaagattttatttgtcccttgaaaaagtaacaaatgtgcatagatcaatttgtactactttggtcattggatatttctgatccttattgcattgtacctaaaggagagtaactaatggtaacctttttaatagagtatgtgaaaggtagtggctgatgaatccttaacgttcatagggtctttttgctgttacggttgtatatagaggtctgaaggatttttaaaatgatttgcactttttcactgcatgcttacaattcccaaaggcaaaatctgtactgaggtagatcatttgaaagggctagattataaaattaagccttagagtatggaaagttcttataacaataatagtacacacttcagagtaagacaaatgcaaagcatcttaaggagtgaaaatagagtctaaatcttgcctttggcactacaaggtgtgtgtgtgtgtgtgtgttgtgtgtctttagtaggaaatggaagaacactgttttattttttaaagtgtttaatgtttctgtcctttctgtgaattattgaatttaagagccctgctaaataatgaaaaaacactttactaaaatttatcaaattatactgggttcggattgtgaaaacattggccacctagtagcagtggtgaggagtgggagggcccagcaagcatttatcagaaatagaatcacaataggaggagaatttggctgtctgatattatgatttgattacaatactgaatgggaaaagtatctaatattttgtaacaaaaagaccttcatattatctgttttgaccaaaatatgtagctatttcccttacacagattggaccgcacttatctcccttgtcctgtatcctttaatttcaggtctcaggatgtttagaaagctaaaaccccctacccctttctggctgaaaacttgccttatttggtatcttacacattaatgttactagcatcaggagcttactgttttattatgattcatcttcagtaatttttagaagcaagaagaaagccattgtgtcctctacaattaacaaaacttatctctgatatacaaagggatataaatatatacacttaaatagagaaaaagaggttgattgaattgtgcctttgagtgaacccagtttttaaataccgctgtgtttgtttcgccatggcttcagggatgctacatggctcttgcaccttttactcctctgctttatgaagtttgagttgtatttgtgcatcttaaagtaggttgaggcttgaggctgggctttcgggnnnnnnnnnnnnnnnnnnnnnnnnnnnnnnnnnnnnnnncttgtacttaaacctgcttgcttcctaccacagattctttattttcccaaacactacaaaaaaacttttaaaactttgccatttcatctgtttacactctttgccactgattagcagtatttaaatcttgcaagaatattttgtgctttctttagaaacacaagagtatagatttttctcactgaaaagtgagagttacgcattggcagccatgaagggatgctaggatcaattatggcagtaccttttttcccctcctgttcttgagccagttgtctcttttgttttgggtcccacttaggattaacggatgtaaggtattttcctgtgcctttattttgtgtcattctattggaaggaggtgtaacggcagaatagcatcgtgttgggggttttccttcaaacactgcaagtgattattgccaccatgtggaacctcaaatatgcaatccagttgtgttggtttctcggtgacttggagtgttcatctcttcatgaattgtgagcactgaccatgttcttcagttcttaattatggtgagttgacaaataccaactactgcttttctttaggtggctataaatttcttactgtcaggaggaaatgacattatattctgttccactgaacgtcagagatcagcaggcactgtactgggtagagaagtgcctatacttctctacctaagagggcaggagggaaaccctacagctccttgtgagcctatatattagtatatcggcctgggagaggacaagggaataagaccactcatagtgaggctgggccaagctgcactggtcggaccagggcagtggctgacctaaggaagacaacttgctttgcttaaaagtagattttttaagcaatgcttaacacaggcagcattcacctttgttcaggccatcgacatgtattgttaaaattactgcatatccccctcagatatcaagtatacactgttcatgttgggggttgtgtgtgtgtatgtgtgtatgtacggcacggcatgtgtcccaaatcttgttttaattttttttttctgaatgtgatcatgttttgggatgatacctgaggcagggttgcctttttttttatttattaccattatatattatattatattatatat

SEQ ID NO: 516 - DNA, 100 bp, Homo sapiens
gaacaaaataagcaactaaatgagacctaataattggccttcgattttaaatatttgttcttataaaccttgtcaataaaaataaatctaaaaaaaaaaa

SEQ ID NO: 517 - DNA, 357 bp, Homo sapiens
ggagggaccttttcccaagcatgtaaacaagggggcccacagccctggctgcaggcatcatgacccatcttctaccaggcagatctttattacctgagcccctaaggcagtgtctcctcagctgggctgcttccactgagacccccgacccatcccctttccagtacacacacctgatgcatgtaagaatggtagaggggcttttctcagcattgaattaataattcagtggctcctcgggagtcgaatgggcatttgggacaccagaaggaaaagaaatcatcatagtctaaggttcagttgtagatcaaaaaatgcagccaggccgggcacggtggctcacacctgcaatcccag

SEQ ID NO: 518 - DNA, 3799 bp, Homo sapiens
  misc_feature (1)...(3799): n = a,t,c or g
acatgtgcatatttcattccccaggcagacattttttagaaatcaatacatgccccaatattggaaagacttgttcttccacggtgactacagtacatgctgaagcgtgccgtttcagccctcatttaattcaatttgtaagtagcgcacgagcctctgtgggggaggataggctgaaaaaaaaaagtgggctcgtatttatctacaggactccatatagtcatatataggcatataaatctatgctttttctttgtttttttctttcttcctttctttcaaaggtttgcattaacttttcaaagtagttcctataggggcattgaggagcttcctcattctgggaaaactgagaaaacccatattctcctaatacaacccgtaatagcatttttgcctgcctcgaggcagagtttcccgtgagcaataaactcagcttttttgtggggcacagtactggatttgacagtgattccccacgtgtgttcatctgcacccaccgagccaggcagaggccagccctccgtggtgcacacagcacgcgcctcagtccatcccattttagtctttaaaccctcaggaagtcacagtctccggacaccacaccacattgagcccaacaggtccacgatggatccacctagtcccaccccagcctttttctttcatctgaacagaatgtgcatttttggaagcctccctcactctccatgctggcagagcaggagggagactgaagtaagagatggcagagggagatggtggcaaaaaggtttagatgcaggagaacagtaagatggatggttccggccagagtcgatgtggggaggaacagagggctgaagggagagggggctgactgttccattctagctttggcacaaagcagcagaaagggggaaaagccaatagaaatttccttagcttccccaccatatgtattttcatggatttgagaggaaagagaggaaaatgggggaatgggttgcaaaatagaaatgagcttaatccaggccgcagagccagggaaggtgagtaaccttaggagggtgctagactttagaagccagataggaagaatcagtctaaactggccatgctttggaagggacaagactatgtgctccgctgcccaccttcagcctgcaatgagggactgaggcccacgagtctttccagctcttcctccattctggccagtccctgcatcctccctggggtggaggatggaaggaaagctgggacaagcagggaacgcatgattcagggatgctgtcactcggcagccagattccgaaactcccattctccaatgacttcctcaaccaatgggtggccttgtgactgttctttaaggctgaagatatccaggaaagggggcttggacactggccaaggagaccccttcgtgctgtggacacagctctcttcactctttgctcatggcatgacacagcggagaccgcctccaacaacgaatttggggctacgaagaggaatagcgaaaaagcaaatctgtttcaactgatgggaaccctatagctatagaacttgggggctatctcctatgcccctggacaggacagttggctggggacaggagaagtgctcaatcttcatgagacaaaggggcccgatcaaggcagccacaaggccttgacctgccgagtcagcatgccccatctctctcgacagctgtcccctaaacccaactcacgtttctgtatgtcttaggccagtatcccaaacctcttccacgtcactgttctttccacccattctccctttgcatcttgagcagttatccaactaggatctgccaagtggatactggggtgccactcccctgagaaaagactgagccaggaactacaagctccccccacattcctcccagcctgggacctaattcttgagaggggctctctcttcacggactgtgtctggactttgaggcaggcttctgccccttgcgttggctctttgctgccagccatcaggtgggggattagagcctggtgtaagtgcgccagactcttccggtttccaaagttcgtgcctgcgaacccaaacctgtgagtctcttctgcatgcaggagtttctcctgggcagctggtcactccccagagaagctgggccttcatggacacatggaactaagcctcccaaatgggagttctggctgagcccagggtggggagatcctgggaagggaggcactggaggaagacggcacctcttcccccatggcagggtgtgagggaggcaggtttggaatggtgcgagtatggcaatctaagcaggggtctggtctctttgactccaggctggcctttggccgactgtctgctcacccagagaccttggactccggactatccatggctccgaatctaagtgctgcccactcccatgctcacacccacagaaggtcttcccatcccctttagattcgtgcctcactccaccagtgaggaagatgcctctgtctttcccacgactgccaggagatagggaagcccagccaggactgaccctccttcctccagcctgccctgacccacctggcaaagcagggcacatggggaggaagagactggaacctttctttgacagccagggcctagacagacaggcctggggacactggccccatgaggggaggaaggcaggcgcacgaggtccagggaggcccttttctgatcatgccccttctctcccaccccatctccccaccaccacctctgtgtcctccatggtacccccacagggctggcctcccctagagggtgggcctcaaccacctgctcccgccacgcaccggttagtgagacagggctgccacggcaaccgccaagccccccctnaaggtgggacagtaccccggacccatccactcactcctgagagggctccggcccagaatggggaacctcagagaagagctctaaggagaagaaaccccatagcgtcagagaggatatgtctggcttccaagagaaaggaggctccgttttgcaaagtggaggagggacgagggacaggggttttcaccagcccagcaacctgggccttgtactgtctgtgtttttaaaaccactaaagtgcaagaattacattgcactgtttctccactttttattttctcttaggcttttgtttctatttcaaacatactttcttggttttctaatggagtatatagtttagtcatttcacagactctggcctcctctcctgaaatccttttggatggggaaagggaaggtggggagggtccgaggggaaggggaccccagcttccctgtgcccgctcaccccactccaccagtcccccggtcgccagccggagtctcctctctaccgccactgtcacacccgtagcccacatggatagcacagttgtcagacaagattccttcagattccgagttgcctaccggttgttttcgttgttgttgttgttgtttttctttttctttttttttttgaagacagcaataaccacagtacatattactgtagttctctatagttttacatacattcataccataactctgttctctcctcttttttgttttcaactttaaaaacaaaaataaacgatgataatctttactggtgaaaaggatggaaaaataaatcaacaaatgcaaccagtttgtgagaaaaaaaaaaaaagccgaaaaaaaaaaaaaaaaacacctgaatgcggaagagctcggctcccgtttagcattttgtacttaaggaaataaaaaaccaacaaaggatctcacattttcttaaaaagtg

SEQ ID NO: 519 - DNA, 414 bp, Homo sapiens
ggtcgacgacgcaccaggactcccaggcatttccggaggcggcagaaggggactggactgtctcccttgaacatattttagcttcacttctgactgcacagtcattagtcaacttttttgaaaagccactggacatgatatcctaacttgatgatgctgagatcaatcagtactatctcaaaacttttgaaatgagccaccaatcacaatctgaacttaagctgagtaacttgtagcaagacagcagctgctatgcacacctggagtccaccataccaaagcacgaaccagactgtttcttcggggtcagccctacaccgcgatttcagtctaccttaccaatggggcatctggctaaacaacctgacaaactgtggccagcggaagcgacacaaccctcaagcattgtcgacg

SEQ ID NO: 520 - DNA, 6537 bp, Homo sapiens
gctcatcgtttgttgtttagataatatcatgaactgataaatgcagttgccacgttgattccctagggcctggcttaccgactgaggtcataagatattatgccttctctttagacttggtcagtggagaggaaatgggcaaagaaccagcctatggaggtgacaaggccttagggccaaaagtcttgagggtgaaggtttagggcctgcgcagcttccctgccatgccccgcaaggtctcgcattcgcaaggcttgtgacagtgggagcctcattacggactctcctaaagtccatggtgtcctcttttcgcatttgcgccccgtgggtgatgcccgatgccgcccttcccatcgctctcttccccttcaagcgtatcgcaactgcaaaaacacccagcacagacactccattttctatcttaatgcatttaactagcacaacctacaggttgttccatcccagagactacccttttctccatagacgtgaccatcaaccaaccagcggtcagaatcagtcagcctctgtcatgttcctaggtccttggcgaactggctgggcggggtcccagcagcctaggagtacagtggagcaatgcctgacgtaagtcaacaaagatcacgtgagacgaatcagtcgcctagattggctacaactaagtggttgggagcggggaggtcgcggcggctgcgtggggttcgcccgtgacacaattacaactttgtgctggtgctggcaaagtttgtgattttaagaaattctgctgtgctctccagcactgcgagcttctgccttccctgtagtttcccagatgtgatccaggtagccgagttccgctgcccgtgcttcggtagcttaagtctttgcctcagcttttttccttgcagccgctgaggaggcgataaaattggcgtcacagtctcaagcagcgattgaaggcgtcttttcaactactcgattaaggttgggtatcgtcgtgggacttggaaatttgttgtttccatgaaatcctgcgcagtgtcgctcactaccgccgctgttgccttcggtgatgaggcaaagaaaatggcggaaggaaaagcgagccgcgagagtgaagaggagtctgttagcctgacagtcgaggaaagggaggcgcttggtggcatggacagccgtctcttcgggttcgtgaggcttcatgaagatggcgccagaacgaagaccctactaggcaaggctgttcgctgctacgaatctttaatcttaaaagctgaaggaaaagtggagtctgacttcttttgccaattaggtcacttcaacctcttgttggaagattattcaaaagcattatctgcatatcagagatattacagtttacaggctgactactggaagaatgctgcgtttttatatggccttggtttggtctacttctactacaatgcatttcattgggcaattaaagcatttcaagatgtcctttatgttgaccccagcttttgtcgagccaaggaaattcatttacgacttgggctcatgttcaaagtgaacacagactacaagtctagtttaaagcattttcagttagccttgattgactgtaatccatgtactttgtccaatgctgaaattcaatttcatattgcccatttgtatgaaacccagaggaagtatcattctgcaaaggaggcatatgaacaacttttgcagacagaaaaccttcctgcacaagtaaaagcaactgtattgcaacagttaggttggatgcatcataatatggatctagtaggagacaaagccacaaaggaaagctatgctattcagtatctccaaaagtctttggaggcagatcctaattctggccaatcgtggtattttcttggaaggtgttattcaagtattgggaaagttcaggatgcctttatatcttacaggcaatctattgataaatcagaagcaagtgcagatacatggtgttcaataggtgtgttgtatcagcagcaaaatcagcctatggatgctttacaggcatatatttgtgctgtacaattggaccatgggcatgccgcagcctggatggacctaggtactctctatgaatcctgcaatcaacctcaagatgccattaaatgctacctaaatgcagctagaagcaaacgttgtagtaatacctctacgcttgctgcaagaattaaatttctacagaatggttctgataactggaatggtggccagagtctttcacatcatccagtacagcaagtttattcgttgtgtttgacaccacagaaattacagcacttggaacaactgcgagcaaatagagataatttaaatccagcacagaagcatcagctggaacagttagaaagtcagtttgtcttaatgcagcaaatgagacacaaagaagttgctcaggtacgaactactggaattcataacggggccataactgattcatcactgcctacaaactctgtctctaatcgacaaccacatggtgctctgaccagagtatctagcgtctctcagcctggagttcgccctgcttgtgttgaaaaacttttgtccagtggagctttttctgcaggctgtattccttgtggcacatcaaaaattctaggaagtacagacactatcttgctaggcagtaattgtatagcaggaagtgaaagtaatggaaatgtgccttacctgcagcaaaatacacacactctacctcataatcatacagacctgaacagcagcacagaagagccatggagaaaacagctatctaactccgctcaggggcttcataaaagtcagagttcatgtttgtcaggacctaatgaagaacaacctctgttttccactgggtcagcccagtatcaccaggcaactagcactggtattaagaaggcgaatgaacatctcactctgcctagtaattcagtaccacagggggatgctgacagtcacctctcctgtcatactgctacctcaggtggacaacaaggcattatgtttaccaaagagagcaagccttcaaaaaatagatccttggtgcctgaaacaagcaggcatactggagacacatctaatggctgtgctgatgtcaagggactttctaatcatgttcatcagttgatagcagatgctgtttccagtcctaaccatggagattcaccaaatttattaattgcagacaatcctcagctctctgctttgttgattggaaaagccaatggcaatgtgggtactggaacctgcgacaaagtgaataatattcacccagctgttcatacaaagactgatcattctgttgcctcttcaccctcttcagccatttccacagcaacaccttctcctaaatccactgagcagagaagcataaacagtgttaccagccttaacagtcctcacagtggattacacacagtcaatggagaggggctggggaagtcacagagctctacaaaagtagacctgcctttagctagccacagatctacttctcagatcttaccatcaatgtcagtgtctatatgccccagttcaacagaagttctgaaagcatgcaggaatccaggtaaaaatggcttgtctaatagctgcattttgttagataaatgtccacctccaagaccaccaacttcaccatacccacccttgccaaaggacaagttgaatccacccacacctagtatttacttggaaaataaacgtgatgctttctttcctccattacatcaattttgtacaaatccaaaaaaccctgttacagtaatacgtggccttgctggagctcttaaattagatcttggacttttctctaccaaaactttggtagaagctaacaatgaacatatggtagaagtgaggacacagttgctgcaaccagcagatgaaaactgggatcccactggaacaaagaaaatctggcgttgtgaaagcaatagatctcatactacaattgccaaatacgcacaataccaggcttcctccttccaggaatcattgagagaagaaaatgagaaaagaacacaacacaaagatcattcagataacgaatccacatcttcagagaattctggaaggagaaggaaaggaccttttaaaaccataaaatttgggaccaacattgacctctctgataacaaaaagtggaagttgcagttacatgaactgactaaacttcctgcttttgcgcgtgtggtgtcagcaggaaatcttctaacccatgttgggcataccattctgggcatgaatacagtacaactgtatatgaaagttccagggagtcggacaccaggtcaccaagaaaataacaacttctgctctgttaacataaatattggtccaggagattgtgaatggtttgttgtacctgaagattattggggtgttctgaatgacttctgtgaaaaaaataatttgaattttttaatgagttcttggtggcccaaccttgaagatctttatgaagcaaatgtccctgtgtatagatttattcagcgacctggagatttggtctggataaatgcaggcactgtgcattgggttcaaactgttggctggtgcaataacattgcctggaatgttggtccacttacagcctgccagtataaattggcagtggaacggtatgaatggaacaaattgaaaagtgtgaagtcaccagtacccatggtgcatctttcctggaatatggcacgaaatatcaaagtctcagatccaaagctttttgaaatgattaagtattgtcttttgaaaattctgaagcaatatcagacattgagagaagctcttgttgcagcaggaaaagaggttatatggcatgggcggacaaatgatgaaccagctcattactgtagcatttgtgaggtggaggtttttaatctgctttttgtcactaatgaaagcaatactcaaaaaacctacatagtacattgccatgattgtgcacgaaaaacaagcaaaagtttggaaaattttgtggtgctcgaacagtacaaaatggaggacctaatccaagtttatgatcaatttacactagctctttcattatcatcctcatcttgatatagttccatgaatattaaatgagattatttctgctcttcaggaaatttctgcaccactggttttgtagctgtttcataaaactgttgactaaaagctatgtctatgcaaccttccaagaatagtatgtcaagcaactggacacagtgctgcctctgcttcaggacttaacatgctgatccagctgtacttcagaaaaataatattaatcatatgttttgtgtacgtatgacaaactgtcaaagtgacacagaatactgatttgaagatagccttttttatgtttctctatttctgggctgatgaattaatattcatttgtattttaaccctgcagaattttccttagttaaaaacactttcctagctggtcatttcttcataagatagcaaatttaaatctctcctcgatcagcttttaaaaaatgtgtactattatctgaggaagttttttactgctttatgtttttgtgtgttttgaggccatgatgattacatttgtggttccaaaataatttttttaaatattaatagcccatatacaaagataatggattgcacatagacaaagaaataaacttcagatttgtgatttttgtttctaaacttgatacagatttacactatttataaatacgtatttattgcctgaaaatatttgtgaatggaatgttgtttttttccagacgtaactgccattaaatactaaggagttctgtagttttaaacactactcctattacattttatatgtgtagataaaactgcttagtattatacagaaatttttattaaaattgttaaatgtttaaagggtttcccaatgtttgagtttaaaaaagactttctgaaaaaatccactttttgttcattttcaaacctaatgattatatgtattttatatgtgtgtgtatgtgtacacacatgtataatatatacagaaacctcgatatataattgtatagattttaaaagttttattttttacatctatggtagtttttgaggtgcctattataaagtattacggaagtttgctgtttttaaagtaaatgtcttttagtgtgatttattaagttgtagtcaccatagtgatagcccataaataattgctggaaaattgtattttataacagtagaaaacatatagtcagtgaagtaaatattttaaaggaaacattatatagatttgataaatgttgtttataattaagagtttcttatggaaaagagattcagaatgataacctcttttagagaacaaataagtgacttatttttttaaagctagatgactttgaaatgctatactgtcctgcttgtacaacatggtttggggtgaaggggaggaaagtattaaaaaatctatatcgctagtaaattgtaataagttctattaaaacttgtatttcatatgaaaaatttgctaatttaatattaactcatttgataataatacttgtcttttctacctctcaaaaaaaaaaa

SEQ ID NO: 521 - DNA, 5107 bp, Homo sapiens
  misc_feature (1)...(5107): n = a,t,c or g
gctgcggaaggccaaggaatgggaattgaagaacgggacctaggggacagcagcaccactccagcctcagagactgcacacccccttgcctgtatcctcatctgtgtgacggcaggaagctctgcccagagtggcctcagctgcacgactccagaggctccacgactgagctctgaggccagtgcctgtcccccaggcccacttgtattctttctactgtaaaatggcgcctttaaaaaagatgtaagactttggttcccaactttgttaaaaaacaaaaaaagtgatggaaaggtgtttgaaaggatgctatcaggcgacgtgacatctttctaaccagacaggccattgctttcaccgattccaacccagccctggactgaggatggatggttccatgagcccccagatgaaaacctggattcgacagggaagagcttggatccccggctgccccgggcatgagtgtggctggcgcatgggcactgggctcgccttgcacgcccaccaggagggccaggggcatacgcagtcctgacgtggactttgtgtcttggagtaccctctccacgtgcccgtccccctcgtcatcagaggtaaaggcatgagaaaatcgcgctgtgaaacgttttttaccttttattattattttttggacagatgcttttgtcaccaagacatgaaaagctgccattcttcttaacctgttttttaagaatgtctttttactgtgtgtcacacttagatcaaggagttttcagaggttccttattttattaattatttgtgctgcttttgacaggtagcagagggttttaatacttcactaacagtacaccctcctcccccttgggctagcatccccagcccttaatccacgtcggagccggcaggtgcttctcacaccaggagcctctgggggcaggggctggctcctcgccgctgtacaggacgtttactgctgcttggggccagggcagtcctttgaaagggaagcaagttccggaatttgttccctcatggaactataacaccttagagcaagaggcaggaattccagggcctcctgcccctccccttcctccagcttgtcaagttaaaccactaatgtgttggtgggcctggccgtgctgcctctcctgagtagggtgggtgcaagtagggcctctttcccagctttcttgcttgccttctgtgcaatatttcttggagaatttggatgcctaaggcataaaggaaaaaaacagagttcatagtttgagctggtatttaccccctgggtttaaaaatcagattaacttcttggtctcccggaggctgctgtcaggaattctccagtacgggaagatgcagtcacttatgacgaaataagtcacccctgaacgcctccgcaggcagattcatggagaccagtcccagtagcaaccgccccttccccaagcatagaatacagaggtgccatacttggtgtaagccttccttctgtccactgtccagaatgtcctttttcacacggaggaagagatggcgggaaaacactgactgactccttgggtttcccccagacatactttcagagcgctagctgtgtggtgcacgggactttacagttaggattcatgtttaaggtggtggcgcttgaggcctgcaagggccacgttggattactgaagcggaaagcggtctcccatgtataagaaaaagttttacaacacgaattggaagctgcttgagtccacctgaacttgaattgattgcaaagccatctgccgggaacggttttgggttcctgagccatcagccagcctttctttcccctctgatgcacgttcctcccggcctagtccgtggaggcccatcacaccagcatccgtgacgccagcttcccactaggacatccaggcaggtcgggcggggacgccacacgcctcagggccgtccgctgcattgccatagaggagccctccctccagtggtcacttcccaccattgcaggcagacttcccaccattgcaggcagctgggcccacttcatatcacacaaaatgaattttctataaagggaaaaaagtttgctcctccatagattttttagctgccttcgggtcaaatagtttccctggttgacgctcttgggccactctgattggcagcctgctttgccaaagagaactgtgtgaggttttggtggttagtaagagaagggggagatggccagcctgaagtcacggtcctggcccagcacaggtgggcagcagcgagctggcaggtgaagtgtgagcagcacgcaaagtgtcacgtgggccttagccgtcacccaccagcttcctcaccaggcaaggaggccccggagccttagcagggacttgcccgacggcacagctgattggtgctcgactcccagcatgcatattttggttgtaaaaacccaggtttgtaattcacatccacaaccctaagccttttaaagcggaggcaaacgttaacgaaccccatcgtgggtccatggagcctttcaaaatgggtgccctggaggggcctgacagtgggttccttccatggcggatactcccttgatatttcacattccatcaaagtttaaagcatttacttcagaataagttatttatgtgtatatgttcaataaatatagtttttaatttatatctgtacatattagacacacgcgagccatcttgccagaattctgacagtgatgtcattttattcccctcccaaaacatgccccaggaacaagcaccccttgcctctgtggcagctgcgagtgtgtctgatttcataacgaagccaggctgagggcaagaggcccgacaggcaggccagggtccccggagaagccggatttcttcgcaatgtcactggtacttagcagatggtcgtgttcacaggggctagccacctgtactacggtgccgaccgcaatgcgaggaatgtggtggccacgcgatggagctggccggaggacaggtcaggtgagggggccgacccctgcggggcctnagggctccttccattctaaccttgagccacagtgtcactcttcagggctctgccccctggctctattttgttaaggtgtcatcagccttcagcctccatttatatatttttataatgttaagccactgaccaactttttcatagaaacaactatcagattcgagggctccctttgtccccctgaccctgggcacaggcatgggccatggctccctcttcccagaatctgcggggaactggggcaaggcccatctgtctgcaaggctggtagctctctccctcggcttccagagtccacggcagttgcaaggtaaccagtgtggatctgctgagtcaccccaggcaccagacttaccccaggagcatgggccactgtccatggggccttccttgagaccttcccttggggctggcgggcggcggcttaccagctgggtcagtcccatctcgcccctctgtgcctatgccctgggggtttgcaggcttaaccttcccctgtatcttactcatcccagaattattactggccatttctaaatagacaaaaactaccctaaaatgtggagatttactccttttgaaaagtctgtttcaaaaagtgtgggcctcagctctggaggccacccccagggaaggagtttgaggttcattgtcattatggccacagtttggtgcttgtgcacgggactcaaagggcagcgtcgaagctggggttaggtgtagggttgtgagcaaagctcccctgtttgtggccacaccttccctttccaaaaaggctattaattctactcacccactatttggggggatgtaaattttgcccacagactttgccacccaggtgaggtgctgtgttcatgcacggaactgatgtcattagacaccatccaaggatggggcagcctgcagtgtggccggcgactgccatccagagaaaaggcaccttgtgccacagggcgggggccnacaccctgagctcacaggtggcccctgcattcaggtggatgtccatccttgaaacagcctcttctgggaacacagcactggaggtctccagggcatcagggttggcccggcagggtgccctgcagcttacataaaggtcgtggcaatgtttcaatgttaaactaaactattgccttcctcttacttttcctaaaatgattttctaatgggaacagtcacttcaagttcatgacatagtttgaaggaggataattcattttttcctggttgtcgctgtcttcttatccccttggtgggctgggttcatactgtgaaataaactaaaatgaaaccaaaacgttcctgccataaatacgtggcacagcactgcagaaaaagcagtcacctctattcgtgagtccccaagccatagcagggcgtctgtaaaagaagggaaactgcacctaggaagtggtgggcgtcagacgcatcctttcgcccgtagttcatgaaatagttccggctttggtcttccagaaaatctcaacttcaccgtgcacaagtgttaccgggtctttttagtgtagccatggaagatactttcaaaaggacatcttcagatcataagtcttaggaccaaaggtgtttttaatgagataatctttttgattttcctaacaagaagggaaatattcactttacattttaacatcaacttttaagtgatattcagaattaattgaccatggtgatacgttgtaaaatgttttcatattaagaatgtaattatttcccttattgtattttttaaaagctaaagtcatatttaaaattctctttgaaagaaacaggcaaagaaacagcaaagatttttttaaattaaatatgttagtagtgcccacttcaaatgactgtaaatatattttcactgtttctcaatgtatttaattcataaagtaaaaattttatgaaaagaaacttgcaaggaaaatcctagttttcagtccactcgccccactttgtagtagcttcactgaatttcctgctttcctggttgaattttctactgtttcacgtggtgtaacccctagactggcgcccttggcgtgcccctttgtgtatgaataaacttctctccccc

SEQ ID NO: 522 - DNA, 444 bp, Homo sapiens
ggcacgaggtatttatcatggaagttttgtgctcatataactttaggaaatgcagggttgaaaaagttaaacattttaaattctagatttctcagaagttttaatacgttaccttctgaatctttaagacagagctgtagtatacagtgactctgaccatggaactcttttccccgtggcctgtacttccatgaatagtcatctaagcagataaataaatctctaacagcatctaaaaattataatggaatattttaaagatgctcaataatcttaatgtaaaaacattatttatataggatataattttatcacttatagttactagatctgtattttgtatttatatgttgaacttttgggaaattaatttatacatagtgaaagaacaaactctccattcttccattcttaactgttacagaaaagtgaaatttatatttc

SEQ ID NO: 523 - DNA, 216 bp, Homo sapiens
  misc_feature (1)...(216): n = a,t,c or g
tactctcatgaggacagtaccaagccatgaggggtccacccccatgaccccaaacaacttcccaccagggcctcaacctccaacactaggggattacattttcaggcatggaaatttttggggcacaacaaatatccaaaccatatcatcatctctaattcatgaataagttaaaatggccctncttgtaggtatggagccaaatgcaancaaaca

SEQ ID NO: 524 - DNA, 1132 bp, Homo sapiens
gcattgagctttctgtcatttgactttaaaaggaagtttcattcatatttatcctcttatgtaaaattgcggtataaagtctcatttccaaatatgttaaatgacaaaattattttataagatgtttatgcacactttataaccttaagtttttatttgagaatgtgaaagtacaaagtgcagtagacttcaacaatcttgagtgccaagaataatacagaaaaagaagacagttgatgaatgagtttatagggttctaatcttaagatggtaaaaatgtagaaagaccttgctggttttttgggggtattcgtttcttaaacaatccaaatctaagcttagaagaaaagtttagcgttaagcacctttatcttcatgaataagcttcagcttgctcttggcaagagaagagtgcttgagttacagaaggcataagtagtttgaagaatgcagcagcctttttgtaaacttcccagatatcaaaatagactttgatatataaatggttttctgagatgacactgcctctatttctataaccatttcacctggactatctaatcagtcctatgaatgtatccctaaatgtggttattgaaaacctaatagctgcctcatgacaagtacatgttatttaaggaggaaaaaatattaaattttgaattgagtgtgtaggctccctatcattatatatagagtttctttttccacggtagtcagtgacttaacctgaattgtaaatgtttgtaaagggttaattgtcctacatcaaacttagttaaataattccatccacttatggaggaggaggagaatgtggaagaggtaaaaagctggggcacaagttcatatgcctatgagtcagtaaagactgaagtaatgtcctatgttgagctggttattttgatatatgataataattatctttgaagtagaacaattctgttaactggaaaatcacaggatatatccatcatatttttcaggacagatagtttttactgtggggcaaataggttaaaattacactatgttagttgccatttaggttttaaaagcaaaggatctgttaggggaatccctgccatatatagtttgtcccgattagctttcctttgggggattgaagttc

SEQ ID NO: 525 - DNA, 505 bp, Homo sapiens
  misc_feature (1)...(505): n = a,t,c or g
gaaaaatcaaatcacccaaaagagttttgccaggtattcattatggtatgagctacagcataagccttcaagaggaaantgatcaattattggcttttagaatattgctcattgaacagattattcaagtaatgaaagaggaggggaaaaaaatccagcacattagttaacctggcatcaattaatgaggttctaataagctttgtcttatgatactacctggaggttacagagctggtattctgaggaataagcatcagtgagttggtcagatacaatagacgtttaaaatagggcttcaggccaaacatggtgccccacgcctcggccnnnnnnnnnnnnnnnnnnnnnnnnnnnnnnnnnnnnnncattatcttttgaatcctctcttcctcctgcccaccatgaatttacttcctctcacccatctccctgatattgtaattctggttagatcatattcagtgtcaaattattaagatgtgattaaactttttaaaaataa

SEQ ID NO: 526 - DNA, 980 bp, Homo sapiens
  misc_feature (1)...(980): n = a,t,c or g
gaggcccagcccttaggagttagggctgagaggggagcccacgctctcatacccagcaagctgcagagtgatcagacagcccattccctaggatcgcaagtcctacagctggaaacagcggctcttcatcatcaacttcatctccttcttctcggcgctggctgtctactttcggcacaacatgtattgtgaggctggagtgtacaccatctttgccatcctggagtacactgttgtcttaaccaacatggcgttccacatgacggcctggtgggacttcgggaacaaggagctgctcataacctctcagcctgaggaaaagcgattctgaacccttcagtcctgcttgggaggacgcagcccactgcccagaaacaagaaacacgataccattctggccttccccaccccacatcctctcttggccttactgaagatgggggaagggtaagaaggaagggtgtaggccaaggctcaccccagtgctgctggcttctctccacccctcatatgggcgtggggtcctcaaacatcacctttacctgagaggccccaagaagctgagctggcagagagctccaccatttggtgctaaaaaaaaaaacgtcctgaggttcatgaccaccatccagtttctgggcctttacacagtcacctttcactgaggtcagggagcccctgagcaagtggctgctccctgacaaccacaagccatttctctgcacgggggtcattcataggactaatgtatttcatgatctactgtgcacatccaggcctgtgcncacagtcccctgctaaagttgctcaggtgttctagtcctgacttcacctttttgatttggtgtgtgccctagggtatgtacccttccccatctgagcctcggtgtgtccatgtgtctggtgggggatgggtggactgtatggatttccaaggactctaccagtcagtggttctgatgtcatcgggtggaggtggt

SEQ ID NO: 527 - DNA, 458 bp, Homo sapiens
gggggtgacctgcgtgttccccatcgactggccaagcactcgccgcagcaaccagcatgggaaagccatgttacaaggaatgcatcgactgcctgatcgaagacggctcgggcggagggcttcttcggccatgtaccgaggggctgcagtgaacctcactctggtcactccagagaaggccatcaagctggcggccaacgactttttccggcggctgctcatggaagatgggatgcagcggaacctgaagatggagatgcttgccgggtgtggggctgggatgtgccaggtcgtggtgacctgtcccatggaaatgctcaagattcagctgcaggcatgctggacgcctggccgtccatcatcagggctcggcctcagcaccctccacctccaggtcctacacaactggttcggcttccacccacaggcgcccctctgccaccctcattgcctgggag

SEQ ID NO: 528 - DNA, 648 bp, Homo sapiens
gacttttttttttggttttatagatttattttcaaagagtaaaacacatacaatttaaatacaagtccatcagaatcactctgtcagagtcagcaagaatgccaaaatgtgtcctcactgccagacattcgtcactatcatctgagtcctctctcagcaaagccaaagggtctgatactttattcatatacatccttcttatctgcaatgtaatctacaatttcttgtggacacattaacttttcagcatctatatcaggaatttcaaacccaaattcgtcttccatggccatgataatctccacttggtccaaactgtctaagcccaggtctttcataaaatgagaatttactgaaagcttctctgggtcaatcttgtcatagagtttcaatacgtaaagaacacggtcctggatgccctctaacgtcaaaggaggcatgtcgctatactggcggcacaactgtgtaactctaccaggaacctgcgcgagcactaaggccggctgcaaagtcccgagcctcgtctgggtccccgcggagcagagagcggtgctgagaggcccgggccacggccagcatccggacccggggcagcggcgcaaaagccgcgggcaggcggctgacataggctgaaaggacacgagacgc

SEQ ID NO: 529 - DNA, 1695 bp, Homo sapiens
tgccactctaggcacacatgaattataaccattttggaatttccttcgtgatgttcgagagctcagcaatggacccctcacagagctcctctatccgaggccattggagaccccagtttctcaagaattcagctctgctctgagcgtcctggagcttggggatgcagccagctggcctgcactgggtgtggagagaacacctagggaaggcagcctggccctgcccgcctccgccttctggagagcctctgggttctgagtcagcaagccagaggtcatgccacaggcctggctggaacttacacttcacgttccctttttttccccctagagatggggtctcgccgtgttgcacagactgtctgtattcaatggctatcttcacaggtgtgatcataccacattcacttctgaaacactcttgttggcgatcgctaacctcactgggacagagaaccgcagtctttcgagaatggaggctcttcattttttttttctcctttactccaaactcagccctccagtttcttcaaatgtaaaccctgttaacgtcactgtttccaaaaggaaaaaaataagtcagtttttggcagcaccttcatctttctgacctcctcctattctgtccttgtggacttatgtttaccatagaaaatgaatgcgtttaaaacaaaaccactttctgcatttaaccagtcctggctctctctctgctgcctcttcatacgttttctcaagaacttcagtttataattggaagagaaatttttgctgttaatgccagaatgagcaacctcaaggaattgaacacttcttggaaaatctaggtaattcaagccctcatcaggtttacaagatcatcagagaaacagaggattttaatttttagttctggccggctacaggctccatttctctgccttcccattggaaatagtttattttccacatttctccactgcgtgtggtcaaagttcctcacccagcaagggactatagatactcgtgtcccaattccaaaacacaatgcacaagctgaacttgggctgaacgtggcgtgttgagatttggaatgaggtttctaagagccgtgttcttcatggaattttccaggccacttggcagcttggtttaccgatggatgggctagagatcttgtcgtttcttggaagtcacagggaagattgaagagaacgcttgagcatccttggcaacagcccaggtgggacctggatgaagctttgcactcaagtattgtcaagggaagcttcctgtgaaccaaagttctcaggccaaggtctcgcccaccaaagccagaaagtgcaagcacccgtctacccagctctaacttgtatgtgtgagacagaccaggcttcgggggtaggaggatctgcagttgttcagccgtctttctgctggtgttgtctttctgccatcagagaagggacacacagcccgttcaaaggtgtgcagagggctctgagcgccaggatggcagaggctgtttttgctactgaaggagcgtgtgtcctgaactcccacttgcagggacagtccccaccttctctatagccggcactgggagcagccgccagcagggaaatctggcctgagcacaaggatgctttagggagagatcacttcagtgtgtgtgtatatttatttgcagtacagtgcgcgcgtgtgtgtgtgtgt

SEQ ID NO: 530 - DNA, 2336 bp, Homo sapiens
gagggaaagacaaaacgtatttattccaggccaggtcttaaaatgcacactgcacggttccctgttgttatcagcaccagtaaggaaagaacgtgccttaacggcagccccacccagagcctgctgcgtggctgctgtgaggctccccatgaatccacgcagtcttcttcctcactggtgcagttggtgaggttttctaccctcacagcaaagggatccttaactataaattcacggtatgcagagaagaggacagaatctgatttactgattgttcctcatttaaaccatgacttaatctctatcttaggatttaactatctttattttctgggttaaaatttttaaaaaaagtggggagagggtgagagtcgtaaggggggcaatagcaatagagattacactgtgctgacacagagactaaattctagtcagagtgaagacccatataaaaggccggctgatggtttaaggaagtactacatggagtctaatcgagacattcatgagttacatctcattattagccttagtaatgtaagaaaacaattctcaacaaaactggagtccacagttgtcaagtatgctttctcaggcacgggtaggtaaaagtctggagaaatgggttctctccatgcccaatgacaaaggcaagacggtcctaggtttgaggttaagagcaggtcccattgccgggcggtatccgcaggttcacagctgagtttagcagtggaatcgagtggagaatttgggagatacaggcacagtcagaggctggtcacttgactttatctcccagaccctggtacttgcgtattggatttgccttatgcaccagttctctccgtagcctggccagctcctcttttttctgctcttcctcctgtagtctggcctcctccaactgctgggctttctgggcttctacctcagccattctcttctccagctcctgccgctctttggctctcttctcagtagccagctgaaaaggttcctgaactagagaaccagaaaggccctcagcaactgatttcttctctttcttgggaacaaagggctcctgagagatgacggtgtttggacgagccttgaaacaagctgcttctttctgctgtctcagttcttcttccagctggtgcttccaagtctgtgccttcagagcacctcttctgtcagtctccaagcagaaaggttcaatctgggtcacattctttaccttcttctctggcaggttaatggtgtcaaaatgaggcaagggaagtgccttgaacttgggcacctcccctttctgcagttcttttattttcttctccttctgtaactgacgttctttgtctcgagaatcaaacgagaaagggcatatttccacagttcttgcctctgggatttggggcttaaaaggcaccccataatgtggcacaggttgagcttttatcactaccggttcgtcctcttcctcatcttctttggtgggcattcgaattctgttcttcaatgcaaaggctggtgacttggggacggtgattggaagtaccttcttttcaggaacacccacaacatcttccaaagtcttagtagggcaaggtctggaatgaaattcaaagtgttcatcctctgttttcttctttgattctcgctcctggattcttttctcaatttccaaatcaaagccaataggctcggtgggtggtttcacaggtggtttcttgggcaagatgggcccaccttcaagtattctgggatcaagttcacgtgctttgaatttgtattgttgcaatttctcgagctcctcagcctccagctctgctgtacttttgcaggtcacagcccgtgcacggtgtttggtttgcagtacaggagtctgtgggtctctgcaaatcttggtcacagaagatttggagggtaacaggttaatatcatccttcttgctcctcaaatgatatctgttaggggttcgtttatggaagtcttcaacttgctgtgcaaggtggggcacatatgtagaaactgtttcatcaaatgttcttttctttccttggggacaggttgaaaaggctttaacaatgggtacatccctttagttcactcgggcaggagatgaaggatgctttcgtagttcagatgtaaaagttcacttccttatattcctcctggttcttaggatgttgtttgattcgctcatctgtgcggaagtggaagtcaactgatttggtgacctggctcactgatttcttcacaggttgccctattccagccagagcaagtttcttgaattcttcattctttttccgcatctccaccacctcttgctgcattttcatactcttctccag

SEQ ID NO: 531 - DNA, 855 bp, Homo sapiens
ttttttttttttatatttgttttttattcaatttgaaacatttcttttattgaagaagttgaacttacagcagacagtgaaaggagttacagcactccaggacaaacacagacataaaataatacataaaacaagtagcgggaaactggaagatgccagggagtcctcttataaaagcagggttcaccaaaaccagaaggccaactggctccaggacagcgaaaggcacagtggctcctctgctcctctgccttctgcccccatttgaaatgggggacttacaaatccagacttcagggcaggcctagacttgatgcagccactgcaatcttggtccatggtgcaatttggcagacaagttggtgaaaggtaagttgtctccagagatttcaatcagggacgtggcttccagatgttaaaagatacccagctaagtcacaaggaagtggatgttttcaaatgctaagtgaccaccaaacaaaacattctccctgggccttcaccactcagagaacaccaacatacaaaaacaaaagtctgttcccatttcatcaataatggagttttaaggattttgtcatagtgtagaatattaagaatggatgaataaaaagtcaaaaaaggtgcagaggtcctataaatcagggtttattagactagatattaataaattggaagggtttaaaaaaaaaaaaggctgttggccctacatatgacagtttcccattgtttcttagcttagtatatttattttccaacacaatgttagcaattcttacagcagttcttgcatttttccaataacatttttattaatcaaatggtatatatttttcactataacctattttcact

SEQ ID NO: 532 - DNA, 812 bp, Homo sapiens
  misc_feature (1)...(812): n = a,t,c or g
agcgctgagattgtctaaagccccaggaaaaatggtggaaaattcaccgtcgccattgccagaaagagcgatttatggctttgttcttttcttaagctcccaatttggcttcaaaaatctgaagggatctcgtgtttgctgagtgttccgtgtgccagcactagcctaggaggttttagtctctacaaatatttatacagcaccagacgcgatggcaaagtggataaagcctgggtccctgcccttaaggaggtcgtggtcttgtggnaggagacagatggtactttacctcgtgtgggcctttattcctgaatcttggctaaactctttaggtttaacctattggcctcaaaaatattgggcagttgcattacctgtctacctccttattgctatagtaattggctacgtgctcttgtttgggattaacatgatgagtacctctccactcgactccatccatacaatcacagataactatgcaaaaaatcaacagcagaagaaataccaagaggaggccattccagccttaagagatatttctattagtgaagtaaaccaaatgttctttcttgcagccaaagaactttacaccaaaaactgaactgtgtgtaaccatagtaacaccaagcacgtatttatttataagtttttgccattataattttgaccataaattaatttgaccatctctcttattaatagagaagtaaaaaatgtaagttgaccttctcttagattatgttcaatgaatattgtaaatgttcaagtattgttaatgaatagaataaatacaatattgcattcccaaa

SEQ ID NO: 533 - DNA, 373 bp, Homo sapiens
gaacgaacagaaaccggtgtgggagaagatatcctcctcaggaactgcaaaggaatccccgagcagcatgcagccacagcccttggagaccagtcacaaatacgagtcttgggggcccctgtacatccaagagtctggtgaggagcaggagttcgctcaagatccaagaaaggtccgagattgcagattgagtacccagcacgaggaatcagcagatgagcagaaaggttctgaagcagaggggctcaaaggggatataatttctgtgattatcgccaataaacctgaggccagcttagagaggcagtgcgtaaaccttgaaaatgaaaaaggaacaaaaccccctcttcaagaggcaggctccaagaaaggt

SEQ ID NO: 534 - DNA, 669 bp, Homo sapiens
ttttgaacttttttagttttttattttgattcctatggctggacaaggtatctacattctagaacatcttcttaatccctaaacaagtggaaatctactacttatatataaaaagacaagtagaaaaggtcatgattgtctaacagggaacatgaatccccaaataaattatcttacaaaaatatcatacttgcttttctacttttttactatactggtaaaaatgaaatgaaaaaaataattcacattaaaataaaatctgtagggtggcatagaagacaattatttttacatattaaagtccttcaaataaatattttacacacaaatttaagtaagtttttaaaaaaaataagtatttacgctatatttttttgctctgctaaaaagagaccacttattaaactgacattaaactggactgcagctcattctctgcaaagagtaaaatgcatgtcacaggcagattggatacacacgtgcatattacatacatatgaaatggctaacactgctgtgcatactactgccataactagttttaccctgtaaaaatactgtagcctatactgtatcaaattgcaatgaaagaacaaaaggtactacttgcctattttagacacttggtcaagcatttaaaaaaatacaaaaattggtccactgcagatt

SEQ ID NO: 535 - DNA, 1076 bp, Homo sapiens
tttttttttttttcattaagaaaatatctttatttattctgaaatgttccaataatcaatgtaaaaactgtggtagtggctctttcacaactttacaaattatagaaaaatgatttttcctcttctttacagaaatgtcactcccaaatcgtaccgggccctattatggctaaaacccagcaggaagaagggagcagagaatacagcaagcagggctccggctctctgggtggccagaaggcttttcctacacattaaagcccaggctgagtctcaaagacctgtgacccctctgaaggaggctccatccacatggatctgtggcacactggggcaggcctctgtcttgaagggccagtaggccacagaagacctgaaagcatggcactcgtggttgcaggccacagtcaaggcagctttgtgagaatgagaacaggaggcgagcctatagctcaaatccctttctctaaaacacagccagaaaagaggctgtggacactggccaaacagtgcactaggtttagaaatttccccttttactcagcaaagactaatttgttaaacagctattaaaaaaaaatcagaaaacaaacatttggttccatttcagctgtaatcagcagttggtaatttttggaaaaagagcagttttctcatcttgagttgctcattaagtctgtattttttatcaggcccctgactcctttctttctcatccatggttttttggggaggggggcaagtacagctataggagaaggctgtttgttgatttgagaaaactgttaaaatgttttgcactcacatacaaaggctgatggaattcaaaaatgatcccactgatttttatgagaaacatgactgttcctcttgggtgtctcaagtcaaaacaagggcaaccgccctagtgatttataggttcccacattttccgccttccagaaggcattagagaaagggccaacctctgccaggagagattgtaaacacaccactgacagcttggacactttgtttttaaatgcagcagggctttttcctttggcccctggctgaaaagccaactccctaggaca

SEQ ID NO: 536 - DNA, 544 bp, Homo sapiens
cttaaatgtattgggaaagacacgggtctgtggcattgtcacaagggtacacgaatactgagagtgaatgctgaaggaatgatccccattggtggtgaccctcaggtgagagtagggtgcctgtgtttcagcaaagcctgggcaattggaatgcagagctcctaagattccatgacacccccaccttctaattctgttattgcaactgcagacggttacctggcacgctggccacattctgcctcactcttatcagagtctgagctactggcagtgctttcagctctgagttgaggcacctcgaaccttgtttttgtggtgaaggatcctaaagtgctgtggggagtgatcacatttttctcaacatccctggccccacctcttctgccacaaacgtcagcatggtggtatctgccggcccttggtccggtgagaaggcagagatgaacattctagaaatcaacaagaaatcgcgcccccagctggcagagaacaaacagcagttcagaaacctcaaacagaaatgtcttgttaactcaagtgg

SEQ ID NO: 537 - DNA, 480 bp, Homo sapiens
aacaacctctgaaaaagagcttttaaaaagtgatgaaagttgcttttttttcttactattttctcaggaatactccagagatgtaaagcctgagagtccatggtgatgctcaagagctttcatctggccaaatattttaactaaagctgttcattataaataagaggtgattataccttttttaaaaaaagttaccattatttctaaagcccctatggtatgattgtgacctttaacaaaatgcaaaggtatacactggaaaggtactcagcaaaattctctccaaattctgatttatatgaatttcttggactggatagagtactttcaactataccttcctttggaacataccttttaaaaaatgttccctttaaatcctgttattctaatatgtaactctgctcccaacaaacaggtctcctcattgtccttggcatttgacaagttatcccaacttcgaatctcatttcttccttt

SEQ ID NO: 538 - DNA, 2420 bp, Homo sapiens
  misc_feature (1)...(2420): n = a,t,c or g
tttttttttttttttacttttaaagaacatttttattactttcaagtttatacagtaatctggcacaagctattgccagcattcctgccaagtacaaatgcttggacctccccttaatcaacagataaaatacataacttacatttaaggggagtggatacctcaaagtgcttaagtaaaaatttgttctctttaatagtttgaactgtcccttgttagtcgtgtctaaaacattgacctgaataatgagaaatcacaagctaatgttttacttattccttatatggtaagagactaccttttaaagcaccattttccatttggcatttcaccaaggtctaatgtccctggaattagtttttttgttttgccttttgaatatcgataggtgttcatctgaattaaactacgtttagtttgatggcttcctgcctccaaattggcaacagtgtacctcactttgtatgggagctatcaggatctccataggttgcaaagtagatgaccattaccttggggttggggcaaatcagtgaacaagtctcggcaaggtactggcatttgtatttttaaaaaaatctctagccattttgttcttggtgtaaaagtagaatggctgaagtatggcagctgagtaataactgttcttcttagcatgatgtagtgcttagcatgtctctatgggtccaactttgaacattattaagaactggtttgtcttgttttgctataactgatatgaaaaatggtttgggtggggcatggtggctcacactcttacangaggcagacnnnnnnnnnnnnnnnnnnnnnnnnnnnnnnnnnnnnnnnncaggcaatataacaccatttgccaaaaaaaaaaaaaaaaaaagaaaaaagtggtttgaatattcatatttcttcctggccattactgattttcaattaatttatgcataaatgagacccaaactatcactaattttcagctatatgaattgatagccacttgacatcagtgaaaggtacagtagggagtagatgaaattgtatttttaatgaaaaggctttgatgggagattcaagannnnnnnnnnnnnnnnnnnnnnnnnnnnnnnnnnnnnnnnnnnnnnnnnnnnnnnnnnnnnnnnnnnnnnnnnnnnnnnnnnnnnncctcaagtgatcctcctgccttggccccttaagtgccagggttacaggcatgagctaccatgcctggcagaaattcaagatttggataaacttacttctttgccaagcctgttcttcaagttattcagaactgggtgtataccttgtcctcatatgtatcttgtccctgctgtcttttaggttagcaaggtgtatgaatacttttaagttttgtttgttcttttcctcgtggtatcagtgaaatactgatctattctctggctagggtcaatttacaaaattgccatggaactgagcaaaaggcccacgtgggataaaaatcactcaccatcgacgccaccagtatttttcaagttatggcttttgaagtataacaaatttcagtaaacaaaatcaaaagaaaaaattcctctgcgtacaacaaagaagcacctgttatattttgaatgcattcttcatgttgcccagctttctaaaacttgtttttttgatgcctcaacagacagaagtgaaaattatatgccactcttaagtacatccaggttctcctctacatattcccaatatgggaatgctggctagcaatcatggcactctctcagaaaccagccactggaagttaaaacttctggatttcaaaagctagtacaggctgctaaatttaacaaaggaacaaaccttcataaatggtacaaactacctgcccaacacactcttctattttccagaccctttaatattgagtagtctagtcttggattgactatggtgggttaggtctaatctaagtatcttaatagctatctagggataatgaataaaattaaatacaactggtacctcaagtatcataagagaataaatttatgaagacaagcagaccaaagcaactcaagattttctacacctgactactgtagctgtaacttcaaataatgtgttacctatgaaacttattatgtacgaattagttcttaaagacagaaatgatggaaacatgtaaaaaaaaaaaaacaacagtaagtgttcaaacagatccctgttttgttataaagaactggagctctaggtggcatctagtggatattttaatagcaataaaaataaaaaattgggtgatattccaactaaataaaaaatgcagctgctttttaaaatttaaaaacatactttaccaccctgaattataaactcaaggcaagtagcttattattccaataaggacgtggtgtgataaattctctcacacaggttgtcatcaatct

SEQ ID NO: 539 - DNA, 1386 bp, Homo sapiens
caagttttagagaactaaatttgcatttgttaaaatcaaaaagtaggaaagatgttctttacaaataattttgatcaagtatgtgttcaaagaaagcaggataaaaaggctttttctctaacattctgtgttgtactgtattgttgttcaataggaattagcttctgtcatttgctaaaagaatgagtagtggggaacaggatatgttggaaatttcataacgggtaacagaaccattctcttgggtaaaccatagggcaggggcagctgtgctggtaaccatatggtgttccatagcctggagctatgtagccaggagcagctgtcgcccccaacaaaagctccccttgttaggagttcctcttcctctgccccgaacagcttggactgctgcagacgcgcttttttctcaacgcactttggctgagggataatcttcctattcctaatatttgacgcattggggtcagtaaacagtttctccacagcgagtaaagctgcactcgcctttgcccactttcttatttggacctgcgcctctgaatttctgtccatctacttctacctccattacaaagcgcttgtcatggcttccaccagtctctgagatgagttcatacttgagacctcttcttttttcattgagctccattacagggtttttgccacttgctgtgaggatagggccctgagttcttacctctaaggtactggaggtttcagttgtagaatttccagtattattgcttgagtttgaagacactgtttcatttttactttcattatctgatttttcatcggaactcatacattcaatatctgcatcaaagcctgttggatatcccattgcctgcaataccttcaccgctacgtgaagttttgctgttttcttggatggtcctgaggcttcatatgttgtgccatccacatctacagacattgtgaagactggggcatgaacggggccagactgagataggagcttatactgaagcccaggcctgatctgatttagcctcattagtgcattcataaggtctattgctttactatccagaattttccttaagtttcgtttcatcttcttgttggggtctttatcatcccctaatccatcttcaaatggcctctttagagctgaagacccagcaccttctttatcagtaactgaccaggaatacttctgaaaaggcttactagatggaagggggtccatctccagcactttgtaaatctggccaaaggctgatagtctgagtgcatgctgtgcactgtgggtaatatcttctttttgctggatggtcatatagctcagagcatctgttgggtctcgctcacaaggatcatgaagaccaggacccccaggaagtagtattccagatgccc

SEQ ID NO: 540 - DNA, 628 bp, Homo sapiens
tttttttttggttatttgagattttactttgtaatcgagtaatttagccacactcttgtgagggaacaagccagagccaggaccgcatattacccggtaaagctgcagagaagacttgagacttgtaagattggacctggctgcagtcccgtggtcagtaacatctgcaacattatacagccagcagatcagctcttccagctgacagcaaaatgtcttcacacattgcaccagtgattcttttccctgttctcctcctttcctgggaagctggctttggctggagcttgaagggaaggaagctggcccatcactgtctgacacttccaaggggctctgccttttggatatccccagtgggcagggtaaccaaggtagaaatggatcctagatacgaaaccaggctagaaacctgtgtcagccgagcggggagggcaagatactcgtcatcactttccacttcctcttctgatttccacctagactctgtgcaggtagggcgccgggcactctggctggtcctcttctccctctctggcctgggcgagggccaccctctgtcccgtgtccttaggctggggagagcccatatcaaggtgcttgcctatagtcagccggtccttcgcac

SEQ ID NO: 541 - DNA, 906 bp, Homo sapiens
tctgttagattttttcagttgtttttggaaaaattctagaaatcaggatgaaaaatgcagcttttccagggttgctggactgggggttttatttgggcctccttattataatttgtcactacttataaaaaacattctgttgcaaacagtggtgttgcattgaattgaactttggcaatgagaacacagcacacagctcccttttcaaaaagggtctcaaccccagtgtgtatttttgtacatcaacatttagaatacttatggcagataagtaaggcatgtcactgtgtccttcagtaacctctctcagtaactggtttctttatccctaacatgaattcatttctcctttgaagtcatttattattttataaattgagaacaaccacaccaccaaatgtcacaccttcttataaagtgtgaacaaggaaggtcatgtttttgtgggtattttgtcagacttagaggtttcatttcagggcatagtcaaaggcatcatcctcccaactacccacttgattatgtatttcagatccctccgtgggggccttcttctgacagagaattctttgaggtacgcagtagtgcttttgtcagcacagactgctaatctacatcttgctgcgttctgtttgctgaggttggggcttattcatttaacacgtaccaaccattatccagaggcaccatggagagttagtcatggaataaagcactgtccttgcagatgaaaaaagtctccagagcagacttctgacaggaaaggtttagatgctggagagttgaagaggtgtaagaagagatcgtgccctcatttttcacttatttttttggtttattcatttataataaaagggttggcattgatatggtacaaccctgcaaattacttgcagttctgaggtg

SEQ ID NO: 542 - DNA, 1210 bp, Homo sapiens
taggaaatagacctcccatttcttaagcaagttgcttctggaattgatgcaacagggatattagctgtagtttaatggataagttgttctatgagctgctgctatcagtacttttttccacattttccattgatatttgtgatgcttgaaaaatccaaacttcacttggatacatttaattttatgcctttttctctctacctcccacttttcctaggcacccttgcacattttgttactgtgaaggactattgccctgttacctcactgataagaaatctcaactgtattcattcagaatgctttaagcttagtcataaactacatttgcctatggacctttggttattttgttaatgttgtcattatatttaagacttattgtaggaagtaattttaaatctatttcataacctgttttgatctgtctgcatactgctatatgttaatttattacggccttttacaattcacttgtcatctgagattgttctagaaactgatgaggaaagagtcgtactaaccaaaatgaatgggcaattgacataacattctatttcaggtttccttgtacttggggagccaaagcacaagatctaaggaaatcttattcacatttgtccctcagagcatcttaccctaagccacagaggtataaatagtaagatgagaattgctcattgtctgactccttgcacagcatgaatttaattctagttggaaacaaagttagtgttgactactggttaccttaaagtattcaccatactatatatttattagaccatctttcctctttgtttattcaagactatgtacttataaaagagaacctataagaatgtgtagagtgaccaaatagggacaaagtgacatacctagagtttgctgctcaaatttttccactagcgtaaccctaaagcagaggggcatgatgaagggggaaggggttctgagagcaaaatcagaatcagcctaccactgacatgaagtgtgttctgtctttaaaatgtaagtgaattttgcattctctataataaaacttttaatataaaaatgatatgtttaatctttactgaaacttatgccaccacaaaggagcaccatgttcatcacgtggctgctcagttttctcccccagtgccctcacccccagtggaggcaagtccttgagctacacacactggctgtagtgcaagatatataaaca

SEQ ID NO: 543 - DNA, 446 bp, Homo sapiens
ctgaaaccgaaaccgctgtgctgtgggcgcagcgccgagattgattcaccttcacctgtgctgcactccagctgacccaagtaggaagccagacgagctgtaaaacatgaacggaagagtggattatttggtcactgaggaagagatcaatcttaccagagggccctcagggctgggcttcaacatcgtcggtgggacagatcagcagtatgtctccaacgacagtggcatctacgtcagccgcatcaaagaaaatggggctgcggccctggatgggcggctccaggagggtgataagatcctttcggtaaatggccaagacctaaagaacctgctgcaccaggatgctgtagacctctttcgtaatgcaggctatgctgtgtctctgagagtgcagcacaggttacaggtgcagaatggacctataggacatcgaggtgaagggg

SEQ ID NO: 544 - DNA, 1439 bp, Homo sapiens
cttattactgtaaattgttccagagatttaaatttcagaagctgttgagtaactggaagtgttgacttactacaatttggggtcaccaagtgggtggcagatggattgggctgtgcaggggctgaaggactcacccgcaggcccagagtcgctggcctccctgaggctgtgctgcctccatgggactgagtgctgggacggggcattttgggagcctggcaggaccctaccctgcacgtgggccctggccgtgcgtttcctccagatcgtggcaggcggtctcgggatgctgttaatgcagttgaatcaccacctcaaaatgctacaaaatctaccctttacaacaatagtagtacaaataaacgtttagacacttcacgctcaaagagggcttttgctcgggctttttatttcacaattgatgcttaaaagtgcttttaaaggcaatattgcaactacatttatttatttatttatttgctgcagaaatgaagttatttattaaaacacacccatggtagcaagttctgatgggtctgaagaggaggcaggagcacggtgttgagcttctaaacatcgtcctgccagggagggaccctgacaggtgcttggctgacatgctgtggccgaggcaggaaggaagttgcagaattccacgaaggcagaagactaccagtaggcaggtcccatgtcatcacacccgtgagagtggcagtggtctggtggccacagagatgtctgacagcgtgggtctggagccggtgatcggctgggctttgagaggttccttcaggaggtgcctggaccctgatggacagcccccagcctcacgctcccccttgaggtttgcagagggtgccagaagtgaccccagaaagggttctctgaggtgctgcggtccctacccagctagccaggggctctgtctggaagtggcccgtgtcgtggccgtgctgaaccgctatgagtccagagcttcccgggcctcctctgctctgcggggaaggctccggggctctccccaccttctcgaatctttgctcagatatcaccttcccagcaaaggctgtctgattatttgaatttgcaccaccctcatccaaatagtcctgttctctttgcctgctttatttttctcatagtaatcatcatcatctgacacgctgtgcattttcctgctctgtgtatggaagtctgtctgtcctgctggaatgcaggcttctggagggtgtggtcttggtttcgttctctgctgtacttccagtgcccaggacggtgcccagcatggagtagctgctcagccaatgctgtggtcttgatgggactgcattcgctttacatgattgaagctgctggcgtggaagctgtgccatgtcatgtaaagcatgcagtgggaaagcagtggggtgggggcgtctttgtattacatcatctgttgt

SEQ ID NO: 545 - DNA, 155 bp, Homo sapiens
  misc_feature (1)...(155): n = a,t,c or g
acaaccgaaaaccaaataattcaaggcactgctcattacaattttactgggctctattttaacctctacaaggcttagagtacttcgntcttccttnaacantttcggagggaattaaggntcaanatttttgtaagccnaggtttccacggatt

SEQ ID NO: 546 - DNA, 364 bp, Homo sapiens
gcttcaccctgacatgaccaatggtcagtcatcccccttcccccagggctccccagatgagggagagaaggcagaggaggaagcggagtcaggctatggcgagctggcgcttggaatcggaggtgagggacggagtgttcaagagagcaggcggctacacagaggacatcctttgtgtgaggatgttgctgggcattgaatgtccatcagaatagaactgagcaactggccataccctgctgtgaatgaagtcagctgggagaagcatccaggtcagcccggccagcaagagaatctgggccacgcatgtccttggaattttctagtagccattttttatttcatttcatttcattttgaggat

SEQ ID NO: 547 - DNA, 371 bp, Homo sapiens
ttttttttttaaattatatattacatgtttattaagagcacaacttttatgtaaaatttacatttaatgaaaaaaatcaaaaatatttacaaaatcttggaagacagatgtgcattgttctaattacaatccaaagtagtaaataacaatcctttaaaactcacatttattagagttgtgtttacaaattcttggttaaagaggcagctacaaagtttatcactatatataagcaagaaccagcttgctagggtacatttcccattgaaaatctactgggtctcttttacaccattagtggatttttaaatggaaaaaaaaaatcaatataaactcatatgggcttcaaaattggtaacctgtacccaata

SEQ ID NO: 548 - DNA, 133 bp, Homo sapiens
gttcaataccctgaattctttcttgtgtgacatccaagaaccctctcttggggtctggatcgagacccctttcctgtaacagcagggcctcatcccatcatttgaaagaccttaagagttagaactgagattt

SEQ ID NO: 549 - DNA, 536 bp, Homo sapiens
  misc_feature (1)...(536): n = a,t,c or g
gtgcaggtgaggggagaagaatcataaggtaagctctcagagatacgagggtcaaggagaatataagatcttacattccctaacgcacctcttgctcttttgtgtttttgcatgtgacttcatgctggttgtcctctggactgttgtgaccttggcgccctcagtttcctcatcttattggtccctgtacttctaatagtcagtgggctgacagtccacacccctctgcagggctccagacctgggctgtctgactttccagcaggctgtcccctcggtcatgccgcagacttttcacactgtgtccgaagctggagccttggatctgttcctggaacttggctgcccctctttttgtcctcttcccattccactccactgttttgtggctaggaaagtgggganataatgttggaacttccctctcaatcctacatattagccaaaggtttaaagatttcacaccttancantgangttcancctgcttcaatctcccgtgtcaaggataantgcttggtcatcacttcaagtta

SEQ ID NO: 550 - DNA, 1485 bp, Homo sapiens
ggaacagtgaagaaataaaagctaaagttaaaaataagaaacaaggatgtaaaaatgaggaggtactcgctgtactaggccatgaactggggcactggaagttgggacatacagtcaaaaatatcattattagccagatgaattctttcctgtgtttttttttatttgctgtattaattggtcgaaaggagctttttgctgcatttggtttttatgatagccaacccactcttattggactattgatcatcttccagtttattttttcaccttacaatgaggttctttctttttgcctaacagtcctaagccgcagatttgagtttcaagctgatgcatttgccaagaaacttggggaaggctaaagacttatattctgctttaatcaaacttaacaaagataacttgggattccctgtttctgactggttgttctcaatgtggcattattctcatcctccactgctagagagacttcaagctttgaaaactatgaagcaacactgagatgtccaggatctgtgactgaagacatttctgattatttctgtcctggcagcatgttccagctcttgatgtttttaaacttttttttagaagaaaaattaagtacagaaaagcccagatttaaatacatttaatatgtcattttaaaaatgattttaataattcatttcttaaaacactgaatgaattttgaagcttaatgtttttaaaggcatagttttatctttgacatctaatttaccatcaagttgtaaaattatttggaaaaatacagaactcgttttatttgtatacttatatggaatctgcatgtgaggtgtttgagggcatatgtttgaaagagggagcatcaccacaggaatcctttctgtgaggtggaaacagtggtcctgaatcattgtgctcacacctaacttgaaatctggtcttactttcatgctgttatgatttcacctggtgaatcagtgttttaaataagaaaggtaatagttggtaaggccaatgttatttaaatgaaagtagttagaaaaatgctctcctattctaccaaatttttaatttctttcttccctttcttgctacacagtgatcaagagtttctcatagtgctttgaagttagaaattatgtataggatattttaaatcattgagttttgtggggtttttttgtttgtttgtttcttttgttttttggaaaatccgtgtctttatctttttttcccacgtggtagatatgatcccattggaggtaaattgtagcttcttctcattcatgcagtaaataatacatcctttcactcagcagagatggccatattaaacacgttttgctatgttaaaagtggcagaacaggaaagacgaattaaaaataacattttttaagcgacataaggatgaaatactgatgaatctctgtgacattacagggaaaaaaatatagttttctatctctttcaagggcagaagagttttcatt

SEQ ID NO: 551 - DNA, 1972 bp, Homo sapiens
tttcacttcaatgctttatttttagatgatattaaaaacctcattaggctccctgagggaaaagagtgttaaccactaacagaggcaggggaaaaataaaggaaacagaaagataagctaaattgttaacaaggaaagctcctcagttggtctgaggatgctgtacaagctaaaagaaacttattaccaagaccaggtaaatgacttgaggttggagcttaatcttttaccctcaggctagtaaggactagtcaggtttgtcaaagtggcatatgtctttattatgatttccagatgggatctggtgggaggcgggtgggtagaagggaaggcagagaaacctttaaagattgtaagctaagtgctctatacctttatacaataccaatgtgcttgagtctcccgttaagaggctgaaaactgggcaggcatacgcaagactgggtgcgagattcaatggaatgtcaaatgaaacttagaatttattaatgtatttacataatttataatctttaagcaatggccccataaatatagactacaactttacatatgctaagcaatagatacttgcttttccccaccaaaatacttgggttaaaaaaaaattgacagcatttataccaccttcttcacttccactcttcttcctttttaaaccattgctagtcattttagaacatatgaaattcagtttattccgggcagcttctctaccatcaccatcttgatcatgagagcttatttaaaaaggtgccaataacgtgtttggtggcacacacatgacaaggtcagaagcaaacccaggatgagctaggcatctgctgctatcattgttaatttactgtacgtatcctaggctaacatgttcaatgaaaagtgctttagagatggcagagatgaaatcatttccatcagtcctataaataacccattttagcttcagacaataattgtcctccctacacttaaactatcctactatatgttaaatgatacaactccctctaacagtggtaacagaaaccaaggaaattataatctccacaaggtctgtttcttttcccttaagaaccacaaaagtgctaattttccctttacaaatgttacataaaatcttgattacaaaactactcaacaacttaatcctaccatccatacaattatatgttccttttcagcaaggtcaaaagccaacgatgtagtccctttgtacactagagattctttacataatagaagttcacagactgaaatatcattgctgcagtctttggagaacagaactggtccatttctgtgaatcctttttgcacggagaagactcaagactggctaggtgaaaactggtggcagggaccccagccctcctgttaactttcaggaccacctacttcatcatcaagtctgagaggctgaggttcggtcagcagcagctccgctttggctctgaaggctgtcttcggagtttgaagcccttaccgccagatggccaggttggcgtcagtggatggaattcttcgactaatttctataaagagttccatttatgtttatcgcgttttttgcgctggtctctacaaaaattgcatgaatagagtcggcgtagtcctttgcatctctctccatgacttctcttacatcgataagatcacatttatttcctgcaatggcaactacaatattaggtgggccatgctgtcgaagctctttcacccaattctttaatgttgaaaatgtctcttcttttgtgatatcataaacgattatagctgcagccgaccctcgatagtacattggtgctaaggcacgaaatcgttcttgtccagctgtatcccagattaggaatttatgtagctcattttggtactggacagtcttggtcataaaagatgcccctattgttgggttgatgtttggatcaaaactgtcttccacaaaccgccacacaatactcgatttacctacaccc

SEQ ID NO: 552 - DNA, 341 bp, Homo sapiens
  misc_feature (1)...(341): n = a,t,c or g
gattgtgcttcggcttagtgaggaagcactggaccacttggcctccatgtcagacagcacaggtcgggaatagggtgggcacaggaccagtggccactgagtagtgtgttctggaaagacctagtggctatagataccctagtggcacagatggacttgagggctggagataggagtagtaagggccagcagagctcaggagtctttagaaggccctctgaggatcataaattaggggccatgtccacagagtctagagtgaggccagagtgatcattgttaagtatcattggggccctctgctcatagggggttttgctttattggataatanatnctct

SEQ ID NO: 553 - DNA, 629 bp, Homo sapiens
tgaaaaggccgaggacgagtggtcaccaaacagggtggctccccaggtcccgaagcctgagacccggaaggccctggcacccttacaccctcggactcctgccctcctcggcctccctggccccagcgcggctccaccctgggctgcgtctcctggtcacaggctgcgtttctcctttctgtccgtgggcagcccagtccccacagtcacggccaagccacgcagaacgaacatgactccagaggacctcgccctggagctgagcctggcgccgggtcaggacggagggaaaggcgggttggggtccgcgggtcctcacaccgcacggcaggcacagaggctcgccaggccctgatccggtctgtggggacgagggacaccgaggagaggtgctgggcaccaggacgctgcctcctggtccctggttggcctcagacaagcacggcctcgagaaaagagccaagcgcatcgggagcacaccagaaaccggccctgagcacgagaagagcctccgcccggcccgggcaccacccgacctcgcagggagcaggccctgtcaccgacgggtcacctcgcccacacggccagcaccgactaccacagcccttccagacctggctggagtggcg

SEQ ID NO: 554 - DNA, 1023 bp, Homo sapiens
acgagctcgccgcagatccgctgtacttgcgtccgctacagtatgtcaatcgcttgccccagcacagctgtcattcttctctacagaagagcttctcctcatcaactggggatgattacagttcttcctaaaaaaggatggctgctctttttctaaagaggttaacactacaaactgtaaagtctgaaaatagttgcattagatgttttggtaaacacatcctgcaaaagacagcaccagcacagttgtcccctattgcttctgccccaagactctccttcctaattcatgcaaaagcctttagtaccgctgaagacacccagaatgaaggaaaaaagacaaaaaaggaataaaacagcttttagtaacgttggaagaaaaattagtcagcgagttattcacttatttgatgagaagggcaatgatttgggaaacatgcaccgagcaatgtgattagacttatggatgagcgagacctgcgactggttcaaaggaacaccagcacagaacctgcagagtatcagctcatgacaggattgcagatcctccaggagcggcagaggctgagggagatggagaaggcgaaccccaaaactggaccaaccctgagaaaggaactgattttgtcttcaaatattggacaacatgatttggacacaaagactaaacagattcagcagtggattaagaaaaaacacctagtccagattaccataaagaaaggaaaaaatgtagacgtgtcagaaaatgaaatggaggagatatttcatcaaatactccagactatgcctggaatagctacattctcatctaggccacaagctgttcaaggaggaaaagctttaatgtgtgttcttcgtgctttgagcaaaaatgaggagaaggcatataaagaaactcaagagacccaggaaagagacactttgaacaaagatcatggaaatgataaggaatcaaatgttctgcatcagtaattttaataaagaaaagcatgctctgagagaaaaaaaaaaaaaaaaaaaa

SEQ ID NO: 555 - DNA, 375 bp, Homo sapiens
gggaaactgaggttcactggtagaaagaggcttgaccaagctcactgtggctgagctacttattcaataaatatttattaagtgctgctctgtgcctggcagtgagctggccctggggaaacactgacagacagagctgccttaaagacttagtttctgacctcccagagtctgcagcagcagcacaccgagatctagccaggatccaccccaggctcctaacctgcatcctgggccctctccacttcaggtccctgtagtttgggcctgtggcttaggtctagactgttgcagcccgtgagcccttatcctggagcatcttggtataaagcaagccaaggcataagtctctgcaaaccgaacttcaaaagtaac

SEQ ID NO: 556 - DNA, 626 bp, Homo sapiens
  misc_feature (1)...(626): n = a,t,c or g
gagggcttcccagttagtccatcctgtcctttcccacacactctggtgaaaggctttggataagagagaggatggaactactgatttataaaagactggagggtacctatgggtgtgttaccttgtttcccatgagcagagatgattgagacctgggtccatctgattacatattgctgttgattttgtgagcataatcgttggctggtttatgcactgaacctccttgctctgggatcataatcatatttgagtataagttatggtattcacatttgtatttgctacccaatacatttatttgttatatctgacaagcactgggaaatgaaaataattatttgcattacaaactcattattcatgtactttgaaagctttatctaacagcagtttttatatgggctatctgaatcttatcttctaaataaaaactagatttgtgaaagttgcctattctttttgtacaagcggcttaactattttaattgtagcaagtgaagacaaccagcatcactatctcaacccaagtgcctacttanaaaacttgtcctggctgccagtgctgatgctccttactaataaagctgtttgnacagggctgaatacatccttncagacctggc

SEQ ID NO: 557 - DNA, 1311 bp, Homo sapiens
gttttatagagtgtgagggtcactccattaaagatctctcctgggtggatcctacttggatgttcaggtgattttgaaaactgctaacatttttaaaaggctagaacatcctttgacttcttgaaaatctgcatgtctggcttgggttttattaccacatgcctgagttcttcaagaatggaaggctcaagtattctcatcttccatttgccaaacttccttcctgatttgagtcacgtgttccacttggaaagaaagggaacagagagcctcctccatggacagtgtatgaatttcattgggaatcttgctctctcccgcctctatgcctttctctctttttaaccttactttacataatattatagatgggccaagaaaagaaaagatgacataacattttgatgaatttcacctattccattcttcacgtttcagaattggtcgactttgttagaagataattgaagtagccttgggtcaaaagcaaccttttcaattgtgatcatacctaaaacatataaaaaccctgccgtagattaaaagcaattataaaatcataaaattgaatgtttgcagaatcctggagcagtagatttctttgtctttggcctgcggactagaaagagggcagcagtagtatgctggagcttccctgggataccagccacatggtttcttttcattagatctgatttttgtttcccactgtagatctgattttgtagttgaaaacatttcaccaccatcaaacactatttctgaatattgtgcctttttatacctagcctagatgaaaaccgatgccattcttattcagaaaatccccccatcctacatgactgttatctaaacataaagcaaagtgcatttaattcaaaatttggttcacaatataagtattttgtaaaagccagctgaaccagcattttatcaggtggaaatctctgcaagccaaattgctgatactccttcatgcagatcaacttggtgtcccagtcagaatagaacagcataattacctggagttagggggagtatttctgcactattacttgtcagggagagaagaaacttagaattgtccctcaaaggagtgtcaagaagtatgaataaatgtcctttcaccagctcacaggccagaaatggaggacccaagtcaactaggtgaaactactagcagacccagctttcccataataacctaatctgcaaattgttctattaaagtctcattgttttcaggatgcaatgaaagtggatttcaaaaggctttggaaaaataagtggaacatgactgatcttgaaaaa

SEQ ID NO: 558 - DNA, 483 bp, Homo sapiens
aaaagtccttctaatagcaaagtggaaaggtaggctgtgaacaatcttgaatgccatactaagatttgtacttattctcataggcagtgaagagccatcaatagtttttacagaggctgacctgataactctggcggttcaatgtgcatgctatatactatatgcacaacacattaggaaggaagggaacagcgctcagagaaatcaaatcacttgcccatattacatagctcgtcagtggtggagtcagggtataatcagaaactcatgctccttcctctacctctccccagcacagagttggatcagcactgttcacccagctggtatccccatttcatggtaaagcctggaagcttaggtctgactgatgcttgttgaaatacagactgtgggagcagactgcaggacagcattgtgacagagggtggggccaggagagagatgcggtaggaagactgttaaggtgcatctcttattttc

SEQ ID NO: 559 - DNA, 475 bp, Homo sapiens
tgccttcttgggtgctgaagaagcaaagacctttgatcagctgacaccagaagagagcaaggaaaggcttggaaagattgtaagtaaaatagatggcgacaaggacgggtttgtcactgtggatgagctcaaagactggattaaatttgcacaaaagcgctggatttacgaggatgtagagcgacagtgggaaggggcatgacctcaatgaggacggcctcgtttcctgggaggagtataaaaatgccacctacggctacgttttagatgatccagatcctgatgatggatttaactataaacagatgatggttagagatgagcggaggtttaaaatggcagacaaggatggagacctcattgccaccaaggaggagttcacagctttcctgcaccctgaggagtatgactacatgaaagatatagtagtacaggaaacaatggaagatataggataagaaatgctgatggtttc

SEQ ID NO: 560 - DNA, 613 bp, Homo sapiens
ggccggtgtgtatcactggtccaggagcactatgctggcagaatctctttggtgcctgatggccctgccttcgtgggaacagaggctaaggctttgagttacagctgtctctccaacagtgcatctccttctccttcctcagcctcaggtaggagacatggcaggcaacttcctttcctcttctccccttctccagcccgtctgtccacccagctggaggcagccaggcttgctagtggactggttgacggccttcatgcacaggttctccaccagagccttccctgggggtgcctggccgggggctctgagctgggagtgaaggggatgacccatgcggactgtttgctgcttgtagctttccctgggaaagactctgccaggccttggagccagaccaggaggctttataggccaccgcaagcagcagggctccagatgacatcacagggaagatcaagagggtgtggaggggcatcgaagcctctccaggagacaggagacgctggtccagtagagccctaggggcgacgccactcccactcactgtctactctcctctcacctccgcaacactggggacactcacaagagtgtgatccaagtcggccgc

SEQ ID NO: 561 - DNA, 2746 bp, Homo sapiens
gcacccggcagcggtctcaggccaagccccctgccagcatggccagcgagttcaagaagaagctcttctggagggcagtggtggccgagttcctggccacgaccctctttgtcttcatcagcatcggttctgccctgggcttcaaatacccggtggggaacaaccagacggcggtccaggacaacgtgaaggtgtcgctggccttcgggctgagcatcgccacgctggcgcagagtgtgggccacatcagcggcgcccacctcaacccggctgtcacactggggctgctgctcagctgccagatcagcatcttccgtgccctcatgtacatcatcgcccagtgcgtgggggccatcgtcgccaccgccatcctctcaggcatcacctcctccctgactgggaactcgcttggccgcaatgacctggctgatggtgtgaactcgggccagggcctgggcatcgagatcatcgggaccctccagctggtgctatgcgtgctggctactaccgaccggaggcgccgtgaccttggtggctcagccccccttgccatcggcctctctgtagcccttggacacctcctggctattgactacactggctgtgggattaaccctgctcggtcctttggctccgcggtgatcacacacaacttcagcaaccactggattttctgggtggggccattcatcgggggagccctggctgtactcatctacgacttcatcctggccccacgcagcagtgacctcacagaccgcgtgaaggtgtggaccagcggccaggtggaggagtatgacctggatgccgacgacatcaactccagggtggagatgaagcccaaatagaaggggtctggcccgggcatccacgtagggggcaggggcaggggcgggcggagggaggggaggggtgaaatccatactgtagacactctgacaagctggccaaagtcacttccccaagatctgccagacctgcatggtcaagcctcttatgggggtgtttctatctctttctttctctttctgtttcctggcctcagagcttcctggggaccaagatttaccaattcacccactcccttgaagttgtggaggaggtgaaagaaagggacccacctgctagtcgcccctcagagcatgatgggaggtgtgccagaaagtcccccctcgccccaaagttgctcaccgactcacctgcgcaagtgcctgggattctaccgtaattgctttgtgcctttgggcacggccctccttcttttcctaacatgcaccttgctcccaatggtgcttggagggggaagagatcccaggaggtgcagtggagggggcaagctttgctccttcagttctgcttgctcccaagcccctgcacccgctcggacttactgcctgaccttggaatcgtccctatatcagggcctgagtgacctccttctgcaaagtggcagggaccggcagagctctacaggcctgcagcccctaagtgcaaacacagcatgggtccagaagacgtggtctagaccagggctgctctttccacttgccctgtgttctttccccaggggcatgactgtcgccacacgcctctgtgtacatgtgtgcagagcagacaggctacaaagcagagatcgacagacagccaggtagttggaactttctgttccctatggagaggcttccctacacagggcctgctattgcagaatgaagccatttagagggtgaaggagaaatacccatgttacttctctgagttttagttggtctttccatctatcactgcattatcttgctcattcttcagttctctactccctcttgtcagtgtagacacaggtcaccattatgctggtgtatgtttatcaaagagcacttgagctgtctgaagcccaaagcctgaggacagaaagaccctgatgcaggtcagcccatggaggcagatgcccttgctgggcctgggggttttccaagccctcagctggtcctgaccagggatggagcaagctccttcccttgctcatgagctcctgatcagaggcatttgagcagctgaataacctgcacaggcttgctgtatgacccctgggccacagccttccctctgcattgacctggaggggagaggtcagccttgacctaatgaggtagctatagttgcagcccaaggacagttcagagatcaggatcagcttttgaaggctggattctatctacataagtcctttcaattccaccagggccagagcagctccaccactgtgcacttagccatgatggcaacagaaaccaagagacacaattacgcaggtatttagaagcagagggacaaccagaaggcccttaactatcaccagtgcatcacatctgcacactctcttctccattccctagcaggaacttctagctcatttaacagataaagaaactgaggcccacgggtttcagctagacaatgatttggccaggcctagtaaccaaggccctgtctctggctactccctggaccacgaggctgattcctctcatttccagcttctcagtttctgcctgggcaatggccaggggccaggagtggggagagttgtgatggaggggagaggggtcacacccaccccctgcctggttctaggctgctgcacaccaaggccctgcatctgtctgctctgcatatatgtctctttggagttggaatttcattatatgttaagaaaataaaggaaaatgacttgtaaggtcaaaaa

SEQ ID NO: 562 - DNA, 409 bp, Homo sapiens
  misc_feature (1)...(409): n = a,t,c or g
ttgganaccgctatgacnnnnnnnnnnnnnnnnnnnnnnnnnnnnnnnnnnnnnnnnnnnnnnnnnnnnnnnnnnggcacnnnnnnnnnnnnnnnnnnnnnnnnnnnnnnnnnnnnnnnnnnnnnnnnnnnnnnnnnnnnnnnnnnnnnnnnnnnnnnngccatagatattcatatcctctggagggtcctggagtactatgtaaattggttgcaaaaagtctcttttctagaaaaactgggaagacattttgttcatattgatacatttagaattcttttcctatttatttatatattattcctttgagttcatgccagtgagactgagctgacccaagagttggtgaatttacctaacttggacaaaagtttatttaaaatgggtacactttttcttctaaaaaaag

SEQ ID NO: 563 - DNA, 312 bp, Homo sapiens
  misc_feature (1)...(312): n = a,t,c or g
aaagactcagagcattacaaagccttcgaggatgcagctgaggagtttcatccctacatccccttcttcgccaccttcgacagcaaggtggcaaagaagctgaccctgaagctgaatgagattgatttctacgaggccttcatggaagagcctgtgaccatcccagacaagcccaatagcgaagaggagattgtcaacttcgttgaggagcacaggngatcaaccctgaggnaactgaagccggagagtatgtatgagacctgggaggatgntatggatggaatccacantgntgcctttgnagaggaaagc

SEQ ID NO: 564 - DNA, 754 bp, Homo sapiens
ctcctttcttctctttgcttcttcctcatttctttctttggctttcaatgcttcatcagcttttgcagcagcttcaagaaccagctgtagtctggctttggcctgttcagctggtggcagatgttctaatccagctttgatgtttccagattccccacgtttgatgttatgtaattccttgtccttccctttatccttctccttttctcttttctctttatctctgcccttacgtcgttctctatcccgagaccgactacgcgttcttctgtgactggacctttcactgctacgactatgagaacggagacgaggtcttgacctggaccttcttgttctgctttttgacctagacctctgaactctataggatttccctcgaccccttgaacgacttcgacttcgtttccttctggagccataagaagagctactgcttgatcgatgcctgcgtcttctatcataagaatgtgaacgaggctgaagatctctggaccaagatcttgactttgatcttgatttccttcctcctttctttcggctgtatgttctactatctgaagaactgctcgaggaggaccgtctacggtgtttcttttttctcttgcttctgctttcttcttcagtatctgatgaccgacgtcccatttctttgggctcacacctcccgttgacgtgcaagcgccgcagtccctgagtcgtttctttagatcagggcgccgccggcgtccaccgaacttgcttcagtttaagc

SEQ ID NO: 565 - DNA, 1049 bp, Homo sapiens
ttttaaatacactgaaactttattaaaaggtcagggtatatagaaaacaaaaggcatgtttgcaaaattatttatttacatcttaagctcacattaaaatctttctaggatagaatggctaagatgaaatatacaaagctgatataaacacagaactcattaatctttatctgaacagaaacatagagatggctttagataatctgtttttccttcacaaaccaatgttcccttaagtcatgccatgataatgtctccccattaagaacttaacttgtattccccaaaaaagctgagaagcaaaaagctaactttgatttgttaaacagctattcatatgccacaaaaccaaaactattttacagtgctgagaggtccagataggtccaaacatgatgatttttaaatgagtgctttggttaattaggctttgacttggtttttggcattacttgtataattatatcattccaatgagtcactacaggtaatccattcaaaacatgacttgcttaatactatcacaaagcacttagccttgccttgactggaaatacctttaagatgctgacaatagcaacaatttctcctttccttcactcagcaaaagaaatcacataaatcacaaaataaaaaattcatttctcacatgttaaaaaagcaaagtctgccataaacccttagagaagaaacagtttctcataatatctgccctgggtaatagtgcattattaaaatactagacctgcaagatctcttcctatgccttggaagcctatgacttcatgatctattcatgaaaaatatgccgaaggctaaatatgcaatgcattgaaatttctgggaagaattcacatttaaaacagtttaaaaaatctggatttagtaagagttttagaaaaataaataaaacactgtggttctacttctccccttctactctcccttcacaaatctaagcttaagtgcaggcttctaaaaagcagaagagagtacaataggatgagagaggtgggttttactatccacattttccttttcttagtgta

SEQ ID NO: 566 - DNA, 1870 bp, Homo sapiens
  misc_feature (1)...(1870): n = a,t,c or g
gaactcagcagcggagnctggacagcttgcatggcgcttgagagattccatcgtgcctggctcacataagcgcttcctggaagtgaagtcgtgctgtcctgaacgcgggccaggcagctgcggcctgggggttttggagtgatcacgaatgagcaaggcgtttgggctcctgaggcaaatctgtcagtccatcctggctgagtcctcgcagtccccggcagatcttgaagaaaagaaggaagaagacagcaacatgaagagagagcagcccagagagcgtcccagggcctgggactaccctcatggcctggttgggtttacacaacatttggacagacctgctgccttaactccttgattcaggtgttcgtaatgaatgtggacttcaccaggatattgaagaggatcacggtgcccaggggagctgacgagcagaggagaagcgtccctttccagatgcttctgctgctggagaagatgcaggacagccggcagaaagcagtgcggcccctggagctggcctactgcctgcagaagtgcaacgtgcccttgtttgtccaacatgatgctgcccaactgtacctcaaactctggaacctgattaaggaccagatcactgatgtgcacttggtggagagactgcaggccctgtatatgatccgggtgaaggactccttgatttgcgttgactgtgccatggagagtagcagaaacagcagcatgctcaccctcccactttctctttttgatgtggactcaaagcccctgaagacactggaggacgccctgcactgcttcttccagcccagggagttatcaagcaaaagcaagtgcttctgtgagaactgtgggaagaagacccgtgggaaacaggtcttgaagctgacccatttgccccagaccctgacaatccacctcatgcgattctccatcaggaattcacagaccgagaaagatcttgccactcccttgtacttcccccagagcttggatttcaagccaagatccttccaattgaagcgagagtcttgttgatgcttgaggagcagtctggagggcagtatgagctttttgctgtgattgcgcacgtgggaatggcagactccggtcattactgtgtctacatccggaatgctgtggatggaaaatggttctgcttcaatgactccaatatttgcttggtgtcctgggaagacatccagtgtacctacggaaatcctaactaccactggcaggaaactgcatatcttctggtttacatgaagatggagtgctaatggaaatgcccaaaaccttcagagattgacacgctgtcattttccatttccgttcctggatctacggagtcttctaagagattttgcaatgaggagaagcattgttttcaaactatataactgagccttatttataattagggatattatcaaaatatgtaaccatgaggcccctcaggtcctgatcagtcagaatggatgctttcaccagcagacccggccatgtggctgctcggtcctgggtgctcgctgctgtgcaagacattagccctttagttatgagcctgtgggaacttcaggggttcccagtggggagagcagtggcagtgggaggcatctgggggccaaaggtcagtggcagggggtatttcagtattatacaactgctgtgaccagacttgtatactggctgaatatcagtgctgtttgtaatttttcactttgagaaccaacattaattccatatgaatcaagtgttttgtaactgctattcatttattcagcaaatatttattgatcatctcttctccataagatagtgtgataaacacagtcatgaataaagttattttccacaaaaaaaaaaaaaaaaa

SEQ ID NO: 567 - DNA, 827 bp, Homo sapiens
ttagggtccttaaggaattgtggactgaatcactagccttaggtctttcagcaaacagcctatcagggccttttatcatgtgtgagatttgcattttactttgctgactttgttgtaatagatcccattcattgtcccctttgagtagtttccaatacttgaatggcagattggagtttttcagagtatgtgtttcatctgctagtctttctctccttcatagcttttcttttcctggacttgctccttttgagttgcttttgcgtttctcatgcctaggcaagtgtaatagaaattatgtagctccttatgttggcaaaggagctctatatagtttcactttgtataaaagttaggaccagctgttgttacatgtaatattttagttcagaacttgacctgaaggaagggaagaaaagtatgtgatttttaccttttttaacaaatgtgaaaaagtcagttttagaaatttcgtggtagtaagttcggcatttgttacatgtatagagagaagactaataatctctatttataactaaatcattgagatagaaaaagattcccattgactgtagacttcttcccattttgtcttcccttctgcctgtttccccttcaggcttggctctaggaaccaaagtgatttgttgttgttccaacctgggctttatgactttggttagtgccactaccttcttccctcctttcccccttcaatttggaaataaatttctgtatatgttgcaattttaggtttaggtttgttctttttctttttcattaatcctctctcacctcacagataccccctcccatgggcaaataat

SEQ ID NO: 568 - DNA, 1560 bp, Homo sapiens
  misc_feature (1)...(1560): n = a,t,c or g
aaaaggacattgacaacatcattagctggcagcctccagaggtgatccaacagtatctgtcagggggtatgtgtggctatgacctggatggctgcccagtctggtacgacataattggacctctggatgccaagggtctgctgttctcagccctccaaacaggacctgctgaggaccaagatgcgggagtgtgagctgcttctgcaagagtgtgcccgccagaccacaaagttggggaggaaggtggagaccatcaccataatttatgactgcgaggggcttggcctcaagcatctctggaagcctgctgtggaggcctatggagagtttctctgcatgtttgaggaaaattatcccgaaacactgaagcgtctttttgttgttaaagcccccaaactgtttcctgtggcctataacctcatcaaacccttcctgagtgaggacactcgtaagaagatcatggtcctgggagcaaattggaaggaggttttactgaaacatatcagccctgaccaggtgcctgtggagtatgggggcaccatgactgaccctgatggaaaccccaagtgcaaatccaagatcaactacgggggtgacatccccaggaagtattatgtgcgagaccaggtgaaacagcagtatgaacacagcgtgcagatttcccgtggctcctccccaccaagtggagtatgagatcctcttccctggctgtgtcctcaggtggcagtttatgtcagatggagcggatgttggttttgggattttcctgaagaccaagatgggagagaggcagcgggcaggggagatgacagaggtgctgcccaaccagaggtacaactcccacctggtccctgaagatgggaccctcacctgcagtgatcctggcatctatgtcctgcggtttgacaacacctacagcttcattcatgccaagaaggtcaatttcactgtggaggtcctgcttccagacaaagcctcagaagagaagatgaaacagctgggggcaggcaccccgaaataacaccttctcctatagcaggcctggccccctcagtgtctccctgtcaatttctaccccttgtagcagtcattttcgcacaaccctgaagcccaaagaaactgggctggaggacagacctcaggagctttcatttcagttaggcagaggaagagcgactgcagtgggtctccgtgtctatcaaatacctaaggagtccccaggagctggctggccatcgtgataggatctgtctgtcctgtaaactgtgccaacttcacctgtccagggacagcgaagctgggggtggcggggggcatgtaccacagggtggcagcagggaaaaaaattagaaaagggtgaaagattgggacttaacacttcagggaagtcagctgccggggagaaacttgctcctaaatgaacacataagtttagatcgcaatgaggagtagcagggtactcgtgccnnnnnnnnnnnnnnnnnnnnnnnnnnnnnnnnnnnnnnnnnnnnnnnnnnnnnnnnnnnnnnnnnnnnngtnttccaaannanggnnnntcaa

SEQ ID NO: 569 - DNA, 356 bp, Homo sapiens
  misc_feature (1)...(356): n = a,t,c or g
gctttaattcttgtattangtgaaaagtgcctgaaaacaggttcacagactcgatgaaaagatagtgtttgtggggaacaagccctgtggagtatctcaacgtacctacctgttgaaatcatttgggagtttggggatacagtcatgtgttgcttaatggcagagatacattctgntaaatgtgtcatttggctgtttcattgttgtgtgannnnnnnnnnnnnnnnnnnnnnnnnnnnnnnnnnnnnnnnnnnnnnnnnnnnnnnnnnnnnnnnnnnnnnnnnnnnnnnnnnnnnnnnnnnnnnnngtangcaattgtnanacannggnnagtatttgtctngntnnacatatct

SEQ ID NO: 570 - DNA, 1173 bp, Homo sapiens
ggaaagcgaggaaagtgcttggattaggagagtcttgtgggcccctggccagccttcctgcctcagctcccctgctgtctccaggggcaggtggtaggcatgggtaccctgcatttcactggagtgggttcttggatctctgaggggaaggaacagcaaaagaggcccttcttcctcacccaagatgcagggtggttggggccaggagtttggaccctctaggtcttgggggaagagctgggtaatacctggtgtctgagtgattctctgcagaccctttcccctcctcaaggatcacccatcctcctttcagccccctttatggggaccaggcagctctggagccagccacaggggctgttagagaagcaaggcctggagtggcctgcaccgagtagcagggtcagggttcgtgtgctcctcctcctgctgcaggggctgcacatcccattgccccacttctgctttgtgtctccctctgtctagcttccagggcagggagcaggccccacctagggctgcaggcagtctggcctgtgccagcacggtctcctgtgcccaccagccccacaggtgctgtgctttgtgctcttggctgctgtgctgggacagaatgggatgccaggaagagaagaaagggggtgcagtctgaggccaccaccccccttcctatctaagggagggctgaagacaaggggccggcattcagtgggcagcagaaaggagaggccccttgaagctgctcagtcagaggcccccgtccctccttttgccttccgcaggactgaagacctgaaggggctggcttttggagtgttgaggtgaatatctgggagcagagatcatgaatagctcagggcagtgaatggcgcaccaagagcagggctgtgtgtgggaggctgcagccaggattgcctcagctcctccccctcaggctgggaggatagcacaggctaggggctcggggtggagggtcctcagctctgctgcccccaccccagtactagcctagcttcccaagctgtggcttagaggatagttggcttcctgcctctctcctctaaaatagcaagtctgggaaatcctggggtgagtggagtcaccccactcccagttgctggcagagactgagactaaagcatcacttaataaaccccccaagcccaaaaaaaa

SEQ ID NO: 571 - DNA, 608 bp, Homo sapiens
ggtgtacacaaatgccaaaatggtgcgtattctagcagtagttttatggacatcaaatgcctgaaagaaagatcaggaagttgtatgtacagttgatctgaaatgcaacaacttgattaggaaaagtgatacaggaaacttttcccactgcaccttccagaggcactgaggttcggttcctgccacccctgccagtgctttctgtggtgccaggaccacatccgtcagtgtttctgccaggcgtcatggtgcagtggggtttgagttgatgctctttctgtccactttgctcttccaatgttttatagaactggttagtactgcagaaaaaccacgacttaaagaaggccttatacatgaacaagacacagttgctcagttcggaccacaaaaagaaccagtaagacagcagattcatcgcatgttcctcttaagagtgaagctcatgcatttcgtgaacagcttgcacaactacatcatgaccagggattctacacagtacagggctggagtttcaacatcaagtcgaggaagccaaggatttagatcaattggattaaaattcactataggtatctgtcaaccatccatgaccggtgtctgctgag

SEQ ID NO: 572 - DNA, 405 bp, Homo sapiens
gtgctttggaggtcccttcatgattgccaaaatgttaccagggagtccttgttcttagagctccaaagatgatggtgggccgcttccatgatggcggcaagcctcttgttctctgacctggggttcttggcctcacggatactaaggaatggaatcttgggccatgcattgagtgttatagctctattcagcccaattaggatgaaccccaggcacttagcccgcgcaggaacaatggcaagcctctagcccgattgggagcagcaatggacactgcctcgctggatcacaagtgcagcagatccacccctgccagatccagagggttggaagtcagctgcgggtctgcaatgacggcaaacagtggtggacggcgagtgaaagctcagctcgagccataaaaac

SEQ ID NO: 573 - DNA, 1036 bp, Homo sapiens
tttttgaaggagaaaggctttaatatatattaaaaataggcaaggtaatgcttttcatagtatagtaagatttgcctaataccatcttatttctttgattaaaagttacttagcttcagcatgcgtgtacattcaaaatacaaaattaaagcatgagttgtcattaatttgcagaattctatgattgaagcctctaaatgaattgtgcaggagagggagtttgtaaacaactgactacagacattcacattgggtcatctttaaaaagctggactctgcttttggatgcttctcggaggcgagttggattttggactgaagtactgtcgttccattcctttttttgaggtgttatgagtggggctataacatcgccatcctgcggcttggtgaaatttctgtctgcacaccactgaacaaaatattgtcttgcggcatacaaactctttctgtccaccttcttacaatatactcgaatcagctgctctgcaaatttctctggcagaagttgtgaaacctggtttttagtaatcctgattgctctgttgggggcagtcttacaatagaagctaacatgatcaattggattcttttcttgcattccataatccatgttgataacatccactataaaatcttcagccttcagtttcacgtctagcaatactttgggtttagcactggcaacctcttttggaagagattcatagtcctccgggttaatctttatttgtcctgttggctgcgtctcacccacatacttgaatagattacggtattcaatttgttttaaaatctctcgtgcgtctttcaatttgggatcagtagagtataaaatctccagaaaaatgttatctgtcagcttagtataggcttccatgtcgtcaattgctgtagaaatgcgatacttttttcctccagcacctgtaatctctatgtagtcatctgctttgaggaaagcatctgtaatcattgtatcaataatgttgccaactttgtgttgataagctctacggtgtaaagagttgcgagtgtg

SEQ ID NO: 574 - DNA, 214 bp, Homo sapiens
aaattaaaaatattaaatatggatctcataaatatttatctattaggatgtacctatgcttctttcattcgacacttatttactgaatgctgaattacctgtatgttaggaggcattacttaaaatcatgagaaactgggactggaaaagtgtgaacacagcaaactggttaaataaattctgcatacaataaaatacaatgtagccattaaaa

SEQ ID NO: 575 - DNA, 1497 bp, Homo sapiens
tgcagtgccagggtttccatgaaatgagccatggtttgcttcttatgctggagaacattgacagaaggaaaaatgaaattttccctattgattctaaccttgatgcagagatacttcaggaccatcacaaacagcttatgcaaataaagcatgagctgttggaatcccaactcagagtagcctctttgcaagacatgtcttgccaactactggtgaatgctgaaggaacagactgtttagaagccaaagaaaaagtccatgttattggaaatcggctcaaacttctcttgaaggaggtcagtcgtcatatcaaggaactggagaagttattagacgtgtcaagtagtcagcaggatttgtcttcctggtcttctgctgatgaactggacacctcagggtctgtgagtcccacatcaggaaggagcaccccaaacagacagaaaacgccacgaggcaagtgtagtctctcacagcctggaccctctgtcagcagtccacatagcaggtccacaaaaggtggctccgattcctccctttctgagccagggcaggtcggtccggccgcggttcctgttcagagtcctccgagcagctcttccccttcagcttctcctgctcctcctcatcgggcttgccatgccttgtaccaatgtcagaggaagactacagctgtgccctctccaacaactttgcccggtcattccaccccatgctcagatacacgaatggccctcctccactctgaactaagcagatgccatctgcagaagtgctggtagcataaggaggatcgggtcataagcaatcccaaactaccaacaagaggaccttgatcttggcgaaagccctcgggtgtggcagctttagccctcctccagatcacatgtgtgcaaattatggcttcagaggtggaagataaacagtgacgggggaacaaacagacaacaagaaggtttggaagaaatctggtttgagactctgaaccttagcactaaggagattgagtaaggacctccaaagttccccggactcatgaattctgggcccttggcccattctgtgcacagccaaggacttcagtagaccatctgggcagctttcccatggtgctgctccaaccatcagataaatgaccctcccaagcaccatgtcagtgtcgtacaatctaccaaccaaccagtgctgaagagattttagaaccttgtaacatacaatttttaagagcttatatggcagcttcctttttaccttgttttcctttggggcatgatgttttaacctttgctttagaagcacaagctgtaaatctaaaaggcacttttttttagaggtataaagaaaaactagatgtaataaataagatcatggaaggctttatgtgaaaaaagttgaatgttatagtaaaaaaaaaaagatatttatgtatgtacagtttgctaaagccaagttttgtttgtattgatttctttgcatttattatagatattataaaataaa

SEQ ID NO: 576 - DNA, 1528 bp, Homo sapiens
tttttttttttttttttttaccagggtaaacccgtatttatttactagcactgttaaaacattacacaaaacacattcaagtggcaagtaattataatgcaagcccttgcatggcaatccaaatttattgaactactgatgctaagttatacaaaattgcaccactttaattaaggcttttagtttacatttggccacctcaaagtagttgtaacattaggttggtcaatttaaatactgtggctccctgttggatagacacacaatctttacatccaaacattaatgcatacaaagcaacaaggcattgttaaataaaacagcaatagttactgcaaattaggccttgtgaccaattacatatgattaaaattacttcccacattcacatccacagtactcgtccaccatttaacatctcaaccaaaacgttacacatgtgaaacaatcactaacaggcaaaaatactaaacctgtatatttggtattgcaaatacacttatgcatgagcaagcaagggattcacagtgagaatctacagctgcagaagcctgaaaatgatttacaaaaattgttaaatcattaaaaaattgtttgaaaatatacacttcttgttgtagacccccactgtacacacgactataaacattgttccctatgtaaacaaaaaaaggaaacatataataagagatttgaaaagtctggacatttccttcccaacagatattaaaggcaacgtctttaatctaagacattatactgaaaggactatcatgttttaaagacaagatcaccgtctccacaggttttttaaaaattaaaaaaactatatagctgtgttaatcaaagcgcttattttgtacaataataatgaccttgaatttcttaaaaaaaaattacaataagctacaagtatcaaagaagcgaagttatctggagtagtctatataggagctctttggactttcttttattatgctaaaatagtggtgcttttaggatttacattattgtactctccaatacaaagtatggggcatgttaaagtatacagtacaccattttcatacatgtacaacattggtggatgaagaatgtctcttagcagtaatactggatgtagcctctggttttaccagctgcaaactctaggactattatataagtaaaaatctctcttgtgatactggaaagtgattagaatgtgcaaactgatatagtagctttcatccgcctcttaaagggtaccaccacaggaaagtccatttaagatgttggtaggtttaacaaagttggaatgctggcactgttgaattgggcaacagttcttcagacctggctcagagctacaatgcatttagtatattaaagcagctgacatgatgactttttgcgagccttcccaggcactggagtttttctgttaatttgccgcactaggtcataaaagatctcattaacatttatttttgattttgcagaagattctaagaatgcacagttgttccattgtcttgctagattttga

SEQ ID NO: 577 - DNA, 1326 bp, Homo sapiens
gctcgacgccaaaccagaagctccactcgcccgtaggctgtccctgtagccctgctccctccctggaggctgctcttctgattctgagagctggcctagtggtgctgagggcccctttctgcttctctgcccacctgctgagttgccactcgcagtgttgtcagttcccgtgttctgagaagaggtcatgcctgggaggaagggatcgtcatgctgcatcgaaccctccctcactgctctctgcacatcacggccacacagcacctgcagggaggctgtggggaggtgtggagcaggtgcaacaggcagctactctcctgggggccacacggcggagagaggattcgatgcagcatgacgatcccttcctcccaggcatgacctcttctcagaacacgggaactgacaacactgcgagtggcaactcagcaggtgggcagagaagcagaaaggggccctcagcaccactaggccagctctcagaatcagaagagcagcctccagggagggagcagggctacagggacagcctacgggcagtggagcttctggtttggcacatgggaaaggctggggcgcatgcgctgaaacatgacaccatcagggaagccagaaaggacaacatggacaaggccatcgatctgaacccccagccaaaatgggtgctctcggcttgctcaaaaagtgctgccagcagcgataggttggcaaattaaaagcaaacaaatagaggtcacggccacacaaaggcagtaactgcactcacaaggtggctcagccccaaagaggtctgaatctgaatatgccgcactgtccctgccccgggggagaaggggaaggctgggccctgggaactagagatgatggcattcctttcattccttcctgaggcgggcctggagggctgtgccctggtgactcctgtctcctaaaggagggcagggccggctgaaggatccaggcattgatgtctagttctgaggacacccaggacccgcaactacaagggccatctaaaacgtggcctggaggggatgggggcaggcgggcacaaaacttctgctcagctcactccagctccccacgtgctcatctgttccccagatctggggctgcctagtgagccgttaaacgcctgggttccgcccagggctgccttccaccgggacgccgggcctgctgtggctggaccctgccgctgtggtggtcttctcaccaaggagcctggtctggctgcctggaataacctgcaggtcggtgttctcaggggactgtggcaggttctgggctcgggtagccaggagtgcattgaggtactgcagtcgc

SEQ ID NO: 578 - DNA, 375 bp, Homo sapiens
gcggcacgaggtgtctgcagctctggcagaggactgttccactagacacgctgaagggactgggtacgtgttttccttcaggaccagagctgagaggagctgggatcgcggcggcaatggaacgggcctcagaaaggcgcacggccagcgcgctttttgcggggttccgggccttgggacttttcagcaacgacattccacacgtggtgcggttcagcgcgctcaagcgccggttctatgtaacaacctgcgtgggcaagagtttccacacctatgacgtgagtgacttcttttgttagcttcccaggaaaaccaccctccttggcctctaactctgtcctggagcagtccggttctcccttcccatttaccacg

SEQ ID NO: 579 - DNA, 659 bp, Homo sapiens
gggcttccgctggagcctctcgggaggcgggtaacgttatagtatttgtcagaagttggggtctccgtgggcattgtgatccgtcccaggcagtggattaggaggccagaaggagatcccttccacggtgctaggctgagatggatcctctcagggcccaacagctggctgcggagctggaggtggagatgatggccgatatgtacaacagaatgaccagtgcctgccaccggaagtgtgtgcctcctcactacaaggaagcagagctctccaagggcgagtctgtgtgcctggaccgatgtgtctctaagtacctggacatccatgagcggatgggcaaaaagttgacagagttgtctatgcaggatgaagagctgatgaagagggtgcagcagagctctgggcctgcatgaggtccctgtcagtatacaccctggggtgtaccccaccccttcccactttaataaacgtgctccctgttgggtgtcatctgtgaagactgccaggcctaggctctctgtagagagtcttcaagatcccggagtggtagcgctgtctcctggtgaaggagtatttgtcacactggaatgtgactgtgtgtgtatgtatgtgtatatatatatatatatatatatataaacaagtttgttgacacctaa

SEQ ID NO: 580 - DNA, 384 bp, Homo sapiens
taaaataactatttatatcatagttatcacattgaattctaaaagagcaatgtagaactttatacttttcttgaatattacagatcatgttaaagtcccttttgttctccccagttttatcctcctcaccttcatctcccctcccagaggaaattgttgtaatgaatttgatttgtatccttctagtttatcttttaataaactatatatatgagccatgacatggcattgctttgggtgcttttgtagaacatgcacattgtagtacatttcaaatcatactcccttggtgtgaatcttgactctgctacttaattttgtgaccttaggtaagttatttaattctttacatgcctcagtgcctcatctatcacatagggatga

SEQ ID NO: 581 - DNA, 981 bp, Homo sapiens
  misc_feature (1)...(981): n = a,t,c or g
gctcgacttttttttttttttcacattttctttagtactttattgttttacaagtgaaacctttaagtttctccccacctactcccgcagaaaaaggcatattcaattgtcccatactaatttttgaataacctaactctccctttgtttctactaagagaggtttctttttggctacaagtaacaatatacatatacccaaagcaaatggaacaatataaagaatatctcacataacaaaaagtccaaaggtaaagcagttcctggattggttaattcagaagcacaattcaggtgctttctatctacatcccactattctcagtgtgatagctttcatctccatacttgtcctttcatggccatcagaagggctgttgcagattagcttcaaacatccatatcacatatcttcactgagaagcagaagagggatgctggcaaatccctaacttgtatcaattgttaagagcaacagaaaatttcttattcaaagccttcagacttcctttgtctcgttagcctagattccatcaaatgatcaagtaagccaattaccatgattggcacagaatctaatcaacactcaccctctctaggctagggaagcaccctattctatagcacaaggcagccatacagagttttaggccaaaaaaaaagaaaaaaaaaatggggctttgtcagcaaggaagggagaacgaaatggctgatgggtaggcaaaagaagaataacaaaccaacttatttgaacccagctttttcacacatacaattctcacacctgttttattttgaagttctctattgtgttctattttgatctacttctgtgtcattagctattcctgggtcattaagacttatactannctttatacatgtatatttggtaggaactttcctaaattttttcaaaattaaaattttttccccaaaacatgtgagaattaggattgcagtcatgcattgcttagcaaa

SEQ ID NO: 582 - DNA, 486 bp, Homo sapiens
ctattactgtatgtaatgtatatgtgatattttcttaactccagagagccattacaaaattccatttatggaaaccctcctaaaagtgctctattcctaacttggcttggaaaaaaataagcatttataaataaatattcaccaaactcctagaaatataggaactgatcaaatgtttcttaagttaacatgatttggataaaacttagttaaataagattaatatagtatttttggtgtaataaaacaactatatcttcaaaattatcattattgaatataaaacaagcataaattcctattctgcttgagttctagtcaaataagctaatattatacttactagaaacgtaaaatcttaaagcttatagatttgattctaattaagttgtcattcttatgaaaaacattatttttttatgctgaaaagatacacatatatttagagttagccagctggactcagtttaggtgatcccaattttg

SEQ ID NO: 583 - DNA, 2902 bp, Homo sapiens
aaattattcacaaaaagcagctgcgaaatcagaaaggcagctgccgctccagggtctcaaatccattaaaaccaccacagaacaattaaaacaatcagagagagaaaaggaaaaggaaacaacgtccaacatttggcatttggttttatccacaggttttcccagagctcctcttggaattgaaagcaaaatatattggcaaacactgcttctcaatacacaggaaggggagcctcagtgcctcctgccaacagaggcggctctgtgcagtcagactgtggggtgcacagcagtctctcaggctggggtttctggcctctttccatccaatcaccccttccaggaaattcagcagcctaccagacactgggcctctgcctgggctgccctttcccccaggcagagcggccttgggcataatacccaggcaacctgccagccccagagcagaaaccctgctgggatcccttccttcatcaaccttggtgtggaggatgctcaatagcgcttccacctccccctccccagcccctagctacatctctccacccttccctggacagtcctacttcccagctcacccacccaccagcagcttaagtctgggtgggatctatcatcagctcctccccctgtaacctcttccctccacagatccaccctgtgactcctcttcactcgcgagcctcggacatggtggcccccggctccgtgaccagccggctgggctcggtattccccttcctgctagtcctggtggatctgcagtacgaaggtgctgaatgtggagtaaatgcagatgttgagaaacatcttgaattgggcaagaaattacttgcagctggacagctagctgatgctttatctcagtttcatgctgccgtagatggtgaccctgataactatattgcttattatcggagggctactgtctttttagctatgggcaaatcaaaagctgcacttcctgatttaactaaagtgattcaattgaagatggacttcactgcagcaagattacagagaggtcacttattactcaaacaaggaaaacttgatgaagcagaagatgattttaaaaaagtgctcaaatctaatccaagtgaaaatgaagaaaaggaagcacagtctcaacttataaaatctgatgaaatgcagcgtttgcgttcacaagcacttaacgcttttggaagtggagattatactgctgctatagccttccttgataagattttagaggtttgtgtttgggatgcagaactacgggaacttcgagctgaatgttttataaaagaaggagaacctaggaaagctataagtgacttaaaagctgcgtcaaagttgaagaatgataatactgaagcgttttataaaataagcacactgtactaccaactaggagaccacgaactgtccctcagtgaagttcgggaatgtcttaaacttgaccaggatcataaaaggtgttttgcacactataaacaagtaaagaaacttaataagctgattgagtcagctgaagagctcatcagagatggcagatacacagatgctaccagcaaatatgaatctgtcatgaaaacagagccaagcattgctgaatatacagttcgttcaaaggagaggatttgccactgcttttctaaggacgagaagcctgttgaagctattagggtttgttctgaagttttacagatggaacctgacaatgtgaatgccctgaaagatcgagctgaggcctatttgatagaggaaatgtatgatgacgctattcaggattatgaaactgctcaggaacacaatgaaaatgatcagcagattcgagaaggtctagagaaagcacaaggattattgaaacagtcgcagaaacgagattattataaaatcttgggagtaaaaagaaatgccaaaaagcaagaaattattaaagcataccgaaaattagcactgcagtggcacccagataacttccagaatgaagaagaaaagaaaaaagctgagaaaaagttcattgatatagcagctgctaaagaagtcctctctgatccagaaatgagaaagaagtttgacgacggagaagatcctttggatgcagagagccagcaaggaggcggcggcaaccctttccacagaagctggaactcatggcaagggttcaatcccttcagctcaggcggaccatttagatttaaattccacttcaattaaaccaactgtttttctgctcttcttaatttttttaaagattaaaaacaaagaaatcttgttccgggaccctaatgaaaaaaaatttcaaatcttttcagtttgtccatgaccaaagagttgctttaataggaaaaaatctgttcttatccctgtcagatttatggttaatgggtttgcaacggcaaggaggcaaggaatggttctatttctgacagagcagcctgcatctgctttatgctgtctggagggaagtggtctgaggcaggctcacccgtggaagtgctcacgtattctgtattatttttctacactggagctggagattcttctcttcacagccttgcagagtaagtccagtgcctacaagtgtaagaaggagctgtaatcttcatgaggatggttatacttcagtattcttaaagagaacatgaacatttttgagctgtatgttcttagggacaactgtgcttcgatgtggtcagtctcgtcacttgtgagtagctgtgaaatctttagtgtgcatgtgtttgcacctctgtggtctgtcaacgtggctgtcactgaaggagcaagagaccatcttttaggaaccctgccaccaaataataatatatccaggcttagactttggattaatgttaaatgtacatttttttggttcagtacctgaagaagaatactgaaacttgaatct

SEQ ID NO: 584 - DNA, 908 bp, Homo sapiens
gagataaaatgactcaatctaaaccacgtgaaggaatgtattaacataatccaacaaaaatgaaataaaacaatccagagttttgagtgttttttcacacttgtaataaactgaaaaaatatttcaattaaaacaaccatatgccacaaaaagccactcccatcatccacaatactaaagtccttatacaacactagataaatttttatataaaacagtagaaactagcataccattaattagaaacctcaaaatattcagaaaacagtatcaagtactcaagagaaagctcaagaagccaaaacctcaagaatccatacatcctggttgttaccctaaattgtaattaactacccacacatttaatcataatcaactttttcaaagatatacaaatcaatgcatctatttaaaaggactactctttatagttcagaactttacattaacttttatattctactcagcagggtgtctgtctgtactccaaattagctctcatgttccaggaaataaatacaaactcatatgccttgtgatcactgatggcctgcttatgtaattctagtccactaaatgttaattccatagaatatgctcttgattatgtaaaaactctaatttcttgatgaaatactgtaattctccaaaggttacaattttgtaaagatatgcaataactgagtatcactcccatgaaagacaaaaaaagtataattttgttccaagattaacttagtctcatgtatctctattaagtctttcaaggattccagagaatcttttcatatctccatttctggaaagtgaaatcagtatagaagtaatttgggaacttgaaaatggcattcatttttttcagcagatgccaaatttttgaccgacatggttctcacaattactttgtt

SEQ ID NO: 585 - DNA, 353 bp, Homo sapiens
gcagtgttctttcccgctgagtccgcatgtgtctcagcatctttctcagtgcagagttccagggaagtcaatagcagtcaatgaaaattgatttttgtctttgctttagacagtgccacaaggggttgttactcgagaccaagggtgggtggagctgacagtagggcagtgtataacaggtgaagtttagtagtccccctgggaattagagtcggtggctagagtgggaatcttgaaacctagaggttgttaactaaccttgggagaagtgtgccgccttaggaggagggagtagggctggtaggtggttgaatggttctcaggaagtctaaccacattctctcatgctctag

SEQ ID NO: 586 - DNA, 438 bp, Homo sapiens
gcggagtgaggcgcagtcgttcgcccaggctttggcccggcttccagaggaaggtgggagtcaatcattttgacaagtctcctgaaagaacagctagcaggaactgaaacctttttccatttggtctcgtggcaaaggcagagattgctccagcagctccacacaaaatgatgtgctcacgggtgccctctgaacagtcttctggtacctctctcttgcctaaagacggtgccccattttcttgggattccttggatgaggatggattggatgactccttgctggagctgtcagagggagaagaagatgatggtgatgtaaattacacagaggaagagattgatgcactgttgaaggaagatgacccatcatattgagccatcttctggggaagatgatggtgggctttttgaggaagggagaaagagggattcaatt

SEQ ID NO: 587 - DNA, 783 bp, Homo sapiens
ctgatgttctgctcagcatgttctgggtgcttctcatctgcatcattcctttcagatgctgtagcttcttcctcctctttctgcctccttttctttttcttttttttggggggcttgctctctgactgcagttgaggggccccagggtcctggcctttgagacgagccaggaaggcctgctcctgggcctctaggcgagcaagcttggccttcattgtgatcccaagacgggcagccttgtgtgctgttcgcccctcacaggcttggagcagcatctcatcagtcagaatctttggggacttggacccctggttgtcgtcatcactgcagctctccaagtctttgtttggcttctctccacctgaagtcaatgtagccatcttcacaaacttctgatacagcaagttgggcttgggatgattataacgggtggtctccttagaaaggctccttatctgtactccatcctgcccagtttccactaccaagttggccgcagtcttgttgaagagctcattccaccagtggtttgtgaactccttggcagggtcatgtcctaccccatgagtgtcttgcttcagtgtcaccctgagagcctgagtgataccattctccttccggccgaggcctttgccttgagtccatccatgctttaggcagctgctcctcagcaaacttcatcccacgactcttgacctctggggtgacattcatggtgagaaaaaagtctctatcctcagactctcaccagagaagaagaggtgatatcatccgtcattgctg

SEQ ID NO: 588 - DNA, 789 bp, Homo sapiens
cttgaatagggctaaagaagtattttaacaaaaatctattatgtacctaatattgtgcctaataatatttagcaccacaactcaaaaaacatttagcacttgaaaaaaggagactcacctctggctctttgccactgtcagaatctgaatctcactggccctgtggagtagggatcctatctggagaagtgggagcatgggctgcagtcaggactgctgcagactgagccatgtgatggtacgtaatgagttcccctgagggaatgaaacaccctcaccccttcaaagtcacccctttggaattcaacacagacacacatatcccttcaaaaacttttatttgtatcaacagttcctagctcttgacttagcttagagcttttaaaagagcagacaccttatatatttgagattgaaaaagtttctgctattaatcagaaataatcatttctattttctggcttaccccttggaataagccaaaaataaaaccaaagttacatttcctgacagatggctaagaaaacaatagaaggaacatcctgaattctagagttgactcttgctgggtgaaggtacaccttcaggcttaggtccattctcctaagtaaagcctgaaggaaaactcttaacacctaattctttgtggaaaaatgatcaactagccatttcacaggctatagaacaaaagtacaattgggcatctttccttatgtcctgggatcaggggtgcttacatttaacattgatcaggtaaagaggagaggctgtgctaaggtctgagaaaag

SEQ ID NO: 589 - DNA, 1359 bp, Homo sapiens
tttttttttacaaataattatgttatttattttgaataaaaaagtggccaaaataacaatactaatggctctgtatacaaaccacaacatattcaaggttatctcacatttacaaaactgccattatgtacagcactacatattcacagcaactctattagactctaagtaccagaatcatgtaagcaattgaggggaatcccaaatgagaaagagctaaaaccaatggtagttcatcaattggagaaatggccaaccagcgacttggtaaagaaacagaggttctgttacccttttaacaagtaataactaaaatatgattaccccacaggggccttatactgacaaaccaccgtccccaaatttccatttcattttctccataatcttccccacttcaaaattttcctaggaacctcagctctaatatcagataaaaacgcaggacactggatatgtaatcttcaggaaaagaaggttaagtagtgctaaggatgtgggatgatctggttcaacccaaaaaagccagttcaaacccaagaaagaactctgccctcttctggcaggagtagctttgtagtgttgaacacaggggaagtgaaccacattacatcctgatgaggcaggaagttactcactcattcttacacgtcatgagcacctacccttgcaaggcactttacattaggtgctgcaggaacaacaaagataaaacaattcctgcccttgaggagcttacaatctagtaatgaaaactatgtacatatatacaatggagagaagtcaccaacttttctggattggggggtattccaagcaaaatgcattgttatcaaacttttttttttcaacaccaaaagtctataaaacattccacctaatcagatggtaagaattgaaaaagcatctcctttccaaaaccttatgtttttagatgactgttctgtttatttcaaaaaaaagtcataggtaaacacatatataattcaaagccaagcacaagatttagtacaggcattgggtaaacataaaacatgtatcactatacacaacacagacttatttttctatatagtcttttctataaacaagtttgatattcactttcatacatcaaagtacaaatctgagtcaaagccttgaaaacaacataattcttagggacgtttagcatttaattttccattagtggagagaaccctaaaccttaccagtctgctaggccaaatgtaaactggtaaagtatgaaaatgcctcaaagccatcaatatctcttacattatccaatttgaccattttacaggatttttttttttaatgaaagtaacaggatttcatgacagtgaggcaactttttac

SEQ ID NO: 590 - DNA, 1079 bp, Homo sapiens
tttttttttttatatttaaaacatttattttattatacatatttaaattttagaaagttattaggtagatgtacattcctctgttgctttactttgatcttcagttaccattttccgagatctttccaatagcttatcccatattgtaaaatgtgctcttaagtgaacaggtaaagacacaccctggaatcttcgtatgagacttggctgggtgggttgaagattgtgaactgctgacacttcatactggaaacaaatacttgttcttggaataagagggccctcactcacatcaatgaagtcacctattctgtgtagcttgactattctctcaggggttctgagatgccttctcttctatgaaatctactttgtacttgctgtgttgaaatatttccaatgccacttttgcttcaacttccagagtttcaaatggaagatctttataaattaaagcatgagcatcctttgtgaaggaacgtaagttctcttttgttggcatccactcatcaagtttgctatccaaaactacgtcataacagaaggcaccagaaattacaggaacttctggagctctgaccaaattgaccatatattcatctttgaatgccctctctatcacacagcccatcatcatagcacaggaacgccaatatgccttattcacttctccctggatcacaatctttgaaagtaagaaatttaatttcacaggactttgttaaaggcttatacatgtcccaaggctgtccatccaccagagccagaatggacttcctgcaataccactcgcttaaatgcatggcacaactgtagggagttgaaatgtttttattcatcacgaagacagtaccggggtcagttttcccaacatgcttaacttctatcttctcagttcggggagttaatgataactgcctggctttctctttattaaagagatcattccgcatttctgtcaattctgtcggtgacagctgagaagctggcgatgttgctataaatctccatttgatcccgccaccgggtgcgaccagccagagccgcagcgcccgtgaacccatggccagcgcctccat

SEQ ID NO: 591 - DNA, 2047 bp, Homo sapiens
cttgcggagacgcgcgcgtcggggtttaacgcgtttctgggccgccgtaagcccggcctaggggcagctttgactcgagagccggctataggcgcatggaaggttccctggaacgggaggcgccagcgggcggcgctggccgccgtgcctaaagcacagctcgacgttgccgcccgaaagcacccaggtccggggctacgacttcaaccgcggtgtgaattaccgcgcactgctggaggccttcggcaccaccggcttccaagcaaccaacttcgggcgcgctgtacagcaagtcaatgccatgatcgagaagaagctggaaccactgtcacaggatgaagaccagcacgcggacctgacccagagccgccgcccacttaccagctgcaccattttcctgggatatacatccaacctcatcagttcaggcatccgtgagaacctttcgctaccttgtgcagcacaacatggtggacgtattggtgaccacagctggcggcgtggaggaagacctcatcaagtgcctggcgcccacatacttgggcgagtttagcctcagggggaaggagctccgggagaacgggatcaataggatcggaaacctgctggtgcccaatgagaattactgcaagtttgaggactggctgatgcccattctggaccagatggtgatggagcagaacacagagggtgtaaagtggacgccttctaagatgatcgcccggctgcgaagggagatcaacaacccagagtccgtgtattactgggcccagaagaaccacatccctgtgtttagtcccgcacttacagacggctcgctgggcgacatgatcttcttccattcctacaagaacccgggcctggtcctggacatcgttgaggacctgaggctcatcaacacacaggccatctttgccaagtgcactgggatgatcattctgggcgggggcgtggtcaagcaccacattgccaatgccaacctcatgcggaacggggccgactacgctgtttacatcaacacagcccaggagtttgatggctctgactcaggtgcccgaccagacgaggctgtctcctggggcaagatccgggtggatgcacagcccgtcaaggtctatgctgacgcctccctggtcttccccctgcttgtggctgaaacctttgcccagaagatggatgccttcatgcatgagaagaacgaggactgagcggctgcggtcccaggaaggtcttaccccctcttctatttattaatttgcagacccagcccctcccctactttttggtcagctacgtctctagaataagatggtatctgaagtccttccatgtctgtgtctcggtccttggtcctgttggtgggtcccctggcttcagcctgctccatcctctgcctcataggcctcctctcgccagcactggacgctgcctcccatggcggtcagcaggcagggctctgttgggtggtaggccagcgactgcaccacaccggaacccacagggcagggccagagccagcgcaccctccaccaggtcccagaagaacaccttcccgtcctcagaacagctgaccacatgtgtgtcacgctcgctcaggcagcagtccagcttgtattcctggttcttatggcccttgtactcgcccagcagctcccctgtgtctttgtccaggagccgcaatgtggagtccaggctggacaccagggtgcactgcccatcccggctgaagcaggtgcaggtgatggggctgcccacgtagtctgagaagagctgccccatccttaggtcatagcgtctcacgcggccatccacggagcctgccaggatctcgtggtctgacaccttcacactggacacgccatctctggcctcatccagcgtctgcactggctcaggcctccgtgagcggcaatcccaacagcggatactggaatcaatagagccggacaggataactgtggcctcttcattaaactgcaccgtgttcaccttccctgcgtggccccggaatttgcgcacgacctgccctgatgccacatcccacagc

SEQ ID NO: 592 - DNA, 850 bp, Homo sapiens
aatttatctgggatattaaagaatctaccaattcttaaaaacacagatttatactttaagcttattttaaaattaaagaatatataccaattcttagaaacactttaaggactactcttaaataacttaaatatcagagttttgttgtaatattaaaatttaccatggaaatcactgttgttcagctatcaccttaattgtgtatgatatgataaatgtttagcagtaaagctatcttaagatttaatggaaaagtttaatttgaagatgtaacaaaaattctgaccacagttgattctgaatttttaaggctttcctaataggctgatcacagagaataatccattttgaaggtataaaactgcactgtatgtctgtcacttgtagctgaactgattcacattttgacaaaagagagaaaatacaaaaatgagttttgcaaatgtaataactttttctgcatatagaactaaataattgaaaaatatgggctatagttctcaaaggtagatagtaaaatcactggctttttccagctgtatgtttttccactgtgcgtgtacacacacactggaaaataattaggctgattttgcaggtcttcattgttagagattctgaagtatttactgtcaattcataggtttcagtttatttaggaaattagtgtttgacagctttttttaaattatttcactgaagctgagattattagtgatacaaagttaaaatttcaatatttaatttctctatatattattaatattaaattgttttttacttataaattcatgttctcatctgatttaatattaaatttgtataggtgggcgtttcctaccattttgcg

SEQ ID NO: 593 - DNA, 440 bp, Homo sapiens
ggagcatgactgaggttgaaacttcacaggtcagctgtggcctgagcgctagccttcatgtcttgtaggggaggggaaagaaaaggtactggtaagagtctccaaagcactgatagtggactgaatctgcttgatgacccaccttgatccagggcccctttactccagtgggagaccttatacatttttagtgtctagagatttaagttgccactcttcttagtgtttgaaaactacctttttaattgcaagagggaatataaacatacaccaacaaaagacagcacaatgggaagggcagcccagaggcagtcctgctcattgctgacttcagttcaaaatattttgcatgcctggaattttcaccatctcagaggtttcctctatgagcaattaaagaacagcctatggatcccagagtttccataaaataagttctt

SEQ ID NO: 594 - DNA, 455 bp, Homo sapiens
gcatcaggggcaccctgaccggaggaaacagctgccagaggcctccactgctaaagtccacataaggctgaggtcagtcaccctaaacaacctgctccctctaagccaggggatgagcttggagcatcccacaagttccctaaaagttgcagcccccagggggattttgagctatcatctctgcacatgcttagtgagaagactacacaacatttctaagaatctgagattttatattgtcagttaaccactttcattattcattcacctcaggacatgcagaaatatttcagtcagaactgggaaacagaaggacctacattctgctgtcacttatgtgtcaagaagcagatgatcgatgaggcaggtcagttgtaagtgagtcacattgtagcattaaattctagtatttttgtagtttgaaacagtaacttaataaaagagcaaaagctaaa

SEQ ID NO: 595 - DNA, 1810 bp, Homo sapiens
  misc_feature (1)...(1810): n = a,t,c or g
cacaggcagagatcaagtacaaaggtggtacaacatcttggccctgcaactgatttttataagaaacttgcattagattgctcgggacagcaaactgcagtggatttgttccttttaagttcacagtattctgatcttgcttctctagcttgcatgtccaagtattctgcagggtgcatctattattatccatcattccactatactcacaatccttcacaagcagaaaagttacaaaaagacctaaaacggtatctcacaagaaaaattgggtttgaagctgttatgagaataaggtgtactaaaggtctttcaatgcacacttttcacggtaacttctttgtccgttctactgatttgttatcccttgccaacatcaatcctgatgctggatttgcggtgcagttgtcaattgaagaaagtttaacagatacttccttagtatgttttcaaacagccctattatatacatcaagcaaaggtgagcggagaattagagtacatacactttgtttgccagtggtaagttcactagcagatgtatatgcgggagtggatgtacaagctgccatctgccttctggcaaacatggctgtggatcggtccgtttcatcaagtctgtcagatgcaagagatgccttagtgaatgctgtagtggactcattgtctgcatatggctcaactgtctcaaatttacagcactctgcattgatggcgcccagctccctcaagttgtttcctctctatgttttggcccttctcaaacagaaagcatttagaacgggtacaagcacacggctggatgatcgtgtatatgccatgtgtcagataaagtctcagccacttgttcatctaatgaaaatgattcatcccaacttatacaggatagacagattgacagatgagggtgcagtacatgttaatgacaggattgttaccacagccacctcttcaaaaattgtctgcagagaagctgacaagagaaggtgctttccttatggactgtggctctgttttttacatttgggttgggaaaggctgtgacaataacttcatagaggatgtgcttggatatactaattttgcatcaataccacagaaaatgacacatcttccagagctagatacactttcatcagaaagagccagatccttcataacttggcttagagacagcagaccattaagtccaatccttcacatagtaaaagatgagagtcctgccaaagcagaattttttcagcatttgattgaagaccggacagaggctgcattttcttactatgaatttttgcttcatgttcagcagcagatttgtaagtgaagtagaataaaattgaataagaaaaagatctataacctaggtaaagcataatctgtcagagaagcgcgtgagaaatttgaaatgaaggcatttgttaatacaagatgcaacgcacagcactctgtctgaggctttggtaaaaagtaaaaggggaagaaagaacttgacagatcctttttcaactcaaattaatggtaacgatgatgctgtttcaccaagtatattttgaattggtttctacacatttccagtagtatggcagtacagtgctctgttcattgccaagctggcaaatttatgtagctatgtggaatgatatgtcataatgtaaaattggataaatccttttttccttataattanttataacatttccgggaccttgaactctggcaagagatgccaaaaggcattggtacccgtgttaattggtttaaatgaattaccttttaaccaaggaatgtttcctaatncattaaatgaatt

SEQ ID NO: 596 - DNA, 1001 bp, Homo sapiens
gcggcggactcggcttgttgtgttgctgcctgagtgccggagacggtcctgctgctgccgcagtcctgccagctgtccgacgatgtcgtcccacctagtcgagccgccgccgcccctgcacaacaacaacaacaactgcgaggaaaatgagcagtctctgcccccgccgggccggcctcaacagttcctgggtggagctacccatgaacagcagcaatggcaatgataatggcaatgggaaaaatggggggctggaacacgtaccatcctcatcctccatccacaatggagacatggagaagattcttttggatgcacaacatgaatcaggacagagtagttccagaggcagttctcactgtgacagcccttcgccacaagaagatgggcagatcatgtttgatgtggaaatgcacaccagcagggaccatagctctcagtcagaagaagaagttgtagaaggagagaaggaagtcgaggctttgaagaaaagtgcggactgggtatcagactggtccagtagacccgaaaacattccacccaaggagttccacttcagacaccctaaacgttctgtgtctttaagcatgaggaaaagtggagccatgaagaaagggggtattttctccgcagaatttctgaaggtgttcattccatctctcttcctttctcatgttttggctttggggctaggccatctatattggaaagcgactgagcacaccctctgccagcacctactgagggaaaggaaaagcccctggaaatgcgtgtgacctgtgaagtggtgtattgtcacagtagcttatttgaacttgagaccattgtaagcatgacccaacctaccaccctgtttttacatatccaattccagtaactctcaaattcaatattttattcaaactctgttgaggcattttactaaccttataccctttttggcctgaagacattttagaatttcctaacagagtttactgttgtttagaaatttgcaaggg

SEQ ID NO: 597 - DNA, 207 bp, Homo sapiens
tgtgtccatcccagagcatgtcttctgttactgttaatcagagtgtgtgtcacacttcctggggccactgaagtcactaaccccggcagaaaggatcggaattttcctactctaaaaggagaaatggcaaaatatagaagctaggctggtgggaaatagagaagagggctatttctctataaacatgttatcgaaaaaaacaatgcc

SEQ ID NO: 598 - DNA, 476 bp, Homo sapiens
  misc_feature (1)...(476): n = a,t,c or g
gcaatgtttatgtttcttcattgatctctagagacccataaacacggttatgaaacgaggcttgttagtgctgtgcttgccagcaggggccactgttttattctgtacctcctgatcccccctccaaccacaccgccctggagcagctctgtggaaaaagtggaatcagcttagaggttttggagaggaagatactgaaacgtaaacgatataagaaagtcacggtgcacaaatatacatacctcatttctgtgtcccttggagcagatgggggaatgtgcgcagatgcgaagctcttgctgtaatttatgtgacaaataataaaatatatgttttgtcggatccagaaatctcatgccttcagccaacatccataaactgacagtctaacttggtggcttgtaagtaanggtaaaaatcttaaactggcaagcnccgnggttacnctggaatncnnccntttgggggccnaacca

SEQ ID NO: 599 - DNA, 1248 bp, Homo sapiens
tttttttttagagtcatgaccttatttatttacaagcacaggataagtccctaacctcccccaaagactgagcaaccctacccagcccagttaaatactgcaactgggggggtaaaaaaggtcgggaggaggaattaagggaaatacaggaataggggaacatatcccacattaaatagttatatacacatcagttcctgtggttctgtacagagcagcggctgaccccacccccacaggacacaatgtggggagaggagactcaagggtactgagggccagagccaacctctgggtgaagtgcaataggcagcagcaaagtcctaatggttgcacaagagggaggggaacccccaggggcttacccacccccaccctgccctggaatgtgtaagggacaggaatggttctcagggagcacacaggaaggacaaggcttggaaccgtcttcagggcccagttttaagggcaacgttttgcctacttcaccctagacacagcaacccttggaggaaagcagatggtcagcagtgctcttatctgcccctccaaacctaagtgagggcctggttccttcctacctctccccagggaaaaggaaggcagctgcttggcttccttctagaagccccgggagcctttaactaccccagctcccttcgtagtgtcactgtccccaccagggaggggccaggcacagtctgtgggtcatcaggctcaggagaagttctggacagggtggctgaccttcatacaggcccaataaagagcccggcccaaacacagcacagccaacaggatgacaaatgcccaggctgcatagatgcctccatatcgccgtgcatgcttccatgtgccaaaggcaaggccagtggcagtgactgccaaaagcaagccaagcaagaagcagcagatacatctcttacgtgggtatctgcgcccaatagatgacactttcctgcagtgaggacaacgtgccaaagtgcggtctgtgaactctgtccacagaaaagtattcttgcaatgtccacagataaccctgacacccatgggttggggttctggactcagaggtccgggatgcacaggccccaggttgatgattcttttgcagtagggccgagggcatgcaatccgttgggatgtcactttgcagataaggagacagttacaggggcatcgaacatattttttccctgggggtgcattcttgattggggtggcttcattgcagacaccacatttgac

SEQ ID NO: 600 - DNA, 721 bp, Homo sapiens
tttttttttttttgaagttataaaagcttgtttttctttattagaatacttttttcaattctgatttgtcacaatttagattctttttctaagaataagcagaaatttacaaaatttaatttttatttatacattcatccgttcaatacacatttcaagaaagctgtattgcaccctttcagtggtagttacaggacaaagaaacaaaataatccaagagagagaccaacaaatgtatatttataacacagagtaataaacacaaataaatgtggagttatttaagcatgtaagatggtacatgctctaccaggtatgggggcttctctaagacacaagatcagattaaagtcttgaaagataatctggggttagtcaagcaggtagaagtgtgaagagcactttctgagcggaatctccatgtgccaagtctagttcaagagactggatagagattagcaatttggagaatgcaatattaagaaatggcaaaggtgagcctacagagattccaaagttgcatagtgaggtttgtgtttgagaaagtggactcaggcagccacgcaaaagagggattaatagaaaaggagactgaggtaggaaaatcaaggcattagctgttgcagcaggtgtgggcagagttggggaggcaatgggatggattcatgagctattaaaaaggtcaaaggagcagggattcatgacccataagtattaatta

SEQ ID NO: 601 - DNA, 455 bp, Homo sapiens
  misc_feature (1)...(455): n = a,t,c or g
gnnnnngnnnnnttggaatccctnctntgganaccgtttgacnnnnnnnnnnnnnnnnnnnnnnnnnnnnnnnnnnnnnnnnnnnnnnnnnnnnnnnnnnggcacgaggcgtggcctgagccgtgcgggtgactgcttcagggcttctccgcgactggaccgggcgccgctcgaaagcacgccctccattcgcactgcttgttgggctcatcatgaagcgcttgggctccgtgcagcggaaaatgccgtgtgtgtttgtgacggaggtgaaagaggagccttcctccaaaagggagcatcagatcagccatacctttgggctcgactagatagaaaacccaacaaacaagctgaaaaaagatttaaaaattttctacattcaaaagaaaacccaaaagaatttttttggaacgttgaggaggacttcaaaccagctccggagtgctggataccac

SEQ ID NO: 602 - DNA, 482 bp, Homo sapiens
ctgcttcagggcttctccgcgactggaccgggcgccgctcgaaagcacgccctccattcgcactgcttgttgggctcatcatgaagcgcttgggctccgtgcagcggaaaatgccgtgtgtgtttgtgacggaggtgaaagaggagccttcctccaaaagggagcatcagccatttaaagttttggcaactgaaactgtaagtcacaaggcattagatgcagatatatacagtgcaattccaacagaaaaagtggatggaacatgttgttatgttactacctataaagatcagccatacctttgggctcgactagatagaaaacccaacaaacaagctgaaaaaagatttaaaaattttctacattcaaaagaaaacccaaaagaatttttttggaacgttgaggaggacttcaaaccagctccggagtgctggataccagcaaaggagacagaacaaataaatggggacccagtgcctgat

SEQ ID NO: 603 - DNA, 3419 bp, Homo sapiens
ggcaggagggagggagccagaggaaaagaagaggaggagaaggaggaggacccggggagggaggcgcggcgcgggaggaggaggggcgcagccgcggagccagtggccccgcttggacgcgctgctctccagatacccccggagctccagccgcgcggatcgcgcgctcccgccgctctgcccctaaacttctgccgtagctccctttcaagccagcgaatttattccttaaaaccagaaactgaacctcggcacgggaaaggagtccgcggaggagcaaaaccacagcagagcaagaagagcttcagagagcagccttcccggagcaccaactccgtgtcgggagtgcagaaaccaacaagtgagagggcgccgcgttcccggggcgcagctgcgggcggcgggagcaggcgcaggaggaggaagcgagcgcccccgagccccgagcccgagtccccgagcctgagccgcaatcgctgcggtactctgctccggattcgtgtgcgcgggctgcgccgagcgctgggcaggaggcttcgttttgccctggttgcaagcagcggctgggagcagccggtccctggggaatatgcggcgcgcgtggatcctgctcaccttgggcttggtggcctgcgtgtcggcggagtcgagagcagagctgacatctgataaagacatgtaccttgacaacagctccattgaagaagcttcaggagtgtatcctattgatgacgatgactacgcttctgcgtctggctcgggagctgatgaggatgtagagagtccagagctgacaacaactcgaccacttccaaagatactgttgactagtgctgctccaaaagtggaaaccacgacgctgaatatacagaacaagatacctgctcagacaaagtcacctgaagaaactgataaagagaaagttcacctctctgactctgaaaggaaaatggacccagccgaagaggatacaaatgtgtatactgagaaacactcagacagtctgtttaaacggacagaagtcctagcagctgtcattgctggtggagttattggctttctctttgcaatttttcttatcctgctgttggtgtatcgcatgagaaagaaggatgaaggaagctatgaccttggagaacgcaaaccatccagtgctgcttatcagaaggcacctactaaggagttttatgcgtaaaactccaacttagtgtctctatttatgagatcactgaacttttcaaaataaagcttttgcatagaataatgaagatctttgttttttgttttcattaaagagccattctggcacatttaatgataaaatcccattgtatttaaaacatttcatgtatttctttagaacaacataaaattaaaatttaacatctgcagtgttctgtgaatagcagtggcaaaatattatgttatgaaaaccctcgatgttcatggaattggtttaaacttttatgcgcaaatacaaaatgattgtctttttcctatgactcaaagatgaaagctgtttcatttgtgtcagcatgtctcagattgaccttaccaagttggtcttactttgttaatttatctgttgtccccttcctctcctctgccctcccttcttgtgcccttaaaaccaaaccctatgccttttgtagctgtcatggtgcaatttgtctttggaaaattcagataatggtaatttagtgtatatgtgattttcaaatatgtaaactttaacttccactttgtataaatttttaagtgtcagactatccattttacacttgctttatttttcattacctgtagctttgggcagatttgcaacagcaaattaatgtgtaaaattggattattactacaaaaccgtttagtcatatctatctaatcagatcttcttttgggaggatttgatgtaagttactgacaagcctcagcaaacccaaagatgttaacagtattttaagaagttgctgcagattcctttggccactgtatttgttaatttcttgcaatttgaaggtacgagtagaggtttaaagaaaaatcagtttttgttcttaaaaatgcatttaagttgtaaacgtctttttaagcctttgaagtgcctctgattctatgtaacttgttgcagactggtgttaatgagtatatgtaacagtttaaaaaaaaagttggtattttataagcacagacaattctaatggtaacttttgtagtcttatgaatagacataaattgtaatttgggaacataaaaactactgaataaatcatgtggcctaatattgaaaatgtcactgttataaattttgtacatttttgatcaaatgtacatctcccctttgctaacggccgtctgctctcaaggatgacgtgggtttgatttctaagtgtttcacagtgtctgtaaatcaagaccaaagagcctgtcgatgagactgtttattaccagattcacttctgaattggccagaggaaatctgaatgtattatcctgtgtgtgtctaggtagagatattggaaggctgccaggggatttcgaagtttgcaacctttataggataactgatggcaatattaagacagacgcctgcttttgcaaataacttacaagactgtaaattcccaaagatctgaatggggctttcctgatgttggtatctaaggcttaggccctatagattgatttacctttggaattgtgctccaaatgtctactgaagcttaaccgaagaactaataaatggactacagtagctcacgttacagggaaccaccctaggcagggaggctctgtgtgttaaaatgagggtctcactgctttaggattgaagtggctggaaagagtgatgcctggggaaggagatggagttatgagggtactgtggctggtactttctgtactaaacatttcctttttctattttaccactaattttcttttaaactgtgagccgtccaagtcagaagaagacagcaaaaaaagcaacttttccaacatacaatttacttttaataaagtatgaatatttcattttgagaacattccctggaattgccacataattcattaaaaacatttttttaagcaacacttggaacagtgtttactttaaatccttaatggccttaattaattctcagattcctgccccatcacttacagaaccaattcactttagagtgactaaaaggaaacgatagcctagctttctaaagccacgctgtgtccctcaattacagagggtaggaatgggtatacctctaactgtgcaaagcagagtgaaattcaattcatagaataacaactgctgggaatatccgtgccaggaaaagaaaaatttctggcaaatattttgtcactgctgtaaagcaaaatatttgtgaaagtgccaaaataaagtctgtcatgccaaaagt

SEQ ID NO: 604 - DNA, 675 bp, Homo sapiens
gtgaagactatgatgtgatagctagcatgataggagccaagtgtaaaaaactccggaccctggatctgtggagatgtaagaatattactgagaatggaatagcagaactggcttctgggtgtccactactggaggagcttgaccttggctggtgcccaactctgcagagcagcaccgggtgcttcaccagactggcacaccagctcccaaacttgcaaaaactctttcttacagctaatagatctgtgtgtgacacagacattgatgaattggcatgtaattgtaccaggttacagcagctggacatattaggaacaagaatggtaagtccggcatccttaagaaaactcctggaatcttgtaaagatctttctttacttgatgtgtccttctgttcgcagattgataacagagctgtgctagaactgaatgcaagctttccaaaagtgttcataaaaaagagctttactcagtgacttaatatatgttctgtattaaaattaatgtgctttgttggggtttaattttgggattggttttgggttttgtttttagttgttttaatggtaagaattaagacatttgtagattttaaagaaaaatatgaaattgtccattaaatcaagtaaaaatgtgcacaaatgttttcataaaatactgcaagcacttctcttc

SEQ ID NO: 605 - DNA, 363 bp, Homo sapiens
attacttaccattggaatattttgagccaggagagcgccttctctctccagccatcaccgctgtggttgttcaggggtagcttttcaaaaacagggcagagcctggctgtcccaaccagggggagcaggggcttggccctgacagcctgagcccttcccctggtgtctgcacagcctttataaagagagagagagctccgaagcaataacaacacctgggggtgggtcagtgagggccccctcaatgattttcttgtttgttctgtgaaatcccgctcacctcctggaggggtggagcagctgggggctggagccctgtttctttgtgtcatcgtgagcatgtgccccttcccaggggctgtg

SEQ ID NO: 606 - DNA, 376 bp, Homo sapiens
tccctgaatcatctactctggaaataaaccaatagtaagaggcaaaattatacattctcttgggattccacacctagaaagctgttttagaaaagaaatgtgttcacaacatcccggtaaatcaaaaatgaaaattgcctaaataatacattgatcaggtcttcacaagttccttcttgcacacagtgaatgatgaagtaagtactgatagcacctctctccaagactgagaaacatcactatcttcagccatgtgcactctcccaacaaaatgaaagaggcaagtggctaaagacataacttctcattttcagagatgaggaaattacaggttagagaaaccaaagattacttagcaaggctgagtgatcgcaag

SEQ ID NO: 607 - DNA, 2535 bp, Homo sapiens
ggaattccgcggagtgttggtgagtgacgcggcggaggtgtagtttgacgcggtgtgttacgtgggggagagaataaaactccagcgagatccgggccgtgaacgaaagcagtgacggaggagcttgtaccaccggtaactaaatgaccatggaatctggagccgagaaccagcagagtggagatgcagctgtaacagaagctgaaaaccaacaaatgacagttcaagcccagccacagattgccacattagcccaggtatctatgccagcagctcatgcaacatcatctgctcccaccgtaactctagtacagctgcccaatgggcagacagttcaagtccatggagtcattcaggcggcccagccatcagttattcagtctccacaagtccaaacagttcagtcttcctgtaaggacttaaaaagacttttctccggaacacagatttcaactattgcagaaagtgaagattcacaggagtcagtggatagtgtaactgattcccaaaagcgaagggaaattctttcaaggaggccttcctacaggaaaattttgaatgacttatcttctgatgcaccaggagtgccaaggattgaagaagagaagtctgaagaggagacttcagcacctgccatcaccactgtaacggtgccaactccaatttaccaaactagcagtggacagtatattgccattacccagggaggagcaatacagctggctaacaatggtaccgatggggtacagggcctgcaaacattaaccatgaccaatgcagcagccactcagccgggtactaccattctacagtatgcacagaccactgatggacagcagatcttagtgcccagcaaccaagttgttgttcaagctgcctctggagacgtacaaacataccagattcgcacagcacccactagcactattgcccctggagttgttatggcatcctccccagcacttcctacacagcctgctgaagaagcagcacgaaagagagaggtccgtctaatgaagaacagggaagcagctcgagagtgtcgtagaaagaagaaagaatatgtgaaatgtttagaaaacagagtggcagtgcttgaaaatcaaaacaagacattgattgaggagctaaaagcacttaaggacctttactgccacaaatcagattaatttgggatttaaattttcacctgttaaggtggaaaatggactggcttggccacaacctgaaagacaaaataaacattttattttctaaacatttctttttttctatgcgcaaaactgcctgaaagcaactacagaatttgattcatttgtgcttttgcattaaactgtgaatgttccaacacctgcctccacttctcccctcaagaaattttcaacgccaggaatcatgaagagacttctgcttttcaacccccaccctcctcaagaagtaataatttgtttacttgtaaattgatgggagaaatgaggaaaagaaaatctttttaaaaatgatttcaaggtttgtgctgagctccttgattgccttagggacagaattaccccagcctcttgagctgaagtaatgtgtgggccgcatgcataaagtaagtaaggtgcaatgaagaagtgttgattgccaaattgacatgttgtcacattctcattgtgaattatgtaaagttgttaagagacataccctctaaaaaagaactttagcatggtattgaaggaattagaaatgaatttggagtgctttttatgtatgttgtcttcttcaatactgaaaatttgtccttggttcttaaaagcattctgtactaatacagctcttccatagggcagttgttgcttcttaattcagttctgtatgtgttcaacatttttgaatacattaaaagaagtaaccaactgaacgacaaagcatggtatttgaattttaaattaaagcaaagtaaataaaagtacaaagcatattttagttagtactaaattcttagtaaaatgctgatcagtaaaccaatcccttgagttatataacaagatttttaaataaatgttattgtcctcaccttcaaaaatatttatattgtcactcatttacgtaaaaagatatttctaatttactgttgcccattgcacttacataccaccaccaagaaagccttcaagatgtcaaataaagcaaagtgatatatatttgtttatgaaatgttacatgtagaaaaatactgattttaaatattttccatattaacaatttaacagagaatctctagtgaattttttaaatgaaagaagttgtaaggatataaaaagtacagtgttagatgtgcacaaggaaagttattttcagacatatttgaatgactgctgtactgcaatatttggattgtcattcttacaaaacatttttttgttctcttgtaaaaagagtagttattagttctgctttagctttccaatatgctgtatagcctttgtcattttataattttaattcctgattaaaacagtctgtatttgtgtatatcatccccccgaattc

SEQ ID NO: 608 - DNA, 1298 bp, Homo sapiens
  misc_feature (1)...(1298): n = a,t,c or g
gctggaagcgggtgatgaaggtgctggcaggcgtcctggacagcgtggacgtccgcctcaagatggaccaccgcagtgacctggtgttcctggccgacctgcggcctgaggagattcgctaccgcctgcagcactactttaagttcctgtttgtgcgggagcccttggaacgcctcctctctgcctaccgcaacaagtttggcgagatccgagagtaccagcaacgctatggggctgagatagtgaggcggtacagggctggagcggggcccagctgcagggcgacgatgtcacattccccgagttcctgagatacctggtggatgaggaccctgagcgcatgaatgagcattggatgcccgtgtaccacctgtgccagccttgtgccgtgcatnatggactttgtgggctcctatgagaggctggaggctgatgcaaatcaggtgctggagtgggtacgggcaccacctcacgtccgatttccagctcgccaggcctggtaccggccagccagccccgaaagcctgcatttaccatttgttgcagtgccccccgggccctgctgcaggatgtgctgcctaagtatatcctggacttctccctctttgcctacccactgcctaatgtcaccaaggaggcgtgtcagcagtgaccatgggtgtggggccagcagctggtggggactggtttcaacgccagctttctgtgcttctgcctgtcattcggagaaactctggctctggggcttggggcttctcaggatcctggatggcagagactgccctcagaagttccttgtccagggtgggcacccacagtgactcagaggacagggctaggcaggagacctgctgctcctcattggggggatctcttggggggcagacaccagtttgccaatgaagcaacacatctgatctaaagactggctccagaccccgggctgccaggattatgcagtccacttggtctaccttaatttaacctgtggccaaactcagagatggtaccagccaggggcaagcatgaccagagccagggaccctgtggctctgatcccccatttatccaccccatgtgcctcaggactagagtgagcaatcataccttataaatgacttttgtgcctttctgctccagtctcaaaatttcctacacctgccagttctttacatttttccaaggaaaaggaaaacggaagcagggttcttgcctggtagctccaggaccccagctctggaaggcaccccaaaagaaccctcttgtgccccagcctcttcctttgagttctcgggaac

SEQ ID NO: 609 - DNA, 59 bp, Homo sapiens
tgatctgagttcagaccggagtaatccagggtcggtttctatctacttcaaattcctcc

SEQ ID NO: 610 - DNA, 412 bp, Homo sapiens
gagtccttcagggatgtctggggacctgtccttatccagactggatttcatttttgtttttgaagccaccatcccagaacagtgaagacagtacagaaagctactagaagcaaccagatgcaatcctgtactctttctcaagcaaggagggactgcttatctgttggcatctttatgcactgtgtggagtactgatgaaaagtgacagcatttcatagctgtgtttaggggaggtggggagccgactgcagtgctatccagacagctcaccctctttgcagctattaagagtctcatcaaggctgtctatggcgatgtcgtcattcctcacattcccagaagtagaatttgaaaagatcagtgaacattaacaatttcttcttctccctgacatatgcacacatacagcctg

SEQ ID NO: 611 - DNA, 466 bp, Homo sapiens
  misc_feature (1)...(466): n = a,t,c or g
gccagaccatctgggcacgcacaggctacttggggttcctgcggagaactgagctcacagatccaaatggagagcgccatgatgccctctacgtggtaggggcactggaagaagccatggagctgcggggcatgcggtaccacccaatcgacattgagacctcggtcatcagagcccataaaagcgttacggaatgtgctgtgtttacctggacaaatttgttggtggttgtggttgagctggatgggtcggaacaagaagccttggacctggttcccttggtgaccaacgtggtcctggaggagcactacctgatcgtcggagtggtggtcgtggtggacatcggcgtcatccccatcaactcccgtggggagaagcagcgcatgcacctgcgagacgggtttttggcagaccagctagaccccatctatgtgncctacaacttnaagcaataaaaannnnnaaa

SEQ ID NO: 612 - DNA, 846 bp, Homo sapiens
ttttttaattaatttgtcatgaatatggacaaagccttttctggggtgtgtgtgtgtgtgtatgtttgttttttaagtcgtcattattcattcgtattctttttctgtgtaatgtaatcatataaagttactttggacagagacccagttaattttctcttttgataggatacatggtttagataaggtataaagtgtccctttttattctagaggcttttcctttaattcagagattagtggagataataacgtcagtcaaggctaatgtggtacatggaacttgctaatggaggttggacattctgtttcagtcttacatggatattgtttcattggtgttgaggaagaaaaaaattagatactaccatgcattgggacagcataattctaatattacattgaatatggctttttaaaaataagtattaaaaagccaatcgttttctccatttatctatcttttttgtttgtttttaatttggttgattgatatgcacccaggccgtcttatttttacttgttaaatgtctgtctaggaagaactgtgattggaaaggaattaattattatacaaataaatctggtaggatatgagtggagtaagtttgcttgaaacagaagtatattttctactttgaatcacctcaccagagtcatctgtcaagaattatgtataacaatttatctttattgcctacatacaacatactttttctgaattaagataacttctatttgtgagttgaacttcattatctgccattttgtggaatcaaccttacattctttggtggaactagagctgattgtcaccacaaggttatatgacaactctgttctaag

SEQ ID NO: 613 - DNA, 449 bp, Homo sapiens
ctgcgttgtaaatattgctttaccaaacaggtcacggaggagtaaagtatctgcacgtaaaattggactacagaagttatgggagtggtgcatagggattgtccaaatgacatctctaccctggagagttgtaatcgggcgacttgggcgtcttggccatggggagcttaaagattggagtatcctccttggagaatgttcactacagacaatcagcaaaaagctcaaggatgtgtgccggatgtgtggaatctctgccgcagactctccttctatccttagtgcctgcctggttgccatggagccccaggggtcctttgtagtgatgccagatgctgtcacaatgggctctgtttttggccgaagtactgcactgaacatgcagtcatctcagctcaacacccctcaagatgcttcttgtacacacatcttggtgttcccaacatcat

SEQ ID NO: 614 - DNA, 306 bp, Homo sapiens
tcctatgtttataattctgtataactatactataggattatccaaaaaataaacaaaagaatcttttcatgatttgtacttcttcttaataaactccttattttgccaaaaagtgtcatcaattcatttggataacttttatgttttaggaacgtggcctctcttttaattactgagaacttacaaaatggttcagaaagtttatatttttaaagctttcattcattgatatattgaacatctaaggcttaactatctttccactgggacaaaaacagaattcttaaaaatgaggaggagggccca

SEQ ID NO: 615 - DNA, 1068 bp, Homo sapiens
  misc_feature (1)...(1068): n = a,t,c or g
aagagtttctagagtttttattattcaaaatgagtttcatttcaattcaggtacttgaaagaaggttctagtctgttactttgacacagcacaagatcagtagtttattccaatgaagtattccacccaaatgaaagcataacatgcaagtagttatttatttcaatcactcctatttgaaggtcctcatttttggagaacagccaggcattttattatccactctttccattccttaaaggcttccacgggtttcggtaaattcccattatcctcgtgactgtgttctggagttttggaagcttgactaccctacgttctcctacaaatggaccttgagagcttgtttggaggttctagcagggaagcgcactactcgtatacccttgaccgaagaccggtcctcctctatcggggatggtcgtcctcttctgaaactacctttgcaaaaattatagcagtgagaaaattatgacagtgaaagaaatctgacctaattgactccatcttgcttctaacctcccagctgcccttgttcattcctgggcatagggagcactaactttgggaggatttagtttatagtttaactttgaaacaaagatgataacagcccctccctgagaccaacccactccttgcctggggaccagaaagcctttgtaaaactaacacattgggccacaagattagaaatgacggctcaggagtcacgcagctggagatgacaagattctgacactcctccaattgctcctgtagataatattattattgtaaaacctaacatgggtgtttgaggtatttttcagaccctgccttctgatggatcagctgggcaccacccaggaccagtaaaactgggcttcatctggtcttctgggcccccacccgggaacccaactcagtggcaagaggaaactcaacncctaanatttcaaccccggccaaccaatcagcattcccgcttcccgagccccctgcccgccaaactacctttaaaaaaccctagcctccaaattttcagggaggctgatttgagtaataataaaacccctgtctcctgtt

SEQ ID NO: 616 - DNA, 658 bp, Homo sapiens
cctttcaaagtgctggtaattacaggtgtgagccactctgcctgggcctaccactaacttgaatacattcagaatcacctcctctccccaaaatttgtagaaatagtttttgaggaagccaaaagcaaagcagaaacctttacagtattgtttcttttctctttgttaactgtgtcattacagcaaaatactagcagtctgcctaaacatgttcattgtacatttctcaggctatcaatgaatggaggtttttaaaaagttgaatatttgtctgaacattttatttcaaagttcaaaaaaacagaggctgcaaaattcattttataatggctattttgtgacgataagatgtagttcatgtttttctgtagcactgggcccaaatattctttgtaaagaaaatcgctgcagcaaactgttactgtgtttattatatttgtagaagtattagaaaaatattctattttttattcagtgctgcgtaattacccatggtagccaaccctacaaaagacaggttttcacaaattgaggtggaggtgggcggttcagtatctgccactggacttgattataaactgtatttgaatatcagtggtattatcttttaagttgtcagcaagttaccaaggtattcattaaagaacttgtaatatca

SEQ ID NO: 617 - DNA, 779 bp, Homo sapiens
gtagacggaaagaagggaatcatggcaaaagctggcctggaagggatagccagagggatagaatgactctctctctacataccagcagcataccaaatgcgttctctaagttcctacctccttgacctgatcaccctccctcctccaaggaagagctcaaagttcccagccaatagacagcatgaatcaaggaacttgcattatatgtgctcttgaatctgttgtctccatggaccattcctcggagtagtggtgagatggccttgggttgcccttggcttctcctccctctactcagccttaaaaagggcttcttggaactttaccagcagcctcagctttacaaatgccttggtatgtacctctggcaaatgccccaccttggtgatgttgcaacctttccttctgctagggtgtacacctagcctgtgcaggtgtcagctctgctagggagtcactgtacacacaaactctactggaattcctgccaacatctgtcaccctgcagctcctttacagttcaatccaatgatagaaaccatcccttccctttctcccttggctgttcacccagccattccctgaaggccttaccaacaggaatatccaagaagctgttgtcctctctcgaaccctgaccagatcatcagccactgaggccagtggaatttccccaggccttgttaaaacaaagaaagcattgtacttctcagattccccttgtggaaaaaaaaattctgctgtgaagatgaaaataaaaatggagagaaaacactgga

SEQ ID NO: 618 - DNA, 723 bp, Homo sapiens
ctcatagacaccttcagggtgtggggtacagcctccttcccatcttatcccagaaggcctctcccttcttgtccagcccttcatgctacacctggctggcctctcacccctatttctagagccactgcgtctggccttctataattttctggtagtcacgatggaaacaaacaaaacaccttagaaccagagatcgaccccctcaagcaatacatcaattcccttcacaagaaacgtcggggctacatgagtatctgtgttgaatgcggtctgaaatgatcctatggattttcccggctggttgccactactgtacaacattcagtgcccacatccatctgtgccattaagcttttttgagacatgagagatgcctcttccctgctgtatgacatgcatttgggaagttggaaagaaatgacaaaatcagggagaaaacatccaagcttcttacctgtagatagaatcagccctcacttggtgcttattaccagttattcaagaacaataacaacaacaaaattagtagacatccaagaagcacatattaggaccaaagatagcatcaactgtatttgaaggaactgtagtttgcgcattttatgacatttttataaagtactgtaattctttcattgaggggctatgtgatggagacagactaactcattttgttatttgcattaaaattattttgggtctctgttcaaaaaaaaaaaaaaa

SEQ ID NO: 619 - DNA, 537 bp, Homo sapiens
gtgacttcgtggtaaatgtaactcagtgtttgcttgtgacttatttataaatattgtaagtttgtgtcgatgagtgtaagttggcagtgcgcacgtctcggtttttttacatgatttaaggaaagacttttatgtcagaacttggtgcctgtaccgtcaaccccgctgctgcccgtgtttaaacgcaggagaactttaaaactggccatctatcttttcagtgtacaagtcactgaacccattgtttctttctgaagagactttcctttcaaggcttcccatgggtccgcgccacacagggccggtgctgctttatttcagactctgccccagggttccagggaatccgaaccccgggagtgcttgacgcgggttccccaacttccgccttaagaaaacagggaccagccgggcaccaggcccgtctctcacgtacttttaacacatccttgaaagcccctcgtttaatgagaaaagcgaacactgcggtccttgccaaagtaaaatgaagctgccccaggacaaggggttaccatg

SEQ ID NO: 620 - DNA, 1804 bp, Homo sapiens
ggcgcttcggctcctcccgagccgcctgctagccccgcgccgcactccatccccacaggctggggacgggccaggtgcggctgtgtgggttcgggagcggagttgcagaatccaaggacccattttgtttctttctccgcactgctttatgggaggcattatggcccccaaagacataatgacaaatactcatgctaaatccatcctcaattcaatgaactccctcaggaagagcaataccctctgtgatgtgacattgagagtagagcagaaagacttccctgcccatcggattgtgctggctgcctgtagtgattactttcttgtgccatgttcactagtgagctctcagagaaggggaaaccttattgtttgacatccaaggtttgactgcctctaccatggaaattttattggactttgtgtacacagaaacagtacatgtgacagtggagaatgtacaagaactgcttcctgcagcctgtctgcttcagttgaaaggtgtgaaacaagcctgctgtgagttcttagaaagtcagttggacccttctaattgcctgggtattagggattttgctgaaacccacaattgtgttgacctgatgcaagcagctgaggtttttagccagaagcattttcctgaagtggtacagcatgaagagttcattcttctgagtcaaggagaggtggaaaagctaatcaagtgcgacgaaattcaggtggattctgaagagccagtctttgaggctgtcatcaactgggtgaagcatgccaagaaagagcgggaagaatccttgcctaacctgctacagtatgtgcggatgcccctactaacccccaggtatatcacagatgtaatagatgctgagcctttcatccgctgtagtttacaatgcagggatctggttgatgaagcaaagaagtttcatctgaggcctgaacttcggagtcagatgcagggacccaggacaagggctcgcctagatatgatctatgtctctggaggctttgatggaagcaggcgtcacaccagtatggagcgctatgatccaaacattgaccagtggagcatgctgggagatatgcagacagcccgggaaggtgccggactcgtagtggccagtggagtgatctactgtctaggaggatatgacggcttgaatatcttaaattcagttgagaaatacgaccctcatacaggacattggactaatgttacaccaatggccaccaagcgttctggtgcaggagtagccctgctgaatgaccatatttatgtggtggggggatttgatggtacagcccacctttcttccgttgaagcatacaacattcgcactgattcctggacaactgtcaccagtatgaccactccacgatgctatgtaggggccacagtgcttcgggggagactctatgcaattgcaggatatgatggtaattccctgctaagtagcattgaatgttatgaccctatcatcgacagctgggaagtcgtgacatccatgggaacccagcgctgtgatgctggtgtttgtgttctccgcgagaagtgaccattgttggagcaccatccagagctagtgaccagtccagtggacagttagtgggagaatcaaaaatcctttccagaatgtctgtttctcactatgtgcaccgggtgattacaggcaccagtgcagtgatgattgtacttatttgacacatactccccgtcgtcctggttcttgttcctgagaagggtgggtaacagatattccaggaaaaagaatgcacattgaatggatgtgagagaccacattgc

SEQ ID NO: 621 - DNA, 765 bp, Homo sapiens
aaacagctgcagttagcactgttatctgagcatgaaagaactggaaacgctccttacgtcgagatgttggaccttgaagccctcctgaggccaacatgcaaatctggctgtgacggttcatctgacacctgtgtaaagctgaccagcctgctctgtacagtgacaatgaggagcccctctcttccttaagtaggaatctgtgaagcaaaatgtttgctgccaaagacaaatcagactgtcagtcattaaaaacagcattagcaggatgaggatagcaatggggaagggttgtgggcaatgcagtaacagggaaatggcttcagaaatggtttgagttggaagacaacattcttcatctctcaggacttctaattccttgatgctaaaagaagaggcatggattctatgagcttccaagtccctttccactttaaccttctacaaatctttcagaggactgcctagtagcaaaggttattcctggacacaggaaagacgggcattacagggaccaaagctctgaaaggtgacttttattaccaacacactggctggaaaagggaccaaccacatcacgggtgagtgatacttctcagtcttctctactcattcaacaaaggaaatgtgggctggggcagaggtcttttttcatttaatactggaaaaatattgaagagcatccatgttcacttatggctggttttgctatagaaattggaaaataaaggccacttttttgaaatccccagtttaattaaaaaaaaa

SEQ ID NO: 622 - DNA, 483 bp, Homo sapiens
ggcagagtaacattccaacaaaacaagaactttcatcaaacctttgctacatgggttaagcaaggccagtcaaattcaggcgttgttcaagtacagcagaaagtcctgggtatcattccatcaagtacaggtaccagtcagcaaacctttacttcattccagcccaggacagcaacagtcacaattaggcccaatacctcaggctctggaggaaccacaagcaattcacaagtaatcacagggcctcagattcgccctggtatgaccgtgattagaacaccactccaacagtcaacactaggaaaggcaattattcgaacacctgtgatggtacagccaggtgctcctcagcaagtgatgactcaaatcatcagggggcagcctgtctccactgcagtctccgcccctaacacggtttcctcaacacctgggcagaaaagcttaacttcagcaacgtccacttcaaatatacagtcttcagcc

SEQ ID NO: 623 - DNA, 1652 bp, Homo sapiens
agaaccaaatcacaataagtctttagctgcaggtgtgtggggcctacacgcccagacacacacatacccaaccaaaaaaatctcccaagctcctctcttagaatatcctccgaatcctaaatctagagctccaaggatgctggtcattaagaaaggtaatacaaaagacttacagctatctggattcccagtagtaggaaatcttccgtcacagccagttaagaatggaactggtccaagtgtttataaaggtttagtccctaaacctgctgctccacctacaaaacctacacaatggaaaagccaaacaaaagaaaataaagttggaacttctttccctcatgagtccacatttgggcgttggcaactttaatgcttttaaatcaactgccaagaactttagtccatctacaaattcagtgaaagagtgtaatcgctcaaattcctcttctcctgttgacaaacttaatcagcagcctcgtctaaccaaactgacacgaatgcgcactgataagaagagtgaatttttgaaagcattgaaaagagacagagtagaagaggaacatgaagatgaaagccgtgctggctcagagaaggatgacgactcatttaatttacataacagcaatagtactcaccaagaaagggatataaaccgaaacttcgatgaaaatgaaattcctcaagagaatggcaatgcctcagtgatttcccagcagatcattcggtcttcaaccttcccacaaactgatgttctttcaagttcacttgaggcagaacacagattgttaaaggaaatgggctggcaggaagacagtgaaaatgatgaaacatgtgctcccttaactgaggatgaaatgagagaattccaagttattagtgaacagttacagaagaatggtctgagaaaaaatggtattttgaaaaatggcttgatctgtgacttcaagtttggaccgtggaagaacagcactttcaaacccacaactgagaatgatgacacagagacaagtagcagtgatacatcagatgaccgacgatgtgtgaaggatttcctaacagctttagaaatcttagtgtgatacatctctcatacagtttggggtgaattgtaaaaatgaagaactataatttatgtagtgaaataccccattagaagaggattttttgggggacttcaatatgaagaaaaccaagaatgttttgttgggctgtgttgaacattatttctttgtaaatgaatgttgtaggaatgaggacttgggttggtccaacattgactttcttcatcactgcaacatttctctgactagcaatgtgacgatgtaacaaatgagattttctcatttaataataaaaaattgtgtaatgttttgcaaagcttctgtcttaaaatgtccaggtcttaagaaaaaaggcagcttacactgttttgcttgcagagtcatatctttttcgtacaatggaaatcctcaagtccactttgtgcggtctccctctccttcccccaaaaaacaacaacaacaaaacaaaaaccaaaaaggaaaatgtagcatgttggctaaaactggagcaaagtgcactaaaacaatttcctgaactcacctgttgtactattcaccttttaaaccataaattgctctttagccatt

SEQ ID NO: 624 - DNA, 1732 bp, Homo sapiens
taaatggttctttattcataaacttgatgcaagtttacaaaatttactgtacattgccaaataaatctgcaattaaaaataaaatccattaaacaaagcatgccaaatgtgcagctatcagtctgcttgccatcaggatattaaagaattcaacaatgtattcaagatttagccttaggcttaaggaactttactgatttaaagaattctgccttgtcacttgttatctgagcaactggcaatcagaactttatacaaatgtaatcaagtgaacaagaataccagaaaatctatttactgctctcttaaccaaaatggaatcaaaagaaattaaacacacacaatgtagaaatgacaagtctctcagatgtggtttacaaagttaaaaactgaatctcaaagctaatgcacaagaaacacttttgaactttgtaacttgtttgtgcagaaaaatgtgcttctggatttcttgttaaaagtgcttaagaactagaatttacttttaaatcaaacgtgggtgtataaaaaaatctattaccaaccaaaaaggactgattcaggtaaggccaataaaatggagagtaccttgatttgagtcaggttctataaaaaaattaacatatgtagagtttctattaatctttcaatgtaaaagccattgttttgacatggcaaaaattactgtaagagtctccaaattaagtatctttttgtacttaactgcacagcttttgctcaaggagtctttgtgccaatcactttataagtttattagtttacaaacgattgcaacatcccgttaataaaatggaaacgtaagatgacttagtattttaaataacttgaagctctgtactgtggctcttgttcataagaaacactgaaccaacaagcagcagattcagcccagccaagactctgatgccccagtggaaatcactactcacaagccttaattgatacagttttacactgctttgcctaagaagtacaatacaactcaattaagagtattatcttcaggaaacaattcatatcttcacatagtcattaaaaagtttaacaatttaatgagtaggtttcctatcacattttggcaatatcataaaatggttttagacatgaaagagctattatgatttagaaggccttaaatttcctaaaccaatattgaacatcgattaaacctgtattggctgtaaatggaacaatatattgcaaatccttgtaacccatgggctcaatataggaaagttaccctaaagcctcaacttcagtagcctgatgttgacttggctgctttaaaaagttcacttttcaagaaaaagagataaggagtggccagtatgtgtatttatcaggaaaaatacagtaaaggccccactgctcagtccaagatatctaaaatgagcaaaatgcgaaggctgtaacttatactggatgtcagatgacagattatccactaaaatatctattaactaacatcttcggtactgctgtaataggggcactcaaagcttttgtctgcatgttggaaagattttctttaaagcaacattagtccaaacatacaacagtcaacatatttagccatcttcctttggaggggtgtaccagccatttttctcatgtatctgtacaatggaattataggattgttgggctcttgctagattatattgattcttatttgctccaaactgcactctggctttgcctttgactaaggtgg

SEQ ID NO: 625 - DNA, 238 bp, Homo sapiens
gggagaaccacacagttaaagagctattccctcctcatagtgaaaccctgaggtggaaactgatgaaaagtgtcccagagagcagcctgctcgctgcctctggtactcactcatttatccattcttctgagcttaaagagaaaagataaaaatgagaagtgctttaaaattaaagttgatgtttaaatatcacgtctcttctgagcccctactttttcatcttaaaaatactatttcc

SEQ ID NO: 626 - DNA, 544 bp, Homo sapiens
gcgaccgctcgtccgccggcttgaggcccgcggggaggcgcgcaattcgtcggcccgcgggggggcggccatcccggcagtcttcgcggcgaccaaggactaccaggaaggggagcggctgggatggcgcgtccgcggccccgcgagtacaaagcgggcgacctggtcttcgccaagatgaagggctacccgcactggccggcccggattgatgaactcccagagggcgctgtgaagcctccagcaaacaagtatcctatcttcttttttggcacccatgaaactgcatttctaggtcccaaagacctttttccatataaggagtacaaagacaagtttggaaagtcaaacaaacggaaaggatttaacgaaggattgtgggaaatagaaaataacccaggagtaaagtttactggctaccaggcaattcagcaacagagctcttcagaaactgagggagaaggtggaaatactgcagatgcaagcagtgaggaagaaggtgatagagtagaagaagatggaaaaggcaaaagaaagaatgaat

SEQ ID NO: 627 - DNA, 855 bp, Homo sapiens
ttttttttttttgcggtgaactacagaatttattaaataagaaagctatcaattggaacaggaggaaaaaaaagttttaaaaaaaatctataggaaaatagtcaaaaaagcatttagtgctcatcgccgtccctctgaggggggccgtcagaaaggcaactgggacctgacagacccgggcacatacttgaaattcctgaattctaacctgcattgtacaaaatgccacttgaaacgtccaccagaacccccagccaaagaggcacatctggacagcttcacagcacggaacgtgtgaccttggtccccgtgggtcccggaggaggacagcagcagccacgcggtggcccctgcgcactcaggccatgactgcagggaccacccactggggccacaagagtgacccgggagccagagggagccctgagcatcggcggaaggcacaggtccctgcccggggtggccatctcagaggcacatttagtgtttgttctacttatgaaatcaaggacaaccaattgtacttatcttacaactgatgttctgggatgggactggaaaacattgattccagaaccactctttttcttaaaatcactggcttttatgacaatgtcttccaagagctcattagaatctataagatcgcaggaatttcgccaagaagggctgcatagaaaccacagagacaactcggccagggctgctcccattgtggtggccaagaactggctgagggcacgacactggactcttgcgatcaacactttactctgggtgaagactgcatatttaaggacacaactgcacatttagatcgagcggtggtgacctcagggtatacacggagcttca

SEQ ID NO: 628 - DNA, 647 bp, Homo sapiens
  misc_feature (1)...(647): n = a,t,c or g
catctatctgctctgtcaggttatatgctatgttctgataaattcttaatcatctttcaaagctcagttcaagtgtcacctcttcctggaagctttccctggttttcccctctcccaaaagaacttaatgactcctttcctgggcattcagattatatgcctccttcacagcgctcactgtttaatagcaattattttaaatgtgaggagatagtataatataatgcttaagagttttggaaacaaatagacgggttaaaatttcaatttctgctttggaatcaaaataaagttgggttaaaattctgctttctgagcttaattcctttgaacctccggtgttcttatcagtaaaatggggatatagcactcaccttatattgtggggaataaatgggttatgaatccaaagtaccttgcacagtgcctggcacatagtgggcattccttcaagaagttacatgcttctctcgccacactgtgctggaggcaggaccacagctgtctcctgtgtgtgtgctggcacgtggaagcctctgcnnnnnnntgtgggaggggaagcctccaattcagaaagcatgcagactgggccctagcagcctgcctggctgtggacagatctttggcaaaatggccctntnggtcaa

SEQ ID NO: 629 - DNA, 433 bp, Homo sapiens
  misc_feature (1)...(433): n = a,t,c or g
tttgaanaccatttntnacacnnnnnnnnnnnnnnnnnnnnnnnnnnnnnnnnnnnnnnnnnnnnnnnnnnnnnnnnnggcacgaggatctttttagaaactgttggaaaataaacagaaccaaccaggtgaaacaaagcacagacattgggttaggatgtagtgagttgtgaacaatcaggattctgggtgtgatgggggtccctgtctcataggtgatcctttggtgccatgtgaccgagagacatggtgtctaaggcccatggcctgaaaacctgggtgctgctcctagctgactgtggaccttgggcaagtccttcatccgtcctgtgcctcactgtcctcatctgaacaatggtatgatgacacctgccctctctttcaatcatgctttgaggatacagngagattggttacagtgaacccttcaatg

SEQ ID NO: 630 - DNA, 763 bp, Homo sapiens
taatttgatagaaagcatttgtagtcaactgaattttaatgtagccaagaggagaaaaggagtggtttcaaatcaagcgttgtccacacttttagaatgggaaggcatagaacatggtatctcatgggaaagatcatgtttacagtaatgcattccagattaaaaagtaaaaggggcagagagagtagaggctgtttctcagcatgtgaggatctagtgactgtcaccacattatttgaggaaaactgctaccactaccacaggccaggatctttccatttttgactctcaccttctcccagaaccagtcatgctgaatgaccatcactgatcctacggaactttgacaaacgatgaaactagtggaggctttcaatgtagacatcctcagcagaggagtgtagccctcgtactgctgctacaagtcacacgctgagtcacattgctgtctgcagagtgatgtgaacctgtgtatacgtgcagtttcttctttacccttcgtcccttccccaacatcctcagtgagcaaatcgcatttctacctggtgagaacacccctgtaaagagcctactttgttggtccaacacagtgtgtctgcccaaatgccctttattaattaagtcaccttttggggagtaacataatcagtgtaaatcaaatgctgtccccatcccattccccaagaacctgcatcttgagaatttttggctgtgttttgtaaaagctttttgcttttacgctagtggtgatgttggaggagaa

SEQ ID NO: 631 - DNA, 424 bp, Homo sapiens
gcaacatacaaaaactttaattatttttgcaaaaagaaagccaactattcgccttggaaataataatgaagtacaaatagctctgactctgcatttggacaaggatgaaccatgatagatatttagaaagggttttaaatcatgtgtatgttggctacagagtaaaaggaacagagaagactcaagctattgtcaggtgtgtatgtgtcatcagcacacactgggggaggagagtcctcactaagtgccacaacccctgatagctgtcagtctctcatgaagcaccatgatctggcatggactcccaaatgccacttgagagaaggtcttcacagcagactgtgcatctgtgtcacaaaacacggctgcaatgaacaacagtgttcattttttgcccttccaaatgtattcttgtgtatgatcg

SEQ ID NO: 632 - DNA, 406 bp, Homo sapiens
ggaagctggaaactgggttccagtcctggctctgtgcctctctgagtctcattgcaaaatagaggtcaccagaaggattactggatgaaaaatgaggtagcattgcagacgtgcatggcacgtacactctaggttgcttcctagacagaaagctcagttcgaggctggtggcatccatgctggcagcagccaaactgtctgcgacagagtgaggaggggcatgccacgtgaaggaccagcatcagaatgacatgggaagaaactcttcacaatagcagaagaaagagctcctttcagcctaacatgtagaactcaagtcttcttgtcgcgcttctgtccctcgcccctcctcccccactgagaactagcttttactgagcagtattacatgccagctacctcgggt

SEQ ID NO: 633 - DNA, 1696 bp, Homo sapiens
tctggtccagcatgtgcaactgctttaaacaatttttaaatatatccaaacttttttccttctattcttctcaaaggcatttgaaagggataccttttatgaatattcttgctgtagaacaatgtagaaataaccttcggggtataaaacagtaaaaataaaaatattctacctgagtgtgttaaatcaagtgatttgtaaaacaaaaccttccacaagtgtgggctttctacatgtaacttggcccaggctgaaggcttacaccctcatgttctacaacacagatcactaatgatgataacatgagttaaattgggattcttgcccttctgtgtggcttttggcttctaggttctatgaccaaactattgacatatttgaagtctgtatgcagtcattgtgtgataaatctactttacagctttgcctcctacctgcagcttacatgataaccatgctgtgaagtgctacatatgcttcatacaatatgttgccccatctgataataaaaatacaaaggtgctctttaagctaaaccataaaccttattagagaattctagttaaggtgttttgtttttccacatacatgtaaataccttaagatcaataggatcaataaggataatattagttatcaaaatttagtcttcatacttgaagaatttgtttttaaaaataactaagatgcaaaaaaataaattagctagtcttgaacaagagtgagttttgcagaaaactgacatatctgaattctagtacagataagaatctgtcaaatgataactgaattcacgtgactaaccactcttttacgtaagattgtatctactcatgagaaataggggaattcagtgttatcattatagtctccgtatttaaactgagtttttcttttccaattttttttccatgcctcaacataagggaaattaatcagttaatttctgctgacttaggtttcctaaacagcttttagttctcaaggcacagctgtggtaaaaacagagcaaaacacccagccatttattggaattctgcagtacaaaataagcacatgtgctctatataatctagtaacaggatagcaacagttaaactgtctcaaacaacagatgtatttgcttgattttccttcctaacttcttttgcatcaggaccgcaagcaaagagcttgtttcccagagtattttgggcaaatccggaaatacataatgtggcccattgccacaaaggagactgaaatcaatacgagcaagccaaaagcttcaggatttggagccaggatgaccatgatgaaatgcagaagatcaagaagatagttcatggagttctgtacaccatttataatgcctctttcagattcaattacattttcttgcagcaactgtgtcacagttaaatcaaaggaccaaagaccgattctagcagcaatgacgcctgcaaacagcagactgacagagattatgggcacagattcaggacttgtctccgggacaatattagcagaattagacccattagacatgtatatttcagttgtaatttcaggtatcttggtaggtgtaattgactctccttgaatgaaccttgatcggatatcttcaaaaggagaaacggacaagtccagggggcttccaggcatgaatacagagatcacacacaagatccaacaggaaagctgtgccaatcctgag

SEQ ID NO: 634 - DNA, 654 bp, Homo sapiens
tttttggctcctgtaagtcattttactttgaatatataggaaacaaaatccacaaacaggaagctatgttctatggttatgtcttttaaacaatgttctgtatttacaaattgtttttttccctaagtaaaagcaccagctgaaaagttataggctgctaaaaccgttacaaatattacaaacccattaaaagacattatgccaaacgtacttattaaaaaccttaacaaaacgaagagacaactgacaacgcaaccaaccaattgagccaccatgctgggctgggtggcagttccaatttccttgcctgtgtttctgataaacggggctgggagtgcttatcccagggagaggatcctcgcccaccggcagggaacttacagggacagagctggggagaggcagctgtgtctcaaggaaacatggcagcctcacttcctgctgtaggtggcctcctggtcagaccccctcaacccacaggacaagggcagaggcatacaggagggtctggccagctttcggctgttcatctgtcaacagaatgcctttctgcgaccttgtcctcatccactgaagggtttggagtttttgttttttcctagacacttagctacaggacactgtgtgatgtgtcctcagggacttgctgtctgc

SEQ ID NO: 635 - DNA, 1256 bp, Homo sapiens
  misc_feature (1)...(1256): n = a,t,c or g
tcgacgctgggctttcgggtcccgcgcccagagatgggctccaaggcaaagaagcgcgtgctgctgcccacccgcccagcgccccccacggtggagcagatcctggaggatgtgcggggtgcgccggcagaggatccagtgttcaccatcctggccccggaagaccccccagttcccttcaggatgatggaggatgcggaggccccgggagagcagctctaccagcaaagccgggcctacgtggctgccaaccagcggctgcagcaggcgggcaacgtgctgaggcagaggtgtgagctcctgcagcgagccggcgaggacctggagcgggaggtggcccagatgaagcaggcagcattaccggcagccgaggctgcctcctcaggctgacctctcggggcctgcaggcttgggcagcgcacaaggtggcctgcacccagnctttccctgggggtccgtcggccccagactggcattcacggggtcccagcccacgtgggtgttgacacaggcgcccctcctgatgctggggctgcggttcatccgtcgtctcattcatgccgagttggtgggacccacccagctggctccgtcctgcgtgacctgagggccccactggggttctggaagaggatagggacattattgctgtactgtgattctgtcgtcagctcacagtggccgtgctctgcagtggggcccctgggagcaggtgccacctccttcctctcccggggcaggcactcgcctgttccacttctgagtccaggtgttgggatcgaggtgttaactgtgattccatccagcgagtgcccacccaatgtcagagcagcccgagggccagcctgagcccctgaccccacttccttctgggccccgggctcctcccacaagccacgttgatcttcacaacgaccctgggccgctggggtcacccaagagaagcagccctgagacccagccaggctgggcctagctccacggcacgggtgtctcccagccactgcccttgctggaggaccgctgtgagtcactggccaggagcccagggtgtcctgagtctcatagccaccctgccagctgcagcaggtcctgggcctgctctctgcgggttctggccctgggggagggggcgttagtgcggcggagggtcttgccaaaggcttttcatcctaaatagcaacttgagtggaaacctgggcaagggccgcccagaggctgggccctgcacataaagctttcgtgtgtgtctggca

SEQ ID NO: 636 - DNA, 347 bp, Homo sapiens
ggaacttttcaagcaaaacttcgaagatttgcattgcaaattttaccagttggagcgcctcatgcaggaatacattcctgacctgtacaaccacttcctggatataagccttgaagcacacatgtatgcctcccagtggtttcttactcttttcactgcaaaattccctctctacatggtcttccatatcatcgacctgcttttatgtgagggaataagtgttatttttaatgtcgcccttggattattaaagacttcgaaagatgacctgctgttgacagactttgaaggtgccttgaagttctttagggttcagcttcctaagagataccgctcaaaaaaaaaaa

SEQ ID NO: 637 - DNA, 1286 bp, Homo sapiens
ttttattctctaaaatttatttacagttaataagttaaaaagcaaagtacaagcagattataaatctcaaccataagcacatcaaactgtccagggaaacactttgattccattacaaacaattgttttctaatgcgcttaagacataacactctatcaaaaaatattttaaacacaccaataaatattaggcatgtatgtccattaaaaaccattaaagagtcctgtggcaatccttaaaacaatgaaaaacttttgagttcaaaattgctcagatattttgtattcaaatatttttaaaatttacttaagagttttctaaaaaatagtactatcatttgcacacagcagatcaataggtgtcagtcaccagcttaaggttacacttgtcaatattcaaacttgaataaaataaacacacatcacaacagcgacacttggcactatcaacaatgaagcttgccctcaacaattatgacgttactggttttagtaacataaaaataccattgctggttgacaggaaggataaaaatgacatcaagaatctcaaaaagttatgtgaggtgccggtcaccacatttaggcactcaggaattaaaaatcaaataaaagcatagcaaggtgatgaatttcctcctggcttccccctctacttgtgccatatgagataaaagagaaggcaagagaatgaacggaagatcatgagatttctttcaaaaactatacacaagctaagctacagacttcacttcaggaggagtaagtggatgcctcattataaaggccactatgccaagtttcttttcacattctgtgacaaagtacccatgaaatactttcactttcctattagtataccagtcaactatattagatgttgcttcacattttaaaagttgtcacataggtttttaccaaagggcaaaaataaagattttttacatcttatttcacagactagaaatggcataatttttgaatagtccagatgaataccatattgaattcaagatggacaatcagatccaaaatggaatcagatagcccatgtaatccaaagaagcatttatgtgagttcaagtatgctaaagtaacaaggcataggagagaaaaatgtcaagaatctcagttaaaataaatgaatggtgtcagtggttatgtttcagtggtgtgctgagcagttatcctcccagttaagccaaatttcaaaatcctctggaaaactatctagataagctgtatgtcgaaatcgcattctaatatggccattgggtttatttttc

SEQ ID NO: 638 - DNA, 348 bp, Homo sapiens
gcaatgaagagatagaaaacctataaagagaaacaaacaaaaaaaggaattgttgagcctgagaaacagaaaagaagattgaagaaaagtgaacggatcataaggggtatgtgggctaccaccaagcagaccaatatatctattgtgggagtcccagatggtgaagagagaaagaggcagagacaactttgaaaaaataatggctgaaaaattcccaggtttgatgaaacacacaaatataaacatctaaagaagctcaataaactccagatgatcaaactttccgaaaaccagaaaaagaatcttgaaaacccgcaagaggaaagctactcattacatgcaaggtgg

SEQ ID NO: 639 - DNA, 1431 bp, Homo sapiens
aagcccaagctgaacactgggcagatccaggagtccatcggggaggcagtcaatggcattgtgaagcacttccataagcctgagaaagagcgaggcagtctgacgctgttgctctgtggagagtgtggccttgtctcggccttggaacaggctttccagcatggatttaaatcgccccggctcttcaaaaatgtcttcatttgggatttcctggaaaaagcacaaacctattatgagacattagagaagaatgaagtagtccctgaggaaaactggcatacaagagcccggaacttctgccgatttgtcactgcaatcaacaatactccccggaacatcggcaaggatggcaagtttcagatgctggtgtgcttgggagccagagatcacctcctacaccactggattgccctgctggctgactgccccatcactgcacacatgtatgaggatgtggcactgatcaaagaccatacacttgtcaattccttgattcgtgtgctgcagacattgcaggagttcaacatcacgctggagacgtcccttgtcaagggcatcgacatctgacctcccagcaccagccagcagcaggactgagaaagactcaccctgcagctctgaccttttttcccaaagggacttaagcgattgtgcaggagtaggagacaaaatgtacactcactgtaaaaagaaaactagaggatttttggaataaataatctattttagagtttatttgctgatttgctttttacacactttcatgtgaaagagtgatagggagagggagcgaggctggtgccgcttattttgaagctggtgccctccctcgccgtggccacatgctggaagcctgaggcctccctggactgagcctgtggcactgcgtgcgggacagttatgtttccttgccccgtcgcattaatgaggcccttccacatcatttttaaactaatgtttttctatattaacattattatggatatttggctttcataggccacacacaggtgtgctgcgcgggaagccccatgctccaatcaaagggatttttagtagtgcctctaagcaagcaccgatgagtcagtcccacgtattttcttttttgtcagtattgtttgggaaggagacatgcccgggatgtgtcatcgtgccaaataccacatttcctgttggcacagtttcacagaagtaaacataagcatgttttaacaggtttttccttttcttttttcttttttaaaatgttttatttatttaacccgccattgtgtgtttttaagtattttctttttttaaggaaaggaaaagcttgtcacaatctaactggctatgttattattattaaatttatgttttgcaacttagaaaccagctacagtatggcccacttaataaaacacctgaaacaaaaaaaaaaaaaaaaaaaaa

SEQ ID NO: 640 - DNA, 2049 bp, Homo sapiens
atgggaagttaagtatttagctacataaatgttgtaagatcatatcttatgtatagaggtaataagaccatttggaattactggactaattgaatagttaaggtttctattcgggacaataaaatgtattttgaaagtgctgctaactattgatgctgacagtgtttcactcctatgagtgacccaaacatattataaatatgtggtaaagggaatggagcctgtggggttgagcagaatgttgtactagctgtgcctggactgagtataacagctttatgattatgagaaaacaaattctttattttttttttctgttccaaagattcatcctatggggtggccataaagtctagaattagatactaatattttgtcattcattataacatatcaataaaccatttgttaaaagatttgcctgggtttccagacttgggtggccaccttgaataattcttgctgtcttctgggaaggatgatgaaatttattcctgctgccttaaaaatatgtatcccttcttcacccatcatgactgtccccagtgagtgtcctttactattcttgggggagtgactcctgtctaacttttcatactggcgagaagaaaagaagcctattttaacactttagtggtgttgaaacacattacttactttctgaagatgtcccagtgaatcctctgtcaattcactgccatatgtaatctatatgataaggaatgcatcttccttctaagtactgcccaaactcttgccagctcctctcccattgtcccttcatgtgaatatttcttggctaccttagtggaaatatagatcagtcttctccccatccatcctctcaaacataatgagattgtttactttttagatttatgcagtgaaaatgcccagtcaggtctgaatcgtcagtgcattatattgactctgagcactttagaatttagagttgcaattgaatgccagctgtggagatggggtgcatatcagatatataaataaagctcaggtttgctagggaaccaggtatagagaaaaataagtctgatatgaggaaaattgcacaatttagagtagttatgccgtagagaaaatttccacaaactaggaaatgtagagagttattctatagaatactcaaaagaggaaagtatgtgatttttgggaaacagggaaaatcttcaaacttctttcttcacttccctttgtgtttagctgaccctccaatgtgatcattgcctttggagtttgggagaggtacgggaagtggcctgatccctgcttccatacttcactcctccatccatccttccctccctcttcccctccagctaaatggacaattctagccaacattgagtcactcaataagtctcaacagtgggtgtgtttgctgagattgtccagcagttgagcagtttggtctcacctccctcgctagttgagaccaaaaagagacaaataactttttcatggtctttgaaacataatgcttatttcgtggtcaatggctttaaaaaaatctgtttcttgttttcttcaacaaactcactagttttcccttaaatgatattgtaaaaattaaagtaatcttgaaaatgttttgacaaaagtaaaattaaagggacatcttttcttgttttgttttttttttctattgccacacatgaccgttccttcacctttaagcaaagagagtggttcagatggtttctaagatgccaacctgacctcgcattctgtcattctacccagctcttaattcaatttgcttccattatcctaacaggcttctttcttacttagaacttggaaaggctgctgtatttaataccctccaacactaacgcagacttaagataggtactgtttattgaaaacctactgagtgaaatgtgcggttttaggaccttcataaacatctcatttaatctttctagcatcctgtgaaacagccatgatttcacgttgataaacaaagaagacaggggtcccagggatggtgaaccatcttgcccagggcttcggctgctggtgaccaagtgg

SEQ ID NO: 641 - DNA, 576 bp, Homo sapiens
gaagaatgaatataacttcaaaatgaggcaactagaacatgtgatggattctgctgctgaggatccccagagtcctaagacaccacctcactttcaaacacatttggcaaaactcctggaaacacaagaacaagagatagaagatggaagagcctctaagacttctttggaacaccttgtaacaaagctaaatgaagacagagaagtcaaaaatgctgaaatcctcagaatgaaggagcagttgcgtgaaatggaaaacctacgcctggaaagtcagcagttaatagagaaaaactggctcctgcaaggtcagctggatgatattaaaagacaaaaggaaaacagtgatcagaatcatccagataatcaacagctgaagaatgaacaagaagaaagtatcaaagaaagacttgcaaaaagtaaaatagttgaagaaatgctgaaaatgaaagcagacctagaagaagtccaaagtgccctttacaacaaagagatggaatgccttagaatgactgatgaagtcgaacgaacccagactttggagtctaaagcattccaggaaaaagaacaactgag

SEQ ID NO: 642 - DNA, 1287 bp, Homo sapiens
gaaaaccagcatgtacccaccaccagttcttcattaactgaccctcatgccggagtgaaggcagccctgttacagctgcttgctcagcatcagccccaggatgaccccaaaagagaaggtgggattgattatcaagcaggagacacttacgtgtccacttcagactacaaggacaactttggatcctcttctttctcttctgctccttatgttagcaatgatggtctaggaagcagttctgctccaccactagaacgacgtagtttcattggaaattcagatattcagtctttggataactacagtactgcttcatctcattctggtggtccacctcagccttctgccttttctgagtcatttcccagttcagtagctggatatggagacatttacctcaatgctggtcccatgttgtttagtggagacaaggaccatagatttgaatatagccatggtcctattgcagtcctggcaaacagcagtgacccttccacggggccagagagtactcatcctttgccagcaaagatgcacaactataactatggtggtaacttacaggaaaatccgagtggccccagcctcatgcatggacagacctggacttctcctgcccaaggacctggatattcacaaggatacaggggacatattagcacatcaactggcagaggcagaggcagagggttaccatactgagtatctgtttttcctcaggcacatcatttttatctggaaagacttttctagctgcaatttaaggcagcaatccaagagacttgaataataataattcaacaacagctttatttttatgtggagaagggtcttgcatacaatagtttaaaaaagacaaaaaaaacctttgcttaaattcatgctgttctaaaaactagatcgattgtacatcttcacaaattctagttaacaattttattttgtattcttgcagttttaagtggatgctaattttaggggcataagccttttatggccctcttgcagatcttctgaactatgcacatttgtgctttttttgtaagtttggaccaacttttatgtaacaaacagcccctccccacttccagttttacaacaatcagaaagggcactgatttatttggtatttttctttttacaaagctacctttagtcaaaggtcactgtcagtctttgcacctgctttcagtgttattgtgaaaggtgtactttgtgctcatttcagaaaataaaacacaacctttctcttgatgcaacggttttataaaaaaaaaaaaaaaaaaa

SEQ ID NO: 643 - DNA, 1242 bp, Homo sapiens
ttttttttttggttgcaacatgtttaatttctgctgttcacactggacactgcatcatactagtgtcggcccctgaggcaccccttcctcgcctgcacaaaggaggacgagagatgaacattcagaggcagaaaagggcaataaaaaaagagctgtgtatgtgacctccaactactcagaggtgggggaaaacagccccatctgtcttgcactaaaaggctcaccaagggcaggtgaggggcaaatgggtaatactgggagggggtaacacaaggagaagcgacatgagtacaccaagatgtcaaaagctgcgacgggctggatgagggagccccaagagggcatatgctcagggtgccagccggctgcttttccttgtgacagccttgcaaggaagctgtgaggccaggacactaggccagtggcatccacactgcgtccttcaggaggcgaggcctctgcgcctcattctccaggagggaaaaccagggaccaccccgagctctcccaagtggcaggagttcaaatcagggccagtggcgaaaccaggaggcctgcctgaccaactgcccttcacatgatctctcttcaatctgttgcccggggccccgaccatctgggcagaagcggatgtgctgacttcactttcttttgtcctctacacacacgtgcaggcgttaaggaggcaagcaggtgaggggaaaggaacacaagttgacctgcccagcctgacaattctgaagaaagactgtttcccggggcatgaggaaaaagaagaaaagctgcggcagagtctcttcggaggcagcacccaaggcatccgttgtactcggggcccagcctttcctcccctctgagtcctccaccaagtccacagcaagcaaacgattcaccagaaaaaaacagaagacacaggaacagaagagctgctgatcactggctttggtgcttaagtgatgaggcattttcagtcacactcgcactgatctggctcctgggaggagacgccacggcatcctcccagggtgaggctctgatgaggctgcacatggacagggtcccctctcaggtgggaaaggcagcatcctgcccattggaggcatgggtctggagagtttctacccaattcctccctcaatcatacctggaggtgacagctacccccaccactgctcctccaaaggcctcgagataaaaatccctgaaaagggggcaggggtgcttccaggtcaagctgctggg

SEQ ID NO: 644 - DNA, 1604 bp, Homo sapiens
  misc_feature (1)...(1604): n = a,t,c or g
gtctcacaattcaataattaattacaaagactgagacttacattaaaaaagtaaaaaccagaaccccccaggtgccgtcttctgctttattgacaggtaaattgttcaaaaatgttctcacaattcaataattaattacaaagactgagacttacattaaaaaagtaaaaaccagaaccccccaggtgcccatccagcagaaggcccaggagngacgtcggggtggcagggctaggcggtgctgggccactcagtgccgacttggggaagtgcacgtcctgaacagccttgccaagcagccgaccggtggggaggacaggggaagcctggcccaagctgtggacaagctgtgtctgccgccacagttaatcacaagcctctgacgacacagggccacagagctggtcactcaacatctggtacaaagggtgaggtgaaatccacgcgcaggggattgctgtgccgtggccggggccagttgtgcaggagtgtgttgggtgggtctacgtgatcatacgggctactaatcacgggggctccatgcgggggcaggactggtggggggggggcgggcagggcggggcggggtggggtatcccagtggctgcttcgtgggcgccctggggctctgacttccctcaagcccncaaagccacagggcctgcctgcaccacgacactcgctggttttatggcaggaggcagaagccgtggaagcgaatggaaaacagcacagctgacttcacagtagtagatactggtgacacttcatggctgcgacccagaatgaacttaacgcacacagggacgcagggtgtcactggtcctgggcctttgtccatgactaggtggtcagcaggacttctgcagctgactgtgcaatggctaaatgaaaaaaaggccacagactaacctccactttcctgtcttcaaaattctagtgacactgggaatgctataggacctcctactattctcttaaggtcctaggaaagtttcaggaactagggaaaagactgggtactgaggctgtgtccccagatgtctgcttccgaagcagccgcgtcatgacgggtttctgctgaggaagtggtgttggcagggccccatatgccctctcgggttgtcaggggtgggagacaggctgtatgggggtccttcatgtgcagatggaacagcatcgcctcacagctgtgcagacgaacagatgtggtctactgccacgaacaatgcggcataaaactgatcaatattataataaagatttgtcttcttcatctccatatctacaaagtgattctacatttccttggacaacactggagggcccgctcagtcttggcactgacgctggaggccatctccagctccctggcccctgtggcgagctggcggcttcaggtgtcacaggccggctgctccaggccttcgagggggagctggctcctgtggggggagttggggctcggtgggccgctggggttggagctattcgatggagttgagtgtttggtggagtccgaatcaggctgtgaacaggaagagggcagggtgagcacccgctgccctagcctgggcgagacgcgtgcccagctggatgcaaat

SEQ ID NO: 645 - DNA, 837 bp, Homo sapiens
agccatctttctcttgccgcgtgctggtgttggaggaccctccctgcttcagatttaccaacagcatgaatcaagaaaagttagccaaacttcaggctcaggtccggatagggggcaagggtacagctcgcagaaagaagaaggtggtacatagaacagccacagctgatgacaaaaagcttcagagttctctaaaaaaactggctgtgaataatatagctggtattgaagaggtgaacatgattaaagatgatgggacagttattcatttcaacaatcccaaagtccaagcttccctttctgctaatacctttgcaattactggtcatgcagaagccaaaccaatcacagaaatgcttcctggaatattaagtcagcttggtgctgacagtttaacaagccttaggaagttagctgaacagttcccacggcaagtcttggacagtaaagcaccaaaaccagaagacattgatgaggaagatgatgatgttccagatcttgtagaaaattttgatgaggcatcaaagaatgaagctaactaaaagtttggtttttggaagctggcatggactagatttaacaaatcagctatgtggttccaaagttttacagacatggagaacatcacctgttactagttcagtaatataaatattttgtatattaataatgctgtttgttcagcatttttcggtcatttgattttgcattttgcacttcctcccaggatatttttttggtcaaaatatgaagtattggtgcagtttgagggtgttttggtttttgattccctggtttttttgttttttgtttggggtatttttggtgtatgtatgt

SEQ ID NO: 646 - DNA, 413 bp, Homo sapiens
tttttttttttttttgccaatggaggtgagaagaaataacatgtgactttttcaggagaaatctccaagaaacagcgttctattccgcatgcttttttctcttttctatagcaatggggatcttgacggtccctccttccttctggattcctgtgttaggatgacacagcacagagctacctctcacctgaccagtcatgagatgtaaataaatgaggaagaagatttttgagccactgaaatttggaggttgtttgtcaccacagtttaagctagcccccactgactgatgcacggctgaagaatgagtccgaactggctctggacaagacatgtgaagagcgctccaggctgagtaaaattcaagggttgcctcaaagataacagtgaggcacgatatgttattggggtgg

SEQ ID NO: 647 - DNA, 2248 bp, Homo sapiens
gtggttaagtagtgactaactgtgcatgtccttcatggtaggtgagcaccagtctccatgatcaaaaatgccccagtttcctttgaaaaagccactagttctgtgaattgtccttttccctcctgcccctaacagtcctacccctctagcctacattagcatatttctcatgtaatgtattttgctggtaagctcatccattagctgcgtccttcagctattcctttagattggaggaagtggatatgaagatggattgattcagctcaccttccatgattgcttttgagggaaaagctacagtggccacatttcagatgttcacttttgcaatttgtggagggtggagagaggtagacttttgttgtgtgttttataaagtactctcagtaaggagtgtttgagttgaagagtcatctgattcgaggccactcatgttctttgtaaacttaaactttgaccaagaaattcttcacttctcacttcttcacttcttcccaatatacagtaagtacgtgagccagtcatccatacactaaggcctagttgagaaaaacctttgattcaggatggctgggttactaaccttgaaatgtaagagatctggttttgaatgtaaaagttgcaacacacaaacggaagtcttaaaaactttttgctctggtcagttacaggtggatccccaataatctgtttttggttttctgatggaaataatagaattaggggaaatcaaatctggttggtaggtgtctacagtattagaagagggtataagggcactgtttaacactaagttctaatacttccagaaactgtgcattccagatctacatactaaatgctcttatcattttgaaatgggctcttgattaatagacccatattttttagtggcttctatgttgtatatttgtctaaaatgaaagctcttttgcgttctaaaactacaatatatgtcatcttattttccctgagtatccaagtatagtgcagattctatgtaaaactactaaatgacactggaatatgtttagtagattagggggaaaaactataaaggtttatacaattgtttgtagttacatttaggatggacttatccctttggagaagagtgaagtttgttttttcgccatgtgatgaagaccactgtgattttttaaaaaagtagataatacttaaaatggcgtaataattctgcacttgaatttgtactgttaacagcacatttggaagattttaaaactttttattgtcttataaatagcattcacttattattttggatatttaagggttccattaagttaacactgtatttggacaaagtgtgaccaaattagccagtctgttttcttccatgtttaattagaagtgagaggtagaagtacttcaaattcaacaggccagcaagcaatcggcttaaaattccctttcttaaatgttgtgctcttatgttctcggctttttaatgactttatttttacagtacttgttcagtcacttgagatgaaatgcttggggtagcttttccatcctcaaacttaatgtttttactagttcatagtgtttgggaacagtatatgccaatcactgagactgcatcagagtttgcaattttgtatgtttcattgccaaagaaggcttagtggttgttgactgtagtataagtcagctttctgtagcataagatttgattttcccatacttacttcacttgttatacatcactgattatttgggttaaactggactcatttcaagcagtttgcttttgttcaaatcgtgatgagaaacctaatactgtaatttgatttgagccataaaacacattttaatattagcttgtattatagttattaagcttgtttttgtggaaaaaaacttactaaaacctaggtaactctagattaggccagttcaggtgtattttgtatcttagtaatggatcatatcgtaaaaatagagataagttgggaagatatattgattatgctgttctgttgagggaaaggtcatgtatttagaaatttaaacttttggttattgtgttcacatcatagtattcaagcatcatttatagtttggttttgagaacttttctggtattacgtttatggcaaatgtataaaagaaacaagttttggttatatttttatatttgtaaagtaagtttggttaaagtgatcactgttctttttttattttattgtcatttcaataaaaaatatttgaaagaaaaaaa

SEQ ID NO: 648 - DNA, 2124 bp, Homo sapiens
tttttttttttaaaatggtagaatttattttaatataatgatatatatgtgtccacatatactattttaaaaataagcatgtaaattataatcattataaaacataagttagtcctaatttaatattatcagagtaaaagagcacatatagaagtcagtctaactttgttgcacttgtcttttaaagttagaatacataaaagatttagcacgttgtattttatcttatttcagttttcatgttatcatcaactataaatacccttaggaatgtaccaccttataacttacattgaaatagccaatatttcttagtagttattaaagtaccattaaatcacctaaaacaaataatctaaaaaaatactagtttaaattaaaaccctgaggaattaaaatttgttttacacaatagttttggttaagtgcaatttcatgtacatactactttgtttaaggatgtacttggtaaggcatagtaaaaataaaatctacgtaagtaacaatctaatactatatttaatttgttgctacaaagttgttttgtttctctaaaaagtagtttttgcatatcattctggacctcttcacccatctgctggcttatttgctttatatacaacagttaaaatttgtgcactaagctgagctgccttcacaattgtggttcagacaaaatgcacccaaagaactacatgttaagagagttcatgtccatgctcaaccatggcttgcacaaattgcttcgaagacacgatccatgtaagtggactgtcttggccagattccctccagaaaaccaatatggcctccataagaagtaaggaccaaagcaacattaggattttgcttagcagtttctattggaatagcatgactgggtgagaaaacatcatccacagaatttagacacaatactggaattcctactgacttcagtctaggactcggactggcatcagtataataatcatcaattgtttggtatccaaacatgactgaagtgaatcgcttatcaaactctctgatggatttagccttcatgacatgatccatatcaacttgttttacaaacatatgtcggtgcttattaactgaagactgaaggcaggttgtcaaatagtaattaaaaagtagccagttcagtggtttttccaatgactctgagcaagcgaaggtgttccaaccaacggaaaaagttgcagctgccatcaaaggcgttttggacccaattttgcccaagtaatttagaagcagcattctggggaaaaataattttgaaggccactgcagctggagagagcaataagtgattatttctgtaactggagtgatgaaagtcatgctacaagttcagcttcagaacgcagctccagggatggctgggagtgcgtcaggaatcagaaggtcaacatggcagccggtgagtgatgcaatcgacttcatgggcttcagacaaaccttcaggctcacaaaatccgcagtcacagagacccgtagttaagaaaaatattaaaattcacctgaattaattctttccttccttcgttcattcaatcaaccgcatttaataaaatatgataaacataatcagacatttatttaaaaagtgtccatacagctagcttatagtcctctcaaagagacagccaataaaatagcttccctctcagagattattttagaaagggaaaaccttaccctcccattgaaacccctgctgccaggaaaggagcagaagggtacaggctgtgtacatggtgaataactgtctccaagtcttcagtgttagcacaacaataagtccttggcgtcaagagattctcccccgccactcctctgttgttaaaaaccacacatctgtatcctaattcttcactaagatggatcatatgaaggatatatgactccttgcttgttcccgtgaggccaggcaacaataagatagtaggtctggtgctggcatccatataacacgtactgttatcattatcaaaccagtccagtgaaatctgtcctccatctgcagttttaataagttcattcctgtactgcaccgggggcttcgaagtgatgaaaggtctaagcagggtctgtcctcgaccctcccagcaccagaccgtc

SEQ ID NO: 649 - DNA, 381 bp, Homo sapiens
cggcatcactgtactccagtctgagtgacacagtgagactctgtcccccccgccccccgcaaaaaaaagatgtatgtagtgctgacaaaaaagtttcatatttggcatatttcttttaccctcccaaatattatcaaaaggtctgattctctgcgtaacagaaaagtgacaaatttcagttgctactgttcgaaagtttcataaatttaaaaagccacatcctgctatgctttcaaaccatttcactgaaacctagttcctatcaaatattaaaaataaatcatacatgtgatccagattccaggggaccagaactatagtgcttttagaaagtgactgtttacagagatgacttacaaagaaatgcattttataacaacc

SEQ ID NO: 650 - DNA, 132 bp, Homo sapiens
caaaattatgtgactcagtttattgctatatttgccttgttgaggttgtcagacccacagtatctgtgcggattactggtacagtattcaggggatgcagagctcttagatgtggagggcttgactggttgt

SEQ ID NO: 651 - DNA, 789 bp, Homo sapiens
  misc_feature (1)...(789): n = a,t,c or g
ttttttttttccagggaaaagagagagtttattttatacagtagttgttttattttatacagtagttgtacagtaattgaggaaaaatgttgtcaggtggcagaaaacaatggagccacctagaagctggctgatgcagctggggcacacagaggaggggcctgggtaccccttttggggaaactgagacgaagctatttagaacagcttgaaaataagagacttttctagaatggggtggcagctaaagtagcttctttttctttctttcagaatgctcagatgcatcagttccttaatatacacgtgaaatttgaaaactgtacattcggtgagattaaattttatatacaactagcaattgtccagctttgttgctcattttcaattaaggctaaagtgttcaacatgagaaaatgtgatacatttgatacagtgtggggtgggagtggatgggcagctcttggtggtactggaccttccacaaggctgtgtccacccagaatccatgctggcaggagggaggcagaggtatcaaaccaaacctctcaccaagcggcccaggaggggcagctgttcctctcgtgacaggcacaggcccatgagacagtgtcttctttttgagcgggagctggtccgggtctagttcacttcaccaagaagtccatgctgtcgcaatagtttgttaagtctttcaatttcttgttccttctcagagcagctgaactcaaggtgttgaatcttggcggccaattgnacattcntctgttttngccttaagagttgccg

SEQ ID NO: 652 - DNA, 1178 bp, Homo sapiens
gggctgtgtgcggcctggggagccgtcttggcctggggagccgtcttggcctgcgcgggtgcttcggcgccgccaggctcctgtatccccgtttccagagccgcggccctcagggcgtggaagacggggacaggccacagccttcctcgaagacacccaggatccccaagatttacaccaaaacgggagacaaagggttttctagtaccttcacaggagaaaggagacccaaagatgaccaagtgtttgaagccgtgggaactacagatgaattaagttcagctattgggtttgctctggaattagtcacagaaaagggccatacatttgccgaagagcttcagaaaatccagtgcacattgcaggacgtcggctcggccctggcgacaccatgctcctcggcccgggaggctcacttaaagtataccacgttcaaggcggggcccatcctgggagctggagcagtggatcgacaagttacaccagccagctcccaccactcacggccttcatcctgccttgacagacgctgtcctccagttccccaagtccctccaggtcctcaccggtccctcccagccctgcccactctggagcagcgtgcccgtcgggaggcaagatcagctcggcgctgcatttctgccgggccgtgtgccgccgggccgagagacgtgtggtgcctcttgtccagatgggagagaccgatgcgaacgtggccaagttcttaaacagactcagtgactatctcttcacgctagccagatatgcagccatgaaggaggggaatcaagagaaaatatacaagaaaaatgacccatcggccgagtctgagggactctgaaatcacagaaagtgggagcttggaggatccctccatggcgatggccgtggagagaggagcttgcccttctggggtcctggttcctgaagagctcacccagagaggctcaaagcagccttttgtcccagctcagctttgatctacacctcttgccaccttcctcaagggactgtgaccctttggggattctgcccctgaccctgcttccccaagctctcctgggtcttggagggatgtgggaatgaattggcattgcaggaaagacaggtaaagtgattgctgcaatgagaaggagctgtgcggaaaaggaataaaagttggaaaggctggaaaaaaa

SEQ ID NO: 653 - DNA, 1667 bp, Homo sapiens
tttttttttttttttctggatacacattagtaccaccaattttatttatataagaaatgcctggtccactggacttttcaatttaactcagtaataattactgctgtttcttgacagaccagtgatatttcccccatagttttaaagtacaaaaaacagaatagttaggggaaaaaaatctcaagtataaataatgcaacctttaacctaccaagggtcactaaattgttaacactgattattataaatgattcaatttatttaaactaaaaagcattaattaaacatttcctcttccatttgggccaagggacatgcttaacaaaacacaaaaaagcaatagaagcacaaagttgtatgattttttcagaaaacaaaacaaaacaaaaaaacctcgattcaaaaagggaacacattttggaagctagtcagaataaagatggaagaaactactttaaaaagaaactatttgtcagttaattgataaaaattttctagtaacagtaacttttactggagttacgacagggatgggtcaagacttgtaatacatggtggaagtgctgatgataggagtgtattaaagggcagtaaccgaatgttttgactaagcgaatggtaatagctgcccttccacttatttgttcctttgtttataattaagctgaaaattataggactaaatttactttcatgaatctgctggtattgactttgaaattttcatttgggtctgggggttattaaaacacattttaccatgtcctggaatttatattaattttgttagataatgaaatgctaaatttaatgccaaccatattcaataaagtaatatctcttatggttttcaggcttatttggatgactaaggaacaaagggaagaaatgagacaaagaagtgacaatgggcactgtggacagatcataatagtctataatttctaagcagtgtacttttcatgtatgaccaagtaaagatccctaaaattttaaaacaggttttctatgggatggcatgaaatccaatgttcatcctttaaaactgctgggagaaatggctgccaaggtcttttgtatcaacataatatgaatgaggaagtataatttgttccatgtgctcaaaaatatagtttccccatgacagacttttaatttgatcaaattctggctaaagtggttgaacccagaagaaaaactatctagtgagggcacacagagcctctgaaatagctctgtcttctgattcagagctagtaaaggtcacgctacagggaccatacatgtggatgcataataaggcatagcttcagctgttaaggttgaaatatgggccagtgtattccacatctgttccttaaaaagttaaaaaaattatcagaacctcttccatgaaattcagccggtggtgtgaagtgtgggattccttgttacgagagatatgctcaggactctaaagcagcagcaacttaagaagttagcaatgaaactttggcttaaaataaaaacaaagaaaagaaaaggtcaaactggtgcaagttgtctcctgaaagaggtatgtgggactgaccctcataaatgtcatccaacgtaagtttcccctgccttcttttactgttatcaccttcattgcacaggagttatatcattctgtatggttaagtttc

SEQ ID NO: 654 - DNA, 866 bp, Homo sapiens
  misc_feature (1)...(866): n = a,t,c or g
gagaaactggatgtagggggggtatgaaaaaatcattcgaaatcggttttaggggtataaggttggataggaatgttttagaaagaagaatgtaaggcagataactaatttgtcacatccaaagtataaaactgctactttttccctagaaaagggaagctcattttaggcagcctaaaccagtaagattttcttcctcctccaagtgcagatttttgtacctttcgtttgtcaaaacattctttggccctatgcatgccagagtgatatagaaaggaagttaccacatttttttgagaacaaatcactcctgataaaatttcttagacaattgataatcattttaagaaggaaatttaattgtatttagctctgtgtctcgcccctttggtgtcactcttctacctcttccatcactatagctaaatatttagaagtatatcttggacacctaggcacaaatgttttggttaagtatcttaaaactgatggatggtatggctggggcagcnnnnnnnnnnnnnnnnnnnnnnnnnnnnnnnnnnnnnnnnnnnnnnnnnnnnnnnnnnnnnnnnnnnnnnnnnnnnnnnnnnnnnnnnnnnnnnnnnnnnnnnnnnnnnnnnnnnnnnnnnnnnnnnnnnnnnnnnnnngcgcatgctgttagtcctgtctacttcggggagggctgaggcnnnnnnnnnnnnnnnnnnnnnnnnnnnnnnnnnnnnnnnnnnnnnnnnnnnnnnnnnnnnnnnnnnnnnnnnnnggcaacaagagcgaaantcagttttcaaaggaaacaaaacaaaaaaccttttggtttagttaccggaagaaactttttngcatttttctnttttncagag

SEQ ID NO: 655 - DNA, 700 bp, Homo sapiens
  misc_feature (1)...(700): n = a,t,c or g
ggaaataaacaatattttggaatcaaaatttaaatctcgggcttcaaatggcccaggccaaacccagctcttttttttttgcagatgcagaagagagtatcggggtcactatgtgacatctgcagctgccaagagtgtccatgctgcccctaatcctgctccaaaagaactgacaaataaagaggcagaaagggatatgctgccttctccggagcagactctttctcccttaagtaaaatgcctcactctgttccacaaccccttgttgaaaaaactgatgatgatgtcatcggtcaggctcctgctgaagcctcccctcctcccatagctccaaaacctgtgacaattcctgctagtcaggtatccacacaaaatctgaagactttgaaaacttttggtgccccacgaccatactcaagttctggtccttcaccgtttgctcttgctgtagtgaaaaggtcacagtctttcagtaaagagcgcaccgagtcacctagtgccagtgcattggtccaacctccagccaacacagaggaagggaagactcattctgtaaataaatttgtggacatcccacagcttggtgtgtctgataaggaaaataactctgcacataatgaacagaattcccaaataccaactccaactgatggcccatcattcactgttatgagacaaagntctttaacattccaaggc

SEQ ID NO: 656 - DNA, 1369 bp, Homo sapiens
  misc_feature (1)...(1369): n = a,t,c or g
cggaaatctgaagaaaaaacagatacaaagcgaactgtgattaaaacgatggaagaatataataatgacaataccgcgccagctgaagatgttatcattatgattcaggttcctcaatccaaatgggataaagatgactttgaatctgaagaagaagatgttaaatccacacagcctatatcaagtgtaggaaaacctgctagtgttataaaaaatgttagtacaaagccatcaaatatagtcaagtatcctgagaaagaaagtgagccatccgagaaaattcagaaattcaccaaggacgtgagccatgaaatcatacaacatgaggttaaaagttcaaaaaactctgcatctagtgaaaaagggaaaaccaaagatcgagattattcagtgttggaaaaggagaaccctgaaaagaggaagaacagcactcagccagagaaagagagtaatttggaccgtctgaatgaacaaggaaattttaaaagtctgtctcaatcttccaaagaggctagaacgtcagataaacatgattccactcgtgcttcctcaaataaagacttcactcccaatagagacaaaaaaactgactatgacaccagagagtattcaagttcccaaacgttgggaggttggnaaaggattggaattaacaagacggtaaagactctcccttcttcgggattaaggattctggcatctgggaccaggaaaaataaaccaagggaagagagatttgcctaaaaaaggaacaggagattccaaaaaaagtaattctagtccctcaagagacagaaaacctcatgatcacaaagccacttatgatactaaacggccaaatgaagagacaaaatctgtagataaaaatccttgtaaggatcgtgagaagcatgtattagaagcaaggaacaataaagagtcaagtggcaataaactactttatatacttaacccaccagagacacaggttgaaaaagagcaaattactgggcaaattgacaagagtactgtcaagcctaaaccccagttaagtcattcctctagactttcctctgacttaactagagaaactgatgaagctgcttttgaaccagactataatgaaagtgacagtgaaagtaatgtttctgtaaaagaagaggaatcttcaggaaacatttctaaggacctgaaagataaaatagtggagaaagcaaaagagagcctggacacagcagcagttgtccaggtgggcataagcaggaatcagagccacagcagccccagcgtcagccccagcagaagccacagtccttctggaagccagacccgaagccacagtagcagtgccagctcagcagaaagtcaggacagcaagaagaagaagaaa

SEQ ID NO: 657 - DNA, 655 bp, Homo sapiens
gttaatcttaaaatactgcatttttatagcttctcagagcatgtggatgggatgggattttcgttattttgctgggtcagcttatctttaatatatggactattcctataaaccaaagtctctgacaagtgcacctaatttatattgtattttaactacagtgtaagtttccattaacaaaaccatcctaaagcgttaactgctcataattttaatcagctacagttatgaaaaaggaagaattttgctctaaagattattaataagcttagaaaatcctgcttttaccctaacagaatgaagtggggttgaggggcggtagtatgaacagtgattcctaactctatggcgtaaattactttgaagagttcattttggaagtaagggaatcccgcttcccttggtgttgaagatctgcatctgattttgaaacgtcccagatttagctttcaaggtgcgtgcatgttgaatgatccagaagcaacgaaaactctggggtgagggattgaaaaaatctgaaatcacagttggatttttaaattcaaccatcaaaaatatgtactatcagtttttttttacattgatgtgaaataagcaaattttcatgataattaagctgcaaaatttaaagttatcaagtaaataggaaaaaaaa

SEQ ID NO: 658 - DNA, 765 bp, Homo sapiens
ggccgcgtggctggaagacatggccactccagtcggtgttgagcacggcgagcagtctcaggcctttagtgatgatgattaaaggtggtggctgtggccttgaaaacagtcatgtgaaaactcatcaccttaaggtgttaagtgtaaggatcttcatgatgaaatttctgtaaatggtgcagtcagcctcagtttccaaagccggaaaaggatcctctagtagccacggtgtggcagctgctcctgaaccaggacctggacccggacccaaagtgccatgtctttaatgttagctcccagcgatgccagatgggatcagcacagccctgcctctgctgctaattgttcctctaaagtaatcgccatgcgttcttcgggcttcatctttaaaggaatgaagcaactgagattattctggaaaaccttttggcagttagtgaaattagagtacaactaagaacattttcagacctccactgtggatgacctgggtataatctcacaaatcgatgggactgcaaggattgtaaactgaaatgaacatgagtatactctgttggaagagcctaagaggaaactgatgccatgagtttcagagagtaatgcttaaccccagttacacaggatgccgtcttgtgtttcctcttgtttagttacccactacagtgattttgtgatctgctaatgggttgccacccacaaccattgctttagcacttttacttcaaatcaatgaaggattgataaaagttaaaaaaaacaaaa

SEQ ID NO: 659 - DNA, 61 bp, Homo sapiens
gggtgaagaggaagcagtacgatgcctacggctctgcaggcttcgatcctggggccagcgg

SEQ ID NO: 660 - DNA, 409 bp, Homo sapiens
gtcggttcttgtcttcaagagcttataaaaaagctaaaaatacggaaataactctaatgggaaccactacaagctaaatgtcattaaagtgaatcatgcaaattatggtaattgagagaaggggcagattgcatttaattagaggggatcaagaaaggctttgagaagctgccatctgagctgagtctgagagcttggcctgcagagctgggggtgggtggacaggccaggtggagggaagataatgagcgcagatagaaggagagtgggcagatgcctgcggtgcctgttttggccagagcctacggtggtggggaaggtagtgggaaacaaacctaggagggagggtggggccagcaataaaatatctttagcctgctccagcagtctgggtccagcagtgggttgg

SEQ ID NO: 661 - DNA, 378 bp, Homo sapiens
  misc_feature (1)...(378): n = a,t,c or g
gcaaccattaactcttattggacaagctcctcctgtgagtggggcctgtactcacttcctcttagatcataattccatcttcaagagactgatttccagaatagtaatctttttccagcgttctctcttctccaatgccctggttgttatttttcccacctctcctaatattgatcttcttgtcttttggttagaactgcaacttcggagttgagttcatttcctattgctgctcaattcagtagcaacatagctggcttgttcccatgacccaggaagtataagtcattgacagtttcctgagtggctctgccaatccataccacccttggtactgtgaaaaggcttcttggcaaccnnnnnnnnnnnnnaaggacg

SEQ ID NO: 662 - DNA, 495 bp, Homo sapiens
  misc_feature (1)...(495): n = a,t,c or g
ttttttttcaaattacaagacctagatttagaattcagagctgcagatttaggtcccggatgggtggagtagcagcagttgttacctgcaattgtgagcattttagcgagagaagggaaagagaagtggagattctcatgtctccatgtctactcaatgcacactgttactctgattaggtttctgggctccatggtctctgaatcagtttcagttctgaagataaaagagtcatggaatgaagtaaaatgattaatatctgccctataaagtttgtagaaatctggtctagcccctctagaagtgactatagaggactataggacaccaaataggcagagacacaattctgcctgcatatttagggtgacagccatgcactttaggagcataattgtggagttgactggaagactaagaggggnaagtcccctttacaataaagcttggttggcaccctatgtgtttatattatgtctggtaattctgtcgagc

SEQ ID NO: 663 - DNA, 615 bp, Homo sapiens
tcggaccaaaaaaattatggcccatgaaaggagagagaaagtgaaacggaagccgtcagccctctcctgagtacccacgtcctagggaaggagaagatcgccagcatgctgccggagcagctctacttcctgcagagccccccggaggaggagcccgaataccaccccgacgcctcagcccaagaatcatttgctgtttcaaatagagaactgtgcgatgatgagaaagagttcatacattttccagtatgtgaggggacctctcaacctgaaccctcgtgttcagctgtcagaataacagccaataaaaactacaggagcaaaacctctcaggaaggtgctttaaaaaagatgcatgaggaagaacaccatcaacaaatgtccatcttacaactgcaactgatacaaatgaatgaggtgcatgtggccaaaatccagcagatagagcgagagtgtgagatggcagaggaggaacacaggataaaaatggaagttctcaataaaaagaagatgtattgggaaagaaaactacaaacttttaccaaggaatggcctgtttcctcatttaaccggccctttcccaattcgccctaagactttgggggtggctctcct

SEQ ID NO: 664 - DNA, 367 bp, Homo sapiens
gaatttatacaacccatgtacccaacacttgaaagatgggtggatattttcccaggaaacagattttgggcaggacattcccatgcactggaaatagcatgaacaaatgcatgaaaattgcctacaacatgcctggcacatagctgtgaggtaccctatgagttgttgacttgaaaacatggaactgcacagggcattcaggcaagtgcaagtggttcaggggccagtgcagagcagagtgctgagtaaagatgtcagaaaaggaaagcaatggtctggtacaagtcttgtatagaacaagaagtttagacttttgaacaggcaatcgagatttggggttcagaaagataaatcccaaaagtatgga

SEQ ID NO: 665 - DNA, 595 bp, Homo sapiens
aaaatttaaggattgggaatattcctcttgtgccaattaaaagcagtcgttggaagcagaaatgaatttaaagcattacacgttatcatggcggccttgctttttccttccagtattcatccaattgcgctgatctcctgcatccacatcttgcgtaatccacaaagcagctatggtccagggctgcaaaatcgtcctgcctgattcctttagaattcatactacctcagaggagcaaacctaatcccctcagcctaatcctacctgtttaggatcatctaaacttgtccttcagaaagcttgatcagtttaaaattgctttctaaatagaaatgaaatacgtgatatgagagaggttaaaatactgcttaaaaagggaaacactcaatttagtaattcggttgcctagatgaaatcgagtggctattgatccgtgatgtttctagatttttaagactatgtacttcctatttctttggaaaataatcatccagtttgatgcccattacaaattttcctgctatgaaagaaattctatgcgcggcagttttgcaataaaacaacccgggcttcgcaatgggagaacttcggtgcg

SEQ ID NO: 666 - DNA, 996 bp, Homo sapiens
tttttattttttttttttagtgtgattgcatttattcttataaatgtacagagctgtagaagtgcaagccaagagttctatagagtagtacataaacaccatatggtaccactcctgctgggaggtaagcctggatacacccctctcctcaggaaactgtcacctgcagaacacacagcactcagaattaaggcagtttggccctgggacattggtggtattttggtatgtggccactggccctaaacaactgaccatttctaccctgcctcactgcactgtcccaccaggtccctccagctttttctacaaggtaacaccctcctaaatggggtcagccagctcagaaacctcttcttcagggacagttgcagctgaatatgccagagctgattattacaacaacgatgcagagggccttggttttggggtcctgccaccctcacccctagaagctgctaaacacccaggccattctgccctgaccacctccccaacagagatgtaggtctatacttaccttccacagccacctcccagcacacactgggtccctctacctgtgttgctgtctttctttacactgtgctacatttgatcccgtttccacatgtgcacttcacctctgcagacacaagaaaggcctggacatggtctctgcagatggggaaggggttctggatggagatgttcttgagctctacaagcattatgacaaagtgctcagaatgttggccactgcatagagctgcagagtcccattccagaacagagtaaccatctgcctctcttcccaagaccccaagctggcatgactctggtctctgtcctatctctctgctgtgatgctcctagctagtagagtaagtcagcccccagatactgtatattcctctcaaccttccatggtttgagaaaaacacaaagatagatgtccatcaggcactcacaggattaccatcgtaaggatggttgtcagacaaataacaaataagc

SEQ ID NO: 667 - DNA, 498 bp, Homo sapiens
ggaccgtagacttccctttccagccctacaaatgccaacaggagtacatgaccaaggtcctggaatgtctgcagcagaaggtgaatggcatcctggagagccctacgggtacagggaagacgctgtgcctgctgtgcaccacgctggcctggcgagaacacctccgagacggcatctctgcccgcaagattgccgagagggcgcaaggagagcttttcccggatcgggccttgtcatcctggggcaacgctgctgctgctgctggagaccccatagggccgagttagccgaatgccacctgcctttgatacgtgagaacgttgtctgagaaccgtgacttctgtgcttgcttgtgtctggtcagcttgctacacggacatcccaaagattatttacgcctccaggacccactcgcaactcacacaggtcatcaacgagcttcggaacacctcctaccgcctaaggtgtgtgtgctgggctcccgggagcagctgtcat

SEQ ID NO: 668 - DNA, 789 bp, Homo sapiens
ccgggtagtggcgtgctgggcgtgcgcggctgcggtacggcgtgttggtcccagcggttcagctgaggtagggacgtgctgtaggccggaatgttaccggctgttggatctgtggatgaggaagaggatcctgcggaggaggattgtcctgaattggttcccattgagacgacgcaaagcgaggaggaggaaaagtctggcctcggcgccaagatcccagtcacaattatcaccgggtatttaggtgctgggaagacaacacttctgaactatattttgacagagcaacatagtaaaagagtagcggtcattttaaatgaatctggggaaggaagtgcgctggagaaatccttagctgtcagccaaggtggagagctctatgaagagtggctggaacttagaaacggttgcctctgctgttcagtgaagtgaggaatgtgtttactgtgtacatggtttactagaaatgtttattgattatatttccagctttaattttcttgagtaatttaactgaatttacacagtttgcttcattgtattttcaaacaaatagaaaataaacttattaggaagcattttcttaaagtgtttcttgctgtcttttctatctgctctaatgttttggtccttttattgagtttttattgcttttgatgtcagggcttatttaatctctagtgcatgaaagtctcatatgtaaaaaatgattattctgaatttaatctgtcattggtcatacttctaagtgttcaaccttataaaaaaaataaatgactatcaaaaaag

SEQ ID NO: 669 - DNA, 152 bp, Homo sapiens
gggtactggttcagcagaaaaacttgacaatcacacgacagttggcattgtgaacattgacttgataattaaagaacaattgttttttaggaatgatgtggttgtatttttaaaaggatctctatttttaaaaatacaaccacatcattcct

SEQ ID NO: 670 - DNA, 2053 bp, Homo sapiens
aggcgttcagactcttagctgaacgcggatgacggcgactatgctgtggagcggctgccggcgtttcggggcgcgcctcggctgcctgcccggcggtctccgggtcctcgtccagaccggccaccggagcttgacctcctgcatcgacccttccatgggacttaatgaagagcagaaagaatttcaaaaagtggcctttgactttgctgcccgagagatggctccaaatatggcagagtgggaccagaaggagctgttcccagtggatgtgatgcggaaggcagcccagctaggcttcggaggggtctacatacaaacagatgtgggcgggtctgggctgtcacgtcttgatacctctgtcatttttgaagccttggctacaggctgcaccagcaccacagcctatataagcatccacaacatgtgtgcctggatgattgatagcttcggaaatgaggaacagaggcacaaattttgcccaccgctctgtaccatggagaagtttgcttcctactgcctcactgaaccaggaagtgggagtgatgctgcctctcttctgacctccgctaagaaacagggagatcattacatcctcaatggctccaaggccttcatcagtggtgctggtgagtcagacatctatgtggtcatgtgccgaacaggaggaccaggccccaagggcatgctcatgcatagttgttgagaaggggacccctggcctcagctttggcaagaaggagaaaaaggtggggtggaactcccagccaacacgagctgtgatcttcgaagactgtgctgtccctgtggccaacagaattgggagcgaggggcagggcttcctcattgccgtgagaggactgaacggagggaggatcaatattgcttcctgctccctgggggctgcccacgcctctgtcatcctcacccgagaccacctcaatgtccggaagcagtttggagagcctctggccagtaaccagtacttgcaattcacactggctgatatggcaacaaggctggtggccgcgcggctgatggtccgcaatgcagcagtggctctgcaggaggagaggaaggatgcagtggccttgtgctccatggccaagctctttgctacagatgaatgctttgccatctgcaaccaggccttgcagatgcacgggggctacggctacctgaaggattacgctgttcagcagtacgtgcgggactccagggtccaccagattctagaaggtagcaatgaagtgatgaggatactgatctctagaagcctgcttcaggagtagaacccacacttgttctggcctggtgttcagtgcgactgcagtcagtgttgagtggtgccatgtgggccgctctattccaaaggaatcatggattagacccaagggctgagctcctctagggcaggacctgcaccctgtgtgttggcaccagcatcgggtcttggactggggcagaatccccagtggaaccggaagagctggactgatgagaaacatcagaagaacacatactaccttgttttcctaatgccagaagggtgaccagtgaagattcaccgttcaaaccatggaaagtcctttcttgggatccactttatcttgattagtctgcattttactagttcactggatccctcctctaggggcctggggactttcactgatgctcttcctgattctagagcaaaggtgtgggaaggggaaatggaggaatgccctcctgtctgtgtcgttctctgtgccacagctacagatgcagaaggtttctctggatagcacacctctgaatgtaaatcatgataaaatggatatgtggaaaccttacgccgaatctgtgatgtagggtgtatatctactcctggactggcctcgatatcaagggctggaactgttgagtcttggatgatcgatgggtttcctgttaagaagccttaggtctggagtgctagtacgtgttccttgtctggatagacctttgaatagtttctgtgtgttttggtaccgatccggagctgttcccctgtgaaaatgtgaatcacattggt

SEQ ID NO: 671 - DNA, 634 bp, Homo sapiens
gcctactactactacctactactactaaattcgcggccgctcgaccccgggtggagccgccgcagtgcagatcttggtggtagtagcaaatattcaaacgagaactttgaaggccgaagtggagaagggttccatgtgaacagcagttgaacatgggtcagtcggtcctgagagatgggcgagcgccgttccgaagggacgggcgatggcctccgttgccctcggccgatcgaaagggagtcgggttcagatccccgaatccggagtggcggagatgggcgccgcgaggcgtccagtgcggtaacgcgaccgatcccggagaagccggcgggagccccggggagagttctcttttctttgtgaagggcagggcgccctggaatgggttcgccccgagagaggggcccgtgccttggaaagcgtcgcggttccggcggcgtccggtgagctctcgctggcccttgaaaatccgggggagagggtgtaaatctcgcgccgggccgtacccatatccgcagcaggtctccaaggtgaacagcctctggcatgttggaacaatgtaggtaagggaagtcggcaagccggatccgtaacttcgggataaggattggctctaagggctgggtcggtcggg

SEQ ID NO: 672 - DNA, 1112 bp, Homo sapiens
gacactggagtctggagtgtggagccccacagtcttgcaggtcacatgctctccttgcacatctggcctggttgtacccactgggcctctgcctctgccctgggccaaaagggcccctccttgccaggggagagacagccacggtcctctttggccgatgctgtattctcattttggcccttgttcttaggcccgtctgcccgccctcctccatctaacctttcctgttttatccgcagcccttttcttctttgagttagtaaagatttattctgtaacctgacactcatctgggccctttgcagtttgccagccatattcccatgtggattttcccactggatccaggggccccatccggctgggcaggagggggctctgacgtacaggttggaaatcagaagtctgtgagagcgcgggagtgcatgggcagctctgggtcccagacctgggcccgacccctctgcttcacctccagctctgctgctcctctactcttgggtcgagatccctttggagccacagcgaggaaccctgtggttcctcaggcaggtgtaaccttgagtcagccaggagccctcttttcctgtgtcaaagcctgccctcgggctctgctcacctctggtgaccctccaagatgcccctgccctcagtttcccctcatgatctggcctctgcccccttctctagccacagcctctagtacactttagcaataccaccagactagttagagttccccactcaccaagcaagacatgcagtttcatgcctctgtgccttcgctcatgctgtttcttccgactggaatgccttcccctgctcctcctgccttgtctgcctggcaagttcatctctcacgatcccctcaaaggccccctcctccaggaaggcaacccctgtgcccctcccctccaggctacctctgcactttgtcaatgcttctcttgtggcacttatcacactgtattttacttgtttacatgtttgtctccccttctagactgtgaatccttaagggcatggactgtatcttatgcatctctgtatttctgcgcctagcacgggcctagcacacagtaggcgctcaataaatgttgaatgaatgaata

SEQ ID NO: 673 - DNA, 600 bp, Homo sapiens
  misc_feature (1)...(600): n = a,t,c or g
gttctgtattttagtaaacatacatatatacagaaaagtgcacaaataagtggacggcttagagaatttttataaacccagaggccctcttagtctcctttaagtcattatcatcgatgccctgatgcttgcgtagtgagtcttctgatttctagaactgtanactaattttgcctgatttggattttgtgtaaatggaatcatacactgtgtattcttgcgtatctggtttctttgactcagtgttgtttgtgagactttgtgttgttgtgtacagttgtaactggagtttccattgctcagtagtattatgtgatatatcataatgtatttaagtaaaaagactgagttttagggtatgtgtctgtattcatttgctagggctgccgtaacaagtatcacagatagagtggcttaaacagaaatttattttctcaattctgaangttaagaatctgnagncagcctgtcnggaagattantttcntctgaancnccccttggtttgnaaatgacngcntcgctncccngtanctccaaaggatcnttcccccggnatngggtgngccnatcccctttccttangacacantcgattgg

SEQ ID NO: 674 - DNA, 2013 bp, Homo sapiens
ttttgtttgtaacttgttacagaactacagcatcgtcactttattttacccaaatgcaaatcgtttttcacaaccaagacttttttctttcctacaatgttacaaatgatgtatccaagtccgactgtaatttggagttaaacagggatcatagaaccaaggaattatctctgaagctgctctttgggccactgtgccaaccccaacagctctatcctgttgttcttttttttaattaaaaaatcattaaaaaaaaaatggagatggggtcttgctatactgcccagggctgatcttgaactcttgggctcagacgtaccgatatactgatcctcccgcctcagccttccaaagtgttggggattacagtgtgaggccattggcacttcggccatctctacacactgtttttcaaggaaaggcagctacacctattccgtctccaaaccaaccctcacctggtgtccagttttcttggaagtctcaatttttctcatgacagcacattacctaatacctaccacattaggatgttaactcataaaaacatactacaaaagctttaaaaaacatttatttgtattaagtaagtgcaacagtgcaaagaaacttatgcatttgggcccttgcttccctactgttcacattagtttagtttagaagattaagtataataacagaaggagaacagaagaaatgaatataaatatactcagggtagccaaatcctctaattcactaaaggatgaaccaaagttgttggccagattcacatttatgtgggagcctaaacaaattatgttccctttaactgttctaggcctgtggaaaagggaagtggacaacatttatattacaagacagtaattttattgaaacatctttttttgtctaaaactatgcatggagatattaatctcttgtttataaattaggttaagtctaacatcactatttgaaaccagtgttatttacaaaaatgaacctcttctttgctttattgttggtttacaggaataattttaaaccaacctcaatctatctttaaaaatcttcctgccttcaaatgcccagcaacccttataaggtagggggcagccctttgacagcaacattcatcattcaccaggaatgtagaaccacaagtgaacaacaacaacaacaacaacaagattaaatcattcccaacaattcctatttgcttttccaaagcatgctatgtctaattcctgcctttcctatgccagacaggtgggagagggagccccatagagtatattaatgttaattaaattaacttcctttaaaagctaacaggatggcttagtgtggatgaggatgaactgctgtggatgacactagcagataatgaagtaaactttaaacccagattagtaacatgtactccagtaactgaccagctcagatagagacttctcatttactctggatcacatgtacaatattttaccttccaattaaatatagtgccaaaatctttcaaaatagatagagaataggcttcttagaaattcaaataaaaatgttaaataataaaaactggtggcctattatagagtttctgacagactccaatatactgggtaccagaaagtaactctatctcagatgctagtaaaaaggtaaattttgtatatacataaaagacaatattacgagactgtagtgtcatttgtcaaaacaagaatatctagaatggaattttcagtaaacacttgggatgaagggcaatcagaatacaagaggaagcaaaatccacataagttaattcctaatttgagaaatcaatagaatcaataaattgataattactgtctccataggtcacgaattccaaagactagttagtagttagtttctaactaaatgattacaggacgttctgatatatgctgtcttcttgtgatcagtttgttctggcaagacttcaacaagcacttgcccttgaaaacagctcagcgggagaacgatcggaggcaatcacttcgtttt

SEQ ID NO: 675 - DNA, 2069 bp, Homo sapiens
tttttttaaaagccagttacttttattataatgaatgagaaatactatgactggagaagaggtttcacgtgactagattattcttggttcacacactatggtatcaaaattaattatggaaaaaaaaacccacattggattacacacatttttattgagttttgtctgatgatagggaaacatttacaaaggagtaaatgttacgtaacttctcacggtatgtaagttagaagctgggcagcaaacatggttaccaagagtcgtctagttcttcatgagaaaagcctgttaaactttcgactttgtcactagattgcagcgtgtccactagggagccttcttggaccatcttttttgagctcttatctgccgactcctggtcttgctcctgctggatgattttcatgtatttctctaaaggattttcactgtgagcagatttgtcttttatttcttgattactcatttctaattcattttccatttctaattccttttttattttaatcttcagtgattcttcaatcatcttcctttcctgatacagtttttctagttctcttcgttccctttctaaaacttcttgtaggttactctgccttctttcttctgtctgccttcgttctttgacttgctgttcccgtattttttcttcttccttttgttcttcaatttgtttctgatctacacattcaaaagatgattcaaactcctcattatccttaaaagctagcttgtccacatctgaaaattcacttttgtcttgaagttcagtttgtcttcgataaagacccactttctgctccggaggcatggagacaggagggatggagaggctgtgcctagactcagtgggtgatggtaggggcattctgtcaggacaaggactgggggaagcaatgtgtgatctgcccagaccttccagatacatttcactttcgaggcttctttttgcttttggaaggggtgtggaagagaggcgtctggaggaagtgcccccgcggagcctcgaggctgcactgcctgtcagtgcttccacgacgtcattcctttcttccagtgtgcccacttgaggctgctcagagacaactctgtcctctccaaaaatatgtctttccggggaactggaagtaatgtttttgaaggcttccagcaagtgcagagatggtgggctctttgctgctagtgggcttttggcagagtttttaatgactctccgatggtaacttctgaaagccttttccaagcgttcggcctcttgctgaagctctttgacccttgccttagtattggctacaaactcaaggtcagaatcaggggaactaccctccacccatgcagttggataatttgtgatccttgatgcaaccatacgtgctagaacgttttcctgtttaaaaggattgttcaagaaatccccacttatctcaccattgcaaggcaccacattgccatttattaatccattgacagaacgatcgatcacagactgctttggattgcagtacacttcattctctagggctgtctgagtttgcttcagttgcaattttaaatcggcaacctgagtagttaaactctttacagaagctttgtaacctagaatctgggccttcagctgtgcagaatgctcaatttcgtcttgcagttgtttgtgcagagcttgcctgcagctttcgaactcctcatgctcaaccactatagccttttcggctttccgtagttctttctgaaagactgcaagttcaggagccggctgagctaggcggtttaggagacgcaggttttcatttctactctcttccagttgttgtttaagttaatttattttgtgccagaagctccagtttctcttcttttagtagtgaataatcactcatctctttaaccttttcattcagcatatggttttgttttgttattgccaaagactgggctttgacagactctaattcaagctcaagttctttcacacgatttacagattgattgagttcctccttttttgaattaatagctatgagctcctcttgcaaatgaacagctttttctttattcttcctttcatc

SEQ ID NO: 676 - DNA, 315 bp, Homo sapiens
gattctggatacaagtcctgtatcagatattcgccttgcaaatactttctgcctagtcttcaacttgtcttttgattctcttaactgtgccatttgaagagtaattgttttaagttttcaagtcacatgtatcagtttgttcttctatggattgtgcttttagtatccaagaaatcttgcttaatctgaggtcacaaagttttctcttatactttcttccagacattttagagttttaggttttacatctaggtctacgatctatgtagagtgaatttttgtatatattgtgaaatacaaatctagagtcagagt

SEQ ID NO: 677 - DNA, 785 bp, Homo sapiens
  misc_feature (1)...(785): n = a,t,c or g
tttttttttttccaggagaatgactcagtttattattctcaatttgaccctatgtatcccactgtaggctcaaacactgcacagagctgccacgtctaacctcgtaacaactgcgtccctggaaggtgaagggggtaaaccacaaagtcagaaactttgggaaaagccacggtcgcatgcacacctctcaaacaaggaaacaaactacaagaaagggctcagtcattgtacacagcaagtgtgcagtgggcaaagttctgttcttttgacattggccaaatgcgtaagtccctggtttcttgggctcaatcacggtccaaggttagtaagaaggccaacaatgttgtgagcaggattcaatttctacagggtcatggggcatcatccaccatgtgaaggggctccagcaggttggacatgatcaatacccatccagattaggaccctgacgcccttgccagagctcgggctcgggcagctttggcctcgtcttctagctcatctaggaaacgctcctgggaaatcgagtagaaggtgtaaccataaatagccaacaccagggccccgatgcctaggccggtcacgatgttccgggttcgccgccgtggtaggaccttctgccactgggcaagctccgcctgccgcatggaatgcagttgctcgggtgtcagcttctcccgagtcgggtcgatacgctgagcgaacggggcctctccacgcttagaatccagagggtcaccagctcccgaagacgccatgttgccactcctcccccncgtgccgaa

SEQ ID NO: 678 - DNA, 408 bp, Homo sapiens
acctctttttttcagagtctctggtaagaagagtgaaagcaaagaagccaagaagtctgaagaaccaagaattcggaagaagccgggacccaagcccggatggaagaagaagcttcgttgtgagaggtgatgcctgcaacgcgaggctcgccctgcctgtcggggccggggctccatgcatgctcttcattgcagggaggagcttcccaccatctacaagtgtccttaccagggctgcacggccgtgtaccgaggcgctgacggcatgaaggtgagcactggctgtgctgaacccaggcccggcagctgtcagtgtgaacctggggggaggtagcaggtgtttctgcagcctaactcagacttgcgcccaggacactttgacctaggttaaccgagaccttgaagcat

SEQ ID NO: 679 - DNA, 304 bp, Homo sapiens
  misc_feature (1)...(304): n = a,t,c or g
cagagctcaggcggtaatgctcggtcaccaccctgctcacctcttgctgtacagccgggttcctagcaggccatggactggcatccactccgcagctcaagggttagggaagcctggtgtatgacatgttgctttctcttcttagcttagaaaaataaagatatatataatcttggctggcaaagggacaatttaagaactcaagttaaaaattgatattggctgggtatggtggctcatgcctataatcaggcgattacaaggtgangaagtttgagatcaacctgccaacatggggaaaccc

SEQ ID NO: 680 - DNA, 1085 bp, Homo sapiens
ccgcagtcctcttccgggtgatggcggccgggtgccccggatgtagccctggcgcaacatctcttcttttttccacctcgccttccgcggattcccagcttgagaaactactctttgccccgtcatgccaaagaggaaagtgaccttccaaggcgtgggagatgaggaggatgaggatgaaatcattgtccccaagaagaagctggtggaccctgtggctgggtcagggggtcctgggagccgctttaaaggcaaacactctttggatagcgatgaggaggaggatgatgatgatggggggtccagcaaatatgacatcttggcctcagaggatgtagaaggtcaggaggcagccacactccccagcgaggggggtgttcggatcacaccctttaacctgcaggaggagatggaggaaggccactttgatgccgatggcaactacttcctgaaccgggatgctcagatccgagacagctggctggacaacattgactgggtgaagatccgggagcggccacctggccagcgccaggcctcagactcggaggaggaggacagcttgggccagacctcaatgagtgcccaagccctcttggagggacttttggagctcctattgcctagagagacagtggctggggcactgaggcgtctgggggcccgaggaggaggcaaagggagaaaggggcctgggcaacccagttcccctcagcgcctggaccggctctccgggttggccgaccagatggtggcccggggcaaccttggtgtgtaccaggaaacaagggaacggttggctatgcgtctgaagggtttggggtgtcagaccctaggaccccacaatcccacacccccaccctccctggacatgttcgctgaggagttggcggaggaggaactggagaccccaacccctacccagagaggagaagcagagtcgcggggagatggtctggtggatgtgatgtgggaatataagtgggagaacacgggggatgccgagctgtatgggcccttcaccagcgcccagatgcagacctgggtgagtgaaggctacttcccggacggtgtttattgccgga

SEQ ID NO: 681 - DNA, 253 bp, Homo sapiens
atctcattacttttgggaattcttccatttggctcagggctgtaatggagctgttaggggagccattatcattgaaagcaccacttagtgaccagatggccccattggaagcaacttgccgaatgtcagggaagaagacatttaatgaagcctaacagcctaacacaagctgagtaggcaagagtggaatcctggttttggtaatggtggtgctttatcttcagcaagagcacaattcttttttttgttgctg

SEQ ID NO: 682 - DNA, 1207 bp, Homo sapiens
  misc_feature (1)...(1207): n = a,t,c or g
ttttttttttttagattagaataaaaatttatttttgtaaagaattatattttgtatttgcaaaagctgaaaatgctcataaaaattaccagcccagagcttggatttccaccggatccaccacgtgagacaaaagagtctgtcacttcttcttgccaggtttgagggccttttctagaccttggatgtgttttcgagggagctgatactcttcaagcaatagccagccgaggtggtggacctggtttccctggatctgcacctgaaggctgtccttggccccagggcacggattgacggtggtgctagcctggcatcgctgctgaaggatggcagccactgagtatgggtccagaccataggcctccaagttccggaccacggtcacctttttattagacgctctttgtgctagggtgatgtcaattggacagattctccctttcttcacaatgggctcttgtccgggaagggtcacttgataggcaggctgtaatttttccaaacacctggtcagaagactgtcccatggaagcttcatgactgtatgctgttcatttttctctaagatgcagtcacataggatgggatccaatctcacaagatttttgttgtctgcatcaaccaggtcatttttcttggcgtagttaatgacgatcgttcggacctcactgccctccagaaagctccccttcttgtggccagactcctggaagagcagggtcatgctggctgggacacagtagaggggttttatatctggagggtgatagggctgttccctgctaccctcctggatagtctgggaggtcgggaagggctcgggtatgacgaaagatgtaatcctcgggtgtttccagtccacagccacaatgctctccacccctttgctcagctccttcacctgtataatctgctcctgctgcatttgctgcaggaacttagagagctttttgtagcttgacttctttatgtccagttgtcgtccttcggggcagcaggagaacatgtggctgccaaggaaagtgctggtgagtaaagggaggtcagcctttttgactcggcacttcaaggcatgtaagaagcattgctgtaacagctcatccatttgttcttgaagcgttttgctatctgtggagtcttggttcaggcccctggtgctggtgtcttctggggctttctgagagagacttgtcttncancnctg

SEQ ID NO: 683 - DNA, 560 bp, Homo sapiens
gtaggtagtgctggagcatagtaagtgttcaataaagccagtcattcttaggaacagagcagccttgtttggagactagacatttcccattgaagtcaggctaccaagaggcatatttattttccagcaggaaggcagctggggatgggccggttacatccatttgatgttgctagagcatcccagctactcaccacaacccctcctccaatattcacttcataagaacctgtgggaatccctgcaacatttaccaccttctccaaccctggtgacccattcttagacaagcttggctaaataattcccttcctgccatcctcacaaccagtgaggtcaccttgtttgagctgtgttcatttttggagttaatgtcattttgaatcacatttatgaggaaagaagggtgggggtagatgataccgattggttggacttcagttgccatatttaaacctttcatttccaaacctttcttttggattttacggtttttgtctatgcttattacgtagccttcacagggatccaattgctgggctgaaatttttgagctttga

SEQ ID NO: 684 - DNA, 855 bp, Homo sapiens
  misc_feature (1)...(855): n = a,t,c or g
gaaggtcagcgtgtgaagtaggcgctggcaacgcggggttacccgctgttattgaggagtaacggcccagcggaccacccaggcttgaggcagcggcgggaaccactcggtttgctgcgataccatggaaggaggcgggggaagcggcaacaaaaccacagggggattggccggctttttcggagccggcggagcaggttactcgcacgcggatttggctggcgtcccgctaactggtatgaaccctctgtctccttatttaaatgtggatccacgatacctcgtgcaggatacagatgagtttattttacctaccggagctaataaaacccggggcagatttgagctggccttctttacgattggaggatgttgcatgacaggggctgcgtttggtgcaatgaatggtcttcggctaggattgaaggaaacccagaacatggcctggtccaaaccaagaaatgtacagattttgaatatggtgactaggcaaggggcactttgggctaatactctaggttctctggctttgctctatagtgcatttggtgtcatcattgagaaaacacgaggtgcagaagatgaccttaacacagtagcagctggaaccatgacaggcatgttgtataaatgtacaggtggtcttcgagggatagcacgaggtggtctgacaggactaacacttaccagcctctatgcactatataattaactggggagcacatggaaagggctccttggcttccaacagttcactctggaaggtttttgcccaactcatggaatgggagggacattttcagtagttcntctaggttcctttttattaaggacagttttgggagttattttttt

SEQ ID NO: 685 - DNA, 1062 bp, Homo sapiens
cgccgcgcagcgcggctgtatttgcggcctgtgcgagtaggcgcttgggcactcagtctccctggcgagcgacgggcagaaatctcgaaccagtggagcgcactcgtaacctggatcccagaaggtcgcgaaggcagtaccgtttcctcagcggcggactgctgcagtaagaatgtcttttccacctcatttgaatcgccctcccatgggaatcccagcactcccaccagggatcccacccccgcagtttccaggatttcctccacctgtacctccaggggaccccaatgattcctgtaccaatgagcattatggctcctgctccaactgtcttaggtacccactgtgtctatggttggaaagcatttgggcgcaagaaaggatcatccaggcttaaaggctaaagaaaatgatgaaaattgtggtcctactaccactgtttttgttggcaacatttccgagaaagcttcagacatgcttataagacaactcttagctaaatgtggtttggttttgagctggaagagagtacaaggtgcttccggaaagcttcaagccttcggattctgtgagtacaaggagccagaatctaccctccgtgcactcagattattacatgacctgcaaattggagagaaaaagctactcgttaaagttgatgcaaagacaaaggcacagctggatgaatggaaagcaaagaagaaagcttctaatgggaatgcaaggccagaaactgtcactaatgacgatgaagaagccttggatgaagaaacaaagaggagagatcagatgattaaaggggctattgaagttttaattcgtgaatactccagtgagctaaatgccccctcacaggaatctgattctcaccccaggaagaagaagaaggaaaagaaggaggacattttccgcagatttccagtggccccactgatcccttatccactcatcactaaggaggatataaatgctatagaaatggaagaagacaaaagagacctgatatctcgagagatcagcaaattcagagacacacataagaaactggaagaagagaaaggc

SEQ ID NO: 686 - DNA, 1688 bp, Homo sapiens
  misc_feature (1)...(1688): n = a,t,c or g
ccaatttttcaaaagaactttattaagaaacagaggaaagatacaaaattcccatctgagaaaggttcccatttttcaaaagaactttattaagaaacacagaaaagatacaaaatccataaccaaaggaactgaagagtttacagcacactgggtttagcccatgccaatgtagagaaatgggctgggctggcgctcagtcactaggcaccgacgtcctgattcctcgtctttgacccaggtgtcccttgggttgctaagtcaaccagttctaactttctctggagacaagtcaggctgccctcccaaaccttcccaaacctccttcctaatgtctttatacacaggccctcttccatctggtccctaagatttctcacccagcacctcaggtgaggatcttagtctgatgttgctggtactttgtatactgctccaatcacaggagtctgcagtttctaaaaaatctaattttgctccctgtcctggacccatttccataaactgcattcaacaatcccagttgggtagtctaattttgcctacctttgggtcaagttacctactttcccaagtctgcatctgaacttggtctttctcctgctaacaacgtattcctaggtactctctctggcagttctctgccccagttcatccaagaccttctccccaatacagaagtccgcacccctttccaatctcccacttaatttatgggatagccctagttctctgcttacctttcaaggagagacaatcagagaccttgatcttggcactcgcctgttcaaccctgcccagctcaggtcagcaacctcatcggtttccttgcaaaacttttgacttctgccttggactttcgccccttagaattttatttctgcagatttagaatatggcattgctttatagataccgtaataataaggctaaaatagaaggagagctactccctttccaaatgatattttctctaaactctcaaaagattgggccactcttgccatttttcactttttctaaatgtctactcttatgggtccttaactaatacggtctgattcttagctggcttttaagaatggcattacatttcagcaagctggccattggtcccttctattcctgaagtcactgttgtgacnttcagataaggcttcttcaagtaactgctggaaagcaaaacaaaatggtctcctctgaaggagaagctgatttgcagaaagctctactcggggtgttccagagctttcactcacaacacatgtacctaacatcctcatacacgcttatgctgatggaggggtatcaggtgggtacaagtcagttgaaacttttcctaaccaacaccttgtatttgagctttatggtgtccgaaatacttctctacatttctcatccagtcctcacagcagctctgtgaagtgggcatgtggatgtcattatcccaatgatgctgatgtacaaactgagggtcagagaggttaaggcantagaccaagatcacacagctgtttagtgcagagccaacactcaacccaggtctctgctccctcattctcttcccatttcttgacaccaagaatacgaaagaggttttctacttccctcttccctacccanacaggattttcttttcactggtccatccacgcacaacctagtcagttccgaacaggnaaaggaac

SEQ ID NO: 687 - DNA, 1934 bp, Homo sapiens
cggacgcgtgggcggacgcgtgggctctcttcctggggggacccaggtcctgctgaagacagatgtgccattgagctcagcagaagaggcagagtgccactgggcagacacagagctgaaccgtcgccgccggcgcttctgcagcaaagttgagggctatggaagtgtatgcagctgcaaggaccccacacccatcgagttcagccctgacccactcccagacaacaaggtcctcaatgtgcctgtggctgtcattgcagggaaccgacccaattacctgtacaggatgctgcgctctctgctttcagcccagggggtgtctcctcagatgataacagttttcattgacggctactatgaggaacccatggatgtggtggcactgtttggtctgaggggcatccagcatactcccatcagcatcaagaatgcccgcgtgtctcagcactacaaggccagcctcactgccactttcaacctgtttccggaggccaagtttgctgtggttctggaagaggacctggacattgctgtggattttttcagtttcctgagccaatccatccacctactggaggaggatgacagcctgtactgcatctctgcctggaatgaccaggggtatgaacacacggctgaggacccagcactactgtaccgtgtggagaccatgcctggggctgggctgggtgctcaggaggtccttgtacaaggaggagcttgagcccaagtggcctacaccggaaaagctctgggattgggacatgtggatgcggatgcctgaacaacgccggggccgagagtgcatcatccctgacgtttcccgatcctaccactttggcatcgtcggcctcaacatgaatggctactttcacgaggcctacttcaagaagcacaagttcaacacggttccaggtgtccagctcaggaatgtggacagtctgaagaaagaagcttatgaagtggaagttcacaggctgctcagtgaggctgaggttctggaccacagcaagaacccttgtgaagactctttcctgccagacacagagggccacacctacgtggccttttattcgaatggagaaagatgatgacttcaccacctggacccagcttgccaagtgcctccatatctgggacctggatgtgcgtggcaaccatcggggcctgtggagattgtttcggaagaagaaccacttcctggtggtgggggtcccggcttccccctactcagtgaagaagccaccctcagtcaccccaattttcctggagccacccccaaaggaggagggagccccaggagccccagaacagacatgagacctcctccaggaccctgccggggctgggtactgtgtacccccaggctggctagcccttccctccatcctgtaggattttgtagatgctggtaggggctggggctaccttgtttttaacatgagacttaattactaactccaaggggagggttccccttgctccaacaccccgttcctgagttaaaagtctatttatttacttccttgttggagaagggcaggagagtacctgggaatcattacgatccctagcagctcatcctgccctttgaataccctcactttccaggccctggctcagaatctaacctatttattgactgtcctgagggccttgaaaacaggccgaacctggagggcctggatttctttttgggctggaatgctgccctgagggtggggctggctcttactcaggaaactgctgtgcccaacccatggacaggcccagctggggcccacatgctgacacagactcactcagagacccttagacactggaccaggcctcctctcagccttctctttgtccagatttccaaagctggataagttggtcattgattaaaaaaggagaagccctctgggaaaaaaaaaaaaaaaaaaaaaaaa

SEQ ID NO: 688 - DNA, 1600 bp, Homo sapiens
tttttttgcagcttcaagaacgagtgatttaagaacagccctcccatcttagcaatgtcccggggtggctggagccacggtcacttcttggtcctggtccagaactgtcggtagcgctccacatgcaagtcatcactgagctcctgctcgtactccttcctcgactggagctgagcctcacgcttccgcagcctggcccggcgctcctcaggagacagggtgtccagatctatgggcatcgcccaacatgcgccgtggctccctgtagcggatgtggatggtggagccatcctgcttcaccagcagcacggggtagagtcgtgcataagcctggcggtgcacacgagtgagtgaggccctgctgctgtcagctcgccaggaggatgtgtgcaggcggcggagtgcaggtccggtggccttcacggtgctctgcctcagccggcagagctggtgacccgtgccggggcaggatgagcctcggggcttcctcagagagccacaggctgtggtcagaggcgttctggccccctagccaggaagaggctgccaggctgagcaagggcacaaagcttccagcacaggggacagtggacaatagcaaggactagggaggattagaatggcggtttcctgctgaagagaggggttccctgggggtggccccctgacagtaatccccagggacctaaaagtccatgcttacccaagcaggctcccacggccgccattcctccttacagccccagtggcacgtggaggtggtcagtacaggccctggcgtgcaacctgctaggcagagaatgaagagatcttttttaaaaggaaggttcttccacctaatggtttcttatcaaatcccagcccaggatgcttccaagacacatgtaatcaccacgccactcaccaacctctcccagcaacccttggacttctcagaaccgcctgtagaggtttttccaaaagcagaagttggtcactactcccaaagattctgagtcagcctgcggcagggcccaggctgtctgttctggccgttaccgagtctgcgaaacctctctgaatggactgcagcctcaaaagtggagctgaggtcatgccttgctttctaaggtcattgctagttttaataaaaactcagtgaagtgaggattgtcatgcttgcttaaaggagaatggaaggccccagggctgctttgctggtgaccctggattcccatgggagtctgtgctgaggtgtgcgaagtaaaagcccagttttcaatactcagattcccaggagatgaggctgcacagaggccgagcgcccagcttcctctggcgtacccctgtctctcaccaaggaagggacctgaagacaggtccggctgcctctaaaatggaaatcctgctacgtgtcctatgcccacatccctctccctcggcctcaccagcacaggagcctggggctggtccaggagggtcttcggggaaagctccctctcctttcctgctagactgcatggggacaagaggttatcccaggtgcagccccctgtccccttccctgcctccctcctcccgactccaccgggagggtacagcgcctcccgcctctgttccc

SEQ ID NO: 689 - DNA, 250 bp, Homo sapiens
cgtgcctctcctcctccgcacccgcaggtcctcaccccagttggcgtcaccatgcagttcctccagggagctcctgggtgggaaccaggactcgtggaccagcgactcactgtagtaggaggtgtgtgcatcagaggacgggcccagctgtggcgctggggacaggcgcttcatgttgctggatttcctcttcaaggtcctgagaggactgtctttaaacagggtgctctgactcccagccaccgagctc

SEQ ID NO: 690 - DNA, 334 bp, Homo sapiens
  misc_feature (1)...(334): n = a,t,c or g
cataattctgtgattgaggatgtattatatatttacataaaacaaggctgtaaattctaaaggaacaatacattagacgtagtttacatttggcttnnnnnnnnnnnnnnnnnnnnnnnnnnnnnnnnnnnnnnnnnnnnnnnnnnnnnnnnnnnnnnnnnnnnnnnnnnnnnnnnnnnnnnnnnnnnnnnnnnnnnnnnnnnnnnngtcgacgctgncccgcnaattcagatctatgaatngtatatnnnnnnnnnnnnnnnnnnnnnnnnnnnnnnnnnnnnnnnnnnnnnnnnnnnnnnnnnnnnnnnnnnnnnnnnngcnttcttttatg

SEQ ID NO: 691 - DNA, 620 bp, Homo sapiens
ctcgaaataataatttgacacaatactagtcaaccatttagaggccttggaaaaagaagaggaacagcacttgaaaattccaagtatgattggaaattatctgggagcggggaattaaatattcaatgcatgaaagcaattgtactggcttctgggaaaaaggaaacaagaacattgctatggaacttgttacccagagaaaggaagtgaaaagatttacaattataagcacgaaattcattggcagattacctgctttatctacagacagattgttttggggtttggttttgtctaggcagcctctggcccagggctccttaattgcttgctctgctaatatttcagcttcctctcttgactccttgagggaaccaaccgctctttgggaagaccaaacacttaggccacctcttgttgcttccggggttaaccctggaggaagctcttgctgttcttggggggcaagctttctttccaaagggaatgaggagggaagggcaagcaggcagggtcctgcagcgtcaggccttctggggaaagtttcctcattttgtttgacagggtcctcagtacatcagacacccagatttgaatataagtcagagcctgatctcagc

SEQ ID NO: 692 - DNA, 423 bp, Homo sapiens
ggagtgagatctagtggctaggatgtggtcattctatgggaatgctcattcttatttggaacttggatggcattttcctccagatatgcagcagccacgcacatgctgagtgacatttcttccgcaatggccaatgggaactgggaagaagctaaggagctcgctcagtgtgcaaaaagggattggaacagactgaaaaaccacccttctctgaggtgagagtttttctaggtacctgccaaaatttatacattgaccaagttgttcccaacacttacagtaattttcttcatgaagaatatactcctttttctctgtggttaaaccagctgtgggaattgaattttgtggcgtgctttgcctagaatgaaagtgctgtgttgaaataggaagggaaatgtctgaaggttaaagtgaatttga

SEQ ID NO: 693 - DNA, 434 bp, Homo sapiens
  misc_feature (1)...(434): n = a,t,c or g
ggaaaacagcagcagccaagaagagagatggggaaatttagagagaggaagacagagaagaaaaatccactggataccttatgtgtaattcaccaatctgttggaacacttctgccacgtgtgaagagttttggcagaccaaatccacatgcctgaagtgatgcccaccaacaaagacataaaaattttcaacatttcaacagccatgttggaatcatctgcagaataccgaaaaagtgcccagttggagatttcataaaaataacaggcaatcacacacgttgcaggaactgtgtacagtactgagaacaccccaatcttgaccatcagtctttctaacttgtctgtctttgtcccatccttttgaagatttgaccgaattttgaacaaggccccaaaccttgcaagcaatgaacaaagtncctttgccaaat

SEQ ID NO: 694 - DNA, 708 bp, Homo sapiens
cgtcactgagccgcgccactgagccaggtagggccctaccctcttctgttgctttctccctgtggctcgcgccgtcccccgccgcccgtcgaccccgcttccatgtccctggcggagcacagctcccaggaacctccacgcccatggccagctaggcagagggaatcctctatcacctcctgctgttccacctcgagctgcgacgcagacgacgagggcgtgcgcggcacctgcgaagatgcttccctgtgcaagaggtttgcagtaagcattggctactggcatgacccttacatacagcactttgtgagactgtctaaagagaggaaagcccctgaaatcaacagaggatattttgctcgagtccatgggtgttcagttcagcttataaaggcatttctacggaagacagaatgtcattgttcaaattgttcaaccttggggcagggcatggataccaccttctggagattaaaggatgaagatcttctcccaagtaaatattttgaggttgactttccaatgattgtcacgagaaagctgcacagtatcaaatgcaagcctcccctatccagccccattctagaactgcattcagaggacacacttcagatggatggacacatactggagttcaaagagagatgccgttatttgagcaggtctccgagacctgtctgaactggaagagaagctaaagaaatgtaa

SEQ ID NO: 695 - DNA, 552 bp, Homo sapiens
gggccatgcacatctcaggtggccctgcacgcgtgtgcctgcctcggcttgtcgcctgaggcctgcttcctccacttgctccagctgacaggcacctctccaggccccgtagatgggcaaggacttgataaccagggttttaggcttttaaaggccattttgggggtcagccctgcccctgaacctgttcatggtgcatcagaacataatgctgacaccggtgtcagtgtggcccgagcctgtgtcctccccacctcgcccaccctggcaaggacagctgcggccaaggacgaaagccctcccttggctggcctcacgatggggccgtcccgggagccaggtgggagctgccttccactgccatcgggtctcctctcctctcccacgcggctggccctacccaggcgcctcttcggtctcagtctggcaagacgctgggtcttcaggctccatgccaacagagcccctggtgcaatgcggtcacaggttttatgggactttggtgagctgggcggtcatggtgttgaaataaatgtattttgttactttctg

SEQ ID NO: 696 - DNA, 1225 bp, Homo sapiens
  misc_feature (1)...(1225): n = a,t,c or g
cgtggtattttacaaatacattcatattcaaagacatgggtgcttatgggagaggatggtgtaaagaaagggaaaaaagccataaaaccagagaatctttgcatgggactgtattcctgagatcccaaaccaaagggatgaatgtgctgttatgccttaaatgtgtgcaccaggaaatgcaaactagaaagggtggctctgaagggtcctcaggtgaggaagacccccagggctgagaatccaccaccttcatccttcaaaagagtacctcagttgtctgcttacgcttcagccagcatgtgtgagcttggtcatttcctgcaagccaggcaaccacaccagtgtataagcctcaagcaaatgtcactccccaagccccaaatgggactaaggcctctgctgggctaggcgtggtgtaaatcccaggcctggaagctcctacccaaccctcatttgtttcaactcactttcaatatgtgcatagtttcataaagcagacatttccatgaggaaaagaggatggtggtgaaaggggaggggtgaagggacatctccaagtcacagaggctgcaaaactcagcatgacttgtggacggagccacaggccacccagggcaacaagacccacataactcaccaagtggttaacggctctaaaccagggtcaacaggagaggggacaaaagtcactccttgattttgctgcagcttaaagataagttctacctcagcttatgctagcccttatggggcaaaaaagggaaagtcattctccccaagtccaggctgggccgtcaaacagggagtggggtgtcagccccagacctcaatgaggtccccagattccatgcccaggtcagctggcagctccctgcctgaaagctttgtcccatcaaagaagaaggagagcttccgtcccgacagtcccatggcctcctcatagtgggacatgagggtctttagaggggaatctcgagacagtgagacttccagtgtctggtgtttctcctttccctgcacccggagctggagctgttgggacgtctctgtggcctctggagaacttgttagtaccacacagtcaatgatgtcagccactccgagctttagggtcctgggagtggcagtaggtgatagctctgtctctccaaaaagcaaaaagatcctgcttggggacaccccaaggtgggttggccatgtgggcnaccacantcgtggangggct

SEQ ID NO: 697 - DNA, 1104 bp, Homo sapiens
  misc_feature (1)...(1104): n = a,t,c or g
atctttttctctggtgtattcatggaaagcatctactgccgcacgacactagtactgtgccttctttcactgccctctgctctgcagctctcacccagcttggctgcttcaagtctgtgcagttgacttggctgtactgaaaagtgaacagcatggattaactcatcctgctgctgagggcagtgcaaacaggtgcttattagaggtagtgacttgcttaattagtgacactcttaatttctactatggataatttcaaagtagaatcactctatgcttagagttttggcaccaatgctgtagggcagcagaatctattctcagtaaaataacttatggtttattagatattctgtattgggattttaccagcttgacttttactgctcagatgctttgtttccccccctttagacgctgtaattctcttgggaagagtaactattcttaaggtttttacagatacccaccttagttgtaaattggatagtttatatttctgggactttttaaatgaaaatgtggaatgttaagttacaaaagacttttcatcagaaaatttcaaacaaagtaaacatggcgttttatagtcctctaaaatctaggtgctcccacccaccaaaggcatatcctgcaaagggctgtgaactatcttggtgaactgtcttgggtcccctttccatgtatgttttcttgtcactgaaaacaaacaacgctgagtttatcaagaaaatttaaattgggggatcataataattccaaccaagtgacaactctgacatcaaggttattaggagctgtacatccaattcaagttttatttgctgctattctgggagaataaacttgtatatggagaataaactaataaacttgtatcgaggaaatccataaagttataaattagcctgaaaaatatttcaggtaatggtgtggattggcctgctttgactctcagccaccaacagaaatctttgtccacctttgtttcctcagctaaaagtaattttgttataaacacaaagtgactttaaacaggtaaaaaaccctttcccatttttgtacattaccaaagtttttcnttacccacngggtaactatttt

SEQ ID NO: 698 - DNA, 314 bp, Homo sapiens
ctgagacatttttaagaagaaaggagacaacaggcataaatcagattgttaagattaggaatttggttttggataagtttgagatgtctgggaagcaaacaccgtacggaaataccaagaagacattggattatgcagatctgaagcttagaagacagttctgggctggagatataaattttttgggtccctgccatggagacagcatttcagtgaaagagtgaatgagatcacccacaagagggagtgcagagggagaaaaagccctaggaccgagcctgagaggcaccaaggtcattcacaagttgggaggg

SEQ ID NO: 699 - DNA, 412 bp, Homo sapiens
tttttttttttaagaaaagagctctttattccacgtcgtccgatatttttacacaagtaaaataaaatgcatatctctatataccgcgatctgggtgggaggcggcgttctggaacaaacgctgccgccgaaccctgtaaacatgatggggtggagatgggggtggcgggcggcaggcgtccatcagggaggacctggcctggcctgccccacgggtcggccgcccggctggcttggcggcgtggagagagaccccgtatgtacacacacctggctgctgagcacgctcttgtgtccgctgggggtcagcagggcccaagcactgtccacagcaccagcgccaggcccaggggggtgaggctgcaggtgaggctgggtagggcacctgagccttctgagtcaccagtcccgc

SEQ ID NO: 700 - DNA, 871 bp, Homo sapiens
ccagtttgattcgttttattgacaattcaaattgaaaaaatttcacctaaaaggaaggtatgtgatcacaaatgtagctaacagggggaacgcatacagcaccagggagggagagtgaggctggacataccattacagagaggagggaagagaaagaatggcgcggggggcggaggaaagagagcacttgccaaaaatcccacactttccacttctcagctatcactcaatcatttttctggatagggttaacagctagaaatggtttaagggcaacatccaggtagtttgtctggaagatcagggagatgaagagttggagagaatgtgggtgtagcattttgaaggattctccagcttgaacctgttgccagaacccttttcatggtgaactgggagtcaggaagcttaatcctggtctcagctcagccatgaacttgctgtgtgactttgggtgaatcactttccctctgtgatcctctttcctctgctgtaaaacaatcaagttggcaagttctccactggctctagcactctgcaatgccaagcgttctggcaacctgggctagaccaggagactggctcagcttccggagaaatgaaactactaagaaggccagccagagtgacgtggcactggccttcacctggagcccacttccttggcagcggcagcaattcagagggtgagtgtacgcgcacacacctggaaggaactcacactcactgcaagggtgatctctgcaaagaatggctgtgagggagcctgggttttgctctacacagaaggcaggtccacaggactcggggggtgatacagatgaagcaatcacacaatctgtagggtctgggatgcaggatacagtggagc

SEQ ID NO: 701 - DNA, 1052 bp, Homo sapiens
atactactactaaattcgcagccagctcgacattatgaattcaacaagtatttattgagtgtctattatgtgctagatactgagacacatcagagaacaaaaccaaaagccctgcccttgtcgggcttacagtctagcacttaccgccagttaacctgcaggctacctggagccccgggcaagtcaccgcacctctgtgcctcggtcctcagctgcccaatgggagaataagcagacctggctcagacatgaatcatgtgcttggtgtactgcagatgccaaactgcatccccacaacccaccacgtagacagcagacagggctggaagttgatttttaatgataaagtacaatgaagggagggcagaggggctaagcctagctgtctggggtgctgtggtggtggtagactggctacacaaactgttgctgctgctgctgcttcttggtggccgccttgctggcgaggtccttggccttctctgtagctgccagtgccgtctcctttgccttctccttggcttccttggctgtctcaacaagtgttttggaaggggcctcgccttgcagcttagccaagatatattcaaaacccttcatagtcttggtcacgttgcttttgaaccgggcaagaccaaattcctggacagctctggagacaccaaataagctagaggagacccaggcttcccggcggatttcagtccagccactgttgtcagagttcacacagtaaacacatcgttcctccaccaccatcagccgggcgtggttgatgttccaggtgaaggtagtcatggtctgattctgtgggtccacaatagagtcctccaggacgtacaccgagtgagcaacattggcaggaaatagtcgctcggcccagcgtggcatcctgttggtcttggtcaggagtcgccgggacagcagtttctggtcaggggtcacctcccggtgtactatgtcttccgtcaagacatgtttgctatagggattcgggtaccgctgccagaaaggcgggaaacactttggtcccaggaactccggagcacgct

SEQ ID NO: 702 - DNA, 735 bp, Homo sapiens
aggtctttatccatgcacattggaacacaggattactgggttgaaatcattctagttttgtcatttagatacttgtagatgaatctattttagcacaaggtataaataactcgggaggtcatctctatcttctttccttttgtgcatttggctataccacgtttaggtactaaaacagctttgcttatgttggccaggggaaaacatggcattctgtgcgcaaagctaatgatcgccagccctgccttggcccctcccttgtttatggtcattgtaagatgccccgcatgttaaggcttaagctgtcactgggctgggtgtaatacccgcttcattcctcctcccaccctcttacccgaaacatgaagggcactgtgctctattgagatctcgataagatcatcattttaacttgtattcaactgagggaggtaacatgatatctgggtgctggtggattgagacctcaagcatcaattcaaaattgctgtcgaaaatatgcactattttttttttccactctggctaagtgtaggctctgaagccagttttatagcttgatacattctggtgaaagatgtcttcatttttaatgaaagaacctacagttagtaggtgtcacctcagggtagaaattcctggatagaaattctgattatttgaaactctgatagaaatcctagatgctaggattttgaagaaaacctgggttttattgcatagatttcacctttt

SEQ ID NO: 703 - DNA, 1943 bp, Homo sapiens
cgcttgcagggctttcggctggaggagtatctgatagggcagtccattggtaagggctgcagtgctgctgtgtatgaagccaccatgcctacattgccccagaacctggaggtgacaaagagcaccgggttgcttccagggagaggcccaggtaccagtgcaccaggagaagggcaggagcgagctccgggggcccctgccttccccttggccatcaagatgatgtggaacatctcggcaggttcctccagcgaagcatcttgaacacaatgagccaggagctggtcccagcgaagccgagtggccttggctggggagtatggagcagtcacttacagaaaatccaagagaggtcccaagcaactagcccctcaccccaacatcatccgggttctccgcgccttcacctcttccgtgccgctgctgccaggggccctgggtcgactaccctgatgtgctgccctcacgcctccaccctgaaggcctggggccatggccggacgctgttcctcgttatgaagaactatccctgtaccctgcgccagtacctttgtgtgaacacacccaggcccccgcctcgccgccatgatgctgctgcagctgctggaaggcgtggaccatctggttcaacagggcatcgcgcacagagacctgaaatccgacaacatccttgtggagctggacccagacggctgcccctggctggtgatcgcagattttggctgctgcctggctgatgagagcatcggcctgcagttgcccttcagcagctggtacgtggatcggggccggaaacggctgtctgatggccccagaggtgtccacggcccgtcctggccccagggcagtgattgactacagcaaggctgatgcctgggcagtgggagccatcgcctatgaaatcttcgggcttgtcaatcccttctacggccagggcaaggcccaccttgaaagccgcagctaccaagaggctcagctacctgcactgcccgagtcagtgcctccagacgtgagacagttggtgagggcactgctccagcgagaggccagcaagagaccatctgcccgagtagccgcaaatgtgcttcatctaagcctctggggtgaacatattctagccctgaagaatctgaagttagacaagatggttggctggctcctccaacaatcggccgccactttgttggccaacaggctcacagagaagtgttgtgtggaaacaaaaatgaagatgctctttctggctaacctggagtgtgaaacgctctgccaggcagccctcctcctctgctcatggagggcagccctgtgatgtccctgcatggagctggtgaattactaaaagaacttggcatcctctgtgtcgtgatggtctgtgaatggtgagggtgggagtcaggagacaagacagcgcagagagggctggttagcccggaaaaggcctcgggcttggcaaatggaagaacttgagtgagagttcagtctgcagtcctgtgctcacagacatctgaaaagtgaatggccaagctggtctagtagatgaggctggactgaggaggggtaggcctgcatccacatagaggatccaggccaaggcactggctgtcagtggcagagtttggctgtgacctttgcccctaacacgaggaactcgtttgaagggggcagcgtagcatgtctgatttgccacctggatgaaggcagacatcaacatgggtcagcacgttcagttacgggagtgggaaattacatgaggcctgggcctctgcgttcccaagctgtgcgttctggaccagctactgaattattaatctcacttagcgaaagtgacggatgagcagtaagtaagtaagtgtggggatttaaacttgagggtgtccctcctgactagcctctcttacaggaattgtgaaatattaaatgcaaatttacaactgcagatg

SEQ ID NO: 704 - DNA, 73 bp, Homo sapiens
  misc_feature (1)...(73): n = a,t,c or g
ctgctcaccttcggtgtanctgggattaagccgtgcccacacctggctaattttggatggtagaaanangggg

SEQ ID NO: 705 - DNA, 727 bp, Homo sapiens
ggctttcctcctgggctagtgaacgcggcgaagtctcctctttctaatctccagagccgcagttccatcctctgggtcagcggcttaccctgactgggctgcggtatctgccttccttcccccaacaaggcgacaggtagtcggggctggggcggaactgactgagtgggccgcaactgactgagtgggccgcggctcccgcctgaggaggctaggaaggactgaacagcagccgacttcccaggctctaaaaatcgtgcctctgagttagagctacctcaaaagcaagaccaagcatgagaaatggagtcttttggccaagtattggggtgttcggaattcaagcgtatgagagagtggacggtagcgttgagaattttcatttgaagatctcgtcttaaccaccccaagtgtagtcagaggcggcgttttccctgcgagagtgccctggaacaaagcaaggatagcgtgggttagacatacctgaaatgaaagcgtcttactttatctaggtacatatttgcgtcagtaaggcgcaacgccatttctctcttggaattcagaagtgaaatatggtgactgggacgcctgtacattgctttgacttaaaaattgaagtccattattctgaccgaaagttaatctgatgattaattggttaaacatactatcgttgctaattagcataattattatttacaataaagtgagctaaatagctacaact

SEQ ID NO: 706 - DNA, 584 bp, Homo sapiens
caccagggtgtcctagtccgcagaggtgtgggggacacactccataatctctacttttctttttgtgcagctgagtcatggagctttcagccccagcacatggctcctccttaactgcgtctgctcaacctccctcagccctgtgaacagcatccccgcacacagacgcagagcaggactctctctgctgccacttcaccttcctgagagaggaccagcggccagagcctcagtgactgccaccctggaggacagggcacaacaaccgtttctggagagaatgggaggattccagaggggcaaatatggaactatggctgaaggtagatcagaagataactttgtctgcaacaccaccggcattgaggattatcctagtgggcaaaacaggctgcgggaaaagtgccacaagggaacagcatccttggccagcccgtgtttgagtccaagctgagggcccagtcagtgaccaggacgtgccaggtgaaaacaggaacatggaacgggaggaaagtcctggtggttgacacgccctccatctttgagtcacaggccgatacccaagagctgtacaagaacatcgg

SEQ ID NO: 707 - DNA, 2468 bp, Homo sapiens
attttccatattttagagtcagaaagaagcgcttggtaataaaaataatagagaattattttcttcgagcccgctctgcgcctgcgccggcctccccgcgcccgggcccacggctgagtgcgcggcgtcagaggccccaagtccatctcactatttacagatatgttacaggccgggatggtcacagaggaaagcccagctctcagcatggccccacgtggtgaggagcccccaggctcctccccggctgtctcggacagagactgagaagcctgccgcgtcccgtgggggcctaggctgcggcgggctccacgggggggcaggagtgggccgtgatgtcgctgtgcttgtacgccgcctcgtccaggtccagcagcctccggttgacctccagtgtcatgcagccgcggtagaacgcggtgactggcgctgaagtcaccggcacatctggcaggcccgccagcaaaggtgagcacggggctccgcaggtgcctctcgagcacggccagcctctcctgcagctgcgcggcgctcacctcgctctggcccctggtgccgtccacctccagggtggcctcaccgtccctcagcgagacggtgaccacgtgctcttggccgtcgccagaccttgatctccattagggccaaggccgtatgctccacggccaggaccaccagctgcttcttgagtttcttcgtggagtgatagtctaccagtgccacagagagaggcacggccacggaggtcggggggcccagagcgcaaacagcacgcctgtgtctgcggctgggcggatgtgagccacgacttctacttcccaggttgattcagtcccgacgtccagaggggtccgcatgtagtccaggctgtagaaggcgaagccgctcccggggtagaaagagcctctctccgtcaccgagaagcactgcatcctcgtgttcactttcaccgtttcctggatggtggtgtcttctccgttcagccagttccagctcctcatgcagccatccagacgagggtttataggctgcacgaggtccttctcatggaagggaatacctcccacggtcaggttcagatgatacagtcctcgctccggttggaacaagtccccggccaccgcgattttcatgacagcatccctgttgaccttgatgaccagattccgcgccagctcctcaacagagattgtctgccacatgccatggttgatgaccgggccgctgctggtgacacggccgacaccgttgtagcgcagctgcagctccagccggccggctctcagggcccagcacgatccaggtgctgtcctggtggcctccggcaaagaggaggatgccctcggggtcaaaggtccggaagtcaaactcagctaccagcctggtgggctgcagcctcttgaagcgcagtcggatcacgggggtcccactgaacatccggcccaggtacaaggacttcacactcttggccacgctgaagggcacgcacggcaagatgtcctcacaggtgtccatgtcctgggacagcttgaggcccccacgcccgtcacagtggcaggtgtagctccctggggagttcacgcagacctgctcacagcggccctgcagacactcgtccacatctcggcaagccttctcctgggagctgtacgcaaagccctcgtcacagaggcaggagtaggagccgggcaggttcttgcagcgcgcctccccgcaggcctccgagtctgcgcactcgtctatgtcttggcaggtcctgccatcagaggagagctcgaagccgctgtggcaggaacagtggaagctacccggcttgttgtggcagatctggaggcagcccccgttctcctggctgcattcgttgacatctttgtcgcagagccggcccccccagccagctttacacaggcagaagaagttgcccatgaggtcctggcaggcttgggtccccttcctatcgcaggggttgggcgtgcactggtcaggcaggttttgcacgcaggtggcgaagcctgagtttttggtgtacggagacccatacttgttgatgcagtctaagtatcttgggtaaaaataatccgtctcggggtcgttctcgaacacctcccgcgcctcctcgcggctgcacagctcctccacgcactccctctccaggtggccctgcttggcctcctcgaagacctgaaaggcgcggcgctgcctgggccgcaggaactgcgtggcctcgcgcgccggcaacagcgcggcaagcgcgcactccgcggccagcagcagcagcagcagctgcggcgcgcggcgcagggcggcgggcccgggcgagagcgaaggggccatggcgggccggggacgcgcggtcagagcgcccgggaggccgaggcgagcgggcgccgcggggcggaggctccggtcatcccgtcctggcggccctgaaggtcacatcgcggcggcggcggcggcggcggctgcgg

SEQ ID NO: 708 - DNA, 320 bp, Homo sapiens
  misc_feature (1)...(320): n = a,t,c or g
gttctatgtggttgagcagaggctagctaaacatggatgaagtccaggcgnnnnnnnnnnnnnnnnnnnnnnnnnnnnnnnnnnnnnnnnnnnnnnnnnnnnnnnnnnnnnnnnnnnnnnnnnnnnnnnnnnnnnnnnnnnnnnnnnnnnnnnnnnnnnnnnnnnnnnnnnnnnnnnnnnnnnnnnnnnnnnnnnnnnnnnnnnnnnnnnnnnnnnnnnnnnnnnnnnnnnnnnnnnnnnnnnnnnnnnnnnnnnnnnnnnnnnnnctgcatgtagtttatattgattggaaaattgtaggagatgaatagagaaaagag

SEQ ID NO: 709 - DNA, 811 bp, Homo sapiens
  misc_feature (1)...(811): n = a,t,c or g
gaacttttttttctcacccagtcatttgtacctcttcatatggctgtgtcgcaccctccagaaacgtggttatacttccagtcagtgtgggagaactgaagacttccggttggtcgaggaactgagggttgaccttcgggaaggaagttccactcatcttatttattatgcctgtgatgtgggtcctgccagggagacatccagtactcggtgtctttaattgccacctggggaactgtgtttattggccttctttggggcatcctggttttggatgaagtgaggggaatacagaggtaaaagaattgtctccaccctgaagcggggagtcccgcttcacatttctggaaatggtgcagccactggggacagttctgccccgggcatggttgtttcttcaaggtcctctaaatataatccctattcttacataatccttggccctgatggttttaagcaagaactcctgtgtcccatggtctccaccactcaccatcaccctgctgtagcaagagtcctagtcaggggaggtgcattttagtagttaaattgcacttatccatgagataaataaaaggagaactgtttttatcagtggaggctaacctaaaatttcaaagtgttcgcctttttggaaatcttggggcctctctctctgtaggaaccaatgggcccttgtgggcttcacggccttcgcacctaactggagagttctgaggctcctgcagctcacctgagcccacagactagggttcttgggctccttccgcagcatgcctggtttcacccccagaacccgtcagttntgggg

SEQ ID NO: 710 - DNA, 342 bp, Homo sapiens
gcggcacgagacaactttgactcaggctggatatgtaggcgaagatattgaatctgtgattgcaaaactactccaagatgccaattataatgtggaaaaagcacaacaaggaattgtctttctggatgaagtagataagattggcagtgtgccaggcattcatcaattacgggatgtaggtggagaaggcgttcagcaaggcttattaaaactactagaaggcacaatagtcaatgttccagaaaagaattcccgaaagctccgtgggaaacagttcaagttgatacaacaaacatcctgtttgtggcatctggtgctttcaatggtttagacagaatcatt

SEQ ID NO: 711 - DNA, 298 bp, Homo sapiens
  misc_feature (1)...(298): n = a,t,c or g
gggtagggtgatgggagagtgcaagctggagggtggtgtttagctcaatgggaggtaataaaaagaaagataatttctcagaacattttcgtattcttggcgtcacagaagcattcctaagcaaagacataaaacccataaaagaaaaccaaactgaactacagaaaaatttaaaacttctatgaaagaaaaaacactataaacatacttaaaggannnnnnnnnnnnnnnnnnnnnnnnnnnnnnnnnnnnnnnnnnnnnnnnnnnnnnnnnnnnngtcgacgcggccgcgaattcc

SEQ ID NO: 712 - DNA, 1018 bp, Homo sapiens
aattaatcatgtatttattattgtgttttaaatcttaaatatattcatcctccaagtaacagaatttagcatctttacacattagctgtatcgtgtgttttgatagtttaggcacatttcaggattttagatttcattttgtggtttcattataaaacagcttgcacaccaaactcaatcaatcttttttatttaaaaatccacctaaaaattcacttctgggttttagtttttgtttaaaaagaagcaaatatttaaaagcatcaaatgttactagtctacaattcatcttgttatgaacatttttagtttgaggattgggaaaataaacctattacattgattaggcacagtactatggccaatgggccagaacatcagggcacatctgtgtactcaggcaacagttagaggtctgaatggagggggtcatgcctcaactgtgggcactcctttctctatgccccctccaaaaattgttataagtctcaaatcagtacatgagattgtatgtaacttggttaaaaaacaactatacgtgctttctaaattatgttgcaaagccaagacagacgaatataattgtagcctcactacaacttgtggtcttaatatctatgtcacaggaccatgttataggtgagacagaattataccatccctctggtgttttcagaaatctggttggaaggagtccatgactataacatttcacattgtagcaaggctccaatatttcttgaattggggcagtgaatataaatcacagtacaaaatccgtaattctttcagtggaaaagcaacaggtgctacatacgagaatcacttatataacatctatttttttaaaaaaaatgcagatataaaatattaattgcatagggaattaaatataaggccaagaagaatattaagtaaaaaaaatcatagaaagggcactatggtgtcaaaagacagaatttcatagagtaataaatctgaattactatctaattaaaaatcacagtatgttgctgta

SEQ ID NO: 713 - DNA, 608 bp, Homo sapiens
ggcggtggggtgcgggtgcccgggtgaggggcggagctgggggcatggcgtccggagcggctcgctggctagtattggcacccgtcaggtccggggctctccggagcgggcctagcttgaggaaagatggcgatgtctccgccgcatggagcggctcaggccggagcctggtaccgtcgaggtcagtcatcgttacccgcagcggcgccattttgcccaaaccggtgaaaatgtccttcggccttctccgtgtgttctccattgtgatcccctttctctatgtcgggacactcattagcaagaactttgctgctctacttgaggaacatgacatttttgttccagaggatgatgatgatgatgactaacaggaattacagaaaggagaaagcactaactgaagaaatggtgatgctctcagtttctctgccttccctatcagcagaaaggctcggggaaggccctcagcctcccagtctggtgaagcttcctgtatggtccatgaccgtattccaccccaggctctgggaggctccctgagatgtgctgtccactaagcactgcacaaacaagcaatcaaattatgaataaacataataaatatcaaa

SEQ ID NO: 714 - DNA, 394 bp, Homo sapiens
  misc_feature (1)...(394): n = a,t,c or g
gttntgnatctgaaacctttgaattnaacccnnnnnnnnnnnnnnnnnnnnnnnnnnnnnnnnnnnnnnnnnnnnnnnnggcacnnnnnnnnnnnnnnnnnnnnnnnnnnnnnnnnnnnnnnnnnnnnnnnnnnnnnnnnnnnnnnnnnnnnnnnnnnnnnnnnnnnnnnnnnnnnnnnnnnnnnnnnnnnnnnngaccttctgaaatggagcctttgttagtccatgaaggtcgatgaggaatggctgatcctgctgggtcctccctcaagctacagaggaataatacagtcagccccctgtatcactgggttacgcatctgttgattcaaacaaccatggattgaaatattagaggaaaaaaaattgataattgtatctatactgaaaatac

SEQ ID NO: 715 - DNA, 765 bp, Homo sapiens
ggccgattctaatatgcggtagtaatgaaaatagagtaatgctgtaataatagtgccattgtaaagtgaattacaccattaagcatctattttgtctaatttgtattgtggtagtgtgagtgatacacacacatgcagacgtagaggagctggtctttaagaaatagactctagctgagaagagaaaccccagtcctataatattgaacagtcagtgaacaaaaataattggttctgtgcaaagtgaatttatttatacatatacatatatatacacagccacatatataaatatacacacacatgcacacatacatattgtgtcaggcagatcaagaagatatatgactttggcataaaaaaatgcttggcttatgttgccttttaacaagttgattatgaatggggacacatattaattatgacaagtcaagtcaatgatggcatcaatgccaggctttgaaaacaaggctttctacgtttgtttcaacctcttcatccttattaccatgtctgagaacccctattaactggtatttctcaagttttggaaagaagtattaagggcccaggaatgatcgattttattttgtcatttatctcctaaggaaggacatttgtcaaacaattttctttccacagcagaaagatagaggcacatttctatgccttaagtcacacatgaaccctaagagcagaaataggacctgagaaggcagtgtccaacatggctgctcccagtgggacaggtagatttaaaagtac

SEQ ID NO: 716 - DNA, 439 bp, Homo sapiens
  misc_feature (1)...(439): n = a,t,c or g
ctttgactgcnnnnnnnnnnnnnnnnnnnnnnnnnnnnnnnnnnnnnnnnnnnnnnnnnnnnnnnggcacgagcaaaatggtaaaaattatattgaaggttcagtctcctcagattcttaaagactttgtgaattatataggcaggatttaaggatagcatctccacctaatgaggtgtaacacttgcttggttttaaaacgtccagatcagttcttgttgcttcctgaagcatgggcttgggtctgcagcatgttgggcgcacagcattatgggaagggaaaaggcacaggctgccgtagagctggggtttcagagtgagacagatttggcatagagtccagggactccacttaaagtctgtgggcagttgttccctatttgtctgagcctttgtttcctcatctgcattatggtttaataggctgtcaggaaggcta

SEQ ID NO: 717 - DNA, 565 bp, Homo sapiens
tttttttttttctttgttaattctttattatttattgtttcggatgacacaccaggaagggaaataggaaaggctctacatcatttgtcgtatgtgctccacaatttgccctcaagtttgaatcctaggtcctaccacccacacaaaactgccattgccagcctgctcaattctacccaatctctagccattttcatactgcaaagttcctatgacctcctcccaaggagctcaattctgtactttacctcttcctgacctccctggaatccaccccgcctccaaccacactgtaattagaatctgaattctgcaactaccttgatgttagtctctgtaggggagcagcctgcagcctcctatggactcccattaagacaggatattccttccgtctagggggtgctgattgcaacttttttgctaagatgaaaagctggagtcgaaatgagaagagaggagttgtggcaggtattttgttttgcaatggctccagactgctcttctgtttgataaagtggctgtaactatgtgggtgggaacagtgcagttttttctttattcc

SEQ ID NO: 718 - DNA, 415 bp, Homo sapiens
acctctgggcagcagcggcaccgagactcacggtcaagctaaggcgaagagtgggtggctgaagccatactattttatagaattaatggaaagcagaaaagacatcacaaaccaagaagaactttggaaaatgaagcctaggagaaatttagaagaagacgattatttgcataaggacacgggagagaccagcatgctaaaaagacctgtgcttttgcatttgcaccaaacagcccatgctgatgaatttgactgcccttcagaacttcagcacacacaggaactctttccacagtggcacttgccaattaaaatagctgctattatagcatctctgacttttctttacactcttctgagggaagtaattcaccctttagcaacttcccatcaacaatatttttataaaattcca

SEQ ID NO: 719 - DNA, 262 bp, Homo sapiens
gaccctcagtaatgctgctgatttactctcagatgtctcaagtctagcttcctttttgaatccttctcctactccaggggctgtcaaaggcagccttaaagttcagtgactgttaggtggctcaggccatttttcattgggtggtctttggtgtttgcatactgaatttgaattcagtttaaaagcaaactgttggatatgaggaagaaaggggatatggccttagcccttttttccaatatttggaatatgaaagcataat

SEQ ID NO: 720 - DNA, 271 bp, Homo sapiens
agagctaggaaaacaggtctgagtctgggcagggctgggaggaaaagtgactttggcggagcgattcacaattatctcctggtcacctcagaagtccagggaaccttagggcatactgtatggatcagtaggaacagctgggtggcagagccagcacatggcagctgacccctggccccttacactctgcagagaatatggccctacccttccatgaaggtgggcacaagaaggcttaggggagccctttacgggagcaggggtatttaag

SEQ ID NO: 721 - DNA, 796 bp, Homo sapiens
tgaggaaatagtgtgtttgcttaggagtgtttactgtctggtaactactgtgctaagccctttcctgttgcctgccatccctgctgcgagcagggacaagctgggtgctcactcatggcatcttatctgttgcagatagtccactgtgtgcagaggcatgggagttgtcatgttgggaacatgctagacctcagtatccttgagggatgctgccttgggtctgggaaactgttagagggaaaccccaagaggtgcaggcactgagcctctcagggacaatgacctgggggtcccagctcccctgggagggggcctcctcatggtaagtgaatgccaagaggttaagttggcctgtgtttccgaggtggaaattccaggtcgctggcttcatttgtcttctcttttagattgtttgggggttgatcacagaccaagagtgacgagtgatgtcaccctgtgactcatggccggaccttcttgcccctattgtctcagcacaacattattcgacttttccctcagcgtgggtgggcagaggaaaagccctgtggctctggggacttgggatccagagttgaagacccttcagctggctctgccctgccagtgccacagagtgccatggcccaggaagacaggttttcttccatctaggccaggccatccagtggccatcctccgtgtcctcccgcctcctcctggtgtgacttctgaaaaccaagaatttgttcctgttgactttttctgtgctatggaccattgtcctctcacccactcaataaatcttgaaacatgc

SEQ ID NO: 722 - DNA, 463 bp, Homo sapiens
  misc_feature (1)...(463): n = a,t,c or g
gagtgcattagaaacacaaattacagatgtctagggttaggatttctcaaagtgacactattggcatttggggccagataattcttgattctgannnnnnnnnnnnnnnnnnnnnnnnnnnnnnnnnnnnnnnnnnnnnnnnnnnncttaaacgcaagaagtatgcccctgttttgacagccaaacatgcctccagggtattgccaaatgttccttgagggacagaattgcctctggttgaggaacctctggtctctggggggtaaaggctttgtatgggtgcctgatgtaggagttgggcacttaatttgccattaggtaaaaaattatataacattatttggaacattttaatggaacattattaaatttatggggtagttaacctggaggggaaantttactanttaantggttaccaaaaacccgttaggttattnttaattatcccntaacacagggg

SEQ ID NO: 723 - DNA, 1064 bp, Homo sapiens
gcggccgcgtcgaccttctcggtcctgtaccacgagtcatggctgtgggcaccagtaatgtgctgggacaggtacccaaaccagactctgaagccatccctgtactggtggtacctcttggagctgggtttctacctctcactgctaatcaggctgccctttgatgtcaagcgcaaggatttcaaggagcaggtgatacaccacttcgtggcggtcatcctgatgaccttctcctacagtgccaacctgctgcgcattggctctctggtgctgctgttacacgattcctctgactacctgctggaggcctgtaagatggtcaactacatgcagtatcagcaagtgtgcgacgctctcttcctcatcttctcctttgtcttcttctacacccgactggtcctctttcccacccagatcctctacaccacatactacgagtccatcagcaacaggggccccttcttcggctactacttcttcaacgggcttctgatgttggctgcagctgctgcacgtgttctggtcttgcctcattctgcgcatgctctatagcttcatgaagaagggccagatggagaaggacattcgtagtgatgtagaagaatcagactccagtgaggaggcgggcggcggcccaggaacctctgcagctaaagaacgggacagctggaggggcccaggccagcccccactgatggccctcggagccgggtggccgggcgtctgaccaacaggcacacaacagccacatagccgggcggggctggctgtaaggggttgcccccccgccagtgccttggatatttctggggtgactggactggcgcccctgggccacctttctggagacagggagggccccacccggggtgggtgggaaggctgatgatctgtctccagccccttccttctgcccacccgcccttcttcctctgggcaactggacagatctgggagccagcagctggatgctgtggctggccagagacacctccaggctgtagcctgggggctggggggagccccaggctgaaaggggtccaattaaaacaaatggagccaaa

SEQ ID NO: 724 - DNA, 1520 bp, Homo sapiens
ttttttttttttttttgctgttcacccaatgatcttttattatcaggtatcctggctggcccaggacccagagacagacaagctggggccaagcagggcggacgatctgagacccattttacaggtaagaaagacaaggagcagaggcctgcatgaaactgcagtaagcagcaggcgccagggggcccaaccccactggaatcgcctgccctgccctgagcctggcccacagtggctgccacatttcagacagggcagtgagtgatgggacgtgccctttgccccctctggtagggcgtggggctgggggaaggagcaggacagtaacatccgtgctgctggctgggacccagaagtggctgggacatgggggctgctttcttctgtgtagaggcctccctacaaggctcccccctcccccgaccctttacctagggcctgccagaaaacacttctcattgtgaaggggacagaactaatgggggacagtggaggacatggatctacccccattcctgagtcacacgactcacccagagtcacggcccagactgggcctggggtcatggcgccaggttgcccctctggcctgtccacagctctcggagctcgacatgacaaccccaggttccgcagggcggccttggccacgtcctcacagtcacggtgggcagatcgggcctgcatgatgagtgcctcagcccccaggtccaggatgggcttcgagaaggcctggccgtgggccaccaggtttcggatcagcatgcaagcctgtttctgcacgccggccttctgcgggtgtgccttcatggcctgcagtgctgccacagccccgccaccctccacgatgatgcggctgttgtcgggcttacgcagggccaggaagcacagggccgcgcagctctgctcacacacctgggggctggtcagatgctgggtcatagcagccacgatggactccgtcccaccagcacggacaatagcatctttcacgtcgtcgttgcctgcgatggcttcgcaagggtgctcagcacttgcttcacgagctcctgaacgccgctctggtccctcatctggtggtcattgcaagtcggctagcagggacaccagaatgctcaggcccccgaggtcgacgacctcctggcagaactcgttgcgaatggccaggcgggacagggttccacagagctcgctcaggatgcccagggttatccaggaacgctttggtggcttcgatgagcaccttcaagcctttgttctcctgcacaatcatcttggcatggttgtgggcatggccaaagggcacacggatgtcgtcatcgaaggtcatgacacgcagggcccagcaggcttccctgaccacgtcagtgtggtggccatgatgggtgatggcaccagtcagcagaggcagcacgccagctttcaccaggtcttgccgattctgttcatgtttcaggcaagcgtgacgcacacagcggatcccagagcaggtcaggtcagcctcatcagccctgtgccga

SEQ ID NO: 725 - DNA, 250 bp, Homo sapiens
gctcgaccaagcatcagaaccaaattcaagatatggctagagatgttggtactgtctcttcaaactgtgtttttccttttagtatgcctcgtaattttttcttgataactggacataatgtactgggttaaagaaattgctgtgatgttcctttagtaatgtgatggtaaggtgtatgtataggtgggggagcattctatagtcctatgattaggtctcagtcttttagtgagcctgtgcctctggatgt

SEQ ID NO: 726 - DNA, 58 bp, Homo sapiens
ggaggtgacagtagtagctcaatcatatatctttctcacatgatcatttctaccttga

SEQ ID NO: 727 - DNA, 1673 bp, Homo sapiens
gtcgaccgtgtccgcgcgcctgggagacgctgcctcggcccggacgcgcccgcgccccccgcggctggagggtggtcgccactgggacactgtgaaccaggagtgagtcggagctgccgcgctgcccaggccatggactgtgaggtcaacaacggttccagcctcagggatgagtgcatcacaaacctactggtgtttggcttcctccaaagctgttctgacaacagcttccgcagagagctggacgcactgggccacgagctgccagtgctggctccccagtgggagggctacgatgagctgcagactgatggcaaccgcagcagccactcccgcttgggaagaatagaggcagattctgaaagtcaagaagacatcatccggaatattgccaggcacctcgcccaggtcggggacagcatggaccgtagcatccctccgggcctggtgaacggcctggccctgcagctcaggaacaccagccggtcggaggaggaccggaacagggacctggccactgccctggagcagctgctgcaggcctaccctagagacatggagaaggagaagaccatgctggtgctggccctgctgctggccaagaaggtggccagtcacacgccgtccttgctccgtgatgtctttcacacaacagtgaattttattaaccagaacctacgcacctacgtgaggagcttagccagaaatgtaagaacccttgaggggatggactgaacggacagttccagaagtgtgactggctaaagctcgatgtggtcacagctgtatagctgcttccagtgtagacggagccctggcatgtcaacagcgttcctagagaagacaggctggaagatagctgtgacttctattttaaagacaatgttaaacttataacccactttaaaatatctacattaatatacttgaatgaaaatgtccatttacacgtatttgaatggccttcatatcatccacacatgaatctgcacatctgtaaatctacacacggtgcctttatttccactgtgcaggttcccacttaaaaattaaattggaaagcaggtttcaaggaagtagaaacaaaatacaatttttttggtaaaaaaaaattactgtttattaaagtacaaccatagaggatggtcttacagcaggcagtatcctgtttgaggaaagcaagaatcagagaaggaacataccccttacaaatgaaaaattccactcaaaatagggactatctatcttaatactaaggaaccaacaatcttcctgtttaaaaaaccacatggcacagagattctgaactaaagtgctgcactcaaatgatgggaagtccggccccagtacacaggggcttgactttttcaacttcgtttcctttgttggagtcaaaaagaaccacttgtgttctaaaaggtgtgaaggtgatttaagggcccaggtcagccactgtttgtttacaaaatcaggtaactaactgcatacactttttctctttccatgacatcaagactttgctaaagacatgaagccacgggtgccagaagctactgcgatgccccgggagttagccccctggtaatagctgtaaacttccaatttctagccatacgctcagctcatccatgcctcagaagtgcatctggagagaacaggtttctaagcataaa

SEQ ID NO: 728 - DNA, 249 bp, Homo sapiens
aatctttctagtaaattccatatttaattcaagaaaccataacttaaggcatgtaaaagagatcctttgctcaatgtgatgccattgtgcttatccaaagtatattattattacccacaaagggtgagagattaggctgcagccataccccaagtggagtgagcagcaagacctgccccctgctcagagtgtagatgactgggggcacctgcattcctaggggctctgccgtatgagctcctgtcgatg

SEQ ID NO: 729 - DNA, 4974 bp, Homo sapiens
tttttttttgtgttaaacagctttaatctcgctcattgcggcttctcggcacagtaagaaatattgcacatgatcaacatgttttgttctggggaagggggcaagggcagggggaatcaccttcttagaaagtacaacccaagttgggagggcagagggggtgaggagaaaaccctccccgtgcctgtggcaaagtgcaggagcccccacccccaaactaacctgagtccagcccctctggggaaaaaaggggtgcatgaactccccctattccacaggcgcctccctgtggcccaaggcctgcaccaccctccagcttgcagccctcacaggagccattttgcataaagtgaaaagctctgaaggtcacacgctccaggttatgtacaggggcttggaggagggagactgcccctgcagcccctcagctgccccccagcaccgggagggagcttcgagggaagggggtatttacaagaggagcaggcctcattccgccccaaactggagaggacgaaatggctttacccgggaggagataaccttcctgcccccacatactgtccatgtcctgagggggtactataagtcctggcatcttctcaggggtccctcacctgcctgtggcagctgtggagggacctgggggtgggggggagggctggggagccccctccccacgccaggctgtccaggctccgactctgggggtggagtcagtgacggggcagcctgggccgtgccagagtccgagctgggtgaggtggggtcagggccccctgcgggcctgggagtgggggcagggcagcagcagcggtgccagtggggggcggtacagggagaggagcctcagctcccagggggctgctccgtgggagtggcagcctgcatgatcttctggcgcacctcacggatcttcaactgcagacaaaccttggagggaaagatgtctgcatagcgggcctggaaggcggctgtggcctgggctgacgggaagaagccatggtcctgaaagagctgcatgaccagggcccggcgctggtccagggtgcgccgcagggaggagtatggcaccttgtcatactctagctccccaagcacgtcctcggcttctgtacggtcaaaggtgtgaagatgtccccctcgcacttggcactcttgggggtgtgttgggctccgagctgcagctggagcgtcttctcatcttgcgcttgggcgaggtggggtcctcgggtgctgaatccaggtccgtggagttcttcctcttcttgcggtaagagcccaggatggcccggggtgaggtggccagagactgcagggtgggggagggcagcacctcctcaggccgaaactcaggcaactcagcaaagcgctcttcgaagtccacttctgacaggaccctgttgtccacagagtcaaaggtcttcttcaggggcgggggccgcaccttcaccttcttgccagtaccagccgcctccttgcgctccggggtgtccccggctgcccgcccactgctgctctcgctgctgccaccaggggctacagctggagctggggccgggctgggaggagtgggaggctccccacgattctccaggccctgcccagggacgcgccagtctgaagatgagctggggaatttgctggccatggtctcagggcccttggcgctggtccgctcctcagcaggtgggggcagtggggggctgctccgggccgtgggagtccaggtctctggcaggggtggaggggctggtggtgtgggctgcccctcaagctcagactctggggcagttggctctcggactgggccaggctccagaggctgccggggtgcagggccaggccgcccagaggcacctgcctcaaaggaccccacgggaatgctggcgatggctgccttcactttctggggggccttcgggctgggccgctgggccttgggggccactaagctgtaggtcatggaacctgctgtggcgctggggaaagggctagtcggggctggggtggcagtggcaggggctggcgggcccttgggcagaatggtggctgcaggtggggttgtgctggtggccacagtgtagaccaggcttgggggggcctgggatggctgggccaggggtgctgaggaggtgggtgcagggctgccagagtaaaatgctgttatgacaggacctccgggggctgcacaggcaggcggcagctggggactgggcacaggtgacacgcccacctgaccgggagccagcagtggggcttggcctgctgagagcaggggctgcacgaaggcggggccgctgggccccagcgaggtgaagcctagagctacagagctcgtgggcccgtacgaggtgactgttccagcctggctggacgcagggctggtacccaggggcagcgcgtgcccgcccgctgactgcacataggtgattctggtggaggagggcaacaggaccttctgaggctgagaggtgggtccagggagtgtggctgggcccaggggcggcaccaggccgctgggtgtgctcacaggcaccggggtcagctggatgatcttgctggggggctgggcaccattctgcacaggtactgagaagggcgggctcaccagtggcagtggctggccggcccctccaccccgcactgacatgctaggggcggccagaggcactaggaccttcccaggcagcagctgggctgagccacccgggggcggggcctgcacgggagaaactgactgggctttggggggtggggcggagggtacagactgcaggatggggatgccaggagtgggtgcagtggcagccaggactttgccgttggtggaagtgcccggtgggagggtgaaacggatgctggtggtgggtgcagggccgctgggagccgctgccttggtcccaggggctggtgctggggcaggtgccacctgaagctgctggggcagcgtgggcaggatgtactgtacctgggtgattcccccagccttgcccagggcacctggttgcaggatgcccaggggtactggcccattggggccactcccagcacctgctcctgagcccgcagtggtcccaccaccaggggccccctgggcaatgaactggacagcagggggcgcaggggccccataccccggggtgcccaccagtaggttagtgacagtggcaggcgccttccccacagtgcccagcaggggtccagccaccaagtgtggggctggtgaggtggctgctgccgacttcttgtccgaatacactaagctgacacccagcggggagcccccaggcacccgagacccagtgcccatttcagtcctggcacctgctgtgtcatttggagacgcctcagcccggccagaggtggggaagggcttagaggcgatgggcacaggagtgctgctgacaggccgcaccacattggtgaccatggtggcggcaggacgggacaggggagctgctggggccccataggccagtgatggggcgggggcggagggcactctggctccgccgccctcttgctcctccttgtttgggggcagcaccagtgtctgcaggatgtttcctcctccgctgggaggggccgcgatgactgaggggcctggtggctccaggccacccacactttcgggtctcttgcgccggaaggtggcaggatccattgggaggaaccgggttgccttggaaggtgtcgctggacccccagccccagggggtgggggccgtagggggcccgctgtgctgccctgaccagactcctgggccttgaaggttcctgagcccagtgagaaggaggtggctgccgaggctgaggaggaagcaggcgaggacgcagaggaggatggggcggaaccatagcctttgccaaaggctacaggaggatccgggggccctgggggctcagggtccagtggggggcggcagtgggtaaaggaggaacggatcacaggtgaaaacaccttccgaccaaagcccttgttgccctctgggtcctccccagagctgtccccactctcgctgtcggtcacccgctccttgcacttgagatcaatgtcagtggtgccgaagccatcgtcagcaatgacatcatcatccccttcctcctcacagatgaccatgcgctcctcatcactcgtcatgtcctcactggccgcacgctgagaacgagaagctcgggtgggcagcagcgggggccgcccagtggccgccaaggcacctccctcaccaggggctgcaaagggtcctggagctccatactgggtagaaggctttgggccagagtacgatgcagggccagacaccatctgcgtcagttcctgtagcgcctgactgtctacttctccgccgtccaggctgtgtaccccgctgtgggagaaagctcggggccgggctgagccaggtcccccaactgtgtgtagccgttctgccccacaggagctgctccccggagccttggtgtctgagctcaggagtgtctgggctgcaacggacaggagctcagaggacaccccaggggcagcagcagtgcccgtctccgacatgctccgctcccgcgtctccttgtgccctcctgccagccccaggctcgtgggcttggcctctgagctggacttctttcggtccttgttgcaccacttccaatctgggtgggccttgaagtgggcctccttcacctggaaggccaggtcgtggtacttctgcttctccttgggccccagggcataccaccactcgcccaggatcttgctgacggtccggttgtcctggttgggatgacgctggtggaccagggcccggtgccgcttgctgaagatcatgaaggcattcatgggccgccggatgtggtccttctcccgcttgttggggctgcgtccatccttctcagaagatgagtcccgttccttgggtagggcactgagggactgggtccgacgttttccgggcggtagaggcaactggatctcaggag

SEQ ID NO: 730 - DNA, 345 bp, Homo sapiens
gtcaccagctgggccccggtctcaggtccaagatggccatccagacccagcagtcgaagtttgtgaactggcaggtggacggggagtatcggggctctgacttcacagcagccgtcaccctggggaacccagacgtcctcgtgggttcaggaatcctcgtagcccactacctccagagcatcacgccttgcctggccctgggtggagagctggtctaccaccggcggcctggagaggagggcactgtcatgtctctagctgggaaatacacattgaacaactggttggcaacggtaacgttgggccaggcgggcatgcacgcaacatactaccacaaagccagtg

SEQ ID NO: 731 - DNA, 202 bp, Homo sapiens
  misc_feature (1)...(202): n = a,t,c or g
tgccagagaaaggtgaagtcaaacttaataaaatttaaaaaatgatatatgaagggaaaaagcttcagtgaaataaatagcataaataaaaaacaatcctacttctggaaataaaggaccacttagagaaatgcnaaatccctggaaaggcttagcaatngaattagccagttgaanaagnacttttgagcttganancagg

SEQ ID NO: 732 - DNA, 747 bp, Homo sapiens
aataccaccctcactgggctccatgaggtctcggcccaaaaccctactaactgttggatatgcctccccctgaacttcaggccatatgtttcaatccctgtacctgaacaatggaacaacttcagcacagaaataaacaccacttccgttttagtaggacctcttgtttccaatctggaaataacccatacctcaaacctcacctgtgtaaaatttagcaatactacatacacaaccaactcccaatgcatcaggtgggtaactcctcccacacaaatagtctgcctaccctcaggaatattttttgtctgtggtacctcagcctatcgttgtttgaatggctcttcagaatctatgtgcttcctctcattcttagtgccccctatgaccatctacactgaacaagatttatacagttatgtcatatctaaggcccccgcaacaaaagagtacccattcttccttttgttataggagcaggagtgcctaggtgcactaggtactggcattggcggtatcacaacctctactcagttctactacaaactatctcaagaactaaatggggacatggaacgggtcgccgactccctggtcaccttgcaagatcaacttaactccctagcagcagtagtccttcaaaatcgaagagctttagacttgctaaccgctgaaagagggggaacctgtttatttttaggggaagaatgctgttattatgttaatcaatccggaatcgtcactgag

SEQ ID NO: 733 - DNA, 611 bp, Homo sapiens
ttttttttttttttgccatattgaatcaatatttatttcaggacatgccatgtcaaaataaaacaaagagtcaacccttgcctttaacaattatattgtattataaaagcactttacaactccatcccatctttaagtataagttactggtatgtgggctaatgattatctgtaagcatttctctattcagatccataatccaagtgctctctgaatattacaaggtgacaataagtgggaagtggaggaggaagaggaaagagaggggactaaggttctcccagtttaaggttttgttccaatgaggggatgaggaagtatgaagatatttttgttgtcttttcatctttatactgtgttaagtaatgcttacaacataaattcagcaggcttttcctgagctgtaactcagaagttttcgtcctgcaaacaatgtatttacaaatgtgtttattagcttacacagcaatctcacaataactagtaaagattaaaagggcacactcctagtatatttgtttgcagtgttttaagggaaatacatattgccatggtgaagctctaaatagattcaacgaaacatctgaagattgaaagttgccctgtgccg

SEQ ID NO: 734 - DNA, 616 bp, Homo sapiens
ctgagagaacctggatttttatttccaaagacaaaccacacaagctgtaacttgcagataaaaacttatatggaatttcaaattgcatgaagtttaaaacttcatgaagtttcacattaaggagcggaggcttctctctctcgtctcatagaaacaaatcctgaaaatactcatcaaattcttcttcctgtgatttttcatctgtctctggtagtggacccttccaaagttcagattctgaagcactttcttcctcatcagagtttcaaagtagttacattagcagacaaactcctctccaataatgattattagtctaaaaaagaaatggcacaaatgtggcctgtcaatacagaatgtccttttagttaaacacaacataaaaataaaacagcattgatttgttacggtagttctagccttttacctgttggactctgatccctgaatcaacatgtgtgtctgaactttgctcctaactgaatctattctgacaccaattctagcaaaaatggcaaaagtgggggagggcattttgtattctaatgatctacatacaaatgataaaattttaatcttgaaagcaagattcctgactcaatgacagccatcactg

SEQ ID NO: 735 - DNA, 568 bp, Homo sapiens
  misc_feature (1)...(568): n = a,t,c or g
aaactcagctgagtatattttgtgaatctatttcttattgtttactcctccactaataccacactgtggtgactctagtagctgtacagtaactcttaacatcatatagggcaattctttccactttattgatttatattttcagaatggctttagcttttcttgtcccttgcctttccataaaaattcagaataagcttgtaagtgtctacaaacaaacctgccataattttgataagaattaaagcagaggtgtccaatctnttnggcttccctgggccaccagtggaagaagaagtgtcgtgggccacacatnnnnnnnnnnnnnnnnnnnnnnnnnnnnnnnnnnnnnnnnnnnnnnnnnnnnnnnnnnnnnngtgtatagttttcattatatatctaccaccacagataagcaaaaatgtccttgcataataatcctaattatgcactgccccattcagagggtctttcaaaatcattgaacaggttccaagtttgcaatcactgatacagaaaatgtacatatctagctaaacttcactacttttttgatattttttattat

SEQ ID NO: 736 - DNA, 691 bp, Homo sapiens
gtgggagacaagatgaccaagacaggaagccaccccaaacttgaccgagaagatctttgacccttgcctttgagcccccaggaggggaagggatcatggagagccctctaaagcctgcactctccctgctccacagctttcagggtgtgtttatgagtgactccacccaagcttgtagctgttctctcccatctaacctcaggcaagatcctggtgaaacagcatgacatggcttctggggtggagggtgggggtggaggtcctgctcctagagatgaactctatccagccccttaattggcaggtgtatgtgctgacagtactgaaagctttcctctttaactgatcccacccccacccaaaagtcagcagtggcactggagctgtgggctttggggaagtcacttagctccttaaggtctgtttttagacccttccaaggaagaggccagaacggacattctctgcgatctatatacattgcctgtatccaggaggctacacaccagcaaaccgtgaaggagaatgggacactgggtcatggcctggagttgctgataatttaggtgggatagatacttggtctacttaagctcaatgtaacccagagcccaccatatagttttataggtgctcaattttctatatcgctattaaacttttttctttttttctaaaaaaaaaaaaaaaa

SEQ ID NO: 737 - DNA, 428 bp, Homo sapiens
cgagggtatggtttcaaagactctgactgactgtattcaaattccataaggcattggaatccttcccataggaatagctgtcatcgtctcaactgatttgatccccttccccttcacccagccctgttgccgggagcggtaacacagtaacttggagctgatggcactatgttcagctccacttggaaacattaatcacaggttgacaggaataagatagaataactgcatttgagtgtgctcttaaagatatatttatggtgcattttggttggaacgcatcaacttagtgaatctttttctaatctaatttaggcacttgaagaggacctgagagagaaggaaagagaaattgctacagagaagaaaaataatctaaagagagataaagccaatcaggaaataaacaatggcattaaaatcaaaag

SEQ ID NO: 738 - DNA, 749 bp, Homo sapiens
  misc_feature (1)...(749): n = a,t,c or g
cgggtactctagcaatgaaagaaggtgaagttctctacattatagaggaggacaaaggtgacggatggacaagagctcggagacagaacggtgaagaaggctacgttcccacgtcatacatagatgtaactctagagaaaaacagtaaaggttcctgaagagggtttctgaggaaatgggcaagatgttgaaggaggttacatgcagctgcttttgggggagggtattagagttgtcaggctcaaagagagtgagagaagcaagttgcatgagtgcatgcagacatgattttttttttactaacttcattagcatttccatacattgtttttaaaaatcataataccaacccttaagttcctagttcacagttattcccacaaaagaaaaagccaacaatagtgtaccatttttctattttattttattgctgtctaatcaataaagaatgcagagctgtcaaaaaatgtgtcttacatttagctgtcccaacaggattgtcttccctcccagctctggttttaattggcttttagacccactatctgtcagatccttgccatctgtcagtgtctgcctgcgccacctccgtgcttgcctaacatcctgttgcatgtctagcgtgattgagctagattttcaggcatgtctttagattcccttgttcttgtcaaagccttgttttgttttacatttgtagtgcaaatcactttgtcaaacatctccagcactatngttccatcttaggt

SEQ ID NO: 739 - DNA, 1097 bp, Homo sapiens
  misc_feature (1)...(1097): n = a,t,c or g
ggtcgacttttttttttttttttttacggtaataaaaataatctttaataaacttgtatagagaggattccggtttacatgtaagtctgctttaaataaccacagctgaatgactggaaatgttcttttcttaacacaatgcccattcattataagttaagctggtcctagtttcttacaaatctcttatttccttgaatttatctactacaccctcactgtgatgccctttaacttataagctgggcctgcccagcctggcttataaagcccctcttcagaaatgtaccaggtgtattaaacagaggcatcatttaatggaaatctgcacttcaaaacagcacttgaaggaccagccattggccctccaatgtaaatacttctcatttcacattatcacagaaacagtgcagtttactaaccactccttccttataagaaattcagtagctgtaaaattttttttcagtttcaaaacatttcaatacttattaattccaaagatccgaacaccatgtagttgtggcattttgggaattagtacactcaggagagaagctgtgtttaggatgaagtgagttggatcatacttcgtatagaaacttgccagaaaatatagaattattggagaaattgtgaaaaacttccgtgaagatgtaaactgtactccatagtccagttgttcccaatgagttaggagcccttgctttaccctggtcagggagtttcgaaaggtgttcctttcactgcatgcaaaaatacgtacatccccagattatgtataatatttgttaaagtccaagcaacaggaacactgaagaagggaatgctgagtaagacaatatgaagcaagccaactcccaatgcatatgtcagccacatacacagctctgttcatgacacgggtatttggattcacttcactgtgggcaactccaacgttcatgtttgctccgccgccccactccgggccgccggctcgcagcaggaccagcccggctgctacggccgcggatacacgccctctcgtgccnnnnnnnnnnnnnnnnnnnnnnnnnnnnnnnnnnnnnnnnnnnnnnnnnnnnnnnnnnnnngaa

SEQ ID NO: 740 - DNA, 634 bp, Homo sapiens
  misc_feature (1)...(634): n = a,t,c or g
cgtacacacagatgcacatggacacaccccaaacacggcacaggctcctacacacatgcacacacgtgttacaccacaaacgagctcccagacatgtaaacacatgtctcccacacgtgagctcccacacatgtacacatgcacatgtacgcaccacaaacacatgcgcaggctcctgcaggcgtgaatacacacatgcacacacatatacacacacgtgccacaaacaagtgcacactgtcctggtgtcctgcactgcatcctgcctccttgctgaggggcccctgtgagaggcctctggatgggcatgggaagatgggctccctggcccccagcccatgcctccctgggatgaagagtccccctcctggcagaatgtctgggctttgcagagcaggccccgggggtgaagtcgcagcttcacttacaccagctgctctgtgagcaaggcttggtgccctggacaaggcccttcccctttagggaggtccagcctcgcaagctgaaacctcccctcggctcagccctataccaggcggccacagcaggactggccacacccacgccgcacctcatccgtgcacgcgtcggagcccccgccagccttctgccacgagccagnctgggaagggcc

SEQ ID NO: 741 - DNA, 506 bp, Homo sapiens
  misc_feature (1)...(506): n = a,t,c or g
cggacgcgtgggcggacgcgtgggggatcgcagtgctctcaaagacacgtacatgttgtccagcaccgtctngctccaaaatcttgcgggccattgccttaaaggaaggttttcattttgaggaaacattaactggctttaagtggatgggaaacagagccaaacagctaatagaccaggggaaaactgttttatttgcatttgaagaagctattggatacatgtgctgcccttttgttctggacaaagatggagtcagtgccgctgtcataagtgcagagttggctagcttcctagcaaccaagaatttgtctttgtctcagcaactaaaggccatttatgtggagtatggctaccatattactaaagcttcctattttatctgccatgatcaagaaaccattaagaaattatttgaaaacctcagaaactacgatggaaaaaataattatccaaaagcttgtggcaaatttgaaatttctgccattagggaccttacaactggc

SEQ ID NO: 742 - DNA, 537 bp, Homo sapiens
  misc_feature (1)...(537): n = a,t,c or g
ggaggtgtcggttcgtgctgctgagctgcccaggcttcacggagcggtgttggaaatcaatagctcttctagcctttgcattgtttaaatataatagtgtcattggactaagatgttcctgatgccaacctcttcagagttaaacagtgggcagaacttcctaacccagtggatgaccaatccttctcgggctggggtcatattaaatcgtggatttcctattttggaagcagacaaagagaagcgagcagctgtggacatttctaccagctttcctattaaaggcacacatttttctcatagcttcagctttataaatgaagaagattcacttcttgaagaacagaagttggagtcaaacaacccttacaaaccacagtcagataaatctgaaacccatacaagctttccttgcattaaaaagggaccacaggtaacggcatgtcacatgccccggncancaaggagaaacaaaaatgactcacccagatcttgcgagtgaatcaaagaaagggntttaaaaacccncttttaaaa

SEQ ID NO: 743 - DNA, 589 bp, Homo sapiens
ccaggaagcccactgtaattcgaattccagccaaaccaggaaaatgtttacatgaggatccacaaagtccacctcctctccctgctgaaaaacctattggaaacactttcagtacagtatctggaaagctcagtaatgttgagagaactagaaacttggaatccaaccacccaggtcaaacaggaggttttgtgcgagtacccccaagggttgccaccgagacctgtgaatggaaaaaccattccaactcaacagcctccaaccaaggtgccccctgagagaccacctcccccaaagctttctgcaaccagaagatctaataagaaactgccttttaatcgatcctcttctgacatggatcttcagaaaaaacaaagtaacttggcaactggactctcaaaagccaagagtcaagtttttaaaaatcaagatccggtgctaccccctcgtcccaaaccaggacaccctctctacagtaaatacatgctgtctgtgcctcatggaattgccaatgaagatattgtctctcaaaaccccggagaactctcttgtaagcgtggggatgtacttgtgatgctgaagcagacgg

SEQ ID NO: 744 - DNA, 335 bp, Homo sapiens
gaactggattctgatgatggttgcacactgtgtgaaattactttaaaaatcaccaaactgcatagttataatggataaattttatgatatataaattataccttaataaaactattttaaaattcgaaagctctgaagatacacagatacacagagagagagagagaaaaaaacatatccactgttatttgctaatactacacttaggaagacaagacttgcaggtaaagtgtttaaaaggcacaatttagaaaacaagacagtttcctaggatttcaaagatcccctattattgtgggaaaagcaggcatctagtcatatataccatttcttgc

SEQ ID NO: 745 - DNA, 504 bp, Homo sapiens
tttttttttttacaagtctcaagttttttattttcagaacagagtctggttttatttttaaaaagagaaggaaaaaagtgataaatgctagtgaggtgccacttccctccttcttccaggctctaaccgccagctagctctctttcacaaaacccacggatgcagaatcaggacatgttaaaatggaacagtctttagagagggtctagtctttttaaaataagtaaggatttggggactaacagagaggaagcccctgacttgctgaattgttaggagcaggcggttctcgagattctgagcccagggatccttttctgtgaaccatggcacgtgctgggcactggcctcaggagacagtgccctgccttggctgttcagggtccacggagaaatctcaggttttgcccctttcactagggatgccctaagaaaggcaagggcaaaggaagtttttaggggtcatcgtgactgggggcaggggaagtgaagtgcaaagactca

SEQ ID NO: 746 - DNA, 521 bp, Homo sapiens
  misc_feature (1)...(521): n = a,t,c or g
taaaagtggtcattttattcaggtttagaaaaaaaaatcctatttcttttccttttatttaaaaaaatttgtttttgtggggggttgggggaataaataattggcacaactatctttaagaggtgtttcatctgggctaccttctcatgaaatcattcccagtagggactgaagctgaccttcatgttccattgcattcagatgtcaaccatcccggttgccttttatcccaaagcttgctgtgagtgtgtgtgtgtgagacgcaggcgaccctcttagtactggggtcttggggccaacttttcccatcaagcgttactttgattctgttctgacctcattccatagtttgcagtgagcatggcatctttgcctgggagatactatgctaggggcagctttccagggggcaaagcaaggccctcgtgtttacacggctctcctncagctcacacgacatgtgaggagatgaccaaatgtgaaaacaggtttccctgtgttgcccgtcatcctttggcccg

SEQ ID NO: 747 - DNA, 931 bp, Homo sapiens
  misc_feature (1)...(931): n = a,t,c or g
ggtccattatacgtgtcttctaagagctgttcaatacagtattcactctagaaacaattatctttttctcttaatgattttgtgtgcatctttaatctttcaagccaaattacagctatttcaggtttcctgtgttagcttggggataggatggtggctggagacaggcaggcttctctgccctgggaagagcccactcagcttaattgctctgccatcgtagagcctggttggacttggcttcctgaaaactcccactgatagtgcctgttagatctcctgtttgtttcagttggcagaacatttactggccccaactgtgggcatcatcctctcagcagtcttcctgtcacccgcctgggcaggcagaaggagctgcagtcccacgtgggcctgcctggggggggtgggggctgcatggctgttgggtggcagtgtcagcacagggagggcttaagttggggatgtttgaccaggccacctcctgcaactgctgtttctcctgtccctcctatagcagggcttgcagcagcagcagtgtggccatctccatcccccaaagcacacttgctctctcaatatgtcctagttttcttcagccttttctggttcaagttcccttgtcctgatctcatcctctctggtctcccaataactcacccttgggatgtgtttagagcgtgggaggtgcctttgagaactgcttgactccatgatctcctagaacaaaaccgccctgactttacagggggaacactcatgctgagctgagaaagcagagaagtggcgtgggagccagctgggggtgaagagcatttgggccagtcccgtggcccccttcagattcctcaagcaggattgttctgttctaaaaagctgttgcacagcattcgcaatgagatctttagttggcggatttctggaaanttgt

SEQ ID NO: 748 - DNA, 350 bp, Homo sapiens
ctgattatgctaatttcaaatgaagattcctgccttaaaatattttttaatttaatggtcagtatattttgtaaaaatcatgttaatttatttcatagttgacattaatatcttccctaatttctttgtatatattttgttatgccttaaaggccacctgctatacagttgttaaatcttaaatatggctttttaaaaatggggaataatgtattagggtcaaattaatatcccataaaatatatatttctgctaatattagtaaatatcttaatttttcattagattcatatcatttaatttcacatattcaacacctttaaatgttggaatcttaatatgcgaagtgg

SEQ ID NO: 749 - DNA, 976 bp, Homo sapiens
  misc_feature (1)...(976): n = a,t,c or g
ggtgtggtagccggcgccgcgcccaatagccggacggggatctgagctggcaggatgaatgtgggggtggcacacagcgaagtaaaccccaacacccgagtgatgaatagccgaggcatctggctggcctacatcatcttggtaggattgctgcatatggttctactcagcatccccttcttcagcattcctgttgtctggaccctgaccaacgtcatccataacctggctacgtatgtcttccttcatacggtgaaagggacaccctttgagactcctgaccaaggaaaggctcggctactgacacactgggagcaaatggactatgggctccagtttacctcttcccgcaagttcctcagcatctctcctattgtgctctatctcctggccagcttctataccaagtatgatgctgcgcacttcctcatcaacacagcctcattgctaagtgtactgctgccgaagttgccccagttccatggggttcgtgtctttggcatcaacaaatactgagggatgggttttgggacagctccatgggcatggggaaggcactgaaacagaggactataaaacatccttctcttattctccatactgtcttcctacacctttaaagcctgagaactatacaacctttcccagactcccaagaagagaagagattggcaaatggggctccctgggcccagtcctgctagtggcaagtttctttgaatcaggaaggcaggtgaggtaagggccaaatcactctcctccatagcaggaagccatttgggcagcttctttggtgattacatctttccatatcttttacacttaccaccttccagctctgttttgctgtgtatttttcttacaataatttttttcagctatagctgcagtttaatcaggatgggtagagagctgtcctcaataaggctgggggtgggaaagaatggaatactgacctaatgtanaaaacttaaaa

SEQ ID NO: 750 - DNA, 1325 bp, Homo sapiens
  misc_feature (1)...(1325): n = a,t,c or g
cgtttgtgggagtgtcactgagatggcccgtgctgccgcccaccccgcctcggagcctctgggagcagcagtgccactgtgcatggcgtgggctgagcttggtgtgtggccgtcctggtggctgcacacctggcgtcgtcctgggcccttgggaggagcacagctgaccctggttttgctgcagtcccagctggactgttttcccaggcaggattttaatctagaatttagaaacatttgtatttgtaatgacttctggcaaaagcacgtgtcctgggccggatgtaactgttctcctttcccagctcctgtttgtgaagggcgtctgttatgctcctgcagtcgccgaggccttggatgtgcagccaggggaggagcgtcctgccggccccgcagggcccccaggganttcagggtaaagtgtgggccggtggcgcaagactcagaggtgtgctcgtctctttcctgtcagagtgggcgtccccaggccacggtgcaggcctgagtccttccaccggccccgtccagtcgtccctggaggggctgtggaggagggacgcctctgtgtggtcaggaagtgaaggggccattggccgcatgccatgtgccacctgcggcttgtgtctcacctgtcatctggactcagcacccaggctgcacgtctgacacctgagagccgagagagtgggccggcctaggaaccaagnctgggggcttgcgctctgtccccaggatggtggccttgtttgtcctaaanacacccagcacaggttctggcnncctganatcctgtggagccnagggagggtgggtgnccacatgtgcttgagggttntcacnctggccctcagttnccctgctgtgcgggtccctggggcagctgcaggggctcatggacccatcagggtctccacagctcccctgcagtgtgtgcaccccacaatgtctgcggctcttcttccggcgtgtcgggctttgatcacagcatagccacgtcagtggcgtgcgcctctcgcacaggcccantctgggtctggtggtgccaggtgccgtgacacgccgtgctgggcttgtgctgcagctgggtggtgtggccctcattctcatgttcccagctgctgggcagtgctctgcctgtgtgctgcgcctgcaggctgcgtgtgctgccgtggatctcctgcatcccttgacccctcccgccatcagaggaaaggctgctccccgaggcaccgcttccctgtgcgacgctaaagaggggccctcagtgtgaacncctcttcaaagaaaaagggtaaagacccagancccnnnngnnnggggggggg

SEQ ID NO: 751 - DNA, 881 bp, Homo sapiens
ggtggcaggctgcttgcagctcaacgccagggagtttcctgatgggtcagggtggggaggctgcacaccacacaaggtcaccctactctaccttctacccaccctaccacagccctgagctcaccactcccccagggcatgggactcttgataattccaagtccatgaaaccctacaattatttgcagtgcgtatgaatccttctatgaaagtacttcccctgagtgtgccagccctcagtttgaaggtcccttaagtcctcccccaattaactataatgggatattttccctgaagcaagaagaaaccttggactatggtaaaaattacaattacggcatgcattactgtgcagtgccacccaggggtccccttgggcagggtgccatgttcaggttgcccaccgacagccacttcccttacgacttacatctgcgcagccaatctctcacaatgcaagatgaattaaatgcagtttttcataattaatgaggaaaatgaaaataaacagtggtcattcacctcccctgtctaattaagagcaaagcagatgcttgtgggctgagtaattggcacaactctatctaaggtgtttactagtttctgaagtgtgtttcaactattgtgagaattttctatgtaataataaatctcttttcgtatgagaacttcttttcctttccttttgtctgtgaagcactgtgattctgtttctactggaaagatttttttctttttaattttcttttaaacttatttaatttgtttgaacaaggtgtctaagaatatactgttgaataaagacatgcacacagcataattcaatgtctattttggttgtacagtaattataaaatgcatgttattaaaaccagatgagg

SEQ ID NO: 752 - DNA, 324 bp, Homo sapiens
  misc_feature (1)...(324): n = a,t,c or g
ggaggccagatcacaatgggtgttgtgagtgccaaataagagtttgaactttatcctgaaagctgtggaacatttttcaaacttcttttttttcttcttttaagnnnnnnnnnnnnnnnnnnnnnnnnnnnnnnnnnnnnnnnnnnnnnnnnnnnnnnnnnnnnnnnnnnnnnnnnnnnnnnnnnnnnnnnnnnnnnnnnnnnacctcagccagttttcaaacttctaaataggggagtgatgataggatagatagaacattctcttaagaagcttggctatgaaagtgaagaaacagttaatagagaagttttttttttttga

SEQ ID NO: 753 - DNA, 1212 bp, Homo sapiens
ccacttacttgttctaaatagagctgtttggaggatgttctctgcgctcccaggccggcatcgagtgtcatcaatttctaccacctgctctctcttctgcccaaggctgtgttgcttattccttacaaagtttatactgcatttggggctgtatctttttttgttttttgttttgtagaaaataaatatctccgggggcagtacaggtgtctgggcttgtatttgatggggtttctccggtccctgtttctactggatttggagccaggcccagctagccaagtttggaatggcatttgtcatgtcagtagccaccacctttgttcattgtgaacctaccaaggctttccagcttcatacacattgaccagagctcaagctcctgcctgcaactcctgcctagagttgaagaaaagcaaactggccttggcaggcacagtgtcatcataccctcaccccatatgtttggggtctgcttgaggattcataaatcagccactctggattgttgaggaatggccatggcagccacagaaaaaagaatttttctctctgagccaaggttgttttttgtttttttctcttttcttttttgttttcatttcattgggaagatctccaatggactgaacagctccagtcagcagcagttaccacaaactgtggaatctggggccccaccactcttccctgttaaccagttctgtcagcatccccctctccagcagcacttccatgaagttggttctgagactctggccgtgaacacccgtttcttcagtgatttgttttgggcttttggctcaaaaccccaggctcttgtttttgtctagactcttattctgtttcctgagcagcaggaggtagggaccactttgatgtcagacttctggtagctggacatgttctcgagatgggtggctgttcgcgacttttgtaccagagtgaaattgttagaaggagggtttctggctgtggttctaaatggagccccaggaagctgccctctccccagggtttgtgctcagtagagccctgtggatcacagtcttgaggtcctctagcaggggtgagggagagcagcgacttcagctgagtccctgccagtggttaagcaaacaatggtttcaaaattcaaggtccccaaatggcagcattttatgttctgacctgtttgtgttatatagtggttttttttttcctctttggaac

SEQ ID NO: 754 - DNA, 2178 bp, Homo sapiens
ccgcattcaagatggcggtgcaggagtcggcggctcagttgtccatgaccctgaaggtccaggagtacccgaccctcaaggtgccctacgagacgctgaacaaacgctttcgcgccgctcagaagaacattgaccgggagaccagccacgtcaccatggtggtggccgagctggagaagacgttgagcggctgccccgccgtggactccgtggtcagcctgctgggacggcgtggtggagaagctcagcgtcctcaagaggaaggcggtggaatccatccagggccgaggacgagagcgccaagctgtgcaagcgccggatcgagcacctcaaagagcattagcagcgaccagcccgcggggcccagcgtgtggaagaggaagcgcatggatcgcatgatggtggagcacctgctgcgttgcggctactacaacacggctgtcaagctggcgcgccagagcgcattcgaggacctagtgaatattgagatgttcctgacggccaaagaggtggaggagtccctggagaggcgtgagacgaccacctgcctggcctggtgccatgacaacaagtcccggctccggaagatgaagagctgcctggagttcagcctcagaatccaggagttcattgaactcatccggcagaataagagactggacgctgtgagacatgcaagaaagcacttcagccaagcagaagggagccagctggacgaggtgcgccaggccatgggcatgctggccttcccgcccgacacgcacatctccccgtacaaggaccttctggaccctgcacggtgggcggatgctgatccagcagttccggtacgacaactaccgactacaccagctgggaaacaattctgtgttcaccctcaccctgcaggctggcctctcagccatcaagacaccacagtgctacaaggaggacggcagctccaagagccctgactgccctgtgtgcagccgctccctgaacaagctggcgcaccctggcccatggcccactgtgccaactcccgcctggtctgcaagatttctggcgacgtgatgaacgagaacaatccgcccatgatgctgcccaacggctacgtctacggctacaattctctgctttctatccgtcaagatgataaagtcgtgtgcccgagaaccaaagaagtcttccacttctcacaagccgagaaggtgtacatcatgtaggccccacgtcgtgaaggcgcacgcctcggggacgggctgcagtgggcggggaggccacgctttcctcctgtcccacgctccagcctgccgcggcgtttctgtttcttgcgaccaaagatccgtgagcaacgataaatactcttaggaagagagaaaataaggtttcataagtttgtacttgaaaacatttggattggtaggattttgtaacacgtcaaccatttgatgcttctgaaaagtactttcaacttgcgaaggaaactcttctttaaagactgacctaaacaccgagggaaacttaagaacgtttaaaatataggagtccgtgatttccctgtgttttcagtttctttccttctgtgaacgatgagacttggagaacgggctggtccttcaccacttcctgttggccctggcctgggccggggaaggtggcagcggcaccggactgacctgcagtgacccgcgatgccgcgccacgagggacacttatggcttcattcgagagctgctgccaaaacgcctgcgccgccaccgtcgggggctggcttcgaggacgcccgcctgcctcgcgggtcgtgtccgcgggactgtgttcgtacgtgcatagtttcgatatcacatcgcggggctgtgttcgtagctgcgtcgtttcgatatcacaccctctgtgtgcccgccttacttcctgcttcgagaatgtataacgtggaaatccacgggaccaaatttctgcagaggccttgcccggatggttccataactgtagagtctaattgctatccattacagaaattaatcgttcagttgaaagaagtactgatgacttttcaaaacaaatgaaccaccgtagctgacagagaaccgtatcgtagaggtttgtagttagtgcttatttttgcatgttgatgttgactagctaataaactgtaaatgtaaaccatgcgaataaaatggttttctatttctcaaa

SEQ ID NO: 755 - DNA, 488 bp, Homo sapiens
ggaaggcggagcggcggatctggacacccagcggtctgacatcgcgacgctgctcaaaacctcgctccggaaaggggacacctggtacctagtcgatagtcgctggttcaaacagtggaaaaaatatgttggctttgacagttgggacaaataccagatgggagatcaaaatgtgtatcctggacccattgataactctggacttctcaaagatggtgatgcccagtcacttaaggaacatcttattgatgaattggattacatactgttgccaactgaaggttggaataaacttgtcagctggtacacattgatggaaggtcaagagccaatagcacgaaaggtggttgaacagggtatgtttgtaaagcactgcaagtaggagtatatctcacagaattgaagctatgtgaaaatggaaacatgaataatgttgtaactcgaagatttagcaaagctgacacaatagatacattgaaaggaatagg

SEQ ID NO: 756 - DNA, 1099 bp, Homo sapiens
ttttttttacaattattaagccaaatttatttcaccccctttttaaaggtactcctaagcggggaacaatgcaccaagacactcctgctccatggcatctttagttcaggcaacctggcagggactgtgcttctcccctcctgcctcaaagaggcaacttttaattgtagagatctgcaaagtgctcattgtccttaggttgtctgttatcactcaaatgcccaaattctgtttttgactgacccaggctcactctgtgtgaacagttttaataccaccctcaacgtgggataaggttagctgttagcagcaaaattaagcagatgctttctaggaatattcctagggaagatggtaaaaaaaaaaaaacaaaaatgtgaatttagcagtttgcctcacaagattttcacttttaaagaatactgtcttaatgcccacctcctggcaatatccaggtaatatccagctcactggttaattttggatggtggagggtgggaggagagacaagcagcaaggttttctccttagcaaaacagaaaaacgtgattctcttctcagagtacacctgaacaataggagtcatctaaacaacaggaggacataagcatttctgcatggacggaagaccaggcttctgtaggcatcacaggatgacagcagaagcagcacagtacagggcagagcaaagtcgctaagtgcttatggttcaagaggctggtttcaacatgcaatgcattttgttaatgacgttttagcctaataaatgcccttctaacagttcaaggaaagggtcactatccttcctgaaataactttcttggttttacattttattcagaaatacatatttaaaagatcatttcatcaatcttctaaacttttttggctgattagaataacatataccacaatcaattttttacttacccttttacttttttttatctatgtacactctgcctactcctttttaccaccatctaccacaagaaaaatgagactcatcttttaaacttatggtacaacaaaaagacctgggtcagaatcttggctctgcatttactggtgttataggtacagtcactaattccgtttt

SEQ ID NO: 757 - DNA, 1600 bp, Homo sapiens
  misc_feature (1)...(1600): n = a,t,c or g
agctcagtgtcctggttactgcagcggcanaagcagcaggtcctactatcgcctccctctagtctctgcttctctggatccctgaggagggcagaaggtactgaggaaggttaaagggaccagccttggagtatttccccactctgagactcagctggccacaggccaggttctgaagttcctttcttccaagccagtgattctggttcttgggacaaggtgttgaggaacactaggaaacagaggggactgtgacctggggactttttctgcaggaagaaaacagcccaaagatgagagtgattcgcgtggggtacccgcaaggagccagcttgctcgcatacagacggacagtgtggtggcaacattgaaagcctcgtaccctggcctgcagtttgaaatcattgctatgttccaccacaggggacaagattcttgatactgcactctctaagattggagagaaaagcctgtttaccaaggagcttgaacatgccctggagaagaatgaagtggacctggttgttcactccttgaaggacctgcccactgtgcttcctcctggcttcaccatcggagccatctgcaagcgggaaaaccctcatgatgctgttgtctttcacccaaaatttgttgggaagaccctagaaaccctgccagagaagagtgtggtgggaaccagctccctgcgaagagcagcccagctgcagagaaagttcccgcatctggagttcaggagtattcggggaaacctcaacacccggcttcggaagctggacgagcagcaggagttcagtgccatcatcctgggcaacagctggcctgcagcgcatggggctgggcacaaccgggttgggcagatcctgcaccctgaggaatgcatgtatgctgtgggccagggggccttgggcgtggaagtgcgagccaaggaccaggacatcttggatctggtgggtgtgctgcacgatcccgagactctgcttcgctgcatcgctgaaagggccttcctgaggcacctggaaggaggctgcagtgtgccagtagccgtgcatacagctatgaagatgggcaactgtacctgactggaggagtctggagtctagacggctcagatagcatacaagagaccatgcaggctaccatccatgtccctgcccagcatgaagatggccctgaggatgacccacagttggtaggcatcactgctcgtaacattccacgagggccccagttggctgcccagaacttgggcatcagcctggccaacttgttgctgagcaaaggagccaaaaacatcctggatgttgcacggcagcttaacgatgcccattaactggtttgtggggcacagatgcctgggttgctgctgtccagtgcctacatcccgggcctcagtgccccattctcactgctatctggggagtgattaccccgggagactgaactgcagggttcaagccttccagggatttgcctcaccttggggccttgatgactgccttgcctcctcagtatgtgggggcttcatctctttagagaagtccaagcaacagcctttgaatgtaaccaatcctactaataaaccagttctgaaggtgaa

SEQ ID NO: 758 - DNA, 650 bp, Homo sapiens
ttttttttttttttgaaaataaagcacatttattaaggcaaaggccaagctggccgcttcagaacatggccaaggagcgtgaagggattgctccactttaccaccactcagggcacccaggccccaggggtcctgggtccaccccaggccagcagaagctatgaagcttacgcataagcctggctctccctcttcacgaaggcctggaagaggctgcccagctcccagaggggtggggcccactcgccggccagcagcccctgtgtggcctcgaggccttcctgctccagatcctgctgtttctgctggagctgctgcccccgatcctgccccaagggaaagctgagatgagtctgtccgggacaggcttcccgccaggtgaaggggggactgtgtaccacctcacacaagcaggagaaaggagataccccccgacattccccaaaggcagttgctggctttgaagggaggaactcctctccccagctctgaaatctcttccactccctagttccttcatatttccagagtcccactgggagtgggggaggtctatcatcccctcaaggtagcccctactccctgggggatacctgatctctctccatcagccccagggctgcctggtgtccacggtagagggtatgccc

SEQ ID NO: 759 - DNA, 638 bp, Homo sapiens
agctggggctcagcctcttgtcatctggagctttgtgggcaaagctggagaagctgcaacccagatttcaacccaaaaaggtcaagctgaatgcctcagactgatgtggaaggcagctggccttcctgggttggaacgaggcagtggccctgagccccttctccagggccaggtagaaaggacaaacttggtctctgcctcggggaagcaggaggagggctagaagccagtccctccccacctgcccagagctccaggccagcacagaaattcctgaggccaacgtcaccaaagttagattgaatgtttattatctttctttttcctttttaccttattgatttgatgaatcttgaaatggattcatttccataaaccaagttaaagtatggcccgaccatttaagaaaacaaccatctgagacacgcaggaaattgtgagcatttcgacccgagctctcatttcctatttgtgaagggtcagacacagtctacccaggggtgtctgggggacaaggggttctctggagatgtcacccagggagccccctctatgtctgagaggctgccactgctgcacatgctcagtgaggcttgggcggccatcctggcacatggctcttcctgggtcaaccgtga

SEQ ID NO: 760 - DNA, 1365 bp, Homo sapiens
gctcattaaatatacatgtatataaaaaacatacaaaaagtacaagattatgttaggaaacttttacagtgtcaacatcctgatttctcaaaatcttcagtagagggccaaaggtcaaaactttctgtgcacaaaaacttgatgtgactgaaatcctgaatcagtgtcatgcctaggcatgctatgcacagaatgaattttaatatgcagtcctcttttaaaaaaaaaaaaaaaggacaaaaaaagtaaccaaaaccaaaaccaaaaacacaccacaggacaaaaagttcttcttaaatcaaattctatttgtgaattcagcaaaataatttctataaaataaaacagcaaaatatttaaatagaatagggtgggctgtatctgtttgcaggggtatttggtttttagacaggttccaaaaaattacacacattcaagttaccaattctcttttaaatacagtatgaactgaggatttccttatttttaatcaaatgtttattctgaaattgtaatatctcaattatatcaaccagtagtttcttttttaatgagaccctgctttgaacgttaaacgttttggaataatggaaaaggagctaggacaattcttgctttcaagtaaaattgtgactgagcagaaaatcagccagctatcttggtgcagagaggtactccaagtaccgtggggttctgatgacttccacgtcactgggatccaacagaaggaaagttttagaagattcacctaataaactctaccaaagaaacaaaacaagcacaccaaatacagtcttatattatgctccagcatcttggcatagcaaatttttgcatatttgttttaaatctttaaaaattcccattactgatacgtaagtgttctttattccacccagagattgaactgtcaaacattatatataaggaacatatgtgcaactgaaaatagactgtcacatttctccccttgttttatattttaatattctaggtgtaagaagtaaaagctctgagtaatacagctgtcacttctcggacaactgctgtcattatggtaactttttcctcattggctacactaacttggtgtgaagccatgctaaatgttacagcataactatagcttcaaagtgattaacctaatatcagaataaaaaggcaatgaaaaaaatctagaaacagtgttacatcaccaattttccacatcaaccaaataatttaaaggttaccagccttacattgctcatagcaaaattgactccagtggcaaagaattaacatgaaactattggtgtggctgacatggatgggctctgttttgttgctgttggttttttttttttcttttttgtaaaggagctg

SEQ ID NO: 761 - DNA, 519 bp, Homo sapiens
tagacatcaatgttaggcttcagaagtccaaggaagaacatcatgtgtgtggtgaatatgaagaacaggatgatgtggagagtaatgactctggagaagaccagagtgaatataatacagacacatctgctctgtcttctattaatccagatgaaataatgttagatgaagaagaagatgaagatagtattgtaagtgcacatagtggcatgaatacaccatcggtagaaccttctgatcaagcttctgagttttctgcaagtttctctgatgtcaggatcttgccaggctctatgattgtatcttctgatgatacggtggattccacaattgatagagaggggaaacctggtgggactgtggagtcagggaatggagaggacttaaccaaggtgccattgaagaggctgagtgatgaacatgaacctgaacaaagaaagaaaattaagaggaggaatcaagccatttacgctgcagtggatgatgatgatgatgatgcagcttaagatgatttacttg

SEQ ID NO: 762 - DNA, 1182 bp, Homo sapiens
ttttttttttaaacaggtggaaaataactttttttttgagaaaactgattcagttgtgttggaaaaaataaggaaatctgattttaaaggttttctaagatcatttgtatgggttcagtgtattcataagaagtccaccctgagatgcctgtaaaagtcaaatgtaattacacttcaaactttaatcctaaattattgacagatagatagatagtgaccaacttaagggtaatcatatatgtgactaacatttgggaggaaacaggaaaacagtggtctcaaaacaacaatatcccagtctccatttgaaagagcatagatcttggtaaatcattttgaaaactatgtgctttatttcccaaaagatcaaacttaatttttaaaagacacccttttcagaagtatgggttttcattgctgtttagtttcttaggtgtggtatgtcttacgtagcttatgcttacaaagccaaataatcgcagggcaaggcagataaaggcaggcaggatagtgacagtggctcggtgagcatccgccaagggcctcagaccactgttaccataaaaacatccacccagtgttatgacgtccgatttttttttcccttaagaaggtggaaatatggcttttaatacataggaaaccttcagtttttaaatgcagggcaaataaacatttttaaacagtgccagccagactgccagttctcaaacagactgaatttccaaagcacaaccttttcatgtttataaaaaatagaaatggcatttagggatacattctaggatttggctctgacttctaagttgcactcttaggaagaaggagaggataagcttaggtcagctgcagaggtcattcccatgggggagtggctggggaggaactgggctatgtggaaaagactgtgcgcccgtctacggatgccttctctcttgatttcaatgattgatagcatgtggctttcagacctaaggaagagttagagctttggagaatcacaatgcctgtgattgaaatcaggatttaaaaaagggttagaggcataggggaaggctaccattacaggaagtagttggatcttaattttcacatgtatagggctagacagcttcatctgtaaagttctgtatttccataattgttttatctttaggaagtccagtgtaaagatcttccagc

SEQ ID NO: 763 - DNA, 875 bp, Homo sapiens
ttttttttttaaggcttatattacatttaatagtgttaattttgaagacaatagtgttaatttcaaacttccataaagggtaaccctacagttgaggtgtttgatgcagaaaccagtacaaatttcgattgttaggaaaccaaatgttctgaacattattttcattagaaaagggaaggtaattttatagttgtttgaggtgttgtaatacatctactgataggcccagctgtttaactaaactggctgtctgttccaaaatccatgtggggcttgggttttctgaatgtgcatgctcctgtgttctacaacattctacatatgaacaatctatcccactatgggctcttgctacagtttttgttaaactcagcattattttcacagagtctttcatctttagcttcatcaatctttttctcagctggaactacatgacaaaggtccatatcctcaatggagtccaataaatctacaacatgggacggtggagtgattgatttcagatgtttgagcacatactcttcacactggccaactgcatccagaagattgtttattttattgatcaaagttgaattattattatgaaggtgacaccaggagagcaaagcactcaatgttcctcggagtcgtccatagtttaaaatgacttctgcacctttcttataaccttgattgaagccctgttgaagagtaactgctttgccagcatctattccatctctataaccttctttgactcgtctttgcatgttactctgccattcccgctgtgccaggagcgactcgtctgcttcttcgtcaaacacgtcccctttgtctccagggccctggatcaaggaggctgcttgaacccacgacatcaccgaggc

SEQ ID NO: 764 - DNA, 1595 bp, Homo sapiens
tttcatccaaaatagtagagatgtctttcccacgatgacctgtgatggtggagatatcttttcctcggccaactcctcctccatcggcttctttgatgtcatcttcaatagcttcatcaattgcttcatcaaactcatcaaatctgtagcttatacatttccttgttcttgttgacctcctttcaagcaagtttgctttggatttttttgaatcttttttcttttcttcttgatcttcagaaaagtctggctcttgtggaggaatgatgttttcaatactgataccaacatacaccaagcgttcttttcttcgttcggcacgctctttcttctttaaggcaacatccaaatcctgcaactgttcctctaatttttcacagagcagtttatgttggcaaggtgggcagaaccattctccatctgggatgatcatcagaggagggcgaaggcagggcagtatggtatccactatcgcaagagtcacacagaagaattagctcaggatggtttggaaggccacattttttgcatggttcatcatcatctgctaggatggcttcttcactttccttttcttcctcctcttctgaagctgcagatgatttttcactgccagacccttcactttcatcattgctggaatatttccatctgccacgtgtccgagaaccagtccatcgaactttgcctttgggttttactttagaatttgtatctttctctgaatttttcaaaatttcctttttgtcagttttttgcaaagctgttgactcttcttccacctcatcttctccttcccctctttttttatcagctttctgatctctgatctcagccacttttgcagtgggtctagatattcttggagatcttcttaaagtacgacccacatttgttttctcctcttccttttctgtcttctcttgcttgttttctggttctagaactttggggggagaatcgggcttctttttccgacttgatatcctgattgttaatttgatgccctctttctgcctttcagaggttatctctgtattttctgaggcagtggtttcttcttcaggaaccaacttatatttgaatttgcttttttgcatagaaccctttgtctcagaaggctcctctatgccagaggtctgggcattgtccagattatccatttctacctttgtgaactcagaatcctcttttagggtttctaggtctacttttttcacagactggccaccaacagtacttgtactctggcattctaccacttctttttctgaggctagtttctcacagtggtcaatgatattagatggtggagaagtttcagctgcctcaggagagccaggcttttctgactctagagtactctttggaacttcttctggtattggactcaatctttgtgcgtccttatcaagaaaagtctttttggacttctctaacttttcaagacattctaggattggtgggcgcttatccttcttagttttgggagacttctcttcacctttcatggtacacgactcggtggaagataaagcagtttttgaagagagatcttttgccatctcagaagaatcaagagaagtttccatttc

SEQ ID NO: 765 - DNA, 707 bp, Homo sapiens
ccttgacaatctactgtgccactgtgctactaactcttgtttacaaaatttgattctaagttgaattgcttcattcaacacccccaccctccctcccctcgaggtggtacctaagctgtggatttgctaaatgaattaagcaacctagaagatacagagctaatgaattatcaaaatgtgattaatcccagtaaggaaacactcatttagtgtctgtatttttgggtgtgaaaattatttagttgccagtatattctgaagaatgtcttcttgatcagtcagataagcttgcttttttttttttttttttttcatgaatcatgtttggttcctgtgaaagtccctggtccagggatcctcctcctttctcttttacttctgaattctgaaattcagttagttacttttgcctttcgctcttctatcacagccaccttgaccttgggtaaaacccaaggtctttccttctggctaccttcctgcaggtccaccctgtctgccattggtctcctctgcctctgactacatctgccaccaacaaccctcccctcacccctgccaggggcagacaggcttctcagcagaactgtgactgaaatcagagctgctgtctggggcagtgttaactacacagaggcacatcctgacagggtttgccccagagatctaaattccagaaggagggcaccacacctaggaaggtaaat

SEQ ID NO: 766 - DNA, 2082 bp, Homo sapiens
tgaggccgccggccagccgccgccatgggtgcctacctctcccagcccaacacggtgaagtgctccggggacggggtcggcgccccgcgcctgccgctgccctacggcttctccgccatgcaaggctggcgcgtctccatggaggatgctcacaactgtattcctgagctggacagtgagacagccatgttttctgtctacgatggacatggaggggaggaagttgccttgtactgtgccaaatatcttcctgatatcatcaaagatcagaaggcctacaaggaaggcaagctacagaaggctttagaagatgccttcttggctattgacgccaaattgaccactgaagaagtcattaaagagctggcacagattgcagggcgacccactgaggatgaagatgaaaaagaaaaagtagctgatgaagatgatgtggacaatgaggaggctgcactgctgcatgaagaggctaccatgactattgaagagctgctgacacgctacgggcagaactgtcacaagggccctccccacagcaaatctggaggtgggacaggcgaggaaccagggtcccagggcctcaatggggaggcaggacctgaggactcaactagggaaactccttcacaagaaaatggccccacagccaaggcctacacaggcttttcctccaactcggaacgtgggactgaggcaggccaagttggtgagcctggcattcccactggtgaggctggggccttcctgctcttcagcctctgacaagctgcctcgagttgctaagtccaagttctttgaggacagtgaggatgagtcagatgaggcggaggaagaagaggaagacagtgaggaatgcagcgaggaagaggatggctacagcagtgaggaggcagagaatgaggaagatgaggatgacaccgaggaggctgaagaggacgatgaagaagaagaagaagagatgatggtgccagggatggaaggcaaagaggagcctggctctgacagtggtacaacagcggtggtggccctgatacgagggaagcagttgattgtagccaacgcaggagactctcccctgtgtggtatctgaggctggcaaagctttagacatgtcctatgatcacaaaccagaggatgaagtagaactagcacgcatcaagaatgctggtggcaaggtcaccatggatgggcgagtcaacgggggcctcaacctctccagagccattggggaccacttctataagagaaacaagaacctgccacctgaggaacagatgatttcagcccttcctgacatcaaggtgctgactctcactgacgaccatgaattcatggtcattgcctgtgatggcatctggaatgtgatgagcagccaggaagttgtagatttcattcaatcaaagatcagccagcgtgatgaaaatggggagcttcggttattgtcatccattgtggaagagctgctggatcagtgcctggcaccagacacttctggggatggtacagggtgtgacaacatgacctgcatcatcatttgcttcaagccccgaaacacagcagagctccagccagagagtggcaagcgaaaactagaggaggtgctctctactgagggggctgaagaaaatggcaacagcgacaagaagaagaaggccaagcgagactagcagtcatccagacccctgcccacctaagactgttttctgagccctccggacctgagactgagttttgtctttttcctttagccttagcagtgggtatgaggtgtgcagggggagctgggtggcttcactccgcccattccaaagagggctctccctccacactgcagccgggagcctctgctgtccttcccagccgcctctgctcctcgggctcatcaccggttctgtgcctgtgctctgttgtgttggagggaaggactggcggttctggtttttactctgtgaactttatttaaggacattcttttttattggcggctccatggccctcggccgcttgcacccgctctctgttgtacactttcaatcaacactttttcagactaaaggccaaaacctaatcgtaaaaattaaa

SEQ ID NO: 767 - DNA, 1088 bp, Homo sapiens
  misc_feature (1)...(1088): n = a,t,c or g
ttttttttttacagtgggctgtagtggtttatttatggtcttctataaaaggtcaccatagggagaagtgggagtaacagggaactctcaaggcaacggaaatgtaaatcttaacatcttgtctatttcaggtgatattcttgccctttacaatacagcactgaagccaggacatgcagctgcattttcagaagattgtgattcagcctctactaaagttgtcatccgtggagcaggaaaccaggtaaattgcttaccaaacacccctcttcctacaatattgtttaatgggaagaggttgcaaattcagggaactcttttgctgcaatttacactccccaatcatttcatcccaaaactcaagcctgcttttctgtagacttcttcatggacttgacagcctaattgttcttgaacatctggtttattatgtcaacatctaggttcctattctaacttggaatttcaaatatttattttctaatctgaagaagtcagtttaacagctcttctctctactggctataaaattgtatctattttgtttgaagcagtaagtacatatatcctatttgtgtttttagtacaattacattggctatcttgactataaaaaggaaagaattcgtaagctttccatgaaagccagcacttgctcatttaatcctggagtttttgttgcaaacctgacggaatggaaacgacagaatataactaaccaactggaaaaatggatgaaactcaatgtagagtaagtatgtaactgggcctagctgtgaaaaaagtgttgtatttcaattcctagagtcttgactaacaggagttagtcagtacttttcactaacaaacatttgttttctgtcccaccaagagagggactgtatagcagaaccctggctggtagcatcacaacacctcctctgcttatcgtattttatcaacagcactctaccatcgatcctatgtggaatgtccgccaccttggtaagtagaattaaccagtggcataagctagtaaagaattggtatcctaaaggactatcctccaggggatggggtatattcctntggttccccttaagtaagtt

SEQ ID NO: 768 - DNA, 427 bp, Homo sapiens
  misc_feature (1)...(427): n = a,t,c or g
gggagcaggcctcggggcctcagaagcaggcttttatctggcccgaggctcccagccgttcagcgcgtcttcccataacctataccgattattgggactctcggctgcagacacaggagtcacagatgctgggaagtatggcccgaaagaaacctcgaaatacctcaaggttgcccctggctttaaaccccctgaagagcaaggacgtgttggcagtgctggctgagaggaacgaggctatagtaccagttggggcatgggtggaacctgcctcaccaggtagttcggaaatcccagcatatacatcagcatatttaattgaagaagaactaaaggaacagctaanaaaaaaacaagaagctttgaaacattttcagaaacaagttaaataccgagtaaatcaacaaattangttgagaaaaaagcg

SEQ ID NO: 769 - DNA, 1654 bp, Homo sapiens
tttttttttttggaattggtttaaggttaaatttccaaaggagaccccaaattattattattattaaactatctagggcaagggagtagggtcaggtcctccccagcccagctgtaccctccttcccctctggcagggagagaaggggcctcccagggacttcccctcccccttagaacaggggggtgcgagctggtatggatgccctcctgggcttcctgggggctctgcccactccagactccagtttgtccaccccctgcagggtcctacatgcctaagagagcccttgtggtagaggccagcttgctaggcagctaggcaggagacccctacaaggtccaggtaaaggccagggctgccagagcccagcagactggtgaggtgggaacccagcccaggcctcgctggcacctccagctgcctgcctatggtcccactggcattgctcaccactccagcccaagtagcactggcagcggaagtgtgtctgcaggtggtcaatgtcggcccaactgagctcccccacaggttcgagctggggttcaccaggtgcatggccaggcactaggcggaaactgttggtgctgagatgcaggaaggtactggcactggggtttgcggcacacaagcgcccatggccatggcacttgggcccggctgcaaatattgggtgccccaggacacattgaccacgtaggggaccagcagccgtgtcaggtaatctttgaggtactggcaggtctccgtgcttgtggtgtaccccgcgtcaccccagaggatgacaccagctgcgcccagggccgcactctcgccaatggtagagatgaggtccatctcactaagccccgtgagcctgcggctgtaggtgggtcgtgtgaagacgtagactgggagtgccatggttggcatggtgggtgcgagccacacgaagggcctcctgaacacggaagctcacaaagttgcggccatggcgggaggaagcaagtgtctcgtccaggtagacagacgggaagagggccgtgctctcagcccacagccaggccagctggtcattgcgggccacctcaacatcagggcagcggcctgtgtagctctcccagttctgcacataatcatgattgtagcagtcaggaaagaggtagaagccccagaggtgccggggccgcactgccttgacataacgcagtgtctccagcatgaactgctgtgctgcgaactcaaactcatattgtgcctgtttgactatgcggtctggaggccagtcagggtgacgactggccactagctggcgtgataaccggcgatacacatctttgtcctgccagttgcgcacccacacaggtcgccagtcctcccagtcgatgaccgccagccccgcagactcctgtgtccgaatgtagtgctccacacgtttctgcagcatcttccggtgtgcccaaaggctgacattctgtggcacaccaccatgcacagaccttccggcagaatcgaagcgtggatacaggcctagacggtcgcggtagaagatggtaatattctggttcacaaaaccctcattaggtgaggcctgcacatcaaaggcattcaggtccagtggcaccttgaggcgtgggccacagtcctgtgtgggcacgtcccacgctaccacaaa

SEQ ID NO: 770 - DNA, 1011 bp, Homo sapiens
ttcggcacaggagatggcggcggaggaacctcagcagcagaagcaggagcccgctgggcagcgactccgaaggtgttaactgtctggcctatgatgaagccatcatggctcagcaggaccgaattcagcaagagattgctgtgcagaaccctctggtgtcagagcggctggagctctcggtcctatacaaggagtatgctgaagatgacaacatctatcaacagaagatcaaggacctccacaaaaagtacttcgtacatccgcaagaccagggcctgacggcaactgtttctatcgggctttcgggattctcccacttgggagggcactgctgggatgacagcaaggagttgcagcggttcaaggctgtgtcttgccaagaagcaagggaagacctgggtgtcccaggggctttcacttgaattcacaattgaggatttccacaacacgttcatggacctgattgagcaggtggagaagcagacctctgtcgccgacctgcctggcctccttcaatgaccagagcacctccgactgaccttgtggtctacctgcggctgctcacctcgggctacctgcagcgcgagagcaagttcttcgagcacttcatcgagggtggacggactgtcaaggagttctgccagcaggaggtggagcccatgtgcaaggagagcgaccacatccacatcattgcgctggcccaggccctcagcgtgtccatccaggtggagtacatggaccgcggcgagggcggcaccaccaatccgcacatcttccctgaggggttccgagcccaaggtctaccttctctaccggcctggacactacgatatcctctacaaatagggctggctccagcccgctgctgccctggttgcccccctctgccagggcgttagacatgtacagaggtttttctgtggttgtaaatggtcctatttcacccccttcttcctgtcacatgacccccccccatgttttattaaagggggtgctggtggtgaaaaaaaa

SEQ ID NO: 771 - DNA, 325 bp, Homo sapiens
ggcatcatcgcccctctcctctcgggggttgcccaggaggtcagcccttgcggcccccccagcctgggtgctgtgttagccttagtggccattttcataatgtctctaaacaagcgacactctagtggtgatgggaatagtaaattaaaaagtgagtagatggatttggacaacataaagcaacaaaatttgagatggttgaatgagggccggaggccatgatgaaaagggcactttggaaagggttggggtggaagggaaatatttccgggtgggtgtgagctgttgggcttccaggtcagctcttggccatgcagccatgcct

SEQ ID NO: 772 - DNA, 627 bp, Homo sapiens
  misc_feature (1)...(627): n = a,t,c or g
cagatgagaaaaattatgctacaatagttgttggttttccagatctcatgtcacccagtgaagtttattcttggaagagaccatcatctttgcataaacgaagggcactgatacatcattctatagaggaaagaagaaaagggggactccaaaacaaagcaattgtgtgactcttttagatacgaatcaggtagtgaggattttacccccagggagaagtccctctaaaagatatctacccaaaagatgttactcctccacaaacatctggttatatagaagtcactgatcttcaatcaaagaaactccgatatatccctattcccagatcagaatctctctcgccgtataccacatggctgtcgaccatttcagacacagatggcactgctggctgagtgggacaaaagcggtgttgttactgttgatatgggaggtcacatcaggcttttggggaaactgggacttgaacgtctgcagcgatcactcatggaatggagaaacatgattggacaagatgacagaaatatgcagattataatcaacagagacagtggtgaagatgtaagctcccccaaacacgggaaggaggacccagacaacatgcctnacgtgggcggcaacact

SEQ ID NO: 773 - DNA, 348 bp, Homo sapiens
ggaaatgatgctcaggggaagtgggggtcctgggaggtgggaagaggagtgcaagagggcagtaccaaatgcccagaggatcaccaagcagcgatgacacccaggagcttggggcctcactttcagggtatctgcaactgatctgattaagtctgaacttggggggaaaaacagaccctaaattactagtctagtgtagagtctcctgtccacagaggttcatgccatggaagacagcaagtgacatctgttttaatttatattttcataaggcagtaaggaaaataattagcttaattattgtctcccttacgcaaaagctatttgaaaatctctggataagccttg

SEQ ID NO: 774 - DNA, 336 bp, Homo sapiens
ccagccactgtgtgaccagctgtcctcctgtggggccagcctcaatagtaggggtcaaaagagggccagggcttctctgagagagctggctgtgcactgcacactggaaagccaaggagctaggcatccctctttcttgctgccaggctctggaacatggccactgtgactagatgtagtcctactctagaacaaccctcagcacacagggtaagaacatggatcaaagacagcaccatgggacaccctgctggcatctggtagatattacaggtgtttctcacttgggtcagacttttctccccgaggcctcccaactggaaaaagcaggctggc

SEQ ID NO: 775 - DNA, 1589 bp, Homo sapiens
gttgacggctgcgactccattttgtaggccgcttatttgtgtgcatccacggcgattcttcccgcagagttgtgaagcgcaaaggcttacaattaaaaggaagaaaaaaaaaataaagataattcgggagtacaattgacaaagcgtgtgggtcgctcagcctccagcagtaactgctgatctccagttcttggagggttccggtgagaagaacgcccctactgcggtactgaggaagcggcaggaggagatgcggcccctggacatagacgaggtggaagcgcctgaggaagtggaggtgctggagcccgaggaggatttcgagcagttcctgctcccggtcatcaacgagatgcgcgaggacatcgcgtctcttatacgcgagcacgggcgggcgtacctgcggaccaggagcaagctgtgggagatggacaatatgcttatccagatcaaaacgcaggtggaggccccggaggagagcgccctcaatcacgtgcagcacccgagtggcgaagccgacgagagagtgtcggagttgtgcgagaaggctgaggagaaagccaaggagattgcgaagatggcagagatgctggtcgagctcgtctggcgaatagagagaagcgagtcttcttgaaggaggagatcggtggttcacagctgaggactgtagtcaactggtaaggatgaactgacaccttgaggaaactgaaacagcttgtcattttctctgttttgtttttgtatgttttttacccccatgtaacagtctcccttatggtcagtgattgatgacctcgatatggatttagattatcaaatgtgtttggttttggaaatataacttttgtcaaagaaatactctcagaagagaaatggggcttaattaagttgtttttgtggtcacgtttattcttgttacttcgctgtgtttttgaaatgttgggcatggcctcgtattttgctgttacctttgtgacctgattgttttttggaacacgtcaagacgtgggatcagaatcttccaactttagaggtgcaatggaagacactacgctacttggttgagcctggtgaagaatgtattaatgagactgctttgcataaaactgggaagaaagagaagacagttggagatggaagatggttttgtatatattttggaactttagttcctctgtgagacgaaagaggagagctatgttttgtgtcacattgtctgatatatattgtgtaacctgtcaggtgagttgatttagacaacatagctgaccttttatgacaaggcagtttgaatagggactattgtaataccctcacacattataggggcatcagagaatggcatggaagagacagtctacagagagctttaagaggccggagaaaggaaaagacattatcagggcctggaaagtctcttccagttcatcagggtagtagacctgtcagattggaggtcaaagtcaaaagtataataagtgttaatttgccttgaaaaacaaagacctaaaaagccttttttaagaaataaattttttgttcacatgaccaaagcccctcctgtgtgtgttaataaaagaatcataaac

SEQ ID NO: 776 - DNA, 957 bp, Homo sapiens
tttttattaacaatgtggcctgatcacaattctttaaagtctagactagttttccgtatgttttccacattttattctgacatcatatcttttaaaaacaaaaggatgcgaacatttgcacttctcaatgtttttttttttcccatagatgtagtttcacttatttccttcaggctttttatcagcaagaagcaatgtctgattttgataccacccatttgctatgaaaatataagaaggcgtcatcttcaaagcaacactccagttgggcttcttcatcgtttagctgcatgatttcttctacgacatttgtaacagacacaacgtatatagaatttcagtttgggtattttttatccttttttttcttttttaaaataagtatgttttctgcttatttgtgttttcttttctttgaatatattgcacaatattttattattaaaaaaaggttttatgtctcaggcaaaaagtttttctccttcaatcgggaggtgttaatgtgtattattttctaaaagaggtaagtggttgtctgtgtggccatcctcaaaaggaacagaattgacaggtttataggatccaagtctgaaacgacagcaaattatttcaactataaattttccaattccatgtaacatgcctgttgttgaaaagattcctccaacaataccacagagtcttacaaaaaactgccagaatggcatgtgctcctcagtaactgtcaccataagagaactgagatcatatttcataaatatcccagagactccatggctgcctgcagcatggttaatgatacgttccctttctgtcacagaaaactgatgggtgtctgctgatattttatatgtatgtagttttgttggcacaactgtaataaaatattggaacatctggttgtgatctatagcaattttttcagttccatctaaaggattaataattgctggaacc

SEQ ID NO: 777 - DNA, 540 bp, Homo sapiens
ccaagtgaggaaatggaaaactaagttatctcattgcttacatagttatgagccaagactttgcaaagttgtcttatggagtcagagttgataacgtaagtacgttttctggatataagaactatcgtggaccatgaagaactgagtgtcagtttcatgtaacgaccgtctattcaataatctgctagaggttgataacaattgatcctactcttgagtgcttcctgtgaactgggcactggaggaacacagtgtagcaagttgatggttctgagcttgtgaagatttcattgtgaagatgtgcctggttagctcccacattcggactcaaggatctcagaagggtgaagcaccgcaaggtttctgggagtttctgtgggagctgcagaatctttgcttctgtttctgattgaaaatgtatcagaatcctcagaaaaggaggtgttattctctgatgtgctcagcctgggttgacagctgaggggtccactgggaggagctgggccatgaaacctcctgcatgctcatctccttggggaa

SEQ ID NO: 778 - DNA, 337 bp, Homo sapiens
atgagggtgatccttattcaaaaataacatctgactactataaaaatatttgcatatataagtttgacaaagaaaagaaaatcaatgttaaaccattaaatctgagcactgttagacttgattaatccatgcacatgattttttttgagtagggagcattagtacctggtgctagagaatagaaccctcaaataatttttagaattcttacctaatatgtaaaagtctgcatgactcttaacaatgagtcacatccattgattttacagggattttagttcgtaatccagaaagtaataatcagggattttattttaatcaggcatcaatccagatt

SEQ ID NO: 779 - DNA, 725 bp, Homo sapiens
attcggcacaaggacggggggtttacctggcttttatgaccaggcatagtatctattatatttgctttgtaataggcatgatgtggaaataccatcttggtttgagatgcatttgaggattttaatttatggaaagcacaacatatgcaattatatttattgaattcctagatgcagtatggatatttaaattgttaaaactttatgaaaacttggaaaaggttgttcaggtttataaatagctttagtgatgcctcccctctttaaatacctgtcacaccgtatgaatatggtgagatcagactccctaagactcttttcaggttcatttttataatgtttactttttaggacagaacagtaagctaaattaaaagtaatatccagttcttactgatttgagaccagagtggaaagaaagacatcattggtacatcactgtcattccaaaggtacagtgtaactcctgggatggaggaataacttacctatcactacaacacttacaaatgagaatttctcagaatttcattctaggcaagttccactcaacaccagatcaagcaattctatctatttacactattagcctagttttctcatacagtcatcacaagcataggaagatacttcaaaaccaaaaaaaccaaggtgcatcattaatattcatttaattcaaataccaaatagtttacatagggccagcttagaaatagatactaaat

SEQ ID NO: 780 - DNA, 1120 bp, Homo sapiens
acaaaataatattgttaataacataggaacatgaacatgaaaacaatgtaaacaggttagaatttttgatatgatactacaaacgtgattttgatcgtacgcaactggtaaaattctatgcaaaaggattaacaagacatatcataggaaatcactttgcccaatataagcagttctcagcacatactcaaatgcacacaaacatgaaaatcggaaataaaggaatgttaaaaaaataacttaggcagacacaaataaaaccaccccactagtgtatgaatgatgcatgtttttatgatcttaattacatttaaggatttaaaaaatgccactgatctcacagtttacaatatccaaatcttcaaacctgctggaagaagtccacagcacagcctggaaattgcatccgttgcattctctcgtgcagttaccttctgccttgatatgtagtcagttcttcctgaaggatggaagctctcttttgcagaaaattaacctgtgattttagggaggaaatggtgtcttcaagttcttggtcttagggatgctggcatcaatcctttcaattttgtttcatattcttgtcggtatgtaagttatctgttcctgtgactcccaattctttgtgttgtaattttttctctgcacatcgcacctgattagaacggttttctaattcatcttgtaaaaccttgattgcttggtcattatctctaatcagctgcttcttctcatcttcaaacttttgtctaacatcctggagccgccttatacatggcaagctgctgctggctgttctcttctttcagagaggaaatggttgtctgaagttctgctatgatctgtgaagatttggcaagcttctgagtgtattccttctcaatctgcttcagcttgctgttggccttttccagtgtcatctctgtctcagcagcatgagtctttttcagctctattttcatcttttctgattcagccttcagtttattgacgacaatctcatgttcccttgtagccctttgcttttcctcttcacgaagaagacaaagctctaccagctgctgtttccgctgtgagttcacattgatcaattcttctctcaacttgtgaacctgggcct

SEQ ID NO: 781 - DNA, 1563 bp, Homo sapiens
tttgttgttggagaaaggagagaaaggaaagcgcgaggagccgccgccaccaccagcgcagcaggtcctggagctgtgaggagattcgggccgtcaccctgcctcccctgcgtcccgccaccggccgcttctgtcctcggacccattccaacaatctcgtaaaacatggtggattactatgaagttctaggcgtgcagagacatgcctcacccgaggatattaaaaaggcatatcggaaactggcactgaagtggcatccagataaaaatcctgagaataaagaagaagcagagagaaaatttcaagcaagtagcggaggcattattgaagtgctgttcggatgctaaggaaacgggacatctattgacaaatatgggcaaagaaggatttaaatggtggaggaggaggtggaagtcatttttgacagtccatttgaatttggcttcacattccgtaacccagatgatgtcttcagggaattttttggtggaagggacccattttcatttgacttctttgaagacccttttgaggacttctttgggaatcgaaggggtccccgagggaagcagaagcccgagggacggggtcgtttttctctgcgttcagtggatttccgtcttttggaagtggattttcttcttttgatacaggatttacttcatttgggtcactaggtcacgggggcctcacttcattctcttccacgtcatttggtggtagtggcatgggcaacttcaaatcgatatcaacttcaactaaaatggttaatggcagaaaaatcactacaaagagaattgtcgagaacggtcaagaaagagtagaagttgaagaagatggccagttaaagtccttaacaataaatggtaaggagcagctgctgcgcttggataacaagtaattcaacgcacgcacttaacagaaatgttaaactataacaagcaccatttgaggattaacaggaacatttttttgaagatttcaaacgaactcgactttcagtataattgtacctaaagtatttataaacagctcatcggagcctctatttgtcatagacttttgagttgattgttgggaccacataataggaccattttttttttgtctttaaaattgttgtaaatctctgtatgcactttgcttttttattaaacgtactccaaggtgagtcttgactctttagtgtaggacaagattgtacactaacaccagcatggacctgcttttcattgtgtctgaaatgtgagccacgtagtgtcggcctgctgtgaagttaacattgccaggacgattcttctacagaaataatttcaatttttttcagtatttagtagtgaaagatattaatacattaatggtaatacatttctggtttaatataaattaaggatgttttctagttgtgcatgaatgctggcaacttagtaagttttgacaattgtttaaatatgtaatgttaagcttaggtttaaaaaagtaaagctggtaaactgggtctttgtcatttgctttaaaaaaaaaaaaaaagaaaataaatgcgaatgtgttggtgcattcaa

SEQ ID NO: 782 - DNA, 2495 bp, Homo sapiens
gttcgtagttcggctctggggtcttttgtgtccgggtctggcttggctttgtgtccgcgagtttttgttccgctccgcagcgctcttcccgggcaggagccgtgaggctcggagagcggcagcgcgggtccccggccaggagcaagcgcgccggcgtgagcggcggcggcaaaggctgtggggagggggcttcgcagatccccgagatgccggagttcctggaagacccctcggtcctgacaaaagacaagttgaagagtgagttggtcgccaacaatgtgacgctgccggccggggagcagcgcaaagacgtgtaacgtcccagctctacctgcagcacctcacggctcgcaaccggccgccgctccccgccggcaccaacagcaagggggcccccggacttctccagtgacgaagagcgcgagcccaccccggtcctcggctctggggccgccgccgcgggccggagccgagcagccgtcggcaggaaagccacaaaaaaaactgataaacccagacaagaagataaagatgatctagatgtaacagagctcactaatgaagatcttttggatcagcttgtgaaatacggagtgaatcctggtcctattgtgggaacaaccaggaagctatatgagaaaaagcttttgaaactgagggaacaaggaacagaatcaagatcttctactcctctgccaacaatttcttcttcagcagaaaatacaaggcagaatggaagtaatgattctgacagatacagtgacaatgaagaaggaaagaagaaagaacacaagaaagtgaagtccactagggatattgttcctttttctgaacttggaactactccctctggtggtggattttttcagggtatttcttttcctgaaatctccacccgtcctcctttgggcagtaccgaactacaggcagctaagaaagtacatacttctaagggagacctacctagggagcctcttgttgccacaaacttgcctggcaggggacagttgcagaagttagcctctgaaaggaatttgtttatttcatgcaagtctagccatgataggtgtttagagaaaagttcttcgtcatcttctcagcctgaacacagtgccatgttggtctctactgcagcttctccttcactgattaaagaaaccaccactggttactataaagacatagtagaaaatatttgcggtagagagaaaagtggaattcaaccattatgtcctgagaggtcccatatttcagatcaatcgcctctctccagtaaaaggaaagcactagaagagtctgagagctcacaactaatttctccgccacttgcccaggcaatcagagattatgtcaattctctgttggtccagggtggggtaggtagtttgcctggaacttctaactctatgcccccactggatgtagaaaacatacagaagagaattgatcagtctaagtttcaagaaactgaattcctgtctcctccaagaaaagtccctagactgagtgagaagtcagtggaggaaagggattcaggttcctttgtggcatttcagaacatacctggatccgaactgatgtcttcttttgccaaaactgttgtctctcattcactcactaccttaggtctagaagtggctaagcaatcacagcatgataaaatagatgcctcagaactatcttttcccttccatgaatctattttaaaagtaattgaagaagaatggcagcaagttgacaggcagctgccttcactggcatgcaaatatccagtttcttccagggaggcaacacagatattatcagttccaaaagtagatgatgaaatcctagggtttatttctgaagccactccactaggaggtattcaagcagcctccactgagtcttgcaatcagcagttggacttagcactctgtagagcatatgaagctgcagcatcagcattgcagattgcaactcacactgcctttgtagctaaggctatgcaggcagacattagtcaagctgcacagattcttagctcagatcctagtcgtacccaccaagcgcttgggattctgagcaaaacatatgatgcagcctcatatatttgtgaagctgcatttgatgaagtgaagatggctgcccataccatgggaaatgccactgtaggtcgtcgatacctctggctgaaggattgcaaaattaatttagcttctaagaataagctggcttccactccctttaaaggtggaacattatttggaggagaagtatgcaaagtaattaaaaagcgtggaaataaacactagtaaaattaaggacaaaaagacatctatcttatctttcaggtactttatgccaacattttcttttctgttaaggttgttttagtttccagatagggctaattacaaaatgttaagcttctacccatcaaattacagtataaaagtaattgcctgtgtagaactacttgtcttttctaaagatttgcgtagataggaagcctg

SEQ ID NO: 783 - DNA, 438 bp, Homo sapiens
  misc_feature (1)...(438): n = a,t,c or g
gaaaaaaaagaaaagaaaggctactttcatcgctactgcacatcctctaagtaggttaaggaagatttacttagtagagcctcaagatggatttaagttatggataagaattatttataactaggatatcattcagtattataagtgtctgcagttacttaaggatgctagaaacagtctctagaagtttcagtcttctctctgaagtatactttcaagtagtaactgatttagcaagctcttacacaattagatcaaacgtgcgcttcagtcttctgcctttctgcactgccacacattcctgtctagtggatttttttttttaggcgtggatttttaaaaagngagattttgttgtagttatttagccagggtcttattttagngntttctggttttccactgtttgtagcttgntttaaattgaaatctaatttc

SEQ ID NO: 784 - DNA, 923 bp, Homo sapiens
tgacgaccggtaggtccgcaacggctgcggggacaagaccgttgaggctgccaggcgagtcaggcctttctggacctcgcctgactcggctgggctgtgcctgaaattgacccagctctatcagggattatgaaaaaacaaggagtaagcccgaagccgctgcaatcttcccgccccagccagtctaagcggcggtgcgggcctccccccttcccccccgcctccgccccggagccggaggtagaggaggtggaaaagtcggccctaggcggcgggaggtccttccggcggaggatccgaaatgtggaaaatcgaaaaggcttggagctaaaggtggtggccaagacccttcttctcggccccttcctgttggtccgtaattccctggcgcagtccgggaagaggtgcacgaactgcaggcgtggtggttcccagcagaaccactttggacttcgcagtccttgtggcttatctacattggttacatttagtaaaactttgtgaaaattatcgtcatttctctcacctctcatctttggaacgggagatgactttttgcaccaaaatggttaggtttcttcttctaacgaattaatttgtggtttaagaatagcgagactatgaggtagagatgtattaggaattgaaatgaacttttggtgaactgcactgtttcataagctataacccaggtttattatttaaatagtaaagtgtttgagattatttttctgttacttcattatctctcaccctttcctaatgcagacttctttttaagataatgaagatgaattatagtagctgaggaaggaggacaaagaaagcactgaagaagtgataaaggggaatgaaatgagatgttatcagaaattgctttttctttggctacagttgggaggtcccatgttttactgggtctt

SEQ ID NO: 785 - DNA, 291 bp, Homo sapiens
gggctaaggccaggttgtgatctaagactactaacatgtcctgatcggaagttatcggccccctgctttgttgcctgttctggctgtgagcttgcagggcagggccatgtttattacttgtgtacaccccaagggcatcgttctgtatgaacttgtagtcacttatacttgaaaaaatgttggcttgaaaaaagagccacgctttgtttttagaacactttttctcttaaaaaagataaaactatttttcattttttaatttaatttttttcttttgagataggatgttgc

SEQ ID NO: 786 - DNA, 823 bp, Homo sapiens
gtaagtgtgatattactttcagagaattcagacaagtgagaaacaataatgtaggagtcagcaaagcagaattcagagacttcagccaatcactgctgctctgagaggatccagttagagactcagtatcagcggtcagaacttatctcactcctgtgaactttcaggctggacttaaagctgccaagtttcccctgcagggaaggaaacactgcctcccttcagcaggtagctcattagaaagccaaacaggcaaacgatcctggcctctcccgcccagctgaccgctcttcagcatccatgcggttgtagtcgtgactttctcagtcacgatcaagggtgattttttcttaaatatcaagctgttctttgaacagggaatgaacatgagtttttgtaacgtgactgaagttgagtttaagtaggaagcgcaggaagttcccaagtgccaggtgtgtgtagctccagagttccttttacagtgaggtgtctctcactgggggagcttccagggatcctgagcagactggacacaatcatctctcccttcctctatgtcaagcactgttacaaaagactgtgagcaaatttccatctaaatattaataattctgaagaagaggcaaaactgttgaatgcaagcgatacctattgttgaagaaacccacaaatttctgattctaagatcaggggatacaacaaaatctacaagtcatttcaaatagcacacaggaatcaaactttggtaaatcatttctgaggcacaattaaatatattgtagcactatgttaattaattatattaaatgtcgattcatcttga

SEQ ID NO: 787 - DNA, 1195 bp, Homo sapiens
gagagacagaggggccggaagttctcttcacggagccgcgcggctgcgggggcgcaaatagggtcagtgggccgcttggcggtgtcgttgcggtaccaggtccgcgtgaggggttcgggggttctgggcaggcacaatggcgtctcgagcaggcccgcgagcggccggcaccgacggcagcgactttcagcaccgggagcgcgtcgccatgcactaccagatgagtgtgactctcaagtatgaaatcaagaagctgatctacgtacatctggtcatatgggctgctgctggttgctaagatgagcgtgggacacctgaggctcttgtcacatgatcaggtggccatgccctatcagtgggaatacccgtatttgctgagcattttgccctctctcttgggccttctctcctttccccgcaacaacattagctacctggtgctctccatgatcagcatgggactcttttccatcgctccactcatttatggcagcatggagatgttccctgctgcacagcagcttctaccgccatggcaaggcctaccgtttcctctttggtttttctgccgtttccatcatgtacctggtgttggtgttggcagtgcaagtgcatgcctgggcagttgtactacagcaagaagctcctagactcttggttcaccagcacacaggagaagaagcataaatgaagcctctttggggtgaagcctggacatcccatcgaatgaaaggacactagtacagcggttccaaaatcccttctggtgattttagcagctgtgatgttggtacctggtgcagaccaggccaaagttctggaaagctccttttgccatctgctgaggtggcaaaactataatttattcctggttggctagaactgggtgaccaacagctatgaaacaaatttcagctgtttgaagttgaactttgaggtttttctttaagaatgagcttcgtccttgcctctactcggtcattctccccatttccatccattaccccttagccattgagactaaaggaaatagggaataaatcaaattacttcatctctaggtcacgggtcaggaaacatttgggcagctgctcccttggcaggctgtggtctcctctgcaaagcattttaattaaaaacctcaataaagatggccctgcccacactgtgccttgtgtttggggcttgaaaaaaa

SEQ ID NO: 788 - DNA, 703 bp, Homo sapiens
gaagaagcggaggccgaagagttgagtccgttgctaagcaacgaacttcacagacagcgatccccaggtgtttcatttggtttatcagtgtttaatttgatgaatgccatcatgggaagtggcatccttggcttagcttatgttatggctaataccggtgtctttggatttagcttcttgctgctgacagttgctctcctggcttcttactcagtccatcttctgcttagtatgtgtattcagacagctgtaacatcttatgaagatcttggactctttgcatttggattacctggaaagttggtggtggcaggcaccataataattcagaatattggagctatgtcatcttatcttttaattattaaaacagagcttcctgctgctattgcagaatttttgactggagactatagtagacatataaaatgaagttgttgagccagatgatctctaaggtctcttccagctctaacattccataactgtgattctgagttactgctgggaggaggtaaagttatcttcagtcccacagttcagtgctttggtcagttatatgacttttatggacataaatgaattgtgatctgaaatagtataaagtaactggtgtacagaatttcaaaaagtgttcctttattcctgtgcaagagaaaagagtcctggtcctggggattaaatgctcccttttgtacaaaaa

SEQ ID NO: 789 - DNA, 358 bp, Homo sapiens
ctcaaaaccaacacacagagtgcaggaaaagaaaaatagtttctaattgtcttttcctgcactctgtgtgttggttttgagttaactggataccaccgtcagggccgcgtgtgttcagtcacagccattaattattcctttttcttaaactcttggtttccgtagctggagcctttttctatctcagttactcctatcagtctgcgaactccaaaggaagctgctcccacaaaccccaagaaagtcaggatcaggagaggtgatccgctggcaaagacgcccaagacaaaactgaagaggggagacaggagaatggtggcccaggacaggaagttcaggagggtccacggcctccggg

SEQ ID NO: 790 - DNA, 1013 bp, Homo sapiens
  misc_feature (1)...(1013): n = a,t,c or g
ctgtcatcactctattcaaatggaaaaattcttaaactagagagagtgtgagcatcaaccacccaatgtgcagtttccacctccgccccagcacattcccaggagagcaggggagcaggagatgagctgtcctgcagtaagtcctggccaacgccctttgataggttccatctcacctaatcctcctgtctccttcgagggaggctggatgagggattcaatagacaggttgacctgtccaagtcatcagctaataaatgttaaatccagggctcaaacccatcaagcagcaactattgcattgctgctggaaactgaggggctccttttcaccctgatgacatggtatgtcattccagcagtcttattcaagagaactgggcaggggtgggagggaaacatccttaaaaactcaaaagctgatgcatccactgtttttatatggtttcacagctataggaggacaattatgcactacccactgcttcaggctgtgtgcctagttgtgtccatgtacatgtatccttggtgctcaacatgtatttggtgcatagtaggtactcaatgaaactttgagaaattagattgggctggtttggatggtcttgnctataacagtcattgatgtagaaaagaattcagtcaaaggcnggaggactttccaggtgaggaggagaagtgacaaagacttggcataggattttggaaaacattgccaaccttttcctccggtcctacaggaaaccagacgaatttttgaattgtttcatatgccaacatatttggtgctgttttttaagcttaattttgttttttatgcttaattttgttttttacaatacaacatcagatgaacacttcataatttcttttctggctttcagaccatgacattgggtgacattgtcttcaagagaatcagcaagagaatttaaacaagtctgcatttcatattattttagtgtgtaaaattaatgtaataaagtgaactttgttttaaaaaaaaaaaaaaa

SEQ ID NO: 791 - DNA, 850 bp, Homo sapiens
gccggactctgcatgctgaagctctaccagaagcggcacccggacatcaacgccagcgcctacagtgcctacgcctgcctggccattgtcatcttcttctctgtgctgggcgtggtctttggcaaagggaacacggcgttctggatcgtcttctccatcattcacatcatcgccaccctgctcctcagcacgcagctctattacatgggccggtggaaactggactcggggatcttccgccgcatcctccacgtgctctacacagactgcatccggcagtgcagcgggccgctctacgtggaccgcatggtgctgctggtcatgggcaacgtcatcaactggtcgctggctgcctatgggcttatcatgcgccccaatgatttcgcttcctacttgttggccattggcatctgcaacctgctcctttacttcgccttctacatcatcatgaagctccggagtggggagaggatcaagctcatccccctgctctgcatcgtttgcacctccgtggtctggggcttcgcgctcttcttcttcttccagggactcagcacctggcagaaaacccctgcagagtcgagggagcacaaccgggactgcatcctcctcgacttctttgacgaccacgacatctggcacttcctctcctccatcgccatgttcgggtccttcctggtaagcgggcctcccggcgaagcggttgggggttacgtgaaggtaagcagctgcctccttctctgtgagctgatctggcgtccacaccccaggtgttagctgacactggatgacgacctggatacttagaaaggggcttcaggaagggatgtgctgtttccctctacgtgcc

SEQ ID NO: 792 - DNA, 358 bp, Homo sapiens
agctatttctaccttgactccgtggctgacttcatctttttcatgagtgtcattacagatacctggatcatgatgatcctgaaaaacaggtcacagggccaacagctgatgagtatttggagcatcttattcccccaagatgaccactccctgtcttctgctacacctatattcatcggggggggaggtgggaaaatagcaggattcttggggactctgagggcatgaatggagaattatttgattgaaaccacagagctcttgtacttagtattaaatattaaaatagaaatgaaaagttcagcttttctggagctgtaccatagcggccaatgggaggaagtcttacaaagaaaat

SEQ ID NO: 793 - DNA, 611 bp, Homo sapiens
  misc_feature (1)...(611): n = a,t,c or g
gtctcagtttctaaatttataaaaatcaggagtgcaaaccagagcaagatttgtcaaagtctccagacacccagacatttgttactttcagctattgcagcttcatccttctgagtacatgagttagtgggcaagcccaacatttaaatttctttaaatggaagaaagaaagtggataagatagaaaaatcagggtgttgcactttattaagtgtaggtattgttttgagaagcttttatttcacacccaataaaagtgtgcaggattcctcttgttccagccttaccttcccgatgatcctagcacatacttgtgtgtatatacagacatgttacagtgccaagtgtacttcctactgtggtgtgatttaaaaaattgaaataccctaaactggaagaactcctcaaggtctaaactgccgnnnnnnnnnnnnnnnnnnnnnnnnnnnnnnnnnnnnnnnnnnnnnnnnnnnnnnnnnnnnnnnnnnnnnnnnnnnnnnnnnnnnnnnnnnnnnnnnnnnnnnnnnngaagaattaagaattttagctgggcgcgtggcttangcctgtgatcccagcacttgggaggcgaggtgggtggtcaccagtca

SEQ ID NO: 794 - DNA, 819 bp, Homo sapiens
taggtttgaccaaggtttggattaaacaactatatttttgagagatggcttttcaggaagatcagggaatcctgagactggatagttagtggagggtgggactcattccacagaaatcgaaagttgtgatcatggagtttgcaattgggaagtaagagaccccagatttggagctgtgtcctcctgggatgatgttagatgttggctctctatgctgaatagtgaagctgtggataggcggttgctgggttgagggactgttgatttcatgttcgaaaatatcttcaggtggtccatgtaggcctggtgtctgctgcctccatctttgaaggaacatggaggagccctttctctgtaggagccctaagtctgggttttatcttaaaagaacacaccagtcattctgggtctccccttattgccattgccaggggagggtcgtctagtccttaagcataaacactggctgtcttcctactggtgtccccgccccctctgtatcccccaccccaacactttgccagacagttctttatgatgaacaaactttggctttagagctttaccacttacccatggctccctccttactgggcaggtggtgtacctgcctcttcccagcccagaaggcagcttagtcaggtcatcccagtagtagctcctacagctcttctgaccagcccatttccatctttggagggccttagcagactctggggtattgtcctcagagaagagacaaggagatgatggatggggtgcatgtgtatatgtgtgtttgtctgctgtccaataacaccaaaagtggaacttaaaaaa

SEQ ID NO: 795 - DNA, 543 bp, Homo sapiens
  misc_feature (1)...(543): n = a,t,c or g
gctgccagggacgccgagggcctgaccaggggccccgaggcctgagggcccctcccctgtccccacctcagtgcctgcggggccctgagcctccccctgtgccagcagccccactccctcagggtccagccatgccccaccctggactgaagttctgcaaagtcctccgaggaccggaacacgtttctgcgacccggggctctggccagcactgtgttctgcgtttggtctcatacctgcgtctaccttccatctgtgtccagcgggccccggctccagcccagccagcactctgcagggtcacacgcaccgtgtccccacccaggacagcagacacccgccagagtgtgcgcgcccagtgactgcaccccggccctcatcaaccaccggcactgattggggcaccgcctgggccancctcaacaaggaaccctcctcatgaaatcntnggnccnccnaagnaagggggggnccccccccntttngcccccnngggttccccttnggnccaattttnaaaaantgnttcnccaaaaaaaacgg

SEQ ID NO: 796 - DNA, 1749 bp, Homo sapiens
  misc_feature (1)...(1749): n = a,t,c or g
ttttttttttttttcactaggaaacaaaggatattttattccttttttctgttgttgttgaggatagatcacgatacagagaacagcaatgggtcacagcgcacggtttggttggtttccgcgggaacacagaggacaggaggggcgggatctgggttgagttcccactctcgttatgaccttcaacctctcactgttcccaagggctgcacggagcctgctgagtctccaacccacctcgctcaccgctctgaccaccgtcagggcagagcaaaggatgcggggagttgcctctgctgcccatctaaggggacgtaggcagagaaggcaaagggcctctgctctccctccatccatcccggtgtgctgggccccaacggaacaggagtccttcaactattgccctggccagagacccaattgcagggactgtagtctgcatctggatgagctggggttttagattgaagtctcagaagcagggaaggttggaaggggtaggggtcccagagcccattggagttattgctgagaagatatgcaggggacacagttccccaggggcagagtagaaagccctgggcctggaatccccgggcgctctgtgaaggggcggggcagatggggactcctcgtggaagcccctgggaagaaattaaccacggaaaggcatagcctgcctgacgtcaaacgctgggctcaccagctccttgctttgtatctccagttgctaagagaccttcagactgggatcaggtgggataaggaagcaaggtttttgttaaaggagtgaaaggagtccatgaagaatgatgacaaagtgctgcaaaccttcccaggtcccaagacgactgaagaccactgcccgtgctcttaccctacgcatccctaaatcaggggagggggctggtctcgggcaacaagcagcctcctaggagcagaaggtgatggagggcccacgggggcagggaggagcagatggccatgtggctcagccccctgccctgggaaagcgagtccacagttcactaacaaacacaataccatcccacaaacaagtagccacaaagaccacatttgcnaannananncantnanananancacacaanacanacatcacgggaggtgggcaggaccgcaggctgcagtggggaggcaagtgttagttgcatcatcaggtggaggaatggtgttagaggggatagggtgggggacacacaagttcttggcttctcctggggaaagggctgttgctgaagtggccggttttcttaagcatcgacatttgcatccaaaggttcaagcagccgcctcaggttccagaggcttccacctgatggctgcacttcagttctctgctttctggggctctgttgcattggcggtgatgaggttctccacctgggcttcctcatctcctggggcccggggcttctgattgaaactgcacttgcacctgcgacttaggataaggaggatcccaaccgagaagaggaccacagcgaacaccagtcccccaatcctcagggtctggtaatcataatgaaaagggtccatttccttctccttttcagctgcactggccaggaccatgggggccagcaggctgcagaggaagaccagcaccaactccatggcgtctgcacaggccggtcccctccgagactcccaggaggacccgccgagtcccgaggagcctgggagtggcggggctgggggcagggcggtgggtgaggnttgagctgc

SEQ ID NO: 797 - DNA, 453 bp, Homo sapiens
gcgctttcatggtcttgctgattccactcaacggagctgtggccgtgaagatgccgcgcttcccagttaaagaaaatgaaattgaaggactcgcgcatcaagctgatgagtgagatcctgaacggcatcaaggtgctgaagctgtacgcctgggagcccagcttcctgaagcaggtggagggcatcaggcagggtgagctccagctgctgcgcacggcggcctacctccacaccacaaccaccttcacctggatgtgcagccccttcctggtgaggcttggcacagggctgggtccctgcctccagggctctgggtgcccaggcatggccagggctcattggactctaccctgacaccacctccacgctgctcaggtgaccctgatcaccctctgggtgtacgtgtacgtggacccaaacaatgtgtggacgccgagaaaaaaaaaaaaaaaa

SEQ ID NO: 798 - DNA, 578 bp, Homo sapiens
gcggaagctggtctgggggcgttctctcgagtccgggccgcaagtcccagacgctgcccatggaggcgtcccagcgagccgccgctggatgctaagtccgatgtcaccaaccagcttgtagattttcagtggaaactgggtatggctgtgagctcagacacttgcagatctcttaagtatccttacgttgcagtgatgctaaaagtggcagatcattcaggccaagtaaagaccaagtgctttgaaatgacgattccacagtttcagaatttctacagacagttcaaggaaattgctgcagttattgaaacggtgtgaagacggattctttggttgataaattgctatcattctaaagtcatggacttcactttcggcaacaaaactaaataaggatggaacatttattgaatgaaaaatgcacttttgtttttccatttttttaaataataaaaatcagacaaacaggaactgggtagtggtgatgaatgcaaaactttgtgaatgtgctttataaaagtgataattagacactttagaggatatacttggtgataatgtgaatgatgtaatcagac

SEQ ID NO: 799 - DNA, 780 bp, Homo sapiens
taaggaaaaacaagtcaagctagcatccagttactatatagcttggctaaattatacaagacttacaagattgattactcgacaggcttgtatttaagagataactgtgaggttaccattatgtgatgttactataaggacttttaacattggtttaacaaaccatagaggcattgaagggtttttcttagatgcctagaaaaagcacactgggctgttttacctttcttttttaggtcaatcaagactccaaaatagtgattcctaacctttttggagttgctctgctactctgaatatgttctatacagcataaggattgtcaccttctgtgtgttgcaacagcttctaagataattagggacaaatgatgttacaaaaggaagagtactgctggtctaagtgctgagttgtatgtctttgcatagctccactctgctgctaaatatgcatgttctgactgacaccatcttgatgccagtactggattccagcattcagcaggtgcagatctcggctttacacaatttatctttacctaggggttcagtcagtaatttctgctttttagccagggccagtgcagggtcagttaatgctacagttactgtataggcaaacagtatccttttttctccttcccctaggcctattggggcttttgcaggatatctgggagtgtttttaaaagtcaattatttttaaggcagtttgaggggatgtgtaggagtggagcatgaaacagtttataaggctgggggctgtattattccagcacag

SEQ ID NO: 800 - DNA, 618 bp, Homo sapiens
  misc_feature (1)...(618): n = a,t,c or g
gacccatctaaaattgcctcaacccccaactttctgtctgtcataagagtcaacttcattttactcatatcacttatctccatctgatatttatttatttatgtagtctctctgtcttcccatcccctcagcttatattctgagctcaatgtgaggtcttttcttcattactaggtccatagaggaaactcagatcactatttgatgggtgaatgaatgcttcaataaatgaatgcatgcatgcatgcatgaaattctgtgaggctgggcttctttattcccatttcacaaatggagaaactgaggcccagagaggctaagtggctttcccaggattgctgcatagaatagacacaaatctggaattcagggttcttgccacctacccctggaattcccctctgcctttcccttgtgatctccttcctctcggggtcancccacctgcctccagggactgagcacaaagctcctcttgagctttgcctgtntgaggagtcttggggctctgtgtggttattttgttttctgtgtgttgttttgggttctaaaaagttgagcgccatggcaggtggggtaagccagggcangctgtcccaaacttgtatgtccccctgg

SEQ ID NO: 801 - DNA, 455 bp, Homo sapiens
atggcaaccagctgcctcctgaaaagcaagtcttttcatctactgtatctggattttttgctgcagctagtttcatgtcatatcaacaatgtgagttcaattttggagcaaaaccattcaaatacccaccatctatgaaatttagcacttttaatgactacgccttcctaacagctgaagaaaaaatcattttgccaaggcacaggcgtcttgctctgttgaagcaagtcagtatccgagaaaactgctgttccctttgttgtgatgaggtagcagacacacaattgaagccatgtggacacagtgacctgtgcatggattgtgccttgcagctggagacctgcccattgtgtcgtaaagaaatagtatctagaatcagacagatttctcatatttcatgacacatgtgaagaggcatcgtggacttttttctactcaattccagccaatgttga

SEQ ID NO: 802 - DNA, 903 bp, Homo sapiens
ttttggcgtctgggatgtactttattggacaagtggtggcccaagtcttggtctggaagcactggggccctggaccaggcactgagtttgaggaggcccagagttcagggctgtttggagcgaggccacaagcggctggtgagggagccaaggaagaggttctgcttgttggacttggagagctcggccaggcgctgctgctcctcctgctctagccggctttgccgctgttttgaaagccgccagcgggtcatcctccagggcatagtgctccagcacggttcgcacgtcctccacaccattcagtgcaatggtcttgaggaaggcagacagatccaacaagacccggtcatcagagttgccgtcccagggccgcagggcaacgccgttatagggctgcaggcggaaggcttccttcttgcagtccacaactactactcgagctgggtcccgattcagacatgaaatatcctttacatggtgtccatccatgtatcttgtggcgtcccggaataggcggtaggagatgaagccatgggggtccacactatcaatgagtggaaacgcagtcatgccagtctctgacgtaaagatgacaatttcatataaaggggcaagctgctggaacaaggtctcgatgcctgggcgcttcttaaacctccagccagtggccagcgaccactcaggatgcaagaggacgccggtgagctccaaaacgagcgtgtagggtggctggtagtacggttcctgcagagggtctgggagaaggcaagggctggtgggctcgatgatcatctgtctataatctttgaaatatttgtatgtccggcgcaactgctgtaccagaattggatcattgtcgaactcatcaggaatcttggcaccattttcgtccaccgggtt

SEQ ID NO: 803 - DNA, 414 bp, Homo sapiens
gccagcagcatgggcacagtgaacataatgaactattcattcaagaaacttgactgtgaaaggaaggagggagagaaggtacagtagttagagaggagcaggggatcatggcaaagttttttgattctgtttaagagttgtttactgagtccctgcttatgtctctttattatctttctggctacccacgtttgctcccagttagaatcctggactctaaccatgggatggaaggtggtgttggcacaggccactgctctttagcagcctaaaggattatattctcatcaggtagaaactttgtggtcactgaagtccttacatgccccatgaagacttgtgtgtggatttgctgcctgcactgagctaacacgttcctgtcctgaaggcttcttccacagtgagctcatcaca

SEQ ID NO: 804 - DNA, 481 bp, Homo sapiens
  misc_feature (1)...(481): n = a,t,c or g
cttngaaaccctnnnnnnnnnnnnnnnnnnnnnnnnnnnnnnnnnnnnnnnnnnnnnnnnnnnnnnnnnnnnnnnnnggcacgagcggcacgagtaggcggcggcggggtcggcggcggcctcctggagaatgccaaccccctcatctaccagcgctctggggagcggcctgtgacggcaggcgaggaggacgagcaggttcccgacagcatcgacgcacgcgagatcttcgatatccgccgctgctgggcgcgggcgggttccgggggcttgcggtggggggagcagtgatatcgagcagctggtggagccgcatcccagcagggcgttcctggcagagggttctaagtgggcaagggcgcagagtcccttttccttcacttcccacatctgattcgctccatcaatgacccggagcatccactgacgctagaggagttgaacgtagtanagcaggtgcggntcangttagcgaccccga

SEQ ID NO: 805 - DNA, 542 bp, Homo sapiens
ttttttttttttttcaggcttggaagtatttaatagcagacaaaatatagttcaatatgaaaagcattatatgagacaaaggcaattttcaaaaattgataaaacattccaccaaaaatcatgactatgcatctaacagcttcaaaatatagaaaatactcaaatgcaaaatcaacaaatctgcaattacagaaaaagacttcaacatacttttagaaagtagtaactcaagtagacaataatagctaacacttaccgggcacttcttatgtgagtggcactgaaacatgtgctttcatgcattacctaaggctagagaaaatgttaataacttagacaagtcatacatgtatcataaatatctttgtacctgacaaacagaataaacatctttttaaacaccattagataattatttaaagaccacatattgggaacctacccctaaagaacaataacaaccacaataacaactatcaccccagtaaacatggctggcaagaatacaattaaatgaacattatcactgatttggcaacagc

SEQ ID NO: 806 - DNA, 1857 bp, Homo sapiens
agcttattttcttgccctctccctaacggggagaaaatccgagccacccaactggaatcagagggtctggctggggtggatgttgcttcctcctggttctgccccaccacaaagttttctgtggcaagtcctggaacatagttgtaggctgaggctcctgcccttcggtcgagtggagcaagctctcgagggcagcactgacaaatgtgttcctaagaagacattcagacccaggtcttatgcaggattacatccgtttattatcaagggcaaccttggtgaaagcagaaagggtgtgtgctattgcatatatatgggggaaaaaggcaatatatttttccactgaagctgagcaaccacatattgctacaaggcaaatcaagaagacatcaggaaatcagatgcacaggaaataaaggaaagctgtgctttgtcattgaatcctaagttcttagctgctgatgcaagttgtcccccaaggccatcacaaagcagtggggcatgagctgtgtttcaggggccactaaataacagctggtactgaccccagaaaccgccttcatctccattcggaagcaggtgacacaccccttcagaaggtgccctgggttgccgagtgtcagaatatactcaggactccagaggtgtcacacgtggaactgacaggagacccgccaccgtggaggcagggggcaagaaactcaagaacgcatcaagagcaccagccctgggccagggaagacaggctcttcctgcagtttctcgtggacactgctggcttgcgggcagtcggtctccagggtacctgttgtctcctttccgatgtaataactactttgaccttacactatatgttgctagtagtttattgagctttgtatatttggacagtttcatatagggcttagagattttaaggacatgataaatgaacttttctgtcccatgtgaagtggtagtgcggtgcctttcccccagatcatgctttaattctttcttttctgtagaaaccaacatgtttccatttatgtcaatgctaaatccaaagtcacttcagagtttgttttcccaccatgtgggaatcagcattcttaatttcgttaaagttttgacttgtaatgaaatgttcaagtattacagcaatattcaaagaaagaaccacagatgtgttaaccatttaagcagatcatctgccaaacattatattactaataaaacttaaccaacacttacaattcagtcatcaaagtaagtaaaaattagatgctacagctagctaactgtatccctagaaatgatgaataatttgccatttggacagttaacatccaggtgttacaaagtcagtgttaattctaaagatgatcatttctgccctttagaatggcttgtcccatcagcagatgaatgtgttaagcacaaagcatcttccttaaagcacaaagagagggactaactgatgctgcatctagaaaacacctttaagttgcctttcctctttgtagttagcgttcaggcaggtgacgtgtggaaagtctagggggttccattctggccatgcgagcccagctcctaccaacgtcggtaacttgagcagtccctgttgctggccagagactgcctggtcgccagcgctcaccatgggtgccaggatgcttcgcagaggcactgtgctcacggttggacttggtgtcagtgggaaagggcagtgtggggactgtcatttttgtgatttaataacacacagtgaaaatccaggaagaatgaattaagcttcttctgggagttgtttattcctgctcgtgcttaagattgatgatttcgtgaaataaagaacatcatttcatttaagagatc

SEQ ID NO: 807 - DNA, 1448 bp, Homo sapiens
  misc_feature (1)...(1448): n = a,t,c or g
tttttttttctctgccttgggaaaatggattattctaataaaactttattttttcaaacacagccacagaggcagaacctcatgtttaacacacacagacttatggatttttcttttaatataaaacaaagtttacgaaaatttttttccactttttgtatttgtaatcccattagcacagggactttggcagcaggtgggagtgaagggcagctgagctgccactgggcagtcactgggcacaggaggagagcaccagcctggggagtggcttcactcacacacacagggatactcacctactggccaaccacactacacacacagcacagatgcagacattgacccagtgtcagccacatgccctggaggtgtgctccactctgggtaagcccaatatgtgaaaattcaaatagtcaaaacagctaaagtggagggaggttgcttgctttacaaaaagaagcaatcataggctgcttttaaatggtcagcagtccaaatgcattgaaaaatagcatttggtttacacagaactgttggaacagatctactgtgtaaagcaaaatgaaccaattcttgaaaagtgttccagggccacaggttcttagattgggaagcaagatgacagttctgactagcttagttttccagactgaaagtaatggaattaaaataatgataactgtagaccttctcccctaaggatggtgccctggggctttggggaaacccaggatggaggcagaatcactgcctcacatcctcagcttagggcctacagaaacttcnactggcattgccagtaacctgttgcaaagctgcacagccaatctacagcagagagccctgggatgaggatgccccaggaggaaaagaaattggcaccagggaaattatggcctgaagagggagaagagccaggggaggaatgaaaccatagatgggcaactcctgggctcacagtttccctggattctctagagggcctctctcaggcccctagagacctggtagcctagtggtaactagccaggagatagggaggagcctctgagggccagaggcttaagaagacatagccacctcctctctggagtggagacgaaggaggctgaagcctcactgatgctcctgacatgcaggagatccagaaaatgtcaggttcaattccatgaggaagaaaacacaaagaccttggtcttcctcccttacatgaggaactgggtcctaggaaaccctggaaattgaagagaaaaatgcccttcttgccataaacaagggcaggtcaaatttggtcatgcagggtctaaccaaagctggataaaacctcacaagctattgtggtggcagcttcagtatgtgtttccactggtgccagccctaccaaggtacttaaacccatcactgtggccacttgnccagctgtcctggctcaagttgcgggtgag

SEQ ID NO: 808 - DNA, 371 bp, Homo sapiens
ctggatttttacaaattcgtttttcagctaacatcatcttcctccttgataactacactgcatgacaatgactttgaatgttgcatcatgtattcctaagataaactccatttgtttagtcagtcctaatttgaaaatgagaatttgttccaatgggattgatacattacggaacaatagcagagtaatacaaatttcgtatttgcttattatatatgatctcattggtgagaaactaggagaatacagaagacagtgtttaattctgcatccaacagaatcaaaccacttggggatattcccaacacacacccctaaatatctatcagctatctttcttcactgcctgttatgagccacacccatttaca

SEQ ID NO: 809 - DNA, 687 bp, Homo sapiens
cttaaaattaactgtgggctactcagccagggtacagtgggagcctcaggaaggtcagaggcaacctcctcccctgttctatcaatagaaacccaacgttgaggcaattcctaaacagacgcacctcgtagcttgctgtatgtgtttattctttattgctttcagctttggggctgtaacaggtacaaatatttggtttccctatgatttatagagaagaagaagaaacccagctttctatcagagcactgcaagagaagagtcttacacctgccctcagtgggagatgagaatggtcattatgacttagagaatgctacacgtgtaggttgctggtgtgtcctgaatccacaggcataaagcactccccatttttcctactgtaatgcagattctccggctcaaggtctagaatatttgatcctaagatcaagacatcatgcccttcgaatagtactgctctttgttttcaggagtcacgtgaacacacaactctcctatattcctcacgaacctcaggattgagcaaggtctttgtaatttttttggttcactttattgacctgggagcaaggtgctaattctgtggtcagtattcaatgtttttttcagtggagctttttctttgggccatatttgccttctaatacattcctgcaatatgtagtggtgatttcccttagcttc

SEQ ID NO: 810 - DNA, 436 bp, Homo sapiens
tgaccacaaataaaggaaacactcatcactagtatctaagtcgggctttacagtaactatgcaccttctgtgtgcttcacctcactctctacttcaaacagcccatggagggaggtattattatactccttatgttgacagtgaagaatctgaggcccagagaggttggggacttgagtaaagtcacacagccctgagaggcaggaccagggttccattcctgctctatccagttccaagcccttgtgttttccattatgtttagtgcctctttgctaacagcaacatctgcaagatttgtgttggttttgatggagaactctagctcatccacatgctagtgcccaagtggtggaggggccacctcagcaggtgggttctgaatgcagccaaggctgtccccgcaatgggtgagactcgctccaactgcccgcct

SEQ ID NO: 811 - DNA, 1096 bp, Homo sapiens
cataagcaacctggaaccagagctgagagctcagatccatgagcaaaaccccagcgttgaagtggtctactacaacaaggggctttgaggagggtcagcctctgtcccctccctcacttccttgggctgctgctttagtggagtcatgtcacccctaccacttggctatctgcctagcactgggcaggggccttggtgggcagatggcaattgagggtagcaacctattagggtgggggagggacctccataaggcttttcctcccttctctggtttcaaagatcagagcacataacccctcctgtgcttgagtgtccatgcatatacatacatgatacacatgtgtatgtgtacattgggtcctgaaagctagaagcaggcatgctagcctagtatgttctgacatctggcttcccttctcagcctcatgtccacctgcctgccagccagggtaacaggtgtgacttccttcttttaaactgttacaccagccaagttattttttgatgggcacctcatcccttctagaaataggaggagccccaggatctcaggacagagacttatagacactagtaggacaaagcgggctgaatccttcaggtttctgatacctagctccccaagctgactgggctggcagaggagaacatgttgagacaagggaggcaggggacttatgcatccctcagtgccatcccttgtatcctggaatagctccatttcccctcctcctctctaccagacaaaggagtgcctgtttcctgtactgccctcgctgtctcccccaccaccctacttgacagcgtgggcatcttcaggcacagccttgggagttcctggtgtgctctgacatcatgacctcaaatctaaatcctccaatcccaactccctttcccaaacaaaaagccacagaggcagagcaaggcattcccctttaagagcttccactgcaccccctcccaagggacacagcggtaggaatggtgcttaaactccacaggtatcagagagggtgtaactaggacatcctcaagggcagctaggccccgaatgtacaatgttaagacagggaattttgtgttccattgactt

SEQ ID NO: 812 - DNA, 1191 bp, Homo sapiens
ggcggcggcggcctcgaggtgacaactgtctccgtcgcaggctccggcgggggcgcaggaggtcgcccggcgcgtcactgtcgggtcggcgagccacgggggccgccgcagcaccatggcgaccaccgtcagcactcagcgcgggccggtgtacatcggtgagctcccgcaggacttcctccgcatcacgcccacacagcagcagcggcaggtccagctggacgcccaggcggcccagcagctgcagtacggaggcgcagtgggcaccgtgggccgactgaacatcacggtggtacaggcaaagttggccaagaattacggcatgacccgcatgggacccctactgccgactgcgcctggggctacgcggtgtacgagacgcccacggcacacaatgggcgccaagaatccccgctggaataaggtcatccactgcacggttgcccccaggcgtggactctttctatctcgagatcttcgatgaaaagagccttctccatggacgaccgcattgcctggacccacatcaccatcccagagtccctgaggcagggcaaggtggaggacaagtggtacagcctgagcgggaggcagggggacgacaaggagggcatgatcaacctcgtcatgtcctacgcgctgcttccagctgccatggtgatgccaccccagcccgtggtcctgatgccaacagtgtaccagcagggcgttggctatgtgcccatcacagggatgcccgctgtctgtagccccggcatggtgcccgtggccctgcccccggccgccgtgaacgcccagccccgctgtagcgaggaggacctgaaagccatccaggacatgttccccaacatgggaccaggaggtgatccgctccgtgctggaagcccagcgagggaacaaggatgccgccatcaactccctgctgcagatgggggaggagccatagagcctctgcctcgatgccgttttgcccccgctctttggacacgccgacccggcgctccccaaggaatgctgtcccaacaagattcccgtgaaagagcacccgtgtcgccccctcccgtggacttctgtgccgccccgtccacacctgttcttgggtgcatgtgggttttcggttcctggcggtccaggacggggcgggggctcccctcccatctcgtgctgggaggtctcagcgcgctctcctgt

SEQ ID NO: 813 - DNA, 406 bp, Homo sapiens
  misc_feature (1)...(406): n = a,t,c or g
ggcccgggcagtgaaagcagagacagacaaagcgttaggagaagaagagaggcagggaagacaagccaggcacgatggccaccttcccaccagcaaccagcgccccccagcagcccccaggcccggaggacgaggactccagcctggatgaatctgacctctatagcctggcccattcctacctcgggcctctcatcatgcctatgcccacttcacctctgactcctgccttggttacaggaggtggaggccggaaaggtcgcaccaagagagaagctgctgccaacaccaaccgccccagccctggcgggcaccgaagaggaaactggtgaccaagctgcagaattcagagaggaagaagcgaggggcacggcgcttgagacagagctgganatgaggccanacc

SEQ ID NO: 814 - DNA, 357 bp, Homo sapiens
  misc_feature (1)...(357): n = a,t,c or g
gtgaagttatatggaaacaagaggtggggaaattacagacagaaatggaagagttgaaaggaaggaaggataacaagagcccacctccctgcagtctgctcaagggaaatcttgtacaatttgtgtggacaatgaaatttataattttggcttcaagcttgggtgactttctcctctctgattataggaaaaaatattataattaaattaggattacgcactttttcccctcttcagtgtccttacataggacagacatccttcttgtttggtgaccacagggaccagtgacatcctagttttcttggaattgnttgnacttattgctttattagaaccaccctatagtcagatgac

SEQ ID NO: 815 - DNA, 275 bp, Homo sapiens
gctgggtaggaagcaattgttctcaaacttcactagccccgtcggcgcggacgcttgtcgagaatgcagattcctgggtactgccagatacgaattgagcataccacaaaaaagttctcattttgtgtcctcccatcccattctcctcactaaccaaaggctaggaattatctgtgaatgtaggaccactggatttgcagtcttcatctgacactgtggagagtttctaggaatgaaacagatatatggccttgggtcccctttttttttttttt

SEQ ID NO: 816 - DNA, 305 bp, Homo sapiens
gtctttggtggaacagatgattctcaacaaaaaatttgccttagagcacggcattccaacggacatgggctacgctgtggcccctcaccattcgggcgtctaccctgtacatgttcagctttatgaggcctggaagaaggtctggaatattaaaatcaccagcactgaagaatatccacatctgaagccagctagataccggaggggttttatccacaaaaacatcatggttctcccaagacaaacctgtgggcttttcactcacaccattttctacaaagaatatccaggggggtccctaaaag

SEQ ID NO: 817 - DNA, 452 bp, Homo sapiens
agttgggcaagttctttaaagggggcggctcttctaagagcgagccgctcccagtccccaggaggccctggtccgaccttcgggagacctgaggagatgctgggcaagaaacaagagtacctggaaaatccgaatccagagagaaatcgccctggccaagaagcacggcacgcagaataagcgagctgcattacaggcactaaagagaaagaagaggttcgagaaacaagctcactcagattgatggcacactttctaccattgagttccagagagaagccctggagaactcacacaccaacactgaggtgttgaggaacatgggctttgcagcaaaagcgattgaaatcttgttcattgaagaacatggatcttgaacaaaattagatgatttgatgccaagagatcacagagcaacaggattatcgcccaagaaatctcagaagcatttt

SEQ ID NO: 818 - DNA, 1603 bp, Homo sapiens
  misc_feature (1)...(1603): n = a,t,c or g
ttttttgaaagtttaaatattaaaacaataaatctttattaaacaggttttcacggcattttaaaataaatttaaaaaataaatatttgcattatagcagaaagtcacatgtattgcatcaactcacttttacaatttaatggcatgagacaactaagcatcagcaccataaaactgttaagatttgtttcttaaattcaaggaaatagctctaaagcactgcagcatcaataattttgaaagctataacccagtgattggtgctcatagtagccaatgtttctttttattactggcaactgtggagacagagttcttccagtactaaatattaataagttctctgatcgacaatcccccatctatcagtgtgtcaggattcacaaagaaaagaactgcaggttatgtagtatattccctatctgtgatttaggtttgcacaaagacacttattctagcaaaaaagaaaagatagtgtttccaccatggctaccttttttttcctttttatagagtctcagagtaagatttaaatcataatttttaacctttaaaagtctgttcaagttcaattacaaccatagaaactgtactggtatcagaacataactattttattacaaaacttaacattatttacaaaatgaaaaaataatcaaatgactattgcaggccaaagttaaaggtttttcactcaatgattgaagaaaaattaagcaatatttccatgcactcacaccagatcatttctgaaatatgcaaactcttaaaattcatgttagtaaaactttaatgtattcataatacttgctatgtttattagaagatggtcaaaaaaaatccatggttctgtacaataatattaacagtttgttcattttcctttaatattttttggcttccatgaacactcgtagattgaacattctgcaagtaagaattataatagtacctctgtcaccttgctgaattcatcaccacaagaaaaacacaaatagtttaatgcttttgcactaaactgaatagttataactccaaagttatattaaactgaagccttcattgtgatcaatagcttggatcagtttagagcgtagagtttctttttctgtatattttggaagatccagaagattaaaacaagtatgggaaactgggagatactcctcaccacctcctgtggactggatgactagtttcagactcttcataccaagaataggaatgcgatcactacctgtcaaaaataacagaaactgtttcttcttttccaatggtaattcgtgaaatacttcccaaaaaatttttatcgtaggatgttctgcccaaatattcccctttgtattctgtattcttttccagttccttccaatcataatttgtatttccaatgaccattgcttgtagttcattaggctgaaagagcagaaggacttttcctccacagaccttatgaaagcccgcatgaaaagcatcggaataaggaagccactgatgtattgaatatgtaatccngataagcatcgacaaactngtgccgattttgtttgttggcagctgtgtctgcaccangtagaaccagctctttcaggcctgtgccgaa

SEQ ID NO: 819 - DNA, 2552 bp, Homo sapiens
aaaacctaacttcatctctcgctaccgaattcaggtcggcaagaatgaacctgtggatcctgtgaaactgcgccagtctatccgcacagttcttttcaaccagtgcatgatatctttccccatggtggtcttcctctatcccttcctcaaatggtggagagacccctgccgccgtgagctacccaccttccactggttcctcctggagctggccatcttcacgctgatcgaggaagtcttgttctactattcacaccggctccttcaccacccaacattctacaagaaaatccacaagaaacaccatgagtggacagctcccattggcgtgatctctctctatgcccaccctatagagcatgcagtctccaacatgctaccggtgatagtgggcccatttagtaatgggttcccacttgtcctccatcaccatgtggttttccttggccctcatcatcaccaccatctcccactgtggctaccaccttcccttcctgccttcgcctgaattccacgactaccaccatctcaagttcaaccagtgctatggggtgctgggtgtgctggaccacctccatgggactgacaccatgttcaagcagaccaaggcctacgagagacatgtcctcctgctgggcttcaccccgctctctgagagcatcccagactccccaaagaggatggagtgagagacagcctaagtgtcatcctggctgtccctcagccatgggatgcagacacggcttcctgattgcacctaacaatttgcctccttcggccacacgccctaatgatggcaccaccagggtagagggaaggtcggcttcccggaaaagcagggccaaggatgaggctttcttcaaactactgcccttgatgtccctcaatgggatcaggagttagcttaagaaaaaggaaaacacagctccccagactggaggctggtcagagggaggagacccctggtcctctgctgtggaaggagaggggttcagccccagataactcctttgtggcctgggcaggatgcagagaatgacaaggctgaaaggagggggactggaggctgcctggctccagcgagagctccttctgggaccagagggtgggacggccaggtatcactttgccccttcctgccccaaaaggctttcacatacccgactcaggccagagccaagacaccctggcaaatcgttataggtctcaattcatgacataccagatgccagtcgccacttcacccaacacacacacaaacatacacacaccaaacactctgagtgagtggtaaaggccccgttttaactctggcccaccgcaaacaaaaggtttccctctgtgggggagaaaaagaaatccaggagctcctccctggattaaaaccaacgaggtgcagaccaaactttaacacctttagccttatgtggaaaccaaaaaccaactgctgggaaactgtgaaaagcccttttacccacaaggggaggggtcaaagttgctgccctttggggacacccgagacccctaattagcctatctgaatgaggaccaaaggttagagccctctttctccccgaagaaagagcccggaaaaacatggcagagcaaagagcaaaatcctttctcccccgaatgctttaccagtttctcagcaacatttattcaagatgatttttaccagggaaccttattcaaaggcaaaaccacagctgcttggggtttgaagtccccatcctgggcctcctctcagccgccagacatggccaggggaaccctgtggttcccaagaacaatttaaagatcactctttgatttgaaagaccaccattatcattttactaaattcttatatatacttgtgccttttccaactttcagttctcttaagaaaaacatccactgtagctttataaaataccttagtatcagctaggtccaagtctccaggcaggactatcaaaatggactccttcttcctatcagctctagaaccccagaggacttgcccagtaggccagctgagcacttaccaggcagcatctccctggccttccacagtctcgcctgtctgtctctggccttggtggacctggctccctccctaggaggcttttgccctcagcttgaatacagttcctggtgcatcaaagctgtaagttctcagctgctggcctgcactcatcacctcttcctacaaataaacatttgggaaaaaagtccatcttcaatatgcttaaagagaagggtaggagataaggagaaagaacagatacggtttttttcccctttaaggcctttagattttgaggtactgtaaggggcctagaaggacaaaaggctttcattccctcttccttttggcaggcaggttatcagtccttggcagaagggcccagccctatccttttctgtatcaaacaaaatccttgaggttggtatacaagttaaggctgaaaaaaggccttaaattcccagtaaagaatgtgaaagcaagcatgtaaaataaactggtcttcatgaaaaaaaaaaaaaagagaaaaaaaaagtcgacg

SEQ ID NO: 820 - DNA, 379 bp, Homo sapiens
ttttttttaaatgtgctaagataaataactttgtatatttgtaatttttaaaaattttaatttccaattttgccaagttcagaaatacatacaacttaaagcaaatagggtacaatgttaacaccaggtgagggttacatggtgttcactctactgttttacttttgctgtagatttgcaatttttcaaaataaaaaatgaaaaaatgtttataagacaaagtctatgtcactgagtatcactagttttagagttaaaaggtgccctgtcttataggtaaaaacttttctgctaagagaagcatgggagaaatatttgacatgcattaaaggacaaaactggtttagaagccaataaagagagaacacactgcatgtac

SEQ ID NO: 821 - DNA, 1465 bp, Homo sapiens
tcctactcctctaccccctcacctacctggctcccagcgtctccaccctctggctccacctgcttctgaaagccaccgagacctcaggcccaacctacatcaaactgggccagtgggccagcacccggcgcgatctgttttcggaggctttctgtgcccaattttccaagctgcatgtccgagtgacgccccacccgtggactcacactgagcgcttccttcggcaggcttttggggatgactgggggagcatcctctcttttgagaaccgggaacctgtggggctcaggctgcgtgggcccaggtgtacaaagcatacgccaacactgccttcctggagactgacagcgtccagagacttggcagggcctcctgtctgccgcccttctcacatactggggcagtcggtgggctgagagagctctttggataccttggaaatggccggaaacctccagaaaatctcgcagaccagtcgtttctagaaaggctgctcctccctaaagctgacctggttggatcaaatgcaggggtgtctcgggctcaggtccctggccaccaacctgaggccaccaacctcatctccgtggcagtgaaagtgttgcaccctgggcctgctcgctcaggtgcatatggacctgctgctgatgaagattggcagccgagtcctgggagttttgccaggcatcaagtggcttagcttgcctgagattgtggaggaatttgagaagctgatggtccaacagattgacctgcgttacgaagctcagaatctagaacacttccaggtcaacttccggaatgtgaaagccgtcaagttccccacccctctgcgcccctttgtcaccagagaagtcttggtggaaacgtatgaagagagtgtgcctgtgtccagttaccagcaggcaggaattcccgtggacttgaaaaggaagattgcacggcctggggatcaacatgctcctgaagaagcttcatgtgtccagccttctctctagtgtctttaagttgctgatgactcacaaggtaaagcttgagagcaactttgcctccattgtgtttgccatcatggtgttggaggggcttggccgctcactggaccccaaactggacatcctggaggcagcgaggcccttcctcctcacgggcccagtgtgccccccgtgatggggcagtggcctctgtgggcccttgtcaagagctggaggccactcccaagagcctctcctatggcagctgggacgttttaaaattgggacaccaatttcaaatgtaaccctccagtggtggaaggcacaccatggcttcctctgcttggtttgagggtctgttcaaaagctttgggccaattagggagtaaaaggagggaaggggcctatccattccattgtggaagctgggccaggtgccagggacactctccttcagggaaaatgttatgtggaggaggacgaataaatttatt

SEQ ID NO: 822 - DNA, 967 bp, Homo sapiens
ttttttttttacaggtgaaccatagtctcactttatttcgaattttaggactgaacagaaagaaggttcacagatatttcttcagggaaggaaagtgggcaaatagcacaatgaggcaaaccacacaatctagacgtactttcccgggtaaacaaactgggaagcccagagctcacagaggaggagagcagagcttggggtggcagagaggtgttcattgggaaggagtcaggaacacaagagaaatgttcatgagctcatccaggatagagaggactcttggggaaggggacctccttccccatgctgtctctgccccaagcccttaatgaagcaggagagggaagtctgtccagaaactcatctggttagacatttgcatcaggaatagggagggggtggaggcagagccactttggacatgggaaatcacagttgcagtagacagtgagctctagtcactccagaagcttgacataatttgcagggaagagtccaaagtggccatggcaacgtccccgccaccagccctcgttccaccatctcaatgtcagtgattacgtcgtccggatcaaaggaaagctcatcacttccctctccttggtaatcatatagagccacagctgagatccccagagccacagccccagccccagccccagccgggcagcctgatgatccagccagagcagaagaaaaagaagaatcttcaggctcgagcacctcctcatagtccccctctggttcatcctcctgctcatgcctgtccatctcctcaacgtcctcatagtcattctcaggctcgggctcaggctcgggctcaggctcaggctctgctttgtacactggctcttcctccacctggaggccttccagagtcctagggggcagagctgggggctcctcattgtcctccgggagagttgcctaatgggcagcaagggcactgggtgttccctgctggttc

SEQ ID NO: 823 - DNA, 823 bp, Homo sapiens
agatatttccccactgctctatgaaatttggctgggtgatacttctgctggtttctttaccttctgtgttacagttctgcatggtcctactttttactcagttctgttttgcaattttctttgccctagagacacaagtgtaatctctccctttatccctccactactccacctcagagtagattgtagcctgccaaaggattccttccctcatcctattgaagttgttttttcattgccccatattaatatgactatagaagagccaattaagtagaaatcaagatatacacacacacatagatacacacacacacaccccatacatgtatttatgtggtcttcagagggtccttaaagaatgaattttagattgaaaaatatttagttgtctcattacctcttctaaacacaaaccagctgatgtattttaatctgtttctgttctatcttgtaattaatttggtgggttctacttgttttaacataaataaagagtatgcagcacgtttaataaaatcagaactcttaattgggcttatgcccaggtctaggctgagaagtcctttttcttcttcccacctttatttccttagtttctgtccaccttaatcgaaacaacacatggttatgtctttttcctgctacaactacagggtacttgagcctttcccctcaagtgcattcgaagtcacccaggatgatcctcactagtagcctgctttggcagtgtggctttttgcacacttgccctgtcttcctgagactacttcagtaagccacgtcttccttcttccccacttttatttggtgtcatgaatag

SEQ ID NO: 824 - DNA, 481 bp, Homo sapiens
  misc_feature (1)...(481): n = a,t,c or g
aaaaaaaaaaaaaaaaaatgagggcgttactgtgactttacagcaattaaagtgattataagataatactataaacataggtacactagcaaattgaataaccaaatgaaatggcaaatctctagaaacacaaagcctaccaagactgaatcacaaacaaagaaaaaatatgggtaaaccnnnnnnnnnnnnnnnnnnnnnnnnnnnnnnnnnnnnnnnnnnnnntgcactnnnnnnnnnnnnnnnnnnnnnnnnnnnnnnnnnnnnnnnnnnnnaaatagaaagtaggggtaaacctataactagtaagaacattaaattactaattaaaatcctttcaacaaagaaatacccctgactggatggttttaccagtcagttctaccagacatttaacgaaaattaatgccaatcctttgcaaactctttcaaaaacttgaagaggaggaaatactttctaactcattctatgaggccagca

SEQ ID NO: 825 - DNA, 1303 bp, Homo sapiens
tttttttttttttttttttagggtataaaaagacagatgcaaccatacatttaatttttaaaaatggaatgtatcttacataaggattttgtgaaaaatcttatacctatctgagtattacagaagatgcatataccttccagagctcatggaggaaagagtgtataaacaattttgataaggagttgaaaaacaatttgaaaatagtttacaaagagagaatcaggaggcagaaaaagcttcaagaggcatggtcttcagaaattgttctggaatgctgtttcacttgtatcgatgtcatgttcctggttcaatttcttgaactccaccacttggaagaagacgtgctcaaggatatgtttggcatcctgttggtcctttggtagtttactggttactccaagaatatcaccacacttcctgacataaaattccaggtcttcttcagtacacttattggtaatctgagccagccgtgccttctcagaggagaacgtttcatctaaatcaaatagctccagaggaggaggtggtaactcccggaaactgggaggaaaaaccgcaggctgaagggttggcagcggcgtctcaaactgaggctggatgagctggagtggttcatgtttcacatttagctgctcgtgagcctcgatgacgctgtggaaggaggtggtatccagctggaagatggacaggtcgaagagggtggtaaagtcccttgggatctcatcactctcctggagacactcctcgattccgctttgatagggtggctgtgtagggcagcatcatgtagtcagaaatctctgggtcctcagcatcaatctggtttaggtggatgtctcctgtcgtgagccactggaaaacaacatccatgattttgctgttttcttctttgtccaaatattgatcactgaacatgtgacatgaaccaagcactgccagcttcccaccttggttctttgagtgatagaaagccaaaatgggtctgttaagtgggaagcagacagaacctgtagacagaaccgccactgctggtttcatgacactcaatgtggcaccaaaaggatacacaaaggtgagagcctgggcattgtttccactgctttcctcatcaatgatcgccaggcacagcctttcctgcagctcggctaatttccctgttcaagactccactggaaactagagcttctttaggatggaaatatttgtgatatacatttctaaccacagcatcattattaaccatgattccatattcttctagtaaaaagttaatattggtgtcaaatctggattctcc

SEQ ID NO: 826 - DNA, 465 bp, Homo sapiens
  misc_feature (1)...(465): n = a,t,c or g
ttgnnnnccatnnnnnnnnnnnnnnnnnnnnnnnnnnnnnnnnnnnnnnnnnnnnnnnnnnnnnnnnnnnnnnnnnnnnnggcacgagggaaaagcaggcgcctttgctggactttccttttaatcccctaaatcctgtcacaccctaagactatgaaagagatgggtggagaagagccttggtgctgtggaaagggccatacccactttctccctcattgcagctcacagtgtaggtctcacacccatcccaagcacctaaggggaggggttggttaaagcagcacaatacagtatttgaactcttcaggggtttggggaagtccaatataacagagatagcccaggccctcagcgtgnnnnnncaaancatcctcctttcactctgtctctttctaaggcaaatactcataggtagagttttgcaaggtaagcttacntgagccanaangggngnnangaatg

SEQ ID NO: 827 - DNA, 424 bp, Homo sapiens
ccaggtagtgggatgactgtacctttaaaaatacataatttagtttgcaagctatattatgctactttctattttccttgttactttatagcaattcattttaccctcacaaagtcaatttagaaccttatcattaactgggatgtgtagtgatatttttgggcctctgggtttcatgtgtcaatacaaggaatatttatttaaaatagatttatttagaggaggcacagtgttgttgatctgtgtgacaccacccatatttttaaaaacctttgtatgtttctctaaatttgttgttgactgaatataatagaccctaccataattcgtcaaatatcactgattagttacatcctttgtgtgagattagctgtaaagtatactgctcttattcttattcagaatagttaattggtagccaaaa

SEQ ID NO: 828 - DNA, 462 bp, Homo sapiens
tctgaatctcaggcaactcctcattctagttatggcttatgtacctccaccccagtctggtcacttcagcggccaccctgccctccaaaggttcattctgaagttcaaactgatggcaacagtcagtttgcatcacaaggtaaaacagtttctgcaacctgtactgatgttctacggaattcatttaataccagtcctggagttccatgtagcctgcccaaaactgacatatcagctattccaacattgcagcaactgggccttgttaatggaattctgccacaacaaggaattcataaggaaacagacctactaaaatgtattcaaacatatttgtctctttttcgatctcatggaaaagaaccgcatctggacagtcagacacaccgaagccctactcagtcacaaccagctttcttggccactaatgaagaaaaatgtgccagagagcaaattagagag

SEQ ID NO: 829 - DNA, 515 bp, Homo sapiens
tattaatgggaaaggcattcaggaaattatggtttctacctttttaaaaagtagatgggattgtgtcaatcttggttaatgagctacagttttacaaagctgatcacttcctataaggacaatggtagacattttataaagatgttttttcacaagattaattactgggacaaaagtaatttggaagcccagttccttaggtgggataggaatgaaagcctaaacctcttcctttagctttgttcctatttcttgcaccttcccatatttatgtgccttttgtctatttataatgccactggaagaggagggataactttttctgttatttgatttcttttataactttgttaggtttttgaagctgcaaacactacaatgctttgagggggtctgtgcctgaagctcaggagtgtggatcagacagtctaaagatcctaaaaacttgccaactgggatctttggtttaagcaaactcactgggaaatggaacacttaatgggaatttttaagtc

SEQ ID NO: 830 - DNA, 768 bp, Homo sapiens
ctcccccaactaatgctgcacctcctgctgctccaccacccccacccccacacttgaccccagagatcacgccactgtcagctgccctggctcaaacaattgcccagggaatggcacctccacctgtctccatggctcctgtggctgtatctgtggctcctgtggcccctgtggtgtatcgatggcccaacccttggcaggaatcacaatgagccacaccaccactcccatggtgacttaccctatcgcttcccagagcatgcgcatcacggccatgccacactgatggggctaatggacactcccctggtatagcctcgcagggctggggtcagggggcccttgcccactcacctagccttccccatccctgtctgaagggctcccttgagaactaggacaagagactacaaggagtatgtcctgaggaggggttgggatggtgtgttttctctcacctcccttttatgagggtcctcttgtccatcttcaagcctcacagtgggggcttgcagaggagtgcagactgaagccagcagagaggaaggactgactgaggggctgtgtcctcttatgggaatttgggaacatccctcgtcttgtcctctcttctgcacagcacaggttccagcactggttttagaagaaaaaaataccctgcccagagggaaagccaggaaagattgggaagtgggtggtcaggagagaaggcctgataggagccttcagacaatttgggtcctagttgcttgggttggacaatacagg

SEQ ID NO: 831 - DNA, 1009 bp, Homo sapiens
  misc_feature (1)...(1009): n = a,t,c or g
ttttttttttggtccaaaagcatatttgttcttcagagacacggatgagctgggacagaaaataggggaagacaacaggccaaggcccactctgtgttacttttcctgaagtcagaatcagttgaggcacacactggggcctgcaggagtcgagtgagccgcgtggaggaacatgttgtgtctgccgtttttgaatacccagggtgggagcttggccatctgcatccccacttcccatagcccaggcagagggacagagaaatggagtggggagcacagagcaggctccaacaagacaaattccctgctgccaaaccaccatgatccactctgactttggtcacaaactctgctaaaaacaattctctacgttcactgttcccaagggtcattctaaacagtgggtggccaccacccccttagaagcaagagaaaaagaaaaaaggcaaaataaatgcaagaaggcaagccaagagcctccccagatgcccctgctcaggacccttccccgcagcttggcagtggccactcagggcttggccacaggcagggcttggctcagtatcctgtcaggggcaagagccaagctgtctgggagggtcgggggatgcaggaaggatgtgtgggaatcaccaggccattgctgcatttggggtgacaggctgagtctgccaagccggagggagccctgaggcctcatcctcactgggggtcctattcctggaagagtgctgaatgtcaactcccaggcctcctcttccagcaataaggaagccatgtctgagaggggaagggcaagatgtgccctcagcctcactcaatgagctccacgtagttggcagggaacatgccaaaatggccatccggcccatagccacgccaccagccttcgtcgatcacctcgatgcccgtgatgaggttctcggggtcaaaggagatctctgtgtcgtcggctgcatggtagtcgtacaggncnacggcacagagcccttgcccactgagccctggc

SEQ ID NO: 832 - DNA, 712 bp, Homo sapiens
tttcatgttagtaaattcacttgttcttgggaagcagattaagtagcagaaagtccaggaaagaaagaccagaaggagtaatgagacaagtgatggtggggaagctgaatgttgagggaaggtggaggaaggaggagatgagcagtgtcagtaaatactgtgcattcagtagaagttgaagaatcattgttagaagcatttccaaacaaaacactaagcaaaatgggaattaggcttattttgaatgcatctttaacttacgaaagatgtactaattgtgggggtgcctgaagtcaggcggagctgacccaggggtgggaacgatggcagctgcccaggacccatgtgcttggcccaggctatgtcctcgtgagaggtactggggtccacggatatgtgttgtggggcagacagtcactgtgggatgtcttcaaagtcagcagttacagaattagtttactttgaattttgttgtctaaatagctcctgctttattttttaaattaaattttttgtttttactatcacaggctggcctaactaatacaaaataggtgatgaacctctggttttaccataatgcaatgtgccacggaaagtttgggggaggtttttaatgtaattgcactctggttaattggctcgtaccaagccctgccttatgacttgtgggaagcttcaaggggttccactgatgcaaaaagggtctttt

SEQ ID NO: 833 - DNA, 740 bp, Homo sapiens
tttttttttttcaagtaagttcacttttattcatacagtcattagagaaaatgagcaaaatttccagtaaccccaaccactgccttttctccctggacctagtaaattcctatcaactctttagttgactctaagaactgggctctatgagatcctgacagctaaaacacaggtacagaggagcctgcataaacgttttggtccaggtcttggcctccagtcttatgatgggctggtagaatattgcttcatcagatgcttgtgacagggattgcaaactcgctcaagcttgatacttgaaggaagaggcagttcatttgttgaacaggcatcacagaaggttccgctgcagttcttacacacattctttgttaggctgccgtcttcctggcatagctgacacaactgtggcttttcagagagcagcagctgatcctgttcatccatagggtggggttgcagcctgtggctttcttccaggggcttttttagtttaacattttcctcttgcattttgtgcttcccatccatcttggattctgacttctgggaaccccttcctgggatgctcctgtcgttttgtaatcttctttctttttcctgttttagttctaactcaagctggttccgctgcctggtgagctcctcgacttccagctgcagactgttgatcttgtctccaaagtcctgtttgaagagccggttgtccaactcagcagattggcgcctcgttccgaatt

SEQ ID NO: 834 - DNA, 485 bp, Homo sapiens
  misc_feature (1)...(485): n = a,t,c or g
tgaancccttnnnnnnnnnnnnnnnnnnnnnnnnnnnnnnnnnnnnnnnnnnnnnnnnnnnnnnnnnnnnnnnnnnnnnggcacgaggattgtgaacctatttaatatgtttatcacatatggcgacacatttctgccaacccccagcagctatgatgaactttactatgagattatccgcatgcaccagagctttgacaacctctactccatggtcctgaggctttctaccaatgcaggccagtggaaggaagcagctagcaaggtgacccatgcattggttaatatcagagccatcatcaaccactttaaccccaaaattgagtcctacgctgctgtgaatcacatatcccaactgtcagaggagcaggtgctggaggtggtgagagccaactatgacacgctcacgctgaagctgcaggatggcctggaccagtatgagcgctactcagagcagcacaaggaagctgcttcttcaaagagct

SEQ ID NO: 835 - DNA, 543 bp, Homo sapiens
gtgcatttgttaaggtattgccaactttctgaaagacactagagacaagggaggagaccaagtgctaaagaccttttatcacttttgcaaaaaacaagaaaggccaactccatttattttatcacgtggatctcttaaggaactaccaaatctactaagggacctccaagaattttgtgacccatgaaaatctcctctcctagtcacaaggcataaatacataaaaatacataatggcaaatttctgaatctgacatgacttctcccaaatacagctgtcttcagttccctttaattattgccctctttgcagcagcggtgatggtgggtgatggagtgacatcaggagcgcccagaaggaggaagtcagaaagcccttggggacaggaatgtccttgtgttgcaaacatttctccaagaactgcttgaggcgtatgaaggagcccatctgtcctgagcttgtgatagcttcaattctgggaaagtagtcctctttgatgagaattagcatcttccagaactgaacctcgtattgcttcatga

SEQ ID NO: 836 - DNA, 966 bp, Homo sapiens
ttttttttttttttttcacaaaagcactttttatttgaggcaaagagaagtcttgctgaaaggattccagttccaagcagtcaaaactcaaccgttagtggcactattttgacctggtagattttgcttctctttggtcagaaaagggtattcaggttgtactttccccagcagggtagaaagaagggcaaagcaaactggaagagacttctactctactgacagggctcttgagatccaacatcaagctagacacgccctcgctggccactctacaggttgctgtccccactgctgagtgacacaggccatactacatttgcaaggaaaaaaatgaggcaagaaacacaggtataggtcacttggggacgagcaggcaaccacagcttcaaaactcttcatggaaggggtaatccttgtgggaggtacagctcaacaaggcacagaccctccagttcctgttgtagctgagtaaggtggtcatatcctgggctgctcagttcaaagtcaaagaccttaaagttctcagcaatgcgttctggtgtcacagacttggggatcaccaccaagttcctctgcatggggaaccggatcaggacctgggctgtagttttattgtgcttggctgcgatcgccttgatcctgggatcctcccaggagagaagggtcctcgggcttggcccagggcctgtcaggagagccgagggggctgtaggcggtcaccacgatgcctttggactggcagtactggattaacttctcctgagtgagatatgggtggcactcaatctggttaactgcaggcttatacttcaagccaggtttgtttaagatcatctccacctggagatggttgaagttggagatgccaatagctttcaccagcccttcatccaccagctcttccatggccgcccacgtgtccagaatgttggtgtcactgggaaccacattgcccgactcatc

SEQ ID NO: 837 - DNA, 665 bp, Homo sapiens
ttttgctttttataaaacaagtttattcacattttagaaaaactaattccaggacaggaaatggcctccctataggatccctaagagatcaagaacagaaggccagagggaggggcttgggagggaaggagtggggaaggggaggcacgtctcccattctgggtagtgggaggtcaaataaattaaaggaagagtggacagagggagagggtgtccaggcaaccagaggagggcttggagctgggccggaagacagtcgacacctgcaagacctgaaaagggtgcccggtgtgggctggggagtaagggatcaccgttttcgaagcctcttcatgaagcagcaagtgatggtaccaaggacagtggcaccagtgactagggccacccctgtacccaccagcagaggcacaaatagggtgtccagggcatgcatgtaggggtagactgtaacaggccctgagcgggcactgcccgcctggtaccagctgtagtcggcatgctgcacccaggcgctgggggcacagtggtacacgccttcatcctcgggccccaagctgtgtagtctcagccgatggcttcggggccccaccagctctacgctgacagggcctcctccaggccggactcccagctctgccacaccatcctggcctacgccacccacc

SEQ ID NO: 838 - DNA, 344 bp, Homo sapiens
  misc_feature (1)...(344): n = a,t,c or g
gggatttaatgtttaatggttacagagtctcaacttgagaaatgacaattgttctaagnnnnnnnnnnnnnnnnnnnnnnnnnnnnnnnnnnnnnnnnnnnnnnnnnnnnnnnnnnnnnnnnnnnnnnnnnnnnnnnnnnnnnnnnnnnnnacatnnnnnnnnnnnnnnnnnnnnnnnnnnnnnnnnnnnnnnnnnnnnnnnnnnnnncagctcgagcccagggaactcaggaccagcctgggcagcaaagtgtgagaccccgttctccacaaaaggagaacgttttgttggaaattttttttaaaaccttggttttaaattgaaccaaatcccaacnattgcg

SEQ ID NO: 839 - DNA, 704 bp, Homo sapiens
gaaccccctttctcctggtaaagggtaaggggggggataatgtttaccacaggtacgaaatagtcactttaacattgagacctctgcctcattgaattcaggttttttaagtacttgaaactcttcagattctccttattttagtttctttttacatttatgaagtagaaagcattgttttgtaaactgttttgaaaataaatagcctagtctcttatcctctttagcgtggattaaaggtgaagttctgcaaatgggagagtgttcacagtagatagctcagattgattgaacacatttgaggaagagactcctgcatgagataccagcatttttacaaatactttttatgtacattctttattttgtcattttgtcaaccctctccccaagcacatcttctttccttttactatgtctatgtagggaaaaaaacaaaacaaaaaattgcacttacgttacactcccaaaatgtgggtaatccgtgtctttcaaaaaacatttctgttttttgttttgttttggtcagtccattgcataagtgacaagtttgggtgcttgtggcacgtatgtatgaagcgggagggggatgagaattgcctgtccttcagtaggctgtaaaagtaatttacatgtaagtaaaaaggggaaatagaatagatgccaaagtcatttattcagtccttagttttcttatgtggcat

SEQ ID NO: 840 - DNA, 374 bp, Homo sapiens
gcggcacgagagcattgctgacagcccaacagactgctctggaaattattgtcaacatgtgctgcaatgaagatccctctgatgacgaatgggaagagctttctagcagtgatgaaagtgacgcatttatggagaattccttcagtgagtgcgggggacagctgttttctcccctctgcctctcccatgaagttcacacggctctcaccaactacctcatcccaaagaagatttttgagaaaactgcctttccaaacagcattgcagttgacctatgttctaggaaccctacttggaaacctttgattagaaaaatgaacactattcagtgcagagccctcttctgtctccagagtcttgtgtccctcctggat

SEQ ID NO: 841 - DNA, 1313 bp, Homo sapiens
ccggaaatcccggaagtaacagctttgggggtttgctgctggctctgactcccgtcctgcgatgggttgcgacgggggaacaatccccaagaggcatgaactggtgaaggggccgaagaaggttgagaaggtcgacaaagatgctgaattagtggcccaatggaactattgtactctaagtcaggaaatattaagacgaccaatagttgcctgtgaacttggcagactttataacaaagatgccgtcattgaatttctcttggacaaatctgcagaaaaggctcttgggaaggcagcatctcacattaaaagcattaagaatgtgacagagctgaagctttctgataatcctgcctgggaaggagataaagggaacaccaagggcgacaagcatgatgacctccagagagcgcggttcatctgccctgtggtgggcctggagatgaatggccggcacaggttttgcttcctccgatgctgcggttgtgtgttttctgaacgcgccttgaaggagataaaagctgaagtgtgtcacacgtgtggggctgccttccaggaggaggacatcattgtgctcaatggcaccaaggaggatgtggagatgctgaagaagaggatggaggagagaaggctgagagcgaagctggaaaagaaaacaaagaaacccaaggcagcagagtctgtttcaaaaccagatgtcagtgaagaagccccagggccatcaaaagttaagacagggaagcctgaagaagccagccttgattctagagagaagaaaaccaacttggctcccaaaagcacagcaatgaatgagagctcttctggaaaagctgggaagcctccgtgtggagccacaaagaggtccatcgctgacagtgaagaatcggaggcctacaagtccctctttaccactcacagctccgccaagcgctccaaggaggagtctgcccactgggtcacccacacgtcctactgcttctgaaagcccgcactgccaccgctcctgccccagaaggttgtttagtttccacgtaggcaggtcgctttgtgcctctgagtgcgctgctgtgtgttctctctatagttctgtgtcataaagctgtcctggccagccttcaagctggtgtggccactcttgatgtgaggcgtgtcggttccaggggggacatgggaggggctgcacagtggcccgaggtcatgcttgcttccacctgcaggtgcatttgggtcctttccatggccaggaagccctgtgggctgcactttttatgcttgcagtaacaagagactccagagtcctcaccggtgcagag

SEQ ID NO: 842 - DNA, 467 bp, Homo sapiens
  misc_feature (1)...(467): n = a,t,c or g
tttgannnttgnanancgnnnnnnnnnnnnnnnnnnnnnnnnnnnnnnnnnnnnnnnnnnnnnnnnnnnnnnnnnnnnnnnnnggcacgagccccccaccccccaatgttgtatacaaaaccttagaggaagtgtatgcagaatgttggattttggaaaggctaatgtcgatggatcttggggaagaactgaagtagtagaaaatgaacctggataggatcagataataagatcaaatacagtagtgccttgaaagccagacaggaattctgatttgacttcatatagatgtgtgggaactgttatgggatctcaagcaaggtaatgataaaagtggtgacaatgaaagactgatgatggattagggaaaggggctaagattgggaacaagataagtagctataattgagaatgaaagtgaagcccacatctaagaggacaagtgtatatctttttaagaaatatgt

SEQ ID NO: 843 - DNA, 242 bp, Homo sapiens
accagttacttttgaggacaaacggaaagccaactatgagcgagggaacatggagctggaaaagcgacgccaagccttgatggagcagcaacaaagggaggcagaacgtaaagcccagaaagaaaaggaagaatgggaacgaaaacagagagaaatacaagaacaagaatggaagaaacaaaaaacatagaaaaacacttagaaaagacaagggaattagagagaaaacaaaaggaaaaaac

SEQ ID NO: 844 - DNA, 1068 bp, Homo sapiens
  misc_feature (1)...(1068): n = a,t,c or g
ttttttttcaataaaacatttttattctgtacaatatatatgtgtatttaaatatatatacatatgtatatatatatntctccncagagaaaccttagccaacaaatccctgagtccatgggaacccaggacactaacaaagggaaaggagagtccatgcctaaagagtaggaaatatggcaacatctttccctttcctcctggttccctgcaacagagggaagggaacagtcactacaaattactaaaacgagggtttaggtggggcaggaaagtggggtgagagtggtaggatggggaactcagatgccaccagtctgggaaagtaaaacatttgatccagcatgaaagccaacatgaccgcagaggaaaaagaccagactgatgggcatgcagctggcctttggtatatgccaagcctttgcttggtagccccacgcctgggccagcacaacaaatagcacctgtggggcctataagccgggagggggatgggggagatagggactggggaaatggcccttgagtgaaggaaagggagataaagctgaggaagaggcctcaggcctcagcacagggtggcaacactaccattcactgtccctgtgccatttcttcagactctgggccgccaccaccaccagatggccaagagcagataaccttttgtccacagccaggtagagatgggcaacttacatggccttgagaagaggtatagaaaaaggagtgcttttgagggctaccccctgttgtgaccattcctgaagtgcagagaccacaccagcaaaacatgcccagtcttagtagtggggacgaagaattgatgagtggatccagtcagctccggcagacaggccacagggttgccaggtttgatgagccaaccaggtgagcacacagcttcggagcactgccctgaatcctgtcttctccctcaggactgccctttcctggccacaccaagtttggcacctctccagaaagttggcagggagcaagtggcagacagcacccctctctccctagcctattaacacacagagccgccaatggcagggcagagcg

SEQ ID NO: 845 - DNA, 2604 bp, Homo sapiens
gatgaaggattaccaacgtgaattagaagaagctcgtgcatccagagatgagatttttgctcaatccaaagagagtgaaaagaaattgaagagtctggaagcagaaatccttcaattgcaggaggaacttgcctcatctgagcgagcccgccgacacgccgagcaggagagagatgagctggcggacgagatcaccaacagcgcctctggcaagtcccgcgctgctggatgagaagcggcgtctggaagctcggatcgcacagctggaggaggagctggaagaggagcagagcaacatggagctgctcaacgaccgcttccgcaagaccactctacaggtggacacactgaacgccgagctagcagccgagcgcagcgccgcccagaagagtgacaatgcacgccagcaactggagcggcagaacaaggagctgaaggccaagctgcaggaactcgagggtgctgtcaagtctaagttcaaggccaccatctcagccctggaggccaagattgggcagctggaggagcagcttgagcaggaagccaaggaacgagcagccgccaacaaattagtccgtcgcactgagaagaagctgaaagaaatcttcatgcaggttgaggatgagcgtcgacacgcggaccagtataaagagcagatggagaaggccaacgctcggatgaagcagcttaaacgccagctggaggaagcagaagaagaagcgacgcgtgccaacgcatctcggcgtaaactccagcgggaactggatgatgccaccgaggccaacgagggcctgagccgcgaggtcagcaccctgaagaaccggctgaggcggggtggccccatcagcttctcttccagccgatctggccggcgccagctgcaccttgaaggagcttccctggagctctccgacgatgacacagaaagtaagaccagtgatgtcaacgagacgcagccaccccagtcagagtaaagttgcaggaagccagaggaggcaatacagtgggacagttaggaatgcacccggggcctcctgcagatttcggaaattggcaagctacgggattccttcctgaaagatcaactgtgtcttaaggctctccagcctatgcatactgtatcctgcttcagacttaggtacaattgctcccctttttatatatagacacacacaggacacatatattaaacagattgtttcatcattgcatctattttccatatagtcatcaagagaccattttataaaacatggtaagaccctttttaaaacaaactccaggcccttggttgcgggtcgctgggttattggggcagcgccgtggtcgtcactcagtcgctctgcatgctctctgtcatacagacaggtaacctagttctgtgttcacgtggcccccgactcctcagccacatcaagtctcctagaccactgtggactctaaactgcacttgtctctctcatttccttcaaataatgatcaatgctatttcagtgaggcaaactgtgaaaggggctttggaaagagtaggaggggtgggctggatcggaagcaacacccatttggggtttaccatgtccatccccccaagggggcgcctgccctgcggagtcgatgggtgtcccgcatctactcatgtgaactgggccttggcgagggctggtctgtgcatagaagggatagtggccacactgcagctgaggccccagggttgcagccatggatcatgttagactttccagatgggtctcccgaaccgcctgggttctgccggcgccctcctcacgtcaggagcaagcagccgtgggacccctaagccgagctggtggaaggcccctcccccgtcgccagccgggccctcatgctgaccttgcaaattcagccgctgctttgaacccaaaatggggaatattgggttttggtgtccgaggctttgttccaagtttgtcaatgaggtttatggagcctccagaacagatgccatcttcctgaatgttgacatgccagtaggtgtgactccttcatttttccttctcccttccctttggacagtgttacagtgaaacacttagcatcctgtttttggttggtagttaagcaaactgacattacggaaagtgccttagacactacagtactaagacaatgttgaatatatcattcgcctctataacaatttaatgtattcagttttgactgtgcttcatatcatgtacctctctagtcaaaagtgggtattacagacattcagtgacaatgaatcagtgttaattctaaatcctttgatcctctgcaatgtgcttgaaaacacaaaccctttttggggttaaaaagctttaacatccaattaagggaagaatttgtcctgtgggtttggaatcttggattttccccctttatgaactgtactggctgttgaccaccagacacctgaccgcaaatatcttttcttgtattcccatatttctagacaatgatttttgtaagacaataaatttattcattatagatatttgcgcctgctctgtttacttgaagaaaaaagcacccgtggagaataaagagacctcaataaacaagaataatcatgtgaacgtgaaaaaa

SEQ ID NO: 846 - DNA, 1481 bp, Homo sapiens
ggcggcggaaagtggtagcgattttcagcagagacgtagaaggcgccgggacccggaggaaccggaaaaaacagaactcagcgaaagagagctggcagtagcagtggcggtgtcccaggagaacgatgaggagaacgaagagcgctgggttggacctttacctgtggaggcaacactggccaagaagaggaaagtcttagagtttgaaagagtctatcttgataatctccccagtgcatccatgtatgagcgcagttacatgcatagagatgttatcacccatgtggtatgcaccaaaacagattttattattactgccagtcatgatggacatgtcaagttctggaaaaaaatagaagagggaattgaatttgttaaacattttcgtagtcacctgggagttattgagagtattgcagttagctctgagggagcattgttctgttctgtgggtgatgataaagcaatgaaggtgtttgatgtagtggaactttgacatgatcaacatgctgaaacttggctattttcctggacagtgtgagtggatctattgcccaggggatgcaatttcttcagttgctgcttccgaaaagagtacaggaaaaattttcatttatgatggccgaggagataaccagccacttcatatttttgacaaactccatacatcacctcttactcagatacggctaaacccagtttacaaagcagtagtgtcttctgacaaatctgggatgattgaatactggactgggcctcctcatgaatataaattccccaaaaatgtgaactgggaatataaaactgacactgatttatatgaatttgccaagtgtaaggcttatccaaccagcgtatgtttttcaccagatgggaagaaaatagctactattggttctgatagaaaagttagaattttcagatttgtaactggaaaactcatgagagtctttgatgaatcactaagcatgtttactgaactgcaacagatgaggcaacagttaccagacatggaatttggccgacgaatggctgtagaacgtgagttggagaaggttgatgctgtaagattaattaatatagtttttgatgaaactggacacttcgtgctgtatggaacaatgctgggcattaaagttataaatgtagagacaaaccggtgtgtgcggattttaggcaaacaagaaaatattagagtgatgcaattggctttgttccaggggatagccaaaaagcatcgtgctgcaactactatagaaatgaaagcttctgaaaatcctgttcttcagaatattcaagctgacccaacaatagtctgtacatcattcaaaaagaatagattttatatgtttaccaaacgagaaccagaagatacgaaaagtgcagattctgatcgagatgtttttaatgagaaaccttctaaagaagaagtcatggcagctactcaagctgaaggacctaaacgagtttcggacagtgcc

SEQ ID NO: 847 - DNA, 1295 bp, Homo sapiens
cgacaaagtcatggaccgcaacccctcgccgccgccgccgccgggtcgcgacaaggaggaggaggaggaggtggccggtggagactgcatagggagcacggtctacagcaaacactggctcttcggcgtcctcagcggactcatccagattgttagccctgaaaacaccaaatctagctcagatgatgaggagcagctgacggagcttgatgaagaaatggagaatgaaatttgcagagtatgggatatgtcaatggatgaggacgtggctttatttctccaagaatttaatgctcctgatatattcatgggagtactggccaagtccaagtgtcctcgattaagagaaatctgtgtgggaattttaggtaatatggcctgtttccaggagatatgtgtgtccatcagcagtgataaaaatcttgggcaggtgttattgcactgtttgtatgattcagacccacctactctgctggaaacaagcaggttgttgcttacttgcctttcccaggcagaagtggccagtgtttgggttgaaaggatccaggaacatccagctatttatgatagcatttgcttcattatgtcaagttcaacaaatgttgacttgctggtgaaggtgggggaggttgtggacaagctctttgatttggatgagaaactaatgttagaatgggtcagaaatggggctgctcagcctctggaccaaccccaggaagagtctgaagagcagccagtgtttcggcttgtgccctgtatacttgaagctgccaaacaagtacgttctgaaaatccagaatggcttgatgtttacatgcacattttacaactgcttactacagtggatgatggaattcaagcaattgtacattgtcctgacactggaaaagacatttggaatttactttttgacctggtctgccatgaattctgccagtctgatgatccacccatcattcttcaagaacagaaaacagtgctagcctctgttttttcagtgttgtctgccatctatgcctcacagactgagcaagagtatctaaagatagaaaaaggaggacggtggctcagggagtaaaggaaggccagttgagcaaacagaagtgttcctctgcatttcaaaaccttcttcctttctatagccctgtggtggaagattttattaaaatcctacgtgaagttgataaggcgcttgctgatgacttggaaaaaaacttcccaagtttgaaggttcagacttaaaacctgaattggaattacttctgtacaagaaataaactttatttttctcactg

SEQ ID NO: 848 - DNA, 526 bp, Homo sapiens
  misc_feature (1)...(526): n = a,t,c or g
tttggntttnnnnnnnnnnnnnnnnnnnnnnnnnnnnnnnnnnnnnnnnnnnnnnnnnnnnnnnnnnnnnnnnnnnnggcacgagattaagatgaatttgaaaagaaagccatttcctctatttaagaattgccttggcaagaagttggaaatcctagaaccttgttgcaaaggaatgtgtcgctatttgttatgaatgagtctggttgggtccagtgaaaccttcctattgctaatgtgcaattaggtatcttcagtgagggagagactgtcctctaagcaaagcagctaaagctccaggggcaaagggcagagcgaataagcaggggcctgggtcatctattttgttctctggcctgaaagcatttgactgctcatctcacatcccttctttgccctcagtcgttagatattaggtctactgtggttgaatgagactgtctacaaaagggttccagtgctcaccaaaagctgtttgtaaatacnaagtattacntattatctttnctaagggtgngagaaccta

SEQ ID NO: 849 - DNA, 484 bp, Homo sapiens
attgtcacaaaaggttttattctctttgcttgtgactatttttcattgaagcatgcgcttacctatgctgattcttactaaaagcataggctggggtatttattggcgaaaggaaatgtgtagtgtgggctggactgttggtggaggctggctttttagcccacttgctatacatgctgccaatggatttaagacttgaaatgttgaaagttgagtggaattatttccctcctaaaacatttatttacagtactcctctctacccctaaggttgggctctgcctcagaggagtgagttttttttttttttctataaagtttacattgtcttactatttattgagtgaatttctggtcagtgcctatgcaaatataagaaatctggctttaaatattagtcagttttcatggctatgactagattgttttcttgtataactaaatacctgtataaaatgaactaatgttttctctccctccctac

SEQ ID NO: 850 - DNA, 6193 bp, Homo sapiens
tgaggattatcctgatatgaacgcttctcccttggtccgatttgagcgctttgaccgggaggatgatctcatcattgagtttgacaacatgttctccagtgctacagacatccccccatccccaggaaatatccctaccacccatccactgatggtgcgccatgcagactacagttctctgacactgggcagtggctcttcaacaactcgtctcacccagggcatcgggcgcagtcagaggaccctaaggcagctgacggccaatactggccacaccattcatgttcactaccctgggaatcgccagcccaaccctcctcttatactgcagaggttgcttggtccctcagctgctgctgacatccttcagctgagcagcagccttcccctacaaagccggggtcgggcccgcctcctggtaggcaacgatgacgtccacatcatcgcccgttctgatgatgagctgctggatgactttttccatgatcagaggcacagctaccagccaagcaggaaccctgtccagcatccccacagccctgacccgctggacagaagaatgcaaagttctcgatgctgagagcatgcatgactgtgtttcagtggttaaagtgtccattgtcaatcacctggaattcctgagggatgaggagctggaagaaaggcgagagaagcgcaggaaacaactggctgaggaagaaacaaagataactgataaaggcaaagaagataaggagaacagggatcagagtgcacagtgtactgcatctaagtcaaatgactccactgaacagaatctctcagatgggacgcctatgcctgacagctacccaacaaccccatcttcaactgatgcagctacatctgagtccaaggagacccttggcactctgcaatcctcacaacagcaaccaacactcccaaccccaccagctttgggagaggttcctcaggagctgcagtctccagctggagaagggggcagctctacacagctattgatgcctgtagagccagaggaattgggtcccacaaggccaagtggggaagcagaaacaactcagatggagttatccccagctcccactataacctcactttccccagagagagctgaggattctgatgcactgacggctgtcagcagtcagctagaaggctctcctatggatacaagcagcctggcttcctgtaccttagaggaggctgtgggtgacacttcagcagctggcagttctgagcagcccagagcaggcagctccactcctggggatgccccaccagctgtggcggaagtgcaaggcaggagtgatgggtcaggggaatctgcccagccacctgaggacagctccccacctgcatcctctgagagctcttccaccagagattctgccgtggccatttctggagcagattcccgaggaatcctagaagagccgttgccttcaacaagcagtgaagaagaagatccccttgcgggtatcagtctccctgaaggtgtggacccctcttttctggctgccctgcctgatgacatccgtcgggaagttctacagaaccagctaggcattcgtccaccaacccggactgccccctccacaaatagctcagcgcctgcagtggtggggaatcctggtgtgactgaagtgagccctgagtttctggctgccctgcctccagccattcaggaggaagtactggcacagcagagagctgagcagcagcgacgagaactagcacagaatgccagctcagacacccctatggaccctgtgaccttcatccagactctgccctcagacctgcgccgtagtgtcctagaggatatggaggacagtgtgttagctgtgatgccacctgacattgcagctgaggctcaagccctgagacgagagcaagaagcccggcagcgacagctcatgcatgagcgtctgtttgggcacagtagcacctccgcactctctgctattctccgaagcccggctttcaccagtcgcttaagtggcaaccgtggggtccagtatactcgccttgctgtgcagagaggtggcaccttccagatggggggtagcagcagccataacaggccttctggcagtaatgtagatactctcctccgcctccgaggacggctccttctggaccacgaagccctttcttgtctcttggtcctactttttgtggatgagccaaagctcaatactagccgtctacaccgagtactgagaaatctctgctaccatgcccagacccgccactgggtcatccgcagtctgctctccatcttgcagcgcagcagtgagagtgagctatgcattgaaacacccaaactcactacaagtgaggaaaagggcaaaaagtcgagcaagagctgtgggtcaagtagccatgagaaccgtcccctggacctgctacacaagatggagtcaaagagctccaaccagctttcctggctctcagtatccatggatgcagccctaggctgcaggactaatatatttcagatccagcgttcaggggggcgtaaacataccgagaagcatgcaagcggtggctccaccgtccacatccatccccaagctgctcctgttgtctgcagacacgttttggatacactcattcaattggccaaggtatttcccagccacttcacacagcagcggaccaaagaaacaaactgtgagagtgatcgggaaaggggcaataaggcctgtagcccatgctcctcacagtcctccagcagtggcatttgcacagacttctgggacttattggtaaaactggacaacatgaatgtcagccggaaaggcaagaactccgtgaagtcagtgccagtgagcgctggcggtgagggggaaacctctccatacagcctcgaggcctctccactggggcagctcatgaacatgttgtcacacccagtcatccgccggagctctctcttaactgagaaactcctcagactcctttctctcatctcaattgctctcccagaaaacaaggtgtcagaagcacaggctaattctggcagcggtgcttcctccaccaccactgccacctcaaccacatctaccaccaccaccactgccgcctccaccacgcccacaccccctactgcacccacccctgtcacttctgctccagccctggttgctgccacggctatttccaccattgtcgtagctgcttcgaccacagtgactacccccacgactgctaccactactgtttcaatttctcccactactaagggcagcaaatctccagcgaaggtgagtgatgggggcagcagcagtacagactttaagatggtgtcctctggcctcactgaaaaccagctacagctctctgtagaggtgttgacatcccactcttgttctgaggaaggcttagaggatgcagccaacgtactactgcagctctcccggggggactctgggacccgggacactgttctcaagctgctactgaatggagcccgccatctgggttataccctttgtaaacaaataggtaccctgctggccgagctgcgggaatacaacctcgagcagcagcggcgagcccaatgtgaaaccctctctcctgatggcctgcctgaggagcagccacagaccaccaagctgaagggcaaaatgcagagcaggtttgacatggctgagaatgtggtaattgtggcatctcagaagcgacctttgggtggccgggagctccagctgccttctatgtccatgttgacatccaagacatctacccagaagttcttcttgagggtactacaggtcatcatccagctccgggacgacacgcgccgggctaacaagaaagccaagcagacaggcaggctaggttcctccggtttaggctcagctagcagcatccaggcagctgttcggcagctggaggctgaggctgatgccattatacaaatggtacgtgagggtcaaagggcgcggagacagcaacaagcagcaacgtcggagtctagccagtcagaggcgtctgtccggagggaggaatcacccatggatgtggaccagccatctcccagtgctcaagatactcaatccattgcctccgatggaaccccacagggggagaaggaaaaggaagaaagaccacctgagttacccctgctcagcgagcagctgagtttggacgagctgtgggacatgcttggggagtgtctaaaggaactagaggaatcccatgaccagcatgcggtgctagtgctacagcctgctgtcgaggccttctttctggtccatgccacagagcgggagagcaagcctcctgtccgagacacccgtgagagccagctggcacacatcaaggacgagcctcctccactctcccctgcccccttaaccccagccacgccttcctcccttgacccattcttctcccgggagccctcatctatgcacatctcctcaagcctgccccctgacacacagaagttccttcgctttgcagagactcaccgcactgtgttaaaccagatcctacggcagtccacgacccaccttgctgatgggccttttgctgtcctggtagactacattcgtgtcctcgactttgatgtcaagcgcaaatatttccgccaagagctggagcgtttagatgaggggctccggaaagaagacatggctgtgcatgtccgtcgtgaccatgtgtttgaagactcctatcgtgagctgcatcgcaaatcccccgaagaaatgaagaatcgattgtatatagtatttgaaggagaagaagggcaggatgctgggcgggctcctgcgggagtgggtatatgatcatctctcgagagatgtttaaccctatgtatgccttgttccgtacctcacctggtgatcgagtcacctacaccatcaatccatcttcccactgcaaccccaaccacctcagctacttcaagtttgtcggacgcattgtgggccaaagctgtatatgacaaccgtcttctggagtgctactttactcgatccttttacaaacacatcttgggcaagtcagtcagatatacagatatggagagtgaagattaccacttctaccaaggtctggtttatctgctggaaaatgatgtctccacactaggctatgacctcaccttcagcactgaggtccaagagtttggagtttgtgaagttcgtgacctcaaacccaatggggccaacatcttggtaacagaggagaataagaaggagtatgtacacctggtatgccagatgagaatgacaggagccatccgcaagcagttggcggctttcttagaaggcttctatgagatcattccaaagcgcctcatttccatcttcactgagcaggagttagagctgcttatatcaggactgcccaccattgacatcgatgatctgaaatccaacactgaataccacaagtaccagtccaactctattcagatccagtggttctggagagcattgcgttctttcgatcaagctgaccgtgccaagttcctccagtttgtcacgggtacttccaaggtacccctgcaaggctttgctgccctcgaaggcatgaatggcattcagaagtttcagatccatcgagatgacaggtccacagatcgcctgccttcagctcacacatgttttaatcagctggatctgcctgcctatgagagctttgagaagctccgccacatgctactgttggctatccaggagtgctctgaaggctttgggctggcctaataaggccctgcccaactccgtggggttttttttaccattgttggacctggggaggggggagttaaaaaaagaaccagaaagaaattgtcaaaaaccaataaatgaaatccaccaactcaccgtgtgtgtcccagctgccccatcttccccagcgcatacctgttcctcttctcattctctccccgccgcctgtttcctcaccttctctcccctttccatgccgtccatgatccccaccccatgtgttttaaaaaggcagtagcctttgccagggacctgtctgtcccaactgtttgaacagtgtgctcctcagattctgtgttcagaaggatttgctgcattgagacttgaaacctttggataggggaaaaaattatatatatatatattttttgttctgtttgcatttcttaatttgtgcttggaatgtgttgatgtggcacagctaatgattcaatgcgagacaa

SEQ ID NO: 851 - DNA, 1036 bp, Homo sapiens
ccagcgccaggcacattcctcctttccaggaaggtgtggttaagtgtaagtggtgaaagaagggaaaccattgcttaatgtcgcaaaggagacagactgtcctatgttgtgcagaaagctcccacaccaggtaggcaagttggccaccagcaaggccctcctatgagcatgacagcctaaaagtgcaggcaggccctcagctcaactattggtatatggaaaatgagaaatgttctgtgagataagaaatgttttgtcatttttctcagatttgctcccagtcccccatcagctgcttttcccttgtataaaagagatcaaaggaatatacaggatctattcacaggtcccacaaggaaggtggttggaagagtcacagataagggtgttgggtgagaagagctggactgagtccagagattgaaattacaggaagccccattagtccaaagcactgaactcggtgtcctgtttctgccttccagcctcctcctcatcttcacctttccccctcaccagtgttgcttggctaaaccagtatttcttgtgtactaaagaaactgaaaagcttaccacaaaagcaaaagtagctttcatcctttttttttatttcatagtatatttattagaataagagattagatttgttaaacatctaggttaaaatggttaaaaggattttcatacaattttaggcactatacacgttgtttacaacagcattggtacttggatatggggaaagataaatccgacattttaatatcttgatcaatttgtgacattcaaaataattccatttaagaaacattaatcaaaacttaaagagacataccactaagtatcccacacagtatactgaaaataaatatagaaatacaaccagaagtctacagatcaccacagtagacagactggtgaagccccagctatcatggcagtgaagggctctggctagatttggatgtcaactgctgagttctacatgaaaagcaaataataataataaaataacatgatgtaaaaaaaaaaataa

SEQ ID NO: 852 - DNA, 357 bp, Homo sapiens
cgcttcctcctcacagcaagccgtctcatctcagaggcttgccttcatatggcattcctcatttcctccccagtctggctacagcctcacctaactcactggtactgctcttgtccaggtcaccaatgaccttccaattgctaaatccaatggtttgctctcttatcttaccagatcccctcccattctacacagtaaactgccacttctcagaggattttcttctctcaggtactgtgacactactctcctggttttccttcttcctctttagccaatcctgtctcctttgctgcctcctccagaatcacaagctctaaagcttggaattccttggggtttggtgctgtgttctct

SEQ ID NO: 853 - DNA, 431 bp, Homo sapiens
  misc_feature (1)...(431): n = a,t,c or g
ctcgatacgtggaagaattctgtaagtacacttttaggtttaactgtacattttataaaagatgggattacaactttggcaattaaaatgttatatatgaaaaaagacatttttaatggtaacacaccaaaaacctttttaagaagaaaaatggagtgatcaaaggtattatacagcttttgtgcaaatttctcaagaaataaattgtttaatgatacgatgtagtgagccaagaatgtttaaacatggtgggtagcaatgatgctcattatgtgtacaatccacctgtgggataagaaaagacagtagacactggagactgtatatacttgtccccagagaatcaccggtcaagggtcactcacttatccttcaggttgccctaaggtacagcggcttttgagtcagtgaggaaagacgcngtgccgaat

SEQ ID NO: 854 - DNA, 2247 bp, Homo sapiens
gcacgggacaggccgggccacacccaccggggcgagctcggagggcggcgctctgggcggagggcccggcggctcggcccagggcgcgttacctcgtcgccggggccggagagggcgggcggaggcacggggcctggaggcgccaggcggaggatgcgggcgacacggtggcggcggcgaccgcgcgaccgggcgggcgggcgggcaggggcgagcggagggagggagcggactgcggcaggatctgtcgaggaaaaatcttgcggccggcgattccccgccttttaagcgcagcctgcactccccccaccccacgcaggggcgggccttccccaacgcgggcgcccactggccgccgcgcgccgctcccctccagctcgcctgcgcctctcactctccgtcagccgcattgcccgctcggcgtccggcccccgacccgcgctcgtccgcccgcccgcccgcccgcccgcgccatgaacgccaaggtcgtggtcgtgctggtcctcgtgctgaccgcgctctgcctcagcgacgggaagcccgtcagcctgagctacagatgcccatgccgattcttcgaaagccatgttgccagagccaacgtcaagcatctcaaaattctcaacactccaaactgtgcccttcagattgtagcccggctgaagaacaacaacagacaagtgtgcattgacccgaagctaaagtggattcaggagtacctgggagaaagctttaaacaagtaagcacaacagccaaaaaggactttccgctagacccactcgaggaaaactaaaaccttgtgagagatgaaagggcaaagacgtgggggagggggccttaaccatgaggaccaggtgtgtgtgtggggtgggcacattgatctgggatcgggcctgaggtttgccagcatttagaccctgcatttatagcatacggtatgatattgcagcttatattcatccatgccctgtacctgtgcacgttggaacttttattactggggtttttctaagaaagaaattgtattatcaacagcattttcaagcagttagttccttcatgatcatcacaatcatcatcattctcattctcattttttaaatcaacgagtacttcaagatctgaatttggcttgtttggagcatctcctctgctcccctggggagtctgggcacagtcaggtggtggcttaacagggagctggaaaaagtgtcctttcttcagacactgaggctcccgcagcagcgcccctcccaagaggaaggcctctgtggcactcagataccgactggggctggggcgccgccactgccttcacctcctctttcaacctcagtgattggctctgtgggctccatgtagaagccactattactgggactgtgctcagagacccctctcccagctattcctactctctccccgactccgagagcatgcttaatcttgcttctgcttctcatttctgtagcctgatcagcgccgcaccagccgggaagagggtgattgctggggctcgtgccctgcatccctctcctcccagggccctgccccacagctcgggccctctgtgagatccgtctttggcctccctccagaatggagctggccctctcctggggatgtgtaatggtccccctgcttacccgcaaaagacaagtctttacagaatcaaatgcaattttaaatctgagagctcgctttgagtgactgggttttgtgattgcctctgaagcctatgtatgccatggaggcactaacaaactctgaggtttccgaaatcagaagcgaaaaaatcagtgaataaaccatcatcttgccactaccccctcctgaagccacagcagggtttcaggttccaatcagaactgttggcaaggtgacatttccatgcataaatgcgatccacagaaggtcctggtggtatttgtaactttttgcaaggcatttttttatatatatttttgtgcacatttttttttacgtttctttagaaaacaaatgtatttcaaaatatatttatagtcgaacaattcatatatttgaagtggagccatatgaatgtcagtagtttatacttctctattatctcaaactactggcaatttgtaaagaaatatatatgatatataaatgtgattgcagcttttcaatgttagccacagtgtattttttcacttgtactaaaattgtatcaaatgtgacattatatgcactagcaataaaatgctaattgtttcatggta

SEQ ID NO: 855 - DNA, 420 bp, Homo sapiens
  misc_feature (1)...(420): n = a,t,c or g
ggactctgacctgtcagaagaatttgaggacctggggactgaggcaccttttcttcctggggtccctggggaggtggcagaacctctgggccaggtgccccagctgctactggatcctgcagcctgggatcgagatggggagtctgatgggtttgcagatgaggaagaaagtggggaggagggagaggaggatcaggaggaggggagggagccaggggctgggcggtgggggccagggtcttctgttggcagcctccaggccctgagtagctcccagagaggggaattcctggagtctgattctgtgagtgtcagtgtcccctgggatgacagcttgaggggtgcagtggctggtgcccccaagactgccctggaaacggagtcccaggacagtgcttgagccttctggcttanaggaaa

SEQ ID NO: 856 - DNA, 2900 bp, Homo sapiens
tttcaccaaaaacaatgttatttaattgtaaaatctccaccccctgagcatatgttttcaggtctgggtgactaattagactgggaaacaagggcaggaacgatggccctgtgcttggtctgcccgctgcctctgtggatgtgtgggccgctggcttcagtcctgcttttttgatggccgttgtttacgctatgtatttttgcaggaggcctgaggtgggctgggttctcctcctatggcagggcttcactctcctcctccgttggggcttcgctgtcccttgagaatccttcttcatcttcttgtaaatggacttcggtgacaacagatctcaatgaggcagagaagtataatcaaaatcgttagtattccagtcacaattaacgccaagatgagttttttggtatagccatatcctggaagttcttttgtgaactcaagcgacttctctttctgttcactctgggcttctgtgctctcattaatgtagttctcagtcttccattggtccgtatcccattctgccttggatgcctttacttcctgctgcccactgagaagcttcatcaggtggcctgtcctggagatgagcttggcacaggtcacttgcacatgggccccagagcagtccatcttcaaggtccggataacatgagaaatgagccttctcacattgttgttggggataagggactgtagctgctgggttagctgaatttcaaactgatcacctggggacgagagcaatgggtaattgaagcttttgggctcgggggacaggtcagtgcccacgttgttgtattcccattttgtctcagtttgtttaacagttggccctaagttgaatgcagtcctagtgggaatctgcctcaggaagatgattgtagtttgtgttttcagagatggtgacttctggcatgttagtgttttccataaaaacattttcttccaaggcatttcttgcagttgtgtcttttatattagtggtttctataaaatgttctgaaggagcagatacttccagaaaaggattttcttgcttcaaagaactgtgtgagcaggaatgtgaatgggaagaaataaccatcacgggatcagatggctccaccagggtggtcctgggtagatagaaagacaggcaagtcagtatgatattcaagatgctattgacaagggccttgttgacaggaagttctttgatcagtaccgatccggcagcctcagcctcactcaatttgctgacatgatctccttgaaaaatggtgtcggcaccagcagcagcatgggcagtggtgtcagcgatgatgtttttagcagctcccgacatgaatcagtaagtaagatttccaccatatccagcgtcaggaatttaaccataaggagcagctctttttcagacaccctggaagaatcgagccccattgcagccatctttgacacagaaaacctggagaaaatctccattacagaaggtatagagcggggcatcgttgacagcatcacgggtcagaggcttctggaggctcaggcctgcacaggtggcatcatccacccaaccacgggccagaagctgtcacttcaggacgcagtctcccagggtgtgattgaccaagacattggccaccagcgtgaagcctgctcagaaagccttcataggcttcgagggtgtgaagggaaagaagaagatgtcagcagcagaggcagtgaaagaaaaatggctcccgtatgaggctgggccagcgcttcctggagttccagtacctcacgggaggtcttgttgacccggaagtgcatgggaggataagcaccgaagaagccatccggaaggggttcatagatggcccgcgccgcacagaggctgcaagacaccagcagctatgcccaaaatcctgacctgccccaaaaccaaattaaaaatatcctataaggatgccataaatcgctccatggtagaagatatcactggggctgcgccttctggaagccgcctccgtgtcgtccaagggcttacccagcccttacaacatgtcttcggctccggggtcccgctccggctcccgctcgggatctcgctccggatctcgctccgggtcccgcagtgggtcccggagaggaagctttgacgccacagggaattcttcctactcttattcctactcatttagcagtagttctattgggcactagtagtcagttgggagtggttgctataccttgacttcatttatatgaatttccactttattaaataatagaaaagaaaatcccggtgcttgcagtagagtgataggacattctatgcttacagaaaatatagccatgattgaaatcaaatagtaaaggctgttctggctttttatcttcttagctcatcttaaataagcagtacacttggatgcagtgcgtctgaagtgctaatcagttgtaacaatagcacaaatcgaacttaggatttgtttcttctcttctgtgtttcgatttttgatcaattctttaattttggaagcctataatacagttttctattcttggagataaaaattaaatggatcactgatattttagtcattctgcttctcatctaaatatttccatattctgtattaggagaaaattaccctcccagcaccagcccccctctcaaacccccaacccaaaaccaagcattttggaatgagtctcctttagtttcagagtgtggattgtataacccatatactcttcgatgtacttgtttggtttggtattaatttgactgtgcatgacagcggcaatcttttctttggtcaaagttttctgtttattttgcttgtcatattcgatgtactttaaggtgtctttatgaagtttgctattctggcaataaacttttagacttttaaaaaaaaaaaaaaaagtcg

SEQ ID NO: 857 - DNA, 728 bp, Homo sapiens
gggaaacctttatccagaagtcacaactcactgcacatcagaagacacacacaaagaagaggaaggctgagaagtaagatgagttgggaaattctcttgactgaattaatccttcaaaacaatcagataattcacacaagaggtacaccttatgaatcgcatcaatagagggaaattttcagctacaatctttgctctctctgtgtatcagcaaatacatagagagattctgtacatttatttgggagaaaattttatcatattttaggcttttctaaatattagataatatagatggcagaagtcatgcaaattgtaaaacaggaaggaaacctttcagaagtcatacttttgttttgcaacatagaagtcacacaggagaaaaatcctgtaagtaaaacgaatgtcaagacattttctgtcagggcagccagctgtagacatccaaaagctcacaaatgagaagctccttgagtatctagaaatctctttacacaattggagctcatgtactagagaattcaaagggataactgcaaagacactggtagatatagaagcctttattaagaattgatgtttcattcaatttcagatcactggtacttggatagatattttaaatatttggaaggtgttcaataaaaattcaaataatttgtactgagggaaacagttatactacaaatcatgttgcagatctgatgccgagattgctctattttaaa

SEQ ID NO: 858 - DNA, 439 bp, Homo sapiens
gcagtaagtagaagaatccaaatcagactgccttttcctcccccatctgggaccacgggacctctcctagactcctggcctttgtgcttcccctctgtgctttggttgagtagtcagatctgtaaagtggagagaatcacctgtgtccttcccactcaccaaggcaggttggccaaggacccaggaagactgtggggatttgctgtttcaggagtttggtgagccccactgcctcatcgatggctcaagggtttggtgttggggtgtggttgatgatgccaggctgactcatcacgggggcacttctttggagtgaggaagactctgataggagcttccatttgcgaaaagcaacagggaaaatgtgaaaaccaatagtcttagtggtttagagaaggactctgggtatcagaagcagaaatactagggttttgggcca

SEQ ID NO: 859 - DNA, 592 bp, Homo sapiens
ctaggttctgaagaatgataaattggactggggctgaggttgccctggggtttgagggaacagggctccctgggtatggctctccagggtaagaggaggagacttcccagttcagcctgactgcttcccccacccctccaggtcctgagcctttgcctccaaaaggtctgcagtatctggtgctcttgtctcatgcccacagccgagagtgcagcctggtgcccgggcttcgggggcctggcggccaagatggggggcttgtgtgggagtgctcagcaggccataccttctcctggggaccctctttgagccctacaccttcagaggcacccaagccagcctcccttccacatactactcggagaagttggtgttccgaggccacgagtgggcaggagcttgcagatttggaatctgagcatgatgagaggactcaagaggccaggtttgcccaggagggtgggacccccaccagagaccttcccacctccaggagaggaagagggtgaggaagaagaggacaatgatgaggatgaagaggagatgctcagtgatgccagcttatggacctacagctcctccccagatgata

SEQ ID NO: 860 - DNA, 435 bp, Homo sapiens
ggaagcgccagggtcagtgaaggggagagggatgtggggaaacactgccaagagcctccatggtgttttccacaggaacggaaggtgcagcaggatgagcaggattaggataagtagctagtctgaatcattacagacggcgctaggaggtaggggctgtccctaattgtcttgtacctagccctagggtgaccagggcaggggaatcatggcgagaagcgtaagggcctgatgaagaaggtgtgctgggtgtgggctctagcccacttggttttgtgtgagaggtggctgacagcaggttgtttgctgtatgtaggagttatccagccctgcaagggcagtccctccagtgtctgcaaagcccgaagatgtctgcatccaaaatacagaataaaaagatatgggtactacaagtactcagtaagactgatatct

SEQ ID NO: 861 - DNA, 308 bp, Homo sapiens
cgcggccgcgtcgacttggatcttaaaagttatttttaataaaatggtaatattaggattttaacttgtgcattcttttgtcttcaaaatgaagtgcaaaaggagtgtttgcctggggaagctctttagttggactttagttgagattatgttaaataaatgccttacttactgttaacatttctctttttttcctttaagttctgttggacttgaactgttaacatttctaaagtgaagggagtaccgtaaattcttttaaacgtttgtcagtatttgggtatttggtatggccatctggtataggc

SEQ ID NO: 862 - DNA, 374 bp, Homo sapiens
tcattggcctgcccctgagccggtggaggagtgtgagggatcagaccaggaggcaagtgaagcccaacgccacgctggagaaacacttcctcacggaagggcacaggcccaaggagccccagctgtctctcctggccgcccagtgtggcctcacgctgcagcagacccagcgatggttccggagacgccggaaccagggatcgaccccagctgaccaagaagttctgtgaggccagctggaggtttctcttctacctgtcctccttcgtgggcggcctctcggtcctgtaccacgagtcatggctgtgggcaccagtaatgtgctgggacaggtacccaaaccagacttcttgaagccatccctgtactggtgg

SEQ ID NO: 863 - DNA, 425 bp, Homo sapiens
tactattaagtattgctgtctgtgtctcccttcagttctgtcaatgcttactttatatatttaggtgctctaatgttgggtgcatatatatttataattgttatatattttgggtggattgaccctttcatcattatatggcatctttctttgtctcttgtgacagtttcttacttaaagcctatcttgtctgatataactatagccacccttttctggtttagttaccatttgcacagaatatctttttctatccttttactttcagcctatatgtgtccttaaatttaaagtgaatctcttatagacaacacattgctggatcttgcttttttgaatccattcatccactttatgtcttttgattggggaatttaaaccatttacatttaaagtaattactgatagggaaggatttgtcgagc

SEQ ID NO: 864 - DNA, 638 bp, Homo sapiens
  misc_feature (1)...(638): n = a,t,c or g
gaaaacagttctgaaatgttaacagtgcaatggaaatagaaagtgttcttttttaaaactactgtatagtagatttccaacaaactatcgttgctaattaaacttttccatcacttccttcaatatccttttattccctggcctctctcctcctcttctcttaataaagcccccagacgtgggctgtgatgggacagcagctgcaggttgggaagtggggcgcgtccaggatacccaccacatgggtgttaattgccctttgtgaaattctggggtgagaggtcagccctctttgcccatctttgtcacttctcagtcatctgtatcctggtggcagttgtgttatcccagcatccttcccctacccccaccttccctcccttctcctggagcccaggaaaaaaccatctgctgagttggctttcagaagatttttttttaaataccaatttccctttgttccgaggcaacctccaatcanggctggtgtctgccgggtttggcgaaangctggtantgtgtttcatgctccgggaggaaaaggttgtccacttgcttttccttttggattcgattcccnggcattctgaaggagaatccatggttgcaannggcggcngncagctataantgggggg

SEQ ID NO: 865 - DNA, 371 bp, Homo sapiens
  misc_feature (1)...(371): n = a,t,c or g
gaaaaaaaaagaaggtccgagcaatctcagatatatgagaggccaagatgggaagatcacttgggtaagactgggaagattgagtctgcagtgagtcacagtcgcatcattctgctggatttgaatggtactgcttctggcccaagttgtctgggcaaccttagacatggtaaggcaagagcatctgatcaacattagacatggcaaggtgaaagccatctggttgaactcactcgaagaggagacccatctggtcaacctcagacatggcaaggtgagagccatctgatcgaccttaaacatggcaaaggtgagaccatctggnccaaccttaaatatggcaaggngagaatcatctgggccatcntaaa

SEQ ID NO: 866 - DNA, 564 bp, Homo sapiens
  misc_feature (1)...(564): n = a,t,c or g
tttnnnnanntttggnnancnnnnnnnnnnnnnnnnnnnnnnnnnnnnnnnnnnnnnnnnnnnnnnnnnnnnnnnnnnnnnnnnnnnnggcacgagaaatgtcctctgttacagcaacatgggggccagattccttagggtttcacagacccactctcctggcattctaatgctacatgaaggcacactgagcttgttgcagaaaataggaagctggtggtatgcatgcttttaccttgacctgagtccagtgttgtgttcccctcctctctgtagactgagggagttttagggggaatccaaggcagagaatccccagaaccctggttctttgacctcttccatggacacagctcccagttacttcatgagggccttacacacacttgagccacggagattgtgaggcaactcctgctgtgggcaccagtatttgcttactcaccccagcctcatgtgcctatgaggaggccaggctgcttcaaggctagctcttgctgcatgaaagaagctgactcaatttgcaaaaagcttggaagaaattaggaacattggcgggagcgg

SEQ ID NO: 867 - DNA, 760 bp, Homo sapiens
  misc_feature (1)...(760): n = a,t,c or g
gcgtggatctggatttatttctgccactcattataattgtcactgtgacccactttttgtatatttcttttctctttttgatcttcttgtagatttttttcctcacttggttttttccctttactagtttggacgttatatactgaatttttattttttcagtggctgctctggaaatctaaacagactctttatcttaacagacttttagctgagcttaagccaatcagtgccttttgtcattctgtcaaacaatgaaagaaccttggacacttgaattctgactagtttcattcaaacttatttactaattatataaatttggccagattacttaatctcattttacctcagctttactatatgttaggtagacaannnnnnnnnnnnnnnnnnnnnnnnnnnnnnnnnnnnnnnnnnnnnnnnnnnnnnnnnnnnnnnnnnnnnnnnnnnnnnnnnnnnnagatgtgggtcgagcgcagcannnnnnnnnnnnnnnnnnnnnnnnnnnnnnnnnnnnnnnnnnnnnnnnnnnnnnnnnnnnnnnnnnnnnnnnnnnnnnnnnnnnnnnnnnnnnnnnnnnnnnnnnnnnnnnnnnnnnnnnnnnnnnnnnnnnnnnnnnnnnnnnnnnnnnnnnnnnnnnnnnnnnnnnnnnnnnnnnnnnnnnnnnnnnnnnnnnnnnnnnnnnnnnnnnnnnnnnnnnnnnnnnnnnnnnnnnnnnnnnnnnnnnnnnnnnnnnnnnnnnnnnnnnnnnnnntta

SEQ ID NO: 868 - DNA, 516 bp, Homo sapiens
  misc_feature (1)...(516): n = a,t,c or g
ttggatnncnngaactttttggannnnnnnnnnnnnnnnnnnnnnnnnnnnnnnnnnnnnnnnnnnnnnnnnnnnnnnnnnnnnnnnggcacgagcgcatgtctgtttgtacatggtatgtgagtctgtgctttatacacagagtaaggttttctcatccccaagaaccagttttgtaaggtgcccattgggaatgcctggcttagaccatccctgcttgctgcacacctgtgacaccagcacctccttgtcactgtcctcgtcaccctccgnagacgcttcaccttctctgtccccagagagatggatgccatccaatgagcacccctgggccagtggcatcagacagtcactgttccaggctctgttctcggcgctggnggtacaagggtgagtgaaacaggcactactgaagccagcacaggagtgagcacctcctctctctgcctcttctaacctctgctctctgctggcatctaattctcagtaaacacatacagattcttnccatcgtat

SEQ ID NO: 869 - DNA, 1685 bp, Homo sapiens
gcggccgctgtcggtgctcagcggtgttggaacttcgttgcttgcttgcctgtgcgcgcgtgcgcggacatggcctcaaacgattatacccaacaagcaacccaaagctatggggcctaccccacccagcccgggcagggctattcccagcagagcagtcagccctacggacagcagagttacagtggttatagccagtccacggacacttcaggctatggccagagcagctattcttcttatggccagagccagaacacaggctatggaactcagtcaactccccagggatatggctcgactggcggctatggcagtagccagagctcccaatcgtcttacgggcagcagtcctcctaccctggctatggccagcagccagctcccagcagcacctcgggaagttacggtagcagttctcagagcagcagctatgggcagccccagagtgggagctacagccagcagcctagctatggtggacagcagcaaagctatggacagcagcaaagctataatccccctcagggctatggacagcagaaccagtacaacagcagcagtggtggtggaggtggaggtggaggtggaggtaactatggccaagatcaatcctccatgagtagtggtggtggcagtggtggcggttatggcaatcaagaccagagtggtggaggtggcagcggtggctatggacagcaggaccgtggaggccgcggcaggggtggcagtggtggcggcggcggcggcggcggtggtggttacaaccgcagcagtggtggctatgaacccagaggtcgtggaggtggccgtggaggcagaggtggcatgggcggaagtgaccgtggtggcttcaataaatttggtgtgttcaagaaggaagtgtatcttcatacatcaccacacctgaaagcagatgtgcttttccagactgatccaactgcagagatggcagctgagtcattgcctttctccttcgggacactgtccagctgggagctgggaagccctggtatgaggacctgcaagaggtcctgtcttcagatgaaaatggggggtacctatgttttcacctcctggaaatgaagaggaagaatcaaaaatcttcaccactcttgaccctgcttctctggcttggctgactgaggaggagccagaaccagcagaggtcacaagcacctcccagagccctcactctccagattccagtcagagctccctggctcaggaggaagaggaggaagaccaagggagaaccaggaaacggaaacagagtggtcattccccagcccgggctggaaagcagcgcatgaaggagaaagaacaggagaatgaaaggaaagtggcacagctagctgaagagaatgaacggctcaagcaggaaatcgagcgcctgaccagggaagtagaggcgactcgccgagctctgattgaccgaatggtgaatctgcaccaagcatgaacaattgggagcatcagtcccccacttgggccacactacccacctttcccagaagtggctactgactaccctctcactagtgccaatgatgtgaccctcaatcccacatacgcagggggaaggcttggagtagacaaaaggaaaggtctcagcttgtatatagagattgtacatttatttattactgtccctatctattaaagtgactttctatgaaaaaaaa

SEQ ID NO: 870 - DNA, 377 bp, Homo sapiens
ggggtaacactgtgatgtttcagcacctgatgcagaagcggaagcacacccagtggacgtatggaccactgacctcgactctctatgacctcacagagatcgactcctcaggggatgagcagtccctgctggaacttatcatcaccaccaagaagcgggaggctcgccagatcctggaccagacgccggtgaaggagctggtgagcctcaagtggaagcggtacgggcggccgtacttctgcatgctgggtgccatatatctgctgtacatcatctgcttcaccatgtgctgcatctaccgccccctcaagcccaggaccaataaccgcacgagcccccgggacaacaccctcttacagcagaagctacttcaggaa

SEQ ID NO: 871 - DNA, 174 bp, Homo sapiens
  misc_feature (1)...(174): n = a,t,c or g
cgcctctgtacatgctgccctccccttagtcacttagtagtcttctcagttatcagattttctgttgccatgttgnnnnnnnnnnnnnnnnnnnnnnnnnnnnnnnnnnnnnnnnnnnnnnnnnnnnnnnnnnnnnnnnnnnnnnnnnnnnnnnnnnnnnnnnnnnnnnncatc

SEQ ID NO: 872 - DNA, 680 bp, Homo sapiens
  misc_feature (1)...(680): n = a,t,c or g
ggagagagctagcaccatgagcttcaataccctgttgtggttgctagacctactgtaagcacttaactactgaactagtcacagtaagaaaatggtaagtcatatgctttatgttttttgaaataagttataaaacaaatacacaaaaaggcaaaagctcatgcaatagaatatatacaaaaagacagcaaaacgcataagacaagctttggatgctctcaatgaaatgtgtgagtgttaattagatattaggtgctacagagaataaatatctacactcttaaaaattactgaggaccccaaagagctcttgtttatgtagtatccacctacacttgcaacattagaaattaagactgagnnnnnnnnnnnnnnnnnnnnnnnnnnnnnnnnnnnnnnnnnnnnnnnnnnnnnnnnnnnnnnnnnnnnnnnnnnnnnnnnnnnnnnnnnnnnnnnnnnnnnnnnnnnnnngtgactcactaaaaataccaaaantaactgggccttgtgggccnagcactgtngtcccaactactccggaaggctgaaggcaaggagaatccccctgaaacccaaggaggggggaatttgcaattgagccgagatcaacgccaactgnaactccaancccnggnaaganaattgagacnccgtnctcaaaaaaancnacaaaccaaaaa

SEQ ID NO: 873 - DNA, 355 bp, Homo sapiens
gggcagatttgcatctttacaaccagaagctcagggagaagttgaaggaggaggagaacacagtgggccgaagaggtgagggtgctgagcctcagtatgtggacaagttcggcttccacacggtgacgtgctgcggcttcatcccgcaggtgaatgagtggcaggatgactggccgacctttttcgcccggcaccggctccaggcgcagctggacctcattgagaaggactatgctgaccgagaggcacgagaactctggtcccggctacaggtgggcacggcagtgacttctctgggaaagagctggtcctctcatgatcccgccgcatttgtgcgggttcatctataaaacgg

SEQ ID NO: 874 - DNA, 310 bp, Homo sapiens
ggcgaagatggcggaagaggagaggttccccaatacaactcatgagggtttcaatgtcaccctccacaccaccctggttgtcacgacgaaactggtgctcccgacccctggcaagcccatcctccccgtgcagacaggggagcaggcccagcaagaggagcagtccagcggcatgaccatttttttcagcctccttgtcctagctatctgcatcatattggtgcatttactgatccgatacagattacatttcttgccagagagtgttgctgttgtttctttaggtattctcatgggagcagttataaaa

SEQ ID NO: 875 - DNA, 762 bp, Homo sapiens
  misc_feature (1)...(762): n = a,t,c or g
cgtctgaagcaggaaggtgaataaccttcccaagaccttagagctacagagagaatcctcagcacaggtaggagcacacaggtaggtggggtaaacgtgtacagagagcctggcttctacttggaattttcccctcccttggccttaaaaatcggatttctcccttttccagctatgttgatacaagagacaaactatttagaaagtaaaagcctcaaccgtttattttgtgttcaaagtataaccaaatgattttattgcatttactgctcctgggcatgcagatgcatctacacagaaacagcagttgtggttataaaatcttttaacgagtttggggcagaggctttttaattatttttgagacagagtcncattcngtcacctagcttcnnnnnnnnnnnnnnnnnnnnnnnnnnnnnnnnnnnnnnnnnnnnnnnnnnnnnnnnnnnnnnnnnnnnnnnnnnnnnnnnnnnnnnnnnnnnacgtcaacaccacacccagctaattttttgcatttttgggtacagacggggttttgccatgtggcccagggctggtgtcactgaggctagggnaatccacccaccttgggtttcccaaagtgctagggttacaggtttgagccactggnacccaggcccagagtttttcccgatgtgaaatttacgtgagtgacaaggagcaccaggagccttgcctgacttactgtctgttggtaggatgtgacatatgaataatacaaatacccgtctggtttga

SEQ ID NO: 876 - DNA, 528 bp, Homo sapiens
  misc_feature (1)...(528): n = a,t,c or g
ttgnntcncngnacctcttcgtaactncnnnnnnnnnnnnnnnnnnnnnnnnnnnnnnnnnnnnnnnnnnnnnnnnnnnnnnnggcacgagaaccctgggtacatcacttattaagagcaagtgatagtgaagaggccgtgactcagtatgtccttaattcaaagagtcgaagaggctgaggggtcccactccggtagtaaaaactaatataattttcaagatgccaaaatagatataagagctgctctagtcagtgatgcgtgcttgaaaaaccagaagccaacataccgtaagatttgaggattatgaaagtcatcttactaaaatctctcctgaggttactaaactagccagattatctagtcacagtctctggacagcctttgagaattcaatgggggagggggctgcanaacacnccgattaaagtggatttatatttgggaactgngaccccnagtatttttattgnttactttnagacatgcttggaatcttttttttttttaaaataaacctttctccgg

SEQ ID NO: 877 - DNA, 720 bp, Homo sapiens
aaaaaggaagaaaagaaaaaaaggaaaccagccctgtcatggaatttctctccttccctgcacagtaaagacttttgggttttcatggataaaatcaatgtcagtactgaaactcctactctcccctcccgccccactctcccccgttgcccgagatggccaagttcaggcctgtgcaatgccgcttccctctgagcctccctctcaagggccacgcaggcagctgcagcagggccagctgcaggatggggctgccggtcactgaattgtcgttcaaatgcatcatctttgtggcgtctttctcatgcgagcaaagccacgtgctctcctgtctgctgtcacatctgtgcctggattgcttaaatattgtttgtgatggggaggttttaatctggtgatgcagagggaagcagggctgtgggggcacatttaattggctcccagcagcgtggggagtgcttctatggtgtgtggggttttttgttgcctccctctagaagtgttaccgttttcacgtcctattaatgtcctctggttgttaaattacagcagcacattacagtgcactgggttccctcctggagtgaatacaaacggagggcatctacttgtatttttagaagttttgggagaatttagtgatttgtggctttgatcaatcctgttgactggtgtatgtctgcgcaaacctgtttcaaataaatcttttgttaaagtaaa

SEQ ID NO: 878 - DNA, 599 bp, Homo sapiens
gcttctgttctctttgtttgaaacagggaatggggaggccatctgagctgttttatctgatgataggattgtgctgtgttgctttctcaggcgagatgctcttaaagatgcctctcagagcagatctcacacctctcccccaagcatccaaagatggtctgggcactggggcatccaggctgaaagcagcccagctgggagcctgggcctgtcttcaccttcatggaaatgcctctctgccctgaaggggtgggaaattcttgctcactcaggaggctccatccagggattgacctgtcagtctcaagtgacacctctagttcctccatgggcttctgtggccctgggcagggaagtctgatgggtgggcttgaagtgttgcacatcagggagaaaggaacatcagagacccacgggggcctggtgggggacgggctgggctctggagcctcacagccctgggtttgaatcttgggctctagagacatatggtgtcttggcaagtcacttaatgtctctgcacccctcaccccatatctgcaacctttggataatagtgtcaacctcacaggcttgctgtgaataagtagtatttattc

SEQ ID NO: 879 - DNA, 565 bp, Homo sapiens
ccctgactgttgcctcacttccttggaactcctgcctccacagcccctccagtggcagggacaggtcttgggtctttgtcatcttggtgctgtgagaggtaggagggcagcctgccccatctaggaatctgggaagggctggccctctcttagaagccatttgaaattactgcagggattagctccctgtggtggagcatacacagggtactctggggtcgaggtgagaggtgatgtggtattcagtgcccgtcagccaactgtgggccttcacctctacctgcacttcccctctcacaccagctgcactcccgtggctgccagagcagggtggttttccccaatacctggagctcagaaaggcagagccatctggccctccagggtgtccccagccatcaggagacttgagttggtatttggacctgagcccgcacattccactcccattctccctccaagaggggcccagcattgtatttccctgtgaccccttactctcctggccagaacttgagccagctgtgggatgttgctgcaggacagtaagccctcacctgggcaa

SEQ ID NO: 880 - DNA, 859 bp, Homo sapiens
tttctgaaagaaagtctaggcggttgcgcttagacaagggcctacggctttattaacagatgtcgaggaagctttcaggtgctggcagccatgagggtctggttttaaggatggcctttaaggaaaggccgtggcaggcgggctgagaggggcggctccagctcagccctgcccacagcacaggctcacagaagccgagatccacatcaccgcctggcatgcaaaggagttgaagacaaaaccatttttttccagcttctctacaaagccaattactaagcaacagttattaaagtgaagtatccatttacagactgacacaaatatcaaaaataagcagcttagatgagtacagaggctggagtgcattttctgctaacaaaaaccactgtgatattctcccagtttagagggaaaagtctatctcaggccgactcagatgtggcagaaataagtgggtctgaagtgcattttcagttgtttctgcccggaaggagcccggatgatacaaacaggtctggggttcgtggctctggcaagcgcccagagacaactgcgtctctgccaggacgctcatcctcactgcggctgtctgggcagatggctgttggcaggctagggacgacgatgaaaaactgacaatattttaaaaacccagtagggtccacagcagtgtttgaaatgacaggctttttatttctcaggaacagccgagatgacctccagaggtttccagcgaagctggtaacaatccaccctgcagctctatgacagggaggagggcgaatcaaatccatcatcttacgccagacttcagccctgcgggagctgctgcctccaaagaaagcggggacctggg

SEQ ID NO: 881 - DNA, 503 bp, Homo sapiens
cttcttttttttttttttctttacaaacccttgtgtcgagggctgactttcaatagatcgcagcgagggagctgctctgctacgtacgaaaccccgacccagaagcaggtcgtctacgaatggtttagcgccaggttccccacgaacgtgcggtgcgtgacgggcgagggggcggccgcctttccggccgcgccccgtttcccaggacgaagggcactccgcaccggaccccggtcccggcgcgcggcggggcacgcgccctcccgcgcgcgcggggcgcgtggagggggggggcggcccgccggcggggacaggcgggggaccggctatccgaggccaaccgaggctccgcggcgctgcgctatcgttccgcctgggggaaattctgacttagaggcgttcagtcataatcccacagatggtagcttcgccccattggctcctcagccaagcacatacaccaaatgtctgaacctgcggttcctctcgtactgagcaggatt

SEQ ID NO: 882 - DNA, 992 bp, Homo sapiens
aagagctgcacactgggcctccagccccacaggggcccctcagtgtgccccagggcctccccactcagagcctggccagccctcctgcccgtgacgccctgcagctcaggtctcaggaccccacacccccctcagcacctcaggaagccacagaaggcagcaaagtcacggagccctcagccccttgccaggccttggttagcatcggggaccttcaggccaccttccacgggatccgttctgcccccagctcctcggacagtgcaaccagagacccctctacctctgtcccagcctccggggcccaccagcccccccagaccacagaaggggagaagagcccagagcccttggggcttccccaaagccagagtgcccaggccctcacgcctcctccgatacccaatggctctgccccggaagggcctgcatccccaggctcccaatagctgcctggtgcggcagcggcggccaaatcttccgtcctcccgtggatctcccggggtgggggcagggcgggtcccacgatggcccccattgccctcatcaccctgacacccccacattctctcctctggacccccaggaggctggtgccagggagacaggcccaacccacccccatttgcactgagaagagaagttttggagcgttgcctcctagaataaagatacagagagtcaaatagagagaatggagagagagaaacatatattatatattatatagagagagggaggagagcgagagagagtgaggacaccgaactgggctggcggctccaaagcacagccttccctgttccgtcccagcgggagtgatagttaggggtcccaaggttgccacccacgtgcccagctgtcccacgctgcagcgcagacggccacgcccacgccctgttgccaagtgaccttgtccccagctccctcctcacaggctggtgtgagtgtgcgtgcgtttgtgccgagcttctatttcatattgcaaatat

SEQ ID NO: 883 - DNA, 882 bp, Homo sapiens
ttttttttttaaaagtaattacaaattaagaatttatttataagttttcatctttttagaaataaaaaggcttaaaaaacaaaatggttgcaaaaatggttaagtagttttgttatatcctaattgcttaggtgtgctctgtaaattccaaataagtaaaataatataaaaatacattttcatatctttatagaacaaaaacaaaacattaaatgcttttggattttctttactcctcccacagatgagttcacaaatacaaaaactggtgtacatttatactcaagtacaaatctccaacagccaagtaattatagtttgttctgttatgtgcaaagtagattatttcatatttacttggtatggaaagcagagtacaggctcaatggacaataatcattaaacacagattatgtttaagaaaatgctgttgtaaaaatgtacaatagtacatacaattttggtaattatgcacttcttttaaagtaaatacagcttttagatataaatctttcaaaggttttctttgaagagctgtgaggtgactatttcagatttgatgaacagtaatttgtcagtaaacttctcaaaaaaccaatccaagaaagaattgttttctttttccctccatgtggtcggtttcattcttaaggaaggtctgatgcagtaagaagatgcatttcacaaacctttacacaagtttgtgaactgtcaactagagacaccacctctgatgtggatggtttcattcaatccatgttcgagaagctttatatcttctagatcgtctttaatgatgctaatcaaatggctaaggccttcctgttgtagtttcaaatgctgctggatgtctcgtaacagatctgcatctatgtaatactt

SEQ ID NO: 884 - DNA, 670 bp, Homo sapiens
gccgagaagtgctgccaggtgtaagagccacgtctggatgagactcgtgctggaatgtgtgtgcctgaggaggccaattaaccttctcaggtctccccactcgggctgtgtaatggaggtcactgcctgccttgcagggccgggagggcttccagtgacatgcgctgagcagcgtgggctcttgttaggtgcttggtgaatggcacaggtgatctttacctcctgggcccacggacatccaggtccctgatacttattggcggatccagggcgctgaacaaggtgcccaggcaaacataattgaaggtgacatgcagttcctacgtgctaggagcaactcggccaggatggagaaggaccttgggttaaggctgtgtgctgtcctgctgagccctagaagaagcaagaaccagaaagaacgtgtccgggatccatcctccgccagggctaggccgtgtgctcagacttagtgaggttgtgacagtcaccgggtggcgcccgcacccctgagcacctgacgtggcccaggttgatgcccaggcagtggtggtggtggtctgtgctgtcatcctgcccccttgccttccaaatttccttgctgccttgaagtgtcccctctgtcagcatctgccctctgctgtctgtcccttgccgcccccacctttaaaaa

SEQ ID NO: 885 - DNA, 1551 bp, Homo sapiens
ttgcagtcagtccggtgtttgcaaatattgtgtgggctccgcgcgctgcggctgcgggagggtccggccgggcgtctctgcgagcctggagtttgcatgaaactttcacctgcgctccggggagactttcggctccggctcccaccgcgcgcctcgccgccctcgcgaccgcgggctccgtccaacccggcccgacatggacgtgctccccatgtgcagcatcttccaggagctccagatcgtgcacgagaccggctacttctcggcgctgccgtctctggaggagtactggcaacagacctgcctagagctggaacgttacctccagagcgagccctgctatgtttcagcctcagaaatcaaatttgacagccaggaagatctgtggaccaaaatcattctggctcgggagaaaaaggaggaatccgaactgaagatatcttccagtcctccagaggacactctcatcagcccgagcttttgttacaacttagagaccaacagcctgaactcagatgtcagcagcgaatcctctgacagctccgaggaactttctcccacggccaagtttacctccgaccccattggcgaagttttggtcagctcgggaaaattgagctcctctgtcacctccacgcctccatcttctccggaactgagcagggaaccttctcaactgtggggttgcgtgcccggggagctgccctcgccagggaaggtgcgcagcgggacttcggggaagccaggtgacaagggaaatgggcgatgcctcccccgacggcaggaggagggtgcaccggtgccactttaacggctgcaggaaagtttacaccaaaagctcccacttgaaagcacaccagcggacgcacacaggagaaaagccttacagatgctcatgggaagggtgtgagtggcgttttgcaagaagtgatgagttaaccaggcacttccgaaagcacaccggggccaagccttttaaatgctcccactgtgacaggtgtttttccaggtctgaccacctggccctgcacatgaagaggcacctctgagggagcagagaggtggatcctgtaggcctaaaaggcttccaggctgagagccggccgtggaaggagggatgcgtgttccagccaaagcatgccgttctgcaccctacccagttgcctccagggcctctccttggaaggtcttttgagggctaaaaaggtcctgtaagaagtggcatagcacccgtggtgcatggtatgtgggtgaccctggactcgccactggtacccgcccttccgagcggcgcctaagcctttgccgtgagcatgcacactgagaatgctaatggttgggttgattgtatgttgaggatctattactgaccgtatgatgaggccaactttttttccttgtggttagcaagactgcaagagatggaaaaaaagtagtttgaatgttttgtgtgtaaggagtataccatgagatgagatgaccaccaatcatttccttggggggagggggtgtctgcaccttagaaaaaaaaagaaaaatcaaaaaaacaaa

SEQ ID NO: 886 - DNA, 573 bp, Homo sapiens
cgaagatggcggaagggctggagcgtgtgcggatctccgcgtcggagctgcgcgggatcctggctactctggccccgcaggccgtgagcagaggcttccgaaagctgcgccactggagggatccgggacctcagactactcgggtttggccctggcatgtgtgggagcagtttttattagagagaatgctcaatttgcaagttaatttcaagtctccagccacgtcatgaaagtaagaaagattctaagtgtctcacctctcctgcgttaggcaatagagttgtgtagaatggtagctgtgataggtgccttctctaggtttgcggccagtctgtgaaattggtttttgttgattaacataattggattattaaggctattttctcccgctgctctagaaagtagtaggaatagctttccccatccccccgccccccaccaagttacagactgccgagggtgagctattcttgggttaaactgctttatctttgtgggatactttcatggaacctaccttttaaacttatggaaaatagtggaaggcacttatccaaaacctcagtctctttt

SEQ ID NO: 887 - DNA, 497 bp, Homo sapiens
  misc_feature (1)...(497): n = a,t,c or g
gaccaaattgattaatatattgtaagtacttagaacagggccaggcacaaaataagtactgcatatacagttaactatggacaaaagcttgggacctggttcatgtttaaaaatgattattgannnnnnnnnnnnnnnnnnnnnnnnnnnnnnnnnnnnnnnnnnnnnnnnnnnnnnnnnnnnnnnnnnnnnnnnnnttattgctgacttttaaaccattcattcatttaatatatgtttattgtacacatgctatgcctgtgtcaggcactgtttcaggcactggggataaagcagtgagcacagcagacataaagctctgccctcatggggcttgtggtctctcagagggaggcaaacaatgcatttatagacaaatacataatttaaatttgaggttacctattatactcccaacttgaaaaactagcagtatattgaggnggctatttcacatctgatggaggaatatgcttttgggaacatttatggtcttt

SEQ ID NO: 888 - DNA, 2443 bp, Homo sapiens
ataaatcctcataaatactgcctatccatacttacatctcatgtaaagaagacaaccccagaactggaaattgtactgcaaaaagtacacgagcttcaaggaaatgctccctctgatcctgatgctgtgagtgctgaagaggccttgaaatatttgctgcatctggtagatgttaatgaattatatgatcattctcttggcacctatgactttgatttggtcctcatggtagctgagaagtcacagaaggatcccaaagaatatcttccatttcttaatacacttaagaaaatggaaactaattatcagcggtttactatagacaaatacttgaaacgatatgaaaaagccattggccacctcagcaaatgtggacctgagtacttcccagaatgcttaaacttgataaaagataaaaacttgtataacgaagctctgaagttatattcaccaagctcacaacagtaccaggatatcagcattgcttatggggagcacctgatgcaggagcacatgtatgagccagcggggctcatgtttgcccgttgcgggtgcccacgagaaagctctctcagcctttctgacatgtggcaactggaagcaagccctctgtgtggcagcccagcttaactttaccaaagaccagctggtgggcctcggcagaactctggcaggaaagctggttgagcagaggaagcacattgatgcggccatggttttggaagagtgtgcccaggattatgaagaagctgtgcttcttgctgttagaaggagctgcctgggaagaagctttgaggctggtatacaaatataacagactggatattatagaaaccaacgtaaagccttccattttagaagcccagaaaaattatatggcatttctggactctcagacagccacattcagtcgccacaagaaacgtttatttggtagttcgagagctcaaggagcaagcccagcaggcaggtctggatgatgaggtaccccacgggcaaagagtcagacctcttctctgaaactagcagtgtcgtgagtggcagtgagatgagtggcaaatactcccatagtaactccaggatatcagcgagatcatccaagaatcgccgaaaagcggagcggaagaagcacagcctcaaagaaggcagtccgctggaggacctggccctcctggaggcactgagtgaagtggtgcagaacactgaaaacctgaaagatgaagtataccatattttaaaggtactctttctctttgagtttgatgaacaaggaagggaattacagaaggcctttgaagatacgctgcagttgatggaaaggtcacttccagaaatttggactcttacttaccagcagaattcagctaccccggttctaggtcccaattctactgcaaatagtatcatggcatcttatcagcaacagaagacttcggttcctgttcttgatgctgagctttttataccaccaaagatcaacagaagaacccagtggaagctgagcctgctagactgagtgactgcagttaggagggatccgacagagaagaccatttccactcattcctgttgtcctaccaccccttgctctttgagggctggctattgagaactggaaagagtaaaatgataacttaccttagcattgccaagaacttcagcagacaacaagcaattctatttattttatgttgtgtatacatcttgatcattagcaagacattaagctttaaccattatggcaccattttgtgagaatgattgttctttcacttgggctgtttgagagcataattatggtaatcatgagattaatgtttcatgatttctacctccaaagtgtgaagacaagtaaaacaatgtttctaaattgtcttattttgttggcggagaagattacaatggctattagtgctacatttggtcaaatgtaatcacttaaatagcttcttgtcaccttaaactaaagcagaataaaaagtatcctttgaaattataagccctcctttgctgacagctattattttgtaacatcttaccaggtcatgtgctttcagttataactggggctgagcctcctataattacaatgtctatagggactgttttactgcctgtgtattttctgctagagagttagcaatgttagagctagaacagattagaatttctaaacagtatcatgcacagttggtgtgagtgatcagtgtgcattgtatggcatgcatggttgtgaattattctctgttctccaaatactgtttctttaactcagatatttttgttagtgtctaggccacttcatttatttttcgtcatggtactttactgacttctctttattcaattctccacgccctcaccaaaaaaaactgtctcaaaatgagaatattttattttcatggtgagtctagaaaacgcccacttcattctgattaaaaat

SEQ ID NO: 889 - DNA, 1035 bp, Homo sapiens
  misc_feature (1)...(1035): n = a,t,c or g
cacgcacgttcaagtgtgacaaggtggtcttgtcacacaaccaagggctgtacttgtacaaaaacatcctggccatcttgtctgtgcaacaacagaccatccatgtcttccaggtgactcctgaaggcactttcattgatgtgcggaccattggccgcttttgctatgaggatgacctgctcactgtgtcagctgttttccctgaggtaaagcgggacagtcagacaggcatggccaatccctttagggatcctttcatcaattccctcaaacaccggttgctggtatatttgtggcgccgggcagaacaggatggtagtgcaatggccaagaggcgcttcttccagtattttgaccaactgcggcactgcgaatgtggaaaatgcagcttctggatgaaaaccacctgtttatcaagtacactagtgaggatgtagtaacactgcgagtcacagatccatcacaggcatctttctttgtggtgtacaatatggtgacgacagaggtgattgctgtgtttgagaatacatcagatgagcttttggagctctttgagaacttctgtgacctttttcgtaatgctaccctgcacagtgaagttcagtttccctgctcagcttctagcaacaattttgcaaggcaggatccagcgccggtttcaaagacactattataaaatgccaagtatggagggcacacagaggcagtacgccggctggctgggtcagctccccatcagtggctcagttcttacagcggtagcccctatctggatttgtctctcttcagttatgatgacaagtgggtatctgtcatggagcggcccaagacttgtggagatcacccaatcaggttctatgcccgggactcgggcctgctcaagtttgagatccaggcggggttattgggccgccccatcaaccacacagtgcgacgccttgttgccttcacctttcacccttttgagcctttcgctaattctgtgcaaaggactaatgctgagtatgttgtcaacttcanangcganacggcggg

SEQ ID NO: 890 - DNA, 3548 bp, Homo sapiens
agcggggggagtggggaggaggggggtcggccgccgcagccatggaggccaactggaccgcgttcctgttccaggcccatgaagcttcccatcaccaacagcaggcagcacagaacagcttgctgcccctcctgagctctgccgtggagccccctgatcagaaaccattgcttccaataccaataactcagaaacctcagggtgcaccagaaacattaaaggatgccattgggattaaaaaagaaaaacccaaaacttcatttgtgtgcacttactgcagtaaagctttcagggacagctatcacctgaggcgccacgaatcctgccacacagggatcaagttggtgtcccggccaaagaaaacccccaccacggtggttccccttatctctaccatcgctggggacagcagccgaacttcgttggtctcgaccattgcaggcatcttgtcaacagtcactacatcttcctcgggcaccaaccccagtagcagtgccagcaccacagctatgccagtgacccagtctgtcaagaaacccagtaagcctgtcaagaagaaccatgcttgtgagatgtgtgggaaggccttccgagatgtgtaccatctcaatcgacacaagctctcccattcagatgagaaaccctttgagtgtcctatttgtaatcagcgcttcaagaggaaggaccggatgacttaccatgtgaggtctcatgaaggaggcatcaccaaaccctatacttgcagtgtttgtgggaaaggcttctcaaggcctgaccacttaagctgtcatgtaaaacatgtccattcaacagaaagacccttcaaatgccaaacgtgcactgctgcctttgccaccaaagacagactgcggacacacatggtgcgccatgaaggcaaggtatcatgtaacatctgtgggaagctcctgagtgcagcatacatcaccagccacttaaagactcatgggcagagccaaagtatcaactgtaatacatgtaaacaaggcatcagtaaaacatgcatgagtgaagagaccagtaaccaaaagcagcagcagcagcagcagcagcaacaacaacaacaacaacatgtgacaagctggccagggaagcaagtagaaacactcagactgtgggaagaagctgttaaagcaaggaagaaagaagctgctaacctgtgccaaacctccacggctgctacgacacctgtgactctcactactccattcagtataacatcctctgtgtcgtctgagactatgtcaaacccagtcacagtggcagctgcaatgagcatgagaagtccagtaaatgtttcaagtgcagttaacataaccagcccaatgaacatagggcatcctgtaactataaccagtccattatccatgacctctcctttaacactcactaccccagtcaacctccccacccccgtcactgccccagtgaatatagcacaccctgtcaccatcacatctccaatgaatctacccacacctatgacattagccgcccctctcaatatagcaatgagacctgtagagagcatgcctttcttgccccaagctttgcctacatcaccgccttggtaaacagtattataaaatcaaaatatgggtaaaagtaaatatttaccagcaacttaacttttagttgattaaagcaaaaagtaaaccatgaaattgggagattttattacattagttaataagagtgtggtagcatttttctccaatttggctgggattattcaaagtagggtgtgtatgtaacttatcactggaccactttagtttaatcagaaattccttttagctgacaacattgcttaaacaggatagtagttggcaagatgaaatgccagaattaaaaccaatcataagtagaacccacttcaaaataaaaaaacagcattactatttctaatcccaaggaatcactttattgtaaacactagcagaactcttctccctatacaaggtggatggctgattttaacctgaaattttaaatccacagattgagagctagtgtagaattgtctgtgtttattgtttttatgagtaaatacatgcattgtcataataaaatgcatttcagagaatatgcattttacctttgggaatatgttaatttcaggcagcattccctatgggaaaggtgataccagctctgatatgcaaagcatatgataatttatcattctaacttcaacgtataatagggattgtgacctgatatttggagatgtaaatattgctcagcatattaatcccgatggaatatagcattgtagttgactttttaaaaaaaaaaaaaatttaaaaaaaatctacaaattgtgttttgctaagaaaagcctcaactgacagaggagaagtcaagtgtgtggacaggcaagctcctaataaacagagtccagtgggattcctatttaggagccaaggagtactttggaacagtacaaatatattgctttaaattggaagacgctggaggcactgggatgtgatatgcccctctctctcccaatcagagcctgttgatattacaacagggacagatgtgttagttgctcactagagtttatgtcttatattaaattgtatacagtttttattctaaccactaactaggtagtgtatgccccttcagaacatgcagagtgtatctttttttaaatttctccttccgtttcttaagtattgcgcagatttgttcaactttgtaaatatggacatcactttttttttctttgagaaaacacttgtatcagctttgtggtgttttcagggagacagctgtctgcattccctgtagaaacccagcaatgattatgcacgttgagacatgtggctttttatttcttagcaagatattttatctctgtacatatagtagaaaccaaaagctagggaatcagatactctttacaccatcatgccacgcattgtttttaaagcattgcgttaaaaaaaaaattaactaaaccaagatgctgtgattttttaagttgcaatatgtttttggtttttttcattttttaatcattgcagttaagagaaatggaaattagttgtgttaatcttgcagaatgtttgcaggactgactatcaaactggatgatttccatttataccctactgtgtcagttcaagcatcaaaataccttgcatctgagacagacttcctacatcagggacaggtatctgtgtgtcattatacaaaacagttctagggggttgaactacatagtaaaaaaataaaataaatagtacttagtgtaaaataattttataaatgatcttttgtactttaggacattaaattgtacaacttttgtatatataaaagcttaggaactttctgtttagcaggaaggcaacacattcctacacttttaatgtatatgtttgttataatgtccatgtaaacatgccctatgtttgtgccttttaattagtttgtctcaataaacaaaatgtagagaaaaatatgtagctatgactttgttacaactgttcttatccacagtacaaaaatggttt

SEQ ID NO: 891 - DNA, 535 bp, Homo sapiens
gcaggtgtgagccatcgcgcctggccaggacctttgtttcttatctacatattggaagatttggtcctgatgtcctttgaggcttctttagctctagttctctgacacttcagcctatatcacagctaacttcctcagtctcatctattccttatgctccagcccctggcaatttgcctcaagatgggggtttgaaaataactttacctgactcaaggagtgtctgggagcacctcctagtctaagtctgcaaggttccagttcttgcctaaaaccatggccagtggccacccttgggctcagacagctctgggccttttgaccacaagccagcccctcgccctctctgtggcatagtcttctctgccccaggactgcagggcggcttcctccaaggcttccaaggctcaaaagaaatttggctccatccaagaaggctccagctcccctactgggcccctgggttcaggcccacacccctggggccagggccagagagtgtgtctcaggagaattcaatgggttttaggagaga

SEQ ID NO: 892 - DNA, 345 bp, Homo sapiens
  misc_feature (1)...(345): n = a,t,c or g
gcattagaaaattagaacatttacattcataatctgtttaatcttctgttgaatgcccttgtgcactctctttgccctgttttagttccctacttgctgtagattataagtgcccttaatatctccagtatctccacagagaattttgtcttcaagccttggcatcctgttttccactgtgccttcaacctgagacttcagtgatttcacaaatgctctgaacaatggagttttgaaatggttaccatttgtattagtttcctgtgggctgctataacaaactaccacaagnctggntgacttaaaccatcaggaaatctnatttctcttcacagtttctgggag

SEQ ID NO: 893 - DNA, 2304 bp, Homo sapiens
ttttttttttttttctgtaaggagcatactgtgcccatttattatagaatgcagttaaaaaaaatattttgaggttagcctctccagtttaaaagcacttaacaagaaacacttggacagcgatgcaatggtctctcccaaaccggctccctcttaccaagtaccgtaaacagggtttgagaacgttcaatcaatttcttgatatgaacaatcaaagcatttaatgcaaacatatttgcttctcaaagaataaaaccatcttccaaatttccaaagcatgcattgttacttgggcattaaggtatttcaaaatgacaaacattgttacggtattgtaaggccaaaatataatacctatttaccagacatacacattacaactagaaaaaaattacaaatgttaacctagtataacaattccatcaggaatgaatgggggaaagggcactgcatccctctcatatcgccacagatctactatccacttgacatgctttgaattcaagtcctgttagacatgggaacagcttttcctacaacatatgattcacaggtaggttaatacatcttagtctcccactgccatacttttcacccaagtgtacaacaggtatgaatatatgctatcagctttatttacaagtgtatcttgatgtcttcgtggggtaaaagaaccaactatctcaaccaacagtttccaaaaaagtttttggctatgattcatgtatagaaaccaccacataaaagaaacaacagaaactgaggtccgatcccaaacacctaaactaaaatttctcacccactaaaagttgggcagtgaaaactgcctattctctgaattgtataagctaaattctacagaggaatttcagatcaacttcttttgcaaaagcacaagttacacgttgcacggttggggatgctgagtgaatgcattccaggaagagttccgcaagcaatgtgttgttgcaaagagtcgagaatccgagaatctgggaaaggtgatacgtttccaaacgctttcctggctccccaaagatgtaaaacaacaacggtgtaactttatatacgaacaaaggttagtcctgtaaatcagtaatatacatgcacaaacatgagaacatgagggaagaaaggaaacgctacaatttccacattgcattgctgctgttttcacaacctctctgcactaggcggcttcctgtggtacctcttcctaccagtagagagtggcccctgcaggccacttagaaacaggaagctctctcctgagctcactgatcaacctgcccttggcacagacagaacctaccagaaaagaaacaagtacaaaacactatcattaatctgttttctcaagacagtcccaaatgtccttgtgcgatcaccacaaactcagtgattggcccaagtcattcccgggtgccatgaacagtaactggtgtgcagcattagaacaaggggacacggccttgattctcttctgagcaacatgaactgggatttctgccaccccgatctcggctgccacctccgaagaagtcgtgaccagccacctccacagtaaaagattcctcccgtgagtatgatttggaatgcgtcctcgtcgcgtgccagttcagctgaggtggatcggcgtgtactccggcctcctggtctggataatttttggcttaggtctcctcattctttccatttcctcttcttcctccttctcttgaacactctcaacatacatggacccaccacgctgggaagtggtgtcagtcgcctgcgtgcaattcatacttttcccctggccccccagcttggagatggcatataagagatcatagtttatgactggggtcgcatcttccacttgtttccatcccactggcggagaggcgggaggggagatcagaaactgcttgtctggattttgcggagcccaggtgtgagcttcctatgtgtaaggtctgagcaaaatataacttcatttcctttcccagaaactcagtcttatgcagctggagcctggcatctgctgcggagaaggggttgctgaagtttattctgactcgtttgaagctcttaaaatactgaaaggtgatgtccttgtcatacgtcctaaagagggactcaaatttggccctgggtttcactttcgctgaagatatcactgtttgccacacaggcaatcagggagctaaaactgtagttaaagtttctaaaatgcatcttgctttcttacagtgaaagcgctacagacccacgcagtcaagcccctagtgagattcctttccaagaggctgtaggttcctt

SEQ ID NO: 894 - DNA, 992 bp, Homo sapiens
agtaattatggtatatataaggcgttgggaaaaaacattttataatgaaagtatgtagggagtcaaatgcttactgtaaatgcataagagacgttaaaaataacactgcactttcaggaatgtttgcttatggtcctgattagaaagaaacagttgtctatgctctgcaatggtcaatgatgaattactaatgccttattttctaggcatataataatagtttagagaatgtagaccagataaatttgtttactgttttaagaaaactaccagtttacttacagaagattcttttttccaaacagtaggtttcatccaagaccatttgaagaactgcaaactctttctcttagaaaagaaagagggcagcctaaaataaacgcaaaatttgcttatactccatcacattcagatgtcttggttgtgacttattaccagtgtggcagagaacccaagttacattttagatcaaaatattctttatgtaggtattgttaaaaggctagagcctacaagttgctcttccatgcgttggtcacgggggccctgaaaacactggtaatattaagagtctttctcagggtaacttaatgttttcttaatgaacaatgtttccagctacaaattcttccaataaattgtcttcctttttgaaaagtactctcatagaagaaatttagcaatttctcgttgactgactcagtctattttaagtattcagaaaagattttgatccccattgagttaatgctctgccttgaaaattatttttctgatccttgttagtgataacattttttttctactgaaggtcagaggataggaaacaagtatttctcttctggtatacatgtaatgtattctgtaaaaaagtattcatattggcaattttagttaggcataatattgggggtggtaatttttaaaacttagtgttttgtctgattaaagcagggcactgatcagggtatctcctaagaggtaattcactt

SEQ ID NO: 895 - DNA, 426 bp, Homo sapiens
  misc_feature (1)...(426): n = a,t,c or g
accngctatgattgattacgaatttaatacgactcnnnnnnnnnnnnnnnnnnnnnnnnnnnnnnnnnnggcacgaggtcctgagagctctgaagggaaatcatttccaggctacagacctaacctgtgcagaccagggcaggggagccaaggcttccagagggattgtccccaggaaaggcaccaagatgcctcctgcagttctgtcaaggagttttagtctccctgagtacatggaaaatgtgcatttttaaaaaaagagccagttattaccccaggaaaaaacaaagctgatctgtggctgacaggccccacgtgacccagcgcatggatgagctatggccacagggccaaattgaatccccacctgtattattagtccattctcatgctgctgatacnnaccnaccncacanntggtaaatt

SEQ ID NO: 896 - DNA, 826 bp, Homo sapiens
tcccagtgcttgggctttatttcacaccacgtacgtgacaacaagctggcctagagcccacatcagcaggcaggcggcccacagtgccccaggacctaccctgcccccaaacaggccatggggccccttaggaagatgtggggcttcttgagatcagctccagtttttctcagagcccctgtgaaaggagctccatctgcttcctgtggaaacctggactctggctgggtcagagtggactcctagttgctcctcttcttttgtttctgtttaagcttgttccaaatcctttccagggccacttttcccatgaagaaggtgatggcaaaattgcgcttgtaccaatctctgttataatacatgtgcttctgaaaatttttacttaaaaattccttgtagaagtccgccatttcttctgcattcaatgttgctttctgacctgattcagttctcaggcccaggcctttagtttttagtcttgagtgaataaattcttctttttccttactaaaagtcaaattctggtttgcccagaactgttgattccattcttgtgtttcttgtcttaattttctaagcttttgttccaatggagattcattttcaggtatgtaaaagtgaacaggtcgaaggtttgaatatttatctgggggtcctatccaatcatggcaagactttcttggagggcagaatcttgagaccccgctgggcgccgtatccctgcgctcggcgccgcgctccggagcgagttgacagccgcggcaggcgaaggcgcggcagagagggggagaaaggtcttcttccccgcccgcaagaccaccatgcg

SEQ ID NO: 897 - DNA, 1487 bp, Homo sapiens
  misc_feature (1)...(1487): n = a,t,c or g
taaagcatcattaaaacagcctcaataaacaggccgtatttagcccaaatcttgttcaggagaacagcatgggctccgtttgaattttgttggattctggacgtcctcctcctattatataggtctgagagttgtctttgttaataaaatttagctttgtttccccaccagtgataatgacatgaagcactaggaaatgatgcaataaccgcaggtgcatgaggccttcctcctggggaaggtgtgagacaggaggggagcaggactcccccatactcagtccagtggaagcgcagaatgccctgctcgtgttggtaaaaataagacaggaatgtaagaaaaaaagtcttcacgctcaacgtgactatctttggaattcatttcattaaggttttcacaaaatacaaagctcaaacgtaatcatctatgtccaccacaaaacagaatcaaataagtggttagcacaacaaacatagtgatcttttccattttaaaaaatataaataacaatgttcaaggttttacagttttcttagtgtgtgtctttttaaggctttatgttgcagacccttcattaatgggtacttgtaccctgccatcagggatacactgcccaccagcaaggaaggccactgtggatacattcctgagggggacacacactgatccatgttgcctcagcctgttaaaaactaaatgatcaaacaccctccaatcagttctcagtttcattaactttctttctactacaaagtaataatagaaaggggtacgtgtccagcagcattcgagctctcagaagatcaatcaggaagggcaagaaggaaaaaggcttcctcctggagagaatttttttcctttcatcaggaacaaacaccaataacccagatagttcaaacagtggtttgtactgaaacatttttcagattaaatagtgttgagagaaacagtgatcttttggttgggtattttagaagaggttaaagtggagaggttaatgttgggaaaataccactgaaagtacagcccccagcaggaatgggctcactcgtgaggtttggggggcagagccagggccccagccttgggaatgaaatctgagggcaggctctccagcagacacttgacctgctcctggcccagcttgatcttgtcatccagcttccgttgctcaatgaggagcgtggacttcattttcacgaagtgctggtagtcctggagctgctcctctgaaaggtaattggccaagatgcccagcactactcgctccctgcgatccaggttctccttcagctcccgggcatcctcatgctgaccagccaggatcttccttttctcgtaaagagagctcctttcttcattactggcatcttcaccaaggccgctaaggacattctcaancagntagacgcccgagagggagagcagcaggttgaccaccttgtccaaatcccctatgaacatcctatacttgtcncngtgccgaa

SEQ ID NO: 898 - DNA, 401 bp, Homo sapiens
ggcataaagacagacaaatagactaataaaaccgagtgcaaaaaagatgtaaacgctcacatatttattgtagctttacttacaaaaatcaataggttaaagcaatccatacttccctcaacaaacaaatgaatgggtacaatttggaatataaaaacaatagaatattacccagcttttgaaaagcagaaaaccttttatctataataaaaataaaatcttgatgacattatgctaaataaaaaaagccagccacaagacagatactgagtgtatccacatgtataaaatatctaaagtagtaacatccttacgaaacagagaataagatagcatttgtaaagggctgaacaaaggagaagacaggcagttgtttcaggtggtattggagttttagtttc

SEQ ID NO: 899 - DNA, 648 bp, Homo sapiens
ctggttctagatcgcgcgcgaccggcgagggaggaagaagcgcgaagagccgttagtcatgccggtgtggtggcggcggcggagactgcgggcccgtagctgggctctgccgaggtgcaagaaagcctttgaggtgaaggtgtatgaaagtcatcataacagatgttttccaaaaacttgtagaaggttgtgaaaaaactactaggatcacgcggcatgtattgaggtgtggcatgcagcattttggaaggaaaattgaagacgtgttcaagaaaacatgaacagaagcaaatgatgaaaatgagcattttacttgatgttgataacatcacaataaattatggagaaaaatacatatttggctaacttttaattgctgaacaataaagtgttttcttttaaatcaactctaaatagctccattctcatagtcactagtcagacctgttttgaacatattcgaaagattataatcttgtcaataattagcttatttatgggtggtgattctcattgaggctgacagctggggagacattgcttgtacctctaggttccctgtctggcttccccttcagagcctgctgttgtaccaggtggttgaatcttaaaactctttaataccaaatagcaatcaaattccccctt

SEQ ID NO: 900 - DNA, 628 bp, Homo sapiens
  misc_feature (1)...(628): n = a,t,c or g
cttgctgccatgaatcccaagttgctacaagggcgagttgggcagatgcttcccccagcaccaggcttccgtgccttctttagtgctccaccctccgctacaccacctccacagcagcaccctcctggcccaggaccccacctgcaaaacctaagatctcaggccccaatgtttagaccggacacaactcacctccatccacagcaccgtcgactcttgcatcagagacagcaacagaatagaagtcagcatcggaatctcaatggtgcgggagatagaggaagtcaccggagcagtcatcaagatcatctccgaaaggatcccatatgccaatctcatgttgcagcgggaaaaggattgggtctctaaaatccagatgatgcaactgcaaagcactgatccctacctggatgatttttattaccagaattactttgaaaaactggagaaactgtcagctgctgaagaaatacaaggtgatggccctaagaaggagcgcaccaagcttatcacccctcaggtggccaaactggagcacgcctataagccaggtaaggtcctcataagaaaaatgcccataataaaagaaatttgagaagctgctgatgtgatnaaatatagacaagtg

SEQ ID NO: 901 - DNA, 515 bp, Homo sapiens
  misc_feature (1)...(515): n = a,t,c or g
gccctaacttttacatacatattagattaatttgagcctacataaaaagaaaacaaatttgtgaggatttgaggggggaaaatcaggggacttcctgtttgcagctcttatcattgggagaacagtaaattagatctagactaatatatttggtttctctaatttatggcaatttgttaactttgtcattgagtggaatgctgaacaaaatttctatggcacataagcaccttgcacagggttcgctttaattctttgagaagctttcaggcatagactatttagtatactgattaaagtatgaattaaattattaaattagtatcttgtccctgtgaagaatgccctttagccttcaaataggttcatctttacttgaaaataatggaaagctgggtgcagtggctctcgccctactgantgttganaggatcacttgaggccaggagtggaagaccacctaggcaacatagcaangacctngcttttccaaanttttttaattagccnggatg

SEQ ID NO: 902 - DNA, 837 bp, Homo sapiens
gtatactttctcctaagttcagtgacttcttctccagcctgcatcttcttatataaatccagttctgtgtcaagtaattccttctgcatctgagtcttggtttttatactttttggaagacagcgtccaggagaagcagctttgacctcatctttcaacttggtaatattttttgtcaaaacctctaaagttttcattatttctgctttatcttcagacttcattgttttgtttttctccagttttgaaattaacgtcttctgtgtttcaatgtgcttttctaaaatttcttgtttccttttccttacatcctgctgaagtttcaatgcctcctgtttttttgttctgtgcttcattattatcaactgcagaggtggaaacaagtaaggttttctgtgcagccttcaaagcagctggattatacactgtttttgttaggccagtagatgtagacaacacctgaggaaggtctgaagaggcactctgggcttctgcaggttcaatagtacttgaaggtactggacccagccgctctttgactgactgcttcacaacaggcaaaatgggctgctggactaaaggctttggagaagtagtttgtaactgttgggtgcttccttctctgtgccaataaaccttaataaagcgattgtttaatactgcttccgtacttgatattgctttctttgcttcttcgtatgttgcaaattgggattaggggcaccttcaggggtccacccttattaaggcaacctgttaaggtttaaccaagggttcccaaatcgacttaaaatgttcattaagtttgctgatattatttaattctggaggaacttt

SEQ ID NO: 903 - DNA, 395 bp, Homo sapiens
ctcgctgactcgcttcgcttccccgacgcgctgggttcccggagcgcagagcccagcgttagcgggtgggctccccgaggccccctgccctcgccgggctgctccagggtgtcgctcctctggctgctcccgaaggggcttctggccctgaggacggtggtgccaagcgaacttcatttttaaaaagaactggtggatgagaagagcgagcgagggcgagctatggaccctgtgagtcagctggcctctgcgggcaccttccgggtgctgaaggagccccttgccttcctgcgagccctggaattgctttttgcaatctttgcatttgcaacatgcggtggctattctggaggcctgcggctgagtgtggactgcgtcaacaagacagaaagtaa

SEQ ID NO: 904 - DNA, 465 bp, Homo sapiens
ggtcgaccggcgagggaggaagaagcgcgaagagccgttagtcatgccggtgtggtggcggcggcggagactgcgggcccgtagctgggctctgcgaggtgcaagaaagcctttgaggtgaaggtgtatgaaagtcatcataacagatgttttccaaaaacttgtagaaggttgtgaaaaaaactactaggatcacgcggcatgtattgagcatataggttgctgtagatgaatgttcttagctgtcatgtttaaaaatacttctgcttcgttacctcaagtgtggcatgcagcattttggaaggaaaattgaagacgtgttcaagaaaacatgaacagaagcaaatgatgaaaatgagcattttacttgatgttgataacatcacaataaattatggagaaaaatacatatttggctaacttttaattgctgaacaataaagtgttttcttttaaatcaactct

SEQ ID NO: 905 - DNA, 426 bp, Homo sapiens
tccagggtgggctggttctcaactagtgcccagatgcaaaaggactgaggcatcactttcagactgcatatatttttattcatataaagttctttataatactttattttgtggtgttaagttccaccagttatttacaaatgatgtaaaaagctttaagtgttgttaatttctaaagtgttcttgcgttttcagaagtgtaagtggatctcagttgatctgtcaccccaaacctcaaatgatccatccaccctgcttggccatctaattcacctgctctccccagtgactattttggacctttcctctccatagatgactttgcaatctacagggaaaatacttatgcaggacatcttatatctcccccttaccacgtacagttctctccacagctgccagcagccctaacctttttggtcgacg

SEQ ID NO: 906 - DNA, 1536 bp, Homo sapiens
gggatatagaatctaagagttgattgtggaaaacacgtgaatctattgcgcgcatttgtcatttagcaagatggcagcagtccagctgttctttgcagctggagatgaacttttaaaaatccccttcacacttaatgtactgaccgagacagaagtacctgaaaacagctgtgcatggcaggcccggcaatagcttctgacccacagcacccgcgcctcagaagctacggtcacaacttaaaggagtccagggacttgctgcaggctggggggcactgggtggttctcaccagcaggctgcggcggcactgtgttctcattggccaaaaacatccttttgctctgtctcgttctttacacagagttcactgacttgaagtatactcagttaaaatcggggctggaggtgcagacggtgtctgaccggaggatgtggccgtgcccggccgagcactcttgatctgagctgacctgtgtgtgtgtgtgggggggggtggggccttcacctaagacctctgcagcagacctggacagacaggcccctcccgcctgtccaatcgctctagctgctaatacagcgctggctgtggaatccttcaccgtctcagctggtatcagccccagcctgccttgtgccatatctcagcttggatctctgctagagtccccccaaccatatatcatagagttgaatcacaatgagaccgttggctttgaatttgagtcgttggttcccatggtgagatgcttgttaagactttatacttgggtcaatctctcactttattttgtagaaccatttgaaatcctaggatgtgcttgttctggaaggatgacatgggcccagactgaacaagtcagcttgatgatcttaaatgatggaagtataggacgttgcttattttaaaacaagggaaggacacaaaatggaatgactgcttagtcctttctcagatactcttaaaacaattttttattgttaaatttgtggtaatacatggtcacaaccgtggatcaaacaaggtcagtctaaagtggcaggtcctaggtgtgacctgataccaccaccctttgtggcagcaccgggctggactgccctgatccctgggacgtgagacttagcttccagccagtgtgaatcattgtatctgtctcataatcacagcacagctgcagacacaacaacgtgcagcattttttacataaaaatatggtagaattaatttatgacatggaaatgccttacgtggtatcacacttagtcttgaaaaaaacaccaaggtgacgtttaaaatttttagtacatatcctcaaattggagctaagttatacttcttttataaccttttgggcatctggtcgagagaagacaagattttctctatttacagtgatgcaataaatatgtttgccacctttggactgccgttactgatttgtaacttgaaaaggctatggttgatcatgaccccgcctcccccacctcccttataagatgtggacgagagctttattgacctactgactataaaatag

SEQ ID NO: 907 - DNA, 2006 bp, Homo sapiens
gaggcgccacgtcccttgcggcggcgggagagaaatcgcttggacttcggggcggcctcggacggccatggcctttaccctgtactcactgctgcaggcagccctgctctgcgtcaacgccatcgcagtgctgcacgaggagcgattcctcaagaacaggaatgaaggatggcagcatgcgtgcattaaaagctgttttggtagatctcagtggcacatttcacattgaagatgcagctgtgccaggcgcacaggaagctcttaaaaggttacgtggtgcttctgtaatcattaggtttgtgaccaatacaaccaaagagagcaagcaagacctgttagaaaggttgagaaaattggaatttgatatctctgaagatgaaatattcacatctctgactgcagccagaagtttactagagcggaaacaagtcagacccatgctgctagttgatgatcgggcactacctgatttcaaaggaatacaaacaagtgatcctaatgctgtggtcatgggattggcaccagaacattttcattatcaaattctgaatcaagcattccggttactcctggatggagcacctctgatagcaatccacaaagccaggtattacaagaggaaagatgggcttagccctggggcctggaccatttgtgactgctttagagtatgccacagataccaaagccacagtcgtggggaaaccagagaagacgttctttttggaagcattgcagggcactggctgtgaacctgaggaggctgtcatgataggagatgattgcagggatgatgttggtggggctcaagatgtcggcatgctgggcatcttagtaaagactgggaaatatcgagcatcagatgaagaaaaaattaatccacctccttacttaacttgtgagagtttccctcatgctgtggaccacattctgcagcacctattgtgaagcaatgtgtgcatctgaagcaacttgaaatgcagcttcttattgtctggaatgaatcccttaccaactcagtgccagcatcggtagacaccagtcagtgctgatcgctttttaaccctcttttgttgtgcattaattagaaagaaaggtattgaattgcggctagcccagtaagccttgctaatctcttttattttgtaactgaagatgagacccaaagaaagggaaagctgagattttgtgccattccttttaaaatattcatcaggttaggtggggctgtgggggaaaagctactacagggaagagtgttctctgctgtctcttcactggaaaacagggaggggggatttcagactgtgaagaaagttgaatggtggtttttaaattataaagtaatgtattaaaaggtgcattaggctgtagttctaatattgagttcaactgtgaaatccatcagatgtgccaaatggagaagacagaaagcaacaaagtgaattgttctttagcccaagtggtacagtgaatttgctttaacagatgttgaaaactaaattttctactgtattcccagcacgggtgacttctttttctcttcattagccagagatgactaatttaaatttagaaccagattttaatttaaattaatatttccattaataacctattcattgcagatacctattatactgtgtaacagttgttttggaaattttatgtaaaattaaaactatcagtattttacagatgttttaattagacattgttattaacaggaacagtgcagaaactagaatcaagccttataatatcttatagaccatgcatttttgaagttagtgtccactagggtcctattaactgtacatttgcaagatttcattatttttgcctctgacactatgggaaaaattttttagaagctattgggacagattcaagcttttatgcacttggttactacagctgtaaaatgaaatctcgtcttgtagcatggattattcttctcatgttaaacccaccaaaataaaggggactaaataggtaaaaaaaaa

SEQ ID NO: 908 - DNA, 876 bp, Homo sapiens
tttccatagaaacaaacatccccctgcagcaaggaggccggattctgtgccgggggacccacgtgtacttgggcgatgacatgccggacccagggcttgtgcttgcaggcacaaagtgtgcagatggaaaaatctgcctgaatcgtcaatgtcaaaatattagtgtctttggggttcacgagtgtgcaatgcagtgccacggcagaggggtgtgcaacaacaggaagaactgccactgcgaggcccactgggcacctcccttctgtgacaagtttggctttggaggaagcacagacagcggccccatccggccaagcagggaaagaagcaaggcaggaagctgcagagtccaacagggagcgcggccagggccagggagcccgtgggatcgcaggagcatgcgtctactgcctcactgacactcatctgagccctcccatgacatggagaccgtgaccagtgctgctgcagaggaggtcacgcgtccccaaggcctcctgtgactggcagcattgactctgtggctttgcattcgtttccatgacaacagacacaacacagttctcggggctcaggaggggaagtccagcctaccaggcacgtctgcagaaacagtgcaaggaagggcagcgacttcctggttgagcttctgctaaaacatggacatgcttcagtgctgctcctgagagagtagcaggttaccactctggcaggccccagccctgcagcaaggaggaagaggactcaaaagtctggcctttcactgagcctccacagcagtgggaaggaaaggcaagggttgggcccagtgtccccttttccccagttgacaccttcagccttggcagccctgatgactggtctctggctgcaact

SEQ ID NO: 909 - DNA, 467 bp, Homo sapiens
  misc_feature (1)...(467): n = a,t,c or g
tgattttctgagcacacttgattcctagaaataaagagttctgttaaatagagtgaaccccaagtttctcttcaaagaatcagtatgtcagtctgttcagcttcctattctttgattctccattttaaagtttaacttcctggttctcttcacccccttgcctctagtttcagtaaacaactttcccgccagtcctaatcactagttcacatctgttcccctggtcacctgctccatcctgactcatctcggtcacctgctttgaccggagtcacctttagttacctcttcctaaccgtccttcccaccaaactggttcaccccgccactctgggttcgttactcctggntctttttaaaataggccagtcgggaattagcttaggactgtgtgggtccaaccctaggccaataaggggaacgacacaggcagtagggggattacctggcntcagggggttaaggtt

SEQ ID NO: 910 - DNA, 716 bp, Homo sapiens
tgatgaccagctggataaattgtttcaggaagggttgagatgatgttgaacatcatgccctccacatcaatttacggggaaaaaaattcatcttgtttctgccgattcaagaggactgacaagagcagaaacaatagccaacactgtggtcatttcaactggttcagcttacaaaattctgactgaaaaattaaagttgagcaagctttccactcaatggctgttaaaaccctttgcacccagatcagctgtagacaagagcagagctttggatagaaagtctagacaagtacgatcaagatcctgaagcacttattcgaagaactgcaataggaactgaaacatggctttaccagtacaatcctgaagacagggcataattaaagcaatggctaccaagaggtggaagtggtccagtcaaagcaaaagaggtccagtcaagagcaaaggtcatggcaatagttttttgggatgctcaaggcattttgccttgttgagtttctggaaagcccaacaaatgataatatctgcttattatgagtgtttggacaaagtcaaagctttagcagaaaaatgcctgggaaagcttcaccagagagtcctcctccaccatgacaatgttctcgctcattcctctcatcagacaagggcaattctgcaagagttcccatgggaaatcattaggcatccagcttacagtactgatttgactcctt

SEQ ID NO: 911 - DNA, 477 bp, Homo sapiens
aagcttggcacgaggtgcttggatggtgtcttcctctcctcagccgagaatgacttcgtccaccggatccaggaggaactggaccgctttctgctgcagaagcagctgtcaaaggttcttcttttccccccactctccagtcgcctccggtacctgatccatagaacagcagagaattttgatctcttgagcagcttctccgttggggagggctggaagaggaggacggtcatctgtcaccaggacatcagggtacccagttcggatggcctctctggcccctgccgcgctcctgcctcctgccccagcaggtaccacggtcctcggcccatctccaaccaaggagcagctgcggttccccgaggtgcccgggctggccggtggtatcgtggacgcaagcctgaccagcctttgtatgtgccccgggtgctgcgcaggcaggaagaatgggggctgacctctacctcggtgctcaag

SEQ ID NO: 912 - DNA, 392 bp, Homo sapiens
gatctttcctttctataggtcctactagtccctgtatgttaaatatttgacctcttgtcttattatcccgtattgattgtaatttcattgagaagactgtatgcatttatctttgtgtcccatgtagtgcctgggtgctgtgccttgcacatagtagtagctcagtaaatatatattaatttgaaaattgccactcaatttctccctcagcatatttcttagtactattccaaacacaaaattcaagacaagatcatgtaactttaatacagtatactattcaggcatgttcttacaccattattataaatatttattcactctattaatctccatgaagataaacagggccaagcataaagtatataaattcttgctattggcattttttt

SEQ ID NO: 913 - DNA, 100 bp, Homo sapiens
gcgtgactgggcgggtgctgcagccgccctccatcctctacgggggcaggaataaagctattgcgacccctgttccagggcgtctgggacatgcggacaa

SEQ ID NO: 914 - DNA, 484 bp, Homo sapiens
  misc_feature (1)...(484): n = a,t,c or g
gcggcacgagggagagcattctggtgtggctcacagagatggacctgcagctgaccaacgtggagcacttctcagagagtgacgccgatgacaagatgcgccaactgaatggcttccaacaggaaattacattaaataccaacaagattgatcagctcattgtgtttggggagcagctgattcagaagagcgagcccctggatgctgtgctgattgaggatgagctggaggaactccaccgctactgccaggaggtgtttggaagggtctcccggttccaccggcggctcacctcctgcactccgggcttggaagatgaaaaggaggcctctgagaatgaaacagacattggaagaccccagagaaatccagactgattcttggcgtaaacggggagagaccnagaaccgtcatctcctcagtccctgtgtcatctaatggcccaaggcacgaacggtctggctgcnagaccctgtcaccttga

SEQ ID NO: 915 - DNA, 2652 bp, Homo sapiens
agacccttaattgttgcagatcctgtcctggaaccacagcttattcctggggccccagcctcttggaccccagccagttcacagacccaatcccctcctgtcacctgtggagaaaagaaggcgaggacgaccccctaaagcacgagatttgcccatccctgggaccatttcctctgcaggggatggcaactccgaaagtcggacacagccacccccacacccatcacccctaaccccactcccaccactgctagtttgtcccactgctactgttgccaacactgtcaccactgtcaccatttcaacgtccccacccaaacggaagaggggccgacctcccaagaatcctccatcacctcgggcccagccaggttccccgtcttggaccgtgacagcacttctgttctcgagagctgtggattggggaggcgacggcaaccccagggccaaggggagagtgagggtagttcctctgatgaggatggaagccgccccctcacccgcctggcccgccttcggcttgaagcagaaggaatgcgaggacggaagagtggagggtccatggtggtggctgtaattcaggatgacctggacttagcagatagcgggccaggcgggttggaattgacaccacctgtggtctcactaaccccaaaactgcgctcgacccggctgcgtccagggtctctagtccccccactagagactgagaagttgcctcgcaaacgagcaggggccccagttggtgggagtcctgggctggcaaagcggggccgcctacagcccccaagtcccctgggggcctgagggttcagtagaggagtctgaggctgaagcctcaggtgaggaggaggaaggggatgggaccccacgccgacgtcctggcccccgccggcttgttgggaccaccaaccaaggggaccagcgcatcctgcgcagcagcgcccctccctccctggctggccctgctgttagtcacagaggccgcaaggccaagacgtgagtggggctgcccctccacctaggctttccaccgtggccactccctccatgaccaggcctgactctgttaaccactacttgaagtcttgagggggaaagcctccagggagacataggggccttctcccttcttcccaccaaagtagggggtaggcaactggttgtcatggaaatggggatcatcacagtccccttccccttcaccccacgtggctgggcagtgttaagggtggcaagatagtctctgtccccacccccttgtacttgattccccagctgtctttcacacagccccccacccttaggggaagggggaggggcttctctacaatgaggtttttttcttttttttttttttttaagaagaaaaaataataaacttagtttctgtatgagcatccgcgtaaggaggcttctgattttctggtctggtggagggttgggtgggaacttgggcatcgtttttctcctccctcttgttcttgcaaagatcctagcacctgatctctagcccaggactatatgttccaggcagaaatctacccaagaagagggaagattggtgaatttgatgtggtagggtgcctttccccagtcagtttgaagtcacagatatccttttcctctcatttcttttccctcggttcctagacgttcctcggagctctttgatgcctcagacctttcccttttatccctcttgctcaggtgcttcctttcacaactttttccagagggcaggcgtcctagctccagttgctccatcccttgggccctcccctggctcttcatctagccaaactggtttgagtcagccacaccccttcccagctccctgggctcttcacgtggtggctggccactcaaccccacccctgggcttggcttggagccctgagtcagctccatcaccacccaagccaaaccaaagctgaggcaggagccgaaactcagagtccttcaaggcctatagccaggtgatggaggacgaggagaaggcagtggagatcttgggcaacacggaagctgctcatcctccatcccccatccgctgctgctggctccgcctccgctgcttggcagctactagcattatctgtggctgctcttgcctgggagtcatggctctggtgtttgccatcaaggcggaagagcggcataaagcaggccggtccgaggaggcagtgcgctggggggcccgggcccggaaactcatcctggccagctttgctgtctggcttgctgtcctcattctgggtcccctgctgctgtggttgctctcctacgccatcgctcaggctgagtgaccctggatggcctctgctgagagccagccgagacctcctggatcctgcaatgcggcattgctaaggtcctgtgacagcagtggttggaaggatcctggttggaaggatggggactctctcaaggggctttggaagagctcttctagccctttataaaaggagggcagcagctgagactgatgagaggagggcagcctgctctgttctttcagggccccccacccccatctcccctaccctagcccaccctagggcctctacccagcgggaggggttgaagaccaggcctggttttattagaattcattttgtaataaaagccttttttagtggtgaaaaaaaa

SEQ ID NO: 916 - DNA, 285 bp, Homo sapiens
ggtgtgtgattttgaccaagttatttttctttcgcaaactcagtttccttgttgtgtaaaatggaggtgttggactaggtaactgtctaggtgaccttccagaccaaaaattctttgattctgtgatagtgggcattaaacttagctgtgctagaaatagttgtcaatagtatgggtagacatttctgaagtctgctctttgaatgttgtgtaagaattaaataataaagtttaaaaagagatagtgtcatttttaccctattaatgttgtctgtctagataaca

SEQ ID NO: 917 - DNA, 419 bp, Homo sapiens
ggactaacacacctctaacatttcacctctagctcagatgagagagagaatgggacttcttggtactgattgtttttcccatgcctcaattggtttcttttagggagctacaaatttacgggttcactggtgattgatcttttcatccagcacaatggacagaagtctaaggaacgtccttgtggtttcctttgggttcctgcttctctttacagcctatggaggtctgcagagcctgcagagcagcctgtacagcgaggagggcctgggtgtcacagcgctcagcaccctctatggaggcatgctcctgtcctccatgttcctcccaccgctcctcatcgagaggctgggctgcaaggggaccatcatcctctccatgtgtggctacgtggccttctccgtgggcaacttcttcgcag

SEQ ID NO: 918 - DNA, 172 bp, Homo sapiens
gattgatgcaatccgtggatcttagttcagatttccccagttctgcttgttctcgtgtgtgtgtatgtagttctgtacagttgtgccacatgtgtaggtttatgtatccaccatcacattcaagatattttctgtgacagatacttttatatactccttgttctttttattt

SEQ ID NO: 919 - DNA, 686 bp, Homo sapiens
  misc_feature (1)...(686): n = a,t,c or g
ataagactggcatcaagaaagctcctattcagacatatgtgcttggtgctaataaccaggaaacagtaaaatatttccaggatgctgatggatgtgaattagctgaaaacattacttatctgggtcgtaaaggtatcttcactggaagctcggggctgcagattgtgtacctcagtgggacagaatccttaaatgagccagtaccaggttatagttttagtcccaaggatgtgtcttctctgagaatgatgctgtgtacaacctcccagtttaagggtgttgatatcttgctcacatccccatggcccaagtgtgtggggaactttgggaattcttctggagaagtggataccaaaaaatgtggttctgctttggtttccagtcttgccacgggcttgaaaccaagataccattttgctgctttggaaaagacctattatgagaggcttccatatcgaaaccatatcattctacaggaaaatgcacagcatgccacccggtttatagctctggcaaatgttggaaatccagaaaagaaaaagtatctttacgcgttcagtattgttcccatgaagctaatggatgcagcagaactggtaaaacagcctccggatgtcactgaaaacccttacagaaaatctgggcaggaagcatncataggaaagcanattcttgcccctgnggaa

SEQ ID NO: 920 - DNA, 1959 bp, Homo sapiens
gatttcaagataaattagaaaccaagtaaaatcagtgtatttttgctaggtacttaaaggactattttgtatcttttaaattatctgttcatcttttaacttgctcatatttataaccttttcatgatgaatgatattagaatacatgactaattatacagaataattttctttttaatttcatttataggagaacctttacaaatagatcacttggtttttgtagtccatgggattggaccagcttgtgatctccgctttcgaagcattgtacagtgtgttaatgattttcgcagtgtttccttgaacttgctacagacacattttaagaaagcccaagaaaatcagcagattgggagggtagaatttcttccagtcaactggcacagtcctttgcattctactggtgtggatgtagatctgcagcgaataaccctgcccagcattaaccgcctcaggcacttcaccaatgacacaattctggatgtcttcttctacaatagtcccacctactgtcagactattgtggacacagttgcttctgaaatgaaccgaatatacacactttttctacagagggaaccctgatttcaaagggggtgtatccattgctggtcatagtttaggttcgcttatattgtttgatatcctaacaaatcagaaagattctttgggggatattgacagtgaaaaggattcgctaaatattgtaatggatcaaggagatacacctacactagaggaagatttgaagaaacttcagctctctgaattctttgatatctttgagaaggagaaagtagataaggaagctctggctttatgtacagaccgagatcttcaggaaataggaattcctttaggaccaagaaagaagatattaaactatttcagcaccagaaaaaactcaatgggtattaagagaccagccccgcagcctgcttcaggggcaaacatccccaaagaatctgagttctgcagtagcagtaatactagaaatggtgactatctggatgttggcattgggcaggtgtctgtgaaatacccccggctcatctataaaccagagatattctttgcctttggatctcccattggaatgttccttactgtccgaggactaaaaagaattgatcccaactacagatttccaacgtgcaaaggtttcttcaatatttatcacccttttgatcctgtggcctataggattgaaccaatggtggtcccaggagtggaatttgagccaatgctgatcccacatcataaaggcaggaagcggatgcacttagaactgagagagggcttgaccaggatgagtatggaccttaagaacaacttgctaggttcgctgcggatggcctggaagtcttttaccagagctccataccctgccttacaagcttcagaaacaccagaagaaactgaagcagaacctgaatcaacttcagagaagcctagtgatgttaacacagaagagacctctgtgggcagttaaagaagaagtcctgcctatcaatgtggggatgctgaatggaggccaacgcattgactatgtgctacaggagaagcctattgaaagttttaatgagtatttatttgctttacaaagccatctatggctactgggagtctgaagatacagtattgctcgtcctcaaagagatctaccaaaccccagggtatcttccttgatcagcctttacagtaaaaatgacccatctatggctgcttaatacgggacattgagggatccttccccagaaaatccacctgtttgttgctgcaattttcctctcctcagctgcgtcatttcctgcatgttgcctgccacttactcaccactggggtctttggaagataatcttcctctttggaaatgaatggaaaagcaaaaggccctattacttttaaccactggcttcatataaacacttgccatttttttctgcataaaaaaaa

SEQ ID NO: 921 - DNA, 4370 bp, Homo sapiens
caagtgcttggtggccatgtggggctgacgtgcgaaaccttagagccgggggatacgtccgttatcgagaacgttttcctggactgccctgggctgcaggtggacgtgacgaggtcattcgatgcctgaccgtctgcacagcctgtggtgaagaccacccgggctctctctgtcccctccctggccccttcttctaagcttgcagctgccacagaaaatcttctaagcttgcagctgccacagaaaacacccgattaaaaactttttatttcagcaaaataaacgtgcctgtgaaagaaccacacggtggcttccgagagaccccactgtgtacctgagccccaggtggccacacctggtgttctggaaaagggagtccagggccagtattcaggccctgctgtactgcaccctggaaactgcaccaaaccccagctccgcccccatccacggctcccagaatggtttctggagtccctgcaacagacctgtgaggagagggcagggcagggcctgcctcctgcgtccccgtgatgacctgggggatgcactgggcagggacagcttcctccatccacacagccctgtgggcaccaacaaggccactgtgacttcacacgacagcagtgttccccagctcagctgagccggggtgcaggggacagcacagggcacagtcctgtgccgcaaggccctcgtgctcctggaagcctctgggaggaggcgcccgctggtgggacgtcgaagtccaggcgctctcggcagcgaccccaggacggcgcacctaagctatgccgtggtgcaggggacgtgctggagggacaggagcaggcgagagagaagccacctgtggtcccagccccaccccagctcacacgaattccggctgcctttccctgcaggagcccagcgtcatccgcccgccacggagcctcatggggggcagtggggcctgcagcacgttgttggactggttggtgttgaatcctgagagctgctgggccgggccgtcctcgtccccgtccccgtcctcccgggctgtggcctccagctgctcctcactgccgctgtggctgccagaagccacctctaggctggcctcgctctgctgctgctccaggaagctgaggtggcccagggcactggcctccgatgaggacagcagctcggaggcctcctctaggtccgagtccgaatcgttggacacaactcgggattctctgcacccgtccgccgccgcctcctgcagcgggtagaccaccgcctcgcccgcctccaggtacggcacctggacgactacctcagctcgctggttggatgactcgtcctggcccccgggggtctcctccggctcctcctcgaagaccaggccgtagtggacgatgagagtctcgatgacgcgggcctgatggggataatccaccagggaggagagggacacggtggcctcggtgggccgtggccgaagcagcgtgggcccgaacacgatgcccaggttcccgggggtcatcttgttgtcctgctccacctccacgatcctgcgtaggtgacgcagcaggtactgcagcgaggcccggttctcaggcggcaggtcccgcaggagctcccgcagccgacctgccagggccaccgccactgcctcgctctccgagccgtcctgccggccccgggacgccgccttggcctcggcctctgccttcaggctgtccttggccagccctacgagctcgtggtagaggcggaaggagatgagcggctcgggaagctgacgcaggtagagcttgaggacgttgctgatgtcgtggggcgaggcctgcgacagctcgaccagctccttgccgttctcgaaggcctggcacagcttctccacgcgtgtctttaccccattgacccggtagatgcccttggtgcgcagcgcccgccgctcgatctcgcagacgcacttcttgacgatgaagggcacgccgtcgggggcgctgcgggccgcgtggctgaagtcctggccgaacagctgcaggcggccttgcagcttcttgtgcccgcactgtatggccagcgtctccagacatttcttgtggcaggccaggcagcactcttcacactcagcaccctggaagtagacgtagctgttgcactcgcggcacttggcgggcgtgcggagcttccggagccggtgagtacgggccgccttggacagcccctcgtggcggaacggtccactgggcacggccaccggcagctcgggggtcatgccgttgaggtcagcctgctcaaaggctgaagccccggctccaccgtctgggtccaccagctcctccgtggacgacatggtaccactggatgacgtccgctcgaacttcttaaagtcccctgcgccagggccggggtccagcccactgtccgagtctgagatcgagagcggccatgacttgtgaacctggtgtcctcgcccggccctgtggtccttggcaggtgtgccctcagtgcacccgccttcttctggggggctcccggcagcctccggccgcgccacatcactcacgttgaagctgctcttccgggcacgcatgacgggggaccaggcgttggcggagacgtggggctcaaagtcgtagtgcacatcgggctcctggtcccgctgcagctggcgcacgtgggaggcgtactgctggcctgggtcatacagcttgctgctctcacacagcatctggaagtgcacgggcagcggcgccgtctgcatatgcatcatctggtagtaggagatcgtggccgacttgatggtttggtcgctctgccggatgacctcctggatctgccgcagcgccgtcaccttggtatcctccagctcctgcttctgcgtcttcgcgtcggccacgcaggtgcggtaggtggccatagcttcctccgccttgttcttggcctcctcctccagccgccgccgcttgtccagggtcttggtggccgtgctgcctgctcccggcgcgctgccagcctgctcctcctccgccttggccacgaggaagcgagccttgtcgtggtcctcgcagcgctgcacgtaaccctgcttggccttgcgcaggttggactccgcctcttgcagcttcctctgggcacggtgccaggcctccttgatctccttcctgcgcttctcgtgttcaagccgccgcagggtcaggggctgcatgaaggtctgggtctgcaaggtgcccaccgcctgcaccatgctgtggccgaactccaggtcctgctccagggccagcgagtagatggacaggagcggcatgtggggctcctgcatgacgctctgtctgcagttgtgagcgatcttctgcaggcccttggcaaactccatctccagcgtcgtccgcttctccaggtagctgatgaggtccttcatgtacttggccatgttcttggcatacagcagtgcggcatccacgcccccctcacagcgctgtagcagcacgtccacctcctcggcgggcaggcagccggcgtcacagtcttccaggctgggaggcgtgccctcactgcccggtccatacaggctttccatggactggctcgagtccccaggaggcactgctaggagggtgctgctgtccacttcacccatgaggaactcggacactgtgctactgaaggccacagcaatcgtctccagggccttctcgaactcctgtttctccagatcattgttgctctcataatggaaggctttgaccttggcaatgagggtgccggctgcggtgagcgtctccacggtgttcagcagcgggtacttggagatgatctgatgcatgacacgcagagcctcacccaggcactcgtgggcccgcgggcggcgggcctcaaggaggtcgtcacgcaacacacactccttaagtttctcaaggccctcagcgaagcgggccacgtccgccagcagatgggagatgtcctcgacgacgtccgggccggcaccctcggtgggcagctcgcccgggctggcggctgtcagtgggctccggtggctccggcccagtgtccaggaggcagcacccgacagggggaagccagccgcgctggcgtggcggctcaggctggtgggccgcttgagggtccctgtggccttgacgccggaggacccagcgggcggctccaggcttggtccggggaacaccgcgtcagccccatccttcctgggcagctcccccgagggctgcgggctggggcttcccgcgcggttctttttcgagatggaaggggttttcatgagctctcgtttcttcctggagaacatgatggggccccggccgggagcccgagggggcgggctgggggtctcagcgctgcagctcccggcgctggccgcttcgggaccacattgt

SEQ ID NO: 922 - DNA, 644 bp, Homo sapiens
attgaaagcccacgcgatccaagtgccctgcaggttttggtccagggaaaagttggtctctgcagatgactgtaaatgactacctggaggtcgattaaagtgcggtactgcgggattcagccgatttccttcttcctctgactgcccggaaatatcagccaaaggccatgcgttctaaggacatatggaattggctatggataattcatatgctttcaatcaacgaagcacatgtaatggaattccatctgagaagaaaaacaacttccttgtatcagaagatcatggacaaaaaatcttaagtgtactacagaattttagagaacaaaatgtcttttatgatttcaaaataattatgaaagatgaaataatcccgtgtcatcgttgtgtgttagcagcatgcagtgactttttcagggctatgtttgaagtaaacatgaaagaaagagatgatggaagtgttaccattactaatttgtcctccaaggcagtaaaagcatttctcgattatgcctatactggaaaaacaaaaataacagatgataatgtggaaatgttcttccagttgtcatcatttcttcaagtttccttcctatccaaagcttgcagtgactttttaataaaaagtattaatcttgtcaaaa

SEQ ID NO: 923 - DNA, 789 bp, Homo sapiens
  misc_feature (1)...(789): n = a,t,c or g
cccagttcatacatttattttctaagttttacccctgtgaggagtgtgctgaagacctaagaaaaaggtaagatgtgtttgcacgcagcagagctttgcactggagcctgggcctggggctcctggctgacgttatagcggggaacgtagagaaacggatgcagaggtggcagaagtttgctgaggagcagggacctccaacaggtgaggactggggctatctgagcctcctcctctcgtctcagaagccaagctgtcgggatctgctgctgggtactgctcctgccacagccacagggcttccaggaagggattccctgccttgtctggcactgaaggcggtttcccgcaagttagggaagactccactttgcctgacttctagagtaggacttcctggttttaaaatcttggaaatcaactgcttttgctcccaagagccatctcttcctcactgagggatccaagagccagcactggcccttgcaggtgtttctaggccagatgtatagggtagagccgccattgttgctataagcctggtcagttagaatgaagtctcttgctgaactgacgcaccagggcctgccctcagatgctaagaaacaagtccagttttcagttacanagctgtgcccagccccacccaggccacactctcctgaggccagggacactggatgccgcttcctgggtgttaggagcttataaaattgccaggtctgtgctgtaatgtgttncttgagatctcgttggagtttgccaagctgtncaggtgggtgtttgcgc

SEQ ID NO: 924 - DNA, 903 bp, Homo sapiens
  misc_feature (1)...(903): n = a,t,c or g
tgcaaatataaagaggtttattcattctgtcattaggatacaaaatagaacatgtaaaaggcacccctcccgtcgaccccacagttcagtgtgaacaccgagcgctcgtccagggaaggctgccatgcacggcgtggctcccggtgaaggcagccggcttgagccagcctcaggtctcgaacatggcacagctggtgcacagcactttctcgtacatgtcactgcagctgcgacacgtacagggaggggagagaaaagctgctgtcaggggctgaattgtgtccaccaccccccaccattcaaacgtcaaagtcctaacccagaacacctcaggacatgaccttatctggagacaggatcactgcggggcatcatcagtctagatgacggcactgacatggggggncctaaggcaacacgaccagcgtcctaaaaagactacgtgaagagaaggacacagagaaaggaagacgacatgaagatacagggagggggcagcttttaacagggaacaccaaagataaccagcagatgccaggagagaggccaggacaggttttccattgcagcctcagaaggaaccagccctgccagcaccttcctctcagacttctggtctccaaaaagccaacgtggcagtaccttctttgctgtctatgcccactgggtctgcgaactcagttacagcagccctagctgattcccactgccgatcaattccacatggggcccaacctgggtttccagtaggatagaagctctccaaagaaacctccagatgacctgccagaattcaccgaaccacaatggtttacactgaagcacatcaaacagtgcttttctgatatatcaagactaagggtagggccgggcatggtggctcacgcgtatggtgtggcttac

SEQ ID NO: 925 - DNA, 339 bp, Homo sapiens
ctgcaagctatttaaacttgctatgcatccgcttcctcatcttcataatccatcagcatcgtgaaagcacagagggacgttgagcagagctctgtgctggcgccaccgcactctgtagcctgttattggtttttaagtagatcatagccaaagctagagtagcacctggacaagtcacatccacatttatggtatctccttctttgatttgataacttggtgatttatgtttctccctatgcattcctgtttgaaagcgcctatgtcctccaaccatgtactgatagagctgctcaggcacattgagatcagacatacctatcaaattgctgccgtgcc

SEQ ID NO: 926 - DNA, 538 bp, Homo sapiens
  misc_feature (1)...(538): n = a,t,c or g
ttcnnntttgganntnngnataccgttnnnnnnnnnnnnnnnnnnnnnnnnnnnnnnnnnnnnnnnnnnnnnnnnnnnnnnnnnnnnnnnnggcacgagnnnnnnnnnnnnnnnnnnnnnnnnnnnnnnnnnnnnnnnnnnnnnnnnnnnnnnnnnnnnnnnnnnnnnnnnnnnnnnnnnnnnnnnnnnnnnnnnnnnnnnnnnnnnnnnnnnnnnnnnnnnnnnnnnnnnnnnnctaaaagaaaaaaaaaaagaattaaacccaaaatcactaccccatctggacttgatttaaatgaaaagcttctggactttgagctgatgctatagtgggttgaaaattttggggtcctcagaaggggatgaggatatattgcatgagagagcancatgaatcattgagagccagagtntagagagnggtaggtanactgtaggagagccctcaatgatcccggctttcttgnattcncgttgcacttacttggataatatggcaaaagggatggnatgggcctttcaanantnngtntnaaat

SEQ ID NO: 927 - DNA, 980 bp, Homo sapiens
tttttttttttttggtttccaaagtttattaaaaatcaaagaatagaaaaactttacataaaaatatgtcaattttagcttccatattgttgtccacacacaaaaaaatcgaaacatgatatctttttgtcaaacctgtagcacgcgaccacagtggtagccaggccaattcatttgcttcaccatgacggaaatggaacatggtacctgtgtctatgaatcgagttttaaaatgcacaccccacgggacacgcactgccagacccgtagtggtttccttaatgtgggtttacagtcaatattgctaatgcgtagagattagtacaggcctacagatcagtttttataaatattctttatcaataggttcacaatttaaatattttaaatatttttgataactttcggtcatcgagaactgcagacacagtgtgctactctattctggaatgcctcctagagaacctgcagtcgcagctgacagctcccaatgacagagtgagccagtcctggcttcaaaagggcagaccgcagacattttaaagcttgtccttgctgggcgtcgatcacattcagagatcaatctagaactccccactgctgcacatgcatcagatgtcatggtaataagtatcttgtcttgacattctccactagtggacttcaaagaccaacctacctgtagtgtttagcaagaccagacccccgttttaaaaacaggaagtcagatggcctacaagatgcaaccaactcccaggacaactgtggtgctccaaaaactcagggttaggcaggatggatatattcttgttcaaaaaaaggtaacaaagacagtggttgttgtggcagaatacacttgcatagtatacctgtatgcttccgacgtcgggcgccagcggtcccggccccaacgctgggctgtgctctcctgcgacacgatccgttaaaacactccccacggcgcactgggcagctgaagc

SEQ ID NO: 928 - DNA, 873 bp, Homo sapiens
cgccgctgtgccgctagcggtgccccgcctgctgcggtggcaccagccaggaggcggagtggaagtggccgtggggcgggtatgggactagctggcgtgtgcgccctgagacgctcagcgggctatatactcgtcggtggggccggcggtcagtctgcggcagcggcagcaagacggtgcagtgaaggagagtgggcgtctggcggggtccgcagtttcagcagagccgctgcagccatggccccaatcaaggtgggagatgccatcccagcagtggaggtgtttgaaggggagccagggaacaaggtgaacctggcagagctgttcaagggcaagaagggtgtgctgtttggagttcctggggccttcacccctggatgttccaagacacacctgccagggtttgtggagcaggctgaggctctgaaggccaagggagtccaggtggtggcctgtctgagtgttaatgatgcctttgtgactggcgagtggggccgagcccacaaggcggaaggcaaggttcggctcctggctgatcccactggggcctttgggaaggagacagacttattactagatgattcgctggtgtccatctttgggaatcgacgtctcaagaggttctccatggtggtacaggatggcatagtgaaggccctgaatgtggaaccagatggcacaggcctcacctgcagcctggcacccaatatcatctcacagctctgaggccctgggccagattacttcctccacccctccctatctcacctgcccagccctgtgctgggggccctgcaattggaatgttggccagatttctgcaataaacacttgtggtttgcggccaaaacaaaaaaaaaaaaaaaagtcgac

SEQ ID NO: 929 - DNA, 357 bp, Homo sapiens
gggcagccatggttttactcacctctccttaccctttctaccccatcttgtggagaaagtctttctgcaaccccagcctcttcctagaatgttttgtgtgttttctttaacccaaccatcaaccacaaaccagaactgaagggctcctcccagggcacaccctgtgtagggaagggaggggtgggggagtccccttgctcctggctgtcacctctgtgcagattgtccccaccaccaccttcccacaggaggctccagctccagagctgcctccgccctctccagtccagcagggactttttcatctgccccgcccttgtcctggtgctgctgtagcagtagtgtgaccttggtaag

SEQ ID NO: 930 - DNA, 1938 bp, Homo sapiens
gccgagcagtcatcatcctcaggaagacaagattagatgcaccccggttggaaacaaagtccctgagcagctccgtgttaccacccagctatgcttcagatcgcctgtcaggaaacaacagggaccctgctctgaaacccaagcggtcccaccgcaaggcagaccctgatgctgcccacaggccacggatcctggagatggacaaggaagagaaccggcgctcggtgctgctgcccacacaccggcggaggggtagcttcagctctgagaactactggcgcaagtcatacgagtcctcagaggactgctctgaggcagcaggcagccctgccccgaaaagtgaataatgcggcggcactgagtctacccgccgccctcctgggaactctggctcatccttacgtagttgcccctccttttgttttgagggttttgtttttgttcattggggggtttttgttttctgttttttgttttttttgattctatatatttttccttggttttgttgcctgttagggctgaagaatagaattggccaggacctaggttctcatattcttggtattcctcctggatggaaaggctgttggcatcaataggggacagaggctgatgctggagtggccagtagaggtggtggagcagagcagccatcttttaagtggggctgtatcaggctgggtttatttaaaagcaacaaaatgttttggttaagaaaattattttgctttcagtgtaaatcttcgcagtgttctaaacaaagttcagtcttctgctcgcccctttccctcactgatgtctgcacttggttgaggtctcctggagcctcacaggctctgctgttctccacttctcacctgccatccacgccctgcaagctcatgcaaacaccctttcttcctcctgcggcagagttgttcaggttgcctgggcaggggcttaaacagtgccagcccctgccatcccaaagctattgttaagccccccaggcgtcctccacccacgcccactagcctggccatgttccacagttccttgggctgctgaggggctagtgcagtggtcctgacctctcttatcaagagcacacttctttgctggttgctccttttgagcatatgccgtgtgattatttggaacagttagacttgccacgttgggtcagttttagaaattgtttctagctagagggactggtgtccttccaagtctagcatttggggtatggaaaattgttgtggtgtgtggtagggtttttgttttcttttttgagttttttttccccctttagtctcctggctttttcctttcccttcccttctccactggccagcttgggcctcatcctcatgtcatccttctaggaaggcgcctgccccatcttgtctgccggcagcatgcatccaaggccagagctcaggcctgcagactgggctggtgcctcctccgcttcagggtatgggagttggtgaaggggctttcaaaaaataataagaaaaaaaaggtaaagtctttggtagcttctatccactcagatcctggaaggcagcaaggttttgtggatctagattcattaggaatgtcttcttgtcagccaggccaggacccgggcttgccaagagcagaggccctcccagcaaccaggataccaccactttgggggctttgtgtacagaggtccgggtctgagacctcataggctgcagaaatctggggcagccaccatcaagaagcccctctcaggggccagaactcctttgccagcgtggatttctcaagtcgggactgcataattaaagcagttgcagttttattttttttacagcttttttcccaaaaatgatttgtagttgtgtgtgcagcacttcgccctgatatgtgtgctctacaataaaaaccaaatctaatatattttgaaaaaaaaaaaaaaaaaaa

SEQ ID NO: 931 - DNA, 5647 bp, Homo sapiens
gctttgaaatgaggctcagtgagttattgagaaaatccgcagagcacactctcgtagacatggtgcagctgctcttcacaaggttacctcagtttaaagaagaacccaagaactatgtggggaccaacatgaagaagctgaaaatgagagccggaggcatgagtgattcatccaaatggaagaaacagaagagatcccctcggcccccacgccatatgaccaaagtcacaccaggttcagagctgcccactcccaatggaaccaccttatcatctaacctcactggtggcatgcccttcattgatgtgcccactcccatctcctctgcaagttcagaagctgcctcagcagtggtcagtccctctacagacagtggcctggaattctcctcccaaaccacttccaaggaagaccttactgatctagagcaacctggctctccagggtacagcacagctacagagcctggaagcagtgagctaggtgttcccgagcagcctgacctccaggaagggacccatgtggaaaagtcccagtcagcatctgtggagtccatccctgaagtgttagaggagtgcacgtcccctgccgaccactctgactctgcctctgtccatgacatggattacgtcaatccccggggcgtgcgctttacacagtcctcccagaaagaaggcacagctttggtcccctatggtcttccctgcatccgcgagctcttccgcttcctcatctccctcaccaatccacacgaccgccataactcagaggttatgattcacatgggactgcatttgctgacagtggcccttgagtcagcccctgtagcccagtgccagaccctcttgggcctcatcaaggatgagatgtgccgtcacttattccagctactcagcatagagcgactaaacctttatgctgcttccctgcgagtatgcttcctactgtttgagagcatgcgagagcacctcaagttccaaatggagatgtacatcaaaaagcttatggagatcatcactgtggagaaccccaagatgccttatgagatgaaggagatggcactggaggccattgtgcagctctggcgcatccccagctttgtcacagagctctacatcaactatgattgtgactactactgttccaacctctttgaggaactcacaaagctgctgtccaagaatgccttccctgtgtctggtcaactctatacaacacacctactatctcttgatgccctattgacagtgattgacagcaccgaggcccactgccaggctaaagtcctcaacagcctcacccagcaagagaagaaggagacagccagaccaagctgtgagatagtagatggcacccgagaagctagcaatactgagagaactgccagcgatgggaaagctgtaggcatggcctcagacatcccaggcctgcatctgccaggtggagggcggctgccaccagaacatgggaaatcaggatgcagtgatctggaggaagctgttgactctggggctgacaaaaagtttgcccggaagccaccccgattttcctgtctcctgccagatccacgggaactaattgaaattaaaaacaaaaagaagctgctaatcactggcacagagcagttcaatcagaaaccaaagaaggggattcagtttctgcaagagaaaggcctcctcaccatcccaatggacaacacagaggttgctcagtggctccgagagaaccctcggctggacaagaagatgattggagagtttgtgagtgaccgcaaaaacattgacctgttggagagctttgtgagcaccttcagttttcagggtctgcgactggacgaagccctccgcctctacctggaagccttccgtttgcctggggaagcaccagtcatccagaggttgctggaggcattcacagagcgttggatgaattgtaatggctccccatttgccaatagcgatgcctgcttttccctggcctatgctgtcatcatgcttaatactgaccagcacaaccacaatgttcgtaaacagaatgcacccatgaccctggaggagtttcgcaaaaatctgaaaggtgtgaatggaggcaaggactttgagcaagacatcctggaggacatgtaccatgccatcaagaatgaggaaattgtaatgcctgaggagcagacaggcttggttcgggagaactatgtgtggaatgtgctgcttcatcgaggtgccacccctgagggcatattcctgcgtgtgcctactgccagctatgatcttgacctcttcaccatgacctggggccccactattgctgctctctcttatgtctttgacaaaagccttgaggagacaatcatccagaaagccatctcaggcttcaggaagtgcgccatgatctccgcccactatggcctcagcgatgtgtttgacaatctcatcatctctctatgcaaattcacagctctcagcagtgagtctattgagaacctgcccagtgtatttggaagcaaccctaaagcccatattgcagccaagacagtattccatttggcccatcgtcatggtgacatcctgcgggagggctggaagaatatcatggaggccatgctgcagctcttccgagcccaactactgcccaaggctatgatagaggtagaagatttcgtgggatcccaatggcaagatctctctacagcgggaagagacaccatcaaaccgaggagagtcaacagtgctgagctttgtgagctggctaacactgagtggtcctgagcagtctagtgttcggggcccatccactgaaaaccaagaggccaagagagtggccttagagtgtataaagcaatgtgacccagaaaaaatgatcacagaaagcaagttcctccagctggagtcactacaggagctcatgaaggctctggtctcagtgacaccagatgaagagacatatgatgaggaagatgctgctttctgcctagagatgctgctaaggattgtgttggagaacagggatcgtgtgggctgtgtgtggcagactgttcgagaccatctataccacctctgtgttcaggcacaagatttctgcttccttgtggagcgggcagtggtggggttgctacgcctggccattcggcttctccggagagaagagatcagtgctcaggtgctgctctccctgcgcattttgctactgatgaagcccagtgtgctatcccgagtcagccaccaggttgcgtatgggctccatgaactcctgaagaccaatgcagccaacatccactcaggtgatgactgggccacactcttcacactgctggagtgcatcggctcaggtgtgaagcctccagctgctctgcaggccacagccagggcagatgcacctgatgccggggcccagtcagatagtgagctcccatcctaccatcagaatgacgtgagcctggatcgagggtacacttccgactcagaggtctacactgaccatggcaggccgggcaagatacaccgatcagccacagatgccgatgtggtcaacagtggttggttagtggttgggaaggatgacgttgataactccaagccagggcccagccgcccaggcccttcacccctgatcaatcaatacagcctaacagtgggactggatttggggccacacgacactaagtctctgcttaagtgtgtggaatcgctgtccttcatcgtgcgtgatgctgcccacatcacacctgacaactttgagctctgcgtcaagactctccggatctttgtggaggccagtctgaatggcggatgcaagtcccaggagaaacgtggcaagagtcacaaatatgacagcaaagggaaccgcttcaagaagaaatccaaagagggatcaatgcttcgccggcctcgaacctccagccaacatgcctctcggggcgggcagagtgatgatgatgaggacgaaggcgtgcctgccagctaccatacggtgtctttacaggtcagtcaggacttgctagacctgatgcacaccctgcacacgcgggcagcctctatctacagctcatgggcggaggagcaacgccacctggagacaggtggccagaagattgaagctgattctcgcaccctctgggcccactgctggtgccctttactgcagggtattgcctgcctgtgctgcgatgcccggcgccaggtacggatgcaggcactgacctatctgcagcgagcactacttgtacatgatctgcaaaagctagatgccctggaatgggagtcctgttttaacaaggtgctgtttcctctacttaccaagctcttggagaacatcagccctgcagatgtgggtgggatggaggagacccggatgagggcttccacattgctctctaaggtcttcctgcagcacctgtctccactgctgtcactctctacctttgcggccctctggctcaccatcttggacttcatggacaagtacatgcacgcagggttccagcgacttactgtcagaggcgatccctgagtctctgaagaacatgcttctggtgatggacacagcggagattttccacagtgcagatgcacggggaggcggcccctcggccctctgggagatcacctgggaacgcattgactgttttctccctcacctacgagatgaactcttcaagcagaccgtcatccaggaccccatgcccatggagcctcaaggccaaaagcctctcgcctcagcccacctgacttccgctgctggcgacactaggacacctggccatccaccgcccccagagattccatctgagctgggggcctgtgactttgagaagcccgagagcccccgagccgccagcagcagctccccaggatcaccagtggcctcaagccccagcaggctgagccccacccccgacgggcctccacccttggctcagcccccactgatcctgcagcccttggcctccccactgcaggtgggcgtgccacctatgactctgcccatcatcctcaaccctgcgctcatcgaggccacctcaccagtgcccctcctggccacaccccgccccacagatcccatacccacctctgaggtcaactaaggcaggtcactcagagatcaggaccagtgcttcccaccaggctttccttgaccccacttctggctgtcctgcgggccacaagctcttcaggccaagtcagagctgctgttgctgccacttggatggggacctgaaaaagagaatgttgatagccccagctaagacccccaatcagctgtgggacctttttcctcctctgcgctccattcctgggggttcagcctgagagtgaactcagctgtcatctgcagcctctgcctccagcccggcagctctggggaggcatccgtgtgccggccctgcagtgcctgcccacggtcaggcattgaaaactaagcccaaccactctgcactttgtttcccactcccattagccctgggccacctcctccagttcttcctcttttactaattagttggtcagtttggagagttgactggcaccatggagggtaggcaggtgggggctgggtgggggactgcccacaggagcatgtacatatggaaaaacagaacaacagtggactttttatgatataataaatgtcttagtaccagcaaaaaaaa

SEQ ID NO: 932 - DNA, 868 bp, Homo sapiens
atttgctgcaaagttcatgagaaaaagaagaaaaggccaagattgtcggatggaaataattcatgagattgctgtacttgaactagcacaagacaatccttgggtcattaatttacatgaagtttatgagactgcatcagaaatgatcttagttctggaatatgctgctgggggtgaaatctttgaccagtgtgttgcagacagagaagaagcctttaaagaaaaagatgttcaaagacttatgcgacagattttagaaggtgttcactttttacacactcgtgatgtagttcatcttgatttgaagcctcagaatattctgttgacaagtgaatctccattgggtgacattaagattgttgattttggcctttcaagaatattgaagaacagtgaagagctccgagaaattatggggtacccctgaatatgtggctcctgaaattcttagttatgatcctataagcatggcaacagatatgtggagcattggagtgttaacatatgtcatgcttacaggaatatcacctttcttaggcaatgataaacaagaaacattcttaaacatctcacagatgaatttaagttattctgaggaagaatttgatgttttgtctgagtcggctgttgatttcatcaggacacttttagttaagaaacctgaagatcgagccactgctggaaggaatgtctaaagcacccctgggttgacacagagcagtattcaagagccttctttcaggatggaaaaggcactagaagaagcaaatgccctccaagaaggtcattctgtgcctgaaattaattcggataccgacaaatcagaaaccgaggaatccattgtaaccgaagagttaattgtagttac

SEQ ID NO: 933 - DNA, 240 bp, Homo sapiens
gacaagatgtcctgtccaccactggcaaagacagggagtagctatttctcctatgctgtgcctcaatcttctcacccggggaaatggtgcttcccttcctactttatggagcacttatgaatatctaactagaagtgaatataaaagctctttgaactataacacatgataagctactcattgtttcagagattaccccagttttataagagatcacaaaaaaaaaaaaaaaaaaaaaaa

SEQ ID NO: 934 - DNA, 305 bp, Homo sapiens
gctctgaggcactagggtaaagctgcaagtatgcagtctgtggtcacactggctacgtagtgcgctactccaagaactgccattcacaatggctacactgtgaatggtgtttcctggagttaagcattgtgggagcgccgcactggaggtataagttggagatccagtttgaggaatcactggcataatgggaactgctgaaaaaagggaatggatgagaccacctataaaaaaggaatgtgagaaaaagttcttatcctgaggtcctgtattagtacgtttttcaaactgctataaagaactgc

SEQ ID NO: 935 - DNA, 971 bp, Homo sapiens
tttttttttctcactagagcctagggcactttattagaaaccaagtatatcataggcaaataaaaatagtttttacccccattgatacaacataagggattttacattcagcctagatatagggagtaacaaatcctcctgcccataaatctatgacttgcaagtatcttccaccacatgataactctatatagtacatatagtacatagcccttatttattggagggatccaaaatattccttgtaggctcacaaagtccaatacattagctctctcttccctttacacgtctaatagtaaaaactattttttccatgcaaaaagccattattcagttgaagagaaatcaggcaaaacagagatggcagataaggaatggagagaatattattggcacgtgcccaactagtgacaaacaaatgcagtacacaatgacttaaaaataaaagtcacattatagggataacaaaaacaactacatcaatctaagctaaggagtgtcaaacagggagggctgggagttaccggttctattagtacaacttaagtggaaagcaagcacttaaatacaatttatggtaacaggaaaaaaaaaaatactgcagagagctgttcaaagaccacaccaagttgtctgcatcattaatttccagtgtttcacaattagtaaaatacatagctacatatccctgtgagataaaaatacctttccacctgaattacactgggatcagggcagtaacacgaagctactgacccaacattagttcaagtgtgtgcagcaaatgtcttagccacctctttcatatagctatataattaaaaactatgtaaggagctgggtggtttgagggaaaaaaattaaatcaaaacagtattgtgctcaattaataaaagaaaaccctgatgaaaaattatatgccaagaagcttagactataaagatttttattgcatttttaggtaacct

SEQ ID NO: 936 - DNA, 1013 bp, Homo sapiens
ttttttttttccaaagccaaggttttttattactggtcaaaaggtgctcgctaacaaaacagtgttggggagaggtacattccacagctctgtaggagccccagtggcgcatcctgccccaccccgccccgccctctccagtgggcattgtaaggcatttcacacattggtgttttcactttttttttttatatatataaaaacaaaaccagtcctggagtagaaagaaagaccctgtgatgaacttttaggactaaactgaaatggaaaggattggagtgtgggattctgaggggctgggtccagtggcccatggtggtccagcccccatggttggcagaagccgctggaagggggcatgaggagagggaagggcacagctcacatgagggccaaactcagacaggtgcacccgtcttcatcattttttcacttttacatactgtagaaatttaagcaaaatagctattttatatatatttatatatctcatatatatatatataaattaggcaaataaagagttcaggggacactgagatggggcacccctaggggcctcctaggatgaggagggatgcaaggtctctggtgcccagggtcaccagcccaggctgggccaagggtttgttcattattgctgatttggggcctgggtctcagggcggggagcacctgcaggccctgccttccagcccttcctggcctcttggggctagggagccacccaggctggctagggtgaggccagggactgctgccctcaaatccacatgggggttaccatcagtaccccctcctgcatctgtggatgggagctccagaaactctgtgctctgctggggctggggcagcccccttctgttttgggctctgtggggccttggcaggtgggggtgtgggcagctcagataccatcgaggacttgatatgttgagctacaaaattctcccaactcaaagcggtctggcttcctgatgtcttaaaaataaggggctcttgcccaggacacc

SEQ ID NO: 937 - DNA, 167 bp, Homo sapiens
cgtggcctaaacctgaagttctcgtacgttagtaggcatgaataccttgttaagaatctgggccactgatatcagccttccaatttccaccttaatagtgtgctaagtggagaatttcgagctcataaataaaatagtcgccaacccacaaaaggaggtgtgtggtc

SEQ ID NO: 938 - DNA, 376 bp, Homo sapiens
ttttatttggcaaaaaaacttctgaatttaataaagaaatggcaacaactggtacgtacagtaattcaaaatcttttcactaagcaccaaataggatagttctcaatcttctcaagaacctctttgaaagaacgcctaaaacctaatcagtttatttaggtttttagtcaagaaatacaaagctgccaatcagagtttctaattaccatgagtgaccaggttagcaaccttgaggtcataccacatgagcttttaaaagctttgtttaacctatacgttgtaactgaggggatttgttgatgtcaggctggtaatcagagatccatgtgccagataccatatacacacaccaaaaagatacaggattatatggtcc

SEQ ID NO: 939 - DNA, 1096 bp, Homo sapiens
  misc_feature (1)...(1096): n = a,t,c or g
tctcccctccttgaagaagccgcggacacgggaaacccacggcgggcaagggcccagctgtgtgctcctttcctgtcatggcatctgctgatttgaaactccatgacgaacacgttgaactaaacatttttatttaaatttgtatcatgttcatagttgctctcttgttgagagagtcatctgtcctgtttgttaggggtattttttcttgttaaaatgtatctcctgttgaatactcgggaaattcaaagggaagtgtggtcagcacacactgagcgttcttttctggagaggccggttttagcctcgtacctttagcaggaccgatagcgggtggaagggcccgtgtgctggatgggggtgtcgcctcctggatggcacaccctcccgagggacatccagacaggctgtgtcaccctccagcactttatgtgcctgctctgaggtgtcctgaacacacagcaacggcctctccttcatcacaggccggggattccttttgtgtttctgtataacatcgatgacgagctgaagctgttgtcacttcactgccctctttggaatttcttcattgtgctgactgattctattaggggctaacaataaaggcagtctacccactacttatcatgcttgggaaacaagcgtcagcttgtacatatgacaagagaggaccctgaatanaccctctcttcatcagcccaagccttactgaggtgggatgaagacctcattctctgttctttaaaacatgtttcgtgaactaatattggtccatgtattttttgtccttttgggactctaagtgggtcaagaagcaaaaacatccatgtgttgtttggggggaattggcaccattttttcctgactatgtttcaattaactaaagaataaatgatgaagaaattctccttgtagcacaactgtatgctgtgtaaattggtgtgagctcaaagcccagtcatgtgttttacctgtgggtgactctgttgtagaatggtcatattactgcatatgttatcatgacaacttgtgagtttgagtttatatttctcaaagaacaagttacccgtatatgcaacattgcgccattaaa

SEQ ID NO: 940 - DNA, 428 bp, Homo sapiens
  misc_feature (1)...(428): n = a,t,c or g
tccaattcatatagtcttgtattatatacatattaacagtctatgcaatgaaaaataaagaaatttcataaaactatttcaaaactcagaacataaaaatgtaaagaaacaaaacatttaatgtacaatctactccatttggcaatgtgtactgagagataaaaaacctatctacaaacagaatataacaaaaggaaaatgtgacttaagaagtgatctcaggtccatagctcttcggttcttccaaatttgtagatcagagtgctaaaaaatataagtgcattttgaaaaaacacagctagtcccggataaacatcagtattttgggtaacatatgcaccaaaaagaatccacatggaagcaataaagtgacccaaacatcaacatgaaaccantgaaaagccaaactcgagcacctgttcttccta

SEQ ID NO: 941 - DNA, 462 bp, Homo sapiens
  misc_feature (1)...(462): n = a,t,c or g
gaccagctctaattccagaatgtgttcattaccccaaaaggaaacactgtacccattaagcagttactctgtattcccctcttccctaatccctagcaaacgccattctgctttctgtctctaatttgagccaacatcgaggaagagtactctgtacaattgaaattgcagaaaaaactttgggatgtgattgttaggaataaaaaaccacctaattctttgcatgcttctctaagtacagtaggacatgctgccaggggactctttatgggaaggaaaagttgaggacttcataggaagtttggcagttttgtttaggatccaccccagagggtttttggctccaaactcttaggactcatttgtatttcttcattgggttataagaactaaaatttaatgttctatacaaatgtgaacanctaatacttggnctcctatcnaaaacttggttgcccttta

SEQ ID NO: 942 - DNA, 940 bp, Homo sapiens
tttttttttttttttcaaacttaaaagggatttatttgtgatttcctatatatatttagcttgtaaatacaagactgtaaatgtattaagagacaatttctgttaaagttttcattgtgtttcacttcaagtactgcacaagttaaaatctgataaaggatttacattcggttatctgaaactccccatctcagacttttgttttaatgtggtgggtaacttcatcatttccatagataccaccagcaggaaagtgtctcttttatggcttctaggactttcattagttagtgtgcatacagttttcattttctatatcattgtcattatcattgctatcttcatcactttctaatgggatgccagtggcagctgaagcacctttagtttctcggtcaagaggaaaaaagccagttccactgaaagtgtcttgtctctggtagaagagtacatatgctgctttggacacaatttggtcttcagatgcagtggagacactactgtcatcaaaatagtaccattttccatcatctttattttttgcaaaagcagtatagtgtcctcctcccatccctccatagtggttggaaacagcaatcagattatagcggcaaggacctgcatttggattaattaagaattccgacatatccaagtcattgataggaaaatcaactaaggtatccaacttgtctctcatgtatcgactgtaagaaaatcgcttgagatgtactacaagtactggaggcagggaccataaatccaatttctttgtggcttgctgatgttctttacaattcggacaataccagggatcttcagcacctagcttttcttttgttgtaaaaagttcaatgcaatcttttaatttcacaaagggttttttaggaggtttatactccacactttcatgtttttcaaagtcctcagcagcattttc

SEQ ID NO: 943 - DNA, 227 bp, Homo sapiens
ggtaaaagcaacccacagctggaggaatttgaagttgtggtgcactgaaggcaactagagccaaacaaaacccaaacccagctcaactactgactagattgactcaactcccatactaattgcctgaaagaagaagatatgtgtctatttcagggtatagataccacttacctcagtctttattgtttttctacgcacagcatgcaacattcaataacgaattatgg

SEQ ID NO: 944 - DNA, 418 bp, Homo sapiens
  misc_feature (1)...(418): n = a,t,c or g
aaaaggcactggaagaagctgcaaaacgtttccaggaattgaaagcacaaagagaaagtaaagaagccctagagattgaaaaaaactcaagaaaaccccctccctacaaacacatcaaagctaacaaagtaataggaaaggtgcagatccaggttgctgacctgtcagagattccccgctgtaactgcaagccagctgatgaaaacccttgtggcttggaatcggagtgcctgaacagaatgttgcagtatgaatgccacccgcaggtgtgcccagctggagatcgttgtcagaaccagtgctttacaaagagactataccctgatgcagagatcatcaaaacggagcggagagggctngggcctcaggaccaaaaggagcattaagaaggtgaattttgtaaatgatacctccgtga

SEQ ID NO: 945 - DNA, 285 bp, Homo sapiens
  misc_feature (1)...(285): n = a,t,c or g
ggtatcacttatattttgtaccaccttggaaagaaccacctatcatgtttgcttctctcaggaatcttcgtctgtgagacaagaagctattatatgtagtgagtgacccattgactctgaagaagagcatcttctcttaccttggcaacacttgaattgtgctgtctgggattaaggaagcaatctctcctcnnnnnnnnnnnnnnnnnnnnnnnnnnnnnnnnnnnnnnnnnnnnnnnnnnnnnnnnnnnnnnnnnnnnnnnnnnnnnnnnngcacagtggtgc

SEQ ID NO: 946 - DNA, 434 bp, Homo sapiens
  misc_feature (1)...(434): n = a,t,c or g
gacagggatgagccaccataccgagcctcagaaatgcttctgaaatgcttctaaaatgtgctacataattccatcttacacacaacatactttatcctccatgattaaaagtcattaaggatactatcttagtcttcagctgctgtgtcaaactatcataaaccagatagcttaannnnnnnnnnnnnnnnnnnnnnnnnnnnnnnnnnnnnnnnnnnnnnnnnnnnnnnnnnnnnnnnnnnntgttgtcttgctataacttcacatggtagggggcaagatagccctctggggcttttttctttttccttttttgtaattttccttttttctgatagttttgatcagaggacaggactttttataagggcactaatgaccttattactgtcacannnnnnnnnnnnnnnnnnnnnnnnnnnnnnnnnggagaa

SEQ ID NO: 947 - DNA, 1831 bp, Homo sapiens
aactggagggtgggttggggaggggtggatttttaaaatgtcaagacagggaaggatgacaaaatggaaatttaaatgacatcctagaggtagagaaaccgtggagatcgcttttctcagactcaccaacttttaatgggatttcatggggtttggttgtgctgatagggtaaggggaggctgctttctgcccttctccccactcccatctgatttacttaattcagtgctcagctgctgaaatttggaaaggaccaaattgctttacagtttttttctttgtgtagtatcttgaaatcctgggaaaattctatggaatagttctgtatatagggcacaagtaaaggcattgtccaaagtttatttatttatttattaccctaaggaatgctttgccattaaccacatttaatgggaaaaacggcagtatcacagatgtaaattaactcaccagatttactggggcctggaactcattctcttcttgctatatgatttagcaagttctaggaaggtctccaaggacaataattacattgggcacaatgtattacttcagtggcttcacccgtagggcaaatctctttttaaaaaactctttggtgcacaagttaacacatttggccacaaaacaccaaagaattgtaggcagtggcccctattgagaagttttccggtagagttggaaatcagttgtgaatacattctttgctagttggagtgcttgtttactaaggcatgtgcccgtcgtaggtattagtgctagtctcaaataggtgcttcccctgaggtgcaggggaagaccaaagtttgcaactcgaactggctttcgtccatgtttctcacattgctgtattttagaaaataggggttaagactgataacaaccttttacattgtgactgtgtttgcattgtctaatgacagataaatccttaacatttctctccaccttagtactttagactaattgtgtttgtccgtccatgccatgaatgagtgggctgtagttgggcctaaataaatgagctgttggaagaaaagaatcacagtactttccagcagtcagtccctggttcctagatgtgttctaagcaatgcaaatgtctaattgtcccccagtgggcatagtcagtgtcgtttatattgtagcagttacagctctgtagtttatgatgcaaatctgccaagagagatgtatgtgtcactgcatggcttctgaaagcaggatgaattttctgcagctgtttcaaagttggggtctgttcttgaatcctctattaattactgtgtgtgagccagagggagctgtggtaagggttgggcccccagcctgtagggaactttctggactcccactctttgaatcgatataggcatttggtctcactacttgaccattctcaccctgtgaaacgtcccacactttgaagcaaatacaattcacagcacagtacacacaaaaaccttggcataagacagagaaggttcttcttattttgtgggctggttgctgtagaaacacataacaaagggcagccctccacttctggtataattgtgtagccccttttctttgggcttgacacctgtcttgaataagagtgattagagctgcataatgtccctctcttggctattgaccatgtggttcacgtacaaaactctgtataagttgaaggaaaatgttcatgttcatatgtacttgtttgctatgactacattttgaggttttgtaaaactgttattttttttttttttcacaatgtgaaactgaaggtcaataaattattagagattttctcttcaaaaaaaaaaaaaaaaaaaaaaa

SEQ ID NO: 948 - DNA, 570 bp, Homo sapiens
tttttagcttgaaacaataaatttattcccatagttctggaggccaggaagtccaatatcagttttatcggtatctgtagggccatgctcctgctggaagaggctctggggaagaatctgttctttgcctcctccagcttctggtggctgtcagcattcctttgctgcggctccatcactccaatctctgcctctgtggtcactgtgctttctcctcttctgtgtggtaatatctccctttgcttctgaagttcagagtgttctttcaggagttgatcatattctttcgaaagtctctctgactgcatcttcatttccatcacatcattttgtgccttagaaagggcatctgaagtcttccttaattcagttttcagtttctcctggtcttctactagttttttattttctgcttccaaaacacattcttcatctttaccatggcttttcaaaatcctttttagtttttcgttttcttccataaattttttggcagccttgttagtattttctgcttgagttttaagtacacctttgtttgacagttcttttgccagttgagtaataagc

SEQ ID NO: 949 - DNA, 1548 bp, Homo sapiens
taaaagcaaaaagcgtagtttctgatttatgttatagaatgatactgattagactttgagccaaggggaaaatactaaattcttttaaacctggagccttagagagccacaggaatatcttctgttgtacagtctaataagctgtggtaggaagtatcatgtaatcacagtttaatgacagtttatgtatatatataattcagtattccctctgataacatagttgccagtgtttaatacacttgtaacttggatttttaccttataggctatatgtatactcagttttttaaagcatttttttcagagatcacttaattccccatgcttctgcaatgcatataaaaactataaatgccgagtggtagaaactcctctttcttcatagtcctcaggctttggttacatttgcatatgccatttgaagcctccagcttttaccagtttaacatccaaagttcacagcatcagcattcatggtgtaagaacagttttgcagtataacacgatctgataatcattcagttattaaattgtaaataattattgggatggtttcttggctttaagtccactgaataaaaactatgaaattgcactctgtgtcaaccatccactaggatagaataccgaaatctgtgcatgcaaaaataggagatgggcccatttgcacacaattcgtagttatgcagtctgctatataaatatgttcacatgcactgtgtgtatgaaaatagatggtctgtgttcagacaaaagtaaaacatttttttcaaattgttacatttaaaggttttctgggagaaatttatgaaacgcaggctgtgtctatttgacatcagaaatttccactttaaaccaaaataataagaaactttaatctgtatatttacaacctttgttgagtacacttcccccttatttatacgtctgcatttccttccgagcttcacatctttctaaaatgcagcttggttttaaaataaaagaacattcattttgtgattctaaacaagcttcagtaaataccaccagtatagtactggtgaatttctcagcataaaatcgacatacctaaaaagttaataaaattcagctcttttccaatttcattgttatgcctattgaagtattaattgccagggtttgatttttagtgaagcttgggagtccatactttgagcagaccaagtgaagggaagaacagaaagaaactcaggagtagagtaatatcacttctcacttacaccactttcaggcacatccaaagagttcctagatacttggaaaatgtctgaaaatttttaagtaaaatactaaacttttcagtgtttagctcaactttttgttcatttggaagtttctctccatccgaggacttaagccagttttggatttgtaagccctgagtacaatacacttcctggaggcatcctcactgctgttgaagcaaaggatatgcatggggtggaaggacggcttcgaacctgggactcatatgccttgagaacaaatagattgttacagccttgggctgctgcgtaatca

SEQ ID NO: 950 - DNA, 417 bp, Homo sapiens
gattttgtgcacattttccctggcactctgggtttgcctaaccccgccgggcaactgggcctcagacactgcgcggttccctcggagcagcaagctaaagaaagcccccagtgccggcgaggaaggaggcggcggggaaagatgcgcggcgttggctggcagatgctgtccctgtcgctggggttagtgctggcgatcctgaacaaggtggcaccgcaggcgtgcccggcgcagtgctcttgctcgggcagcacagtggactgtcacgggctggcgctgcgcagcgtgcccaggaatatcccccgcaacaccgagagactggatttaaatggaaataacatcacaagaattacgaagacagattttgctggtcttagacatctaagagttcttcagcttatggagaataagattaga

SEQ ID NO: 951 - DNA, 355 bp, Homo sapiens
  misc_feature (1)...(355): n = a,t,c or g
ggagctagcacctgagctcagccctgcacttgggacccttccagattacttctttatctggctatttatttgtatcctttaaaatgtatttgtaataaatcagcaatggtaactaaactctttccccatatctgtgagacactagcaaatcatcaaactgggcggggggatcgtggtagcctttgatttatagacagtcagaagtgcaggtgacaacttgaacttgagattggcatctaaagtcggggtagggacagtattatgggactgagcccttaacctttgggatctgaggccatatccaaataggtggtatcagaattgagtttaattgtaagacacctgnctgctatca

SEQ ID NO: 952 - DNA, 791 bp, Homo sapiens
acacccacctgaataaattctgcacccagtctggcaaacatttattgactgctttctctgcatagaacaaccggccagcccctggactccagaggcccaccatcattgttaagagacctacatgcatgaaccaatcacacacgtgctatgagaatagagaaaagaaataagtaattctcacagacactgacaaactggaaaaaacttctttcatcccaggtactttatggctgggatcaaaggggtgactcacttgtttgcacaggaaacaaaaggcaaaaggaagtgttggcatcagttttccatctgcacatataacccccattcctccatgaattgcatgagataggtttcattttctcctggtggcctgtctggagccggctcctcatagagtctagatagaagaccctcctctccgagcccatccccctcagaaggctcgcagccctctgaatcctggtcgaagctggacagcgaaggaatacacagcctgccagtttggggatcccagtcgaccagggtcgtcgatggctcttcctccggcccctcctccgagtctgtgtgctcctgcgccagggggtctaagtcttggagctgaggggtgtatgagtactgtaacgtttgcgggcccaagactgccaacgctgcctgcgactccaataatgttccttgtgtggacacctcctcctgcaaactgagctcctgctcttcaggccccgcacaaatgtcagtggttctgacatcatattcatattcaatgactgttttatccgggggtattgttctgc

SEQ ID NO: 953 - DNA, 721 bp, Homo sapiens
  misc_feature (1)...(721): n = a,t,c or g
tctaactccgcaatccaggttaagctatttttaatgcccagactaatctataatatttcccactcccaacaggaattgagaaagggactccagaagttgggggcttattcagacttcttaaaagtctaccttcttcctctgtactttcagcccaaagtgagacttttgagttgggaagagatacttctgaattaaactactaatcactgtcacccaattctaatcccaaccatctttattctaggcataccatactcactgccatgcttacccttcagttgggcacctgtgtcctccttcccattggccttctggtcctacccaagtgtccagtccacgggtctcagtaacacctctttgcccagccctgtggtagcgttggctgcctcctttacctactcaagtaaccgctttaccactaatttattgttttgtgttttcatctataggatcttacctaggccatatggcctggctgcctctgccaatttaaaaataggcattgagggctgtcttgcaagaaggttcaaggctggcatttgcaacactggcatggtctggacttaacaggcatacatttgttcctggaaggaaggcatctgtagggggggggattccaggaagggggggcgttttcatggaagggnggttttacaaggcccgggaaggcagggcacattgagggacttcaggctngactattttgaggtccgggagnggg

SEQ ID NO: 954 - DNA, 476 bp, Homo sapiens
ggtgagaaagtagaaaacaaacaagtgcttgtaaataagtccatgcccacagtgactcagattcctttggaaggaagtaatgtaccacagcaaccacagtacaaagatgtacccataacctacaaaggagcaacagactcatatattgaaaaagtgatgatatcttcaaatgctgaagatgcttttctgatcaaaatgctgctgagacagacaaggcgtccagaaattggagacaaattcagcagtcgtcatgggcaaaaaggtgtttgtggcttgatcgtcccccaggaagacatgccattttgtgattctggcatctgtccggacatcatcatgaacccacacggcttcccatcacgaatgacggtggggaagctcattgagctgctggctgggcaaggccggtgtgctggacggcagattccactacggcactgcgtttggaggcagtaaagtgaaggatgtgtgtgaggacc

SEQ ID NO: 955 - DNA, 223 bp, Homo sapiens
  misc_feature (1)...(223): n = a,t,c or g
ttaaccttctatcatatttcccagtaacaccttccctcctacatttctcctagaagcccttaaattttgtttttcacatatcgtttaaaacttttaagtgctgatgtctgtctgtgtcatccctcttttttttttttnnnnnnntttttggcnntttnaannggnccnnnccnnnaaaaatttngnancccggnaaaaaaacnngntgggcnanntnnttttt

SEQ ID NO: 956 - DNA, 703 bp, Homo sapiens
ttttcctttctattcttcctctaaatgttcaacacttttctgattttgtgatttgaggttgtttaatagcttcctgaggctccattgagatcgtatatacgtgacacttaacagtctagccttgcctcggtacatatagatatatgatggtggctttgcctgtagtaaattcatgccaaaaacataggctttcagtgcctattacatatgggctttcagctctctctactgagggatgtaggagtttatttctgaggtctgagcctcttttcctttacttcctttactctttcctaagccttctttataaaaactatgcatgttctattgttttccttttttgattccctttcttttattatccccagtaggagtgacttgtaattctcatatgttagaaaggcaggtctcctgggttgaagaaaagatccacccaagcaagtcagcatgtttaataatttttgagggggatctcaaatgtgggaaggattgttatataagacaaccaaatgatgacatgagacaataaatgctatagggaattatggaggaataattagctatttattttcttggttagggaagagatattattagttgtagaagtaattactaacttctacattttttattgtggaaatcaaaaatatatatatgacaataaaatgttataattgacttcagtgtcccataaaccagcttc

SEQ ID NO: 957 - DNA, 1177 bp, Homo sapiens
tttttttttttttttttattgtcaattattttattcaaatgtttggaacttaaacacaaaatcatcattaagttttcacaaaatgaggcatctgtcgcttgaaaggcaaaaaatatttcagaaatatgtttacagaaatgtaaaaatattaggcatcaagacagatgtgaacgtattcagtagcttgtcttgtctgtcagtcttcctctgagccgaagatcttactgtactcactcagcatgagctcagctatctggttctggtagaccatgtggatcgccatgtttcctgtttcattttcagctcgcagaagggtaggtccaaatacaatccccaagctttgcgtggacatgaggttcttggaggctttggccactatcttagttagatgtccaaagaggactttcatggtgtcacgatttggcggagggagtttttgtacaagagattttacagcttcaattcttgtgttgttgtcttgctttttgatcgcttccacaaactgctcaaagaaactgtaagggaagagcggctcaggcagctcccggaaaaacatcttcagtgctccggtgacaacgtggatgtcctcccactggctgtcgtccaaattcagcttctcttcttggttgacaataaatcttaacttctgtattgttgccagattgccactaactcgatatattccatcaacatctagacctcttttctcaacagcttcaatgcattgctttacaaaccacggaactgtggaattttcacgttcacacactttgtgcagatgagagccaaaaatttgatctttaataagtcctttttcttgcagagttttcagggaaggtcttcgggtaataaacttctttaatctgcttttaactcgatttttgtcgcttgtatcggaagcactgtgatgcagtttgaacattaaagattttatgtgctctggtttctgttcttttatatcactgtcatagtgacttagcaattcagtgctagaggatctttggattttgaataattccaggtttcttgatggacaacttgaatcctttggcaatctgtcaattgcatttttgatagcgtggaaccaatccaatatgatgaagtcaatatctgactgtagaaggaactcatttcctgatactgttgtgatctgaaagacattctttctgctcgattt

SEQ ID NO: 958 - DNA, 1458 bp, Homo sapiens
atctttgttgaaagaactcttttattctacctttttgcacaccacctctcatgaaaatggttcttgacaatgccttccgtctctcatctaccaagtgtcttacctagagaaggtatttaggacttttgaataaattcaagactttgctcactagtcagactgtaatttttagaaggaataggagcatcctgactagaagcgtgataaaacctggctatccagaaaataaagaatggctgctaactataaaagctgttggaagaaagggccttaaaatcttaaaagtctttgtattttaaccaaataccttcatagtgcaaatatgataaattcacatgcattttacttttacatactcataacaagatagtaacacagactaaagctgcagtgttttcccaagtgaatcttcattttaaccaaactcacaaagcatttatggaaattaatacatctggcaaagcaccagacttgaatcaagcagtctcaatgctacagtgtaaaaaaagtaaattaaaaaactcaagatgtagaagcagtagccatatcagcaaccattcttctagggaagggacccacatatacgatccttccccaagaactttgatgctaccccgctgaagagtttaagcacaaaacacagtgcttgtatcatataagtaaggactttcatagaggaaaactgtaatataaatgcatttttttttttttgcttttaaaggatactgcaatataaatatattaagcatggcctcaaatatccaacattttcctatcttacattttaaaccaaagttaaaagaacctacaggctttataaagaactctcttcacagcacagctgtagttcactttaaacaaaaaatgttccctttgtgctatatccttagaagtaaacataatatacagataaatgagaagtttcgattctgcatcaagcattattcaatctcaccttctgatataaacctgcatacagtcaaacttgcaaagcattcacttaatattttagttgaaacaaacttaaaaggtatatgggttttcggtgaaggagacctttgtgagttccagtggtgtccttggcactcagaggttcagctgaagtcccgactggtgaggacaagtggagccacaagggtccagacgtaaagcaggaggcagacccagctggagctgatcttgacccacacagctggccacttgctggtcatgctctgaaactttgcatcagggctgtaccagctggtcagggtcatcatgatgtacaaggaagccaagcagagcatgaggtggaataaggagtagctatactgcactccctctttctcgttgtccacagccccgccgaggctgtcccatcttcttcatcactggcaccactggtaagttgtatcaccaaggatgacgctgtcactccctgacagggtcagcttgtctcacttggctatagtgggaagt

SEQ ID NO: 959 - DNA, 448 bp, Homo sapiens
attttttcttccccaaaatgagaatagtagaaattttggtgaactgagcaccatagttatataatatttccctgcgaaggtctagtttgaagaaaaaaaaaacttgaaaacaaacctatgaggttgagcctggttgctataaagactttgggatggtatgtgtttctgggatgagctatatagaaagtttagttgactgctggaccttggatattcttactcggttcaaaatacacaaaaacaagctggtacatatggtgctttataatgcagtcgagagtaagaatacatgttgctgtagccccatttcctttacaaacccccgcacaatttcaaaagtgggaagttaccgtggcctctggtttcccagttcctccgtggtgtaatgaagtcccaggttttagaagctgaaggccaagcctagggtagcatcgtctgtacggtggtg

SEQ ID NO: 960 - DNA, 316 bp, Homo sapiens
  misc_feature (1)...(316): n = a,t,c or g
gccannnnnnnnnnnnnnnnnnnnnnnnnnnnnnnnnnnnnnnnnnnnnnnnnnnnnnnnnnnnnnnnnnnnnnnnnnnnnnnnnnnnnnnnnnnnnnnnnnnnnnnnnnnnnnnnnnnnnnnnnnnnnnnnnnnnnnnnnnnnnnnnnnnnnnnnnnnnnnnnnnnnnnnnnnnnnnnnnnnnnnnnnnnnnnnnnnnnnnnnnnnnnnnnnnnnnnnnnnnnnnnnnnnnnnnnnnnnnnnnnnnnnnnnnnnnncacctagcccagtgttggggcattcagtattaacataattaangaganacaattccttt

SEQ ID NO: 961 - DNA, 660 bp, Homo sapiens
ttttttttttccagaaacatatcgaaaactttactagaaatatagagaaaaaaaaataactgcctgggaggtttcctgtcccttcaggatggatgaccaacagatggggcacctaggtccagtggggctgctcccgatctactgtttcttcctccaggagcaaggcatctagctcctccagccgctgctggagcagggggcccacatcagggctgggggccacattgggaggaacagtcctgccccctgcagcccggaccccacgggacggtcttcgtgatcgaggaaggctgctgtcccgaaattccacagcccgccggagcttccttgagctggtgaaaatcagagtcccattgcgctcccggggttcctcaaagatggtctcaaaggtcctcctggttgtgggtgattggtaattcttgttggtgtaaatttcttccaagctgaactccttcttggttcaacctgattgggtcgaggcagtcccattggtgtaaggtttaagctgaggacgggctggtgttctgcgtattctgaatcgagaaacctttcccatggtcttggtctcaggttctgaaagcacctggtcctttgaggctcttggctccttccctttggttgaacccaacctgggttctgctggttcggagaaggaagtgc

SEQ ID NO: 962 - DNA, 1390 bp, Homo sapiens
  misc_feature (1)...(1390): n = a,t,c or g
ccgccccgggggccgccgccacccgcctcccaccatggctctgaagagaatccacaaggaattgaatgatctggcacgggaccctccagcacagtgttcagcaggtcctgttggagatgatatgttccattggcaagcctacaataatggggccaaatgacagtcccctatcaggggnggagtatttttcttgacaattcatttcccaacagattaccccttcaaaccacctaaggttgcatttacaacaagaatttatcatccaaatattaacagtaatggcagcatttgtcttgatattctacgatcacagtggtctccagcactaactatttcaaaagtactcttgtccatctgttctctgttgtgtgatcccaatccagatgatcctttagtgcctgagattgctcggatctacaaaacagatagagaaaagtacaacagaatagctcgggaatggactcagaagtatgcgatgtaattaaagaaattattggataacctctacaaataaagataggggaactctgaaagagaaagtccttttgatttccatttgactgctttctatgagcccacgcctcatcttcccctgtgcacatgtttacctgatacagcagtgctgcgtgttgtacatacttggaacaacaaactagaaatactgtacttctgtaccaacattgcctcctagcagagaagtgtgtgtgtgacaagccagttctacaggcattacctaggtgtgagactaaaagcttttcttattgacttaaatttggataacagcaaggtgtgaggggggtggtgggtatggtgtgtgcttggatgggaaagaaaaggctccactcacctataggagattatttttaagtggaatccatttaaactcaaaacagttatgaaaagcaaggtgaagaacatgaagctgtgtctgtattcattttattccgaaggagctacgtcttaggtgaaagttatgaccaaccagattaaactctaccccacatcctgcattttaaggtctaagtttaactggtcaacatttaaatggattggagctattagtacatcaagtgtgatgggctttgttcccaactcttttacatctccctaccccttcaacctttggcctttcagcccttctttctctcttccatattctttggtttgtatgtggtttctcagttaatacatagctaatagctcttatttttcttatgtttttaaccgcttaggtctatttggatgtaagggtgaaaattcatttgatggaaatacttgtgtatatttaaagacccaattgctcctctggagcttgtactttcaagaatgattaatctgtgtaataaactggttactacagtcattacatataaaaaaaaaaaaaaaaaaa

SEQ ID NO: 963 - DNA, 607 bp, Homo sapiens
ttttttttttttgtcacagacttttttttttttaaatatattcacggattaccagaaagatcttgaaaaaccctattttgctccatgaccagcacttcctggccgcagatggactctaagtaactttttgcttaatgcttggtgtttcaggtcggtgatccttcctctctgacacgttacgcttgactttggcagtgattggagaagtatccgggttcagcgaaggactcgagtgcgacttcttcagtcctgcagcctcgctttcatcgttactcagtagctctttgcctccttccttgagaatgctgacatacatttcatagcgggttttctcaaactccagatagtggtctttcagtttgtactcatcgacgtccttggctttgaccttcttgtcggggggatatgagcggtgctcggccagctcggtggtgatctgcttcagcttactttcatgtgacttcagttgctcctcctgagacagttttgttgtagtggcaggcagaagtgggcggctaaacttcttctgagagccgattgctgctggaaatggtggtgcagaaaatacagctgccacacaattgattttgtttatccacccttgcat

SEQ ID NO: 964 - DNA, 470 bp, Homo sapiens
accatggtacagaacaccaaagccgaactcacgcactcccgggagaaggtccgtcagttggaatccaatcttcttcccaagcaccaaaaacatctaaacccatcaggtaccatgaatcccacagagcaagaaaaattgagcttaaagagagagtgtgatcagtttcagaaagaacaatctcctgctaacaggaaggtcagtcagatgaattcccttgaacaagaattagaaacaattcatttggaaaatgaaggcctgaaaaagaaacaagtaaaactggatgagcagctcatggagatgcagcacctgaggtccactgcgacgcctagcccgtcccctcatgcttgggatttgcagctgctccagcagcaagcctgtccgatgggtgcccagggagcagtttctgcagcttcaacgccagctgctgcaggcagaaaggataaaccagcacctgcaggaggaacttgaaa

SEQ ID NO: 965 - DNA, 344 bp, Homo sapiens
cgtggttagctgaaatatggattaaaagatggcccactgtgagtgagctggaaatgcctgatctcccttggtttaatgtagaggaagggatccaaaggcttagggagattcagaaggtggagtggattagtcactttagacctactcatcccagctgggagggtccagaagatatacccttgactgatgccttgtgcaatagatttgtgagagcagcacctgcacctttgaaaagccctgtaattgcttttctctagatgtcagatctaatggtgggaactgcagtcacttaaatacaaaatttaaatccatgcctatatttgttgcagcactatttacaatag

SEQ ID NO: 966 - DNA, 217 bp, Homo sapiens
ggagaaaactgggtctgacatttctcatctcatttgctctatacattaacctcttgcaaaaaatttgtgagtcttgcccaagacccattacaactaattaacggctgaactggtcgtctgatttcaaggccagaattaactttctactgcagctcatgggtcagaggttttctttatttaaacaaacaaacaaaaaaaaaaaaaaacccaaaaaaaa

SEQ ID NO: 967 - DNA, 888 bp, Homo sapiens
gaccccttcctcaaaaaagttttccaggatagaggaaatttccttaaaatccataaaacttgtaacagccgtacagtaggaataaggtttggaaatctgcctggaaacctgatttcctcatccccaccttgtttcccaacataaccactgctctgtgcccctgccctctctgccaggctttctccccgatgccgtccagctctgatcctgagtgtcatttcttcatcggcttccaggctgtccttgctagctggtttgactctcacgcatcaagcgtctcaaatttgagaatgcggaggagaaaagaagtgttgcgagaaggaggtgcggccttcagttgaggtctattaggaaaagattccaaataagacaagggcggggggcggcagtcgggagagcccccaggaagccctgtagatgcccccaccccagcccatggagttgctatggttaagcagcctgagccgtacagttgaaaaggggcggtggggcccatctccaaatagcacagccagttcagccgtctgtcctcaacccaggagagctgggaaagccagtggactcctgcacctggttcttgtcactcctggcgtttgtgtacagatcaccacttctctttttggttcgttgttgaggagtcgttttccggacggctccatcacagcattgagctatcaagctgctgttttccacagttggtggtcacagccagggaagttgctgtcttgatttgttacattgtcagtaatccccaaggagccaatggatgtcagtaggagtttctgttaaatgtctccttgatggggactcagtactgtgtagagacgctgtgtttctcttctgggggtgtgcatcagaaccactggggccttttaaaatctacagatg

SEQ ID NO: 968 - DNA, 378 bp, Homo sapiens
gaagaacaatatcttgtttggaattagaaatgtaatacatgcacaggttaaaaatttaaatagtgcaaaagagtacatagtgaaaaatagcctccttccctccctagttacctgatccctgtctcccagagacactctttctagcttatttggggtagccactgacaaatattctttgcctatactattattcatatgtttatatttctctatgtctaacacattaacacacatatatacacatatgcatgagtgcacacatggaagcctaatgtactctgaattttcttacctaatggcttatcttgtagtttgttccacattcgcacatagaaatctactttattctttctcgtggctgtgtaaatattccattat

SEQ ID NO: 969 - DNA, 516 bp, Homo sapiens
ggaaggctccagtgagatggagtcgcgagtcgcggacgctgggaccggcgagaccgcgcgagcagcgggcgggagtccggcagttggctgcaccactcgggggcccgtagtctcggcgcccctgggagccgcccggtggaagctcctgcggcaggttctgaagcaaaaacacctggatgattgcctgcgacatgtatctggaagaagatttgaatcatttaatctgttttcagtaacagaaggcaaagaaagggaaactgaagaggaggttggtgcatgggtccaatatacaagcatcttctgtcctgaatacagtatctccttaaggcataatagtggatccttgaatgttgaagatgtccttaccagctttgacaatacaggaaatgtttaaaggtttaagactttggaatgatactcacctgcatttgacttctggctctgaaattcatcttgagcaatttgtatcatctctatgaacctcaactgttttcatctcttagggctggctgtgtt

SEQ ID NO: 970 - DNA, 563 bp, Homo sapiens
tgattctggaaatattttaattaggttccactttaaaaaaaaagtagcttccttatgacctccacagtgagtacattaactacattttcacaaacagaaaacttacatacattcaactgtttacaagacatgtctccatataacacatttacattcatgtgaaatctatgaacttctttaattgcatatatttatgactcttacatctggtaccttttaaaacagctaacatatagtatgcttatttcctataagttaattaatatatgactatttaaggtgagaagagtctcatttgaagaattacaatagttatattcataccatgggaaatcaatagtttttctaaacataaatttcaagctaaagctttagcaatttaagttatttaactaccaatgcatgaaattcttatcagattgtcccatttggattacagtttaagtcatttcaagctgttcacaattatttgtgcattggtgggggggaaagcaccaaggataataaattgatttttcacatcacagatgaaatcacagcgcaatgatttcaatatcccttca

SEQ ID NO: 971 - DNA, 752 bp, Homo sapiens
  misc_feature (1)...(752): n = a,t,c or g
agacagggggcagcagtaagaagctacagcccgccagcctgcagtctctgtggctccaggacacccaggtccatggaaagaaattattccttagatttgatctagatgaagaaatggggccccctggcagcagcccaacaccagagcctccacaaaaagaagtgcagaaggaaggggctgcggacccaaagcaggtcggggagcccagcgggcagaagacccttgatggatcctcacggtctgcagagctcgtcccccagggcgaggatgattctgagtatttggagagagacgcccctgcaggagatgctgggaggtggctgcgtgtcagctttggtttgtttggcagcgtttgggtgaacgatttctccagagccaagaaagccaacaagaggggggactggagggacccttccccgaggttggtcctgcactttggtggtggtggcttcctggcattttataattgtcagttgtcttggagctcttccccagtggtcacacccacctgtgacatcctgtctgagaagttccatcgaggacaagccttagaagctctaggccaggctcagcctgtctgctatacactgctggaccagagatacttctcagggctagggaacatcattaagaatgaagccttgtacagagctgggatccatcccctttctctcggttcagtcctgagtgcctccgtcnggaggcctggtggatcacgtggtggagttcagtacagctgctgcagggcaagt

SEQ ID NO: 972 - DNA, 506 bp, Homo sapiens
  misc_feature (1)...(506): n = a,t,c or g
tttganacnnnnnnnnnnnnnnnnnnnnnnnnnnnnnnnnnnnnnnnnnnnnnnnnnnnnnnnnnnnnnnnnnnnnnggcacgaggtagcatgtgcctgtaatnnnnnnnnnnnnnnnnnnnnnnnnnnnnnnnnnnnnnnnnnnnnnnnnnnnnnnnnnnnnnnnnnnnnnnnnnnnnnnnnnnnnnnnnnnnnnnnnnnnnnnnnnnnnnnnnctccatctcaaaaaaataaaaataataacaatttttgtagagatgggttcttgccatgttgcttgaactcctgggcttaagtgatccttctacctcagattcttccannnnnnnnnnnnnnnnnnnnnnnnnnnnnnnnnnnnnnnnnnnnnnnnnnnnnnnnnnnnnnnnnttcccctaactaggctcagttcctaaaagaaggccttggtcaggtttctgagccctacccccctcctgctggacaagatcatggaaaatgcctggctcagctattcttttctcacctct

SEQ ID NO: 973 - DNA, 1715 bp, Homo sapiens
taagaacagccaaggacagagagtcatggttgagcagagtgaaaaactgaatggtgtccttgaagcgagccgcctctgggataacatgcggaagctgggggagtgcacagaagaggcgcaccagatgactcatgacggctacttgaaactctggcagctgagcaagccttcgctggcctcttttgacgccatctttgtggatgaggcccaggactgcacaccagctatcatgaacatagttctgtctcagccatgtgggaaaatctttgtaggggacccgcaccagcagatctataccttccggggtgcggtcaacgccctgttcacagtgccccacacccacgtcttctatctcacgcagagttttcggtttggtgtggaaatagcttatgtgggagctactatcttggatgtttgcaagagagtcaggaaaaagactttggttggaggaaaccatcagagtggcattagaggtgacgcaaaggggcaagtggccttgttgtcccggaccaacgccaacgtgtttgatgaggccgtacgggtgacggaaggggaattcccttcaaggatacatttgattggggggattaaatcatttggattggacagaatcattgatatttggatccttcttcagccagaggaagaacggaggaaacaaaacctcgtcattaaagacaaatttatcagaagatgggtgcacaaagaaggctttagtggcttcaagaggtatgtgaccgctgccgaggacaaggagcttgaagccaagatcgcagttgttgaaaagtataacatcaggattccagagctggtgcaaaggatagaaaaatgccatatagaagatttggactttgcagagtacattctgggcactgtgcacaaagccaaaggcctggagtttgacactgtgcatgttttggatgattttgtgaaagtgccttgtgcccggcataacctgccccagcttccgcacttcagagttgagtcattttctgaggatgaatggaatttactgtatgttgcagtaactcgagccaagaagcgtctcatcatgaccaaatcattggaaaacattttgactttggctggggagtacttcttgcaagcagagctgacaagcaacgtcttaaaaacaggcgtggtgcgctgctgcgtgggacagtgcaacaatgccatccctgttgacaccgtccttaccatgaagaagctgcccatcacctatagcaacaggaaggaaaacaaggggggctacctctgccactcctgtgcggagcagcgcatcgggcccctggcgttcctgacagcctccccggagcaggtgcgcgccatggagcgcactgtggagaacatcgtactgccccggcatgaggccctgctcttcctcgtcttctgaggacaaggcgcacgttctccgcagtgcagagcagcttgccgaggaccccgcgtgaagaaagccagcgaggggggcttctgctccctgagactctgggttcacccacagcactttctgaggaagaggacaccagcccaagctggacctgccatttctccactccctacagacagccagtctccacttgcctcccctctggatgtatctggtcagggaagtgggggatgttcttttgataaaaaaaaaaaaaaattttatgtatttaaacttttattacaagatttcaattaaacaggcaccatagcactggcaaaaaaaaaaa

SEQ ID NO: 974 - DNA, 516 bp, Homo sapiens
tttttttttttagtttcagtgctcccaattttatttttatttaatgctaaaagttaaagaaaaaaaggtactgtaaatctgacaaatgacagaattcaggtgatatttccatagcgtgattttaaaatataataatgttgatatctgagattacactcacttcagttgacatgagtttcatcatatatagaaaaagtatcaccttcaacttaaaaaaagtaaaggttaaaaggtggcacacttttaaaatacttggtggccaaggaaaggtatatagtaaaagttgtaaaccatgtgtatgttctcataactttaaatgtgaggccacatgaaagacagtacatctgttaaattctataaattgttaaaagcaaaaaagggaaagcttcaacaccccatcccctaatattttgagtattaaaagcacagctgaaatattaggatttgaaatctgatactgcccatgtacagtaagtagctttgtgacatttttatccagctgtggagaatctctgc

SEQ ID NO: 975 - DNA, 361 bp, Homo sapiens
  misc_feature (1)...(361): n = a,t,c or g
caaatttctgttgtttannnnnnnnnnnnnnnnnnnnnnnnnnnnnnnnnnnnnnnnnnnnnnnnnnnnnctacctctagaagacaataaacatgtagaaccacccattaagactgtttcaagattcttctgatgaccctcagagtctgctgagaggggaagtttcccttaacactaaaaacataatttacaatcagcctccagatttacttctatgtgaaggtcagagaaaaatgcacaaccctcttttgctccagtagcaataaagaaaattaaccaaacagggacactttcaattctgaagtgagaagccatcctctcatcaaaatctctatccaggtaaacccgctcagtagtttcc

SEQ ID NO: 976 - DNA, 1708 bp, Homo sapiens
  misc_feature (1)...(1708): n = a,t,c or g
ttttgtgaataaaacttttaataatgtacagcagaaattggacaggctcattcttatattaaaacaaaagatttcctatattacaatttatttacatttgcatactgaagaggtaaagtgtctaagtggctattttacagtcctttctaataaaatgtacaaaaacaaacagaagtaccgagaatgccgttcgggggcctttatggcgacgtaagaacgggcttggacttggtctgtgaatccagaatccagaggtgcaggtagcactatggatcagggttagcctcggggggccaaaaacacggcttcagtttctccccaactctcacttagtgttaagagtggcagaggtgggtgtgggagcttcccaaagacctgctccatcttccccagaggtggaagagttggactgtgtgtggggtaagggcagaagggccaactggggagtgggctagtggcttgggagtggacgtgtgttggcagatcccagaggctacttgtgactctgggaagaggagtctaagttccatcattacctataaaccgccaaggttctgctgcagggcggataggtgggaggtcagcaggggtaaagacggtcccccnaatgacacaatggtatttaaacgaaattagtggccagtaaattggcccaaaggttaggggaagatctcctttaatgcaaggaaagaagcaataatcagtcaaataaatagaagggccaggagcactggggacctgagggcagggacagggctctccctcctccacaagctttggcagagaactgctgggttggaggcagagatgctctaaggctacatacacaatacaccctcccctggggacaggaagggggctcagaatgaatgcagtgatttgaggtctcacctggggttctaaaccccaggtctcatcacccgcccctggtctctttgtggagggggttgtgggggttcctctttcttcagtgatcttatataagaacaataattctaggctcaaaagggtcgtagaaccaattatgaaaccttctggtctcaaaacaggcatctacttacttgaatcagctctttttacagtgctccaggagtaggacccaagcatgtcttgtccacagatgtattcccagcacctggcacccagcaggcacttcacccacatttgttgaataaatgcctggagagggtacaaccagctggacagtgcaagaaagggccctagagcaaaaaccactcaaggaattgggggtggggacaaaatacgagagagactgagcctcagggcaaagaggaactctcactgctgagtgggaacaggctcaggtgcaaggacaaacatttccagtgtgattgagctatgtgcgttcaattggataatttttttttttagggatttctttaaaaacaaatagattgagaggtaatcacagagatggttttccttttacaaaaacttaatatttaacaacattaaaaaaagttaaaatccaaaccctcccaataaaattaaaaaaagaaatcaaaccactccagttaaaagttatggcttcaaagttattatatacctaagatatgctgaccaaatcaccacccacagccgtgcttctaggcttcgttaaatactatactcaggttaaataacatgttcggctcaggctgtcccttcagtagggctcctgaagtggatgcaaacctctcaccttccc

SEQ ID NO: 977 - DNA, 12939 bp, Homo sapiens
atgatgaacgaagatgcagctcagaaaagcgacagtggagagaagttcaacggcagtagtcagaggagaaaaagacccaagaagtctgacagcaatgcaagcttcctccgtgctgccagagcaggcaacctggacaaagttgtggaatatctgaaggggggcatagacatcaatacctgcaatcagaatggactcaacgctctccatctggctgccaaggaaggccacgtggggctggtgcaggagctgctgggaagagggtcctctgtggattctgccactaagaagggaaataccgctcttcacattgcatctttggctggacaagcagaagttgtcaaagttcttgttaaggaaggagccaatattaatgcacagtctcagaatggctttactcctttatacatggctgcccaagagaatcacattgatgttgtaaaatatttgctggaaaatggagctaatcagagcactgctacagaggatggctttactcctctagctgtggcactccagcaaggacacaaccaggcggtggccatcctcttggagaatgacaccaaagggaaagtgaggctgccagctctgcatattgccgctaggaaagacgacaccaaatctgccgcacttctgcttcagaatgaccacaatgctgacgtacaatccaagatgatggtgaataggacaactgagagtggttttacccctttgcacatagctgcacattacggaaatgtcaacgtggcaactcttcttctaaaccggggagctgctgtggacttcacagccaggaatggaatcactcctctgcatgtggcttccaaaagaggaaatacaaacatggtgaagctcttactggatcgaggcggtcagatcgatgccaaaactagggatgggttgacaccacttcactgtgctgcacgaagtgggcatgaccaagtggtggaacttctgttggaacggggtgcccccttgctggcaaggactaagaatgggctgtctccactacacatggctgcccagggagaccacgtggaatgtgtgaagcacctgttacagcacaaggcacctgttgatgatgtcaccctagactacctgacagccctccacgttgctgcgcactgtggccactaccgtgtaaccaaactccttttagacaagagagccaatccgaacgccagagccctgaatggttttactccactgcacattgcctgcaagaaaaaccgcatcaaagtcatggaactgctggtgaaatatggggcttcaatccaagctataacagagtctggcctcacaccaatacatgtggctgccttcatgggccacttgaacattgtcctccttctgctgcagaacggagcctctccagatgtcactaacattcgtggtgagacggcactacacatggcagcccgagccgggcaggtggaagtggtccgatgcctcctgagaaatggtgcccttgttgatgccagagccagggaggaacagacacctttacatattgcctcccgcctgggtaagacagaaattgtccagctgcttctacaacatatggctcatccagatgcggccactacaaatgggtacacaccactgcacatctctgcccgggagggccaggtggatgtggcatcagtcctattggaagcaggagcagcccactccttagctaccaagaagggttttactcccctgcatgtagcagccaagtatggaagcctggatgtggcaaaacttctcttgcaacgccgtgctgccgcagattctgcagggaagaacggccttaccccgctccatgttgctgctcattatgacaaccagaaggtggcgctgctgttactggagaagggtgcttcccctcatgccactgccaagaatggctatactccgttacatattgctgccaagaagaatcaaatgcagatagcttccacactcctgaactatggagcagagacaaacattgtgacaaagcaaggagtaactccactccatctggcctcgcaggaggggcacacagatatggttaccttgcttctggataagggagccaatatccacatgtcaactaagagtggactcacatccttacaccttgcagcccaggaagataaagtgaatgttgctgatattctcaccaagcatggagctgatcaggatgctcatacaaagcttggttacacacctttaattgtggcctgtcactatggaaatgtgaaaatggtcaactttcttctgaagcagggagcaaatgttaacgcaaaaaccaagaacggctacacgcctttgcaccaggccgctcagcagggtcacacgcacatcatcaacgtcctgctccagcatggggccaagcccaacgccaccactgcgaatggcaacactgccttggcgattgctaagcgtctgggctacatctccgtggtcgacaccctgaaggttgtgactgaggaggtcaccaccaccaccacaactattacagaaaaacacaaactaaatgtacctgagacgatgactgaggttcttgatgtttctgatgaagagggtgatgacacaatgactggtgatgggggagaataccttaggcctgaggacctaaaagaactgggtgatgactcactacccagcagtcagttcctggatggtatgaattacctgcgatacagcttggagggaggacgatctgacagccttcgatccttcagttccgacaggtctcacactctgagccatgcctcctacctgagggacagtgccgtgatggatgactcagttgtgattcccagtcaccaggtgtcaactctagccaaggaggcagaaaggaattcttatcgcctaagctggggcactgagaacttagacaacgtggctctttcttctagtcctattcattcaggtttcctggttatttttatggtggatgcccgaggtggtgctatgcgaggatgcagacacaatgggctccgaatcattattccacctcggaaatgtactgctccaacgcgagtcacctgccgactggtcaagcgccacagactggcaacaatgcctccaatggtggaaggagaaggcctggccagtcgcctgatcgaagttggaccttctggtgctcagttccttgggcctgtgatcgtggagatccctcactttgcggcccttcgaggaaaggaaagggaactggtggtcctgcgcagtgagaatggggacagctggaaagagcatttctgtgactacactgaagatgaattgaatgaaattcttaacggcatggatgaagtactggatagcccagaagacctagaaaagaaacgaatctgccgcatcatcacccgagacttcccacagtactttgcagtggtgtctcgtatcaaacaggacagcaatctgattggcccagaaggaggtgtactgagcagcacagtggtgccccaggtgcaggccgtcttcccagagggggcactcaccaagcggatccgcgtaggcctgcaggctcaacctatgcacagtgagctggttaagaagatcctaggcaacaaagctaccttcagccctatagtcactttggaacctagaagaagaaaattccacaaaccaattaccatgaccattcctgtccccaaagcttcaagtgatgtcatgttgaatggttttgggggagatgcaccaaccttaagattactatgcagcataacaggtggaaccacccctgcccagtgggaagatattacaggaactacgccattaacatttgtcaatgaatgcgtttcctttacaacaaacgtgtctgccaggttctggctgatagattgtcgacagatccaggaatccgttacttttgcatcacaagtatacagagaaattatctgcgtaccttatatggccaaatttgtagtgtttgccaaatcacatgaccccattgaagccaggttgaggtgtttctgcatgactgatgataaagtggataagacccttgaacaacaagaaaattttgctgaggtggccagaagcagggatgtggaggtgttagaaggaaaacccatctacgttgattgtttcggcaacttggtaccattaactaaaagtggccagcatcatatattcagtttttttgccttcaaagaaaatagacttcctctatttgtcaaggtacgcgatacgactcaggaaccttgcggacgactatcatttatgaaggagccaaaatccacgagaggcctggtgcatcaagctatttgcaacttaaacatcactttgccgatttatacaaaggaatcagagtcagatcaagaacaggaggaagagatcgatatgacatcagaaaaaaatgatgagacagaatctacagaaacatctgtcctgaaaagtcacctggttaatgaagttcctgtcctagcaagtccggacttgctctctgaagtttctgagatgaaacaagatttgatcaaaatgaccgccatcttgaccacagatgtgtctgataaggcaggttctattaaagtgaaggagctggtgaaggctgctgaggaagagccaggagagccttttgaaatcgttgaaagagttaaagaggacttagagaaagtgaatgaaatcctgagaagtggaacctgcacaagagatgaaagcagtgtgcagagctctcggtctgagagaggattagttgaagaggaatgggttattgtcagtgatgaggaaatagaagaggctaggcaaaaagcacctttagaaatcactgaatatccatgtgtagaagttagaatagataaagagatcaaaggaaaagtagagaaagactcaactgggctagtgaactaccttactgatgatctgaatacctgtgtgcctcttcccaaagagcagctgcagacagttcaagataaggcagggaagaaatgtgaggctctggctgttggcaggagctctgaaaaggaagggaaagacatacccccagatgagacacagagtacacagaaacagcacaaaccaagcttgggaataaagaagccagtaagaaggaaattaaaagaaaagcagaaacaaaaagaggaaggtttacaagctagtgcagagaaagctgaacttaaaaaaggtagttcagaagagtcattaggtgaagacccaggtttagcccctgaaccccttcccactgtcaaggccacatctcctttgatagaagaaactcccattggttccataaaggacaaagtaaaggcccttcagaagcgagtggaagatgaacagaaaggtcgaagcaagttgcccatcagagtcaaaggcaaggaggacgtgccaaaaaagaccacccacaggccacatccagctgcgtcaccctctctgaagtcagagagacatgcgccagggtctccctcccctaaaacagaaagacactctactctttcctcttccgcaaaaactgaaaggcaccctccagtatcaccatcaagtaaaactgagaaacactcacctgtgtcaccctctgcaaaaacggaaagacattcacctgcgtcatcatcgagtaaaactgagaaacactcacctgtatcaccctcgacaaaaactgaaaggcactctcctgtgtcatctacaaaaacagaaagacacccacctgtttcgccttcaggcaaaacagacaaacgtccacctgtatcgccctccgggaggacagaaaaacacccgccagtatcgcctgggagaacagaaaaacgcttgcctgtttcaccctccggaagaacggacaagcaccaacctgtatcaacagctgggaaaactgagaagcacctgcctgtgtcaccttctggcaaaacagaaaagcaaccacctgtatcccccacttcaaaaacagagaggattgaggaaaccatgtctgttcgggagctgatgaaggctttccagtcaggtcaggacccttctaaacataaaactggactctttgagcacaaatcagcaaaacaaaagcagccacaagagaaaggtaaagttcgggtagaaaaagaaaaggggccgatactaacccagagagaagctcagaaaacagagaatcagacaatcaaacgaggccagagactcccggtaacgggcacagcagaatccaaaagaggagttcgtgtttcctccataggagttaagaaagaagatgcagctggaggaaaggagaaagttctcagccacaaaatacctgaacctgttcagtcagtgcctgaagaagaaagccacagagagagcgaagtgcccaaagaaaagatggctgatgagcagggagacatggatctacagatcagcccagataggaaaacctccactgacttctctgaggtcattaagcaagagttggaagacaatgacaaataccaacaattccgcctgagtgaggagacagaaaaggcacagcttcacttagaccaagtactcactagtcctttcaacacaacatttccactcgactacatgaaagatgagttccttccagctctgtctttacaaagcggtgctttagatggcagttctgaaagcctaaagaatgagggggtagccggctctccgtgtggcagcctgatggaggggacccctcagattagttcagaagaaagctataagcatgaaggcctagcagagacccctgagacgagcccagaaagcctttctttctcaccaaagaaaagtgaggagcaaactggggaaacaaaggaaagcaccaagacagaaaccaccacagaaattcgttcagaaaaagagcatcccacgaccaaagacattactggtggctctgaagagcgaggtgccacagtcactgaggactcagagacctctactgagagttttcagaaagaggccactctaggctctcccaaagacacaagccctaaaagacaagatgattgcacaggcagctgtagtgtagcattagctaaagagacacctacaggactgactgaggaggcagcctgtgatgaaggtcaacgtacctttggtagttcagcccacaagacacaaactgatagtgaggctcaggaatccacagccacctcagacgagacaaaggccttgccgctgcctgaggcttctgtaaagacagatacaggaactgaatcaaaacctcagggagtcattagaagtccccaagggttagaacttgcactccctagccgagatagcgaagtcctcagcgctgtggctgatgactcattagcagtgagccacaaagactctctggaagccagccctgtgctagaagataactcttcacacaaaacccctgattctctggagccaagtcctctgaaagaatccccttgccgtgactctctggaaagcagccctgttgaaccaaagatgaaggctggaatttttccaagtcactttcctcttcctgcagctgttgccaaaacagaactcttgacggaagtggcctctgtgcggtcccggctactccgagaccctgatggcagtgctgaggatgacagtcttgagcagacatcgctcatggagagctcagggaagagccccctttctcctgacacccccagctctgaagaagtcagctatgaggttacacccaaaaccacagatgtaagtacaccaaaaccagctgtgattcatgaatgtgcagaggaggatgattcagaaaacggggagaaaaagaggttcacacctgaagaggagatgtttaaaatggtaaccaaaatcaaaatgtttgatgaacttgaacaagaagcaaagcagaaaagggactacaaaaaagaacccaaacaagaagaatcttcttcatcttctgacccagatgctgactgttcagtagatgtggatgaaccaaaacatacaggcagtggggaggatgaaagtggtgtccctgtgttagtaacttcggagagcaggaaggtgtcttcctcctcagaaagtgaacctgagttggcacagcttaaaaaaggtgctgactcaggccttttaccagaaccagtgattcgagtacaacctccttctccacttccatcaagcatggactccaattccagtccagaagaagtacaattccagcctgtcgtttccaaacaatatactttcaagatgaatgaagatactcaggaagagccaggcaaatcagaagaagaaaaagattctgaatcccatttagctgaagaccgtcatgctgtttccactgaggctgaagacaggtcttatgataagctaaacagagacactgatcagccaaaaatctgtgatggccatggatgtgaggccatgagtcctagcagctcagctcgtcctgtctcttcaggtctacagagtccgactggtgatgatgttgatgaacagccagtcatctataaagaatcattagctctccaaggcactcatgaaaaagacacagagggagaagagcttgatgtttctagagcagaatctccacaagcagattgccccagtgaaagcttttcatcttcatcctctttgcctcattgtttggtatctgaaggaaaagaattagatgaagacatatctgccacatcttctattcaaaaaacagaggtcacaaaaactgatgaaacatttgagaacttaccaaaggactgcccctctcaagactcatccattactactcaaacagatagattttccatggatgttcccgtgtctgacctagctgagaatgatgaaatctatgatccacaaatcactagcccttatgaaaatgtcccttcccaatcttttttctctagtgaagaaagcaaaacccaaacagatgcaaatcacaccacaagttttcactcttctgaagtgtattctgttaccatcacatcccctgttgaagacgttgtagtggcaagctcctctagtggaactgttttaagcaaagaatctaattttgagggccaggacataaaaatggaatcccaactggaaagtaccttgtgggaaatgcaatcagacagtgtctcttcatctttcgagcctactatgtccgctacaacaacagttgttggtgaacaaataagcaaagtcatcatcacaaaaactgatgtggattctgattcttggagtgaaattcgggaagacgatgaagcctttgaggctcgtgtgaaagaggaagaacaaaagatatttggtttgatggtagacagacaatcacagggtaccacccctgacaccactcctgctaggaccccaactgaagaggggaccccaacaagtgagcaaaacccatttctgtttcaggaaggaaaattgtttgaaatgacccgaagtggtgccattgatatgaccaaaaggtcctatgcagatgaaagttttcactttttccaaattggtcaagaatccagggaagagactctctctgaagatgtgaaagaaggggctactggggctgatcccctaccgctggagacatcagctgaatcactagcactttcagaatcaaaagaaacagtggatgatgaggcagacttacttccagatagcgtgagtgaggaagtagaggaaatacctgcttcggatgctcaacttaactcccaaatggggatttcagcctccactgaaacacctacaaaagaggctgttagtgtagggaccaaggacctccccaccgtgcaaacgggtgatatacctcctctctctggtgtaaagcagatatcctgccccgactcttctgaaccagctgtacaagtccagttagatttttccacactcaccaggtctgtttattcagataggggtgatgattctcccgattcttccccagaagaacagaaatcagtaatcgagattcctactgcacccatggagaatgtgccttttactgaaagcaaatccaaaattcctgtaaggactatgcccacttccaccccagcacctccatctgcagagtatgagagttcagtttctgaagattttctatccagtgtagatgaggaaaataaggcggatgaagcaaaaccaaagtccaaactccctgtcaaagtacccctccaaagagttgaacagcagctctcagatctagacacctctgtccagaagacagtggctcctcagggacaggacatggcaagcatcgcaccagataatagaagcaaatctgaatctgatgctagttctttggattcaaagaccaaatgcccagtaaaaacccgaagttacactgagacagaaacagagagcagagagagggccgaggaacttgagttagaatcagaagaaggggccacaagaccaaagatacttacatcccgattgccagttaagagcagaagcactacatcttcctgcagggggggcacgagccccacaaaagaaagtaaggagcatttctttgacctttacagaaattccatagaattctttgaggagattagtgatgaggcttccaaattagtggataggctgacacagtcagagagggagcaggaaatagtttcagacgatgaaagtagtagtgccctggaagtatcagtaattgaaaatctgccacctgttgagaccgagcactcagttcctgaggacatctttgacacaaggcccatttgggatgagtctattgagactctgattgaacgcatccctgatgaaaatggccatgaccatgctgaagacccacaggatgagcaggaacggatcgaggaaaggctggcttatattgctgatcaccttggcttcagctggacagaattagcaagagaactggatttcactgaggagcaaattcatcaaattcgaattgaaaatcccaactctcttcaagaccagagtcagtacctgttgaagatctggctagagagggatgggaaacatgctacagataccaacctcgttgaatgtctcaccaagatcaaccgaatggatattgttcatctcatggagaccaacacagaacctctccaggagcgcatcagtcatagttatgcagaaattgaacagaccattacactggatcatagtgaagggttctcggtacttcaagaggagttatgcactgcacagcacaagcagaaagaggagcaagctgtttctaaagaaagtgagacctgcgatcaccctcctatcgtctcagaggaagacatttctgttggttattccacttttcaggatggcgtccccaaaactgagggggacagctcatcaacagcactctttccccaaactcacaaggagcaagttcaacaggatttctcagggaaaatgcaagacctgcctgaagagtcatctctggaatatcagcaggaatattttgtgacaactccaggaacagaaacatcagagactcagaaggctatgatagtacccagctctcccagcaagacacctgaggaagttagcacccctgcagaggaggagaagctgtacctccagaccccaacatccagcgagcggggaggctctccccatcatacaagaacccgaagagccctcagagcacagagaggagagctctccgcggaaaaccagcctcgtaatagtggagtctgccgataaccagcctgagacctgtgaaagactcgatgaagatgcagcttttgaaaagggagacgatatgcctgaaatacccccagaaacagtcacagaagaagaatacattgatgagcatggacacaccgtggtaaagaaggttactaggaaaatcattaggcggtatgtatcctctgaaggcacagagaaagaagagattatggtgcagggaatgccacaggaacctgtcaacatcgaggaaggggatggctattccaaagttataaagcgtgttgtattgaagagtgacaccgagcagtcagaggacaacaatgagtaaagccatcacacagaagagggctgtggtgaaggaccagcatggaaaacgcattgacttggagcacctggaggatgtaccagaagcactagaccaggacgacctccagcgcgatctccagcagctccttcggcatttctgcaaggaggacttgaagcaagaggccaagtgagggactgcccagttctcacaccagaaaccacacattcactcaatatgcagcttcctgtttcagtaggggagtgacctaactggcctaattaatgggataccccgacatttccactgttagcaaatatacggcattttgctttagttttcccccatcctctttaactataaagctaatttgtgaccaaagatggcatccttcatactggatgctgtatccaatactttgttgtgtctgtgctaacctgggaactggccacctccattgttctttgcttctgcacaagatccatgaaaatccattgatcagaagaacttcacctgcagacctcttcaagtgacactatgtaggaatccttccaaggaatatctatgtacaatgtatatagctgaaatgctcagatgaacaacatattaaaattaaaaccactgcctattgtaactacactgggcatcagaataaaaggcctctagaaattgctgaacaatggttaattaagatattgctaacacaatcgagtgataatacagttttactgcaaaagaagcacttcaaacctattatgtccttagaacttccagagtagccactgctcccagttaaaggtgggtcagtagccttgcagaactgtcctgagaagttattgctggtgctggccagccatggcttaggactccaacagccactctgagggaggggagaagggagcagaggccacgcagaatgaaccgatggggtattcagttgctggcagctacattgtgtggcattctagcatcttcaggtctttagatcttggacaagttggcagggtattttaaaagctataactactgtagttttccagttttgcattgctgctttagcaaaccacgctgtcttacagtggtactttcttctggccactgcactgtagataattcattggaaacaagatttacccactacataaaaggttaaactccttcagtatgttggagtggttctttttttt

SEQ ID NO: 978 - DNA, 519 bp, Homo sapiens
  misc_feature (1)...(519): n = a,t,c or g
tttttgtttttgctgtcgaagcaggattttatttcaccattactggacatctgaaatggggaacgcaacagagagcatgcgtgatgaacgtgctgctcaggggatcagagtcaaagagttgcaagaaaatgaacaacagatgaaggacgtggtttgcagcttgatctgtttctacaggacagtggaagtgaaaggtaagacagcccttaagactcaggatttttaataaactctgatttttaataaccatggaacaatgccctgtaattagctgtaatttacggagatatggaatcttgaacataatgtgatgaaaactaaacctcagaggaagggtatagtaaaaatacaagtcataaaataatattattgctgcaagggaacttgttccctgtttgtaggaaatgaatgtagacctgtattcacgctggatataatgggtggggagaggttttctgggcccgtctgtgggttccgaggctctcctagtttcctcnggctcagtgcttctccccctgg

SEQ ID NO: 979 - DNA, 1193 bp, Homo sapiens
ttttttttttttcataaattaaattttttattcatttttttgcatcaaaatagtgcttaaaattggaatttatactcacaagacatagctaacatccaaagtagacaattaaaaaatattatttgaaaattatgtacttagtactgaagacttcctaaatttgcacattagctagattgccattagcaccattagagagttgatctttggctaatgattattcaggaaaatttcaaccattacaatcagtgagtataattttatatttcagcaacgatagtggtcatgttcagcaacagcttcacttacaaattaaagtaagctcacttcagtggtttgcactctgatgctgtttttttaccccttctcttgcaaataaccagtgaaataaaaattgcttctaactggcaatcgaaacaagggaggaattatggctagccaactagttgctaatgtttgtgttttttttatttaagaaacattttaaataatagagatggggtctcacatggtggccccggctgggtttaactcctaggctcaggcaatcctccccactcggcctcccaacatgctgggatcacagcttcagccaccatgcccggactgctaatgtttgtgaaaggcaaattgtaaacttctatggtttaacttcaccagaagggtaaagggctccccacctgccaccttgttctataaaaaaagtatactctgattactagaatggatttttaaaattcaattcaaagattcaataactatcaacatttctaaacactgatttttctttttctctttttcaaatgttttttaatatcctgcaggtaataacactgatttttctaatactcagaaacatctacttagcagttgtgatactaatttgcaaaatgtaataatgttatacaaatataagatactactaaatacatagtagaaataattgcatgattcctgatatttatattcaaggtataaacatgactgatttcgctgatactacagaataaaaaaaataaagctgctatgtaaaaaattaaagaatatctcaattagatatttttgttcccaatctctttcagacagatctatgaaataatatagaatatactatcaatatgttctttcatatgaagtgaaaaaaatgggatttaagtagtgagataatttctattttttacttttttaaaaaa

SEQ ID NO: 980 - DNA, 437 bp, Homo sapiens
  misc_feature (1)...(437): n = a,t,c or g
ggttgtacattaattagaggtaaagcagagtttcaaacctacgcctgtctgacacatcttttctattacaccacactgcctccccagccatataaacttcctaggagatttgaggattcagtttaagagaatattaaaatgttctatcacatttcaagtgatagaatagtaggacttggtgattaaaaatgggagctagaagagatggaggaatgcaaggcttccactttggtcaactgagtaatatcagaactcttatgtaaaatgtataaggtaagagcaggattgagggggaagatcctggaattcaattggggaacgtgctggaaattgaatttcctgggaggtcattcaggagagctatctagtgaccattaggatacatgtnaacaaggagcntcaaganaaggaagagacatgaaattncaggttttcag

SEQ ID NO: 981 - DNA, 650 bp, Homo sapiens
cagcaagggaatctatgtgtaaacgggcagtgcaaaaataccgagggctccttcaggtgcacctgtggacaggggtaccagctgtcggcagctaagacccagtgtgaagacattgatgaatgccagcaccgtcatctctgtgctcatgggcagtgcaggaacactgagggctcttttcaatgtgtgtgtgaccagggttacagagcatctgggcttggagaccactgtgaagatatcaatgaatgcttggaggacaagagtgtttgccagagaggagactgcattaatactgcagggtcctatgattgtacttgtccggatggatttcagctagatgacaataaaacatgtcaagatattaatgaatgtgaacatccagggctctgtggtccacaaggggagtgcctaaacacagagggttctttccattgtgtctgccagcagggtttctcaatctctgcagatggccgtacgtgtgaagatgtgaatgaatgtgaactgctcagtggggtgtgtggtgaagccttctgtgaaaacgtggaagggtccttcctgtgcgtgtgtgctgatgaaaaccaagagtacagccccatgactgggcagtgccgctcccggacctccacagatttagatgtagatgtagatcaacc

SEQ ID NO: 982 - DNA, 1205 bp, Homo sapiens
  misc_feature (1)...(1205): n = a,t,c or g
ggctcgacgctgtttgatgtggagtgcaaggaaggtggcttccctcaggaactctggttgggtgtcagcgcggacgacgtctccgtctacaagcgtggagagggaagaccactggaagtcttccagtatgaacacatcctctcttttggggcacccctggcgaatacgtataagatcgtggtcgatgagagggagctgctctttgaaaccagtgaggtggtggatgtggccaagctcatgaaagcctacatcagcatgatcgtgaagaagcgctacagcacgacacgctccgccagcagccagggcagctccaggtgaaggcgggacagagcccacctgtctttgctacctgaacgcaccaccctctgggcctaggctggctccagtgtgccatgcccagccaaaacaaacacagagctgcccaggctttctggaagcttctggtctgagggaggtgtctccgaggatccttttgcctgccgccttcattgatcctgtattaagctgtcaactttaacagtctgcacagtttccaaagctttactactcttagaggacacatgccttaaaaaaggaggggaggaaccacgctgccaccaaagcagccggaagtgccttaacttgtggaaccaacactaatcgaccgtaactgtgctactgaagggaactgcctttcccccttctgggggagacttaacagagcgtggaaggggggcattctctgtcaatgatgcactaacctcccaacctgatttccccgaatctgagggaaggtgagggagtgggaagggggatggagagctcgaggggacagtgtgtttgagctggagtgctgcgggcagcctttctcatggaatgacatgaatcaacttttttctttgtttcatcttttaagtgtacgtgcttgcctgttcgtgcatgtgttcataaactcaacactttaatcatggtttcatgagcattaaaaagcaaagggaaaaaggatgtgtaatggtgtacacagtctgtatattttaataatgcagcgcnatagtctcaattgttactttataaggtggttttattaacaaacccaaatcctggattttcctgtctttgctgtattttgaaaaacacgtgttgactccattgttttacatgtagcaaagtctgccatctgtgtctgctgtattataaacagataagcagcctacaagataactgta

SEQ ID NO: 983 - DNA, 504 bp, Homo sapiens
aaaaaggcattttattataaatacattttagttgtagcagtaaaatacattttgttaccatgaatctttgaaaacaaaagaacttcactgagacaatgagcacactgtaggaactgtagaccccaagttgaaaacttgttctatggaaccaaagtagctaacgtaattccaaaactaagttagaaaagataaagacaaagaaagaagaaaataaaaaccctagagagtggctttggggttattttatggtacaaagtcacttttacttttaaggataaactctttaggtattagagcctcttagatgaggtatcatttactgcaaagaaaaaaaattgttataattttgccataagttatgcctatttagatggctgtataactggtactttgaagagatgaacctgaccacctcagttttgtacagcttccctcaggaagacttccccaaataagactcagtatgaatttgctaagtaactgatctatgaagttagctgaaca

SEQ ID NO: 984 - DNA, 453 bp, Homo sapiens
  misc_feature (1)...(453): n = a,t,c or g
ggtgnnnnnntttgnacnctatgacnnnnnnnnnnnnnnnnnnnnnnnnnnnnnnnnnnnnnnnnnnnnnnnnnnnnnnnnnnggcacgagcgagaggcgggggcgctagggccgagatcatgtctgactgggagaggtttccttggcagcagaggacgctaggtttgggatgaaagaagctgggcagatgcaaaatctggagagcgcgagggccgggcggtcagtcagcacccagactggcagcatgaccggtcagataccaaggctttctaaagtcaaccttttcactctgctcagcctctggatggagctctttccagcagaagcccagcggcaaaaatctcagaaaaatgaagagggaaagcatggacccttaggagataatgaagagaggaccagagtatctactgacaaaagacagaaaaccatgttctgcttgtttgaaaatgatt

SEQ ID NO: 985 - DNA, 134 bp, Homo sapiens
ggacacagttagctaaaaaaaagcctagagaacacaaaggtgacacaaactccagagaacatgctgcttgcagctttgaagactgtatcaacagtgtctgcaggtgtacccaacagctccgaagagacagtgac

SEQ ID NO: 986 - DNA, 312 bp, Homo sapiens
ccgagaccaacgagcggctcttcgatgagaagtacaagcctgtcgtgctcaccgacgatcaggtggaccaggcgctgtgggaggagcaggtcttgcagaaggagaagaaggacaggctcgccctgagccaggcccactcgctggtgcaggcggaggccccgagatgaaaccctgaggcccccgagtcctggcaaacttgcttgcctggggtggtgcagttctgagtgtgcctcacctgcagaacagctgagacagattgatgtgcaaagtgtttttcttcactggatttgcacaaattttgggggagccttt

SEQ ID NO: 987 - DNA, 428 bp, Homo sapiens
  misc_feature (1)...(428): n = a,t,c or g
ggtgtgtggtagattaattttattaatctcaagttatagattaaaaaatttaagtaccacataaatgccatttgcctttgctaatgttacatttttatgaagaaggagccttgcataaagaatgatataatggacttttgggacttgagggagaagcttgggagggggggtaaaggataaaagacatattgggtgctgtnnnnnnnnnnnnnnnnnnnnnnnnnnnnnnnnnnnnnnnnnnnnnnnnnnnnnnnnnnnnnnnnnnnnnnnnnnnnnnnnnnnnnnnnnnnnnnntattgaaataaaaaaaaagaaggggacttggacagatagccgtattctttgccaaattatagttacattctgctcatgggggattaggaggttcaatggaagaaaggccccactcagctttctcccctcttaaa

SEQ ID NO: 988 - DNA, 365 bp, Homo sapiens
caagtttttggagataggaaaaagagtattaagctttgttggcagtatactaaaaggttctaggaatgcagtgattaggttttagtgggacatggagaatatgtcctactgaggacctgaaggaactgttgaggaactgaagatagaattattattgtagttcagaccttacattagggacaggtggaaataatttgcagcaccattaaatatgaagctacaaaatagggcagtgggagagggcaatgtttgaagctgtgaatctgtaaaggaaaaggttgtatcataattcatggtttggaaatgaaactgctcacatgctcagctacccggaatttcgtaatcatggttcatagctgttttcc

SEQ ID NO: 989 - DNA, 501 bp, Homo sapiens
  misc_feature (1)...(501): n = a,t,c or g
tttttttttcaggtttgcagagtggaagtttaatgggaccatcaccgtgataccccatcacagcagtcccaggctggaggccccaggctctggccgcctctcccagcatggtgggcctggagagagcaccagcaccacctcccactttccctggggtattgctttgcccctgtgcctcccaccccaggaagctacaagagacaggctgtcctgtccccacactctccctgggtcctgggactccctgttctgaggggctaaggttgcctggggccagagggccctccccagggacaaccatcctctccctgtgtcccctgccccccacactgagggaatgtctgtgtccttgttcctctgccaggggccaactgaggctgccaaccctaggggcggggtgcagggctgtgcggggagggtggctcagatccctgcaaggaggcgtgctgcagggacagcacagcctggggccccggnagacattaaggcacagtgtggcgg

SEQ ID NO: 990 - DNA, 784 bp, Homo sapiens
tggggtcggagctgatcgggcgcctagccccgcgcctgggcctcgccgagcccgacatgctgaggaaagcagaggagtacttgcgcctgtcccgggtgaagtgtgtcggcctctccgcacgcaccacggagaccagcagtgcagtcatgtgcctggaccttgcagcttcctggatgaagtgccccttggacagggcttatttaattaaactttctggtttgaacaaggagacatatcagagctgtcttaaatcttttgagtgtttactgggcctgaattcaaatattggaataagagacctagctgtacagtttagctgtatagaagcagtgaacatggcttcaaagatactaaaaagctatgagtccagtcttccccagacacagcaagtggatcttgacttatccaggccacttttcacttctgctgcactgctttcagcatgcaagtaggtatttcattaaacattcagaaaagttaccaatttacaagtgggtttttcatccccaaggaatacttctaacttagttgatatcaattcagagcatattttcccctagaaataatattaggaatattggccaagtgactatattcccagtttatcccataatgtagctaacaacttggaactagtgttgccagaattccactagcaaatagcagctgtatatatatgctgggaattctgatttcagtctgccttttgtaagagatgatatctgtcattaaaacagtcttcacatgtgatttttctgctcatattttttaaaaagtactggtt

SEQ ID NO: 991 - DNA, 3728 bp, Homo sapiens
  misc_feature (1)...(3728): n = a,t,c or g
cctgaggaggcggcggggtccgcaggcgtcgcgggacgaggagatcggagccgggagactcgcgcagccatggcccccattggcctcaaagctgttgtcggagagaagattatgcatgatgtgataaagaaggtcaagaagaagggggaatggaaggtgctggtggtggatcagttaagcatgaggatgctgtcctcctgctgcaagatgacagacatcatgaccgagggcataacgattgtggaagatatcaataagcgcagagagccgctccccagcctggaggctgtgtatctcatcactccatccgagaagtccgtccactctctcatcagtgactttaaggacccgccgactgctaaataccgggctgcacacgtcttcttcactgactcttgtccagatgccctgtttaatgaactggtaaaatcccgagcagccaaagtcatcaaaactctgacggaaatcaatattgcatttctcccgtatgaatcccaggtctattccttggactctgctgactctttccaaagcttctacagtccccacaaggctcagatgaagaatcctatactggagcgcctggcagagcagatcgcgaccctttgtgccaccctgaaggagtacccggcctgtgcggtatcggggggaatacaaggacaatgccctgctggctcagctaatccaggacaagctcgatgcctataaagctgatgatccaacaatgggggagggcccagacaaggcacgctcccagctcctgatcctggatcgaggctttgaccccagctcccctgtgctccatgaattgacttttcaggctatgagttatgatctgctgcctatcgaaaatgatgtatacaagtatgagaccagcggcatcggggaggcacgggtgaagggaggtgctcctggatgaggacgacgacctgtggatagcactgcgccacaagcacatcgcagaggtgtcccaggaagtcacccggtctctgaaagatttttcttctagcaagagaatgaatactggagagaagaccaccatgcggggacctgtcccagatgctgaagaagatgcctcagtaccagaaagagctcagcaagtactccacccacctgcaccttgctgaggactgtatgaagcattaccaaggcaccgtagacaaactctgccgagtggagcaggacctggccatgggcacagatgctgagggagagaagatcaaggaccctatgcgagccatcgtccccattctgctggatgccaatgtcagcacttatgacaaaatccgcatcatccttctctacatctttttgaagaatggcatcacggaggaaaacctgaacaaactgatccagcacgcccagatacccccggaggatagtgagatcatcaccaacatggctcacctcggcgtgcccatcgtcaccgattccacgctgcgtcgccggagcaagccggagcggaaggaacgcatcagcgagcagacctaccagctctcacggtggactccgattatcaaggacatcatggaggacactattgaggacaaacttgacaccaaacactacccttatatctctacccgttcctctgcctccttcagtaccaccgccgtcagcgcccgctatgggcactggccataagaacaaggccccaggtgagtaccgcagtgggcccccgccctcatcattttcatccttgggggtgtgagcctgaatgagatgcgctgcgcctacgaggtgacccaggccaacggaaagtgggaggtgctgataggatccacacacatcctcaccccacagaaactgctggacacactgaagaaactgaataaaacagatgaagaaataagcagttaaaaaaataagtcgcccctccaaaacacgcccccatcccacagcgctccgcaggttcccaccaccgcccgcctcagttcctttgcgtctgttgcctccccagccctgcacgccctggctgggcactgttgccgctgcaatctcgtgttcaagtgatgccctcatcttgtttgaaacaaaagaaaataatgcattgtgttttttaaaaagagtatcttatacatgtatcctaaaaagagaagctcatgtgcaattggtgcacagcaggagaaatttctggactgttaggatgaatggacgccttctccccgttatttaagatttgtgaccttgtacataaccctgggtgacgtgcacattgcttgggtatggaacggtagaaatttgggtgtttttaaaaccttgtttggggttgttcctgtccttgttgagaatcatagagatgtctgtgttcttggagtatttcacactgaggactaatctgctatcttcattccagtccctacccctcagtgcctgctctcatccaaataacctgggaggtgacaatcaggatatctcaggaggtccaaggtggaacagacctctttggctttcccagcgtctcatacccccggtagtgcagctgtggcgtggaggctggggtgtctgcacgaagtcaggccagcgtcctcctccacagcctgtcactgccccctccccagcctgtgttccacagtgctgtgatcccgagggaagtcctccagtctaagtcacagtgccctgacagggtgagaagcaaacttcccactggaagcctccatctctttggaaaaacagttagtctggagcctgtggcccaggcccttctgtccccagggattcatcccaacagctcattttccctagtccgccttcgttcaagggtcaggaatggaccagaacagatgggttctggaggcccctgaacagagggctatggctgtggagaaggttcttggacccgttggactcacacagaccctgtaccctctcggcaagcatcttcagtcagattatcctcagtttcagatacttcataataccttgtgttgtgtggggtcatacatcatcgtgtttgtaagagaagatggtcattttattctctgtataaaacttagctctaaagcagaaactaaagcagcaaatgcaggaaggctgtctcgccatcctcaagactcagcagctctcattctccagtggtgagcacaccatttgtgctgctgctgttgtcgtgaaatataataacagtggaagtcacaaaaatgtcccctggccccaggcccccctngccgcccttgacctcctgccagggccatgtgtgtattacttgtctagtgatgtcctctcaaagtgctgtacgcgagcctggcgcccacctccgcctccctttcagagcctgctccccgccctctccgctcgctgcattgtggtgttctcttctcaaggctttgaaatctccccttgcactgagattagtcgtcagatctctccccgtctccctcccaacttatacgacctgatttccttaggacggaaccgcaggcacctgcgccgggcgtcttactcccgctgcttgttctgtcccctccctcggaccaaacagtgctcatgcttcaggaccttgtttgtcgaagatgttggtttccctttctctgttatttatataaaaataatttatcaaaaggatattttaaaaaagctagtctgtcttgaaacttgtttaccttaaaattatcagaatctcagtgtttgaaagtactgaagcacaaacatatatcatctctgtaccattctgtactaaagcacttgagtctaataaataaagaaatcagcaccccttcccggtgtcc

SEQ ID NO: 992 - DNA, 2037 bp, Homo sapiens
aaaatgacaaaagcagggaaagttacagattcaaacagcattttaactcatgttgatctggataattaatcttttctaaagatgtgtagtttcttggaaaacagtgatatcacatgattaaaattacatttttatcaacataattgtctggaaaagataagcccctcaattttctaccagttgacttttattcattagatacagaaggtgcagtattacacatcaccagctgcctttgtgaatggctcactacacagccattggggtacaactgtgtgcatgggcagaaacagcaagtgccctcattgtggtcattgggtggggagtgccttttgtcaaggagtctgcaggaattggcttatttctgtatgccaaagtgatcaacacaccaaagtctctgccataaagaatgtggcttccttgcatcctccatcctgttactctgggcccagtaatttgatgtaactgtctgattgtactagagacaggagtatacccagcttattcataatcaagtaaagagactcagattagatttgattttttagcctcctctagagccaatcaggcagttaagagtaataaaggaaaagggtttggtcacaaacctaaccattatctggagattacttcctgctgcactcctgtcttgccatgcacggtcttgccccctcacttttgctcagcctagcagtctacttcactttattgccttgtaagtgtcaggcctcctgggcgctctggaaaagacagggagccaggccctctcacccctactggtaacagggtcattgctgggtgcacaagagggaggtgatttgcatcatggtcatgctgcatgggcttcactgggatgctgttaaacaccagaggagccaacctatcagaatcccagcagcaaaggaaaactcagattttagaggctttttacaataaagtagcgtaactctaggtcatgattgatttcaaatgcctgccatgaatgatttgtaagtaattatgtaggatccatcaaagcagtattgtaggcttttgaattgtcccagtggatccgggaccccatttcactgtctctcttgatcgtgttaatgatgcaatcagagttcaagacaggccccatgaagtctgactgcactgggatggagaaatgaatttcttcccactgaaggaaactctttctcattcgcagccaagacgggagtgccactgttcctctcttcactcctgagatactgcttctggaagcgggtgtcacttcctctctagtacctcttctcttctctgaagtgtgtgactatctcctagtgtttaaatttggcagttactcgccatgtatgtcagcatagaaaaggaaatgtttttaccttatctcctgtatgtatgatagaacttaaaagaaatgtgcatttgttttcatagccccagcagagaaaatcctcttcatagattaaatgtgctgctgtggacaggagggaaaaaaaaaccctctacatattgaaaggcaccaaatgtaatatctgacactgttaagatgcccaaaagagcaaagttgtagtggagatgcagggtcatttccccatgccatccacagtgtttgttagtgagtccacggctgacttgcagtgataaagaaaagcatggagctgtgtctgcagacaatggtggctgcatctgtaagtggcttcagaggcagcagccctggggaaattgatgggtgtggcagtggacctgtgaagagggagaatctagccttcagcctgtgccagtgttaaccactagagaaactgagctttatatccttttttaatgcctgtgaattttagcatattgaaacattagagcaaatactcaggggatttttcattaaacatccctcagataatttagctatatatcattagaaagggaaagctatcatttttattttaaaactaaacaaggccatcttataaactgtcaccaaagtcttcccttttttattgcatgtgtgccttgcaatttcataaaacattaattcacaatgggggtcagaatgta

SEQ ID NO: 993 - DNA, 1649 bp, Homo sapiens
tttttttatcgtatattaaagtttttattccttagtaagaatttttaaatcacaaaatagtgtggcaatatttaggtaatagaatttatggagtgctgaaaatactagaatataaaggtaatttctagtttatcgtcacatactaaacttttctaaaccagctggtttctcacagacagtatttatttttttaaaataatttaagacagcataagcttgtaccaagcataagcattgtaacaaaagtgcaacttttcagcaaatcctccccaaaagatattttaactcaaaatatcattagcacatattttctccctacaaaaatagcatgtcagacatcattaattgggatgtattaacaactatgtacataagagccaccttgtaggctaagagtttaacgttgtttaaacacagcgtttgaggcaaacagtagcaacagcagcagcaaatgcaccaaactgacgaaaagacccagatattttcctcactcatagtcagactgttgtgtctcaccccttacataacatccaagtgagatttctcacagtgctaccttggcaacaaactaaaaatatctagacaaggtcttggtttaagccttattaaaaaagctttctttgtgattatctggtatctggtttggtctccagaaaatacatagacttggagataggaaggcctcacaggacttcattctatatctttacagcatttgcaatcaaaactggccagttaaatgctttcgttcacttttgaattttaacagaatataggatatatcagtttggacttgttttttgttgttgttgttttttgttttgttttgaagttcagtgcacttttttttacagtaagattacaaaaatttaggaacatgatggattaatgagagtgggaatagatgcacttgagatgtgtatgtatagatacctatctatggataaatagaaatctgtacagatagatatctatctatatatggacttagaagaaattaagatgagtccattaattcatggtcaatttctcaataaagtgttagcaaatgtactaggaatgattctggccttctcatccatctccttccctgacttagttctgacgatggcccagctccgtgtttctttaacgagtgcaagttactaagagataccatttaaaccacttcagaataggttgcaacgtgagaaactgcatcctcacttctttgaaaaatatatgccttttagaaagctgaacattagaaaatactgaagagtaaattcaattctaaaagagcctcaatctgtttgtggaacgcctcctaaaacaggcagggcagctttgagaactagctctacataacaactacctgctgttccatgtcaactccaaagacgtcaaaggtgttaacatctttcccctaccccggggttcacctagctcagccacagaacagacccttcttacttcctctcgaattaggttccaattttaagagataatggaacatggcctaaaagggggcaaaatttatttgggggattaaaaaaaagagccagtgtctttcgcataggatcttttacagctggtggggggaagaaagggatgttagtgtgtggagggtggggtggtgcgggatgagcaaaacaggaactccgaatgta

SEQ ID NO: 994 - DNA, 375 bp, Homo sapiens
gttttacctatggatgtttcattaaaccagaaggcagaagaaacatacttggctgcaaggcttgtttctttgcttcctcttgagtacttctgcaaaaatattacctgggacctctttgtgccatgttgtgaccaacactgtcattcctgatagggagggaaaatgtgattaaattccccacagtttaatttgaaatgctatattaaaagatttgggctagaattctcttctggtcttcgttttgatagtgaagtatactggcacatacttaaaagttagctcaatcaaaatgcttcataaatcccagctttcgttactcttcaaggaaaagatgccagtttacttctctttaaataatgtgtttagtctgggcat

SEQ ID NO: 995 - DNA, 376 bp, Homo sapiens
ctagcaccatgttcaataccctgggttggcttcctgctcccctgtccctgtcaccaatagcagcttcattgtgagaagattaaaacaaaggaaaaaaacccaaaaaaactgtttccaaattgtaactaaccaagtctgtgtaggaaattcacaaggcagcagagcagaggctgcagaggtgctctgtctaccgggagaactaatgatccctgtgagcaatgcagggtgcaatgagtcacatggggaaatgtggacagaggcagaaggacatcaaggcccccactacacaccaaattagagtcaatcctcctgttctccccacccacttcgcaaactaatgacgtccgcgttatcccagaggagagtggctaggtac

SEQ ID NO: 996 - DNA, 418 bp, Homo sapiens
  misc_feature (1)...(418): n = a,t,c or g
aacagagaggttaaggaacttgcccaaatgtacacatttaataaaaaatgtggcaaagtttgcatttaagtcacatgagtgattaaaaaaacccacattcataactcctgcatggagctggaacagaagagacctttgtgaagcaacatctactaacttgagcatcttccttcttcacaccaaggtctggggataggcattggctcccatgcacttgtgctgtcaaataaccagtgttttctgcaagcacctttctgtagggtaactggcctgagcttcctgcctggattgaggggcaatcagggatcagcccttcattgttaggcagttgttctgttaaccctgggtatagctggggggtggggaccntggcatattactttaccaggcagttttggggaaaaggatgtttgggcct

SEQ ID NO: 997 - DNA, 1467 bp, Homo sapiens
aggccagaattcggccgaggttttttttttgtcatattatggattttattacagtacgtgtgtgtatactaactgaagggaaaaatgtaaacaaaaccaagtcatggggaaaatggcatcttgctttaatcttcaactgaagttaccttaacaatccatttacaccattatgtcaaattttagtcatctctgcagaattttagacaaatgaaaacagacaaggtaacaccaaatagttaagcacagaaagtgatactgattaaaaagttgaaagtaaaatctaccttggctagaactgaacattcagatctgtctctccagaggaaaatctaacttgaatcataatggttcatattttgactagttcataccctatcaattacctacttatgacttgaacataccttttctcagctgcatgtgacagcctaaaaccccactgagcatgctgccttggcatgcatttactccttctgaaatcatcatctactttctaaaaaccagaaaatgagtttgtgatttaaatttcaaaaaatagtttgtagaaaacacaaaaagaatcaactgtttaaagtcttatccttttcttcactctatgacagctacttctacaaaaaaaaaaaaaagagtatgtgggtactttctaagaactcagaaacaagaaaaccaaaatcagagggtgcatgaatatatgtgcacgcacatgtacagacttaatctctacatcccccaagacagatttaaacaggtaatcccaacattttaaattcagaaaccagagacaaacagttttgtttctaaatcagtggtattcctagctgaaatgtttagaatactgcactcacagttcagcagtactttgattatatatctcattcaaaaaatcaaaataatggccacattcttctaacagcaaggaattctcccactttttatttattttcaaatactgctgtttccataaaccttgcaagtggaagataagctgttcaataaaagccttctttcatatatgtatctatatataaaatatacagacgttattttagaaggtctgttcatataacagatttattttgggtacctaacaaaagttgtacacaattccatccaattgtatggctagaaatgaaacccataacctaaacccaagacacacagggctttccctgcacttggttgaaggaaaaaattcccacctaattccttactgcgttagaagaataaagcacgtttgtcatagtacacattatcgtagtcccttaaagcagggactatttaacaatgtcccaggcttacttctgtctgtacattcaggaataatcatatcactggttacatacaattctcatgcaaagaaaaccctcaaaaaacaaacaaaaaaaaccctcagttagttgttttcttaagtcgaattaatccaaactaataatagccatttaattagcaatctgtaaatcagagagg

SEQ ID NO: 998 - DNA, 401 bp, Homo sapiens
  misc_feature (1)...(401): n = a,t,c or g
gccaactccaaatgtatttggaggtgggcctttcagacgtaattgagtttagatgacgtcatgagggtggagcccccatgatgacactaagtccttctaagaaaaggaagagagtctgagccctcctctacaccatgtgagggcacagagagagagcagccatcaacaagctgagagaggaggactgagaatgaaacctacctcgccagaaccttgtcatatcccttcccggtttccaaacgannnnnnnnnnnnnnnnnnnnnnnnnnnnnnnnnnnnnnnnnnnnnnnnnnnnnnnnnnnnnnnnnnnnnnnntgcatgcttcttggactttgtttttaactcaatatgaaaaacatatgttttaataaaaaaattaccccattcaaaaaaaaaaaaaa

SEQ ID NO: 999 - DNA, 467 bp, Homo sapiens
ggaagaagatagagaaagagaagaaggagtttttgcagaaggagcaggatctgaaagctgaaattgagaagctttgtgagaagggcagaagagaggtgtgggaaatggaactggatagactcaagaatcaggatggcgaaataaataggaacattatggaagagactgaacgggcctggaaggcagagatcttatcactagagagccggaaagagttactggtactgaaactagaagaagcagaaaaagaggcagaattgcaccttacttacctcaagtcaactcccccaacactggagacagttcgttccaaacaggagtgggagacgagactgaatggagttcggataatgaaaaagaatgttcgtgaccaatttaatagtcatatccagttagtgaggaacggagccaagctgagcagccttcctcaaatccctactcccactttacctccacccccatcagag

SEQ ID NO: 1000 - DNA, 638 bp, Homo sapiens
gggaaacagaagttggagaaatacaacagaataaaagtgtcacttacgatctctcaaaattggtcaactatcctggttttaatatatctactcccagaggaattccagacgaatggaggatctttggttccataccaatgcaggcatgtcagcagaaggatgtgtttgccaattaccttacttctaacttccaagcgccaggtgtgaagtctggcaacaagaggtcttcatctcactctagcccaggtagtccaaagaagcagaagaatgaaagcaactcagcgggatctcccgccgacatggagctcgattcagatatggaggtaccacatggttctcagagcagcgaaagttttcagtttcaaccaccattacctcctgacactcctccactcccccggggaactcctccacccgtcttcacccctccactcccaaaggggcaccccgccgctgactcccagtgactcaccccagaccagaacagcatctggagctgtgggatgaggacgcactgactctagaagaactgggaaggaacagcagaggcggatctggggcagctcttgagcaggccgagagcgtaaaacagcgacttccgacgttcctgtgggacacaccttttaactgggcatttc

SEQ ID NO: 1001 - DNA, 580 bp, Homo sapiens
tttttttttcttctttaaaatacatacgaagtgtaaagagaaaatggccaaaacctcaaaactaccattgttgaaaacaatattaaaaggacacaatctaaaatcatgctacaaaaatagtgttatcttgtttaactaaatgtacatctttttttccaattccatgattgacaagagtgcttatgcgacgcatggaaggcaccagaggtgaagtgattatttgccttaaaatatacaaagaattgcctactttgaaaaaaaaatagtcatacttgtaaataaatagtttagtgtttctgccatgggttcctgaacccctacaaatttcaacatatacaaatagtttcaattcctaccattctcttagagggaaccacgtcaaacaaaatcaagttaggaaaagcactgattttatccaagtaggtcaatttgaggcaagattcaaaaactcattttaaaatgggttacgagtgaaagagttgggaacaggcagccccctttgggcctgggtcagcctacgagtccatcccaggtgtcctgccctcacatctgccagccctcaggccggccaggtctcccc

SEQ ID NO: 1002 - DNA, 1664 bp, Homo sapiens
tcaccatcagtatcatttttattgcaaatcagttaacaaaaaagatgaaaaaaatacatcatctacagttcctcatgtagatcacttttaaagtctttttctgtaaactacactctattttataaaacacagtaaaaatcaacatcttgggacgcatctggtcatgccccctggggatgggcaccacgcggcccccgtagagccgggggaggctgccctgaggagtgcaggcggcacggcagcggagcgtccccagtgcatgggcggctaaggctccccgagctgaggccgagtctgacgtccctcactggcatgacacacaacagactcattcattaagattttttaaacaaaatccacctttaaaaacatatttacagacattttttctgccataggctatacttggtattgcaaaaatctgctcctcccaaactaggaggggtggccaagggagcccccgcctccctccagcccctgcccgaccgcatgccccctgccagggctgcggggacaggaccaaaggacgcagcccacggcgttgcacagctcaatgtgcccggctctggcaagtctcctacaaaacacgggagcccacggggggtcgggtcccgcgagctggggcccaggctgtgttgctggagcatcttcttcggaacctgggggacactgtgcaggctgaggtgctggggccgccaccggggtcagcccaggcagtgtctttccccagaaaagggtaggatgcctccgtgtgtgacccaggcaagtgccacagtccacacatctcatgtttgacatgcatgatgcctacatttcaagaacgggcagggggccggggtggttctggagggaccaagaacttgtataaccaacgaacaactacataatactgaacctgaaacaaagattcatgattggtaccatgggtgcaactcttggcatacacactcccgagaaacacattttcacaagcatgcttgcaagaaaccatctaaaacacatggcaacatctaacccatatgctttcacttgtttcctatttcagatgcaaattaatccgcgtgcggaaggtgagccagctttgccctccgtttgccctctggatgcagcttctcctaacaggcaggtgatgctggtggagcgggccggggctggcttggggttgggtgggcgtcggggaaagggcgcggcctggacgccccaggagctttttggactatgctcgttcaacttcccttctccaacatcatttctttttggattttgaaaaaaggaatcaataaataaatagcatttataaatcatgaatctttgtttatattttataaacacagaagaatcttttcatcctacgtaggaaaaccctggctctcagaacttgcttgttttctcagaatagataaaagtttctacctggggccagataaaacagtacatataaataaaaaggcagtgtttctgtgtaaaataaaagtacataaataaatactaaaaaaaattaaaatccttgttcttattttgtataaaaacatgtgttttaaaaaggctcctctggtcggccctggcatccacagagcgcacacagacgcccgaaggcttgggaaaggaagccggggtctcgtggggcgcgccgtttacttgaaggctccggaatgcgggcgatc

SEQ ID NO: 1003 - DNA, 1034 bp, Homo sapiens
tttttttgagcagagaacatgctttattgaggagtagatatagaagagcacattctaccacatgtggggaagggtttagcttctgtaaaaggcctttatcccttaagaaaacccctagtgaagttgctttttgataaattttaacagtgacactgaaactggaggggagctgccactgaacatgcttaaaattagctcccccaacccacagtgaatataagtagtgtacagagatgacaagagaaaggcacaaatgaccggagtcagggattgtggtgagggctccacatgaagacagcatgttggaggagaccaagttgggaagggtgacatgtcatacatcaaaagttgccccaagatagcaggttataatgggctagagagaaattagagggaacatctcttccttcacttgaacaacaccaaaaatagaagaccagagaatagaaggatggtgacaaatcccaaaaaggaaatggaggaggagttcgtggaagggcagaagcactttaatcctagagggagggtgaggcactgttgaaaagagaagcaaactttggccaggggtggccattctgccttgctgagtcatgggctgagatacggaagtcactttcaatcatttctactttctcccagggcactcagacaaaatcagtgcaaggtatatggaagtacagatgtactgtatcagactagtggaggtgaaaaggtttctgcagtataattaaccagttaatatgcagcatgaaagggaaaagtggaacattactttggcacctgcaaacgtaaaaagtgggagtaaagagagaaggaaatatttactagtgagtactttacggtgaggcaaaaagtagtatccgttccctttcaccaagacactgcccactgcccactgcccacaggtgaactcaaatcaaacccagaaccaccaccccttcattcttctctccatctcattcagatcaattatatgctattaccatgactagtccctgggaaactcttcaaaagtatttggctctggttagccc

SEQ ID NO: 1004 - DNA, 826 bp, Homo sapiens
gtctgccggacctcagcagggggcaccgcgggccggactgtggaggggcgcacgcccggaagcggcgagggtagccatgacggcctccgtgctgcgaagtatctcgccagccctgcgcccgactagcgggcttctgggaacttggcagacgcagcttagagagactcaccagcgagcgctcattgttgtctttctgggaactcattcccatgagatcagaacctcttcgaaaaaagaagaaggtagatcctaaaaaagaccaagaagcaaaggagcgcttgaaaaggaagatccgaaaactggaaaaggctactcaagagctaattcctattgaagattttattacccctctaaagttcttggataaagcaagagagcggcctcaggtggagctcacctttgaggagactgagaggagagctctgcttctgaagaagtggtccttgtacaagcagcaagagcgtaagatggagagggacaccatcagggctatgctagaagcccagcaggaagctctggaggaactgcaactggaatccccgaagctccatgctgaggccatcaagcgggatcctaacctgttcccctttgagaaggaagggccacattacacaccaccgatccctaactaccaaccccctgaaggcaggtacaatgacatcaccaaggtgtacacacaagtggagtttaagagatagacttgcaggctgctatccttaacatgctgcccctgagagtaggaatgaccagggttcaagtctgctttccacagaatcaggcatgctgttaataaatactggtttaatcaaaaaaaaaaaaaaaaaaa

SEQ ID NO: 1005 - DNA, 392 bp, Homo sapiens
cggagatgtgccccaagagtgaagatgtctggctggaagcagccaggttgcagcctggggacacagccaaggccgtggtagcccaagctgtccgtcatctcccacagtctgtcaggatttacatcagagccgcagagctggaaacggacattcgtgcaaagaagcgggttcttcggaaagccctcgagcatgttccaaactcggttcgcttgtggaaagcagccgttgagctggaagaacctgaagatgctagaatcatgctgagccgagctgtggagtgctgccccaccagcgtggagctctggcttgctctggcaaggctggagacctatgaaaatgcccgcaaggtcttgaacaaggcgcgggagaacattcctacagaccgacatatt

SEQ ID NO: 1006 - DNA, 190 bp, Homo sapiens
ccacacccaacaaaactttattgttaataaattaaggtatatctaaacatgtaactattcatatccttcattttattcaaaagggaaaaaagtaataaaatcagggaaataatctgttctcgatgcttattttgattctttgttattttccttttataacaacaaaatgtattaaaggagtcagctacat

SEQ ID NO: 1007 - DNA, 1113 bp, Homo sapiens
aggcccgcatcttttttttttttttttttgctaaatagtattgtttattaaggcttgtattctcctagaggaaaaacccaatgtcgtccaggactccattcaggcagtaacagttcagaggaagtgacacgctctaaatacaagtctaatgatacagctgaaacgttaactcagagggtcttttggagcaagtagttttcagaaagcgtctgctctctaggacggtaaggatcctctacaagggcacgtgcagatccaggcgctggagcgtcaggcatgggcaccattttcatgcttcaactcaaactccaggtggtagtgagctcaacggtccctcattccacaaaacatgacagcaaattcatcttctaaaaaaagttttgttttgtttttacccattcaacaggaaaaaaaattagacacacacgatgaaatttacaaccagcagcatcatccatcacactgtctgtactaccagatcctacacttaaagctcagcattattggtataaaaacttaagacggcattagaattcttaagaaaaggtgtaaaatttaaaaagatgtgcaaacaacaaagaatgcccgaccctgaaccagacctaaagcaccttccagttcctccacacatcatgccccaacaccatccagcccaatcggacaccaggacagtgagggacgggtggctgttcagtgggcaacagatctggaaggaaagattttcaaaaaaaacagaaaacaaagtgtctgccaaatttgaaaaattaaaagttatctgtctagcagaaaaatcaaatgggtaaattagcactttagaccgataacagataataaaatgacaaatcagaatgaacaaaaaatcattaaccttttgatttcagtattttcaagagattttatcagaatactctaaatgacaaaatgactcatggtttcttatgtttgctaaaaagcaataaagggatgagaaatatgaagtctcacagaatatcaaatgactgaatttaagaacacaatttctgccaaaatagatgctttgtttttaaggatacttacatttcacattagatcagtctgattgataagctgacaaaaaaaatactcctttattag

SEQ ID NO: 1008 - DNA, 806 bp, Homo sapiens
tttttttttttttttttttcagcttacatacaactttactttcagatagtttttacgggaagaaagctatgttttaaccacttgtaaaaggttaactactgtaaattcagcactttctaataacccttgggtcaaaaaattttaatcacagaattagaagtgttttaagctatattatgttttctgaaacagttgaaagactcctggatcttttgccatttttacaggctgctataaatgcgcttgatgggctcggcttcttccttgtcaaggatgcctttctccacataagcatcagcttgtttattgatgaagtctctcatctttgaaaggtcataatcttctttatttccctttttgtcatgtttcttcaaccattcaatattttttctgatggcttccaaataggcttctgtttttcctttgggttcatctgtctttcctcctgggttggagttatcatcttttgtggaatccttcaagcttccatattccttttccatcttagctgcttcttccttggtactgtctgtttcttcatgactcttctctgatggtgctgggaaaagcttgcttatattgtcagtagcatttttttctagcttgtttttggtctgaagagcaatcatttcatccaagttttcaaggtaggaaacaccttcttctggagatattgttccatatttcaccatcatcttcacaaagtcaatcagtgttttcatgatagtaatcagtgtttctttctcttttgcttctttttctgaatcaatacttttcagtagcgcatagaaatttgggaaatattg

SEQ ID NO: 1009 - DNA, 65 bp, Homo sapiens
ggcgagactccgtctccaaaaataaaagaagctgtgcactgatttgagaagctactggctccaga

SEQ ID NO: 1010 - DNA, 397 bp, Homo sapiens
  misc_feature (1)...(397): n = a,t,c or g
actggaaagaaaccatttaaatgtaaagaatgtggaaaaggtttaagttcagacacagccttgattcagcatcagagaatccacactggagaaaagccctatgaatgtaaggagtgcggcaaggccttcagtagcagctctgtcttcctccagcaccagaggttccacactggggagaagctctatgaatgtaacgaatgttggaaaactttcagttgcagctcaagtttcactgtccatcagcgaatgcacactggggagaaaccttatgagtgtaaagagtgtggaaaacgattaagctccaacacagccttgactcagcatcagcgaattcacactgggggagaagccctttgaatgtaaggagtgtcgaaaggtattcaatcagaaacnggcc

SEQ ID NO: 1011 - DNA, 1521 bp, Homo sapiens
gatccaaagggatttgcgtttgtggaatttgaaacaaaagaacaagcagcaaaagcaattgagaagaagcaccaagaaaacctggcatatttcctaaaacagtgaaaaataagcccattccagccttaagagttgtggaagagaagaaaaagaaaaagaagaagaaaggccgaatgaaaaaggaagacaatatccaagccaaagaagaaaacatggacacaagcaacaccagcatcagtaaaatgaaaagatccagacccacatctgagggctctgacattgagtccactgaaccccaaaagcagtgctcaaagaaaaagaaaaaacgggacagagttgaagcatctagcttacctgaagtcagaacagggaagaggaagagaagcagctctgaagatgcagaatccctagctccccgatcaaaagtaaagaaaattattcagaaagacatcattaaggaagcatcagaagcttccaaggaaaatagagatatagaaatctctactgaagaggaaaaggatactggagatctaaaagatagctctctcttgaaaacaaaaaggaaacataagaaaaaacataaagagagacataaaatgggagaagaagttataccattaagagtgctatcaaagagcgaatggatggatttgaaaaaagagtatttagcgctacaaaaagctagcatggcttctttaaaaaaaaacaatatcccaaataaaatcagagtcagaaatggaaacagacagtgggagtacctcaaaacactggaatgaaaaatgaaaaaacagccaacagggaagagtgtcgcacccaggagaaagttaatgcaacaggaccacagttcgtgagtggagtgattgtgaagatcattagcacagagcctctacctggcaggaaacaagtccgggatactttggcagcaatctcagaagttctttatgttgatttgctagaaggggatacagaatgccatgctagatttaaaactcctgaggatgctcaagcagtaataaatgcctatacagaaattaacaagaaacactgctggaaactcgagatcctttctggtgatcacgaacaaaggtattggcagaagattttggttgatagacaggcaaaacttaatcagcctcgggaaaagaaaagaggcactgaaaagttaatcaccaaagctgaaaagattagactggcaaagactcaacaagcgagtaaacatataagattttctgaatatgattgaaaaaaaaaacagttcacctcttaatacttcacaagatacttgagctgttcttgggagattcacttttattatggtagcactgcataattaatgtgtttttaattaaaagaaatatctttgttcctcaacttgtaaataagacttttttctagagacaaatatgatgtataccacaatttttcttaaacattttatttgttgaaattatcttagatgtcagtgtcaggtgatttagtaaataaatgtgttttgaacattaaaaaaaaaaaaaaaaaaaa

SEQ ID NO: 1012 - DNA, 253 bp, Homo sapiens
cgacttccggggcggcggttgcatcagattctaggaagtgtctgtagcccgcagctgcgggtccgggattcccagccatggcagattcctccgggcagcagggcaaaggccggcgtgtgcagccccagtggtcccctcctgctgggacccagccatgcagactccacctttacaacagcctcaccaggaacaagtgtttcttgcatttcttgtgatcgtcattccttcattcctaacaaaggaagtgttcata

SEQ ID NO: 1013 - DNA, 687 bp, Homo sapiens
gcattacttgttagccccaggcagggacaacgcagatgggctaattataatagccagaccattaaagggaatagcattaatggaggagaaagcagctaataaagagctgaacttggccactttgttgtgcccaggatacaaactgctgttaatttcagtacctgtttcttctgctgttagaactaggaagaaaggatttagtgaccctctttcaaaaggtggatcacaagcttagaggcattgctggataaattcaacagcaagactttatttcttccccagaggtgacgtctgatggttctgtataaataaagtcacaccacctttcttatgctgaattgatgctgctgacctgctgttagtaggacatgcacttttatggcgtttccaggagtggtgatgtgtgttgctgagctcatctaatctctgctttgagcaaaggcaatcctctatatcatggcagggattagaggtatagcctggggctgcagaatggtgtgatttaaattttcccatgcaggttcaaagcttgtaactttgcctgcgtgtacatccacactgggttccagccacatgaactgggccaccttcatagacctccctggtaaccacagcctgacgtgacaaggaatcacagttttactttctgcttactatccatgttagaaatatctaaggaaattcagg

SEQ ID NO: 1014 - DNA, 553 bp, Homo sapiens
cgttcccggagtagcaggagtagctgtgcgagaggtgccactcctgggcgcttgctttgcctccagcatgacccccgaccctggcttgcaccctgaatctagctgcgagccttgggcagaatggatacctgaggaaaggtatggtttctctccagctcagatctaactggactctcggctcctgctggctggacatggaggatttggaggaagatgtaaggtttattgtggatgagaccttggactttggggggctgtcaccatctgacaggagtcacccacttgcaatctgttccctgcatccaaaagcccagcatcttctcctcttacccgatcgactcccccagtccgggggagagccgggcccagtgggagagcagcagccagcccacccacccccatcagatccgtcctggccccacagccttctaccagcaactctcaacgcctgccccggccgcagggagcagctgctaaatcttccagtcaactgcccattccctcggccatccccaggcctgccagccgaatgccactcaccagccggagtgtg

SEQ ID NO: 1015 - DNA, 706 bp, Homo sapiens
ttttttttcttgtccacagtagagtttaataaaaatattcactgaaagaccccccccacccccatcggcccaaagctgaataagttagttagctgtgtccctggtcctttgcgatggtgtgaggctacatcctcccccagatggctacgatgttggagtccgtcagggcggtgaggtaggtgaaggaggcattggccaccactgtgttcaccatggtcttggtcaccacctgggccaagggcccagggctggggccacttcaggatctgtgtgggggcctgcagggctgccggcagcaggggtggctgcttcaggatgttgctgacgtcgtagagccacacgttgccctcctcatccccacagagcacaatccccttatcagggcaggcgctgagcgagaagtaggccaactcggtggacgaccattgcagccgcgccaggaccaccactgccactgtggactggctgccccggcccccccacgtctgcctccagctccacaggcagatggtgcccaggccgctccccttggaggccacgatgtcctcattcacaaatgccagcccatccactctccgtccagatgcctcggagccctcagagaagacgaattccacttcacacaccctcctcttttggggctggtccagccgcacgtcccagcagcagcagccgccctcgcagccggccagcaggcgggcgtccc

SEQ ID NO: 1016 - DNA, 1166 bp, Homo sapiens
  misc_feature (1)...(1166): n = a,t,c or g
tttttttttttttttttttccatcattgaaaatgtttattaatttttatgtaattcttctaatcctaaaagactgaaaacattgctctttatagtttgcgggaatttttaatgccctaaacagaaactccaacagcctcatggcttgctttaaagcagagcctgaatacagggggaacacaggtttgcctgagggttaagaagcatccaagagtaagggaagactgggtaagcaaagcaaaataaaggggcaaacaaaacaaaccacacagcacaagacaccctagcaaaggcttcccacagtgcccccacacgggtaggcacccaggccttttgttcttataaaatatgtttttattggtctttgcagtctcacgtcacaaaataacaaaatgaacacaaggcagatagagctggttggggagcacagacatgtggtggccttgaaagcagcttttccccttaagtctctagaacctgccatgagtaattaagacagtctttgaggatggggctgtcaggtgggggcgtttcagcaggtgccgacgagcgccttacaaacgactggctgaacacctttcctcccaggcctctctgccccagcatcactcaatctgctcagtcctcgactgctgcaggggaatgcgtgctcagagagagatgacacttctgaggtggcccccagctctgggtgcagaggagccggggtggggtattcaggccacacttccctgtggccacaggggaaaggaccaggggaaaaaatggggcagggatggccagctaacaaggggcctttggctttgtcctttgtactggggagtgaatttgcgcatctcagcagggagggtctcgtagaactgatgttcccttgggaccaggggcttgcacagggttgtctcattgaagcggagcacgcatgagtgccccccgacctggtggacaaagggctccagaaagngacctttggcgcggggctccacatccatggccctgaaggctgggctcatcctccgggcgcagatggcggggagatgggggaggcagcggagtccagcggccagtacgtcttctgtctgttgtttgtccgtgtgtccctctcgtcttggctccttggcttgttctggccagggatntctgccgcctcagccgggntcctcggcgttt

SEQ ID NO: 1017 - DNA, 2064 bp, Homo sapiens
gggctggcagactacgccctggagtcaggaggggccagcgtcatcagcacccgatgttctgagacctacgagaccaagacggccctcctcagcctcttcggcatccccctgtggtaccactcccagtcaccccgagtcatcctccagccagatgtgcacccaggcaactgctgggccttccaggggccacagggcttcgcgtggtccgcctctctgcccgcatccgccccacagccgttaccttagagcatgtgcccaaggccttgtcacccaacagcactatcttccagtggcccccaaggatttcgccatctttgggttttgacgaagacctgcagcagggaggggacactccttggcaagttcacttacgatcaggacggcgagcctattcagacgtttcactttcaggcccctacgatggccacgtaccaggtggtggagctgcggatcctgactaactggggccaccccgagtacacctgcatctaccgcttcagagtgcatggggagcccgcccactagccctgcttactggtgcctgctgccagccatctgggagtgggtgaacagcaccccgccgcttcccccacacgcttgctcggcgctctgacttctaggagcacaagagaggagcctgtggccccatgcagatgaaaaggacgggcagggtctcctgagcagcaggtggctcgaggcggttagcaggctccagcagctcccttcttccttccctctgtgcccgtggcgtctgcttcccatcctgggagtgtgtatatatgtagcatatcatgggggactgggaagttgggagaggtaggacctgactggtcttggctggggtcaggggctggtgcctggggagctgatgaagcaggtgccagggctgtgggaggggcaagctacggcctgggctaggtgagctgcctctgcccctgggcaaggaagcgaggccctctgggaggagggtgcttagctccagagcaggatgggacttccccaggcaggaagcacttgatggagagctgcccagctctcctacaaggttagtgccctccacctagggaagcctgaaccacagggtccctgagggccttcgacaaaagtgtgtatttgtcccggggagggtagcagtgggccatggggcttcttgtgccctaaaggggactggctgctgtgatcttctaaggggcccagggcaacctctgtaggcttcccctctgctggggacggtagttgcttttctctctcctgatgctaggttggggcccaccctgctccctgttcctgctagggcctgccaggtgcccctgagcttgctttccacattctcccaggggtatggagacctagacctgtctttggggccattagcatctggggttatagcaagaagagtggggagcatggaactcctgggctcttgtggggacgttcagggtatcggggtgcgaggtctgtctgcaccggcccccacatctaaccaggccctgatgtaggggtcgtccgctcaggctgcccccttgggctcttgcagctcttgttcaggtagtcgcccttctggtttgttctctgtggggcagttggtgggggctgggggaagaggctggcagaagttaccctggatagggaagggggaggaggggacttttagagccagcaggccccactgtattatgtatatatttttcaaggtctgtttttctaactgaaaagctaagggcttgattcctagccccgttctgtggggcacctgggtgatactcagtttcttgttcctggccgtggagaggggcctggggcactggttccggctgtgtctggtggtctggctgcggggaaggggcaagaaggcgggcaggccttcactgcagcactgagcctcaaatccgctctggagcatgaggctggatgcagtggtggtgaggccgccccgctccatcccgaggcagccagggtttgttttgcgctctcctgtcacaaatgctgcactattggttcttaagttttttatctccagatcctaatttatgcctatgcaaaaaataaatgacgcccaagaaa

SEQ ID NO: 1018 - DNA, 564 bp, Homo sapiens
aagcccccggagccgggcaaccagtggaaggagcctgggagaggccaggcctccccggactgctagcctgcttttcctggggtccctggagccggaggaagaaccaggatgttgctgcctgcagaagctcagctcaggaagacttccaggaacctgaggaggagctgccactaacagccatatttcccaatggagactgtgatgaccttggaagggggtcaaaagcctgtgatggagtcgtacacactcctgctgagcccaccggagactcaagatgaaggctggacccttgcgctgtccctggctctaacctacagactggggcctggctccgtcttactggcccccaggtctccatggagactgcagaaacccccgcctgctggaggcctgccacactcacagttaccagctagacagtggggcttactaagacaagcaggacctaaaacagtgtctcccctgggaacctactccccacccaagcatttgctaaagtctgattcacaggggaggttattttgtctctctgtctcggtttctctgaagccactgagacagatg

SEQ ID NO: 1019 - DNA, 792 bp, Homo sapiens
taaatgtgtacctaatgaaaagatctccaagaggtttgtctcattctccttgggctgtaaaaaagattaatcctatatgtaatgatcattatcgaagtgtgtatcaaaagagactaatggatgaagctaagattttgaaaagccttcatcatccaaacattgttggttatcgtgcttttactgaagccaatgatggcagtctgtgtcttgctatggaatatggaggtgaaaagtctctaaatgacttaatagaagaacgatataaagccagccaagatccttttccagcagccataattttaaaagttgctttgaatatggcaagagggttaaagtatctgcaccaagaaaagaaactgcttcatggagacataaagtcttcaaatgttgtaattaaaggcgattttgaaacaattaaaatctgtgatgtaggagtctctctaccactggatgaaaatatgactgtgactgaccctgaggcttgttacattggcacagagccatggaaacccaaagaagctgtggaggagaatggtgttattactgacaaggcagacatatttgcctttggcttactttgtgggaaatgatgactttatcgattccacacattaatctttcaaatgatgatgatgatgaagataaaacttttgatgaaagtgattttgatgatgaagcatactatgcagcgttgggaactaggccacctattaatatggaagaactggatgaatcataccagaaagtaattgaactcttctctgtatgcactaatgaagaccctaaagatcg

SEQ ID NO: 1020 - DNA, 756 bp, Homo sapiens
ggcggcgtgggtgaagccgcagctgcttggagcgtctcctgcatctgtccctggcctaaacccgacgctaggctggagggagcgactgcgggccgggctggcggggactggggcctcgttgtggttcgtggcggggctggggctgctttacgccctgaggatccctttgaggctgtgtgagaatttggcagcggtgactgtatttttaaattcattgacacccaaattctatgtggcacttacagggacctcttcattgatatcaggactaatatttatatttgaatggtggtacttccataagcatggcacatcttttattgagcaagtatctgtaagccatttgcaaccactgatgggaggaacagagagcagcatttcagaaccaggttctccttcgaggaacagagaaaatgaaaccagcagacagaatttgtcaggtgactacttttctaatgtgttttcagagctgtgtatttaagattgagtttggctctgggagatagaaaactcaaaacagcagagtgctgtggtgtgcatgtttgtgtttcccccaaaattctaatcaccaatgtgatgttacgaggtagggtctttgggaggtgatcaggtcagtgagggcagtgccctcagggatgtgatgaatgcccttatgagagaccccagagagctgcttgccacttctaccgtgggaggacaccacgagaaggcgccgtctgtgaaccagaaagcagaccctcaccagacaccaaattt

SEQ ID NO: 1021 - DNA, 2055 bp, Homo sapiens
ggaaccttcgccacagactcctgtactattaacaatctgtaaccaagctaactgtctcatccatgtgttgatttcctgtttcctcctcccccgcctcttccagttcaaaggagtctgcaattggaactgctgattttcggtgggttttgtagttgatttttccaagagcgtcgaagactctctttctcttggttcaccttgcctgtcgctagcaagcatctggttcagcggaaatgggatgtgagaatgatgaaacccgacagaagtatctcagcctgcagtcagttattatgtataggaggtgagctagttaacaaacttgtaccacaaaacaatatcgctttaacttttctaaagccaaatttcccatgtaagctgcagtttctatctttagcccatcatcattttctgcccccccaaaatctgttgaaatgattcactgatgcaaaacattcacccgtaatagactgagaattgagccttaacttcagattaacttgtgagaatcaggaaaattccttcaactgcattgcatcctcttggaccagggctagaatggggatttcaggtttctatgagcctccccattacccctaaagtagaacattttttaaattgtgttgccaccacttctaaaaatttagcaatattagaataggatactagtgaagtaagaaattttgcttgttgttttgcaaaccaaatagtttcctcaaacacaaatcagtgttcccacgaacaagttccaattgagaaacactaaggttatggtgaataaaaccatagggagctttttccccccaacccctggctattttatattaatggggagaggggatttttaaatgtcataaatttgaagagtggtgggttgcattttcttcatgggtttatgttttcgtttcattttggactcaatttcacatcaccaaattcctcatttatacttggggaaaaaacaaggccatatgtaaaaacccttccaatgcctaagtgtctttctcctgcaactccaaacccagactcgccactttgggtgcacaggtggttaggtcagccaactggttctgcctgtcgccttgccacggaggaggcttctaattagctggaaaagagtatttttctaatacgttgcaaggattagccaaatcttcttattgaagaaagaagaaaagtgaagagtggttacctatacctagcatagtacaatcagaacctcgtggagaccaccggggacaggcttgcggacgccggctgttcttcccgccacgatctttctgtggtagcggccagcagaagacatggcctgctccccactccctttccccactccttctttattgcacacagggacaccagtcttcaaggaaagggacttttttccagtctgccaatcatattgggaaagtgctagctgtgctcaccttcatgggggctgtttccagctcgtccacaagctcatcgattttctttagtagattaccggtgtaaatacccagtgtgcttatgagtcagttagtagacgtcttcattcattggagtaactggtttaggctttccagtttggaaaaggagcagagagctgtccatctggattgatggaagaaaagagaacctcatccatgcctggagaacatctagaaaaccttcagccagcctccagtgctgtcgagagaccaccttcccccgacccggaggcacttccttggggtctttctctagggtctcttctctacaaagcacaacactaatgttcgtttccttagacctcagttcaagtgcccctatttatttcaataagaacgcacatatcccagctgttttttgtttgtcacctctatttagttgttacctgtttctctcttctttcaccccttgtccttttccacccttttaagagttacgctagcagatcttactccacgtatactttttcggtttgtgaaggcatcggttaagggcacaaagacagccatgggggacatttatgtaaatacgtctctaattgccacactggcagctgaacagtgtgtagtattttcccagtcagctttg

SEQ ID NO: 1022 - DNA, 389 bp, Homo sapiens
gaactggagactcagaaggggaagcattgggaaaccatgtatgtttcatttctggtttaaccaggcttttcaggatgggacttcagaccaaggacacaagttgggcttgcttaggtgttttgtgttgtgcgcaggcctcagagatgctcttccggtcagagttcccttggcagggccttggaggcctctggttggctctctcaggaagagggcaggtcagggattgggcggtgtaaattgactcagaaacctgcggtttcagcttttctgtggcaaacagggccgagggctggtgaagctgttaaggctaaatgtcgcatgcatgaggcgggctgcaggcctccttaggccttttttggggtaattacaccagtatttaaaaacaattt

SEQ ID NO: 1023 - DNA, 548 bp, Homo sapiens
  misc_feature (1)...(548): n = a,t,c or g
cgagggagaaggggaggagaggggtcgcagcggcgcgcggtgggggcagcgctaggtgtgcgcttcgccctgtaggtagagagaccctttggttagctttccacgccaagtggccgttccaggcaggcagtgtcgtcttggttcagccaaggtcacagagggagtgatagcttccgcacagccctggctacggactctgggcatctttccactgccccgcttgcgccacctgttaggcaggatcgtttttcctctggggcaagatcaaaatccaggtcctgcaggaagaaactcctcttaaaaatagtagggaagagtctccctggaactgttttctcctttcaggatgagggggatcgagcaagccactgtaacccctggcttggcttcctcttactatgagattgctcgtgggcccttangagttccaggtcttcagccctaatctgccttttttttgggattcctaattaancctgatcaagatgacaactcccaaaagcaccagacttcgtggnaagccatggggaaaancattgggaacctgg

SEQ ID NO: 1024 - DNA, 6472 bp, Homo sapiens
ggaagaaagtaaaaactcaaacaagctcatttgatatacaaaaagcagaatggcttcgaaaatataatcccgagcagctccttcaagatgaaggctacaaaaaacatataaaacaccactgtaataaggttttgcttcgtgtgagaatgctgtattatctaaagcaagaagttattggaaatgagtgtcagaaagtatttgatggagttgatgcaagtgacattgatgtttgggtaccagaaccagaccactcagaagttcctgctgagtggtgggattttgatgctgataagtcactccttattggagtttttaaacatggatatgaaaaatataacactattcgagcagacccagcattatgcttcttggaaagagtgggaaaacctgatgagaaagcagttgctgctgaacagagagcgaatgattatatggatggggatgtggaagatccagaatacaaacctgccccagccatctttaaagatgatatagaggatgatgtttcctcaccaggagatcttgttatagcagatggagatggtcaactgatggagggtgataaagtatattggcctactcaatcagctttaaccacacgtttgaggcgtctcatcactgcataccagcgtactaataaaaacagacaaattcaacagatacaaccgactttctcggtgcctaccagtgtaatgcagcctatttatgaggaagccactcttaatcctaaaatggcagccaagatagaaagacagcaaagatggacaagaagagaagaagctgacttttatagggttgtatctacatttggagtggtttttgaccctgacagaggccaatttgattggacaaaatttagagctatggctaggctacataagaaaactgatgatagtttggaaaaatatttgtacgcattcatgtccatgtgtcggagggtttgtcgtcttccttccaaagaagaattggtggatccaaatatttttatccagcccatcacagaagaacgtgcttctaggactttgtatcgcattgaacttctaaggaaagtacgggaacaggcccttcgacatccacagttgtttgaacgcttgaagctttgccatccaaatccagatttaccagtctggtgggaatgtggccctcatgatagggatttgcttattggtgctgccaaacacggggtgagccgaacagactatcacattcttcgtgatcctgaactctcatttatggcagctcagaggaactacagtcaaagtaagatggctcattcaaggacttctaccccacttctacagcaatatcaagtagcactttctgcttctcctcttacctctctacctaggctcctagatgctaaaggtattattctagaggagatgaaagttaaaagtgaaaaccttaaagaggagcctcagtcttctgaagaagaatctatgtcttctgtggaaaccaggacactgataaaatctgagcctgtaagtccaaagaatggtgttttaccacaggctactggagaccagaaatctggtggaaaatgtgaaacagacagacgcatggttgcagccagaacagaacccctaactccaaacccagcttctaagaaaccaagagtccacaaaaggggatcagaatctagttctgattctgactcagattctgagagatcatcttgttcttccagatcatcttcttcctcatcatcctcttcttgctcccactctcgatcaggctctagttcttcttcatcttcatcttgttcttcagcatcttcttcatcctcttcctccacctcttcctcctcctcctcctcttcatcttcatcagaagaaagtgacagtgatgaagaagaagcccaaaaacgagaaagtactactcacatgaaagcctatgatgaagaaagcgtcgcgtcactgagcactacccaggatgagactcaggatagttttcagatgaacaatgggacaccagagtctgcttatatcttacaaggtggatatatgctggcagcctcgtattggccaaaggatcgtgtgatgatcaataggttggacagtatttgtcaaacagttctgaaaggaaagtggccttcagctagaagaagttatgatgctaacacagtggcttctttctataccacaaaactgctggacagccctggagcagctacagaatacagcgagcccagtgtacccactcccccaggtgccggtgttaaagaagaacatgatcagtcaacacagatgtcaaaggaaggtggtttgaagttgacatttcagaagcaagggcttgctcagaaaagaccatttgatggtgaagacggtgctctggggcagcagcagtacctcactcggcttcgagagcttcaaagtgcatcagagaccagcctcgtcaatttcccaaaatccataccagtatcaggtacttccattcaaccaacccttggtgccaatggtgtgatattagacaaccagcctatagtcaaaaaaaggcgaggaaggaggaagaatgtagaaggtgttgacatcttcttttttaacagaaataaaccacctaatcatgtttctttaggcttaacctcctcacagatttccacagggataaatccagcactatcctatactcaacctcaaggaattcctgatacagaaagtccagttccagttattaatcttaaagatggaacgagacttgcaggagatgatgcaccaaagagaaaggatttggaaaaatggcttaaggagcacccgggttatgtggaagatttgggagcttttattcctagaatgcagcttcatgagggaagacccaaacaaaaaagacaccgttgcagaaaccccaataaactagatgtgaatagtctcactggagaagaacgtgttcaactgattaacagaagaaatgctagaaaggttggaggtgcatttgctccccctttgaaagatttatgtagattcctaaaagaaaattcagaatatggagtagctcctgaatggggagatgttgttaagcaatctggatttcttccagaaagcatgtatgaacgtattctcactggtcccgttgtgagagaggaagtaagcaggcgggggagacggcctaaaagtggaattgcaaaggccacagcagcagcagctgctgcatctgccaccagtgtttcaggcaatcctttgttagccaatggactacttccaggtgtggatctcacaactcttcaggccttacaacaaaacctacaaaacttgcagtcactgcaagtaactgctgggttgatgggaatgcctaccggccttccttctggaggagaagctaaaaacatggctgctatgttccccatgctgctgtcaggaatggctggattaccaaatctgttgggcatgggaggactcctgacaaagcctacggaatctgggacagaagacaaaaagggaagtgactctaaggagtcagaaggaaaaacagaaaggacagagagccaaagttcagagaatggtggagaaaactctgtgtcaagttctccttccgcatcctctactgctgcattaaatacagctgcagctgccaacccattagctcttaacccactattactatctaatatactttatccagggatgcttctcactccaggccttaatcttcatattccaactttgtcccagtccaatacttttgatgtacaaaacaaaaacagtgacttaggctcgtctaagtctgtagaagtaaaagaagaagattccagaattaaagatcaggaagacaaaggaggaactgaaccaagtcctctcaatgaaaacagcacagatgagggttcagagaaagctgatgcttcatctggatctgatagtacatcgtcgtcatctgaggattcagattctagtaatgaagactgattcccagactctgcacttaaaatatgaactgattttggattttttctttaataattaattgtaaataccccagtgttgagtgcatcaataacttactgaccgaacatttcagttatttgtttagaagtgcaaactgctttcagagactttttgcatgtaatatttcttaagattcataagtttctgaactcgtatgtactatcaaatacataaaggtgtaaaattacaacaaaaggcattataattttgttgggggttaattttatgaaaattatgctcaataagagttgtatatttaatatatttgcagtgaacacagaatactttatgcatattactgatttaatttgaatatagttttacagcctccttgacacctataatttacagatcaaaactcagcaataatttgggcagctaatgaatgtcatgaaagctgtagaatctacatcaccatccattgctttaattacatgaaaatgctctagtgttgtgatgcactgctgatgtttccaattcaggtacaagtatgttttaaagaagaaataagtttcccaatcagccaatttaactggctacctgttacctcagctgagttagtttaggaagtttacattcgtttctaattctatacttgttttcaggggttttttaaacacatcctatatatcatgtcaatctggcaagaaatatgacttgctttttgctgagcttaattcagatatcagtaaaattaagtcataaaataatcatgtgtcatgtgactttggcaccctatagacatacttagttttaacttttcaaagtttggcctcctattagaaataatcatgtctcagatgagtaatgtctgtttccagggttcagaaaaggcaaactcatgaaatgccactgaaaagaactttcaacacagcatacttcatgtaaaagaaattgtttgtttgctttctttgtgtagatttctatttgtgttttatgtcatggaaatattccagaattaacagataatagtggtaaagtaatatgcagatagtctaaattcattttgagtttctaggtgtaagcagactaaatgttgcccagaatcagtgttgggttatcagtttatattaaatatactgagttgcccgttttgaaaatgcactttgaataatctcaaaaagatgtacaagttatacctgtaaaccacaaaagtgaagcctgaggcttctgttcaatttcatagactcctttaccatgtaaaatttgtctgatatttgatttgtgatacaatttctcctgctaaagctgctattattctgacaaggtaggaggtccaggttcacctttatatatatttaaaacaattagtactggattgggacataaaaatattgacattctaaggagagatatatgttagcatttttctggtactcaaataagttagtagtaaagtctgcaagggcataaatttagggggaaaaagtgtcccagttctctcctacagaaaaaatactttcagtatgttttgataaaactgttgctttgtcatgagttagtcaattgtatcaggttttccaagacctttaccagtaaattatgtttctgtatgtaaaataaccccttattagagagacagtgttatatgtatttacaaaattatataagttccattgggattgtattgattttgtattttcccaaaatagtactttgaattgatagtcctttatgcaatgtcttagcaatagtctctataatgcccatccaggagaagtgggtagtaattcttcatcatgaaaatgatatattacatatttagtatcttccctttgcagtattgcacttttgtttaactagaatacacctatgagatagccaaagtttcaaacacagttatcttagtttaccggtggagtatttcaacaccaaccacatttcccttcctccctctaattctacccacatgatctttattccttcctttcgccaattaaaaaaaaaaaaaaggaaaaaaaatctgtagatcttgtcactaaaatctaatttatatcaaatttatgagagaaagtattttcctaattatggtcaaataaatttggttaacatcctagtgattctctttctatataataaggcaattacagttttcaaagcattaagtctaacataactttaaacattctcttaggtttcaagacacttctatttaatattcattggggaaaagttgtccagctatcagctaagaaaacacatgcaaatatggttgtgtaaagttaagggttataaggaaaaaaaaatcagtagaattacataatactaaagttgcagttgaaagaatatccaagtatgtgttggtagttactaaaagaattatagctgttattgccttgtatttatagcccttgtttcaggttttatgattcaagtcttagtccaatctttcttttggacatttgcaatatttaccagttgtgttttgtgtagtctgaatttgctttctgtagttgagcaaacgtcttaaaaagtcatttgtaatttattaaattactttctatgatgttctatagagcaaatggaagtttaattat

SEQ ID NO: 1025 - DNA, 393 bp, Homo sapiens
gtgataatcagccattagtaactcaagaaccagtaaaggctacatcattaacactagaaggaggacgattaaaacgaactccacagctgattcatggaagagactatgaaatggtcccagaacctgtgtggagagcactttatcactggtatggagcaaacctggccttacctagaccagttatcaagaacagcaagacagacatcccagagctggaattatttccccgctatcttctcttcctgagacagcagcctgccactcggacacagcagtctaacatctgggtgaatatgggtatgatgagcctgagaatgtttcctcagcatttaccgagaggtaacttaagaatgcagcaagaataccatgcatttccttaaaaaaaaaaaaaaa

SEQ ID NO: 1026 - DNA, 886 bp, Homo sapiens
  misc_feature (1)...(886): n = a,t,c or g
acacgcatgtatgatctgttccctgttccttctgggtcaggctgtcacttccggctctcagccctatctcctgcaacctcagtgcctcagcctgagagagagatgagatgctcttggactccccactgcatctgggctgcagggccagagctagtctgaccattaggtcagtctgcctcctgacagtttttgcgtagtcaagctctaggcggtatgggaatggctaccgggactctaatggggtgaaagagaggggaggcttgcctttgagagcctatatagccttcctgtgagagaggattagatagggttccaactgggcctacaagctcaagccatacataaaaggaccttgggacataagaaccaatgattgtgcataagttctaaattagagacacatatagtttctctctttcagcaccagctcttgcccctatgctgggtaccaagggagttctcctagctgtggcttctctaggttctaggggtgcaagcctctgtgtgtttgtttgtgtgtgtctgtgtgtgcgtatccacactaggggtgcaagcctnnnnnnnnnnnnnnnnnnnnnnnnnnnnnnnnnnnnnnnnnnnnnnnnnnnnnnnnnnnnnnnnccacactggccagcctccctacttaccaaggttctccactgcttaccttttccagtgggacagtacagtgtgagcccccgggaagtactgcctgacctatcctaagcttttacacttggattttagccatcatatgttggccaggtctcactgcagcctgcccgaagctaactggctagagcctccaggccctatgatgctccctgcccaggccatatccttaatcctgctgagcttcctggctgaatagatgaaatggggtctt

SEQ ID NO: 1027 - DNA, 469 bp, Homo sapiens
gaacaggtgcaaagatgcatgactcaagcctgtacctcctcattatgggatatttccaaccaaagggctgtctgtactcaggcctctatacccccatacccctaccccatacccaggctgttcccttcttcgtccccctttagcctcttgtcttccctatttctttcaatgcccttgacttcccagcctactcacaatcatgggcactgaattgcagagtctaaaaaccaatggctttgggaggggaacattatacgtgatgttgaaaaatacattcgtttgcattcctagtgggccccagagtggcttaatccttaaacctcccagaagcatgcattctggaattgatgcttcttgacccaggcagaaggaaagctagccagatgagtcatgtgggcataggggtgttcccaacctccaaagccctggttccctgggctttggacttctctccacccccaagggccct

SEQ ID NO: 1028 - DNA, 1384 bp, Homo sapiens
ttttttttttttgaagaattcattgtgtatttattattcacagttaatcactacctaccaaatgctatccgcagagttaaaggattaagtacataggtctttatttaaacactgattttttttttaaatatatacacacaaaacttagttcagcaaggcttcatgatatacaccaattccaaaataaaacaatcaaatggtccaggtgtagaatgccagattccttttatcatctgcgaggaaaagagaagcaggatgaggaagagtgagggaaggcggggacagggctctgccccaggaaggaggctgccgcctcctggcacagcaaacgctccaggcctgggccctgttcatatctggagtcggagggagactcccatcggccgctttgggactgaaaggcccaaggctgtcaccagctcccggaagagagggaggcagtcttgtttttgtcgtgggaaggggtttgggtggagaaaaagattacaggcacatcaccacaggggaccagaagtggagagaagacagagagttctgccgaggccttggtcttcctgtctttccaatcttgccttccccaactctccctgcttcctgggaccatcggtaggggtggggagcagcagtcaacacagcccactgggaagggaggcacaagcagcactccagcttcccagtgctgccctcacactcacctggacaggtcaggggacacaggatgaaagccatggcccaatctaagagcaagacaagtgaaaagtgagtactctcactgtgtaccccagcataggaatagtgaaacctgctacaactggaggctgcgttcccatgacttcctcctccgctctccttgtctgggacttgctggttccaggggtgcatatagggagggggcgggggccacaacccccgagacggtgaggacaggcttccgacccccctgtaagccagatccagtgggatgtgggagagctgggcggtcaccttccctcttgccccggtggcccatcacactcacactgcaccctgggcaagcagttccctgaacccccaaggggctcacaacccttaaagctggagcttaaagcctcctggcttagtacaagcaggagaacgcctcaccttccactcctgcttgtctcctttgctctaccctggctcccctgcccggagggaaaaatatttacacagagtaggagacaaattggctgaaaagctctggactgtctttaacttattttaaaacaaaacaaattaaaaaaaaaaaaaacaccactcagaagcaacccttgaaataaggaaaaaggcactatgaaaaaacaacatgctcgataatcccactggaagggccaacaaagtggaaagagacaggctttcaggtggg

SEQ ID NO: 1029 - DNA, 1894 bp, Homo sapiens
ttttttttttaaatcataattaaatatatttaattctcaaacctttaggaaatgtaaaaagagtcacataataataaacacatatcataatgtgaataatatcatacgggctgctataaaggtctgtggtcagcatccctctgaggtaggcattattatcttcattttatggttgaggaaattggggcttgaagaggttaagtaatttcccacaatcacacaagtaggtagtggcacggctaggcatcccatttctgttctatgggactgcaaagcccgatgctcacactcattccactataccttctcccttgagttcaaaaacttacaggagttctagacttttcaaactcacgatactaatcaagaacgattttaagtattaagagtttcctctgcttcattctgtttccaaaggaaaatatacgtcgcatgaactcatgatcatctcagcatgaactcctgagtgaagcctctcctcagcgtgactcaggaacatttcctcaggcattatctgtcgcacaggccttgcccatccagctcgcttcttcagctctgacacccagtcggggttgtcatcttcctcctcaaagtccgtgtcctcctcatctagcccaggctcaagtcgctctggatccaaaatgacagaatcgtgacctccatcaacactgtccgatgcttctgtttcttcagacagggggcctttcaagaacccttctgaacctggtctatatattgtgtatgtttgaaaagccaagctgagatcagcattcttaaggatgttcaacaaagtgtcaggggtctctttgagccactgcttacgagtagtatttttgctgtactttattacagaaccacctctatcgtcctctgctgttaaactggaggtgagtatggatgcattttccaaagctgtaagagctgtattgggtacatttttctcccactgtcgtctatgaagatttggtgaaactggctttccctcaagatggactgacttattacctttttcttctctgtttactcttctcaatgcactttcaactaaattttcattaatgctttccaaatcagtatggctaccctttctatcttgttcttcctcttgcactgtgcttgcttcatttcccaaagctatcctgattctgctggggtttgttttttttcttggtgtgttatgcttcgaattttttatttcttctaatacttcctcaccatattccatgatgatctcggggggtaagcacttctggacaagccgagctacgatgcctcgagagagaagcgttgtagccgaggggcgatgtgagggattccttttaaacatctgcttgactaggaactgaagttcataggagtaatgagacggcagtggactgatgcacccttgacatactttgaggataagatttttccaactatttgcctgaaatggatgcttaagggtacagagttcatacaggatgcaacccaaggaccagatgtcacttttattgttataaggcaggttttcccaaatttctggaggcacataataaggagttcccacataggtacaagcaaatgccatcggattggagagaagacgggcagatccaaagtctcccaatttcacttttccattctgagtgaggaagatattcttggacttgatatctctgtgtagcacacgtttcttgtgaatgtgatttactccaaggcacatttgggtaaaccaattaagtatcatgtcttcaggaaataactttcctttctgctgtttaatcttttgcattagatcccctccatcacagtattccatcacaatatacaagtgtccttcagcttcaaatgattctttgaaggcaacaatattagggtgtttcattttggctgaaagaacagcctccttcct

SEQ ID NO: 1030 - DNA, 297 bp, Homo sapiens
  misc_feature (1)...(297): n = a,t,c or g
caggcacaggccagtgcacctggccgatagtgttttgacttacaagtatactagaaataattgaataaatcaccttctggacatttagaatttcccttcccctgattttccttttatttctaattaaaaatgaaattctgggttataagggcaagaacatttgtgaaactttacattgtatacatgtcagaaaatatctatcaatatttaataatattctnnnnnnnnnnnnnnnnnnnnnnnnnnnnnnnnnnnnnnnnnnnnnnnnnnnnngnntnnntcaccaggtanagattg

SEQ ID NO: 1031 - DNA, 1165 bp, Homo sapiens
  misc_feature (1)...(1165): n = a,t,c or g
ttttaaaaagacaaaattgtatctgtcagtccctgaaggcagtttgtttttatactctctcacatttgtatttgttttttaaatggcagtattttagaagatttggagaaaagtccacataataatgttttcttaaaagcttttaaagtttttgctgtacttcaatttacttcttccatcagaaaactaagaaccaagtgttncncaatccgntccggctgacctaaatttgggtttncagcacttggctcagccaatttcactgagtgaaggaattgctttatgaggcaaagcatgtgaaagttctaaagtatggttagattgtaggtcgtgctctatatgggaaacatcaaaccattactacagagaaatgataaggcattggatccactattgaaattattatttttggatcaacaagttggtactttctgacttctgtatcttaacataagggaattttaggtaatgctaagtcagttgtctcattttttgtgataagttttggaatttttagttaattgaaataaataatgcttttacttggtcaaaatgcatgtatagcatttctttcatcttagttccttgtgtttgcctatgtggtcctttatatattttttattgtatcgaagaaacaaaactatcttcaaaaataagttaatttggatatatttgtcatatcaaactacaaagtgtacaaagttaagtttagcccttttctagaaagtgatctttaaaattaaaaatgctcctcttttaaattcaccaaatttatgtgtgggaaggcaccaaaatgattttgtaagtgccactgcaatattccctttcaagtgtggcctaaatttcaatcttaaggatggaatgcatgtctgctccttgttctgaaaaatgtaggcatctactacattttaaaacacagtgaaaccatatacataagcctataaaaaaagatttggtgcaatttgaaagcctgttaattttttatgtagacatacctacacacgaaagggttaaattcacagccttactagttccttgcttccagtatttcaattggtctcctcccctcattattattattactactagtactattatttttgcacatagttaactgcccttccaatatggattcttaaaaagtgctgtttctgtgggtattcgt

SEQ ID NO: 1032 - DNA, 469 bp, Homo sapiens
ggttctgcgccagattcctccggcagtggtgaaactctgattgttgccacagaagcaacgtcaaacgtgctgggtggcatgagaaaccaaattaggccagatgtccggcaagacgagtcacagaaatggcgccacggggatgactgatggcttggaacttgacagtgtgaagataaggagagtggaacccaggagctcagagtcctgacagcagcttcagaggaagctcgtttaattttattgtgctcatctcaggaacaaaagcattttttagttaaataatttaacatcaaaacaacatgcaaccaaaaacttctgacatttatagttgatacttgcctatagaaatgtttggtggctggtgtcaaaggtccttaaagcatttgctgccaagttagtggaaggctcacttttgttaagatgactgtaattctccttgttaccgacgagagatcattggaagctgccc

SEQ ID NO: 1033 - DNA, 508 bp, Homo sapiens
ccctctccctttaataaaccacctggctttttgcagtacaaacacctgaaatgtaaacgtgaccctcatgttaagatagaagggaaggacactgatgactggctgtgcgtggattttggtaagttattctggcgtattttacaggtaactgttggtactacgctaatcttgaattgttttcagttgcaaaaggattgagatcaaattgatgaatgtatttccaggtaagatttttgaagtgtgtttaaggtaacaaaagtttttttagttataatccaggtgctcttattcacatgtagaattttcacctaaccaaaccaaagtaccctagatgatgccctcctggaggaagatatatactacatggtgtgtatctactagccacacagatcagcaaggtggtggacaacaggataacatagtagaggcgggagagattccttagtagtggtagaggaaggtttgggggctgtggtgcataaatgagatgaggatgaggttattccag

SEQ ID NO: 1034 - DNA, 450 bp, Homo sapiens
aaccttcttctgctgcctccagggtggggcacacctgctgcacacagggatgacaggtaccaatgtcatggacacccacctcttgttcctgcggcctcggtgatggcataggtcacattttgggagttcagaggaggctacaagggcaaggtcagatggcagagcaaggttggtcctcaggggcctcctctaaagccttagggccccgtcctctccttggccttggctgtttggttaactgtcaccttccactcagggcctctgctctatatctattcccttccagccagactggcagatgggggcttccccctacccctgaggatgaggacaagcccctcggccagttcagcgttcccgtgcttctcccttgggcagcctctctcttgagcccctcaccctgtttctttctgtgaagcgagaatgtctgaaaataaataggaccatgcc

SEQ ID NO: 1035 - DNA, 482 bp, Homo sapiens
aaaaaactgaaaagtgactactcagatatgttggaagtcacatcgaagactatcagaatattaccttgtgttcataggttaacttgtttttgtacacgtcttagttatttcaggcatctctttgcttaaaattgagtttcttgtaaatgtgactgatgagcgaggttagaagtggaagaaattcctgtgcatgttctataatctgacaccctgaaagcaagtttcctttcgtcattcacatgctcttgttctgccgtgactgttcaggtgtatggtagtaagtaaatgtattaacatggtgaacagtagtaatattctatcatagagtattagcccttgcaagttttcagggcgtcttttccgacttcagtttttgtgataaagaatgtgaacagttgttagatgttctcagtgattcaactttaaaacaaatttctcgtgatgattcatttcaaaatcctgagtgagtctgactgaaaaat

SEQ ID NO: 1036 - DNA, 2325 bp, Homo sapiens
cccgcgggcaggggcggcgagtgcgcgggccgccgcccttctcggcgggcagcgcgcgaggaccaggccgaggaggaagtggcggcggcggcggcgggctccccgcccgaggaggaagatgcagacctttctgaaagggaagagagttggctactggctgagcgagaagaaaatcaagaagctgaatttccaggctttcgccgagctgtgcaggaagcgagggatggaggttgtgcagctgaaccttagccggccgatcgaggagcagggccccctggacgtcatcatccacaagctgactgacgtcatccttgaagccgaccagaatgatagccagtccctggagctggtgcacaggttccaggagtacatcgatgcccaccctgagaccatcgtcctggacccgctccctgccatcagaaccctgcttgaccgctccaagtcctatgagctcatccggaagattgaggcctacatggaagacgacaggatctgctcgccacccttcatggagctcacgagcctgtgcggggatgacaccatgcggctgctggagaagaacggcttgactttcccattcatttgcaaaaccagagtggctcatggcaccaactctcacgagatggctatcgtgttcaaccaggagggcctgaacgccatccagccaccctgcgtggtccagaatttcatcaaccacaacgccgtcctgtacaaggtgttcgtggttggcgagtcctacaccgtggtccagaggccctcactcaagaacttctccgcaggcacatcagaccgtgagtccatcttcttcaacagccacaacgtgtcaaagccggagtcgtcatcggtcctgacggagctggacaagatcgagggcgtgttcgagcggccgagcgacgaggtcatccgggagctctcccgggccctgcggcaggcactgggcgtgtcactcttcggcatcgacatcatcatcaacaaccagacagggcagcacgccgtcattgacatcaatgccttcccaggctacgagggcgtgagcgagttcttcacagacctcctgaaccacatcgccactgtcctgcagggccagagcacagccatggcagccacaggggacgtggccctgctgaggcacagcaagcttctggccgagccggcgggcggcctggtgggcgagcggacatgcaacgccagccccggctgctgcggcagcatgatgggccaggacgcgccctggaaagctgaggccgacgcgggcggcaccgccaagctgccgcaccagagactcggctgcaacgccggcgtgtctcccagcttccagcagcattgtgtggcctccctggccaccaaggcctcctcccagtagccacggagccgggacccagaggggcagcgcagggcgcagagcacacccgctgggccagcagctcccaacggcgatgctactactaagaatccccagtgatctgattcttctgttttttaatttttaacctgattttctgatgtcatgatctaaatgaggggtagtgggggatggaagagagtaccaggtggtccaccgttggggagtggggccgtccgcctgctctctactgtgcagacctcctaactgagtttacacacgcttgtgtttgcaacactaggtctggatgggaggtgaggggtgtgcgtatggctgccatgccagtgtctgtgcacatccctgtctgttggtctccatggccactgtggaccgggacccttgggggaagcctgcccatgtcgggctgtgggaggctgatcagtgcgtgtgagagtggcttcccttctgcctgactccccactccctgacctgccccttccttgtttttcctcctactggtctccaccaaggctttgttagcccccaccctgcctggtgtgcagctaacccctccctccccacagccagaggaggccacagacccctcaggggagttccgcgctggtgtctgggctgtgctccctcactaatcggaaggaaaggaagctgggcgtcctctgggccccccaacacacgtcccatttagccctgcacagcggtctccttcccctaagccagcactgctgctccctggacccgggaaggaggctgcctgggttggaggcccgagccattggcgcctgtgctgaggatttgtgctgtgatttgggcaaatcattccaggtctttgggcctccacccccttgtctctagtggacatttgagatcagagagcaccacagggctgggctttgtgccctaacccctgggatgcagcctgcctttccattaaagttcacctaggtgaggattagggcgcggga

SEQ ID NO: 1037 - DNA, 1005 bp, Homo sapiens
  misc_feature (1)...(1005): n = a,t,c or g
tcagcagagaacgtgggacatgaaaacaagtcttaggagtttgagaaggggctcccaggacaggctcctctgctttaaggagcctgtcctgggagaaataagcagggccccagtatgtgcagaagttgtcagggggtgcccaggggtatggtgaaggagaggtagtccccaagggcaccccagcggggccnggtagatctggaagatggtgatccaggaggtgagcactatcacccagaagaggaagcccacagctgagcgccagacatagcctttgatttggctctgttctgtgtaggctgggacaaggaaggcctctcggaagaaccagaagatgttgaccaaccagagaaaaggcaggaaagcaaacccccccaggtagtacttccggcacaggttcaatttctcctcattggacactcgctccaggttcataagctgcgctgggggccgggtcgtcccttgcatctgttacttagggtcaaggcttgggtcttgccccgcagacccttgggacgacccggccccagcgcagctatgaacctggagcgagtgtccaatgaggagaaattgaacctgtgccggaagtactacctgggggggtttgctttcctgccttttctctggttggtcaacatcttctggttcttccgagaggccttccttgtcccagcctacacagaacagagccaaatcaaaggctatgtctggcgctcagctgtgggcttcctcttctgggtgatagtgctcacctcctggatcaccatcttccagatctaccggccccgctggggtgcccttggggactacctctccttcaccatacccctgggcaccccctgacaacttctgcacatactggggccctgcttattctcccaggacaggctccttaaagcagaggagcctgtcctgggagccccttctcaaactcctaagacttgttttcatgtcccacgttctctgctgacatcccccaataaaggaccctaactttcgaaaaaa

SEQ ID NO: 1038 - DNA, 539 bp, Homo sapiens
  misc_feature (1)...(539): n = a,t,c or g
gagcaaatgcaaagagatggagtcataaaaggcgcaggtagtactgtgaggagtgtgaacaatgaagcttaggaagtgagatggtctgtagcaattagtaagagatgaagctaccgtggtggctagagaccaaattgtgagaggacgtaagagtccctttgaaggagttcagcttttatcttgtagttgggtcagtgttaatgctgagtatttaatagggacattttgataaatgtcttaaatctggtgatttactagtttagaaggtagaatatatattttattaactctacaagtggtatttaccaacaagtataacttggaatctttaaaattgtgtaacatggcaacctattttacccctccctgcttattcttatttctcagcacagatattaagctataagattaaagctattgttaatttagagatttatttgaaatgggctccgtgccttgaattatgtggcattccttggctgggtgcantggtcatcctgtaatcccancacttgggaaggcnanacnggcggntcact

SEQ ID NO: 1039 - DNA, 1750 bp, Homo sapiens
  misc_feature (1)...(1750): n = a,t,c or g
ggtcgactttttttttttttttggtgcaagagaattgtatttttattcatggttgtgcctagtaaaattctggtacatggtaagtgctcagtattactgagtgaatgagcaaagacctgaaatactgtggaaacagtaaaagcaaattaccacacaattaggaggaattattttcagacataggatatttaaaacatcactcaaatactggagcatgattcagcaataaattctattccataaaccaggtagataaatgtcacagctttaaaatatagttaagtacagttgatcctcgttattcatggattccgtatttgtgaatttgcctaacctaaaattttgtggtacagcaaaaaacttgctgtacacatattctgagctgaggttgaacaaggccatgttccagctttcatactataaacgtgtcctttttacgctaatgccatggtttttgcatttctgttctttttttgatttcactgtttaaaatggcccccaagcatagtgctaagggcaaaaagctgttcctaagggtaaaaaggctgttgtgtgccttatgaagcttatgtgtcagataagcttcattcaggcatgagttacagtgttgttggtcatgacttcaatgttaatgaatcgattatattaaataaggtgtctttacaacagaaatttacatgttgactgcttgatgaaaatgtgaccagtggcttgcagaaatctagccttgtatttcccctaggttctatatttgctaattcagtgttcgcagtgactttatagaacataactaccttgaataatgagaatcaaccatacttgctgttttccagttcctaatagatttaaaaaaaaaattcaatttacaaaagacacaagatgacttttcttgtcagcagctaactgatcctcatgatgtaaaaccagaaagaggggggaaacaccaaaattcatcaccactgcataatttcaatgtgatatattaaaatttattacttcctgaatagtattcaactaaatctatattatttcaattaaagttacctaggccatatggtttgaaaattgaaaaatccagtaagagggaaaaggaaaaataccttatttaatacattgactttaagaacaatcacatatgcattattcttactatctgaacttagcctctggtaaattcaatcctgcttagttaggccaattgataccctctacaataagccctacatgatcaaaaagcttcatgctttctacttacagcagcatagcaaatctgaagttcttaaaaaaaaatcgccattctattaacaattataaacgattttccatgctctggtacaagaatatttaatgttagccaagaaagatagccatctattccactgaggattgtaatagaggcagccttttgatttttatatttgtttaaagtacacaacttgaatagtaaaatagaaactgagctgaaatttctaattcactttctaaccatagtaagaatgatatttccccccagggatcaccaaatatttataaaaatttgtactaacattctgtaagaatccacacacatcagtaagaagctgaccttcctgttggccatgctccaaatgtctttaagactagacaaattacatatattataaaaaatttcaggatgaatattgagtncctgggtattatcacagtaatagtaaaggttaatgaaataatttttatttctgaaaaacaccatgtttataccccaaaatag

SEQ ID NO: 1040 - DNA, 1823 bp, Homo sapiens
  misc_feature (1)...(1823): n = a,t,c or g
cagattctcagcacccacctgcttatcctctatggtgtccagggactgctgaccttcgggtacctggtgctgctgtcccacgttggcgagcgcatggctgtggacatgcggagggccctcttcagctccctgctccgacaagacatcaccttctttgacgccaataagacagggcagctggtgagccgcttgacaactgacgtgcaggagtttaagtcatccttcaagcttgtcatctcccaggggctgcgaagtgcacccaggtggcaggctgcctggtgtccctgtccatgctgtcgacacgcctcacgctgctgctgatggtggccacaccagccctgatgggagtgggcaccctgatgggctcaggcctccgaaaattgtctcgccagtgtcaggagcagatcgccagggcaatgggcgtancanacgaggccctgggcaatgtgcggactgtgcgagccttcgccatggagcaacgggaagaggagcgctatggggcagagctggaagcctgccgctgccgggcagaggagctgggccgcggcatcgccttgttccaagggctttccaacatcgccttcaactgcatggtctttgggtaccctatttattgggggctcccttgtggccggacagcagctgacagggggagacctcatgtccttcctggtggcctcccagacagtgcaaaggtccatggccaacctctctgtcctgtttgggcaggtggtccgggggctgagtgcaggtgcccgggtctttgagtacatggccctgaacccctgcatcccactgtctgggggctgctgcgtccccaaagagcagctgcgtggctccgttacatttcagaacgtctgcttcagctacccctgccgccccggcttcgaggtgctgaaagacttcaccctgacgctgccccctggcaagatcgtggccctccgtgggccatctggcggaggaaagaccaccgtggcttccctgctggaagcgcttctacgaccccacggcaggcgtggtgatgctggatgggcgggacctgcgcacccttgacccctcctggctccggggccaagttgtcggcttcatcagccaggaagcccgtcctgtttgggacgaccatcatggaaaacatccgctttgggaagctggaagttcgaantgaagaggtgtacacagccgcccgggaagcgaatgctcacgagttcatcaccagcttccccgagggctacaacacggtcgtcggtgaacggggcactaccctgtctgggggccagaagcagcgcctggccatcgcccgagcccttatcaagcagcccacggtgctgatactggatgaagctaccagcgcgctggatgcagagtccgagcgggttgtacaggaggccctggaccgggccagtgcaggccgcacggtgntggtaattgcccaccggctcagcactgtccgtggggcccactgcattgtcgtccaatgccgatggccgtgtctgggaggctgggacacatgaaaagctcctgaagaaaggcgggctatacgccgagctcatccggaggcaggcccatggatgccccgaggacagcggccccaccgcccaaaaagccagaaggccccaggagccaccagcacaagtcctgagaagggccccctgaggtgtggtcgctgccaagcatcagtgttagggctggggctcagcctgggggagcctactgggactgagcccccaggagggccagcatgtggagagttcgctgcggctgctcctgctcacaataaagccggggccgagcagctggcaggggaggccaatccctccctcccc

SEQ ID NO: 1041 - DNA, 485 bp, Homo sapiens
tttttttttttaaatctgaacacttatatttcatacaataacataatgcttttttcttttcacattactgcttaccccaaaagcatggcaatatacattttcaaaaacaatcttcccctgtaattacaatgaaaaacaagaagcagaatacccatcatcattacagaaacaatgattgtatacttttaacataatattcaggtatttttaatcactatcttaaaccaatttttaattatataagttaactgtatatgcttactggctgaaaaaatactggcacaacctacctactgcttttaatacacaacgtggtaacttgtgtcttctgcctaatagcacaattatcagaaaaagaatgcaaaaggtatattagagaaatgaagaaagcatcagaaaaatttcctcagccttggtttatcatctctttgtctttcctttgtatatatactgaagttgactggtcctctttcattactctattc

SEQ ID NO: 1042 - DNA, 275 bp, Homo sapiens
  misc_feature (1)...(275): n = a,t,c or g
cccnnatttgaanacccgntatgacnnnnnnnnnnnnnnnnnnnnnnnnnnnnnnnnnnnnnnnnnnnnnnnnnnnnnnnnnnggcacgagatgaggtataggtgtttcattagtcagtaggctggcctgttgagcttatcactgtcagtgttttgtaaacatttttactgcaaccaaagatgaaaaactttttacatcataattcattgtgtgtttgtgtgtgtgtaaaatgtggaatacaattttcataatacaatgtgctatatactctagc

SEQ ID NO: 1043 - DNA, 810 bp, Homo sapiens
cttccttgatgcatctcgacacatccttgaagcacctcaacatggactggagagaaggcacttggaagcaaatcagaatgaactgcaagcacatgttgaccagataactgaaatggcagcagtaatgaggaaagccattgaaattgacgagcaacagggttgcaaggaacaagaacgaatatttcaacttgaacaagaaaacaaaggcttgagagagatccttcaaataactccgagaatcatttttgaacctaaggaaagatgatgcgtcggaaagtacttctttgtcagcattagtgaccaacagtgatttgagtctgaggaagagctgaagagtttctgagtctgtgagcttcttacatggctccaaatggtcaaataagtgaatgaatgaatggacagaaaattcaatcctttatttttttctctgtaaatatgtacagtgcacgggctatgagatagcaacaaaaaatgcatagttaatggtcatagactttattccaaaacataattggaaaatagaaactgagccattgccaaatggtaaagaaatgaaaagttttcacagtgactactgaatataccaagagcttttggcagtactgctggctttctgggtgattaattaggtaaacttgaatattcccagtaaatgtttgagaatgcataaaattataccaatttaaaaatataaatttttgccactgttttgtgaacggaggatttgtacgctatatttcatccttatttggcgtcaaagttgatgcaaagtttatgtaccatgagacttctagtgattgcctactttca

SEQ ID NO: 1044 - DNA, 361 bp, Homo sapiens
  misc_feature (1)...(361): n = a,t,c or g
gggcttatcaaagccacaaaataagttagtgataataatatagtcatgtattgcttaatgactgggataagttctgagaaatgggttgctgggtgatttcataattgtataaatnnnnnnnnnnnnnnnnnnnnnnnnnnnnnnnnnnnnnnnnnnnnnnnnnnnnnnnnnnnnnnnnnnnnnnnnnnnnnnnnnnnnnnnnnnnnnnnnnnnnnnnnnnnnnnnnnnnnnnnnnnnnnnnnnnnnnnnnnnnnnnnnnnnnnnnnnnnnnnnnnnnnntctaaacatagaagaggtaatgcattgcactataacattaccttatgacagccacgacatctctaggtgacaggaatttttt

SEQ ID NO: 1045 - DNA, 5515 bp, Homo sapiens
ttttttttttttgtaataaagacactgcttttatttagtttgatatgtttctttacagaatgcagaaaacacatcttaaaatcatatagaaggaaataaaaacacatcagtggttggtgaacacttgaatgtgagattggctctccatctcacagagtccaacggccatcaccagcccagcgctcaggggagcaggctgcctgcaaaggcattgttgctgttgttattctgttcactgccccatcgcctccagttgctatggcaacaggccattctggggcagccacgtctctgcatggcagtgcccaatggtggagttgctaggggcgacggagctgtttggaaggcctttcaaagccctcacctggaacattgggaattgtttatttttttgatgaggtcatcagaaataatctcaccaggtcagatcccacttgtgctcctgtctctggggcaccaggggaaactctgacttggaggcatgagcccagtcaccagtggtccactgagcccgcatttacaggctcccccacaggggcactgctcactccagagtaccccctggggactggggcaggggagaggggctggggccctgtgggagaaggcgcaaggggaaatgccctcttgagagcagtaggacagagaactctccccccctcctaccaggcctcccctcctgagggaggacacacaaatcctctgcaaaacagtcgatatggcttagaagtagctgctctgtgtgcaaagggagcctgggtccacccacccaccctcaatcaggggaatggatacattattgcgaaaggcattcctccctaaaaagtacccaaaataacgcttcagacatcaagaaaagtcatgctcaaaatggtttcttccacaggaggagaatcgaagcagagtgggcgcccctgagtcatgggacagagatgcagatggacggacggatgttctgctaaaaaaggcaaaagaaccccagtgtaattccagaatttaaaccattaggaaaagtagggggaaaagaatcaaaacaagcaaagcccgtcagttccatggaatcaacacttaagagctcgtacaaactgctgtaagcatcaccattttaaatcttttttttaataaaacaatttgaggctgtataaaaactttagtaaaaaattagctttgagagctaacagatttttattatgaactattgctggcactcctccccagccgccagaccttttccagtagttcaggcccaagctgggactggagtgccagagaaaagggatggggtgggtcggggcaggactgtggactgttaggacaaagcggccaaggtcaagtgaggaaagagcatcacatgacataaaaatattgcatcttcaccaaaatgtcccccactgagtgtttcaaaaaaccgtgatattccttttaggaggaaaaaaaaaaacaatgcacagaaaaagggtaaaacaaaataggttgatgtggtggagacctttgacctcccaggtgcccccacaagcagcttggcccaccctggagcaccaaagttggggggccacagccaccactgcctcttggagtccctttttcatggaaatgaagaccccttggtcgtgggccactagtgtacatgggctggaagtggggatgtccatggcccaagagacccctccagcttccagcccctggcaacagcgggagagcaaacccagcaccagggacttggcgtgagccccaggccgggaggcccccaatcaggctctggggtatcagagcaaccaagttgacgtagtgtgaaaaaatagtattcctttgataaaaaatactgtcccttggtcttctctaagtttgaaacaccctggggggcttatttttagcaaagcaattccccatacccacccaaaaattatacatacaagtttaggtaaacagcagattaaacgtaaaaacttaaccttaacttctgaaagtcctttgaatttaatctttagttactgttttccatgttacatcctgcagctagacacacgtgaatagaaaaaacagtacagttagtgttaaaggcaaaacgcagagagccagggggccgcccggcactgcctgcgagttcattcatggttcctcggtccctccacctccactccacatggtgctttcagagccagccatcaaaaatgaagcgaagagttctctatgaacaaaccaaaagctgttaggcaaaaaataaaaataaaaaagtccccaaagtctctccagctgctttggggtttgggaggaccagagagggcgggcttgtccaggcccctgtgtcagtgtgtgctaggtcaggtgtcggctcccggtgggcaatggtctgcaggccaccggtctccacagacaacaccatgtcgtctccagggccctgccctaccctgcctccacccaggcgcttgcgggttaaggtgggacatagggaggaggtgaccggtatggggtcatgttcttgggacgggagcccttgccctccatgggtactgtgaagggcggtgggggctggtagggaggcgcattgggatcctcatcccgcaggggcgtgtactctcccatggtgtcctggttcagaggagtggtctcgggcacactctggttggggtactcaggagggggtaggggagccttctcctcctgcagaatgagtggcatgctggaggagggtgggggcttggagtcgtccagttcgtctgcaaagatgataggcacccccttcttgatgaaggtggcctggtcctcaagggtaagcttgcccttccgcttcttgcggtagcagatcatggcaatgatgccagcaatgagcaggatggctgcgaccaccacggccggaatgactgtgtgcaggtagacatcatcctcactgctcttctcagggtccctgtcaggcacttctgtgggcggcgcctctgagggcactctcctgggtggtaccacagggataaactgtaggtgccgacaactgccagagcccgtcacagtgatgcttgtggccttaaagtcaggctctagggcgttggagaaggcaggccgaggttttccatcatcctcagcgatccggcggctcagcccagcgatctgctccttggggcagggctccaagggcagtgtgttgttggtccattccaccacgatggagccccgggtgatattctgcagggtgatggtgctacagtttcggtctccaaaggcgaaggccagtttctttaccaaggcaatcttcttgtggatgtcattcaacaccagtgccgggtcacccacaaacttggccttgaaccttgcaggagccctatccccttgggggcgcctgtggacgtggatctcgaaggcatccacagccgacaggccccccttgtctgtggcatgcatgaaatactcgtgtttgcccacgtggctgctgtcgggaaggccatacatgagctggctgttgctgttgaactgtacccaggacttctcgcccaccagctgctgctcccgcagtttcagggtcagcttcagcttgtcagtggtggtgtcctcatggtcatagaaagtgtctgacgggatcttcacctcaaagtaggtgccaacccaggcatctaccctgtcaatatggttcttgagctctgggcgctggttgggttctccgccacggggcactccactggtggtggtgcgaatacgagtaggcggtgaggcagtttccaatctggtgatggaaactttggtggtgacccggggcactggccggggtgtccgtggtttcttggttggcctgcgagtcgtggtggtggtggagtcagttgaaggcgttgctggttttggtgtggatactcgtggcttcttggtggtggttgtgggaggggtagcaactgcagtaggctccacatagccaggaatggtcatcgttgggcgaatctggccaggaactgtggtgccagcttctgacacccgagtaggctggatggggcctagggttggggtttgaataatggcgcctcgagtccggatggtgaccgtgggtttcccaggaacaggatccctgactggaggagccatggtctctgttggaggagcaatggctggagatgtgggggttggcacgatcctggatgggggctcctggatagccgtggttgggggcccaatggcagtgacaggtgtgggtgtagcatggatctgcctccggacgcgtttgggaagagggggcttcttattggcgatgtgccaacccaccacagggtagccaagctgagcagacattgcgccctccctggcaggggcctctacaccatgaatgtcaggcacactgttctggttcagggagcagcccagcttccaggagagaagggccccattctccaccaccttttttggatttcccgggccagccatgaaggccgacatgtcaaatagtctgttattcaccaccggcactaatttcatgttgtgaagctctacttctgagaagctccgcatcctgtgcaggaggtcaatcctttgctttggggtcatcttggtgaggtcggcatccaaaatcaccgtcaaaacagtcacaggttcatccgcagcacaggcagatgataccacctcaccagggtctggggaggctgtcctcaccgactgcagatcactgtggtcttcagggtagacctcgatggagaacacactggaggtctgggggatgtggctcccgttggcccccagccgtgtagcgctcactgaaatgtaatgcacacccttatcagtgtcaagggggaggccctccagggtgtggctctgtgagtcccagtgcagccaagatggcaaagcctccttccctgccgctgataccttgatgatatctccactggaggcaatcaaatctgttggaatggtcactcgaaatgagcgcccgacgacagccgtgccatcaggaatgccaaccactgtgggaacagcctcgtggaggtctgagagcactgagtgcatggatgcctcaagctggttttcccagtccctgacagcctctgagggttcactgggccagtgggactgagccataaccacagagagcaggaggagaaaggtcctcccccagaggggcagcagcagcgagaggcccacagacatcctcatcccaggtccaagtttgctcaagtcgatagtcttgctaagtaaggaagcaagtgacttggtcccagagctgggttctcaccctctgcacacctgctccatcccggagcacacagagcccagcgccggcgggaggaccgcggcaggtgttcgctcctcctggccccaggacgccgccaccgccgctccccggggattcggcgcgaagctgccgccgccgccaccgccaagcctaagaggcgcgagcgccgcgccgcagccttcgcgcgagcacgtaccgggcggtgagagggcgctgagcgcaagggcggggcgcgcggccggagcctagcaaccgcctgacacgcgagtgttgcagccaatccagcggccagctccgcgcggcgccgactggccc

SEQ ID NO: 1046 - DNA, 1840 bp, Homo sapiens
atagttaactctacttactgttttaacatacatttgatttaacaaattgttcagcataacacttctaattaagtttatcaagttgtactgtattagataatcagcagtgtatctggagtatgtttaaagagaacagttcgcaatacaaaaagttacatggagctttacatcttaactttctttgtcaatttaaatgcaatgtataaaaagtttattttgctattgtgaaaaactaaatgtaaaggaaatcacctactttcatgcaggtgtataatcttgaaaaggaaaaatgcttccatgttgaagccagattttctgtagtaaaacttttaaatattattttaaaagaaatatgtatataaatatctctatattctttggaatgatactaaagtctctggtctaggaccataccttatataaaggtataagagaccatgacaatgtctgaaaatggaatagataatgatgccttttatttaaagtggcccacataatatacattgagtactccatctctccaaatgtatttccataatgtgttgaaaacatgctaacatttgtatgatttttatacttctgccgaatagacttagaatcagatgaattgtctgtgtgtcttgcaaaagagttggggacaacttgggcaggcctatgaagtgcatagggagtgtatgtcttctgaatggttttattgttcttgtaatctagcttaaagaaatgttaactgggagggtgctgaggccactcactgcattaattttgtgtgtttagagttctgttgtcaaaagaaaactaatgaataaattagtttgtcattctagaatttaaagttctaagattagtataaagagtatatagattgttaatccccaccagctagactttgaacttaagtcagacttaaagatttgagaaattatttgtgtcatttactagacgtgatttttagttctgtttgattatatttcctacacaaacttcttatttaacaggatagcctactaaattaaatgtttcttatttcacttaactcatttgattaaactgtattctaaaacatttggggtttttccccctattcagttttaatcttgggaatatgcatttgtaaattgtgatgtcattgagactatatttatatttgacttggcaacattaacatgtcctaagacttagtgcagagaagcttggcagtacgttctttgacttaaggatggcataaaataatcatttttgaacctgtgtaataaagcttgaaagcagggaaaagaatttccttttcccccttttttgtgttgtctataggaattaacttgggattgttttgtgggtttttgtttgttttaaatgtaaattgagaatcttttataagaaataaaagcattattgggtgcctttgtttgtaaaccaaaaagtaataaatgaatccctatatttccattatagtatttattgtatttttatgttctgaaaattacccatggaacaatatgcttaggattacaggaagcagtccttacttacacttcttgtctgttttaggtgtacttgttaattcttatgtcctaattttatttaattctgagttccttacacagcattttagggaaagaatacaggcaggatgacactttgtgttaaagtgttatttttatgtattacctggaatgaggcaggtttttttctgttttctaaaaagagtaaccaagatacctccagggtgtcattgggttccagctgctctcctccacattgaatgatatcttgttaatttataggcacatttgtgggtaatttatatgtctatagagtaagtataagagataattcattagta

SEQ ID NO: 1047 - DNA, 338 bp, Homo sapiens
ggaagcaagtacgactacctcatgatccttcgcagggtggtgaacgagagcaccgtgtgtctcatggggcatgaacgcaggcagactctgaacctcatctccctcctggccttgcgtgtgcttggcggaacaaaacatcatccccagtgccaccaacgtcacctgttactaccagccggccccttacgtcagtgatggcaacttcagcaactactacgttgcccatcctccagtcacctacagccagccttaccctacctggctgccctgtaactaaccttgagacctgagggtttccacagtgggaaccccaatagggctagggctctcaggtaggg

SEQ ID NO: 1048 - DNA, 1403 bp, Homo sapiens
cgcgagtcgtccatcctggccaagctgaaacgcaagaaggggccagggcgggccagcgcttgggacgatggccggagggaccccagcagcaacgacatcaacgggggcatggagcccacccccagcactgtgtcgacgccctcgccctccgccgacctcctggggctgcgggcagcccctcccccggcagcacccccggcttctgcaggagcagggaaccttctggtggacgtcttcgatggcccggccgcccagcccagcctggggcccacccccgaggaggccttcctcagcccaggtcctgaggacatcggccctcccattccggaagccgatgagttgctgaataagtttgtgtgtaagaacaacggggtcctgttcgagaaccagctgctgcagatcggagtcaagtcagagttccgacagaacctgggccgcatgtatctcttctatggcaacaagacctcggtgcagttccagaatttctcacccactgtggttcacccgggagacctccagactcagctggctgtgcagaccaagcgcgtggcggcgcaggtggacggcggcgcgcaggtgcagcaggtgctcaatatcgagtgcctgcgggacttcctgacgcccccgctgctgtccgtgcgcttccggtacggtggcgccccccaggccctcaccctgaagctcccagtgaccatcaacaagttcttccagcccaccgagatggcggcccaggatttcttccagcgctggaagcagctgagcctccctcaacagggaggcgcagaaaatcttcaaagccaaccaccccatggacgcagaagttactaaggccaagcttctggggtttggctctgctctcctggacaatgtggaccccaaccctgagaacttcgtgggggcggggatcatccagactaaagccctgcaggtgggctgtctgcttcggctggagcccaatgcccaggcccagatgtaccggctgaccctgcgcaccagcaaggagcccgtctcccgtcacctgtgtgagctgctggcacagcagttctgagccctggactctgccccgggggatgtggccggcactgggcagccccttggactgaggcagttttggtggatgggggacctccactggtgacagagaagacaccagggtttgggggatgcctgggactttcctccggccttttgtatttttatttttgttcatctgctgctgtttacattctggggggttagggggagtccccctccctccctttcccccccaagcacagaggggagaggggccagggaagtggatgtctcctcccctcccaccccaccctgttgtagcccctcctaccccctccccatccaggggctgtgtattattgtgagcgaataaacagagagacgctaaa

SEQ ID NO: 1049 - DNA, 598 bp, Homo sapiens
  misc_feature (1)...(598): n = a,t,c or g
caacaatctggactaacaccagtacaagcccaagggagattacagggaactcttncagcagacaagaatgagattttgttttctgaattcaacatcaactataataatgagctgccgatgtataggaaagggactgtgttgatatggcagaaggtggatgaagtgatgacaaaagaaattaagctgccaacagaaatggaaggaaaaaagatggcagtgacccggaccaggacaaagccagtgcccttgcactgcgatatcatcggggatgctttctggaaggaacatccagagattctagatgaagacagctgacccttttgcgcttcagttctggtgtgcttaaccatgcaagccctcccacctcccagggctccttgccttaggtggctgtagcatccctaccacccaggacactggtgcgaatgacacaactcaagttgggaggggaacagggaaggaagggatggatgggggtggtgtatcttactctgtttaagcagaacaccttgtttgcggtgttggaacatggttcctttggcagaagtgctttttttttaatcgcagtactatttttataaagcaagaactattccaa

SEQ ID NO: 1050 - DNA, 283 bp, Homo sapiens
gtgtattattccctttagctctttttgtggttacggaaggtatttttcttgtcagttatttacataaaattgtttttggatcaagaagcattaacaagacatgtttattatgcataaattcttataaggaataaatagctggaaatcatcatttgcttctccataatccactatgtggaaatgtagttttattgctgtggaagtctgattataattttgaaacataaatttcaaatacaaaattgtgaaattgaaccacctgctggttaacgagggttttgca

SEQ ID NO: 1051 - DNA, 435 bp, Homo sapiens
tctttatagggagaccaaattttgaggaaggtggaccaacatcagtagggagaaagcatgaatttatacgctcagaaagtgaaaattggcgcatctttagagaggaacaaaatggagaagatgaagatggaggttggcgactagctggatcaaggagggatggagagaggtggcgacctcacagtcctgatggccctcgttctgcaggctggcgggaacacatggaacgacgtcggaggtttgagtttgattttcgagatagagatgatgaacggggttaccgaagggttcgctctggcagtgggagcatagatgatgacagggatagcttggcccgaatggtgctgtagaggatgctgaagaagaaatgggtacatttgactcatctggagcattcctttctctaaaaaaagtacagaaagagcctattccaga

SEQ ID NO: 1052 - DNA, 1579 bp, Homo sapiens
  misc_feature (1)...(1579): n = a,t,c or g
attttacaagtggttttcttacataggactcctttaagattgagctttctgaacaagaaggtgatcagtgtttgcctttgaacacatcttcttgctgaacattatgtagcagacctgcttaactttgacttgaaatgtacctgatgaacaaaacttttttaaaaaaatgttttcttttgagaccctttgctccagtcctatggcagaaaacgtgaacattcctgcaaagtattattgtaacaaaacactgtaactctggtaaatgttctgttgtgattgttaacattccacagattctaccttttgtgttttgtttttttttttttacaattgttttaaagccatttcatgttccagttgtaagataaggaaatgtgataatagctgtttcatcattgtcttcaggagagctttccagagttgatccatttcccctcatggtactctgctcagcatggccacgtaggttttttgtttgttttgttttgttctttttttgagacggagcnanctnctgttacccagggctgggaatgcagtngccgcaatcttgggctcactttaacctccacttccctgggntcaaggcaattcccctgcctttgcctcccgagtaggctggggattacagggnacacaccaccacggnccagctaggtttttttgtattttttagtaggagacgggggtttcaccatgcaagcccagctggccacgtaggttttaaagcaaggggcgtgaagaaggcacagtgaggtatgtggctgttctcgtggtagttcattcggcctaaatagacctggcattaaatttcaagaaggatttggcattttctcttcttgacccttctctttaaagggtaaaatattaatgtttagaatgacaaagatgaattattacaataaatctgatgtacacagactgaaacacacacacatacaccctaatcaaaacgttggggaaaaatgtatttggttttgttcctttcatcctgtctgtgttatgtgggtggagatggttttcattctttcattactgttttgttttatcctttgtatctgaaatacctttaatttatttaatatctgttgttcagagctctgccatttcttgagtacctgttagttagtattatttatgtgtatcgggagtgtgtttagtctgttttatttgcagtaaaccgatctccaaagatttccttttggaaacgctttttcccctccttaatttttatattccttactgttttactaaatattaagtgttctttgacaattttggtgctcatgtgttttggggacaaaagtgaaatgaatctgtcattataccagaaagttaaattctcagatcaaatgtgccttaataaatttgttttcatttagatttcaaacagtgatagacttgccattttaatacacgtcattggagggctgcgtatttgtaaatagcctgatgctcatttggaaaaataaaccagtgaacaatatttttctattgtacttttcgaaccattttgtctcattattcctgttttagctgaagaattgtattacatttggagagtatttnacttaaacac

SEQ ID NO: 1053 - DNA, 450 bp, Homo sapiens
  misc_feature (1)...(450): n = a,t,c or g
gcgcggcggtccgccggtcgtggagggcgtgtcctgcggcgcgatggccgtagtgttgccggcggttgtggaggagctcctgagcgagatggcggcggcggtgcaggagagcgcgcgaattcctgatgaatatctgttatcgtccttggaagttccagtaaaacatacacatgtttggcttcttgtcattactgttcatgtcctgcatttgcattctcagtgctacggaagagtgacagcatcctgtgcaagcatctcttggcagtttacctgagtcaggttatgaggacctgtcagcagctaagtgtctctgacaagcagttgactgacatattattgatgtgggnaaaacaagaagcataaaaggtacagattgagcatcattctttcaaaatagaatcctgtcaagaaatgcattgaaagcgtcatgattcacatggaaaanagggg

SEQ ID NO: 1054 - DNA, 407 bp, Homo sapiens
gggcggcggtggcagggccggcagcaccctcaggaactccagcctgggtaccccttgcctcttccccgagactgtcaagatctcatccctgtgaggggtaggcctgctgattcagagggtcctcttcatttttgggaactcctttccaaagccatatttttgggaggcagagaggggcaggcttgggcaccccttctgccccccccactgagaactatgcaatggagtttcatgaaatggtccacatagtggggaagtagccaggaaatgagaaacttcctcccaccccagacatttttcctggtgggagctgaagcactgggcttccacaggcccctggcctccttgccctagcacactgggactggccccactctcccagctggactcctgcatgctcctcccct

SEQ ID NO: 1055 - DNA, 1560 bp, Homo sapiens
tgcggccgtggcggggatgctgcgagggggtctcctgccccaggcgggccgggctgcctaccctccagactgtccgctatggctccaaggctgttacccgccaccgtcgtgtgatgcactttcagcggcagaagctgatggctgtgactgaatatatccccccgaaaccagccatccacccatcatgcctgccatctcctcccagccccccacaggaggagataggcctcatcaggcttctccgccgggagatagcagcagttttccaggacaaccgaatgatagccgtctgccagaatgtggctctgagtgcagagggacaagcttcttatgcgacaccagctgcggaaacacaagatcctgatgaaggtcttccccaaccaggtcctgaagcccttcctgggaggattccaagtaccaaaatctgctgcccctttttgtggggcacaacatgctgctggtcagtgaagagcccaaggtcaaggagatggtacggatcttaaggactgtgccattcctgccgctgctaggtggctgcattgatgacaccatcctcagcaggcagggctttatcaactactccaagctccccagcctgcccctggtgcagggggagcttgtaggaggcctcacctgcctcacagcccagacccactccctgctccagcaccagcccctccagctgaccaccctgttggaccagtacatcagagagcaacgcgaggaaggattctgtcatgtcggccaatgggaagccagatcctggacactgttccggactcgtagccagcctgtttagccagccctgcgcataaatacactctgcgttattggctgtgctctcctcaatggggacatgtggaagaacttggggtcggggagtgtgtttgtcacttggttttcactagtaatgatattgtcaggtatagggccacttggagatgcagaggattccatttcagatgtcagtcaccggcttcgtccttagttttcccaacttgggacgtgataggagcaaagtctctccattctccaggtccaaggcagagatcctgaaaagatagggctattgtcccctgcctccttggtcactgcctcttgctgcacgggctcctgagcccacccccttggggcacaacctgccactgccacagtagctcaaccaagcagttgtgctgagaatggcacctggtgagagcctgctgtgtgccaggctttgtgctgagtgctgtacgtgtattagttcctttactgctgaccacattgtacccatttcacagagaaggagcagagaaattaagtggcttgctcaaggtcatgcagttagtaagtggcagaacagggacttgaaccaagccctctgctctgaagaccgcgtcctgaatttcttcactagagcttcctcatcaggttacccagaagtgggtcccatccaccatccaggtgtgcttggatgttagttctccaccctcgaggtgtacgctgtgaaaagtttgggagcactgctttataataaaatgaaatatattctacttcctttaaaaaaaaaaaaaaaaaaaa

SEQ ID NO: 1056 - DNA, 382 bp, Homo sapiens
gagtagccattgttttacttccttctatatgaagcatatatttgttctagaggcattacaggtccaactccaaacatgtaaagcagaatgcaaaggtgaatgcaaattgtggtcataagccaacttgttttgccatgtggaaaatatggaaatagttgctatgcattgcacaaaacatctgttgaaataaggctttcaatttgaatgcttcaagatagactgtttctaaaacccaagattgcctggtgagcaagcagatgggcaatttagacaatcttatactagctcatcatcgcttctgaaacacggcttcattggcaattgtaagatagtattctgaatttgtattttggagatcacgaccttcagaaacacacgatgg

SEQ ID NO: 1057 - DNA, 416 bp, Homo sapiens
ggcctcctgtagggctcctctgcagcctgccctgccttcccccggatgctgggccctgctgctctctcaggaccatccgatcaagctgcagctgccaccctcacctagaaacatgcctttgtgcccacctcaagatgggcagtgtccctgttctgaagtgcccagtggcagctccagtggtagaggaccaaggattgaggtttgggacctgaagctccagtgtgtggcctttggcctcttccctggacttgggtgaccagttttccgtcttcctcctgctagtgctccaccccccggatttgggatggaccagttttcccaccttcctcctgctggtgctccatcccccaataccaggctgggccaccactctgaggagggtaggaggggcctcctggattgaaccgggacagaaa

SEQ ID NO: 1058 - DNA, 537 bp, Homo sapiens
  misc_feature (1)...(537): n = a,t,c or g
gataagtgtttggaagtccctccttccttctctctcctgccgccttgtgaagaaggtgcttgcttccctgttgctttctgctatgattgtaagtttccnnnnnnnnnnnnnnnnnnnnnnnnnnnnnnnnnnnnnnnnnnnnnnnnnnnnnnnnnnnnnnnnnnnnnnnnaatagctgtgtgaaaacggactcatacaatatcttgcattcaatttctaggagttttgctggggctccatagaccacaaaatatctcatgctttaaagcaggctaaatcttgatgtgtgaacattgccccaatatgactaataggcaggacacacttggactcaaatgctagagtaaacagtttgtacgggagactgctctgtgagggaactgagctaatgaagngngatggagctancnnnntnactgctgancttaanngnatgtattnntaaatntaaaagnanncantanntatantatgnnnnagaaatagcnnncatnnanannaaggtgntnacccnntcnnantnnanggctcnntaac

SEQ ID NO: 1059 - DNA, 643 bp, Homo sapiens
caagcaccacaccatcccgctagctggttttgttgttgctgtttcagatccatggtctcacaatgtcctcaggagctgaatgtgacctataggtgggtggggattggcccacagatagatagttttaaaaatacaaatcttgaatttaatgccaacattggagaactggttaattacacataaaaagcaggatttccattttcacttgagttaaacaacacacctggacacactggtgatcgtgtccatcggtaggcatcagctggagtggatgtgctggggcctcagcattggcagcgtgcctgggcctttgaaacagttgctcttagctctgcctcgttggccataggatttgaggttgtggcctaaccatgtcatttcagttttgttactagctaataaatcccttgaagtcagagattgtctaataattttcttcattctcccactgcctgggcgtagtaccggacacatagtagttgctcagtaaattaatttgttcaaatacttccgttgtgtgcagctgagcatatactgagcttctcaaagagccaggggaaaacaattttcacacaattcacacaaattaaatgattaatcttcgcaactcctttttgagattcacaggggatctacagcacgt

SEQ ID NO: 1060 - DNA, 402 bp, Homo sapiens
  misc_feature (1)...(402): n = a,t,c or g
gatactttctggccttgtgactgctggggacactggattaagcagtcagctccttcttaaataacagaactgnnnnnnnnnnnnnnnnnnnnnnnnnnnnnnnnnnnnnnnnnnnnnnnnnnnnnnnnnnnnnnnnnnnnnnnnnnnnnnnnnnnnnnnnnnnnnnnnnnnnnnnnnnnnnnnnnnnnnnnnnncggcctggggaacagagctagatcctttccctaaaataaagaaagaagaaacagaactaatcagctgtaggatgattaaagttgtgcccggacccgttaatactcagctcacatcacctcctgaagatactggnttcctgngttttccaggcctcacgagncacatctttatntangctgtcagacatttnggntncngtctnacttg

SEQ ID NO: 1061 - DNA, 1095 bp, Homo sapiens
aagaaagcttctgagagtaaacattttgctcctaagctgaagggaatgcccagctatttagtaagtgataagtttcttattttgaggacttgactcccatttgctctcagtgaccccagggcagagccagacgaagtgttccgtacccactgctgatggtttcccagagcccacactgagttgaagaacctattgttcttcttggcatccttcttatgctacttctcccatcgctcaaaggggttgcctatggctgtggtgtgccctgccctaaatgcagcaccactttcaagcttagtaggaccattccaagaaaaccaggtttcttctccccataccacgttgtgcctgaagaacaagccttcccgtccttgcctgcatgtgagtcacttcttggctgtgcagcatgtgcccccctccccgcgatatgctggagggtaggattctgcagcctgtgttgctctctacctggcagcagactgtgcaggagccccaacctgtcctccaattccagcattcacagctgatgagcagtgcaggagcagggcgagaggaacagagccaatgatgtgtgggttacactgaggagccaaggacagggcctcaggtctcccccttacaaggcgtggctcatggcctgcattccagagaccaacatgatagcttttaattcagctgcatgacctgtgccttttaagccataaagatacctcaagcctagcacctcttgaaatccagatgttcatattagactcgaaaaaataggctccaggcctaggtgcccaggctatgatgagtctgcttttgaaggaggtagggaatgacatcttccttggacccaaagcttaaaagtaatgtatgctttgctgaccactgtttgttaggccttaaacaacattcactgtggtggtatcaggcacactgctatgtgcatcaattatttttttgctttccaaacagaatctctggggcacaagttttacactcaagctaagtataactttgtcatttcaggtaaatatgacaagtggtggagcatgaagttttctaatttgacttaatcctaataaatttttgttacaaagtaaaaaaaaa

SEQ ID NO: 1062 - DNA, 1507 bp, Homo sapiens
attcggcatgagggggtcacgtggtggctgggccggggaaatggcggcttcaggagagagcgggacttcaggcggcggaggcagcacccaggaagcatttatgaccttctacagtgaggtgaaacaaatagagaagagagactcggttctaacttcgaaaaatcagattgaaagactgacccgtcctggttcctcttacttcaatttgaacccatttgaggttcttcagatagatcctgaagttacagatgaagaaataaaaaagaggtttcggcagttatccatcttgggtgcatcctgacaaaaatcaagatgatgctgacagagcacaaaaggcttttgaagctgtggacaaagcttacaagttgctactggatcaggagcaaaagaagagggccctggatgtaattcaggcaggaaaagaatacgtggaacacactgtgaaagagcgaaaaaaacaattaaagaaggaaggaaaacctacaattgtaggaggaggatgatcctgagctgttcaaacaagctgtatataaacagacaatgaaactctttgcagagctggaaattaaaaggaaagagagagaagccaaagagatgcatgaaaggaaacgacaaagggaagaagagattgaagctcaagaaaaagccaaacgggaaagagagtggcagaaaaactttgaggaaagtcgagatggtcgtgtggacagctggcgaaacttccaagccaatacgaaggggaagaaagagaagaaaaatcggaccttcctgagaccaccgaaagtaaaaatggagcaacgtgagtgaccgcccaaggtcacaggcacagaaccttttcccctgctatctcccttcctgcttcgaaggactcattctttcctcccacttccaccccaacatagagtagtatttgctttttagtccattttgttttcaatacgatttaatatcgatcagagtaattcttttgtacattgaaatgaggggcttggtttaaaaaaagacctttccctctccctgcccctagaacaaccagtattagaaggtgccaccattggtgctgccttctcttcccacagcctgtaactcagtgttttgtacttcactgaattgtgatggttagaaacttcgtggatagtttgtggaaatcatccaattaaacatactgcttaaaacagtgttgctgtgacttcagagacaagcctggaaggggcaccttaggaagccccttcgcttcagttgctcgcttctgggtgtgctcccttcgaaggcccagataagacagggaacacttgtgagcacacagagcagcatctgatgccctgtggtgtttggcatgtgccccctgtctactgaccaatcagtgtggcatgaggcccacgccacccaaacctttcactttccaaagagctagccgtcctccacccagtaccatgtcctagcctgtctgcatttgttagtggtaatattctttatgtataataaatttttatacccaagccaaaaaaaa

SEQ ID NO: 1063 - DNA, 860 bp, Homo sapiens
  misc_feature (1)...(860): n = a,t,c or g
cgagctccagtgggaaaacttgaaacttgtcgtctgcggatatttatttccacttcttgtatggcctgaagaatctaggaggagaaaaagccagataccaaacttacggccaggcagacgggtcgcgggtgttgacagggtcctgagggagtttgaagccttattctcgagccgcctcctcttctctacccacacttgcaccgaggtcaccccggcaccctccgcaccggttcggttttggtctctgcttgtcctctcagtccttggtactttcgtctccctcagccggaggtggcaaactcagacatctacgggcgcccgaggccctcgcagccctgagccccagctttcacttccctgggctgcccctctccgggagcaggcagacgccccgttctcggagcccagcgctcacttagagcgactgaggttggtcgaaggatctttccccacatcccattaatcagggccctaggacactcgcaggtccctttaactctgcttctgtcattacactagaacaagtagtgtttctgtttagagtcccatttcacaaattggttagtggaggcacccgtggcctggcagcttgcacagtggctgtccacctcggggggnggtgtggacctgagccgtggctcagtgacaaaccaggcacccaactatgcaaggcccctgcctnggtgggcatcctaccctctggactgggcccatggaagccactgggcgggcagctggggtgtagttcatgtgaagccccattcccctcacgcttttggggccactgtgaatggggccaggaaacggatttttggtgcagctgcattccctaatagacctagttccctccacgttagtta

SEQ ID NO: 1064 - DNA, 1485 bp, Homo sapiens
  misc_feature (1)...(1485): n = a,t,c or g
ttaataaatttattcacaaaaagtgatattgcagagggtctgggggctgtacatgggcaggggcttggtgagctttgtacatggggctgggagacaagggagcctccaggtggaagggtattttttaataaaaaaaataatggagctacaaccaccccctcccccctccccgattaaaaagacacaaaaatagacgtctctgaggtaaacggggagcctggggcttaagggtgtttaaagggccttcacaggtgccagagcttagaggtgtcacaggcaccggggtgggctcctgcatcagttggtagaacagcacgtagccctcgcctgnatgccacctgggttttcactgacaggggagacacgagagtcattgtagacatgccaaccagtctggcaccggcacagggctgtgtagtggccatagtggacgctgcctgagtggttgcaaagggcatacagctggtatacaggacttccggctttgtcactggcaaagtcccctaggctcagtcgctgcagtggaaagtctacacctactgaactttttttgatggagcctcgggaggcagaaaatcgattcagatggagcacgaggattcgagggaatctttgtactgtcaactttttggtacttcgagttttctgccgacatcggtcacacactggggcattctccgactctagctcttcttccttagtgaaaaggttgaaacaatcccgcagagacaccttgcccccagcaaatcctttcttggggatgggcagggacaggtcacaaaaaacctcgaaggtcgtggagcgatacccacaggcctggcacttgagacaacttttcaactggcccacaaacaggtccacaatcttgctgtcctctcgctccaggtaacgtttccacattaggttggctcggtcatcatcacttaactcaggttcttctagcagagcccctcctcggcggggtggagagggaactggaccattggcaagtatcggtggagcccggcggcctcggcggttgatttcaaggtgtagccgctccatgaggagcttcaggaactcttgggcatcctgctggctgtatccagagaaggagggaacatatttctggaagacagctcggaatcgagtaggatttcaacacttcgcaggagtccagggtgccagagggcaccaatcacatctgcaaaggcttcagtgagctcttgggctcggcctcctccaggcacctcttgccggaagtcccttctcagacagaagtcccgaagaggtcgagtgctgctcagacactgcagcacagcattcaggaagcacgtgtttcccaggtttcgaaggccaacatgaccagagcccagaaggagtgtgtgatgagccatcttgtcatcagagtagaaaggctcagaggaccgggcggatatcatgtggaaggagccatgggaagcagggggctctgtccgtatgctgaacagggtagggggtcccagg

SEQ ID NO: 1065 - DNA, 2074 bp, Homo sapiens
ggttattgaggaacatggcgttgctggtgcgagtccttaggaaccagactagcatttctcagtgggttccagtatgcagccgattgatacctgtgtctcctacccaagggacagggggacagggctctgtctcgcacttcccagtggccccagatgagccagtcccaagcatgtggtggatcagaacagattcctggaatagacatacagctgaataggaagtatcacaccacacgtaagctttctactaccaaagattccccacagcctgttgaggagaaggttggtgctttcacaaagataatagaagccatgggattcacgggacctttgaaatacagtaaatggaagattaagattgcgggccctgcgcatgtatactagctgtgtgggagaaaacttgacttcgaggaattctttctaaggtgtcagatgcctgatacattcaattcatggtttcttataaccctactccacgtctggatgtgtctagtccgaatgaagcaggaaggccggagtgggaagtacatgtgtcgtatcatagttcattttatgtgggaggatgttcagcagcgcgcagagtcatgggggttaatccctatatcctgaagaagaacatgatcctcatgacaaatcatttctatgcagcgatcttgggatatgatgaggggatcctttcagatgatcatgggctggccgctgccctctggagaaccttcttcaaccggaaatgtgaagaccctcgacatcttgaattgctggtagagtatgtgaggaaacagatacagtacctggactccatgaacggggaggatctgcttctgacaggggaggtgagctggcgccctctagtggagaagaatcctcagagcatcctgaagccccattctccgacttacaacgacgagggactttgatgggctgggcctcccgcacggcccgccagctggcttcgaggaacctccaggagagaagtgcctgttggtccaggaccctgcagaaagtggcctgaactgacctctgaacagcatctgtcaaatacctggccccatttgtgttgagtttcctcttagtgtgcccaggagtctgatctgctggggtacagggctgggagaacccctagctctcccggggtgtcctctcccttaggggaagccccgagtgagagtcccccagcacacactccccaaccccctccagcaactacatgtgactgatagcttttcccaaaggccaaggaagggatggtgtaggttcaaaagggaaaccccccagggcctgctgtggcctaggagcagattgtaatgctgccgagtccggtcggtgaccacgcgttgtccctcggctttcagccatggggttgagttggccattaaaagaaacagagacttctctctgccatggcccttctttattccagggacttagaaacttgcctgagatggtggacgcagtaatgagggcaccgcgcagctcagttagagacggagaaagggaagaggctgggatggtctctgctgctcttgcctctagttcatggagatgtgtctcctgttcaggccaagatacagcccagccaggcctgtcgtctgggaccccaggaggcctctgatgaccaagggctttcacatcctaagtcatttggaaggaggccttgagaacaaagtcacctttgtcactcccagtgaactgaatgaggaacatgctgtctcctgtcttggcctcccctttcatgagatactggggagaagagaacattcctcctggcttagttgtagcagacccagacctgtgcccagctttggtcccccttcccaacttctgaagcacgtgctgcagagccaccttggtctgagcacctgaggaccagcccctcctccctcagtgcgggtcatctcttgggggattttcttaaagtgaagaaagggggtggggaaccatattgcccctccctcccccatcaaacttccttcatttaacttgctataaaatgagtcatataaagaaactctatatgggtgaggtatatcccacttctgtgaaaacattacaaatcaaaccgcttctctcagtt

SEQ ID NO: 1066 - DNA, 410 bp, Homo sapiens
  misc_feature (1)...(410): n = a,t,c or g
gggagccgaacaacatcgtggttctgctccagacgagcccttaccacgttgactcactcctgcagctcagcgatgcctgccgctttcaagaggatcaggagatggctcgagacctcgtagagagagcgctgtacagcatggaatgtgcgttccaccccctgttcagtctcaccagtggggcctgccggctggattaccgcagacccgagaacaggagcttctacctggccctctacatgcagatgagcttnccgcgcacggcgctggagtactgcangctnatcctgngtctccagccggatgaggacccccntctgnnangctgntggtcattcgaccacntggnctttcngggccccgtacctncgagnncctgnatctngcttttccngnantgggntgtntctatt

SEQ ID NO: 1067 - DNA, 689 bp, Homo sapiens
agtttgccttctcctatgttttccagaaatgacttcagtatctggagcatcctcagaaaatgtattggaatggaactatccaagatcacgatgccagttatatttaatgagcctctgagcttcctacagcgcctaactgaatacatggagcatacttacctcatccacaaggccagttcactctctgatcctgtggaaaggatgcagtgtgtagctgcgtttgctgtatctgctgttgcttctcagtgggaacggactggaaaacctttcaaccccactgctgggagagacttatgaattagtgcgagatgaccttggatttagactcatctccgaacaggtcagccatcacccaccaatcagtgcatttcatgctgaaggattaaacaatgacttcatctttcatggctctatctatcccaaactgaaattctgggggaagagtgtagaagcagaacccaaaggaaccatcaccttggagctccttgaacacaatgaggcatatacatggacaaatcccacctgctgtgtgcataatatcattgtgggtaaactgtggatcgaacagtatggcaatgtggaaattataaaccacaagactggggacaaatgtgtgttgaattttaagccatgtggcctttttggtaaggaattacacaaagttgaaggctacattcaagataaaagca

SEQ ID NO: 1068 - DNA, 1005 bp, Homo sapiens
ttttttttttttcacagtaaatatatccttattttattgaacacttaaaaaaatctaaattagtacatatctgcaaatttataaatggcaatttcaatggaaaacaaattttataagtaccacaaagcagacaacaaaaatgtctctttaaaaaatgaacaaattcaaatgtataaggaaatttcagctcattttttcttcatttcctaggggaacgcaattgttttcatgctaaaggatggcgcttccttgaactcaggggaccacgtcaggcatggaccaccacgtgggaggaggggagggctaaccaggcatctgcccacatcccagccgcctgtgacagaatcttccatacacatggctcccagatgagcaccaaagggagaccacagcagatacgattctgtggacttgagaaccaaatctatacaaatattttcaactctaagtccccaagagaacattaacatttttgtctatgaaataatttttccagcaatgaatttttttgatattccacgagctgggagggaacaagcataccttgaagacatatgtattggcatcaaatgtcacataaacacacaacagctgggaacacacatgctatgtatgtcaccatgtgatcacaaccacagcacatgtgaagtgctacaattactcctcagagcggtggaatggcagaggagcttgcatgaaaaatcagaacatacccgtacaccaaagcaattcaaaaggaccaagtcaccctcagcaaaatgacattaatgggaatgacttaaccaacaggtttaaatttttcatactaaactcttttttttttggtgtgctattgtccatccctcaatcatcagtactaatttaaaaatgtgtgttaagtggagcagagaatcctaatctaattccatatttagagaatctcttggtaatataaaaaaggcacatatcaatacctagtgatttgaaaaattacatagcatatgctattacatatttttcgtgtag

SEQ ID NO: 1069 - DNA, 2583 bp, Homo sapiens
gcccgggactatcccttcgcggtgtagcggcagccggagacctggctgaggaggcaaccgcgtagacacctccctgcttagaaaacaaacactgaaccagaccgatcccagttggagggttcgaaaatgttccagacagcctgtcgggaggggttgttgttgctgttggactaaatagctattcctgattggtcatgtatagggttttttaaggcgggtggggggaggagggggtagaggaaaggctccaaacacctgcaggttgggggcggaaagctgtttgcgattccctggactggttggtcggggacaggaggtaattcccagccattgacccccatttctctctctccctccctcttgccctgcctctttctctccacccctatctttcctggaaactcgctttgggcgcggcagatcgcccaggaccacaccgcagcgtaactgcaggcctctcagcgaaaaagggggaaagcaaagacccgggtgtgcatcctcttcctcggcttccgcccctttccggcggagtggagatcctattcagaggggccggtctctctaaatatgccccaggatgaccgagcggccgccgagcgaggcggctcgcagtgacccccagctagagggacgggacgcggccgaggccagcatggcccccccgcacctggtcctgctgaacggcgtcgccaaggagacgagccgcgcggccgcagcggagcccccagtcatcgaactgggcgcgcgcggaggcccggggggcggccctgccggtgggggcggcgccgcgagagacttaaagggccgcgacgcggcgacggccgaagcgcgccatcgggtgcccaccaccgagctgtgcagacctcccgggcccgccccggcccccgcgcccgcctcggttacagcggagctgcccggcgacggccgcatggtgcagctgagtcctcccgcgctggctgcccccgccgcccccggccgcgcgctgctctacagcctcagccagccgctggcctctctcggcagcgggttctttggggagccggatgccttccctatgttcaccaccaacaatcgagtgaagaggagaccttccccctatgagatggagattactgatggtccccacaccaaagttgtgcggcgtatcttcaccaacagccgggagcgatggcggcagcagaatgtgaacggggcctttgccgagctccgcaagctgatccccacacatcccccggacaagaagctcagcaagaatgagatcctccgcctggccatgaagtatatcaacttcttggccaagctgctcaatgaccaggaggaggagggcacccagcgggccaagactggcaaggaccctgtggtgggggctggtgggggtggaggtgggggagggggcggcgcgcccccagatgacctcctgcaagacgtgctttcccccaactccagctgcggcagctccctggatggggcagccagcccggacagctacacggaggagcccgcgcccaagcacacggcccgcagcctccatcctgccatgctgcctgccgccgatggagccggccctcggtgatgggtctgggccaccaggatcagccaggagggcgttcttaggctgctgggatggtgggcttcagggcaggtggggtgagaattgggcggctctgaagcaaggcggtggacttgaactttcctggatgtctgaactttgggaagcctttactgaccctggggctggcttttctgtttcctgtaccagtaggagatcagaaaaatggagcaaagtggtaggtactttttgtgaagacggcacggtcttccctcttccctcagtcccaaatccttcccaagtaagaggctggagttgtcactgcttttggcctggagtttgggatccctgtctttcctaagacctggggttgtcagctctcatctgaggcatccagcagtctctgccttgcctttagcccctcccaagctgggctggggtggcctgtgtggccacttctgtccatatttatagggtacccaatagctgcccatttcgtgagccccatcttcacccaggcctatgttgatccatccagcttgccagatgctgcagagtcacaagcctcgaggtgccttcttcagggcctggttgaagaagatgatcagtggacagtctgctctagatgagctgggccggagggtcaggaaacccagtcgcccttacttcttgccctggggatcaaagttctgctttctccccaatgagacttgccttcctaagcctgtggctgtggagaccatgtctgcagccctgagaaagccctgtcgggctttgtgtgaaggcagagaaagggacaatgatagtagagtgatatggagcaagagatattttgggcatgtgggcttcaactcctcgacatcactgttcatgctggcgagtgaatgccagtgtgctgatgggcgtacgctggtgctgagtagatgcgcagccccatctgtgcattctcctggatgcttagagggatttctttgctgtaagatgtctgtttgctgatggtctggtctatgttccgaattgagcacaaaacctgt

SEQ ID NO: 1070 - DNA, 513 bp, Homo sapiens
ttttttttttttttttttcttggtccacaggtaacaagagaagattatggttttttaatataaatttttaaataattgcttttgacccttgtaaacagcttggctttgttttgtattgaaaaggagatcaagccatcacagtgctatttctaaagatataggacatccctgattgcctttaaagctctatttttggctccggttccaggttaaatcattcttttttacatgatcagaggcaggttgttcagctttaagtattgacagacttgaaggagaaacacgttgaagcatgaaacatgcttcaaggaaacatattgatttgactattaacaatccaaaaactgtaaaaatggtggaatggtaaaatacaaacagtacttggaattggtcaaatgtttgcactccgagactccatgaaccatatattttattttttaaaaaatcatatttatatccatttacataagacttacacatttaaaaagaaatgcacggtaatacataaatgcc

SEQ ID NO: 1071 - DNA, 1630 bp, Homo sapiens
  misc_feature (1)...(1630): n = a,t,c or g
ttttttttttttttgtgaagtgcttttactttctctctggctcacagtatcgcaaggagctaagtaaggcctgtatggaatctccactgtatccatgggatgggaggtgctgaacacacgcccaaggcaacaaggccactcagggaaggagccaggccatgccactgcgtgccttccatcctaccaagctgcttctgctattctttgctttacacttcagctcatttactcaaggaaatgaaatgaagtggcaaacaggacagaaatgaaaatagaattctttaagtgggtaaatttgggacaataaaggcatcaattaaaatatggttcaggaatagggagaggtgctccttcgtgtcgcgagtgaggaggtggaaggtggggggatgtattgtctttgacagagggttcactcaaacctctgccgcaacacctccagatgcacattcggtgtcttctgtgcctgagctggcagatgctggggaggggtgctgtgcccctnacctgccctgccagtcacagtcaagggtctccttcaaggtgctctgggcccatgttctgtagcgacatgggggatggttgtgcccatgccccaggcagtgatcaagcctttgtgnaacgnccatggggctgggcctgccttgtgctgtgcctgctctgaggcagctggggctgtggtggggatccagggcctcattctgtaaacccagtgctggttctctgggagtctgcaccacaggcacgtggcacatattggtccctagttacattaagggcaggggtaggatttgcatctgtttaagattacaaggactggatgagttctgaaaaattcataattctgaaaacctattagtttatttaaaataatggatggcatgtacctatatatgtagataagtctccttttaaatttttttaaagaaccaaagaatcctacaagcccccgtaacacacatacttgagttccagatactcatcaatgccatacttggacccctctcgcccaaggccggactgcttcactccaccaaaagggcactccacagaggaaattaatccttcgttgacgccaaccatgcccacttccagctgctctgccactctccagatctgggctgggtcttgagagtaaaaataacctgctaacccaacatcagctgcgttagcgattgctatagcctcctcctctgtatcgaacttgataactggtgccagaggcccgaaagtctcttcatgagtgcacagcatgtcctgggtgacattgcacagcagggtaggctcaaagaaattttttccaagttggtgtcgttttccacctgtcacaacggtggcacctttagaaacggcatcattcacctgtttctccaccttttctaccgctttttcattaattaatgggccctgagtagttccttcctcaaatccattacctacgcgcaggttcttcttcatggcctcggcgaatgcttttacaaaggcatcatggatgcccctttgcaccaagaattggtttgagcaaacacaagtctgtccagtgttcctaaatttagatgccatggcccctgctacagcctggtccacgttggcactgtcaaatactataaatggagcaaggccgcccagctcc

SEQ ID NO: 1072 - DNA, 412 bp, Homo sapiens
  misc_feature (1)...(412): n = a,t,c or g
ttttttttttttccgatcacagaaaatattttattgacttatttagaaacagcatgatattaagatagcatattttgcattagtctactttaaatgaaggacaaaaagcaaaaataattgaaaacaggctgtgcttgatagcttcatgagaaagaatcatggtggagctgaaaaccttagaagttggttacacatgatggaaaagaggccctcactaactgactacaccattcccattgcttttgcttgtaaatacatctggcacccagtaaaactttataaaatcaagttgttgaatcaatgtttagggtgatgacaacttcccttgtaaataaagggtcatttcctataattttggactttagtattggattggattgattggattgaggncggggtctngggtctgttg

SEQ ID NO: 1073 - DNA, 1893 bp, Homo sapiens
cagaactgaaaaggtattttggtgcccgggcaatcctgggggagcaaaggccacggcagagacaacgtgtgtaccccaagtgcacatggctgaccacccctaaaagcacctggccccgctacagcaaaccaggtctgtccatgcggctgctggaatcaaaaaaaggcctctccttctttgcgtttgagcacagtgaggagtaccagcaggctcagcacaagttcctggtggccgtggagtctatggagccgaacaacatcgtggttctgctccagacgagcccttaccacgttgactcactcctgcagctcagcgatgcctgccgctttcaagaggatcaggagatggctcgagacctcgtagagagagcgctgtacagcatggaatgtgcgttccaccccctgttcagtctcaccagtggggcctgccggctggattaccgcagacccgagaacaggagcttctacctggccctctacaagcagatgagcttcctggagaagcgaggctgcccgcgcacggcgctggagtactgcaagctcatcctgagtctcgagccggatgaggaccccctctgcatgctgctgctcatcgaccacctgggccttgcgggcccggaactacgagtacctgatccgcctcttccaggagtgggaggctcatcggaacctgtcccagctccctaattttgccttctctgttccactggcgtatttcctgctgagccagcagacagacctccctgagtgtgagcagagctctgccaggcagaaggcctctctcctgatacagcaggcgctcaccatgttccctggagtcctcctgcccctgctcgagtcttgcagtgtgcggcccgacgccagcgtttccagtcaccgcttctttggacccaatgctgaaataagccagccccctgccctgagccagctggtgaacctgtaccttgggaggtcacactttctctggaaagagcccgccaccatgagctggctggaggagaacgtccacgaggttctgcaagcagtggacgccggggacccagccgtggaagcctgtgagaaccggcggaaggtgctctaccagcgtgcacccaggaatatccaccgccatgtgatcctctctgagatcaaggaagccgtcgctgccctgcccccggacgtgaccacgcagtctgtgatggggtttgatcctctgcctccttcggacacaatctactcctacgtcaggccagagaggctaagtcctatcagccatggaaacaccattgctctcttcttccggtcactgttgccaaactataccatggagggggagaggcccgaggaaggagtggctgggggtctgaaccgcaaccagggcctgaacaggctgatgctggctgtgcgcgacatgatggccaacttccacctcaacgacctggaggcgccgcacgaggacgacgctgagggggagggggagtgggactgagcgtccgcagaggtgaccgaaaagccgtatgatgatgttcccgatttctctgttggtcggagtcggccagttgcctgaagtagggaagctgagtgtgtcgctccctggtccactgtttctcctataaatgtaaatgggtcacgctctgccgtccgcaccttctcctttcgcaggcactgagcgccgtcccatgccctcggattcgaatcacactcagtccattctcctcccagtggcttgtgggtgaggtggggcccagaccccatgcttcctgtgctcccaggatctgggcacgggtggagaaggggcccacgggtgcttcagtgcaggtccctgctgaatgccaaggccctgggtgcacgtcctccttgaacttgctgtggagttcgtcaacagagctgcgtgccttgttggtagagggtctca

SEQ ID NO: 1074 - DNA, 431 bp, Homo sapiens
  misc_feature (1)...(431): n = a,t,c or g
gggaagatattttagaagtgctttggtttgtagtttgttcattggaatagggataagaaataggagatttttggtgttgaattatgtaatttatttcttagttgtttgtacttctgtgtatatatacacatttaatccaaccaagtaaatacatagcttacagagtttttgcttctggttacataaatgtgaacacaaggtgtctgcctacttatatcaactgaaatggttaatgcatttttggttacttaagcacacgtgggacaagagaacagggccaaagtacagtatttaaacaggccaagcgaagtaaattttttttaaatcaaggatttagacagcattttatacctagttcaggcttttcccccattggtattaaaatgtgttaagtgattagaaatcctgtacaggtttnaaatttttgaata

SEQ ID NO: 1075 - DNA, 650 bp, Homo sapiens
  misc_feature (1)...(650): n = a,t,c or g
ggtgtttgtcttaaacaagggctcaagaccagcttggccctggttggagcaccagacttataanctaatgttattttttttctactttaggcagggaannagctaaacctgggttgtatttctgggcctttgctgccnatatctaggccactttggtagataacaanaacttaatcgtacacaactgtactcatctaccccatttcattaaaaaaaaaatttaaatcncattgaaaagaatgtcatttgtaaaggaaatgtcanctgaaagggacctagatggcaagcanctagccanaccaggttgcggggcaagaanantgcctattagnnnnnnnnnnnnnnnnnnnnnnnnnnnnnnnnnnnnnnnnnnnnnnnnnnnnnnnnnnnnnnnnnnnnnnnnnnnnnnnnnnnnnnnnnnnnnnnnnnnnnnnnnnnnnnnnnnnnnnnnnnnnttcagggcaattaccaantntggtggtgggcccctttaacccagcacntnggaggttggcanggnaanccttaaccnggnggggnnagttttaacaanttnccggtccatgcncccaccnggggaaaaaaanccctnccaagaanaaaangnncnntanaccaaataagggtntgggcaancnanattcagcatt

SEQ ID NO: 1076 - DNA, 267 bp, Homo sapiens
  misc_feature (1)...(267): n = a,t,c or g
aaaacaaaaaaaggcagtattgaaaacagacatgcccaaaaatatcccaggtcatggggcttagctattaatgagataagactgacatgatgaggcctgaaaactgaacccagaatttatcaacatgcangttacaggccctttgacaagacccattttatgatgtattggaggaaagtctccnttnngagttnncatgaaangtcaagagaaaattgatacantgcttgncatggacngntttcattgngctgaaanggaaaaaaa

SEQ ID NO: 1077 - DNA, 2789 bp, Homo sapiens
caaactagagatggctgttttggctccaactggagatacttttttcccttcaactcattttttgactatccctgtgaaaagaatagctgttagtttttcatgaatgggctatcgctaccatgtgttttgttcatcacaggtgttgccctgcaacgtaaacccaagtgttgggttccctgccacagaagaataaagtaccttattcttctcattttatagtttatgcttaagcacccgtgtccaaaaccctgtaccccatgtttatcattcataaactgtttcatcagtctcctcgaaagactctgaatagtcgactactgaacaatgaacacctggatctgagactaagccggacgatgactgggttaaagctctcccggctcacccctccagacccgctgcccatccctcttccttgctccatgcccaggggctggacttgtaaaggccaagtcatcaaggtttcttgccctttgggatgttgggtcagtgggggagccggagagctgggagctgggggtcggagggaggtagtaggtggaggtgttcttccctgattcccttgcgggatgcctcgggctggcctcccctgagggtcttagctccgagaggggaccctcttttccacacagccttctccacctctggattttggtaactgctccctcctcatcccttcaggattagtggcctcagtgggagtctggcttttactagtcctggcggacttgtggtttctacataatgtgctcgcacttttgcaaaaaatctttttatagaaccctcctcagataattctgagtgtcatctatttccctgactggtacagtatctcttctgaaaaagcagagtgcattcaagtctgtaggaaaacccttttcttagggaggtgattttttttctctctctgcttcttatttggcctactttacaatttctaactaactagttattggcatttactgacagtaaattattgcagtcaccaataaatgatagtacattgtgaaacaaaatatttgctcatattagcaaataggacattctttggctttgaagtctttcttttgtgaagacttcacacacggttgcttcagcacacagttgctgctcaggttttatgtatagatgataataatagaaagcacagtttactaacatggtaaaccaacggagttcaagtcaagtcagttaatacccctaagaattagattttatttcttattctgaaaacttgctacacaggggacttatcctaaccccatagtgtgctctgttgctgacttgattcaagttgcagcgtgttttgcgctgactctaaggtgcggaaatcctcacacctggcaaaggagaattcaaactgaactttttgaatataaggcaaaaacttcaagataagggaatatgattgatgattggtacgaaaaaatgtcaagaatgtgttcccctaatacacgacaaaatagagtgacttctggacataaatctgccatttattgaaccattcactacaacaaataaataggtataaaagtggaattggaatttttatacttatttgttgtagtgaatggtttaatgaaaatagaaatcactggtaatttccaccccaaactaaactatttcccttcttttaaaaaaatacacaaccaagattttaatgtaaaatattttgctttaattgtattttatgccttgattaatgaaacatggaaatattgattttcagttttggtcacctgaggaacctatctttgtttgcttttggaaaagcccattttctaaacagatacaatattgccacaacaatgtgcagaaacctttttgataaaaaaaaattgttctttgcctctaagtggatatttgcaattattttctctctcctaactagactgtaaaaagggctgctttagatcctgtagcttactccagttattagttattaacaaacacccaagtctcgaagatatttctaattaaaaaagaaggcatattcagagttctttttaaataaatgttgtttacttttataggcatctttaaacttctggattttggtatgccatttaaaaatacttccagatacacatggaaattagtaatactgcagccgtatccttgcaaacacatctgtcagtgtcaaaggtttcaaggtttttcttaaaaaaagaaaacaaaaaagcaaacacctatactgcccaaatgggaggattagatacatggttagaaatccctcaggaaaagtgttttttcttttcttgttgctgccttaaaaatagaataatgactatttctgatggatagagacatagcattttaagctggtggtgtgtaaaatcccataggtatgtgcatgactttcagagagtatttgggggggaggttaacaagatgtggtgccatttataagcagtgttattgtttttgcttgccccgctgccacaagtcagctaagtcataacaaaagcttcaaactgatgctaaggaaggccatgcccctttggaaacaataaattcccaatctgttttatgttatgtacctgacatcttttcctgcattctctaccaggaaataaagatgaaattaaatatcaaaattctaatcgatgatatcagtgcaatgttcaggaactattcattaagatattagaaaaccattcaaagtggtaggacatcagagcctacttcttacattgctgtgggagaaatgcaggtttcaaatttaatatatatatataatttttttaaaagcagaagtttctttttatatttggtaaacttaagttcga

SEQ ID NO: 1078 - DNA, 357 bp, Homo sapiens
  misc_feature (1)...(357): n = a,t,c or g
gggttatagtaatttttaatgagctacaaatacactcagtacagtgtttgtcaggtaaatggtggtagttcttatttatttcattcttcttcttgcctttttctcaccaaaaatgtgagctatgtggtaaagaccatatttgattgttgttntgctatgataattttgaattgaatggaattcagaaggacctaaggagggcagatcattcttcttaagccctaaacccctcaangggaataatttttantaaatngnggcatttacggacagnatttgccaaaaatcttgtagncnaattatnntnatgaaancttagcaaangccnnatgnnnattgcnnanntttnnnntaggg

SEQ ID NO: 1079 - DNA, 1305 bp, Homo sapiens
tttttttttgatggttttatcttccctttattacaagaaggaacaataaaatagaaacatttgtatggaaaatgcagtgaggagtggtagggaagcaggtgaggaggggacagggcagagaaactcccggttcagggagggaaggggagcaggctgcccccaagccctcccacgcagaggatcatgacccgaggtccagggccctagagctggtggggcagtgtgggggacagttctgtgcccggctccacgcagcagtctcgacagcaacagccagctgccggccccccagccactggtgtcagcagctccccatggctcgccgtctgcccctgcccctcctggctggtggccagctgcagtttcctcatgtgcggcaccacagccgtggcattgaaagcttgcttccacttgctcttggcaaagttcttcttgatctgctcactcaccgactggtggatattcttatctagagctgtatctcctgcaatccatgggtgctgcaaggcctgctcacaggtgaatcttttctctgggtccttcctcatcacgtggcggatgaaatctttggcagagtcagagatgtcgtcccagtaaggagagtcaaactcgtactcggccttcaaaatctgttcaaagagtttggcatcattctcgtcatagaagggagggtaaccgcagagcaagatgtaggcgatgacacctatggaccagcaatccacagccttgctgtagggcttctgggcccaggacttcaggggccacgtatcccggagttccacaggcggtggagagcacactgcccgggtcctccatcttggagaggccaaagtcggagatcatgattttggagtcttcatccaggctgtagtacagcagattctctggcttgagatcccggtgtacaatgcccaggtcatgcaggtatttcacagcatccagcacctggaagatgaggcggctggcgtcccgctccgtgtagaagcctttttccacaatacggtcaaagagctccccacccgacaccagctgcatgatgaggtagaggtggcccccactctcatagatgtcatccagggctacaatgttggggtgcttgatcttgtgcaggacagcaatctcattctccatgctgccttccttgccctccagggcctccttggcaatgcatttgatggccaccagcttctgcgtcctcttatcttctgccaggatcacctccgagaaggcccccgtgcccagaacatctcggaagtcgtagatgtctctaatgtcctccgcctgcttccacctggtgcgtccagc

SEQ ID NO: 1080 - DNA, 418 bp, Homo sapiens
gcgaaccagcaacttcgcccttgttggatcttacacattatcattgtcttcagtaggaaatactaagtttgttctggacaaggtcccctttttatcttctttggaaggtcatatttatttaaaaataaaatgtcaagtgaattccagtgttgaagaaagaggttttctaaccatatttgaagatgttagtggttttggtgcctggcatcgaagatggtgtgttctttctggaaactgtatatcttattggacttatccagatgatgagaaacgcaagaatcccataggaaggataaatctggctaattgtaccagtcgtcagatagaaccagccaacagagaattttgtgcaagacgcaacacttttgaattaattactgtccgaccacaaagagaagatgaccgagagactcttgtc

SEQ ID NO: 1081 - DNA, 529 bp, Homo sapiens
ggcatgacatacaatgggcattaggcttagggaatctactttaatagtggcagaaacaagcctgatattggtccaggaggagtcattgccttatctctccaggtggttatctgcaaatacaactctgagaaatggctcaggtaagaacatcacggtcttgcattggtggcatatgcagcaaggatgctcagggctgatgaagaagtgcctcttccaacacagggatatttttgaaatgaatttattacaatggagatgaataaagcaaacatttactcatcatatgcctgagaaaatgtcatgtcccaatgccaggatataagttgtctaagttaattttaataatcctgtgaggttatggttatttttgtcctattgcagatgatgaactgagggccagagagattagggagctggacagagttcaaccagccaggaagtgagctaggactggtggagcacagattctatcctggtttatctggccccaaagcagatcaccttgaccgttattgaatatttgcagggg

SEQ ID NO: 1082 - DNA, 346 bp, Homo sapiens
  misc_feature (1)...(346): n = a,t,c or g
gaatnnnnnnnnnnnnnnnnnnnnnnnnnnnnnnnnnnnnnnnnnnnnnnnnnnnnnnnnnnnnnnnnnnnnnnnnnnnnnnnnnnnnnnnnnnnnnnnnnnnnnnnnnnnnnnnnnnnnnnnnnnnnnntgtgattcacctgttttttaaatgacatgacattaaaaatattacttttctaaaattcagtttttcactcaatgttttaggaatacttgcattataaggttgtatcaagtgaggcaaacctatattttggtattctgtattcaacacctaccttgtgaatgcctgttttctgccacgttctaggtgttagggatataagtggcttgcaaaatcaga

SEQ ID NO: 1083 - DNA, 603 bp, Homo sapiens
gtaaggccgttttcttttcccattcgctcatctgccaggaaaagggacttgccgttggcgcttcggcctcttgttcattgagaaaaaagaggaaatactccgcgtgcgcttgtagaaggggagtcgtctccagctccgaaccccggagtgttcatcagcggggaatctggctccgaattctctttttttctcccgccgattgctcggaagttggtctaaagcagaggttggaaagaaaggaaaaaagtttgcatcgagactggatttatttgcacatcgcagaaagaagagaatccaagggagaggggttggtgcaaagccgcgatcacggagttcagatgtgttctaagcctgctggagtgaccacacttccaagacctgatggagggccagagctcagagtggcaacgggttcgcagcccttgctgcagacgccccgtgacggtggcagacagcgtggggagcccgaccccagagacgccctcacccagcaggtacatgtcttgtctctggatcagatcagagccatccgaaacaccaatgagtacacagaggggcctactgtcgtcccaagacctgggctcaagctgctcctcgcccctc

SEQ ID NO: 1084 - DNA, 709 bp, Homo sapiens
  misc_feature (1)...(709): n = a,t,c or g
cactgaacaaatcactaaataacacaaaacaacaatgtaagcagcactttcttgtgtaaaaaaaaaaaaaaaagcacgtcctgtcgatgaattttgagtctctctgccttgcctgtcccgactccctttcgcgcaccgtggcatgagaatctttcctcacgctgttcgttgcggtattgctgagcattgatgttgatttgaaggaaaagccgtggttggacccagctgtgtgtttcactcacgtgcaattgagtagctgttgccaggctgtccatgcctgttgtgactaccggttggggtcagatttggggtgaagaatgagtaagtttctgcatgctttgtctctacctgagacacttctacaacaagccaagtataatctctccagccctgcagattttcacctgacttgttcagccccatgcgtagactccccgctgcaggcctctggcctgttgggctcactgcatgcagcccctggcgtgcaatactagtgctccacggcgcgatgtgcttctagcccttgcactgcacctaggctcagggttcaaacggccagcccgaaaagcctgcctgccttctttctggaaacagcacgtccccggccgtgtgcctgcccctttctctactgagctagtccccaaaccaaaggcaagccccctcgggcctcgggggatggggccggccacacccctgaattcgncctggg

SEQ ID NO: 1085 - DNA, 1980 bp, Homo sapiens
  misc_feature (1)...(1980): n = a,t,c or g
ggaggtgcaggtcgaagaggccgggctacgtcgtgccctgcgcgtgagcagctgcagcggcagaggcagcatccagcggcggcgccagcagttccagtccgttgctttactttttgcttcaccgacatagtcattatgccgaagagaaagtctccagagaatacagagggcaaagatggatccaaagtaactaaacaggagcccacaagacggtctgccagattgtcagcgaaacctgctccaccaaaacctgaacccaaaccaagaaaaacatctgctaagaaagaacctggagcaaagattagcagaggtgctaaagggaagaaggaggaaaagcaggaagctggaaaggaaggtactgcaccatctgaaaatggtgaaactaaagctgaagaggcacagaaaactgaatctgtagataacgagggagaatgaattgtcatgaaaaattggggttgattttatgtatctcttgggacaacttttaaaagctatttttaccaagtattttgtaaatgctaattttttaggactctactagttggcatacgaaaatatataaggatggacattttatcgtctcatagtcatgctttttggaaatttacatcatcctcaagtaaaataaatatcagttaaatattggaagctgtgtgtaagattgattcacattccatgcacttgctttaaaatttagtcctgtgcatactgtggtgtttttactgtgcatatttgaatttttcatgcagtttttctagagcaataatcagtggtgcttttgtacctaggttttatgtgattttaatgaaacatggatagttgtggccacctgctgactatttgtggtttaaaataaaaggtttacttgtctgcagaaaaattcaaatatgcacagtaaaaacaccacagtatgcacaggactaaattttaaagcaagtgcatggaatgctgaatcaatcttacacacagcttccaatatttaactgatatttattttacttgaggatgatgtaaatttccaaaaagcatgactatgagacgataaaatgtccatccttatatattttcgtatgccaactagtagagtcctaaaaaattagcatttacaaaatacttggtaaaaatagcttttaaaagttgtcccaagagatacataaaatcaaccccaatttttcatgacaattcattctccctcgttatctacagattcagttttctgtgcctgtgaaaaagaaaggaaaaaaaaacatatagttactactgaaactactataagcaaaggaaattccacccaccaacacacacagttttgaacatttgttttcttttttttttccagctttactgcaaaacctatttcaactctgagtgaagaagacaaggcaggaatatattacacaaacactttgtttcatttattgctttctgcttttcaaaccaccacagaagccttacctgcaagctcccactcttcataatgattaaaaaaaaaaaccaccacactactatctgattctagtcactgcaaacatgcagganttttctactgtgcccttaactctcactgtttcaatctgcccctttactgacaagtgtgctgggtggggtgcctctggaggttgagacattaacagttgagcgagagatgtggatctcttcagctttaagtttcaccattttcagatggtgcagtaccttcctttccagcttcctgcttttcctccttcttccctttagcacctctgctaatctttgctccaggttctttcttagcagatgtttttcttggtttgggttcaggttttggtggagcaggtttcgctgacaatctggcagaccgtcttgtggctcctgtttagttactttggatccatctttgccctctgtattctctggagactttctcttcggcataatgactatgtcggtgaagcaaaaagtaaagcaacggactgganactntggccgccgctggatgct

SEQ ID NO: 1086 - DNA, 355 bp, Homo sapiens
ggcacgaggggggtggtggtggactgtgatcgagaacattcctgcagggagaatgcctcccttccctgagtcagggaccagataacctttccaggatccttccagcccaggacaaagggctttgtctcaggttcagctctcctgagaattcatcctccccgagatttggacacctcagccgaattcctgctgtttaccttcttctctcaagaaacaacaccctgaggattgttgctttcacttcttcggacccaaatcatgatttcccagccacatttctcagttgtcaaatttgtggaggatgctggaagcttctagtgagttgcttacagatgatccaactggcggcttacta

SEQ ID NO: 1087 - DNA, 588 bp, Homo sapiens
tatattttcaaataaaattaaaatgctcgagcacttcctttcagaaagttataaaattaaaaataattattttaaatgctcattcaaatgtgtctgtatacttgctatgcccctttttctataattccaaactgagactgatttttcagagatttttaactttaataattttaaatctagaatcaagtgaaacagatatgttaaatactgagtctagttttcttccatcttatggagcttcatggaataagaaactaatctagtgcaaatgaagattaaatatttctgggtgatggagagatagtcaacaaatttatttatccatcctctgcacatcagtccactggagcaggagttctacacattaaaaatgtaatgggatcagcctaggcattgtttggtgttcttttgttgtattttttagaatgggggtgggggcctaagtgtccttatgaagctgtggtccacgacaggagcttgttgggggagtaccaggggttctgctgctttcctgcatctgagcaacacaacagagatcatcagttttaaatagagtaagccctcacaattcaaaatatcataagaata

SEQ ID NO: 1088 - DNA, 505 bp, Homo sapiens
  misc_feature (1)...(505): n = a,t,c or g
cctctgtgccaggccatcccgtctttggagtgtatcctatttgaggtcaagaaatagcctgctgtccttcccaccttccctgagcagcacctacagaacagcaaccgtgatggtgtgtgaaagcaacagtcagagactgctatacatttctgtgggtgggggtagggaatactggctctgtggccctcctcagagctgggaggccaagggttcactgggcttgaatcctctctaagcacctaccccattatggcctaaacctcctcagtggaccacgggaaatcatgttggaccaagggtttccatgttcaaacagtcaacaaggccctcccctaggttgagatatttttgatactgaaggcccaggccccccagtatggcttgctgccagcaagcancaaggattctctcgtgggtaacgctgtagccaggcaggaccagcctcttcttgggagaaccctttccccacgtagggtttgtgtagtgctcccacatcctgcttatt

SEQ ID NO: 1089 - DNA, 1326 bp, Homo sapiens
gtggctccagggacaggacggccaaggtgtggcctttggcctcaggccggctggggcagtgcttacacaccatccagactgaagaccgagtctggtccattgctatcagcccattactcagctcttttgtgacagggacggcttgttgcgggcacttctcacccctgagaatctgggacctcaacagtgggcagctgatgacacacttgggcagtgactttcccccaggggctggggtgctggatgtcatgtatgagtcccctttcacactgctgtcctgtggctatgacacctatgttcgctactgggacctccgcaccagcgtccggaaatgtgtcatggagtgggaggagccccacgacagcaccctgtactgcctgcagacagatggcaaccacctgctgggccacaggttcctcctactacggtgttgtacggctgtgggaccggcgtcaaagggcctgcctgcacgccttcccgctgacgtcgactcccctcagcagccctgtgtactgcctgcgtctcaccaccaagcatctctatgctgccctgtcttacaacctccacgtcctggattttcaaaacccatgaccgtcagggccacccctgcctctgggccagggaaaccagctactcagggacttctcttgcctggagggtgcagtgatagctcctcctcactgccccactgtgctcctgggcctgtgaccccagtgctcaggcaccttgcactagaggcttctgactcctgggactttggagcttaccagagatgcagtccctcccaggaacctgttggagaggcaggacctgctgctttagagtgcggctgaacccgggccttgcgtccctgtttggccagagcaaggatctggcctggagaggcccatcctataccccttattagagccatgacagcctacagagtgaggtgaggtgctcccaccttcccagatggttcctttctgccccttcctggaaggaaaggtgaggctgccaatagcctcctggcaccagccagacctcacccttgaccaacctctcggggctgggggttcattcctggggcactgtggcctggttttgctttgaaaccaagaaagagcaaagggaacccagcagttctgagtgagttctgagccagccctacctcaggctggctgttgagacatgctacaattttcatttttgtaaaaataaagcttgattgttcacagatctggttcctcactggctgagtagtcctagcaggctccaggagaagggaacagcagacccaagctcagggttgtatggtgctgctgaaaccgacaagaccagcctcat

SEQ ID NO: 1090 - DNA, 553 bp, Homo sapiens
gagttgatacatgggaaagtcttcagaaggagtggaaagagactctgaaggtgctaagacaccatcaagagaaattggaggctagtgactgtgatcaccagcagaactcacctactctagaaaggcctggaaggaagaggaagtggactgaaacacaagattctagtcaaaagaaatccctagagccaaaaacaaaagctgtgccaaaggtcaagctgctgtgtggggcagatttattggagtcctttgctgttcccaatttgtggaagagtgaagacatcacccaaatcgtggccaactatgggctcatatgtgttactcgggctggaaatgatgctcagaagtttatctatgaatcggatgtgctgtggaaacaccggagcaacattcacgtggtgaatgaatggatcactaatgacatctcatccacaaaaatccggagagccctcagaaggggccagagcattcgctacttggtaccagatcttgtccaagaatacattgaaaagcataatttgtacagctctgagagtgaagacaggaatgctggggt

SEQ ID NO: 1091 - DNA, 1339 bp, Homo sapiens
tttttttttccttatactattaaatctttacttgtataaaaaccgaaattagtccaactactttttgcccatttatgatgataaaaattgaaacaaaaactctcaacccattttgtaagacttctattataacattcttaaatccagttcatattgttccagagtcatgtaacatcaaggtggggacacaaaatatgatagtgaattttaccttttcttaggaaatgatcacaatttcattgaaagtacaggataaagtgaatagccccttaacgacttgtgtactttattgtcttcaatagaaagttcaaatatttccattttttaaacctctagaatattatccggacatttaaaatattgatatttgagtttacattaaaggacatcatactctgaaaacaggctggctttaaatatagtttgactgattgtgggggtacttacggacagatttctttaccaagtaccagtttcttatatttaaaaaaaatcagcaagatagaatttaaaaaatcttcatttacaatacattgtaaactgcagacagcaactgccacatacatcatagaccagcacaggtaaaaatcttttttccggatgtctataagactttgtatcttcctttatttgttggttggtatgaattttgcagccggatcagctcttcttttatgagcctggtgatttctgcctttgctttctgcacagccagttcattggcactttcaattgccaagtaaatcttccgctcgccttccttgggttctttgccaggagggaagtaggttcctctgattgtaattgcggcttcagagtattcactgattctctgcagagcttccttagaggtaactttccacctagcagtctgtgggaagtcattgatctctaattcttcttcatatctcttaaaagattcattctgtccaccatcctgtctctcttcttcttgtttctctaacggcacataattgagcttggcattgatcttttcagcaagttgttctgcaatggtttttgcagaaacagtgggagccagaatggtgccacccctaagaattgcattggtggcctgctgcatcacatctacctgagactcgatgcccaaattcttctgggcattgattctaagagccaatctcttagcaatttctaatttctcagcatttcctgcagttggagcaggaacacttgatgttccaggagcagccatatcctttactctcttctttgaattaaacatgctttcaatttgctcatcaatatcaactgcagcatcctcatcatctgaatcttgtagaccaagagctgctttttgtaacttcttcctctcatt

SEQ ID NO: 1092 - DNA, 457 bp, Homo sapiens
ggacctcatcactctgactctgccttcttggaaaggccctgtcactccacagatgtctggccagcttcaaggcagaaggaaaaacaggaaaagctcttttaacagcagcaggaacaagagaaatgactaaccatactaaaagactggtaacagcagcagcagccagacaggcctcaccttaaggacttgggctgccagagcaaattcagcagagcttatttggcctcccattcacacagctcagttctgtgcccacatcacctttggggaagaaatcagcattctaatcagggacactacttcaggagtcctccacagcgagtccgtcatctgtcactttatgtagatcagggttctagacttcttccctgaggttctcagaagcagctctcaggatgaacgtattgtcctcttcccctcttcttgcaaagtgcacagctaatctaatgttgtctct

SEQ ID NO: 1093 - DNA, 4605 bp, Homo sapiens
ggaattccccgagccggagaagatggcggtgcggaagaaggacggcggccccaacgtgaagtactacgaggccgcggacaccgtgacccagttcgacaacgtgcggctgtggctcggcaagaactacaagaagtatatacaagctgaaccacccaccaacaagtccctgtctagcctggttgtacagttgctacaatttcaggaagaagtttttggcaaacatgtcagcaatgcaccgctcactaaactgccgatcaaatgtttcctagatttcaaagcgggaggctccttgtgccacattcttgcagctgcctacaaattcaagagtgaccagggatggcggcgttacgatttccagaatccatcacgcatggaccgcaatgtggaaatgtttatgaccattgagaagtccttggtgcagaataattgcctgtctcgacctaacatttttctgtgcccagaaattgagcccaaactactagggaaattaaaggacattatcaagagacaccagggaacagtcactgaggataagaacaatgcctcccatgttgtgtatcctgtcccggggaatctagaagaagaggaatgggtacgaccagtcatgaagagggataagcaggttcttctgcactggggctactatcctgacagttacgacacgtggatcccagcgagtgaaattgaggcatctgtggaagatgctccaactcctgagaaacctaggaaggttcatgcaaagtggatcctggacaccgacaccttcaatgaatggatgaatgaggaagactatgaagtaaatgatgacaaaaaccctgtctcccgccgaaagaagatttcagccaagacactgacagatgaggtgaacagcccagattcagatcgacgggacaagaaggggggaaactataagaagaggaagcgctccccctctccttcaccaaccccagaagtcaaagaagaaaaatgcaagaaaggtccctcaacaccttacactaagtcaaagcgtggccacagagaagaggagcaagaagacctgactaaggacatggacgagccctcaccagtccccaatgtagaagaggtgacacttcccaaaacagtcaacacaaagaaagactcagagtcggccccagtcaaaggcggcaccatgaccgacctggatgaacaggaagatgaaagcatggagacgacgggcaaggatgaggatgagaacagtacggggaacaagggagagcagaccaagaatccagacctgcatgaggacaatgtgactgaacagacccaccacatcatcattcccagctacgctgcctggtttgactacaatagtgttcatgccattgagcggagggctctccccgagttcttcaacggcaagaacaagtccaagactccagagatctacctggcctatcgaaactttatgattgacacttaccgactgaacccccaagagtatcttacctctaccgcctgccgccgaaacctagcgggtgatgtctgtgccatctcgagggtccatgccttcctagaacagtggggtcttattaactaccaggtggatgctgagagtcgaccaaccccaatggggcctccgcctacctctcacttccatgtcttggctgacacaccatcagggctggtgcctctgcagcccaagacacctcagcagacctctgcttcccaacaaatgctcaactttcctgacaaaggcaaagagaaaccaacagacatgcaaaactttgggctgcgcacagacatgtacacaaaaaagaatgctccctccaagagcaaggctgcagccagtgccactcgtgagtggacagaacaggaaaccctgcttctcctggaggcactggaaatgtacaaagatgactggaacaaagtgtccgagcatgtgggaagccgcacacaggacgagtgcatcttgcattttcttcgtcttcccattgaagacccatacctggaggactcagaggcctccctaggccccctggcctaccaacccatccccttcagtcagtcgggcaaccctgttatgagcactgttgccttcctggcctctgtcgtcgatccccgagtcgcctctgctgctgcaaagtcagccctagaggagttctccaaaatgaaggaagaggtacccacggccttggtggaggcccatgttcgaaaagtggaagaagcagccaaagtaacaggcaaggcggaccctgccttcggtctggaaagcagtggcattgctggaaccacctctgatgagcctgagcggattgaggagagcgggaatgacgaggctcgggtggaaggccaggccacagatgagaagaaggagcccaaggaaccccgagaaggagggggtgctatagaggaggaagcaaaagagaaaaccagcgaggctcccaagaaggatgaggagaaagggaaagaaggcgacagtgagaaggagtccgagaagagtgatggagacccaatagtcgatcctgagaaggagaaggagccaaaggaagggcaggaggaagtgctgaaggaagtggtggagtctgagggggaaaggaagacaaaggtggagcgggacattggcgagggcaacctctccaccgctgctgccgccgccctggccgccgccgcagtgaaagctaagcacttggctgctgttgaggaaaggaagatcaaatctttggtggccctgctggtggagacccagatgaaaaagttggagatcaaacttcggcactttgaggagctggagactatcatggaccgggagcgagaagcactggagtatcagaggcagcagctcctggccgacagacaagccttccacatggagcagctgaagtatccggagatgagggctcggcagcagcacttccaacagatgcaccaacagcagcagcagccaccaccagccctgcccccaggctcccagcctatccccccaacaggggctgctgggccacccgcagtccatggcttggctgtggctccagcctctgtagtccctgctcctgctggcagtggggcccctccaggaagtttgggcccttctgaacagattgggcaggcagggtcaactcgagggccacagcagcagcaaccagctggagccccccagcctggggcagtcccaccaggggttcccccccctggaccccatggcccctcaccgttccccaaccaacaaactcctccctcaatgatgccaggggcagtgccaggcagcgggcacccaggcgtggcgggtaatgctcctttgggtttgccttttggcatgccgcctcctcctcctcctcctgctccatccatcatcccatttggtagtctagctgactccatcagtattaacctccccgctcctcctaacctgatgggatcaccaccatctcccgttcgccccgggactctccccccacctaacctgcctgtgtccatggcgaaccctctacatcctaacctgccggcgaccaccaccatgccatcttccttgcctctcgggccggggctcggatccgccgcagcccaaagccctgccattgtggcagctgttcagggcaacctcctgcccagtgccagcccactgccagacccaggcacccccctgcctccagaccccacagccccgagcccaggcacggtcacccctgtgccacctccacagtgaggagcccagccagacatctctccccctcaccccctgtggacatcacggttccaggaacagcccttccccccaccactggggaccctcccccagcctggagagttcatcactacgtaaggaaagctccttccgcccctccaaagccctcaccatgcctaacagaggcatgcattttatatcagttattcaaggacttctgtttaaaagatgtttataatgtctgggagagaggataggatgggaatgctgccctaaaggaagggctggtgaaaggtgtttatacaaggttctattaaccacttctaagggtacacctccctccaaactactgcattttctatggattaaaaaaaaaaaaaaaaaaagtagattttaaaaagccacattggagctcccttctacccactaaaaaataaccaatttttacattttttgagggggagtgagttttaggaaaggggaattaagattccagggagagctctggggatagaacagggcgcagattccatctctccccaagcccctttttagtgactaagtcaaggccccaactcccctcccccaccctacgctgagcttattcgagttcattcgtactaataatccctcctgcggcttcctcattgttgctgttttaggccaccccagctcagccaatgattcctttccctctgaatgtcagttttgtttttaaaagtcacttgcttagttgatgtcagcgtatgtgtatttggtggggaaaacctaatttcggggatttctgtggtaggtaataggagaagaaagggcactgggggctgttctccttccttccctggggctgtatccatggactcctggaaggcacagagaagggagctataagaggatgtgaagttttaaaacctgaaattgttttttaaagcacttaagcacctccatattatgacttggtgggt

SEQ ID NO: 1094 - DNA, 2053 bp, Homo sapiens
acaaatacagacaactcctagtgcgaacattgcattcctgttctgtccgatttccagatatggctgcaaatgttattcctgtgttaatggaatttctcagtgacaacaacgaagcagcagctgctgatgtcttggagtttgttcgtgaagccattcagcgctttgataacctgagaatgcttattgttgagaagatgcttgaagtctttcatgctattaaatctgtcaagatttaccgaggagcattatggatcctgggagaatactgtagtaccaaggaagacattcagagtgtgatgactgagatccgcaggtcccttggagagatcccaattgtagagtcagaaataaagaaagaagctggtgaattaaaacctgaagaagaaataactgtagggccagttcagaaattggttactgaaatgggtacctatgcaactcagagtgcccttagcagttctagacccaccaagaaagaggaagacagacctcccttgagaggattccttctggatggagatttctttgttgctgcctcccttgccacaactctgaccaagattgcattgcgctatgtagctttggttcaggagaagaaaaagcaaaattcttttgttgctgaggctatgttgctcatggctactatcctgcatttgggaaaatcctctcttcctaagaagccaattactgatgatgatgtggatcgaatttccctgtgcctcaaggtcttgtctgaatgttcacctttaatgaatgacattttcaataaggaatgcagacagtccctttctcacatgttatctgctaaactagaagaagagaaattatcccaaaagaaagaatctgaaaagaggaatgtgacagtacagccagatgaccccatttccttcatgcaactaactgctaagaatgaaatgaactgcaaggaagatcagtttcagctgagtttactggcagcaatgggtaacacacagaggaaagaggcagcagatcccctagcatctaaacttaacaaggtcacccaattgacaggtttctcagatcctgtatatgcagaagcttacgttcatgtcaaccaatatgatattgtcctggatgtacttgttgtgaaccaaaccagtgatactttgcagaattgcacattagaactagctacactaggggatctgaaacttgtggaaaagccgtctcctttgactcttgctcctcatgacttcgcaaatattaaagctaacgtcaaagtagcatcaacagaaaatgggaataatttttggtaatatagtttatgatgtctctggagcagcaagtgacagaaattgtgtggttctcagtgatattcacatcgacatcatgggactatatccagcctgcaacttgcactgatgcagaattccgtcaggatgtggggccgaatttgaatgggaaaacaaagtgacagttaacaccaacatggttgatttaaatgactacttacagcacatattaaagtcaaccaatatgaaatgcctgactccagaaaaggccctttctggttactgtggctttatggcagccaacctttatgctcgttccatatttggtgaagatgcacttgccaaatgtcagcattgagaagccaattcaccagggaccagatgctgctgttaccggccatataagaattcgtgcaaagagccagggaatggccttaagtcttggagataaaatcaacttgtcacagaagaaaactagtatataaaaataaacaaaaagtccttgaagctttacagttaatttaggtatgggcttactggactccaacatcttttgtactctttcatgcttatatagaatctgagttcatgctgaatacttttcagccaataatttatagcctttcccttaaatcaagattgagtttaaaattatagtttgtcttttgtcttaacagttctgaatgctgtcctcaaagtatataatgtttcatgtaccaagacccttttcacagtacaataaacagatctattcataaatttttgttattttataaataaatgattacataattttaaaa

SEQ ID NO: 1095 - DNA, 568 bp, Homo sapiens
  misc_feature (1)...(568): n = a,t,c or g
gtgtggtgctccctgcccagcccctccaggtggaggtgctgccacgggaacgcagttgctctgcctgccctgggcccctggcgaacantggggagcagggcagtgctgtgaggagcccagctttcccagtcaggcaggcatggcttccgtgttcaggctccctcaccagctggtgacacggggacaagcttacaaaccttctctgaacctcagttttctcatttacaagagggcaaagccatccatcaccttgtgtggattcagagaatgtgaggccctggggtgtcctacacaagggaaaggcttgctcagtgagcggtctgcacaccgttagccaccctgccacctctgtgccctgggcaggctccaaaggaaagctctggctgggactgccaggagtctcacacgctcctgttgacattcccagcagccgcccctgaggtcgatgttngttctgttnttctttttcnnnnnnnnnnnnnnnnnnnnnnnnnnnnnnnnnnnnnantnaatatgntntnnnanattgctncttgntattatcnnantnctttatntttttgatatc

SEQ ID NO: 1096 - DNA, 898 bp, Homo sapiens
gcggctttggggtaggtgttattttctcactttgcagatgagaaaattgaggctcagagcgattaggtgacctgccccagatcacacaactaatcaatcctccaatgactttccaaatgagaggctgcctccctctgtcctaccctgctcagagccaccaggttgtgcaactccaggcggtgctgtttgcacagaaaacaatgacagccttgacctttcacatctccccaccctgtcactttgtgcctcaggcccaggggcataaacatctgaggtgacctggagatggcagggtttgacttgtgctggggttcctgcaaggatatctcttctcccagggtggcagctgtgggggattcctgcctgaggtctcagggctgtcgtccagtgaagttgagagggtggtgtggttcctgaatgggtgttcgtccagtggggacatgggtgtgggtcccatggttgcctacagaggagttctcatgccctgctctgttgcttcccctgactgatttaggggctgggtgaccgatggcttcagttccctgaaagactactggagcaccgttaaggacaagttctctgagttctgggatttgggaccctgaggtcaggaccaacttcaggccgtggctgcctgagacctcaataccccaagtccacctgcctatccatcctgccagctccttgggtcctgcaatctcccaggggttgcccctgtaggttgcttaaaagggacagtattctcagtgctctcctaccccacctcatgcctggcccccctccaggcatgctggcctcccaataaagctggacaagaagctgctatgagtgggccgtcgcaagtgtgccatctgtgtctgggcatgggaaagggccgaggctgttctgtgggtgggca

SEQ ID NO: 1097 - DNA, 452 bp, Homo sapiens
  misc_feature (1)...(452): n = a,t,c or g
tcttggattctgtggttgctaggaaaattctgcctgcagtgatattgcgtggtcctagggctcaggcgaaaacagaatgttcctgagaagacgggaaggattcatagggcttcccaagcgagggtgccccatcctaggaagctggacaacttgtgtccctttctagatgcttatttcccttctgagcaatggaggttgtgctggtaaagccagaaccccatgaaggcgagctggcagtgggaggtgacaaggctcattcccttagcagcaccttggttctctagtgccaagtggaaggtgtgtcttgtgcattgcatccttgtagttggggccctccatctctggccctcccgacagctgggtgcgtcctccctctcttggtaagagcagttggaaggaggtcagcacatgccggctgtgggggagacccggctnactgagtggangcccgc

SEQ ID NO: 1098 - DNA, 438 bp, Homo sapiens
  misc_feature (1)...(438): n = a,t,c or g
tttganattgaanancntttgacnnnnnnnnnnnnnnnnnnnnnnnnnnnnnnnnnnnnnnnnnnnnnnnnnnnnnnnnnnggcacgagtcacaaactagctaaaatgacttaaaagcatcttgatcatcagcagctaccaaataatccagcttttaacaaaaatgatttctataggttgtagaaagaatgtttggcctttagattaattcattttaatttgagaaaactgtttagaaaactaataggaagtgttatcttttgtagcccttgaataaacaggaagagaacagtaaagactgaatagttgtatgggtctttttttttatatttatttgacatacttttttaactcttaaaaatctcagaattcatgtaactaaaatagttttaaattataaanatgccacctgttttggcaaaaccngattgccntgtc

SEQ ID NO: 1099 - DNA, 394 bp, Homo sapiens
gcatgggttactgtactaggatcaagccctactaagttaaagaaagattaattttcatataccttctatactgcttccttttcttattctgttattagctcctttgttattaatgtaactaagtctgactcactcagactattgcctttaatgcttgctttgtcataccttgtagaaatgtaaaagatcaacagcagctagccttttcacacaaatatttatatcccagccctttaattgacacagttattcctagcactcattgttgtaatgacctgcagccaagacaccaattttctgctcctactgcctggcaacattgtagtaaataggactgcatcactcaaactacccaatagcaaagttagacttccacaaaaaggtttgtgcagag

SEQ ID NO: 1100 - DNA, 321 bp, Homo sapiens
atcccccagcctgcctgtgggccccactgcccatggagccctgccaccggcccctttcccagtagtgtcccagccctccttctacagcgggcctctgggccccacttacccggcagcccagcttggacccaggggtgctgcgggttactcctggtccccacagaggagcatgccaccccggccgggctatcctgggaccccaatgggtgcctctgggcctgggtaccccttgcggggaggcagggcccccagtcctggttatcctcaacagtccccataccccgcaacaggaggaaaacctccctacccaatacagcctca

SEQ ID NO: 1101 - DNA, 391 bp, Homo sapiens
ggtgccccaaatgtgttcacaggaacaaggtcttaataaaaagcctccaatgggaatagaatatcaggaaaaaggccacatctatggtaattaatggcagaaaagctggagagttggattctgcggtgctgctgacaggtgaactctggtcctctgcacctgtttatgggccatgcagactggtggggtggcagatgttagcctaagacccctagcagtgcctgttgctttgtgagtggagatagagactcttacatttaaaaatggaaaaacatttcacaaattaccataaattgtagttaatatgtagaaaaactcattcatactacttttctaaaatagacatgacttcagcagcagcttttttttgttgtattttgagacagtgtct

SEQ ID NO: 1102 - DNA, 525 bp, Homo sapiens
cctccaccgcctatggaaagagtgtcccactggaggctgcacatggcccaggagtggcaccatgttgcagggacaaccatccccatttggcttctccttaaaacacaattgcagctgcattctgcatcgctgaaaactgcaatataatattaaatctgttggtctatgcatggctgcgtatgtgtttcttggaacctgtgtgacagggatatgtgccctggcacactggccagaagactgggcagccaccatggcagtgctggatgacctcagtaagaatgtgtcatgtattccaggtgctgatctaaaaactgtggctcaaatgtcaccgagcttatatgaagctcccagagagaacatttaaaagctcagagagtaagtgctggggaaagcagagctatcagaggaaatctctcatagaaacgaaaccaaaccaacagaaaatgaagaaggccacatctttaaggccacctctgcctctatcagatgagctgctggtctagatcaggggctggcaaacttttc

SEQ ID NO: 1103 - DNA, 600 bp, Homo sapiens
ccgcgggaagatggcggcgccgctcatccccctctcccagcagattcccactggaaattcgttgtatgaatcttattacaagcaggtcgatccggcatacacagggagggtgggggcgagtgaagctgcgctttttctaaagaagtctggcctctcggacattatccttgggaagatatgggacttggccgatccagaaggtaaagggttcttggacaaacagggtttctatgttgcactgagactggtggcctgtgcacagagtggccatgaagttaccttgagcaatctgaatttgagcatgccaccgcctaaatttcacgacaccagcagccctctgatggtcacaccgccctctgcagaggcccactgggctgtgagggtggaagaaaaggccaaatttgatgggatttttgaaagcctcttgcccatcaatggtttgctctctggagacaaagtcaagccagtcctcatgaactcaaagctgcctcttgatgtcctgggcagggtctgggacctcagtgacattgacaaggatgggcacttggttcgagatgagttcgctgtggccatgcacttggtgtaccgagccctggagaa

SEQ ID NO: 1104 - DNA, 396 bp, Homo sapiens
  misc_feature (1)...(396): n = a,t,c or g
gagcaataccctgaatttctaagtagaatattatactttttaaaagactttcagatgtaattctaagctttaaaaaaaaaaaaaaattctaccacagttacattgcttaccaaatactgagttccattacttttctnnnnnnnnnnnnnnnnnnnnnnnnnnnnnnnnnnnnnnnnnnnnnnnnnngctggagtgcagtggccaatctctacacattgcaaccttgggcctccggggcttcaaggagatcctcccacatcagcttcccggggtaggctggaggactacagggcacatggccaccacgcccgggggtaattttttgtattttttttaggaggacagcgttttttggccacgttggcccatggtgggggtggacagggggcaagggaa

SEQ ID NO: 1105 - DNA, 635 bp, Homo sapiens
ggcctcttaaaatggctcttttgaacagaatccaaaatgactgcatgtaagctctttcttctatgttgtctgtatttcagccaaaagaagcacttatacatctcttgtccctataaattctagaagtctcagatggtcttaatatagacaactctttcctatttacacagtggttgcagctttctcaagtcctttgagtctcccaatagcaagagggatatttcaagcttccgcagtgattccacagaagcccccacattaggcttgaggttgggtaaagaagtaaaaaataataatcttctcaagatacaaataacataacctaatactccctcaaagcagcaacaacagcaaaacagcagctctctgcaaagaagttctttggaaaagttccttcctatctccacattctgtcttctttgggcaccttgttctagccaaaaggtagaagagttgtagagatggttcttaatcatttccttcatgaattctttatttgagtgaatctgtgtatattatttttatcattaatatctatcatattgatggctcattcaaaactgaagacagtccattttaacataatttataatagagatggtgatatggtttgggctgtgtcctgacccaaatct

SEQ ID NO: 1106 - DNA, 1235 bp, Homo sapiens
attccgggtcgcactactactactaaattcgcaggcgctcgactttttttttttttttgccaagataaatcacttttatctctataggaaagggaggatctaaaaaaaatataaattacattagtaacacaacataagaaaaagacagggacaaaaacaacagagaagtctgaatgatgctaccctaacctatttataaaaaggccctgcatcagaaattcacaatcccacccacttctaaaaatatatttagacatgtacagaagcggtgggcttgtttttaaattgtttgctttttttgtaaaaatatattaaaggtgaatagaaatcctctctcccttccccctgtccagcccccagctagggactggagatcaggggtaactatctcatggtgttctaaaccttgattactaacactcccaacccctccccaactcacttcacttagaacctgaaacattaaaaaaaacaaaaacaaagacatcagcctctttggaaaagcataactctgagggtaaacttgcttttcattggaaacaacacaaaacaacaaacagggggctctaagaacccaactaagctaaatgaaacccagtcaaacagaggctgggtttcagctccacagaaaacttctaacaaagaaatagagggaaaaggccggaatcggggggatttgctagcaattagctgcctttgaaagatcaagaaggggtgttaatggacaaaagggctggggacctgatcttggttacagcagtcaccgcatagtcaggcagttgcctatacaggacagaggcttctcctgctctcccctcactaccctctgctgccttgaaatccccaaaataagcaaagctgggcagaaacagaggggaggggagtagggactcacgtgctaggggggaggtagccaggctttttgcctttggtgtgactagatggagaactgcttggcccctggggtccccaaggtagagaaagcaaatgggctaaaggaacccctgattccaaggaaggaaagtagaggcagggctatggagaaaagaaagacaaactggagatacaaagatgacaaaagaagcctcacaaattccctgtggcctgcatggtagctattaaattccccagaagcattgggcaagctggggtgaggttggagtgggtggtacaggtggaaagggcaagggtacactccacttgggtagtgccaaatggaggtggggggatgttcc

SEQ ID NO: 1107 - DNA, 1245 bp, Homo sapiens
agtctgacttcactctaccagagattatggccaaattgcacggaatttggtttcttgccctctgaagcctgagggccccccttgcctggctggtttgacagacccggggtggtcactgctgagacttcagagatcgcagctgctgtgagaatacggtgaaggtactttgttctggaagatgttgtcatacacttttcccagttattttcaaacttgacatgagcctatgttgactcactgggtggggtccttcttacgcagcacacgtggcaagtgcctgaatcggggctggaggcacttcagagcctctgaggggccaccacttctggcccaaaattgcagggttgtagatgaggctgcctgtggagaactggtgtgaggaggaagctgtttccaacaaagagcactttcatctgttgagatggctgtggtgagcaactgaacgagcctacgtgtgtacctgaattttccccgtaactcatttcttccatatgaagaaacaccaaactatgtacagagaactttttacaaaaggcagaccttttttaagctgtgtaacccacatagcctaaccacctggcagaatgactacgaataggggtcattgtgctggtaaaagcctctattacgactgtaagtaagttggatgttggcaaaattaaattgttacagtatttagagctgctgtagctgttccttcacaacataaaataggataaatgactagtacgtctttcaggtgggtggcaagcagaacatgcgtaatattctctacctggtctgtagctgtaactgtgatgtacagacaaagcaaaaattaaaagaacttatgaaaacaaatgcaatgatactaggatatacacttttgtatttttattcttatataaggttatttgctggctattgttggcctctagttcagtctgtgttatttaaattctaatatatgaattatttgaattgaattcatgttcggggccacgttgttgtatgtattgatgtacagccttgaatgtgaataattattgtaaactatattttacaactttttttctggctttattatataaattttctattgggtcagtgatttaatcatataatttaatgaatctgtttatcctttttttttttccaaatacttgtgctttaggtgtagttaccagatgatgaattttcctcgtatggtcagtagtcttgtaataaaaagcatgtagagtgtaaaaaaaaagggaaaaaaaaaaa

SEQ ID NO: 1108 - DNA, 1759 bp, Homo sapiens
cgtgaggaccagcggctgctgccctgccgcaagtacgagcagatcgaagagggcactgtccggcgcctcatcatccacaggctgaaggagacgatgatggtatctacctgtgcgagatgcggggccgggtgcgcaccgtggccaacgtcacagtcaaagggcccatcctgaagcgcctgccccggaagctcgacgtcctggaaggagagaatgctgtgctgctagtggaaactctagaggccggggtcgagggacgctggagccgtgatggggaggagctgccggtcatctgccagagcagctcaggccacatgcatgccctggtccttccaggggtcacccgagaggatgctggcgaggtcacctttagcctgggcaactcccgtaccactacgcttctcagagtaaaatgtgtcaagcacagtcccccaggaccccccatattggcagagatgttcaagggccacaagaacacggtcctgttgacctggaagcctcccgagccagctcccgagaccccattcatctaccggctggagcggcaggaagtgggctctgaagactggattcagtgcttcagcatcgagaaagccggagccgtggaggtgccgggcgactgtgtgccctccgagggtgactaccgcttccgcatctgcacagtcagcggacatggccgtagtccccacgtggtgttccacggttctgctcaccttgtgcccacagctcgcctggtggcaggtctggaggatgtgcaggtatacgacggggaagatgccgtcttctccctcgatctctccaccatcatccagggtacctggttccttaatggggaagagctcaagagtaacgagccggaggccaaggtggaacctggggccctgcggtaccgtattagagcagaagggtcttgcagcacagacttcatcctgcatgccgttcaagcaccagggacagcggtgccctggtcggcttcagctgccccggcgtgcaggactcagctgccctcacaatccaagagagcccggttgcacatcctgagcccccaggacaaggtgtcgttgaccttcacaacctcagagcgggtggtgctgacttgtgagctctcaagggtggacttcccggcaacctggtacaaggatgggcagaaggtggaggagagcgagttgctggtggtgaagatggatgggcgcaaacaccgtctgatcctgcctgaggccaaagtccaggacagtggcgagtttgagtgcaggacagaaggggtctcggccttcttcggcgtcactgtccaagatcctcccgtgcacatcgtggacccccgagaacatgtgttcgtgcatgccataacttccgagtgtgtcatgctggcctgtgaggtggaaccgagaggacgcccctgtgcgttggtacaaggacgggcaggaggtggaggagagtgacttcgtggtgctggagaatgaggggccccatcgccgcctggtgctgcccgccacccagccctcagacgggggcgagtttcagtgcgtcgctggagatgagtgtgcctacttcactgtcaccatcacagacgtctcctcgtggatcgtgtatcccagcggcaaggtgtatgtggcagccgtgcgcctggagcgtgtggtgctgacctgtgagctatgccggccctgggcagaggtgcgctggaccaaggatggagaggaggtggtggagagcctcgcgctgctcctgcagaaggaagacactgtccgccgcctggtgctgcccg

SEQ ID NO: 1109 - DNA, 2038 bp, Homo sapiens
gccgccatggcccaagctgacatcgcgctgatcggattggccgtcatgggccagaacttaattctgaacatgaatgaccacggctttgtggtctgtgcttttaataggactgtctccaaagttgacgatttcttggccaatgaggcaaagggaaccaaagtggtgggtgcccagtccctgaaagagatggtctccaagctgaagaagccccggcggatcatcctcctggtgaaggctgggcaagctgtggatgatttcatcgagaaattggtaccattgttggatactggtgacatcatcattgacggaggaaattctgaatatagggacaccacaagacggtgccgagacctcaaaggcaagggaattttatttgtggggagcggagtcagtggtggagaggaagggccccggtatggcccatcgctcatgccaggagggaacaaagaagcgtggccccacatcaagaccatcttccaaggcattgctgcaaaagtgggaactggagaaccctgctgtgactgggtgggagatgagggagcaggggcctcgtgaagatggtgcacaacgggatagagtatggggacatgcagctgatctgtgaggcataccacctgatgaaagacgtgctgggcatggcgcaggacgaggatggcccaggcctttgaggattggaataagacagagctagactcattcctgattgaaatcacagccaatattctcaagttccaagataccgatggcaaacacctgctgccaaagattcaggggacaagcgcgggggcaagaaggggcaacaggggaagtgggaccggccattctccggccctgggaaatacggcgtacccgtacaccctcattaggagaagctgtctttgctcggtgcttatcatctctgaaggatgagagaattcaagctagcaaaaagctgaagggtccccagaagttccagtttgatggtgataagaaatcattcctggaggacattcggaaggcactctacgcttccaagatcatctcttacgctcaaggctttatgctgctaaggcaggcagccaccgagtttggctggactctcaattatggtgggcatcgccctgatgtggagagggggctgcatcattagaagtgtattcctaggaaagataaaggatgcatttgatcgaaacccggaacttcagaacctcctactggacgacttctttaagtcagctgttgaaaactgccaggactcctgggcggccgggcagtcagcactggggtccagggctggcattcccatgcccctgttttaccactgccctctccttctatgacgggtacagacatgagatgcttccagccagcctcatccaggctcagcgggattacttcggggctcacacctatgaactcttggccaaaccagggcagtttatccacaccaactggacaggccatggtggcaccgtgtcatcctcgtcatacaatgcctgatcatgctgctcctgtcaccctccacgattccacagaccaggacattccatgtgcctcatggcactgccacctggccctttgccctattttctgttcagttttttaaaagtgttgtaagagactcctgaggaagacacacagtttatttgtaaagtagctctgtgagagccaccatgccctctgcccttgcctcttgggactgaccaggagctgctcatgtgcgtgagagtgggaaccatctccttgcggcagtggcttccgcgtgccccgtgtgctggtgcggttcccatcacgcagacaggaagggtgtttgcgcactctgatcaactggaacctcttacaacacttttaaaaaactgaacagaaaatagggcaaagggcgaggtggcagtgccatgaggcacatggaatgtcctggtctgtggaatcgtggagggtgacaggagcagcatgatcaggcattgtatgacgaggatgacacggtgccaccatggcctgtcccgttggtgtggataaactgccctggtttggccaagagttcataggtgtgagccccgaa

SEQ ID NO: 1110 - DNA, 573 bp, Homo sapiens
aattcggcacgagaatttttaatgttactcgactaactttataagtatctgctcaaagagatgctattgttctttttgataattgttgctggccttaaagtgcctgggagggttatcgaactctcatcaattggttgtgaaagctaatttctgatggaaacacccagattttggtctgtctgctgcttgtgttttgatgtaaaagtattttagtaaaaattatttgaagttttaagccactgtgttgataaatatggtgtgtggtcattgctgcctaccttcgtaaagactgaaaacaatttgttcttttcccagtgtaacctttttttccctttagttcataccagagacagcgaaatgagggcaaaggaaagagtagattaaggagtttaggtagttaatccttgcagttccgtttgtatgaaagggaaggctcaattattacatgtaaacaaataatacctgaatgtgtgaggttatcttatagatatttattaattgaattaggatatgttcttaaaatacaccaatctaattatcaaatggctttccccccccagttctgtagaaaat

SEQ ID NO: 1111 - DNA, 274 bp, Homo sapiens
ggtcacctgactctgcttgtcgtttttgcacaggcagacgtgtgcattctggagagcagggagtgagtgtaaagtttaggctgcgtcaggatgctgactcctcagaagtgtaacttcggcactatccagcctgtgggtggaatggcaatagcggagaatgggaacttcctattggagctgtttacggtgacagcccaggatttgtgccacacttgcttccttcatatgctggcttcaggtttctgatagatgaatggcacagctatggtgagtg

SEQ ID NO: 1112 - DNA, 494 bp, Homo sapiens
ttttttttttttttttagaactttgacttagatttattttcatctcatcttttttaaatttctatttttgtgtatgttttataatgtacataatattttagtacagtagtacatgtatataatttacaaataaataattatacaattaaggaagtgaactaaacatttttttactgatgggaggcacaacccatgctcaggaagcacatctgtccacagctgccagagctcctggctctgctctccactcacccgccctcgggaagtgaagggtgggacactgaccccgaaactcacagaacttttgaggcagcatggggaaagtacagagagctcttttgtgggtgccacatggcgttttcaatttcatttaagtgaacatttacttcctctgagcaaaaccgaagggggccagatggtttgggtctaaaacacacttcagctgatccaacttaaataatctgaatttaaatcactacatctctccacatact

SEQ ID NO: 1113 - DNA, 373 bp, Homo sapiens
aactgtcccttccattatagaatgttttaacagcatcccgggcctctacccactaaatgccgatagcgttcctccaattgtgataaccaaacatgacttcatccccagttgagaaccactaccttagggccagagggaaaagattatctgggactgggtgtaggatcaatcatgattcatcccccgggcctggggaaggggggaagggaactttccttcctaaactcaaaagattttcacaggctacaaaatctggattctgttagcaggatgagtggtaaaatggctgttgggtaatccaccagtatcagtcacacgaagaaaacagctcggatcaataaaaccaaaggtggtagaggccaggcatggtggc

SEQ ID NO: 1114 - DNA, 1255 bp, Homo sapiens
tctctctttctctgtcaatctctccactctccaattctccattgtgtctctctgtccactttctcctttcctctccctgtgcctcatcttcctctcctctctctctcccttctctcttctccgtttctctttttcaccccactccttcatcttgtctcgctgtctatattgttttccttctctgtatcttcattgcttttgctttctttcaaactttctccttcacagatttttctttattaatcagaatcatactgaccaacatgtgctgaggactttctgtgtgctctgtgcttcacatacagtcatgtgcatctttccagttccacaagttagttatcctcatttctcggggccatagagctagtgagtgacagagctaggttttgtatgtcaaagcctctgtcctacatgacatggcttttcctgctgccttctcccctggtattcgtctccctcttttctcctctggctctgcctgggctctcctctggctctgccgagggggtggttttcagcctgggcccttgcagatgtgtctgtggcagcaggccaaccagaccgcagcgggctgggcagcgtcctgagagacctagtgaagccaggcgacgagaaccttcgggagatgaacaagaagctgcagaacatgctggaggagcagctcaccaagaatatgcacttgcacaaggatatggaagttctgtcccagggaaattgtgcggctcagcaagggagttgcgtggggcctcctgacccagacctagagccaggagaaaccagctaaagacctgcaggctgcacccacctcctccccttcctaccccctaggatgctattcccttgggctgtggtggaaaaatgagggctggagccaaaatcaaatagcttgggagactggacattaaaggggctagaggcctgatggttagtgttaatgatcctgtcttagggcagaggccaccagggagtggggatcctgagggaaggggcagggatttctccttcttcttggtcctggctcccaagggcttctgtcttcatctctgcatgagctctccttcccagagaccaactcttttttattttattttattttattttttaatttatgtctggagcctggctactctgcatttgggattggggatgctgggtgggtgtgtggtccatgttcagcgttctagcaacacgtgtgtgtgtgtgtgtgtaaacgctatgcagccaaaataccatcctgccagacgggcccacccac

SEQ ID NO: 1115 - DNA, 1238 bp, Homo sapiens
ttttttttttttttttttatatttaaaatactgtttatttgtgatttaacattaattagcattacatctaagagcaatatcagataacatttatacatttttccacaggacacagaggttcattggctcattctttatgccaaagcaagtaaatagaggcattagcaaaaggtgcaatagttcactgttatgtttaaaaaatatttatgcacattgcattcatttagatatatatatttttaaaaagttatggaaaagcatagttcacaggttactatttctacatacattgtaatacaacataaatgatgtagaacattaaaaaaatcttccaatagagagttaagcaactgaaagtttccaccaagagattaaaacactgattccagtagttagtgagatctagaatgacatttccaggctctggctcaactctgcattatcatatgcacacaaacagagccagctccaaaacacactgtaatcaatgtaattttttgcatgccaactcacccttaagaaacactttgagttatttttacccacgatcattctggatcattgattttgcatcgaactgtgacatcacttgggtgaaaggggaaacgcctatattaagcctaggtttaaatttgtatttacattaaaaagaaaggtcactgaaaagatttttttaaatctgtaaaaatcaagaagtggtagttttcttactggtgggattagacctgctgatttcttctagtgctgccctctaaagatacaaaaaattagaaagatttgacccttttaaaactcaaatatcaaccaagaaagacattgcttttggcagagaagcagaattttagaaatttgggacatgtttccaacaaatcacactttgtatcctatcgtgaatatgagtcaccatcaaactagaattcttcttttcacatcccatcttttggtccccttaatttttcactttccctttcattctttttcatttggctaccttatgagacttttctttactcattagcaatactaagagaaaaatacagtttaagattcaaatatgaatctagatgtacctttacatgctctaatcctgttttaacaccaagtccctggattctggagttatatttaagtatactcagtaccaagcagccttaagtatgctctactgtgaaaagattggctaatatgcttaggacacttttatactgaacggtatacaaacatcaacatacaaaaat

SEQ ID NO: 1116 - DNA, 1289 bp, Homo sapiens
atttttctcagttgggtggataaaaccactaacgcttagaaactgttttctcatgcagctatgtttctcttatttatgccttgaggactaatttctggttttctagctgttaatgcactgttgaccttcataatggtgccttacgcaagcgatcccttctgtgggggtctcatacaggggtgtgggccgatgcatgctttattaaggctcttgtttcacctggcagtgtactgtatcaacgtataatacagaaaaaaaatctctttaaggtcctccttcacaaagacataggagtgaaactccctttacatgtcagtatttgttcaacactttaggcaacttgactgtcagtgttaaaatggaaaacaggaaaatggaaaaatctgaccaattctgccaccttgagactttcatatagaccttgcacaacaattgtatagatcacacaccggctgtatttaatatgtaacattttcacacatattaaagatacagaagtattaaaaacccccaatgttaatgtatttgcttaaaaggcacaagtttcacatatctgtctagctatctgttggtaatacagaaagtatactacttttttaaaaaagtgggcagaattcttgtgtatgtatatttgtgtgtacagtatgtgtatgtgtgtatatatatatattatatatatagataatatataaatattttttttaaggagaaactagaatgtttagctagaaaattccacagcctgtgaagaaatatttcaaaatggccataaaggaggtaaaaatgaaaaccataacctaacttttatagaggctttatctttaatttaacgatgtgcggaggactttcttgcttgaatctgttccgggctgtctgctctgtccatcaaatgggcaggtctggaatggggcaccttcggccgttcagaagtggcctgaacagaatgctggaacccaggctggactcggacacactaaggttttgattttgaatttcagccttattagaagatctaacctaagagtaagctaaccacagggattcttttgtagaacactttttatgcagatgaagctattttttccagcaagtagattcttccagtttttccaaggagtaatttccccgaattggcataccacggcgtggacaagctgatatttcacccagctgctggcttgtgggtgtggctctttgctttatatatatatacacacatgtgagtctggctgggctggtaatttgtttgatcttcctggaaatgagcagtgactaacgctcacataact

SEQ ID NO: 1117 - DNA, 2266 bp, Homo sapiens
  misc_feature (1)...(2266): n = a,t,c or g
ggcacgagcttttgtgaatttccagatatgggattttcctgggcaaatggacttttttgacccaacctttgactatgagatgatcttcaggggaacaggagcattgatatacgtcattgacgcacaggatgactacatggaggctttaacaagacttcacattactgtttctaaagcctacaaagttaacccagacatgaattttgaggtttttattcacaaagttgatggtctgtctgatgatcacaaaatagaaacacagagggacattcatcaaagggccaatgatgaccttggcagatgctggggctagaaaaactccatcttagcttttatctgactagtatctatgaccattcaatatttgaagcctttagtaaggtggtgcagaaactcattccacaactgccgaccttggaaaacctattaaatatctttatatcaaattcaggtattgaaaaagcttttctctttgatgttgtcagcaaaatctacattgcaacagacagttcccctgtggatatgcaatcttatgaactttgctgtgacatgatcgatgttgtaattgatgtgtcttgtatatatgggttaaaggaagatggaagtggaagtgcttatgacaaagaatctatggcaattatcaagctgaataaatacaactgtcctttatttaaaggaggtgactaaatttttggcactggtctgcattctaagggaagaaagctttgaaagaaaaggtttaatagactacaacttccactgtttccgaaaagctattcatgaggtttttgaggtgggtgtgacttctcacaggagctgtggtcaccagactagtgcctccagtctgaaagcgctgacacacaatggcacgccacgaaacgccatctagtctgaatcccagcgtcggggctctgtgccagcttactcttcactccagggtcggatgccacgtgctacaggacatgggagctgctgcttgtgggaatctggtgcctgttccactagagacaaggggtagagtttctcatttggatgaaaaccccttcaactggtggtgtacaactgaagctactatatcttttttgaaaatggcaaaaaaaaaaaaaaaaaaattctggagaccacagaactcaagtgtgtgtttctcctcttttgggtcccctttaagtagttgggatattttggacctggagataacaccagttacccatccttaccagggaatgttgccatcaattccagttgaaaataatagaaaagactgaatttttatatgcttcacttaggctttcatttgagtagactctaaaaattctgccttgcttaagttctaacactgcctctcagatttcagttttggacattgcacaactaagaccttttaaacggcatttgccttggctaactcggaagacacatagtctgcagcaagacattcctatattgaagaaatgagagaaaattttatgctgcatcaggtggagagccaaggctcaacggtggttgcattagttccctcgggaagtattgaaaaaactttgaaatggaagaaaatttttggcacctatgttctgagtacccagatgtctggggttctttcttctgcattagataaatgatcatgctcagtgtaacaaagggaattaaaagttttcccacagtccccttctaggggnggaaactcattgtgtcactgaaatgtttagcttactttaatcttgatatcagcctctacagaccttttattctaagctatcgagcttcttgattgcatttggttgaccacgagtgaccctaaggcattgggggactgtccactgggagttggagtgagcacgtggtgctggcaacaggcattgttttacatactttgtctccagtattctgacaccaagtgtcaactgtgggtactttctttgcctagggatatggaatttcataatttgttggcttttgtttgatgggttgataccctttcccattggaatttaaaacccaaccacattatttctattccacatgcccagtagacatatattccaaagccactggaccacttgagtacataagtgccactgtttaatgcaatatgtatattcaggtctgtaaagctaacagtgtgacttggagtgcttcctgcagatgattctgacttgagtatttacatggaccatggtgatatccaaaagaaaaatgctttttatatttatagattatttcattgaactatatatgaaatgggtatcaataaatgtatttactccaa

SEQ ID NO: 1118 - DNA, 1534 bp, Homo sapiens
  misc_feature (1)...(1534): n = a,t,c or g
ttattttttttttttttttgagatcatctactcaaagtttattggactgaacaaaggctgaatacagagatccaagccatgaggagtacatgaggtgtggtgcctataagccagggtcggaaactttccagacaaacctagatagctctactaggagggagtcaacgacctattgtatcaattagatcccagcctgggacaagggcatgactattgctgtttggggacacgtggctctgtgttgaaggcaatgactgtgtgggctgttgcccatgtggcctgttctcccctaagccctgaaccaaaggttcccaggcccagatgagaaggccactgggaatgccatgcccataggggttgatgctgggacattgncccagccttccattaaatgaaaacattttctataaacttactgctttaaaaaaatgttttaaccaacaaacctaagaactgcaaatgagtttggtatagtataaatattgtcaaatataaaattccaagaaacccatttgagactgatctgatgatctgaagttctaactaatctatcaaactttctaagaaaaggcataggtcaagaaatctttttaaagcaaacattattgcttcctgctatagccagagtggagatttggctgaagctggtaagaacctcagtgaaaaaggtgtcttagcaatgaaagggctgaatccgagattcctctagatgaaaaataaggggaaatggtccaagtaaattccctggtactggttctttgctgccctgtaatcaatatggcatctcacccccgacaaccaagccagccacagagagaagtggggttcccagggaaaggggtcggctgacccaccctgacggagctggtgagcacaggtgagctctacctcatttgtctctcattcctcaaagtcttctgtggtttggcttccagtgagggcaaaagaggggagactggagtgaaagtgaaactctgcttttaaaatgttctttttatctaaggtgtgcagggtgtgtggatagcaagtttgagtggtaagaaaaatcccagtccagggtctgagctctacctcttaaaactcttcagcttaacaaagtgacccacaggaacagacatgaacatctctacacagggcagggccaaaggtgttcccaggatcctgctagccaagggacaagtcctgattgagggtctagagctcagcagatttatggaggcagcatgcaccctgggagcctgcccagactcctctctggggtttccgttttatctctcaagcttttaagatgccaaaaggaaaagcctttaggaggacgctaaggataacttcgttattcttcagttctctgctcctcctccagctcctctttggtcatcatcttcttgtactggtttcccctcagcttcccggggctgtatttgaaggagaagccttctccgtcctcctcctcaggcccttccgatgatggccccttctcaccatccaagtcctgctcctcttcctgcctcgcctccaccgcctgctctctgcc

SEQ ID NO: 1119 - DNA, 309 bp, Homo sapiens
ccaagtgtctttaagacttaaaagcagtacatctctatgactccccacaggctggactttgctaatcaatctggtgggctagaagagaaatcctaagaaaaccttcctgcttaatccatctgtacacctaatagataagcatcggtataccaatacaatgaagcgatcttcaaatgctttatcattcagcgctggggccccaggctgaggtgattagggagttagtagtaggcagctgggggccactttgcaggagcgggcttccccttgtcagctttcagtgccctcagccctttctggcagctgcac

SEQ ID NO: 1120 - DNA, 1973 bp, Homo sapiens
ccagtatgaaagtcgttgcgccgtgaatctctactgtagccatgaatttatggacagttagatgcttaccaaaaaagaaaaaaagggagggtaggggacccagatgtacttgaatgtgcagaaaatacattcttgtcctcatcttccgtaattggagggctgggagaggcagctttgctcttcaccacaccttggacggaccaccttctttctgttccatggcctgaaggagtgcatctcctcaaagactcagcccctcacctgggagggcagtggtttgtgggcatccctccatgtacattttaggaaacacttgcaactctcatctgaagaagaaaacaactcatctttgggttcagattttgtgatggtattcagcaagtcacttggggcgagcacacttggtctatcctgggaaagtctccttataagagaagttgtgtatttcatgttgcaccgagcaagggcattggaagacgtcatgaggctgtattttagcaggactgatcgtttttctaagtagacctgagctttgtttatcagtgaaattcaaggagaaaatgaggttaatgaagaggtatcagttaaatatccccttcttctcaccctgccaaaattagcagttgggatttttgggaaactctgggaatattctgggtcattttgttttgtatgtttgttgtttttcgtcttccaaaggtgaaagctatgatacagttccacttaaattttagtgttttcttactcagctcaagcattaatttttgattaagtcttaatctgcatgacctgtgaatctgaatccatcatctccctttcctgccagcttttctacaaacattgaaatatgttatttggtcagcacttatttcctaggttcacagccttgggaggttgtggcatgtcctcccagtctggctgggaagagaccagctgtaccatccaaatgcttccctggtcttgatgatctcttccagagtcgatctgagtggccttttctgcaccctccccttctttctctttgaatggaattaaacccaatttggaaacaacattgacccagtcaaaagcttctaatggtttctttttcttcctccagttttagtttgcttttattaaaaaaagaaaatagtgcatgggccatagctccttcagttctcttattgcagactaaccatcaggatggtatcaaagcacaaatactttggaggggaatgcgttgaactggggcaagtactctgttaacacaaagtgggaaaccacttcctggtgctgccgctcctgcccccactttaggtgggagggacgagttttgccctctagattttaatccagctggtgtccaccggatgttgccctcctggggagcagatatcagtctgtggaactctgggaaaaccacaggcacatttttcggtgcggacagatttgcccagcacataactgggcagccagctagaatactttgtggaaattaagcgaggttttccatttcagccccatggtgcatggtggtggccgatgaatgtgtcagtctgctcagagaaaggacaaaaaggaaattattttcaaaactgtgttcactgtttgggtgtgtgtatggctctgcatgtgtgtgtttttgtctctgtataggtagaggtattcacatcttactccgactgtaaggttgtcttacttcatctctgcccccaccacagttgccattttgtaatgtccttccaacatggagaagacacgagctctctccagttggcatcatttgtcttttttgttgattgcctcattctccagtgaactccatctggccaattgattcagaatcaggcaagatccctgccctttggcacatccactgaaaggccaaacagcaagtccgagtgagttttaaatattaattaatcaccctttattttttacacttgagagtgattgtaataaaggctgtcattaataaacttggttctacctta

SEQ ID NO: 1121 - DNA, 287 bp, Homo sapiens
  misc_feature (1)...(287): n = a,t,c or g
tttggnnccnnnnnnnnnnnnnnnnnnnnnnnnnnnnnnnnnnnnnnnnnnnnnnnnnnnnnnnnnnnnnnnnnnnnnnnggcacgagaagctaagcttggattcaggaggaaataactacaaaaaggcataaacactgaagcataacccatggggtcctactagtgttaactaactaccacgatgacagaggaaaaagtaacacaagaaaagaattactttttaaaaagttaggaaaatggacaaacaccccggaagttgaatttgcgtactttttaatatattta

SEQ ID NO: 1122 - DNA, 508 bp, Homo sapiens
tttttttttgcgtaccaataagtctttatttattcattgtattttcccagggaaaggagaagggaagggaagagtcagcttgtgttaaaaaatgattagaaaatgggaaaggaagtacccagtacagcaaaatcaaccatcaaataaacacaccccagtgatggggtcaccaaagcccaaaggggctcagtctcctgcagttcaggaatgagggaaaaggatcaggaaaaaaacagacaggtacaggctttcctaccctcccgccccataaattcaagattttacacaaagctttggtttttagcagtaaacatggagttacattcgttcgtctcctattaaacaatcttggtggccactttgacataaagttttctagcacctgcataaaagttcctgagtgacttgggatatacattcatattccctttcttgggcctcctgaccccactttctacatggaagggcccccaattggcatctctttactttaggattagaaattaaa

SEQ ID NO: 1123 - DNA, 905 bp, Homo sapiens
  misc_feature (1)...(905): n = a,t,c or g
gtgaggtacttgaactaaatctttggacagtgagtgagaattaaaaagaatccagaagattaaatgtattcacaaaatagaagaatgtaacagtaatattttgaattggtaagttagaactacctaatattttccaactacattatttttatgaggctcatttgtaaaatttttaataataggaataacttgcagttgaacttgattctgttcactgtcacacttctaattattcatttcttcatttatggacatatataatttatttcttggctagcttgcttacatggttaaatttttctttctacatctgcaatgtatctttttaatntnnnnnnnnnnnnnnnnnnnnnnnnnnnnnnnnnnnnnnnnnnnnnnnnnnnnnnnnnnnnnnnnnnnnnnnnnnnnnnnnnnnnnnnnnnnnnnnnnnnnnnnnnnnnnnnnnnngcattgtgcttttaatgatctaaagacactgattagcttctcaactagttctctttctaaaagatcaattttatacaaataagttttctaaatgtaataaagtctgttttctttctccagggaattaagaacaacattgtgctgcccttattagttcctaattacagattaaaaatctgtatctttgaactctagatttacataaatcctggcttccctgcacattttgcccctgtaaattggaatacatgatgattgaaccatctgttatgagaatattacatttcctatttacacaattgtttgtgacagagtaaaaaccattttcatagtatatgttggatcactgttgtcttcatatttctaaaataaatgaattaaaaaatttaaattcttagatgcttatctctatcatagctcagaatgcaacttcaatacccccgattcttttatatttc

SEQ ID NO: 1124 - DNA, 1833 bp, Homo sapiens
  misc_feature (1)...(1833): n = a,t,c or g
accctcaccacttgagggagatatgatgtgtgccttgttaaatagcatatctgataccaccaaagaatgtgacagtgatgataacatgggtgccaaaaatacttcaataggagaagaatttatatccacagaagatgtggaattagaagaagctattagaagaagtcttgaggaaatgtaattaaagatattaccacacaacatcaagtggccttgaagagactgagataacgaattcttgagtttgttttctaaaggagaccagaaatccactattacaaatgtatttgaaaacatgtttttgctttcatatgttcaaaatctgatctttgttttgtatttttgtgctaatgtgcaaacatgtacagaagaaatagaatacatgttcatgcaaatataaattatgtattctaatataggtgtaacagtttcccagttaactttgaatttatatatttagatttaaaggattaaaaaaaaggaaagctcttgacagttggtttcccaaatagcattagttctttaattttatttgtactgtacaaatgatgctagtttatttttttagcagtgaaaatgaatataaaaaaggtgacataggtcaagttttccataaattctacttctcatgtggcactattatataatacctttgagatctttggtttacgtttattaagaagagggtaatggaaactgatcatggaaacatttaaaattttatcagcaatgttctttgtgggtgccatgcatatgtaaattattgctttaattagagcagcacattgctaaaataaaaaatacaccttaatttttaagaaataatttaaatgaaacaatttccattccttttacctgcttagacttttatgtgacttgtatggtctcctggttaaagggaatggtgtcagaatatttgcataaaattatttttcataacagtccttttttatatattggtgtaaacataatattcttcaagaaataatgttgaaagcctactcaggaataatcttccttaactctttaaatttttatttcatgtgaagtgttttcagtttagttattcactgaattgtcagtttccttcatttggtattacatatttaattcttaaatattgaggccccattgtgagtaataaaaaatacgacataagtagaagactaagaagggcttgtcatattatctttgtgtatatgcttcatgttatttaaccagaaatgtcttatctctaaaaatttttagtagtaattatttaccaaacttaaaaacatttctataaatataaagcttttctttatatttaagacaaaatataaaggctagaatttggttccttctctgtaacactaaatattttagtgtgaaattgaatttttttattactatagtcttttcaatctataatttgtgtttttaatttcttgatatgtcacttctgttcctccctgcttgcattttttaaaaactagacattgtggcttggagaatttatccaatccatctttcccgaaatgaccacattgtgcttttagtttgtatgtttaagtggtcaagccaaggcctctaggaggtagtcactggagctggaccttaaacacatactgcaggagcctcacaaaatgggagcaaaagaggcattccagaaagaagagtagttaagcagatgtggggggccngggcaagaggagacagcaccttgttgccagagattctacacaaaggtgtgatggacactgatgctctattaagaagcttttgtggtgtgtgtcgtagagaataattaaggcttctgatagacaggaaggnnatatttcatcatgactctta

SEQ ID NO: 1125 - DNA, 370 bp, Homo sapiens
  misc_feature (1)...(370): n = a,t,c or g
ctgagttggtgtttaactctttattttgcctacctcctggctcttnnnnnnnnnnnnnnnnnnnnnnnnnnnnnnnnnnnnnnnnnnnnnnnnnnnnnnnnnnnnnnnnnnnnnnnnnnnnnnnnnnnnnnnnnnnnnnnnnnnnnnnnnnnnnnnnnnnnnnnnnnnnnnnnnnnnnnnnntctacctcaaactttgaacccattccttttttttgtcccctaaacataacttgaaggaatcctcatacagctcttagcatttttccaagtattacctctttttaagtttcaacctttgcagtattttaaaggcctgtgttatactttggtattaatcctcagatgtgtggcacttttcatctttcaag

SEQ ID NO: 1126 - DNA, 1599 bp, Homo sapiens
tcagccccgtcccaaacacagatgggaccatgaactccggacacagcttcagccagaccccctcggcctccttccatggcgccggagtggctggggcggcccaggagcttccccagggctcccaccgtccatggcggtgcggggggagccaattcttccctgtccttcaccacgcggactgcccaccccctggagggtcttggggttctggaagaagcagccccctactaggcggaaatgggaaggccaccatgcagaatctcaacgaccgcctgggcctcctacctggagaaggttcgcgccctggaggaggccaacatgaagctggaaagccgcatcctgaaatggcaccagcagagagatcctgggcagtaagaaagattattcccagtatgaggaaaacatcacacacctgcaggagcagatagtggatggtaagatgaccaatgctcagattattcttctcattgacaatgccaggatggcagtggatgacttcaacctcaagtatgaaaatgaacactcctttaagaaagacttggaaattgaagtcgagggcctccgaaggaccttagacaacctgaccattgtcacaacagacctagaacaggaggtggaaggaatgaggaaagagctcattctcatgaagaagcaccatgagcaggaaatggagaagcatcatgtgccaagtgacttcaatgtcaatgtgaaggtggatacaggtcccagggaagatctgattaaggtcctggaggatatgagacaagaatatgagcttattaataaagaagaagcatcgagacttggacacttggtataaagaacagtctgcagccatgtcccaggaggcagccagtccagccactgtgcagagcagacaaggtgacatccacgaactgaagcgcacattccaggccctgggagattgacctgcaggcacagtacagcacgaaatctgctttggaaaacatgttatcccgagacccagtctcggtactcctgcaagctccaggacatgcaagagatcatctcccactatgaggaggaactgacgcagctacgccacgaactggagcggcagaacaatgaataccaagtgctgctgggcatcaaaacccacctggagaaggaaatcaccacgtaccgacggctcctgggagggagagagtgaagggacacgggaagaatcaaagtcgagcatgaaagtgtctgcaactccaaagatcaaggccataacccaggagaccatcaacgggaagattagttctttgtcaagtgaatgaaatcccaaaagcacgcatgagaccaatgaaagtttccgcctgttgtaaaatctattttcccccaaggaaagtccttgcacagacaccagtgagtgagttctaaaagatacccttggaattatcagactcagaaacttttattttttttttctgtaacagtctcaccagacttctcataatgctcttaatatattgcacttttctaatcaaagtgcgagtttatgagggtaaagctctactttcctactgcagccttcagattctcatcattttgcatctattttgtagccaataaaactccgcactagctgcaaaa

SEQ ID NO: 1127 - DNA, 438 bp, Homo sapiens
  misc_feature (1)...(438): n = a,t,c or g
ggcacgannnnnnnnnnnnnnnnnnnnnnnnnnnnnnnnnnnnnnnnnnnnnnnnnnnnnnnnnnnnnnnnnnnnnnnnnnnnnnnnnnnnnnnnnnnnnnnnnnnnnnnnnnnnnnnnnnntcagtgaaggaatttttttaaaaggagaagaaaaagataaaagagttgagacaataaaatcaggtgtgagtcactgcacccggccctctttctcttttgaaaaggccttgaaagatggctctctccttcaccttttgttgtgtcctgtaacttttactaattatctaaagtaagggagaaaaattgtttttgaaaacaggcaaataaagtatcttttgaacatggcttttattctgcatgcctgttatatctgtatctttatatgtgtcatatagaagtgatactttactgccaaactacatgaaagagctctaat

SEQ ID NO: 1128 - DNA, 495 bp, Homo sapiens
ttttttttttactgtattcatttttatttttatatttttgtttatattaggatattatacaattttcaaagctaataacagaaatctttttgtatgtatatttaaagcataacaaaataaaagtatttcacaaaagatgtccatattacagtactattgaaatatgaggcacagggtaagtatgcatttgtgggttaaaaacataatacattcattttaaagaataaacatttaatgtgaggtaacattttggttaaaataaatatcatagtaaatgttaacagcaacacctgaagtatatggatacaagaaaggtgttttgtaatagatactatgttgaatggtaaagcattcatgaaatggctgtaatatcttactaaatttacaatcattgcacattgttgagcactttatttatatagagatacccttcatccaccattcctaaaccttaccatacaaaacatagttactccatattttcacctgggtaac

SEQ ID NO: 1129 - DNA, 340 bp, Homo sapiens
  misc_feature (1)...(340): n = a,t,c or g
gggcggagccagatctggagtgcgagcagatccgtctgaagtgtattcgtaaggagggcttcttcacggtgcctccggaacacaggatcgggcccgggacacccagacagatgagattgtcgcactgaagaaggtgcggatggacaaggagaaggatggcatccccatcagcagcttgcgggagatcacgctgctgctccgcctgcgtcatccgaacatcgtggagctgaaggaggtggttgtggggaaccacctggagagcatnttcctggngatgggttactgtgagctggacctggccagtctttngnngantatgncatctccttntngnggctga

SEQ ID NO: 1130 - DNA, 1986 bp, Homo sapiens
caaatatgccctttccagagctacccagaccatatggtgcacccacagatccagctgcagctggtcctttaggtccatggggatccatgtcttctggaccttgggcgccaggaatgggagggcagtatcctacccctaatatgccatatccatctccaggcccatatcccgctcctcctcctccccaagcccctggggcagcaccacctgttccatggggcaccgttccaccaggagcctggggaccaccagcaccatatcctgcccctacaggatcgtatcccacaccaggactctatcctactcccagtaatcctttccaagtgccttcaggaccttctggtgctccaccaatgcctggtggcccccattcttaccattaagttaacaatggacgaagagatgacgctttgctttttgaagtacatgtatatgcacatgaatgcatatataaaaattgctggtttcactattagagggcattcatgaaagaacaactcttgcacctctcagagaagataactgcctcttgtacttggatgcgtagtacatcatatgtatacaatcagataaaagcatagaagtaaatcattcggatgtgatttttatttggttttcatggaaagttaaagtgataaagtatattgaatagttctttgacagaatttgtttaaactatgaaactacacacttaaaaatctaagatgtggattattgttagaatctgcaacttcattggcaaattatttcaagtatttttctataatcactttccccttctaaataaataaacttcgagaataacccatcataatccaaacaaatgatgcctcaacattttgagctgctctgtcggacaaataaacctggtcctcttgaggttatattttggatatacatttttaaactgtcagtaattattgtcagatgtggagttcaatagccagccagtgttcatttttatccttgagcttttagtaaaaacttcctggttttatttttagtcattgggtcatacagcactaaagtctgctatttatggaaactaacttttttgtttttaatccaggccaacatgtatgtaaattaaatttttagataattgattatctctttgtactacttgagatttgattatgagatgtgcatattgctttgggaagagctcgaggaaggaaataattctctcctttgttttgaacctcaaactagataaaccctaggaattgcttaactgcaacaagtaattttcattcccacaaaaacctgaggcagctcttttgcccagagcgttccctgtagccacccccaccccacttgcccttggttctttagaaggagcacacacatcccttgattcctccctgatgtgggtaaactgggcacactccaggggtctaaaacataaaacagttgtgtttagggaaccttaagtcatgcagacatgactgttctctttgtacaagtgtgaatcaaaatatgtatctctttttcagagtctggttaagctatgtcattgtctactgcatagtttcctgagtctgtttgtaaagtgcttatggctaacagttcagttctgtatttgttgacaggtaaataagtggagttgagtgccatctttgaaaaaattaccctctagctctaacactgaaaataataataaattgtagatctctgcaactaagtttaaagcagtgtgactgtgttgcttaaatatcaagtattgtttataaccaccaaaaaaaaaaagccctggtagttttttggcaccttatgtttaaatcagattcttagatttggagtagacctgaccttgttatttattagataacattttgaatgtatccattggatttctaaaatgtattgtgaatttctcagacaaacaggatttatgctggagctctgttttgcttagaaataaaatatttagtagtttatttctgctctaattaaaatgtcaagaatgccaaaaaaaaaaaaaaa

SEQ ID NO: 1131 - DNA, 1068 bp, Homo sapiens
ggggccgccgagagccgcagcgccgctcgcccgccgccccccaccccgccgccccgcccggcgaattgcgccccgcgcccctcccctcgcgcccccgagacaaagaggagagaaagtttgcgcggccgagcggggcaggtgaggagggtgagccgcgcggaggggcccgcctcggccccggctcagcccccgcccgcgcccccagcccgccgccgcgagcagcgcccggaccccccagcggcggcccccgcccgcccagccccccggcccgccatgggcgccgcggcccgcaccctgcggctggcgctcggcctcctgctgctggcgacgctgcttcgcccggccgacgcctgcagctgctccccggtgcacccgcaacaggcgttttgcaatgcagatgtagtgatcagggccaaagcggtcagtgagaaggaagtggactctggaaacgacatttatggcaaccctatcaagaggatccagtatgagatcaagcagataaagatgttcaaagggcctgagaaggatatagagtttatctacacggccccctcctcggcagtgtgtggggtctcgctggacgttggaggaaagaaggaatatctcattgcaggaaaggccgagggggacggcaagatgcacatcaccctctgtgacttcatcgtgccctgggacaccctgagcaccacccagaagaagagcctgaaccacaggtaccagatgggctgcgagtgcaagatcacgcgctgccccatgatcccgtgctacatctcctccccggacgagtgcctctggatggactgggtcacagagaagaacatcaacgggcaccaggccaagttcttcgcctgcatcaagagaagtgacggctcctgtgcgtggtaacgcggcggcggcgccccccaaagcaggagtttctcgacatcgaggacccataagcaggcctccaacgcccctgtggccaactgcaaaaaaagcctccaagggtttcgactggtccagctctgacatcccttcctggaaacagcatgaataaaacactcatcccatgggtccaaattaaaaaaa

SEQ ID NO: 1132 - DNA, 1469 bp, Homo sapiens
agggagcttactgttaatatttttattttacagtgtaatgttcaagctcagaaatgccttatgtggatcgtcagaatcgcatttgtggttttctagacattgaagaaaatgaaaacagtgggaaatttcttcgaaggtacttcatactggataccagagaagatagtttcgtgtggtacatggataatccacagaacctaccttctggatcatcacgtgttggagccattaagcttacctacatttcaaaggttagcgatgctactaagctaaggccaaagggaagttctgttttgttatgaatgcaggaatgaggaagtacttcctacaagccaatgatcagcaggacctagtggaatgggtaaatgtgttaaacaaagctataaaaattacagtaccaaagcagtcagactcacagcctaattctgataacctaagtcgccatggtgaatgtgggaaaaagcaagtgtcttacagaactgatattgttggtggcgtacccatcattactcccactcagaaagaagaagtaaatgaatgtggtgaaagtattgacagaaataatctgaaacggtcacaaagccatcttccttactttactcctaaaccacctcaagatagtgcggttatcaaagctggatattgtgtaaaacaaggagcagtgatgaaaaactggaagagaagatattttcaattggatgaaaacacaataggctacttcaaatctgaactggaaaaggaacctcttcgcgtaataccacttaaagaggttcataaagtccaggaatgtaagcaaagcgacataatgatgagggacaacctctttgaaattgtaacaacgtctcgaactttctatgtgcaggctgatagccctgaagagatgcacagttggattaaagcagtctctggcgccattgtagcacagcggggtcccggcagatctgcgtcttctgagcatccccccggtccttcagaatccaaacacgctttccgtcctaccaacgcagccaccgccacctcacattccacagcctctcgcagcaactctttggtctcaacctttaccatggagaagcgaggattttacgagtctcttgccaaggtcaagccagggaacttcaaggtccagactgtctctccaagagaaccagcttccaaagtgactgaacaagctctgttaagacctcaaagtaaaaatggccctcaggaaaaagattgtgacctagtagacttggacgatgcgagccttccggtcagtgacgtgtgaggcagaagcgcacggagcctgcctgcctctgccgtcctcagtttcctttcatgaggcttctagccaaagatgataaagggggaaatggtttttagtgcgtatattatactgcctcttaggtgtactctttataagctggtaaaccaagaatctagggagtggccaaactaaatataatttctttaaaaaagaaagaaaaagg

SEQ ID NO: 1133 - DNA, 2199 bp, Homo sapiens
ggtttcaaaagggtgtttactatttggccaaacaatattttttaattgtcagtcataaagtgaaatacatactaaaatatatattaaatattcaccaaatctgcattgctgctacatgaaaacattttttggtctgttggaaaatgtaattcctgagatcattgttgggctttgtcaatcattttcctcaccatcaaatcaccttaagtgacttgggagtgtgaatctaggatgttcaattttagaccaattttctctatcttctaaatgagtaaacaggctctgtcttttataaaaggtagaaaaataaccatggtgtgctaatttttttcaaggtataccatatggaaaagtataggctgaacacaaaggaagtcttttctgaatggctctcaatcacacataaggaacatatgttttccagttaatctgtccttgatgtacagcagtccagctgttgttttgcatttattaaaatattctctgctaaatagttatgtttgtctttaaaagtaaaatgccataaaaattaacatcccaatttcctttcctcctaaaccaacatattccttcaccttcacaaagcaaacacatggtgcactgaaaccgaggtgttaccagctttacatactgttctgccatttgtgaggggtgcaaccacaacataagtcagaaaaaaagctatccagcttttcgtggaatctggtgaagtttacacttagcgataagcctctaagcctgaacttagcagggctagcaaaactttatttatttcctaactcctattattttagaatggttttcaaaataatactgcaagttcctaattgaaatacaaaacagaacaaaaagctgtgagaaatcttttttttctttggctccttaaagacttggaataatttatattagtgttgcatacattttaccttctacattttgatgtacttgctcttgaaagcactagaacaaattaattgaaataaaacctctctgaaaccatttgaatctttgatcctaccatagagttttaaaggctttcaggatataacttgtattttcccctgagtctgagtgtctacatgattatagaatgcatgtctcttgcttcatggtgatatccaatatgcatggaatactgaaaaataggtatttcccaaaggctcctatataccaggcatctcagactgacactgaaaaccttttgaagcatttttaacaacaaataatggactatttcacagactgatgtcaataattagttttctggacctacagttgaaagcaaaattatctttttaactaaataggatcagcttcaaaatcctttttggagatgtttttatctattaaatgcctttattaacaacaccatcttccattttctattactccaattcgatttctcctgcatacaaggtaatgagtagaatggctgtgaatccagttaacattccagcattctgaatcatgaagaaggtgaaatcggtttttcttccagttaccttttctctcagcatatcattcatctctggaaacatatctgccagagaaatatagaggaacatgcctccagcaagtgccaaatataatatttgggagcgaaattgttgccccacccaaaatgcccaaaagctagccccaacatagcaggaacatgcagaaaggaagttgaatagcaaggcttgtcggagtgcctcatccctgcattgagtaggatcacaaagtctcctaactcgtggggaaactcctcacataggattgctatggaagtactgagtccctgaaggagagacaaggtgcaggaagccccaatcgccaggccatcgatgaaattgtggagggcatcgcagagcgttatcatccaggcaatcgtccctatttctgacagtttgggccccttcaaacaggtacatgaacttggctctttttttccatcctgtagagataccacactgacattatcaaaatggatatgtccattagcttctgtgacagcaggatttgcatagcatgtcacaccattgatggcaggtaatgctttaggttgatgagttttttcttgaggaccaaagttattcatttccaaagtggggtatgaccatttcttgaccatatgtcttttaattaacatctttaggcatttcttttcaaaaaaaggaaaagtagggtaaaatcccacccaaacacaggcaactgcct

SEQ ID NO: 1134 - DNA, 458 bp, Homo sapiens
  misc_feature (1)...(458): n = a,t,c or g
ggggaaaacagcagtgttggagatattgttgtagagattaaaggagagagttgtgctacaaatacaccaaaggaattagaaaattctgtttaaaattccatttaaaaagcttttataagaataaagatagaaaaatagatatgattatcttgatcattgacatttggaaaacacacaaattcattgctgaggtaaacaatctattatgggacagaatatacattcaataggtggtaaactggatttctcattctagggtgatttaaaattacctgaggctatgcaacgtttctgtcataattcttcctcatatttacaaagaagaaagagattaaatgttgaaagggctgcgtaagttaagtaaagaaagtaatttgaagaagaaaatgtggttaccaactcctttaagaataggagatangagaaagattttcccgaaatatttccataaaccccct

SEQ ID NO: 1135 - DNA, 1571 bp, Homo sapiens
tgctacatattttacctgtttatttcattttttgtgtgtctacccctgaatgaatgtatgcttcatgaaggcaaaggcttttgtctgttttattatctgccgagttctcaggactttggtcagtacttgacatcctgtatacacactcagaaattatttgttgaatgaagatatgaaagctgggcttcaagaatgtgtttcagaggttctggagatttctgtttattaactcattgaagaaaattatgggttttattcttatttctaattgtgagaatgcttaatgtcacaggctacataagggcctcagaagtcacattatttttgtaccaatgtgaacaggagaatttacgagactgctgtggaagttcggtacctaggggtatgctacagggcgtcatgagctggaactgaataagacatgcccaaacaggagagtcaggggagaataatgatctcaaactaacagaaaataatttttgtcagtaactttgagcatgccagtctgctgtttgtgcaagaattctcatttgtaggagttggttccttcgggatggtaaatctgttcattgtgcctgggccctagcagtaattgtgctagggcccaaacactttccaggatgcagtatttccatcttcctgtttgcacatcttatagttcccacttcacagatgttcaatgttttctcacttgttgatgatcccattttgacacagtagagttggtttccaccttgaagcactgtggggggcaataggcagacacatttggaagtggaggctggacattttcccagtcatagcaggtgtcatagccacaggatgtctttcttgtgctgttggatgaagtcttgtcctttcaagaccccttctaactggcggcgtcttggcaggaaccaatatgtagaaaatggagttgctgattatttaaacatttctcagccaaaaacttacaagcgggtgaagtaaagtaatcgttggagtctgtgtcaaacacacagagatcttcttgaatgatggctacagtcttcttcttggagacatacaaatgcattcagatcctgattgtttctgtcccagctgacaatggccttttaattttgttagagtatctttttcacaggtgagagagtttgaaatgggtggtgtccaggaattcccctggcatgtgtaccttgatggcccagcaacaacaaagcctttggggcaagttagctcaatggattcaccaattctatacaatctctgaaatggtgtaattgtcaggacttcctgcacaactggcttgatgcactccgtccgttggcattccacatccccttgtctccaggtcccgtctggtaagcatctgaagtactggtatccaacagtttcaaagccagtaaggcatgaaatttcaacatcttctccaaccaagtatagttgcttttcattccggataaatccattttctggaggaactggctgaggacacccggaatctgcttctatctcaggaagatcgacctctttcatttcttcatcatcattgatacatggttgtccattgttttccatgattgaaaatgtgc

SEQ ID NO: 1136 - DNA, 4530 bp, Homo sapiens
ggctggcggcggtagctgtcgcccgcttggttgcgtgaccgcggggtccgcgtccgctccctccacccttcgcccttcgcccttcgcctcgtcccggcctccgcggcccagcaacggccgtcatggtgccgtcggcgctccctgcgcggccccgctgagcctcggtgcggcggcgagcgcggtcgagatcgccatgcctacccgagtatgctgctgctgttccgctttgcgtcctcgctacaaacgcctggtggacaacatattccctgaagatccaaaagatggccttgtgaaaactgatatggagaaattgacattttatgcagtatctgctccagagaaactggatcgaattggttcttacctggcagaaaggttgagcagggatgttgtcagacatcgttctgggtatgttttgattgctatggaggcactggaccaacttctcatggcttgccattctcaaagcattaagccatttgtagaaagctttcttcatatggtggcaaagctgctggaatcgggggaaccaaagcttcaagttcttggaacaaattcttttgtcaaatttgcaaatattgaagaagacacaccatcctatcacagacgttatgacttttttgtgtctcgattcagtgccatgtgccattcctgtcatagtgatccagaaatacgaacagagatacgaattgctggaattagaggtattcaaggtgtggttcgcaaaacagtcaacgatgaacttcgggccaccatttgggaacctcagcatatggataagattgttccatccctcctgtttaacatgcaaaagatagaagaagttgacagtcgcataggccctccttcttctccttctgcaactgacaaagaagagaatcctgctgtgctggctgaaaactgtttcagagaactgctgggtcgagcaacttttgggaatatgaataatgctgttagaccagtttttgcgcatttagatcatcacaaactgtgggatcccaatgaatttgcagttcactgctttaaaattataatgtattccattcaggctcagtattctcaccatgtgatccaggagattctaggacaccttgatgctcgtaaaaaagatgctcccgggttcgagcaggtattattcaggttctgttagaggctgttgccattgctgctaaaggttccataggtccgacagtgctggaagtcttcaatacccttttgaaacatctgcgtctcagcgttgaattcgaagcaaatgatttacaggggggatctgtaggcagtgtcgacttaaatacaagttccaaagacaatgatgagaagattgtgcagaatgctatcatccaaacaataggattttttggaagtaacctaccagattatcagaggtcagaaatcatgatgttcattatggggaaagtacctgtctttggaacatctacccatactttggatatcagtcaactaggggatttgggaaccaggagaattcagataatgttgctgagatctttgcttatggtgacctctggatataaagcgaagacgattgttactgcactgccagggtctttcctggatcctttgttatcaccatctctcatggaggactacgaactgagacagttggtcttggaagtaatgcataatctcatggatcgtcatgacaatagggcaaagcttcgagggatcagaataataccggatgtagctgacctaaagataaaaagagaaaaaatttgcagacaagacacaagtttcatgaaaaagaatgggcaacagctgtatcggcacatatatttgggttgtaaagaggaagacaacgttcagaaaaactatgaactactttatacttctcttgctcttataactattgaactggctaatgaagaagtagttattgatctcattcgactggccattgctttacaggacagtgcaattatcaatgaggataatttgccaatgttccatcgttgtggaatcatggcactggttgcagcatacctcaactttgtaagtcagatgatagctgtccctgcattttgccagcatgttagcaaggttattgaaattcgaactatggaagccccttattttctaccagagcatatcttcagagataagtgcatgcttccaaaatctttagagaagcatgaaaaagatttgtactttctgaccaacaagattgcagagtcgctaggtggaagtggatatagtgttgagagattgtcagttccgtatgttaccacaagtaacagatgaagatcgactttctagaagaaaaagcattgtggacaccgtatccattcaggtggatattttatccaacaatgttccttctgatgatgtggttagtaacactgaagaaatcacttttgaagcattgaagaaagcaattgataccagtggaatggaagaacaggaaaaggaaaagaggcgtcttgtgatagagaaatttcagaaagcaccttttgaagaaatagcagcacagtgtgaatccaaagcaaatttgcttcatgatagacttgcccaaatattggaactcaccatacgtcctcctcccagtccatcaggaacactgaccattacttctgggcatgcccaataccaatctgtcccagtctatgagatgaagtttccagatctgtgtgtgtactgatcggcgcatgaagacctcagcatatgatttgtaaagcctaaaaattaaggccaagctgagctttcagggtttacttaatgtgtattaacatacttcttgaaaataatgatggaacatatctttaaccaaatgtttggcataccatattagaagttttggagctatatataatttcgagtactttcaaagatagatttatgccatgttaatttgctttgaggttcctgttgcctttttaagttgaacatgttttggtttcactttattccactgttaagtagtatgttttaaacttttcacaaatgtaatgttttttaaaaagtaagccttcagaggattgaaactgtataaattgtttatctcttaaacatctacacagccgcttagatgtagaatttttgttgttgttttctgcaaaggcagatacatttaaatatattcctagtcctggggctgcaaaactgttcggtggctttttgtccccatgctttagataagctgggataggcaccttgctattcagttactataataatatgtgataggcattcctcatcttcttcacaataataggacatctgttgaatagcattcctcgaatataaccctaaaaacgccatactttaaattgtctggttcttgtaatattgtgtttcctgccaagagtttgaccattctgcttgagaagtgtagagcttactcttggagtaccaaactgtgcaatatttttacatcataagatgtattagtttacaggctgtgctttgaaattatagtagtattttgctgtggctccattaattaaatgagatatatatttagtgcagaaaaaagacatttaaaacagctattagttcacctgtgaaggagtctgtacattttgatttctattaagagcacatttatttacatttgtatattattttaaatcctcatagtcaaaaaattctccagatggacttttaatttgtaagatttgaactgtgacttgtatacatctgtttagaatcaattatatttgaaaagctgcctgtgttttaacagtcaagtgtgctaaagtttgtcaatttaagctgcttttgatttcagctaccaagattacaggtgcactctacacataacactgacagacccataacattacatacatcttagtgaattctatcacatggtaaaatgaacagctttctttgtaactcataaaattctcttaggacatttttataaagtcacctgtttatagttctatcttttcagattccatttctttttacataaaacagcatacatatcaaaaactgtagcctagaatacagtttaatttttggcttttgtttttgtttaaaaaattgcagtgaagaatggggatgtttgtgtttatggctatttgggcacctttagtagaaacagacaaaagtaaggaaacgataataggacaagcatacttgaaaatttctgaatacttaaacaaaagcgcaacatcttgaaaaccagtctagtcattgaaacctatgaaatgacactgaaagatcctgggctgcttcttaaataagtagatcagcaagacttgtttcagagtgacagtggagtcgttaccgctggaggactaaagggccctgtggcagctgtcactggaactttgcctcttgatcaggaaaaatgcttcaccagtccgtaaagccaagttgtattttttttattgcccttttttccttctgtatttttaaagaaggatgttaatttttgactatatattttaaaaaaatctaagcagggggacatgcaaaaacaatcatcatccacttggatgtcattttatagattaacactgtgtgcttttgtatggaaaaaatatatataatttaatagta

SEQ ID NO: 1137 - DNA, 368 bp, Homo sapiens
gtagttttaaaaattatttattacgaaaagaatccggttcattaaaaattcaagcagtgcagaagagtgaagtaaaaaataaaaatcttcttactctcccaaggcccttaatcccagtgctcagaaataacttaacagcttttaatgtatcaatctagagattttctctgaataaattatacatttttacaaatgtaaaaaattttcacacaagaaatcagaccatacatatatattaatacttgcttcttccacttagtacttcttgggacttctttagaaggcaaatacctggcaggtaggccctgccattcttcaatgggttgcaggagtgtttcactggggaaagccaaactttaacccggggg

SEQ ID NO: 1138 - DNA, 396 bp, Homo sapiens
  misc_feature (1)...(396): n = a,t,c or g
ggatgaatgcggctgttaagacctgcaataatccagaatggctactctgatctatgttgataaggaaaatggagaaccaggcacccgtgtggttgctaaggatgggctgaagctggggtctggaccttcaatcaaagccttagatgggagatctcaagtttcaacaccacgttttggcaaaacgttcgatgccccaccagccttacctaaagctctagaaaggctttgggaactgtaacagagctacagaaaagtctgtaaagaccaagggacccttaaacaaaaaccagccagctttngngaanactgttaaagcaaaaagctctgttctgcctcaaanaagcctttcccnaaatanaaaaaanttttnccttaaacccnttaaanttggggggg

SEQ ID NO: 1139 - DNA, 655 bp, Homo sapiens
  misc_feature (1)...(655): n = a,t,c or g
gcgcagcctcatcggggccaaggacacacgcctcctgtcagacacttctaggtgttggcttccttagagagcctggggttaggttagctttcctgcttttatcttctgccttggggacctgccaaacgaaatcccacacctgtacagaactgggataggcgcagtggagcgggttgcttggggggcgttggccgacttcttagagaaggccctccatgtgacttcctcccaggagccagatgcgatcctcaggctgctctcaccgtggcctgtccacggtccaggtccatctcagcagcgtgagggtgcactcagggtgttgttagagcgtctcgtgtgtgctagacgcacccctactcgttcctatagaacacagaggacataggaaacccttaaaacacacatgggattctctggtcacagtttttggggtttcaggctatggttgctttgggcaggtggagcaccccccgagggaagcctgcaagtccagggcacaggctgccttttggagggagggctggcccatatgtngctgctggctccccgccaccaantgggcctcagccctcacngattcctgctgagcaacgttggggcacnagggagcaanggggcgtcaggganctgtgccnggcaccctgtgcgntggaac

SEQ ID NO: 1140 - DNA, 312 bp, Homo sapiens
gccccaacatacactttttaatggcacctgtggatttacagagggttgcctctctgtcattccacaacttcagaaggtgtgacaggttttccctatttatcattaccaataataacaagtattgagagttttaaaatttctcccagaagataaactaacaaggatggaaggggagggcaaaggatatctaaacatgagaataaggacatgttagagggggggaaacagttgtaacaataaggaaagagaagagcaacagtggaagagacaggttgtgtgcccctaaagattctgcacccccagtttggaaac

SEQ ID NO: 1141 - DNA, 697 bp, Homo sapiens
ccatggccaatcagaggctgatgtggtttgataccttatgcaaatgaaggtcctggaatggaccaatcacaggccagtgttcagactcttcagtgccagggagtgtgtccaagtcatccttagatccctatctctgtaccctattctcctgcctcagtcttgtgtgagattttgcaccctttgaccatcatcatcatctccccattcccccaatctctccctcaactacttctaaccactattcattaatctcttgtattatttaggtgtaaggaagaacagaaggatccaagtgtgagaaagcccaccctgagtctctcagaggtgattatgactgtgtgagcatgggtgagacaaatcctctgttgttgttgatggctacttgaagtgcttcctccattctttccattgtagaatacttagggagggagagaatattatgacaagttattgatgttgggtgatctctttcactgaaagtttcaggacagcgaaatactatttccattttctgtatgcctcttgcatgcagcctatcacgtcctgtaaggaaaaagaggaattttttcttttcatccaaggttagtttgtggaaagccttccaaaacaactgtatagtaggatgtgatttttggtatccttgctcatactttgaattctgttcaaactgtttccagtcataatcagtatttccaat

SEQ ID NO: 1142 - DNA, 597 bp, Homo sapiens
gaagcttgtccctaagaatgacagcgcttctttgccaaaagtgacacctgagaccccttgtgaaaatgagtttgctgaaggcagtgccttgcttccaggcagcgaggctggcgtttctgtgcagcagggggctgcaagtcttcctcttggtggctgcagagttgtgagtgactctcgcttagcaaagactagagatggcctgtccgtgccaaaacacagtgccgggtccggagcagaagaatccaacagcagctccactgtgcagaagcagaatgagccagggctacagacagaggatgtgcagaagccaccacttcagatggacaacagcgtctttctagatgacgacagcaatcagccaatgcccgtgagccggttctttggaaacgttgagctcatgcaggacctcccacctgcgtcttcatcttgtccttcaatgagcagacgagagttcagaaaaatgcatttcagagccaaagatgatgatgatgacgacgacgatgatgcagaaatgtatggggccatacaaaataatgtccttgagtatttagtaccattaacaatttgacaatttagcacattacaagatttatataa

SEQ ID NO: 1143 - DNA, 786 bp, Homo sapiens
ttttttttttatctgttaaagaatgctttattaatacaaatacacacaaactctgaagcactaagaaatttaaatatctatgtcacagcaaacaggtggcaattcaacatccagggtcgacagaatgcttgaaggagactgcaacagattggattcccatggtggagagggcatcttcacaggtgaaggggggcccagctgaaacagcttttcaagctctctctcctcgtcaaggatcatgagaggcactccactcaaggggaggtgcgcaatctggtgctcttcaggcaggtcaaaactctcaaagtctagaggattgaagggaaagaatttttctatttctggataggcatcatctgagggcagggaacagagcttttttgctttaacagtcttctcagtcatctttttggcagaaaagcttggctgtttttgtttgaggggtcccttggtctttacagacttttctgtagctctgttgacagttcccaaagcctttctagtagctttaggtaaggctggtggggcatcgaacgttttgccaaaacgtggtgttgaaacttgagatctcccatctaaggctttgattgaaggtccagaccccagcttcagcccatccttagcaaccacacgggtgcctggttctccattttccttatcaacatagatcagagtagccattctggattattctaagaatgagaaatacatattagatattggggaaggtgggagaagcaaaggtatagcaacataccaaactttctatcctaggagtgtccacac

SEQ ID NO: 1144 - DNA, 223 bp, Homo sapiens
gaaatttatgtacagactgtgacagattccttcaccttcatcgaagaaccaaaactcatcaaagacaggtcttcaaagaagaagaagaagctataaaggttgaccttcatgaaggttgtggtaggaaccaaattgttctggttgatgggcactgggcagattcttaaaacaatggaagggcaatgggtgggatttcccaggaacacacagggcaaaccccacc

SEQ ID NO: 1145 - DNA, 823 bp, Homo sapiens
acgacgagaattagattgaaatctgttgtgacctagaacatttgacgtcgggcattcagcagatttcagaagggattaccttattttgagttagtttctttgttagtttactgtgtgtctcttattcaatagacaagcagaatttgtgtcctgccctatccatgtcttaaagatgagaagttggatccactgagttagtttcattggggcgggggaaagaactgtaattaaacttgtttaatccttattttgtattgtagctattttttgtaaaagcaacttaaaatcttttaaaaattttatagtgacattagagacaatggtcatacaaattatcacataaacatggacttgaaaaattaggcttttcataaaacacatcacatgtcattgactgctttttagaaatacacttccaaggcagtacatctgtattgctactgaaaagtgccatttcacagaacacagacttctttttgctctttgacatcttgaaaacatctgtttttcttttttaatacaaaactttgtgctcaagacaaatcttacatgaaactctcataaaccatgaaaatgtagctggccttcgggccttaggcagtgaaataagcatgaggaacatattcccctaacttctacccccagcccagcaagttatcctttaagaaatctcctaggaattctggagtttgaaaacaattgctctatgttattcctgcttccagtctctaagtaacaagggcatttaaaagcatagtctcttaaggtccactatagtggttctttatttaaggaataactcagctgggtgcagtggctcacg

SEQ ID NO: 1146 - DNA, 1097 bp, Homo sapiens
gcctgggtctgtgcctaggatgacactggccccagagatgctagagtcgactgcactctctccttagctgcagaccatgcacagtgcctgggcggaaggaggagaggtgttgcggtttgccctgctgcctccccagcaggaacaatagtcataaatgcacttttcacactaaaggtttctttattagttctccagttaaacctagatccctccctggtagattgcgaactcaaagttttgtgatcccaaagccattccactgcaaatgcccagcagtgaagatggcctcaaattgggttcttgcctgcagtgtgtgtggcagcagcccatgtgcctttacctgttgtcaaacttgcaagcatttatttgtctttatgactgtcatggggactgaggttcttcagagaaagagtgtgagctgatgacacagtggttttacacccaccccctggggcagggagtttgcacgtagttgtgagctgtgagtggttagtgcattgctggtattgctgaaggcagggttgatccctcacttgactgatacttggattcaagagaatctagattgtgttgggggagggactgactgtactcatggctaacttaaagtattaaaataaggctgtcccctacaaccttcttagtcacacaggatccctgtagccaaaacagtatatgatccagctgcagagagcagactgctctcagcttgcacagcaccttaggcgagggaagaatatacggatagggaatggggtggagaaaggatgggaatgttgtcatccaggtggctttagggtcctaaggagtggagaaggatggcactggggaggtctggatggatctgtgtaggagttccctgtagataaattactgatcccccatctactatccccagtatgtaatggctgaattaatatgtaatcaactgcattgtatctaaagccttagaactagtcaggtgctccctccacccaataccatttcttaccctctaatcctacctgatctttaacaaagcattaataattctaaggataatctctattttgttgtgcttttttgtaactgttttaaataaatcaatttgtactgta

SEQ ID NO: 1147 - DNA, 374 bp, Homo sapiens
gaaacagtatgattacctctagaatttaaagtcttcatttaatgaataggctgtttcaggtctttgaaagtatcgtctttttttaattcaaagtgcattttaatacagaaacagtttaaaagtagctggccaaaacctagcttatatacagcttccacatatattgtcatatattatcttacttaagacatgctatagctgagataaatagtaataacagcagctaggtgctgtgttcttagcagcactacctgagagctttagacctggtggtagagtgatagcaactggcagctgcctggtcccattgtgcctctagagatggctcctctggcagcagagagttccagttagcaagacaggatgcctgccag

SEQ ID NO: 1148 - DNA, 270 bp, Homo sapiens
cccctaccccttaaaaaagaagaagtttttaaatttgaaataataataggtactggatttatgcaaatgtcttttctgcgtcttttgagatgagtatcaggtttttttttttccttttatcatctgatgatgaacttaatgtttccatttgtattaatggaatactaagtccctctgtgatttctgaaccaagctattcctaggcctgagttttattttgttgacacagaaataaattagaaggccaagcgtggtggcatgtgctgtagt

SEQ ID NO: 1149 - DNA, 1894 bp, Homo sapiens
gttttgtttttctgagttggtggggagggagggagggggagggctgaattgttttgcagaggaagatggcatctgtgctttaaatttctcattactgggttagaaaacaaagagggattgccctgcacattttcttttgtgcttttaaatgtttcttaagttggaacaggtttcctcgggcctgttttgactgattgctggagtgcatttgatagttaaaaattactaattggttttatttcccttcacactctgcctccccacttctccccccgttactgaaaaataaccattttagtgtcaggctagaaattgaattgctgagttttgtgtatcctttaaattaaaaaccacaagtgtttattgtagtggttaaactgtagcatctcagcatctgggtggaagctgcctatatttcttcccagtttaactgggggaccatctgtgaaattaattttccatccagacagctgctgtgagcaaatgaacataaatgctcgctggaaatttactaaccagtttttatattgacctgcagtgtaaaaagcacatttaattataaacaatatattcaaaatgggcaaattttattttcaaatgcagtgtagagctagattaaaagcaactctttgccacctactctgcccttttggcaaagttaccttgaacaaagaatcttaagggtttattaagaactctttattttcttcataccctgttctctgcagtgctttctaacagcttctgggtgcagattttccttcggcatccttttgcactcagcttattacaggtaggtagtgcttaagaaaagtcatggaggactaaagcctaagtccttttcacttttcctccatctgaaggtaggtgagttcatcctcttcatagtaatgctgttttaccaagactttatagcagatggacccagaaagaattttctgctattgtgttcactacaacaggatagggacatcagacagccccagaaaccccttccagatctgatatgggactattaatttttatgctgttaattggtattcattcacaatgcagttgaagggggaaggctccactgcattctttgggctaaggcctgaatgcttgctcatctgtaagatctatactcgaggttttgttttccttttaaaattctttagggagagagggatggtttctgaggggttctgaaagtatgattcaatgtgcaacatacaggtaggtcttcagcataagctgaaatatatgcatgtaaaaactttgacatctttttttttaattttccactttcttcttaactttacttctctttttgtcccccccccatcttacagaagttgaggccaagggagaatggtaggcacagaagaaacatggcaaactgctctgtgctttcaaaccaaagtgttccccccaaccccaaatttgtctaagcactggccagtctgttgtgggcattgttttctacaaccaaattctgggtttttttcttctttctttaaacatagaggtaccaccacaagggatgccctactctctcgcagctcttgaaagcatctgtttgagggaaaggtctctgggcaagcaagtggttatttggattgcttgcttccctttttccacctgggacattgtaatcataaaataacagtaaattccaaacctcaaaaactattatggcctgagcacagctgaaatctagcagagtttaactcttctgcctccatgtctgtcacttataattcaggttctgctgttggcttcagaacatgagccagaaggaatcgtttttatgctagttatttgcatttcatgggttggaaactcaactttaggggaaagggtttccaaattgtatttaaggcaatggggcttgctttctgcccccaatcct

SEQ ID NO: 1150 - DNA, 530 bp, Homo sapiens
  misc_feature (1)...(530): n = a,t,c or g
ttcnntcccncnnnnaancnctttgatatcnctnnnnnnnnnnnnnnnnnnnnnnnnnnnnnnnnnnnnnnnnnnnnnnnnnnnnnnnnnnggcacgannnnnnnnnnnnnnnnnnnnnnnnnnnnnnnaaaaaannnnnnnnnnnnnnnnnnnnnnnnnnnnnnnnnnnnnnnnnnnnnnnnnnnnnnnnnnnnnnnnnnnnnnnnnnnnnnnnnnnnnnnnnnnnnnnnnnnnnnnnnnnnnnnnnnnnnnnnnnnnnnnnnnnnnnnnnnacgctttcaatgtgaaaaagcatccagggacccagcaattccactcccagacacgcacccggaggaaatgacccatgcgccaggttctcccggggtttcctcttaaagcagaacgcggaggtgccgttctgtggattttcactctgaccgtgtgtcacacttacaatcgcacggacagagaaagcgacggggaaatgaaaaataggaaagaactttcctttggtccgtcaataacaattcctgggnctccgtggcct

SEQ ID NO: 1151 - DNA, 395 bp, Homo sapiens
ggaagagaagacaagggaacatttttccactgttgcgcatttgttcaacaaatgctagctgaaaagagcctctagtgacttgtcgcagactacccaatctacccaggccgggcctagaggccaatgccatggcccaaaggcacagctcatggtgaggtccagctgctgggcaggaaaaggacaagaggtcaggtggctgcagaggtgatggctgggggcctgtcagacgggggccaaagacattcctcccctcgtgatccctgacccaagcgcgtggacatgcaagggactccacggagcatccactgtgtgccagccccatgcagggttccaggggtccagggagcctattctgagctgcaccgctcggacaagtcacttgaccattctgacct

SEQ ID NO: 1152 - DNA, 525 bp, Homo sapiens
  misc_feature (1)...(525): n = a,t,c or g
gctctcttccttcnnnnnnnnnnnnnnnnnnnnnnnnnnnnnnnnnnttcctcatacttgatgcatatactttctgcccccaatctccttcagctatactcactctttgttgagtctcccacaattaccattgttcctggcccggacttcaatctggcctcccacattattctggataccacacctgacccccatgactatctctctgatccacctgacattcactccatttccccatatttccttctttcctgttcctcaccctggtcacacttggtttaacgacggcagttccaccaggcctaatcgccattcaccangcaaaggcaggccatgctatagtattttccacatctatcatcgaggctactgctctgcccccctccactaactctcangcaagccgaactcaatggcctaattaaggcctcaaccttgaaaggggcaaaangaantttttaangggcccaaanatgnctccanatccnggacaacaancggtnnatggnnagaanngaattcccg

SEQ ID NO: 1153 - DNA, 2259 bp, Homo sapiens
tttttgactttgaaagttcagttcagtttattacagtgtcaagtagatttacaactattgcacttatcattctggtgacagaaggccaaaactgaagattgagattttcctctaataaagataggttttcagaatcttcaatataagatgttaaaattataaaggcaaagatatatacctcatgttccattccatatccttcctgctgttgtacagtttgctgcaaatgataatttaatttggataatgctttaaatcattgatttctcatgaaattacttttgagtgaaatttgacaagaattttctttatactctcttctttaccaaaacgtattagaagtccccatagtccaaaataaaatgtaaccatagaatggggagataactttagtcaaagaccaagtaaatattaccttctttgcagaactccaggttgtaagtcacgtaaaagtgtggccacttgtggctaaaccttttgggcaatgggagaagaggaacaatgaaggccaaatgtggtcccagccatatgaaaactcttctcaaaaacagaagaaagtcatgaccattgttgggaaagtgttttacatttccaatgaaattctattccattgatctgtttggatgattgtcttcaacctatttggctctagcccataaattgtaattgattcagtcatgtaaagaaccacttttatcttaagcttagaatttataacaatggaaagcaggaaagtggtttttcattcactctaataattgtgcagggataagctagagaaaaaataaaacaaaaaagtaccagtcttctgtcctcttaaattatttttcattctgattatattacaaagaaatgagctgtggaggtttggcactgttttccatcttaacagttgttctgtattgtaagattttatatgtgattcataatgtactactataacaagacacagtttttatatattactggaataatgcaaagaaaatgaattttcctttgggtccagtaattgtcaaaggaatgattgcagattcagaaaatgtgctttgtaataaccctgttaacataaagtatacactgaggaaaaaaataagtatggcacatatatggaaggattagttgtattagcaaggcatttcagggatggttttggttctttagactaagtaagatacatccaatttagacccccttcaaatccttagacaaatgggaatcacttggtaacataaagattattttggtgggcaggggctgatttcaccatgtgcttacaaatgctccaactagtcagtaaactatcccatctgaaggaaggatttgctctggtaataaggctgatatgctcaagctgtaagaattaatttgaatatcaaaaatgaaattgagattgctaaccatgtcctgatagttacagcatgtagaatattaaatgtcctcttttttaactaaagtaaaaaaatgaagaagcatggttaattcacttgtgctgattaaaacagatgtccacgtgcaacttctgtgtgtgagcctccccatgctgccatgccaccagatgctttcccttcaccttgctaatcccactagatgttttcctcggtagaatcctagctcatgggtttccatgtgcatgtttctattgtaatgaaaattaactacaaaatctgaacgttttctgctttcagaaaattctagtgtaccatgtacagcttagatatttctttttcagttaaaaaaaatagtgcaaaaacatatctgatagtcaaggtgatagttcaagtgagttcttgtgccaaggaacacagacaagcttctcctctagctgatctgtagaaactgtatgtagtttttgggaaatattccagattttcccataagttctccactcatccagtcatcatctacagattccagctctgttattatatctccagccttgaaggaaagttcatcttcattctcccctcggaaatcatataaggctttggccttcctgcccttcggtactatggccaacatactttttgcctcagctgggcagggcctcacaaacactgctgggaagatcccctccctgtcctgcagtctgcccctgcaccagtcagaatccagacgttccagaatctggatccggtctcccctcttgaatgataagtcatcactggtctctgctgtaaaactgtgaagagcttcacaccattctgccggaagactgttaacctgagagtttgagccagaatcttcttttttggttttcag

SEQ ID NO: 1154 - DNA, 397 bp, Homo sapiens
  misc_feature (1)...(397): n = a,t,c or g
gctgggttcaaagcttcaaaggataggctgcnnnnnnnnnnnnnnnnnnnnnnnnnnnnnnnnnnnnnnnnnnnnnnnnnnnnnnnnnnnnnnnnnnnnnnnnnnnnnnnnnnnnnnnnnnnnnnnnnnnnnnnnnnnnntctataaatggaagaacaaagtctgatgacagaggtannnnnnnnnnnnnnnnnnnnnnnnnnnnnnnnnnnnnnnnnnnnnnnnnnnnnnnnnnnnnnnnnnnnnnnnnnnnnnnnnnnnatacagctcattgactttgtatccaatcaggcaagagctctgatgganatggacaaggagatgcatgnanntntcctgcctgctgcnacagcagccattctgcagcccatggctgagcagtaattttgactttgaa

SEQ ID NO: 1155 - DNA, 511 bp, Homo sapiens
  misc_feature (1)...(511): n = a,t,c or g
tttgncccctttggannccannnnnnnnnnnnnnnnnnnnnnnnnnnnnnnnnnnnnnnnnnnnnnnnnnnnnnnnnnnnnnnnnnnnnnggcacgagatttaaatattttagaacatttagctgggactaggttcatgacactaaacacatgcaaatggaggctcaggctttgagaagagaatcattgtcaggcccactagagacccagccaagaatggattgattgcccaagccttcattgtcagcatccctctccacagggtttcagcattgctcaccttcatgaaagtttggtgctaagtccctgaatttagactttcttttttcctttttaaaattttcagtgacagggannnnnnnnnnnnnnnnnnnnnnnnnnnnnnnnnnnnnnnnnnnnnnnnnnnnnntgcgacctncnagcngtgctnggantacaggcctgaccncatggcctgcctagattttncatttcttanactaactcagctttcattanctacctatntggc

SEQ ID NO: 1156 - DNA, 556 bp, Homo sapiens
  misc_feature (1)...(556): n = a,t,c or g
gagtgnnnnnntttgaanccttnattgaaaccctntgacnnnnnnnnnnnnnnnnnnnnnnnnnnnnnnnnnnnnnnnnnnnnnnnnnnnnnnnnnnggcacgagaattctttattttaaaatagtagctaatggtgcaggcatccagaatcttaaaccttggcctgagattgttgaaacaagacaaaagttaatgtatgaagtctctactactcccaagcatgaactgtaacattagaccgctttttaatttcatctacttacttatttnnnnnnnnnnnnnnnnnnnnnnnnnnnnnnnnnnnnnnnnnnnnnnnnnnnnnnnnnnnnnnnnnnnnnnnnnnnnnnnnnnnnnnnnnnnnnnnnnnnnnnnnnnnnnnnnnnnnnnnnnnnnnnnnnnnnnnnnnnnnnnnnnnnnnnnagagatagcacgttgtaattcagcaatctttcctgtgatgtgttaaatagggagatgattagagaagaaaaggtgtgccctgtttttcatggaaaggaaggttctagaagagctaagcctgctttcttcctccat

SEQ ID NO: 1157 - DNA, 653 bp, Homo sapiens
gatcaccgtaaaaatgtcttcattaattagacccagttattccacttttgttaatgtctctcaaattgtacaaagtataaaaaattatatgcacaaagatgttccaagtgacattacttttagtagcccaaattataaaccactttaaagtttggggtaaagattggcaaactttttctataaagggccagaaagtaactattttaggtttttaaacctactgtctctgtcataacttgtcaacactgctgtatgaagcacaaaagcagccatagacaatacataaacaatacgggcgtggctttgttccagtaaaactttgtttacaaatgtggtgccatagtttgtcatccctgggtctaggaaatagtcaataaacagatatatacaaatgatacataatgtacttattaaaaattagtaatgaatattattaaaaacatgaaaatattaccttaagtaaaaattgcaagacggaaaagtgtataagtgggtgtaatcatggctgaaataacagaccaagcatatgataaaaagataacaaagtaaatcaaattactaactggttatagtgggataggaggcagaaaatggatgactttgtcttttctcaatgtttttatttgtattttataataaaaatgttttaaaat

SEQ ID NO: 1158 - DNA, 882 bp, Homo sapiens
  misc_feature (1)...(882): n = a,t,c or g
ctaaacagacatctaaattttcgagacttagaataacattcactaaagtttgataatgtcttttttaaatattttcttactgctttatagtgacttgatttggtttctgttgtgtttttgcctaaatactagtaacatatcagtgaaaaaccctaattttttttctcttcaatgtcactagtaagagaggtggtaatttttcacctctgaaattattctgggtttaggtgtcagcttttgagctgcttccctcatcacaccacactcacatgcatctgttctctctcacactctatacccctgccacttcctggcacctccccccatgcttgtcatttaattttggccacttgtaggtatcagtgtgatcttgatcaacactcctggttaccttgggtcagtgaaaagatgctactatattgcttttgtcccaaagtgagtaaaatcccctagagcagagagagagagagagagagagagtgtcttcatgccaaccacagcctgtttctgctgagtttcttatcagccctcaagctatgctaggaaaagttataaaatgccaaaatatttataaacatttactttgtccataaaaaatttacattggatactctgtaagtaggaggtactttgtcccaaaaagatgtataagaatgtactaatagttttatttgattaggattgaacagttcagttgtatctatgccccacagtgaccagtaaagtccaattaaaatatggaaatgtaaaagtgtatgccgaataccttaaagtaactaattatccttacacacaaaaggctcagtgcattaaatatttgcctatcacctgtgtgctgtgtaccgtggcccntgcctcgctctgcactatgaacaactcaga

SEQ ID NO: 1159 - DNA, 319 bp, Homo sapiens
tttacaatggtttcctctcggcagagcccgggttgtgggggatctgtgtggggttctcaacgcagatccatcctggggtctcccgggcagggatggctgacctcgagtcccctcccttcccgagaacctgctctgtcccgagggcagctaacaagggctgagccccaggtacaggttgcctcttccacggcaggaatttttaccaaaaccacaagcaaaaaacaaaacagaccaccacgaccaacaacaaagatggggggtagggttttgtaaaggttctgttaggttcatatttttatatcattttgcccataaatgc

SEQ ID NO: 1160 - DNA, 386 bp, Homo sapiens
cccacgcgtccggtcaaacactcaaacctagatcattttctaccaactatggttgcctcaatataaccttttattcatagatgtttttttttattcaacttttgtagtatttacgtatgcagactagtcttatttttttaattcctgctgcactaaagctattacaaatataacatggactttgttctttttagccatgaacaaagtggcaaagttgtgcaattacctaacaatgatataaatttttggttatttgcacaaccaaaagtttaatgttaattctttttacaaaactatattagtgtagtgtattgaagaactgcatgcagggaattgctattgctaaaaacgcaatggtgagctacgtcattattgagccaaaagaa

SEQ ID NO: 1161 - DNA, 829 bp, Homo sapiens
tttgttcataaaaatgaatttttaatttcatgagcataaaaaaaaaacccaaacctgtcccatacccctcccactcatgcaaacagctctcaaatgagattcttcaaattttacgttttttccattctggctcattctttgcttcctcatcatcagattcaacttgggcaaacatggttttgggctgagtcttggaatatgctggagaaacccaatatgggctgtcttctgctgctttggcatgacgcaaaatggcttcccgaggattactgtcatcggtcttgtccaaagcaatgttcttcacaatataggaagagagagtgcccccgtgggttccaactcggccaccacgacctgggcctgctacaggaggttcaggtttatgcgacttcaggggatccagtctgtccttctccagctgtttccttgtactccgttggcggggctcacggaacataggcaaggcatgaggggtgatgatgtagtcctgagttagagtctcagcttgttttgccttccgctgggttttaaccacacataattttgctcccctctgactcttgttggggtcgtaatagactttagccaatccatttccagttccaaccatgatctggttcagctttggatgccacaggcagcgaacaacactcgcatctgtgatgtctatttcatacaccctttggaaagtcctacgctcaaagaaaacaagtttgccgctgccacatcctctttgaatagatgtaccagtgactatgagcttatcatctggactgaaacagcagtcagtcattgggaacatggtgggaagacccgaggctaaaaaaac

SEQ ID NO: 1162 - DNA, 684 bp, Homo sapiens
gatccaattagaaacagcccgggttatctctttccttattgaacatgatagcatatctgatataaactgttgtggcgggagaaatgcaagatcctttctttctttccctccataagcatctgttgagcccctggtgtgctccaagcactgtgcttggtacctaagttgcaggggcaggtaaaatactcaccataaaactgtaaagcaagcaggaggcttgtatactgagacccactttcacgttattgtcagaatgtgtcatttttgcctgcgatcctgatctggaggcagaattgtcaggtgtggaaggcagaataacacaacccaaagagctctacatcctaatcccttggatctgggaatatggtatgttacatggcaagggagaattaaggttgcaaatgcaattaaggttgttgatcacctgcccccttgagaaggggaggttatcttggagtatctcggcgaacccagtggaatcaccagtgtccttaaaagtagaagaaggctgctaaagagagagagcctgagagatagcatcacgagaaggacttggctcaatgttgctgactttggaaatggaataccctgatttgattttcacacaagatacgcatgtgtcaaaaaatcatactgtaccatatatatatatatatatacacatacagttattatgtgtcaatt

SEQ ID NO: 1163 - DNA, 422 bp, Homo sapiens
  misc_feature (1)...(422): n = a,t,c or g
ggaacaaatgcgtatcttgtccatttgttggtacacaaaagccgttagttatcctacatttctttttatgcctaagggagcccagcaaaggggtcttagctgcaacaagatgctgcagtcattgaaccattcatttagtaattcctgacctctagaatgaacctaagcctatgggcactttggaggggctacccagtcctaccagcctccatgtagcggcagctctgctgcaagctctgcaccttagcagtgagggccacgattttgccatctaggacttgaaggtcagcatcactcaccatgtcaaactggtcctgccagacaaagagggggaaattacaagtggaactgttgtgaggcacaaagatgnaacacacacctggaaggcaccatttggatatgctcaggaaccagccacaccc

SEQ ID NO: 1164 - DNA, 460 bp, Homo sapiens
gcgaggaggagggtgggtatgaggcggtagcggaccgcggagtcgagacctacccgaacgacgcgggcgagcggggctttggacgccggtggagacgcaggcgacgcaggaagaagatgagccttaggtctgaacgccgaggaattcatgtggatcctgtgcaagaaaggatgtggttactgtggcaaccctacctggcagggtttctgctccaagtgctggagggaagagtagcacaaagccaggcagaagcagattcaggagtactgggagctggtggaacgactccagcgggaggaagaagaggcctttgccagcagtcagagcagccaaggggcccaatccctcacattctccaagtttgaaggaaagaaaaccaacaagaagacccgcaaggttaccacagtgaagaaatctttcagtacgtcttccaaggggtccggatcaaagaaggggcttg

SEQ ID NO: 1165 - DNA, 380 bp, Homo sapiens
aagaagaccaaggcccaccatgccccaggtaactgagcaattgtgaacagctacttctgtgttgacatctggagactcctggttcagggaaaacagagcgggctgacattatcgattacatctcctcaaccaagcctgaattattcctactaacattgctgttggttttcattgcagtagatacttaggtttccatttcttcctccccttatcatttactaacctactgtaggtggaccagacttcaaaaactgtattctcatggtgactgcatggaaacttgagcacattttatggaaaattattgagcacagtcttttcatgatcactgtatgctgtgtgtcctgagggcactaactcagagtgtcctgttactccct

SEQ ID NO: 1166 - DNA, 2792 bp, Homo sapiens
gaaataatggaggaattgcgtagcctggacccacgacggcaggaattattggaggccaggtttactggagtaggtgttagtaagggaccacttaatagtgagtcttccaaccagagcttgtgcagcgtcggatccttgagtgataaagaagtagagactcccgagaaaaagcagaatgaccagcgaaatcggaaaagaaaagctgaaccatatgaaactagccaagggaaaggcactcctaggggacataaaattagtgattactttgagcgacgagtagaacagcccctctatggtttagatggcagtgctgcaaaggaggcaacggaggagcagtctgctctgccaaccctcatgtcagtgatgctagcaaaacctcggcttgacccagagcagctggcgcaaaggggagctggcctctgcttcacttttgtttcagctcagcaaaacagtccctcatctacgggatctggcaacacagagcattcctgcagctcccaaaaacagatctccatccagcacagacagacccagtccgacctcacaatagaaaaaatatctgcactagaaaacagtaagaattctgacttagagaagaaggagggaagaatagatgatttattaagagccaactgtgatttgagacggcagattgatgaacagcaaaagatgctagagaaatacaaggaacgattaaatagatgtgtgacaatgagcaagaaactccttatagaaaagtcaaaacaagagaagatggcgtgtagagataagagcatgcaagaccgcttgagactgggccactttactactgtccgacacggagcctcatttactgaacagtggacagatggttatgcttttcagaatcttatcaagcaacaggaaaggataaattcacagagggaagagatagaaagacaacggaaaatgttagcaaagcggaaacctcctgccatgggtcaggcccctcctgcaaccaatgagcagaaacagcggaaaagcaagaccaatggagctgaaaatgaaacgttaacgttagcagaataccatgaacaagaagaaatcttcaaactcagattaggtcatcttaaaaaggaggaagcagagatccagggcagagctggagagactagaaagggttagaaatctacatatcagggaactaaaaaggatacataatgaagataattcacaatttaaagatcatccaacgctaaatgacagatatttgttgttacatcttttgggtagaggaggtttcagtgaagtttacaaggcatttgatctaacagagcaaagatacgtagctgtgaaaattcaccagttaaataaaaactggagagatgagaaaaaggagaattaccacaagcatgcatgtagggaataccggattcataaagagctggatcatcccagaatagttaagctgtatgattacttttcactggatactgactcgttttgtacagtattagaatactgtgagggaaatgatctggacttctacctgaaacagcacaaattaatctcggagaaagaggcccggtccattatcatgcagattgtgaatgctttaaagtacttaaatgaaataaaacctcccatcatacactatgacctcaaaccaggtaatattcttttagtaaatggtacagcgtgtggagagataaaaattacagattttggtctttcgaagatcatggatgatgatagctacaattcagtggatggcatggagctaacatcacaaggtgctggtacttattggtatttaccaccggagtgttttgtggttgggaaagaaccaccaaagatctcaaataaagttgatgtgtggtcggtgggtgtgatcttctatcagtgtctttatggaaggaagccttttggccataaccagtctcagcaagacatcctacaagagaatacgattcttaaagctactgaagtgcagttcccgccaaagccagtagtaacacctgaagcaaaggcgtttattcgacgatggcttggcctaccgaaaggaggaccgcattgatgtccagcagctggcctgtgatccctacttgttgcctcacatccgaaagtcagtctctacaagtaggccctgctggagctgctattgcatcaacctctggggcgtccaataacagttcttctaattgagactgactccaaggccacaaactgttcaacacacacaaagtggacaaatggcgttcagcagcgggtttggaacatagcgaatccgaatggatctgatgaaacctgtaccaggtgcttttattttcttgcttttttcccatccatagagcatgacagcatcgattctcattgaggagaaaccttgggcagctccggccagggccttgtaggaaaaggccccgccccgaggttccagcgtcaacggccactgtgtgtggctgctctgagtgaggaaaaaattaaaaagaaaaactggttccatgtactgtgaacttgaaaacttgcagactcaggggggtcctgatgcagtgcttcagatgaagaatgtggacttgaaaatacagactgggctagtccagtgtctatatttaaacttgttcttttcttttaataaagtttaggtaacatctcctgaaaagcttgtagcacaaaggctcagctggggatggtgtttgacttcggaggaaaaaagttgctattgcccgttaaaggcactagagttagtgttttatccctaaataatttcaatttttaaaaacatgcagcttccctctccccttttttatttttgaaagaatacatttggtcat

SEQ ID NO: 1167 - DNA, 577 bp, Homo sapiens
ctatgtagttctgtgttgccagaaacttcccaaattacagaacattaaggtattcactgaaatttcaaaagtgggcccgtaatcttttgttttcttctcgtagtctttcaatttcagccactaaaccttcattcactgagtatctttccagcaaagaatgcatttcattcagttgcatatgaaactgtttaatcatctccacttgcaaattcacaatgtccctatggcatgcttctctaaagtcatccaacgtttcctgtatcatgttctgaataaaacgaatttgaatggaagtcaatggtgcattttgccggttatttccaatgctgtcggctattttttctgagagtgaactggcaactccagcagtgacagaagatgctatctttggatttggagttgaggatccattgattgggggttcacatatcaactgggcttcaatttcattctctggcttttcaaatttctcagaatttcttgtttggttagatgatggagaggtatttagatttccactttcagcaccagatgtgaccaactttgctaactgtttgaaggagtctttagattcctg

SEQ ID NO: 1168 - DNA, 1408 bp, Homo sapiens
ttttttttttttttagaaagaggaaacattttgattattttattttttaatcttcaaaattttctgccatgagacaggaatgcatgatagcaatggctcaacatcttcacatgaaacacttggattcattttcattcacaagtttttctaaaaacatctacaatttcataaccccacccacttccaaccattatcacagatttaactgaccattaaacagtagttgccagcattaaatagctggaacgcttcctgcgtattagtagtgtcttttgaaactaccaccgaagagtatcatgattataaatctcattgtacatggcaaccccaaaggtgactgatgtcctcaaataaactccctgctgatcactgagagctgtattccccaggtacttaaagaaatgctctttcttctccaagaactgcctgttcatgtcagtatatttcttgcagggagtatagcacatgctgatctgatgatgtaataatcattgctaacagacagatatatatgcctgatacttactggcgcgctccgataagtatgtacagaacatacatactgaagaaagatgggttgcttggaatctctcttcttttgaagagaactattttgaggttttttaacagttgtaaacaaaaggaaagatatacagatacctatacacatagagatctacactgagtattttcaacgtggtgcatatcttcttatctagagatacacacagtgtctccactcgccccttcacacacacccacacccttccatacagcgtgtgaatataaatgttgtaaatgtccttgggagttcactggagttttcatattaccaaatgatgatgaaatacctgatttgtattactcctgagaagatattagaagggaatgacagttctgatgcactttggaatggcacaatcacgtaaacgcctgcatacttaagacttcttaactcatccaaagtttctaaacatgatttgaccaaaaaaatagaaagtatcaaaacaatgcagcaagttaaaaaatcaaaacaaaatacttttttataatcaaagtataaacatataggaaatacatatttgtcagtaattactcttaaagtaggaaatgtactgaaaaccatagctagccaacagaacttaaaaaaaatacctttccaatgcataatacatgcattgcccaaaagagtaggatagccacattagacttacaagacttacagcaactccaccagaaaaaaactgctacacagcaagtctgttaagtatgctgttggtaaaaaaaactgctgtgactgttacccacacttctgtaaaaaaaagaatttgcaatttgatgagtatcttatccctcatataatctgtataaaattacaacaaaaccaataaatttcaagcaccaattc

SEQ ID NO: 1169 - DNA, 802 bp, Homo sapiens
gaacggaaccgacagctggagcgagagaaacgtcgggagcacagtcgggagagggacagggagagagagagagaaagggagcgggacaggggggaccgagatcgggatagggaaagggaccgagaacgaggcagggaaagggatcgcagggacaccaagcgccacagcagaagccggagtcggagcacacctgtgcgggaccggggtgggcgccgctagctgggaaaacactagagctgcaggtaccagccactcggccccagggggttatggccacagagggataggcacagtctccaccaccctggagccaagggtctttcacatcacctatccctacatacataccaaatggaaaagtggccatccttttccccccaaacacacccccttaacctatctcttgggacttagcccgaccctccctctcatttcccattaaagtctgagaggcaagagctaggttaggcaaggaggtggttggccagagatggggaacagccaggtgccccagtcctctgatttttcctccatcctgcttaccacctccctgggtacttacagccttctcttgggaacagccggggccaggactgggtcacctatgagctgaatcagcatctcctcctgagtcccagggcccctgcagttcccagtctcttctgtcctgcagcccttgcctctttcccacaggttccactttatatccaccttttccttttgttcaatttttatttttattttttttattattaaatgatgtggtctatggaaaaaaaaataaaaatctgacttagtttta

SEQ ID NO: 1170 - DNA, 903 bp, Homo sapiens
tttttttttcctttaatgacaactcccaaggaaactgggtgttgagagggaggagctctagcaataggcacattttggaggggaggggccggaagaaaggaccagcgcccaggctgaggtaaatatggccaactctaagctgcttggagatgctgtttccccaacccctgctgccattccccctccaggggaggagctacaagggaaaggggctgagacctcaaggggatgggcgaggctggctgaggaagaacagagctggcggttttggacacagctggtggtagcatatgggctttcccttctaccagatggagtgggctctggcctagcaggtcacgactcaggcagcctgagacacctcctcgggctctctgggatcagggcactggccaggccagatgcccccaccgtgtcgtccatctccccttctgctccagtggggaacaaaggctgggccaggagcgcaaaggccacaaccttcagctcttttcaatgcagcctaggcccaagcccaaagcaggggtactcagagcccagagggcacacacagtctccagtttagaaactgggtacagcataagagtgactccaacttgtaaaacagagacaactgcattgacaaaactggatcccccctcagtggcagcagttccacatcgcgggcccctgcctgggagaggcagggtcatggccacaggcaggacaggctcctccttccctgaataaggcagcatgacatttgcttcattcatctttggtaaaggacaggactggcagagccaacctgggactctaggggacggcagcctgggcctctgcctgccactgctagcgagtgctggcctttccctcaggcttgtgggagctcatccagcccagagatgccctggtggtctccag

SEQ ID NO: 1171 - DNA, 358 bp, Homo sapiens
gggtgtccacgcgttgactgccgtgtgtgactccagtcggcgtctcaacagtctccggtgtccacgcgttgactgccgtgtgtgactccagtcggcgtctcaacagtctccggtgtccacgcgttgactgccgtgtgtgactccagtcggcgtctcaacagtctccggtgtccacgcgttgactgccgtgtgtgactccagtcggcgtctcaacagtctccggtgtccacgcgttgactgccgtgtgtgactccagtcggcgtctcaacagtctccggtgtccacgcgttgactgccgtgtgtgactccagtcggcgtctcaacagtctccggtgtccacgcgttgactgccgtgtgt

SEQ ID NO: 1172 - DNA, 453 bp, Homo sapiens
gatgaggatcctgcactcttcctccctcagtaagtaaatgccagtccctaggaagagagaaccaaaatgtctaccggaccagatgtcaaggctacagtgggggacatttccagtgatggcaatttaaacgtggctcaagaggaatgctccaggaaaggtttttgttcagtccgacatgggctggccctcatcttgcagctctgtaatttttcaatttacacccaacaaatgaacttgagcattgccatcccagctatggtgaacaacacagccccacctagccagcccaatgcctccacagaacggccctccactgactcccagggctactggaatgaaactctaaaagaatttaaagcaatggtaagtttaatgagactctggactctttctttgactcaaataatttgacttaaagagttataaaagaatgagattcatttaaccactaag

SEQ ID NO: 1173 - DNA, 578 bp, Homo sapiens
  misc_feature (1)...(578): n = a,t,c or g
gattgacttcaagataataagctgctaattgtaaacaaaacagttaccctccagtattaatatgactcattagtgtgagccatttgggtcaagtatgattatgacccttggacttcctgatgtagtattaaatttcaactctggttatccattagcaatctgtagagaacttaatgaacctgaacccaggcttctctagctctggtaacgtgtgattgttttcactacaatatgatacatagatggtaccttacttttcctcattcttaataggtgtctaagaatgtcagggcaaaagtatgggcatttttcttgctatgttcagaaagtacagttctctccaacttgcagaggtacttttcttgattaaatagccttctctagcaacatcattttcagactaactaaatgaatgcagtatactcttttctttggttctcaatcattcactccttatgcaaagccaatatnattttcctcataccttatggcttgaggatattggtgaagaacacttcctgggaacacttctcacctgtgatgctgtactattttttttnttaatttaagccggaaac

SEQ ID NO: 1174 - DNA, 690 bp, Homo sapiens
gtctcccagggcacaagctccctagcctctttggatccattgcccctgagctcccagagtcacccctccacctccgcagccagtgaagtgtgttgtgcctgctgaagtgatcaccccccgcccccagccctgcatcaggccacaggtcttggctttctccttatcaccatttgctgttatcacggcacacagcagggaatcccaggcccccccgccaagtggttacccaagtcaccactcctgacccaaaaatcaggcatggcattaaaacgttgcaaattcctttactgttatcccccccaccaccaggaccatgtagggtgcagtctttactccctaacccgtttcccgaaaaaggtgctacctcctttccagacagatgagagagggcaggacttcaggctggatccaccactgggctctccctcccccagcctggagcacgggaggggaggtgacggctggtgactgatggatgggtagtgggctgagaagaggggactaggaagggctattccaggctcagccctgctcctgcagctttgccgctgagtgtaggaaaaacaggcatgacagaccagggtgagggttgtgcccagctgggccacggccatgcgtggggtggcccaataaacaccgtggactcccagcaaggctgctgcctggtgtttcgaggctgctgtggtcgca

SEQ ID NO: 1175 - DNA, 308 bp, Homo sapiens
  misc_feature (1)...(308): n = a,t,c or g
gcttttttaggtcaacttagaagtggcagaagcatagagaaggtgtctttttacctgggattttccattggaggcccacttgcttatgacattgaaattgtttaagagcctgatattcttcctccaagaatttgatctcagtacccatttaatttttttggactcaagatctatgctttaaaccggcaaggttatagatacagcctctagctcttcagatctgtacatgcagtatttaatttcctcttaaacatgttatgagttctacatagacnntagtgaaanagganggagtgngatatatgaaa

SEQ ID NO: 1176 - DNA, 1484 bp, Homo sapiens
cttttttttttttttttttttccttcaaaagggaagatgacaacttttattgttattacaaaagcaaatttaatttgtcatttgaataattgcaagagcagactaagggcttaatcctcacacaggcaccaagtcaggcacagtaggtagctacaaatcgtaagaaaaagctttctttcctacctagagcactcttccatgctttggaattaggctaaaaaactcaacaaacctgatcagttccctttaatcctgtttttttttttttttttttaaatgagatctaggtattaacctgctgtctagcgaaaactagtcactaagtcctggcctgagagatacccacatttcctttagaacaaacagaactaatacctgtgtacatttctgagagcctgatgtgtgagtccttaaaatgtagaccttgcaggaggcttagacctcagtttcacctaatgcatgtggaggaaatggaggtgagaatagtcacctgaagagtgcaagcgctccagctccagcacacacactcttccctgggcagcaggaaaaggaggtaacaaggacttgggctgacatctgaagcactaagctaatgtgcctggtagaggggagcctcaggaagcacaagatgtcattccacctgtgctgtccacaaacctgaggtttccacatcgttttaaagggcacagtggcaaatgtgacaaggcagaaaacaataaccatttcaaggatcacttaaggaatcctggtgttttctgcctaatcagaagtagtaccaacctgcttttcccttatattggagaacataaaggttttaattaatctccactcccacaccttcaggcccttataataacccttagtaaaacaactcagctagcattattgtttcaaggaagcataggattagaggtatgtgagaagtgtatttattgaagggaagactcagtaagttctaggatattaaagtcaagaatatcctagagccaaaaaccaccaaaagttgaaccaaatctacctgaactgaactgatagtaaactgggtcaaatggaatccacggaattactactggaaaataaaaacacttcctattctttctattcctattcatttactatgaaacctaatctaaccaactgactgctaaatgtaaagctagttaagtcttttgtgcatgtgcaattacacttacttaacaagatgctgccatggcgagatctctcacgaaagaaacaagatcaaggatgtactagatggcatctgctagaatcactgaaaaagttagctgcaagaaataaaagcctattatttggagatagataattgtcccctgaatccactggttgttctcttccttacctatgtctgtgaaaggattaatggcacagtttgataaggtaagccaacaatgaatataacatttaaccatcctaaaatcagagctatagtgctataaccacatttttcacaaagggttttaaag

SEQ ID NO: 1177 - DNA, 1187 bp, Homo sapiens
  misc_feature (1)...(1187): n = a,t,c or g
tttttttttttttttacctttccagatgctttagacattttctcttatctttactctctttatggatctgtcatcctctctaaagtattagctatgcgtgcccagctaaggcattgctaaggattgggaacggctaaagctgtctgctccaaagcatcttaaaatagatgcatctcctgccttgagatattcattcgaacccggatttcaccaaaggagggtccttatgtacttgcttacacgaagcaaatttataggaaaacaggggaaacgtcttgattaaaaataaacacaaaacactggtaaccgctccgcctttcctgggtggcgctggtgtgcggctctctccacacgcgtctctctgtacagcacatacatgtttacaccacacacctgcgtggacgagcaccagatcacgcaccccagctccacgacagggacaccagccgactacccacaggctgcacattccggcaggggccctcctggggtgncccacggggaaggggctcggggtcatctccagcactgccaccaggccgccagcccagaattcttgggaaacaccgtgctcggaaaaccgaaggtcagggctgtccttcccagaggccgtgtgcttccagggtgcggagggcccggcggctgacacaggccccagggtggaaggtccctggcaggcccagcttccaagcatgcccgacgcagcctaggggagcccggctctgtggcatcttcactcctgagcctcaggagccccatctgaaagccaaagccgggaggtgaccagctgaggagcgtgcctgaaggtgcccggggtgccctgggtccccaggaagcagccactgggaagggggttgcctgcggggaagccgcttcatccagccgggccaaggcggggacaggcacaggtggctaatgagctgatgttagtgctatctttagaaaattaaagattgtcccaccaaaataataataattacaaaaaatcaccttaattgaactggattggtaatactactacaggtctggttaaatagaaattctacctctctactcagtgatgagccgcactccccacacatcaccttttcaaaccaacagcactgtacaactacaaggccgatgagaaagggacgggaaggctgcgggaagtgcccgggacacgtagagcggtgggtaaggctgct

SEQ ID NO: 1178 - DNA, 1932 bp, Homo sapiens
ggaggcctcggggctgtccgtgtggatggggaagcagatggagcccttgcacgcagtgcccccggcagccatcaccttgatcttgtccttgctcgttgccgtgttcactgagtgcacaagcaacgtggccaccaccaccttgttcctgcccatctttgcctccatgtctcgctccatcggcctcaatccgctgtacatcatgctgccctgtaccctgagtgcctcctttgccttcatgttgcctgtggccacccctccaaatgccatcgtgttcacctatgggcacctcaaggttgctgacatggtgaaaacaggagtcataatgaacataattggagtcttctgtgtgtttttggctgtcaacacctggggacgggccatatttgacttggatcatttccctgactgggctaatgtgacacatattgagacttaggaagagccacaagaccacacacacagcccttaccctcctcaggactaccgaaccttctggcacaccttgtacagagttttggggttcacaccccaaaatgacccaacgatgtccacacaccaccaaaacccagccaatgggccacctcttcctccaagcccagatgcagagatggacatgggcagctggagggtaggctcagaaatgaagggaacccctcagtgggctgctggacccatctttcccaagccttgccattatctctgtgagggaggccaggtagccgagggatcaggatgcaggctgctgtacccgctctgcctcaagcatcccccacacagggctctggttttcactcgcttcgtcctagatagtttaaatgggaatcagatcccctggttgagagctaagacaaccacctaccagtgcccatgtcccttccagctcaccttgagcagcctcagatcatctctgtcactctggaagggacaccccagccagggacggaatgcctggtcttgagcaacctcccactgctgggagtgcgagtgggaatcagagcctcctgaagcctctgggaactcctcctgtggccaccaccaaaggatgaggaatctgagttgccaacttcaggacgacacctggcttgccacccacagtgcaccacaggccaacctactcccttcatcacttggttctgttttaatcgactggccccctgtcccacctctccagtgagcctccttcaactccttggtcccctgttgtctgggtcaacatttgccgagacgccttggctgggcaccctctggggtcccccttttctcccaggcaggtcatcttttctgggagatgcttcccctgccatccccaaatagctaggatcacactccaagtatggggcagtgatggcgctctgggggccacagtgggctatctaggtcctccctcacctgaggcccagagtggacacagctgttaatttccactggctatgccacttcagagtctttcatgccagcgtttgagctcctctgggtaaaatcttccctttgttgactggccttcacagccatggctggtgacaacagaggatcgttgagattgagcagcgcttggtgatctctcagcaaacaacccctgcccgtgggccaatctacttgaagttactcggacaaagaccccaaagtggggcaacaactccagagaggctgtgggaatcttcagaacccccctgtaagagacagacatgagagacaagcatcttctttcccccgcaagtccattttatttccttcttgtgctgctctggaagagaggcagtagcaaagagatgagctcctggatggcattttccagggcaggagaaagtatgagagcctcaggaaaccccatcaaggaccgagtatgtgtctggttccttgggtgggacgattcctgaccacactgtccagctcttgctctcattaaatgctctgtctcccgcggaaagctcc

SEQ ID NO: 1179 - DNA, 969 bp, Homo sapiens
tggcctgggggaaggaggacgaggttctgcctggttcccagcagtaggacgctgtgccatttgggaacaaaggaatagtctgcctggaatccctgcagatcttggggccggaggccagtccaacccttggagcaggaagaaacgcaaagttgtcaagaaccaagtcgagctgcctcagagccggcccgcagtagctgcagactccgcccgcgacgtgtgcgcgcttctctgggccacagcgagcctgttttgtgctcgggttaagagatttgtcccagctataccatgggccgcacctcgggaagctggctgcgtggccgctggtgtggttatcggggctggtgcctgctactgtgtatacagactggcttggggaagagacgagaacgagaaaatctgggacgaagacgaggagtctacggacacctcagagattggggttgagactgtgaaaggagctaaaactaacgctggggcagggtctggggccaaacttcagggtgattcagaggtcaagcctgaggtgagtttgggactcgaggattgtccgggtgtaaaagagaaggcccattcaggatcccacagcggaggtggcctagaggccaaggccaaggcccttttcaacacgctgaaggaacaggcaagtgcaaaggcaggcaaaggggctagggtgggtaccatctctgggaacaggacccttgcaccgagtttaccctgcccaggaggcaggggtggaggctgccaccccaccaggagtggatctagggccgggggcagggcaagtggaaaatccaagggaaaggcccgaagtaagagcaccagggctccagctacaacatggcctgtccggagaggcaagttcaactttccttattaaaattgatgatattcttgagtgctcccgaccttccaaaaggtcctcaacatcctgggagcgaacaaatgattccttttatttcaagaagtagc

SEQ ID NO: 1180 - DNA, 1279 bp, Homo sapiens
  misc_feature (1)...(1279): n = a,t,c or g
ccgccgcgatggtgacccatcttcctgggcccacgctaccgggagctggtcaagaactgggtcccgacggcctacacatggggcgctgtgggcgcgtggggctggtgtgggccacccgattggcggctgatcctggactgggtacccttacatcaatggcaagtttaagaaggataattaattacacaaacccttcacagactgctctggtgcctggtggcgctagctcctcccacctcagcacctgctgcatctggagcagcccaagcctcaggatggacaagaggaaacccacagctcagcttcaggcttcttatgtttctgaaaacagcttggatattttaatgcacgttgcattaaacctcactgaaacctgctccgtgcccggatgttgatcatgctggtggcttggttactgtgactgtagctggagtggcacaggtgacccaggggtcctttcagcttccagaatgttgcaaagtttaggagagtgttccaatggcttgacaagaaactgcctatttgaaatggctcataagtagtatctgcagtgtgttcatccgttgctgccttaacaagtcacccacacgtagtggcttaaagcaacgaacattcactctcttcacagtctgtgttcagtcggggatttgggagtgatgtatctggggtggttgtgggcccagagtctctcatgaggttgcagttaagacatcagccaaggccacttcgtctgaggaaggctcaactggggctggagccacttccaagccagtgccctcacgtggctgtcggtgacagccacagttccttcccatgggggcccctacacgaagctgcttgagcatcctcacggcatggcctctgccctttccccagagcaggtgaaccaagggagaggaaggagcaagccacagtgcttctatgagccaccctgagaagtctcacgtgatcacttccgccacagcctgtttatcaaaagcaagccccccaggcccagcccacgtgcagagggaggagaatgaggttctgtgttttgaagggaagaatatcagaattggtagacatttcaaactgtcacattagggatacaaaaatgaacaggctgggagtggtnnnnnnnnnnnnnnnnnnnnnnnnnnnnnnnnnnnnnnnnnnnnnnnnnnnnnnnnnnnngttcagtactaacctgggcaacaaagaggcccctgtctctgataaaaagaaaaaaaatgaaaaaataaaaatgaacaggtataaaaagagaatatggtacaaagtc

SEQ ID NO: 1181 - DNA, 415 bp, Homo sapiens
tatgggaagccagtttagagaacctggaaatcgaacctgatggaaatatactccagctcaatcagacactggaagagtgtgtgcccagggttaggagtgtacatcatgtcatagaggaatgtaagcaagaaaaccagtaccttgaggggaacacacagctcttggaaaaagtaaaagcacatgaaattgcctggttacatggaacaattcagacacatcaagaaaggccaagagtacagaatcaagttatactggaggaaaacactactctcctaggctttcaagacaaacattttcagcatcaggccaccatagcagagttagaactggagaaaacaaagttacaggagctgactaggaagttgaaggagagagtcactattttagttaagcaaaaagatgtactttctcacgg

SEQ ID NO: 1182 - DNA, 324 bp, Homo sapiens
atgagaaggaaaaatgaagactatagtatcacaaacacagaggagctcaatctgcctgcagacattcccagctacttgtcttcccaaggaacgctgtctgagccacaggaaggctacagcaactctgaggcaggcagtcatcagcaacttatgcctcctgccaatggatatatacacaaaggcactgacggtggcactggtacccgggtgatttgctcagattgttatgacaatgccaacatctactccaggacccgagaatactgtccatacacctatattgctgaggaggacgttcttgatcagacactgtccagcctcatg

SEQ ID NO: 1183 - DNA, 334 bp, Homo sapiens
ggctggtttcagcgtgcgctcaggtcgcctggagagccgcgaggtcatcgagtgcctctatgcatgtcgggaggggctggactatagggatttcgagagcctgggcaaaggcatgaaggtccacgtgaacccctcacagtccctgctcaccctggagggggatgatgtggagaccttcaaccatgccctgcagcatgtggcttacatgaacactctgcgctttgccacgcccggcgtcaggcccctgcgcctcaccactgctgtcaagtgcttcagcgaagagtcctgcgtctccatccctgaagtggagggctacgtggtcgtccttcagcct

SEQ ID NO: 1184 - DNA, 326 bp, Homo sapiens
  misc_feature (1)...(326): n = a,t,c or g
ccagaattatctttaaatgtagatcagatcatgtcacatccctgcctaaaacccttaggcggcttctagttgctcttagaagaaaacctaaattcnnnnnnnnnnnnnnnnnnnnnnnnnnnnnnnnnnnnnnnnnnnnnnnnnnnnntgtaacctagtccttgtgtatcaattcaacttcatttctcactaccattttcccttactcaggtttagtaagcattttttactttccagaatgtaagttcttttataccctctgggccttcatactcatgatccccaaagcctgtaacgctcttgccctattaatttcttactcactc

SEQ ID NO: 1185 - DNA, 421 bp, Homo sapiens
  misc_feature (1)...(421): n = a,t,c or g
gggtagaggagtgatttctaacctttttgtaatctttagaaggtgataaaagctatggctatctctctccagaaaaatgcacgtttgccacatatacatagggtgtatgtatagttaggggggaaatattttactaatcctgcgaggtccgtggttaaggactccaggtttagagtggaagttaatagggtcaaatccacaatgctgggaaacaccatcatttaaggcagtgttactgaatatatgagctgagttattatgcctgtgtcaaaattacgtgggctgcttgttaaaaaaaatacaggttcctgggactcatccaaggttaatgaattacgctctcttggggcgggatttgggactctacatttttgactgcctcagngcttttaagngnncntaaaattgagatccctggcct

SEQ ID NO: 1186 - DNA, 881 bp, Homo sapiens
agccaacaacgcaccggatgtggtcatccctgatgtctggaatacttgctgaccagagtggagacctcccaggtagagcagagaagggtctgtcagcttgatcacttcggccacagccacgatggtgtcgcagtatccgtccacgtcttccccgaaaccggacgccagcttccggaacaggaagcgcagctgctctgcctccctaaccatcttctcggcaccctccttgcgctcctccgggctccggaaggaaatgcgcttctgcatgaccgcccgcaggtactccaaccaccacgcgccggtgcgcctcggccgtcatcctcttcttatacggctttttaattttggcaaaatcgttgaaatagtcttccacggtgacacagataatgtctacagcgtttgaccctaatagccacttcttcgtcatcaattcattcagatgttgctccaggtccaggaagacctcctccagcaaaccgctgcagccctccttcgcgatggcgtctaaaatcccgtcccatgctgggctggctcggagacacaccctcttccacttcattctttaaatactttctttttaaactgactatggattccttgaaggtctggcagttgttgatgatggcgatcatgtactgaacgtagcagtgagggtgctgccgattcctcaggtgctcttctttatacacgtgcgcttcatctttatatctgcttaggaaagaattcatctgctgaagacataaaactagtacctttgttttcaaatcttcacttatctgagcagcaacttgaagattctgttcaaacatctggaagacaatggcagggagtgtggtctggtagtacccgtcctggtcggcttctggctctgtctctttgac

SEQ ID NO: 1187 - DNA, 1699 bp, Homo sapiens
tttttttttccctggaaggaaaggatttaatgattaatgggccatggttatttccaacttttaggcttaaaaattcctccttcccaatgtaaacccgggtatttaaaaaagcctgtctcagtaatgcagaaggaccatagtaggggataatagtaacgtctgctttcaaatctgcatgcttcgttaaccaaccaaagaaagtgctccagggtttcccaagtcaacaaagtatactcagttacactttccctgatcatactatgaattgaaacagaacactcctttgacttttaatagcacttttcatccacggcacaagcactttcccattattttctcctttaccctcaatatccttgtgaggtagtgaagggagggagcaaaggatttttttttttctattttgcagatgagaaaactcaaggtgaattttacaacagtggttctcaaccttggcagcatattgaaatgaccagaaagtttttaaaaatccttatgaccagctcatattccagaccaacatcagaatcttggcatacggaacccaagcatcgatgtgtcttccaacattccaaagtgactacaaagtgtatacagccaacactgagaaccactggtttgaatgatttacactcaatcttcaggcgcaactgtcttctaccgaaatgctctcctcagcaccaatgacaaagatattccatctccttgagcactgcagcagtttaagattttgtagagctactactgggttttagtgacaaatttacgtaaatgaaggccctcatgacccagatgctcatgctgctcacttcaattgcatatgatttggcgaatgggacattcgggaatttaaatctttgagataagaatggcttgttgttaaatattgaggcaattatttcattctaggtccaatacgcaataaccatgtgtttcggttttccactcagcaccttcaaaactgttgcaaatgaatgtttactaacaagacaaaagagacaattataaaccaaactctcaacaaaattcggaatggccacatcacaacctgaaaaagaaacaagtacttaaaggacttgatcacttcctaacaagtccatcttcaacctgaaccacttctcttgtttaatcaaattttaaactttgccgaactgagttgttctacaccaagaaaaatcaatttctataccacctacattctctaatacatttaacatataatttcactcaatacaaggaggtttcttcttaacctggacatcgaaaagaatctttaacagatttcatcttttcaagcaatgtatcaaatacacaataaatacttgtaaacttttcaggtggcaacaataaatctttgttctatggctgaaatcccttgcttcacaggagtattgacaatcttaactcccaaggagcaatccaagaatcccggccagctgctgggtgtccctaatcagatttaaaacaaaacatacatacagcaagaactcagaagtacaaagatttcgctcgcttttgtcaattcttatgtatctaaaaccatacaatttatactttcatacagaaagatgtctgtttcttttctaacaaaagaaaaactctcagctcatgtgggttggattattaattcaaaagcattttagtgatgagaaacaagatttgtaagtcaaaataggagttaatgttaaactcttctaca

SEQ ID NO: 1188 - DNA, 356 bp, Homo sapiens
ggggaagaagacccgttgccatgcagaagcgcccctttccttatgaaattgatgagattctgggtgtccgcgatctcaggaagggccttgccttgcttcagaaatctgatgatcctttcattcaacaggtagctttgctcactctgagcaacaatgccaattattcatgcaatcaagagacaatccgcaaattgggaggcctcccaattattgcaaacatgatcaacaaaactgatccacacattaaggaaaaagccttaatggccatgaataacctgagtgagaattatgaaaatcagggccggcttcaggtgtacatgaataaagtgatggatgatatcatggcctctaacctg

SEQ ID NO: 1189 - DNA, 428 bp, Homo sapiens
  misc_feature (1)...(428): n = a,t,c or g
gacatgataaaaatggaaataaaaatattttaccccaaaggatgttttttggccctattttgaaatggacctgcagagccattgagaaacatttgcatctgtaaagcatctcattaacataactagatctttcctcttccaggccttccgaaacctgaagagattaactgagaatctagcaccttttaaaagtctaaatagaaaacatttgctatctattatctctaagggcagccacttatgagacttcatctatgtaataaaaaccttggtctccacaaccccttatgttaacccagncattcttttctattgattccaggtctttanaaaataacttaactctnnnnnnnnnnnnnnnnnnnnnnnnnnnnnnnnnnnnnnnnnnnnnnnnnnnnnnnnnnnntcccctgctttaagtcgtcctg

SEQ ID NO: 1190 - DNA, 937 bp, Homo sapiens
ttttttttttacaaaataacacaatttattactattttgaaacaaatcacaaaataacattcagaaactcaacatttctaaataacttaattcacaataagtttagtcataaagtcatgctacaaaactcctgtgtataaaagattattaccaaggtattcatagatgttaaaatgttcttcagaatggagttggttctagaagccaaagattctggaatgatgctcgtaatcatgactgccagcctgggagaggagctgggctatgcggcatgtgctcttagcttccaactcaccagtcttttgatggggagtgatccctccagggcagttagccacctcagaggcagggtaccctactgatcacagaggcaaagagcctcccacccatataatgttagacaactctacattcatttaaaatctagaggtgggaatgataattcgcaaagcttctattctgagtaggagaactacttgacgacatcccccagagggatgatcttggatgtaacagacatggaagacggactcaagtagggaaaaagggaaatcctgactctgattatgtcaaaagacagttaactactcatgtgggtttagaacgagcaagggtgaggtttgattctctaacatccaagtgcaggctagatatttacccatctgccctatggaagtcctttccaccaacatccagttcctaagtttaaagtgcaaatctactgaaaaatagtttactatccctcttcccctatgttaaatttgctagatcataatttggttggctgggtctcctctaaactgccccaatatgggaaattaactagaatcccagttaatgacttcctcccaaatatcaagtaaaaagttttatcagtttatccttaggtcagagaaaggtaagactcagtctagttcttcctttcagttttcttccc

SEQ ID NO: 1191 - DNA, 409 bp, Homo sapiens
gggtggctctgagaagggggctggagccagaactggagctggccgggcagggacctaagcaggaagaggctgcccagccccctcttcttgcccctccctgccctgcccctcccaccaccacaggggcttctggagctagccatggtcttgtctgaaaacctagggactgcctctgtcccagtccctggggccctgtttcctcctgaccttgtttctcttcaaggttgacttgagggttttattattattatttattaacttttatacagcccagagtccccaagcctcacccgtctgcccagtctagtctggcatcaaaaatggcagctggcctggccagtcagtctccagagggacatgaggctttcctggggcaggaatgtaggggctcagggttcgctgctccagg

SEQ ID NO: 1192 - DNA, 584 bp, Homo sapiens
  misc_feature (1)...(584): n = a,t,c or g
ggaacatagttaatccattcttccatctctgtcttttgattggggtgtttaatccatccacatactatagttacctataaggtagaagtaatgtctgcaatttttactacttctttttttaatgtcttatgattatgctcttctattcctccattactgtcatcttttgtaatcaacagacattttccattgtatcttttaaaattcctttgttatttcctttgccatatgtattttaaatgtattctcttagtggttagcctggggattacaattaacatcttaaaacaatctcttttggattcatatccacttaatttcaatagtggcagtcaagagtcactccaatatacctttattctctcctcactcccttgtgctattattatcatacaaattacatctctatatattataaggcccatcaacacagttttgtaattattgctttagggcaggctgtcctttaaaacaggaaaatttacaaacaaaactgtttatattgtctttcaccctacctacataggtacccttacctctggctctttatttccttcacnggggtggccaagttaagtncgggg

SEQ ID NO: 1193 - DNA, 340 bp, Homo sapiens
gggtgatctgagtttatttccaaacaggtcaggcccagatacaagcgaccgcgtagttgggagaagagcaatgctggaacagtgggtccctgtcttccacatttcctaaagtgggagggaggcggaggagtgggatagcttctgattgagggcattgacatttgtctaaggaattaaacaactgggcagctagatgacctcaagtaaccagtctcgtctcagccccagccttttgatgctcatcatcttgtctggttttataaacagggagatgaatccaccttcatcggacttggcaggacagaggcatgttcatctgtgtaatcaggtttaatagcag

SEQ ID NO: 1194 - DNA, 455 bp, Homo sapiens
  misc_feature (1)...(455): n = a,t,c or g
aaacaaggtcagttgaacataccgatggtcagagtgtcctaacagactcactatggcggcgatatagtgaatttgagttgttgagaagctaccttttagtttactatccacatattgttgtgccacctctgccagaaaaacgggcagaatttgtttggcataaactctctgctgacaacatggatccagattttgtggagaggcgacggattggtttagaaaactttctcttgaggattgcttcacatcccatcctttgtagagacaaaatcttctatctgtttttaacacaggaaggtaactggaaggagactgtgaatgaaactgggtttcagctgaaggcagactccaggttaaaagcgcttaatgcaacattcagagtgaaaaacccagacaaggagatttactgaccntaagcactatagtgatgaactgcagtctgtcatctcacatct

SEQ ID NO: 1195 - DNA, 497 bp, Homo sapiens
  misc_feature (1)...(497): n = a,t,c or g
aacagttgggcttagctgagatgtgtcccgtcggaattggcctcttcatgtaatgaaggcagtattggaagagttaatggaggccacacccccgaatctccttgccaaagagctctggtcatcttgcacaacacctgatgaatggtggagagttacgcaggtatgtgctttgttttagactatactcagtagtagtatttcttttgcctgctaccttcttgcctatcttgtttgtcctccttcccttccttcctctgtccctccagacttggtagtttgagacgtatatttgagtttaatattacagttataaaggcatgaacatgactgtgtccgagggcaagatgggggaagagttatggnngaaatgaaaaggagatcctaagcaaatttacacagggacaagaaactgantacncnatgtccccnctttaattgggagcaaacattngnccancatgggcacangangggaanacaagncactggggctactt

SEQ ID NO: 1196 - DNA, 478 bp, Homo sapiens
  misc_feature (1)...(478): n = a,t,c or g
ccttgtccggagctgcggccttaggttcgcttcctacggggcgcacgcaantntcccagatgcctacgggaaggagctgtttgacaaggccaacagctccttcccttaggcttcgcttcctacggggcgcacggcgcccaattcccagatgcctacgggaaggagctgtttgacaaggccaacaaacaccacttcttacacagcctggccctgttaggggtgccccattgcagaaagccactctgggctgggttattgctagcttccggaacgaccttattctgcaccagcttttactaccaggctctgagtggagaccccagcatccagactttggcccctgcgggagggaccctgctactcttgggctggcttgccttggctctttgagctcccttttgcttaattactgggttttctgggcagtttttttttaaagagttggagtaagaagaggattaaaaaggaaaggcaaata

SEQ ID NO: 1197 - DNA, 1349 bp, Homo sapiens
  misc_feature (1)...(1349): n = a,t,c or g
ccggctcctaccctgaaggtgcacctgcagtcctcgccgataagaggcagcagttcggaagccggttcctgagagatccggcgcgcgtcttccaccacaatgcctgggacaatgtggagtggtcggaagagcaagccgcggcggcgangaagaaaagtccaggagaacagtatccagcgggtgtgccaggagaaacaagttgattatgagatcaatgcccacaaatactggaatgacttctacaaaatccacgaaaatgggtttttcaaggatagacattggctttttaccgaattccctgagctggcacctagccaaaatcaaaatcatttgaaggactggttcttggagaacaagagtgaagtacctgaatgtagaaacaatgaggatggacctggtttaataatggaagaacagcacaagtgttcttcgaagagccttgaacataaaacacagacacctcctgtggaggagaatgtaactcagaaaattagtgacctggaaatttgtgctgatgagtttcctggatcctcagccacctaccgaatactggaggttggctgtggtgtgggaaacacagtctttccaattttacaaacgaacaatgacccaggactctttgtttattgctgtgatttttcttccacagctatagaactggtccagacaaattcagaatatgatccttctcggtgttttgcctttgttcacgacctgtgtgatgaagagaagagttacccagtgcccaagggcagtcttggatattatcattctcatatttgttctttcagcaattgttccagacaagatgcagaaggctatcaacaggctgagcaggcttctgaaacctggggggatggtacttctgcgagattacggtcgctatgacatggctcagcttcgatttaaaaaaggtcagtgtctatctggaaatttctatgtgagaggtgatggaaccagagtttacttcttcacacaagaggaactggacacgcttttcaccactgctggactggaaaaagttcagaacctggtggatcgccgactgcaggtgaaccgaggaaagcaactgacaatgtaccgggtttggattcagtgcaaatactgcaagccccttctgtccagcaccagctgagagggcanctgctgccaacacgatgcaagcccattgtgtttccgggctttttttaaaaaaaaaattgtagcactgggcnnnnnnnnnnnnnnnnnnnnnnnnnnnnnnnnnnnnnnnnnnggggaggatccattgagcccagcagtccaacctgggcaaaatagtgagagaccctgtatctgaaagtaataataaaaataaaaaatataaatga

SEQ ID NO: 1198 - DNA, 330 bp, Homo sapiens
gcttagaaacactagaaattatattttctggaaatttcaaattttactagaatgtggtcattgtcaattatgtaacaggggctttccttttcaatatagcgactatcagtaatagtgctggaaatatgataacaggccacattctaaaaattcatttcctctttaattaggacctaactcttggaaactccttcatgtgagctgccacaacatcatctaaaagcaaactgccaaaaaatcatcttaaaccgcatcatctaaaagttattttggcaaaatgcatggtctcaaatggaagataatgacagctaagatagaatttagaatgag

SEQ ID NO: 1199 - DNA, 766 bp, Homo sapiens
gttcctatcccaaaatcagcagacaaagtgacagacaaaacaaaagtgccctctaggagcccagagaactctctggaccccaagatgtccctgacaggggcaagggaactcctaccccatgcccaggaggaggctgaggctgaggctgagttgcctccttccagtgaggtcttggcctcagtttttccagcccaggacaagccaggtgagctgcaggccacactggaccacacggggcacacctcctccaagtccctgcccaatttccccaatacctctgccaccgctaatgccacgggtgggcgtgccctggctctgcagtcgtccttgccaggtgcagagggccctgacaagcctagcgtcgtgtcagggctgaactcgggccctggtcatgtgtggggccctctcctgggactactgctcctgcctcctttggtgttggctggaatcttctgaaggggataccactcaaagggtgaagaggtcagctgtcctcctgtcatcttccccaccctgtccccagcccctaaacaagatacttcttggttaaggccctccggaagggaaaggctacggggcatgtgcctcatcacaccatccatcctggaggcacaaggcctggctggctgcgagctcaggaggccgcctgaggactgcacaccgggcccacacctctcctggccctcccaacctgagtcctggggggtgggaaggattttgagggaagctcactgcctaacttgggcttggggttgtcttgcccaaa

SEQ ID NO: 1200 - DNA, 601 bp, Homo sapiens
  misc_feature (1)...(601): n = a,t,c or g
gcggcgcactcagtaagtncataatttgctggcatgattgcaggtaggcatgagtgtgtatgtcctaacatgtaggctggtgtgtgtaggcatgtgtgaataagcatgtataaatgagcttaagtgtgctgtgtgcacatgtgtacacacagctaatttatctgcagacctatatgtgagcatgtaagagtgaacatatgtgtgtgtgtgtagtatgtaagaatgaggaactcggtatgtgcatgtgtagacaggtacccagcagtgtgtgtatatgcgcatgagtgaggatgtataggcagaagatgtgtgtgtctatgagtgagtttgagtgtgcaggcttgtattaggtgtatgtgaggaagcccttgtgtgtgcaggggtgcacatgtttggccacaggcatgggaggtgtatgttaggagcatgtgtgtttgtaggcagactcatgagcaggtgtgtgcaaatacatatccagctgcactgtgggtgtccacccacaccttgtgttcctcatggcctaccccagcctttcttctccactgggtcccactgttccctggagacagagggctagcatgctgtcatttatctgaaggtt

SEQ ID NO: 1201 - DNA, 342 bp, Homo sapiens
gattgacctcacaaccgagcaaattgaagagacgttaaaatacttccttttatgtgctgaaagagttggccagatgactaagacatataatgacatagatgctgtcactcggcttcttgaggagaaagagcgggatttagaattggccgctcgcatcggccagtcgttgttgaagaagaacaagaccctaaccgagaggaacgagctgctggaggagcaggtggaacacatcagggaggaggtgtctcagctccggcatgagctgtccatgaaggatgagctgcttcagttctacaccagcgctgcggaggagagtgagcccgagtccgtttgctcaacccc

SEQ ID NO: 1202 - DNA, 330 bp, Homo sapiens
ggctccgcttctccacctgctcccggggagctattgggatccagagaatcacccgctgatggtttttgcccaggcctgaaacaaccagagagctacgggaaaggaagggcttggcttgccagaggaattttccaagtgctcaaacgccaggcttacggcgcctgtgatccgtccaggaggacaaagtgggatttgaagatccactccacctctgctcatggcgggccagggcctgcccctgcacgtggccacactgctgactgggctgctggaatgcctgggctttgctggcgtcctctttggctggccttcactagtgtttgtcttcag

SEQ ID NO: 1203 - DNA, 522 bp, Homo sapiens
ggaacctctcatcctgggctttgcagtcagcctgccctgtggcattgcaatcggcccagcatctggtccacacagatccttaaagtaatcttcattcttgaagacaaacactagtgaaggccagccaaagaggacgccagcaaagcccaggcattccagcagcccagtcagcagtgtggccacgtgcaggggcaggccctggcccgccatgagcagaggtggagtggatcttcaaatcccactttgtcctcctggacggatcacaggcgccgtaagcctggcgtttgagcacttggaaaattcctctggcaagccaagcccttcctttcccgtagctctctggttgtttcaggcctgggcaaaaaccatcagcgggtgattctctggatcctgtagaataaagatagaggctgctggaagaggaggcccaatagctccccgggagcaggtggagaagcggagctcctgcgctcgaattctgaataccgtcccccgcctgctccgcgccggggctctccgcgc

SEQ ID NO: 1204 - DNA, 762 bp, Homo sapiens
  misc_feature (1)...(762): n = a,t,c or g
cagagcagaccctctccccagaaggacccgcaggcccttgttattgcctcgcttagatccaggacagagaggaaacaagcttcccacgggggaacaaggcctggatgaggatgttgatggggtctgtgaaagccacgcagcccctggtctggaatgcagttcaggctcagcaaactgtcagggtgctggcccctctgcagatggaatcagctccaggctgacaccagcagagtcctgcatggggctcgtgaggatgaatctctacactcactgcgtcaaagggctgatgctgtccctgctggctgaggagccgctgctgggagacagcgcagcattagaggaagtgtaccacagcagcctggcttcactgaatgggctggaagtccacctgaaagagacgctgcccagggatgaggcagcctccacgagcagcacctacaacttcacatattacgaccgcattcagagcttgctgatggcaaacctgccgcaggtggccaccccgcatgatcgccgcttcctccaggccgtcagcctgatggcatagcgaatttgcccagctgcccgcagctttatgaaatgactgtcagaaatgcctccacggctgtgtaacgcctgttggcaaccccatccagggagacatatttccagcagctgggcacctgcaggcacggaggttccggctttcccaaaccttcaggatgggcgcttttcagcttttccgggcaaagcaaaagnaggaaggtggttgaagcacggggg

SEQ ID NO: 1205 - DNA, 1147 bp, Homo sapiens
gaagaagaaatagcgttagaaagaccagagaaagaaatcaggaatgagggatcccagcctgcttacagaacaaaccaacaggacagtgatatcgaagcgttggccaggtgtttggaaaatgtcctgggtttgcacttctctagacacaaagaccatcaccaccatggctgaagacatgtccccaggacccaccaattttcaacagtgtgatggccaggaccaagatgaaacgcatgagggaatcagccatgcagaagctggggacagaagtatttgaaagaggtctataattacctcaagagagcaaggcatcagaatgctagcgacaggagatccgcgagtgtttggaaaaagtggtgcctcaagccagcgactgttttgaagtggaccagctcctgtactttgaagagcagttgctgatcacgatgggaaaagaacctactctccagaaccatctctaggcaactatcaaaaagaagcagaagttcaagtggacaaatttatgtgaaaattcatttaacatataagctgaactctattatggggaatggatacaaaagcagagctcccatcttgactttcaattcctcatcagaagtactggcttctttagagagtagtaagcatggctgcctatgcttggagtcataagtgttatttggactataccctgagataagcttatagatcaagtttgggctcccttgaaaagcatttctctcatgtgcgcccctcagggcttccagcaggattgagtcaccctgacgatgaccggggagaagccgtgtgctcttcattattttcagctggaggacagagctcagtgcctgactgcctagggtctcatggactgtaggcagcctgccagtgaaggtcactggactctagcctacaacatgctgagctacagcccagaagccagacatgcctgtcttagctgacctgtttttggtccacttttgcccttccatgactaataaggaagatatgtgtgtatttcatacacacacaaggacctggattaaaaatccaaaaagtgattctcttctatgatttatttcaaactcatccatagataattcaagatttgtattcaaaataaacatagttttcacagttacaaaataaatcacctattttatctttt

SEQ ID NO: 1206 - DNA, 669 bp, Homo sapiens
caagatcttaatacaatactcctcacctcagcccaattatcctctgatgttgcagtggagactcccaaacaggagtttgatgtatttggcgctgtccccttctttgcagtgcgtgctcaacagccccagcaagaaaagaatgaaaagaacctccctcaacacaggtttcctgctgcaggactggagcaggaggaatttgatgtattcacaaaggcgccttttagcaagaaggtgaatgtacaagaatgccatgcagtggggcctgaggcacatactatccctggttatcccaaaagtgtagatgtatttggctccactccatttcagcccttcctcacatcaacaagtaaaagtgaaagcaatgaggacctttttgggcttgtgccctttgatgaaataacggggagccagcagcaaaaagtcaaacagcgcacttacagaaactgtcctctcgccaaaggcgcacaaagcaggatatgtccaaaagtaatgggaagcggcatcatggcacgccaactagcacaaagaagactttgaagcctacctatcgcactccagagagggctcgcaggcacaaaaaagtgggccgccgagactctcaaagtagcaatgaatttttaaccatctcagactccaaggagaacattagtgttgcactgactgatggga

SEQ ID NO: 1207 - DNA, 415 bp, Homo sapiens
gtcatggtctggctcttaattcaccaactctgggagcagaggggattagacatacgcaagtctttctagaccacaggaaaaaagccgcagttagatatgggcatttaagcacttcagagctttcatcccccaggagcaatacatagaagggacttaagaaatgaagctccctgtttgcccccaaaaggagtttatgacacactattccagcagcttcttgtttgtttggcttctaactaacttacattgggggagtttaggggcagtcaaatattaacctgccaccagcctgggaagagtttgtccacacattgagtccctcagctttcacagcttccaccgagggtctacatcctaaaactctcagctctgggagaagaagggattggcctatgcagatctctagacctctgca

SEQ ID NO: 1208 - DNA, 365 bp, Homo sapiens
  misc_feature (1)...(365): n = a,t,c or g
tccttaaaccaaccagtgggtcagaaaagaaatcacaagggaaactagaaaatactttgagctgaatgaaaatgaaatgtatatnccaaaacttattgaatgcagcttaaagcagtgcttagatggaaattgatagctggcaaatgtctgcattcagaaggaagaatcatctcaaatcagtaacattgccttctaccttaagactcttagaaaaagatcaaactaagtccaaaacttagaaggaaggcaagaacaaagattacagcagaaatgaatgaaatcgagaatttannnnnnnnnnnnnnnnnnnnnnnnnnnnnnnnnnnnnnnnnnnnnnnnnnnnncaaacattggctaaactacca

SEQ ID NO: 1209 - DNA, 621 bp, Homo sapiens
cgtactaaggctttatgtgatgccaaaaaactttaaaaagcaaataataaatcatgaggctctacaaaatagcttagaaaaacaagttttctatttatttaaaaataagtttgtagttactacattgcagggacaggtattcttacacatacattctagtttgtataaaaggattcaaagaattatgcatcaaaactaacatagaaagtgtccacgtaacagtaaagaaaggtccaatcagtatgtacaaaaagaaagggcactgctattctggtgtgaaactgctgtttataatatgatactccaggttcggaaggaaaaaaacaaacttcaataaagctaaataattaatttgttttaaaactctgtgttacttattacatacaacagatctgcttgtgtttaaacattgttttctgtacaaaataagcataatcttaatttgaaaatgtgtcagtttcaactttcaccctctaggtcagttactttttaaaaattgagctacattctacacatgtctaaatatcctgtgacaggatttaagttttctaaaagatcttcagtaagacccctgtcttcttgcagttttaatatggtccaaaaatgtaactttgtattgtc

SEQ ID NO: 1210 - DNA, 335 bp, Homo sapiens
gtgagactctgtctcacaaaaaaaaaatgccctttaaataatgaataatagtgatagaaaatgtcatttcttggacaaatgaaaaattgaaattaatgtatataattagatattattagctactcttaggtagcttcatttgttgaaagtttgacaagtgaatgaagttcacatctggaaatcgttgaacatttttcgttcatggaactcaatggctacgttagtcgtttatgcttttcactgttgtggtaggggctttggaagtaaatgccatcaacaatggatacagaagacctggatttggaataaagggcaaaatttatttgatggggctg

SEQ ID NO: 1211 - DNA, 431 bp, Homo sapiens
gttgatgaaactagccctctgtttctcccctctcttttccagtcaaatgtcgctgcctccaatgccaagctggctttgttttatgactggctgttctttagtccagacaaggatagcattatgaacataggtatgtgaccaagaccaggcggctccacttccccatccccctaagcccccactgccttccttagtgatagcagtcataaatctcagggcaccgtggagtggaggcagtttatctgggagcagctctgttgttcctcatcagttttcccttgacctagaaagagaattgctttgataaggctaagccatcactgtacctcctccccacagtcttcaggatgcatggtcttcaggaaggggaagggcatgggttaaggttaaggctgtaccatgtactgcttctcctcactattacttcccta

SEQ ID NO: 1212 - DNA, 1839 bp, Homo sapiens
tttttttttctaaaatgttatttttttgaggtttaaaagtttattttacaaccatgtaattgtacaaatgatataaacagaagtcagataaaattattagtacatatatagtactaaagcataaactattacagaaaatttgatacaaagttgtacataagtacttgtaaaggcaattaagcttccccagtctatgggaatacaaaagttgcccagcaattaatttacattacaaaaaaggaaaaccattatttatgctatcacaaaagcaatacccttaaaagtaaaaacaatctccacttgatattagtaatttgaaaaacttagcatatctacaactactgcttaatcaacacttttcattgattcaacattatcacttaaatggcagatgcaaaataaccttgccaggggcaaacatgtttactctgtgctaatgaaactatgaaacagttcctgcaagttcacagacaagtcaatcaatgattgactacagaacagactggtgagtgttacaaaaaaaaaaagacctgcccaggggaccactaggggtggaggaagaacacctgggtctcactcactgggcacttgatgctttcatttttatctgtaagccaggggacaattatattaatattgtatgaatacactgctactgggaaaagcattcattcaacagatgcccactacatactctgtaccaggtagtgtgttaagtgctgaaacagggaaggacaaggcacatcctacgggggctcgcagtgtgggcaggtgcctgagctaacgcacacacacaagggctgggtacctgccagatctgtatcactccggagcaacgacctgtctctctgaatgatctctggcatggtaaaagagttaactgtatttcaaaaggtgaaaacaaaactttttttgctttgttatgcatgtttcaaattgatcaatggttcaggcctggagtatgcatcagaattatctgtgaagcttagtgaaagtgctgatgccagagcccacccaaagcttactgcttcagaaccactggggacctggcagttctgatgtgcacgactagtcaagaatcctttaaaggctgataaagcaatcttgaaatcactgtcaatgcaaaagtggatgttcctcattaataagaactcaaaaaataaagtacagctagtataagacttgttttttgtgcctataaaacccaagtgttagctactttctaactataaaattctatccaaaaagacttgcagtcaaaacaccgagccaaaaaacaaaaaaggcaccaaagccagtgcccgacttcaatgtgcaaaggcccttttacgtgctgatattgtaagcaatctgtgtgccatgtgtacatatgcatctgttttcagggaaagaaaagctgttaaagccaattaaggttatgaattcttgctactactttaatattaaacctttaagtgaaaatttattgaacactattacaaatgtggcaaactgacatagctggtttactgcacaaactttaatgtcaaagggattagatcagagctccagtctcacttactgggcctataacattgtgcagggcacttatctcacctcaggaaaatggaagtaactgcttcattttacagaggtattaaatgaaagaaatgagaaaactataaaccaacattgaagcctgaattattgcttagtatttaaagtctagtacaattgcaatgtttttaataaaaaaactcattgataggtgtatttttacagtgtatctaaaagcagcatttaacattaaaaacttagtatttaaaagagtacacaaccaggcagggtgtggtggctcac

SEQ ID NO: 1213 - DNA, 765 bp, Homo sapiens
acaccctgaagactgctaatttttgcatgcatatgattttcacatgaatggatgaaaatactaaaatctcttccccctggaattgtctaattgccccgaccctactctaacagcaactagtgggtgggggcggtggagactcctgccattctctgtggcaccccacttccctggaagctcagtcggcctccgtctgctcacgtattggcacggttgtcttccaaacccattgatgccggaacatgggtcaggaagaacacagtcagctctctggtgctttccatagcgttcctttttgccaggcttctgagatttttaaataacggaagcaacatctgcctctgaattagctgacaatgggaaacacacattgcagagattatcttaatgtatagcaaatcaaggaaaacaaaactttgacttaaccattggtttcagcttcctatcccaccaagccaccaacttcgtttcacttctctttcttctctctctggccccatgtgctcccttggtggagacatgaaggagcaggcaagtggcctgcagggggaccccgggatgctttgcccacttgacaggtagaggagctaaggccctcagcatggaacaggttcccaggctcacagaggaaggtggtggcaacacggagacttctcggtcacctggaacacaccccgctgtggacaccccctctgggactttttttctgcctctccccttaggattttgcaattcttttcaaaccagtgtcacaaaactttaaaa

SEQ ID NO: 1214 - DNA, 510 bp, Homo sapiens
gtcctcctttccttccttccttcctccttccctcttcgccaggtgcattgttgttgctgtttgtgtagtgattttctaggactaagtctgtaaagtctgtattctttgttgtgtgtgatcactgaaggatctgctcagttagtttagtggctggctaatgactgaacagagatttccttaaattccttgcaagtttcccaacctttgccagaggggctgtgtgagtttgggggcatgtatttgaatgcttcaacaggcaatttatgactttgccttagctttcacactctgcttacacagagcctcaagatcagccagaggtgagagattaggaccttctcaggtctttcctgggcatgtgcacagctcttctcatgcatgtgactctctaggaatattttagagcttttctataccccctatgggattttgcttttaagttttttgggcagccccttgtaagcttcaattaatattgctatttccagcaactatgatgttactcgtgcc

SEQ ID NO: 1215 - DNA, 2029 bp, Homo sapiens
  misc_feature (1)...(2029): n = a,t,c or g
ctgcctcaggaagcttggcttcccctcccatggggaagtgctggaatccactcttgcctgaccctcccataagaaacaagggaaattcctttacgtgagccgccttgctcagaacaaagcttggcgtgtttcttattcctcatcaatctgacaaaatgggtatttatttgtgcctctcaagcgtgtggcttggacatgatgttccgcatcgtggaagtggccgtgcaccaagtggaatatctgttactatagtaacagttcctttttattgataccagaataaacaggaatgcaaaggctgtctcacttgttggcacatttcagcagcctccgttcccagaggtttaagaaccgccctctagaggcagccctccttgctagtctgggacttcccggtggagtgaggaacccagcaacacgctcctgacttcccttcccaaggactcgacctgagaaccgccatgtactcggagatccagagggagcgggcagacattgggggcctgatggcccggccagaatacagagagtggaatccggagctcatcaagcccaagaagctgctgaaccccgtgaaggcctctcggagtcaccaggagctccaccgggagctgctcatgaaccacagaaggggccttggtgtggacagcaagccagagctgcagcgttgtcctagagcaccgccggcgggaaccagctcatcaagaagaagaaggaggagctggaatccaagcggctgcagtgcccctttgagcaggagctgctgagacggcagcagaggctgaaccagctggaaaaaccaccagagaaggaagaggatcacgcccccgagtttattaaagtcagggaaaacctgcggagaattgccacactgaccagcgaagagagagagctgtagggccagctggccgggcttcaggccactgccccaccctggcctggacagcctccttcagcccttctgtacctggcagcccctgggccccaggccctgggacgtctgtgatgttcccacctgcttctgtagaaatgtgtcaccccagagggcctggctctccctgggaggctggggcccctaagctcctaggttttccttccaagcacccagccctcctgctccaagagggataacctgcacccctccctgcaaggggttcagagcccagcacaggagctttctctggcagaattgaggaggaagaggtggccctctgacttgacaagccttctgttctgcccaggccttcccaccaggaatctccgaggctccccagggccccgcttctccgtacaccccagctcctaggtctcagagaactcccccacctgtggttttacctgcagccagcagagcttagcttcaaggacaactgccttcaaagccactgaggggaggaagggcagggcagactgcaggtggccttgttgctggcatcccggccaggtgggcggggactaacaaagacagctgtttagggtcttctcccctcacccatgctttcatcatcccctccgcacagcctccccgtccaggccttctaaccacacctacccagggctgccgcattcctgcactcagaagtctgcagcggtgcctcacaaacttgattgtgcataaaaatcactggggatcttgttaatacagcttctaactcaatagatctgggagatcnnnnnnnnnnnnnnnnnnnnnnnnnnnnnnnnnnnnnnnnnnnnnnnnnnnnntgctgtgagcagcagggcgagagtgcccagggctgatatatattggaaatatcacccctgaagccatcgctggcccccacctcctgtggactgatgccccagggattcccaccccacttctgcaaccccaggtatccttcattatccaccccatcccagactcccaccccagggattgcccgtgaagactttggcctagcaaattgtgttggttatgtgagtgttgttttaatcagagatgtacatgattgccaatctgcatttcttaccagtgtgaccacactgttacgatgcaattctagcc

SEQ ID NO: 1216 - DNA, 646 bp, Homo sapiens
  misc_feature (1)...(646): n = a,t,c or g
gcttggggaataaaaaaaaagatgagattcattcacttctgaacccatctgcaaccatccaagcatggcagctgatttctaaggacagaaccaaggagggcagtaaacactcagtattcacccatctttgaggcgtaaaggggagtaaagacttagactgtaggtccagagcagacctcaggcaagtaaggaacaagtgatgctgggccatttgggtgttaagccttccacctttggctgatcccggggttcttaaataggattttgattgtgggactccatctctctgaattttgctcctgccttcttctgagtgttgaaggatcctgaactatcatctccgtttcttccttaaacaacagctccttaagtagcagggntttactcttgcagtttaatgtgatacaagagttggccgatttttanttgggcttttgtgcaaatgaatgctatgcccccaagctctgaaaaggggaaacgtcacactccacangtancaaaaagggcaggcattttgnaaggaantttgtnatccatggggaaggactngggntttantcccttcntccnanccaaaanncccccttttcccccccntttaaaancngggtggnttccaccnaangtgtcccaatttttnaaaaaa

SEQ ID NO: 1217 - DNA, 401 bp, Homo sapiens
  misc_feature (1)...(401): n = a,t,c or g
tttgagacagctttaaaacttgtttgcattgatagttggtaaactacagttttgcttgtggatgacagcagaaggaaattagacacttgcccaaggacctttggaatggcttttgcttgtcctgagattctttagttnnnnnnnnnnnnnnnnnnnnnnnnnnnnnnnnnnnnnnnnnnnnnnnnnnnnnnnnnnnnnnnnnnnnnnnnnnnnnnnnnnnnnnnnnnnnnnnnnnnnnnnnnnnnnnnnnnnnnnnnnnnnnnnnnnnnnnnnnnnnnnnnnnnnnnnnnnnnnnnnnnnnnnnnnnnnnnnnnnnnnnnnnnnnnnnnnncttgggaagtggggagtgctgattggtcaggttggagatggaatcatagggggtcgaagtgagtttttct

SEQ ID NO: 1218 - DNA, 1733 bp, Homo sapiens
tttttttttttttttggaagagggacggattgtgaaactttattgataaagaattccgttccaaaggtgtattccagtcacatttaccctacataaaataccaacatcttcttattgcaaaaacagaaactccggccgttgtattgatgctgacttaagagaaatagaagcctctatataaggcaagagtccataccagaagaattcgaccaatatgagatacctccaaaaaaatcaactcaataacctactttatatgtaagagacccaaaaaagtcagcttttgtgggaagttgatatgcagtttattgaacaaacagagtgtacagtaactaaacgaactgtgtatttccaaaggaattaagaccgcatatctggattcacacctaaaagcacatagaaaattaaaccaaagaagggcaagttttgtactaaaatcacttgggcccaggttattctataagaagattctcactggcatttgatagtaacttatcaccttctgtgcgagcttgggaaccagctgactcagtgaactgcttcctgtcttcagtgcgtgatgacacagatgtgtcaagcttaatagatcttatatgtaaatttaagaataagaagttttatacccaccctggttttattccaaagttactgctctggcaattttgggctccatccttaggaagatactggaaaagcaagagaacctttctcagctgcctgtgtgaagtgacgttgttctagaacggtgccctggggcctcatgcacgatttcacaagtatagctgcataatctgtggatgtcactgaatggaagaagaatcatcaatggtatatttaggttatagaaggttccactgagataagaaaaggttctacaatgcaggtagctgtcaagcctcctaaatatttaactcgttttagttaacatcacactgtgcattgagtgcaagattctttggttacaccatattaaccaccaggaggataactcctggtttgtaaaagacatcagtggttcttaacggaggggtgatatggccccaggagacatctgactatgtctggagagaatttttcacagctctagcgggggtgctactggcacctaatggatatggatggcaggaatgctgctgaacattctaccatgcacagggtggccccacaacaaacacctctcaggccactaatatgaatagtcccgaggttgaaatgtcctgaaaaaggttcagaaaacatgtctagacgtttgcaaagtcaaatgtatattatggaggctgcaaggcgccccttgcatctcacagctgagggaccccgtcacctctcaccatcagaggcccattcattcccgccttccattccaggcccagtgcctgctccttctcactgaagaactcaatagagatttgctgaatgaatgagggaaaaataagctagaagcatagtttaaagtcttccatcgactacattaaacagcaattttatgtggcctaaactttattctgaaccttagtggtgtcatagtctctgactatatagaacctcaaagttaaggctaacacgttcttaaagatggagtgcacatcttaaggggagtttgtctaaacacttctcgagtcattttagtgggacaaaccaaataaaatggtgctaaaggcaaacattcaatatacttcattttaaactaaaaaattaacatataaaatgccatgcacagcagacaccattctttt

SEQ ID NO: 1219 - DNA, 707 bp, Homo sapiens
ccctcctagaggctgctctaggatattctaaataatattttaccttaaaaaagctgacacaacatgaacataagcagacagtttatttgggtgaagtttaaggattataacctgggagcaaatattcaagttgcctggaatctacactttcattagcagcacttacaagtggagttgtaaaggcaaaaaaaaaaaaataatagaggtacagtgaatgagctgatacgaaattggttgtcagaaatttttatttaaagaaataactttaataattgattggacatatatcattatggtttagggtatgagatacagtgtccaatgtggtattatcagtttaatttatagctacatgtggcaatagtgaacagtctcaaaagatgaatacatatttcaaaggaggagaaaggcgtaactgcacgttcatttcaatgtctgagtttgataaccaaaagtactttcattttttagataaaaattttctatttcccaaatctcaagacctggatacaaaatgtagagctgcagatttaaggcctgaatggctggagtagcaggtgttacctgaacatttgtgaacattttaccaagagaaaaaaggggaaagtgaagattctcatgtctacatgtgtactcaatgaacacatgttactctgattaggtttgtggggccccatggtctctgaatcagtttaaggtctgaagat

SEQ ID NO: 1220 - DNA, 956 bp, Homo sapiens
aaaggtatttaccaagacaaccgtgagtaaagaaaggcaaatttattacagaaactatgaaaatacattgcaagaatgcaacatgcagcacagcagagaaggggctgtctgcaaagataaagggctggagggaagttttctaaggttgtgctggacggcgctatgtgcaggtgagcttgtgctatatgctaagaatatgttggaataattttaactgccagacctttcctcttctggtgcctgagggaaacgccctgctgcttttagctgtcttgtaacccacacgccttttcacttctgaagttgcaagaataacggctgtggtttttcacacaaaagggttgcagactgggttaggtccctgttccgccaacctggctgtttcccagtttcagttaacttagtggtttactagagccccacacctttctctttcatatggccatgatccaggaggtaatccgtcacctcccctccactagagtgctccatggccagggataatcccgtcacctcccctccaccagagtgctccatggccaggggtaatcctcacctctcctccgctagagtgttccatgggccaggcagtgtttcctgggtccagagcacctcaaacaatttcagtgttgtggtgactcagggccttcaccatacagacttgacagcatagtctagaggctggaggggctctgtgactcccattaatgacagtcactgccacggtttccccaggcaggatgtgccaggagaactgctccatgttggctcagcagaatgttattataggtagctcaaaaagagagggaacagggcttctctagattatttcagggaacgagctattatttgaatgttaatttaagactattttatcaattaaaaatgtaaggcccaagaaacttcagtgaggaagaatgaacaaattgaataaatactgttaaactttatgcttc

SEQ ID NO: 1221 - DNA, 493 bp, Homo sapiens
gaaaattatattaaacctcaaatttgggggtttgatttggaagacattagcaagtaatttggaataagttcccatccccaactaacttggatcctgtagtccaagtaatagtcatggtctatcattcagttacttgtgctaggcactgtgttagatattaggtataaatattaacagaaggcagggagtgaagcccccaggcatagccagtcatgttgccctggaacacaaagaggtgtccaatctcctgcaggaagaggagctgctgccattctgggaacctcaagcttagttcagaggaaacatctatgaggagaagacccaaccaccttcaacttagaagaagcaaaagagttctgtggacccctctgtagagagggaggggcatgtgattcaagaggccacctggatatttcagttgaagtttatctttaaggctcgctgcttctctgctgtcatttataagttcattcaataaatactgagcactttc

SEQ ID NO: 1222 - DNA, 1304 bp, Homo sapiens
tcttctcttaatcggaatcgtgatggtgttggattatttcaatggtggggttaatatagcatgttatcctgtctatcttttaaagatttctgtataagactgttgagcagtttttaaaatagtgtaggataatataaaaagcagatagatggcgctatgtttgattcctacaacgaaattatcaccagctttttttcattcttaactctttaaaggattcaaacgcaactcaaatctgtgctggactttaaaaaaacaattcaggaccaaattttttctcagtgtgtgtgtttattccttataggtgtaaatgagaagacgtgtttttttccttcaccgatgctccatcctcgtatttctttttccttgtaaatgtaatcagatgccattttatatgtggacgtatttatactggccaaacatattttttcttttgtccctttttttctttcctttctttttacttcctttatttctttattccttccttttcctttttttcttttttttttcttttttttttggtagttgttgttacccacgccattttacgtctccttcactgaagggctagagttttaacttttaattttttatatttaaatgtagacttttgacacttttaaaaaacaaaaaaagacaagagagatgaaaacgtttgattattttctcagtgtatttttgtaaaaaatatataaagggggtgttaatcggtgtaaatcgctgtttggatttcctgattttataacagggcggctggttaatatctcacacagtttaaaaaatcagcccctaatttctccatgtttacacttcaatctgcaggcttcttaaagtgacagtatcccttaacctgccaccagtgtccaccctccggcccccgtcttgtaaaaaggggaggagaattagccaaacactgtaagcttttaagaaaaacaaagttttaaacgaaatactgctctgtccagaggctttaaaactggtgcaattacagcaaaaagggattctgtagctttaacttgtaaaccacatcttttttgcactttttttataagcaaaaacgtgccgtttaaaccactggatctatctaaatgccgatttgagttcgcgacactatgtactgcgtttttcattcttgtatttgactatttaatcctttctacttgtcgctaaatataattgttttagtcttatggcatgatgatagcatatgtgttcaggtttatagctgttgtgtttaaaaattgaaaaaagtgggaaaacatctttgtaccatttaaagtctgtattataataaggcaaaa

SEQ ID NO: 1223 - DNA, 1343 bp, Homo sapiens
  misc_feature (1)...(1343): n = a,t,c or g
cttttgtgtgcttcctgctggggaatgtgtacgaggcatttaagcattggaagcggctcctgtgcctcctgtgccggtcagaagcagccatgatgaagcaccacaccctctacatcaacctcatctccatcctgtaccaccagcttggtgagatccccgctgacttcttcgtagacattgtctcccaagacaacttcctcaccagcaccttacaggttttcttttcctctgcctgcagcattgccgtggatgccaccctgagaaagaaagctgaaaagttccaagctcacctgaccaagaagttccggtgggactttgctgcggaacctgaggactgtgccccggtggtggtggagctccctgagggcatcgagatgggctaactcggggagcgctctcagctgcgaggggccccttcccacagggctgcagtcctggcctctccatttacttcttcccatcctgggacctgccagggcagcaatctctccaggtcctgcaaagatggagccagaattccctttttcactgataaatatatttcttcattgccaaagaggctgtacccatcctgaaggcacatttgtgggttccccatcagccaggccttggtgctaacctggctgaatttcacacaggctcttacacacacacgctcctaggagacatctgcctacacggcaaccatatttcctctgaatgagaaggaattgaaccaaaagtccaagaaagaactgattgcttgttccataggagcttaggaaacaagaaaccctggattgcccagggggtctgagaagttggttggtgactttttttgcggttaaatgaagggtgatggggagatcagcccgaattgccgcctgcctcttgctaaataggagcagaggacttggcctgcagctccttgggagcccttgattgggaagagagtttcaagggaggcagctggattcaatctagcaggtggtcagcttcagctttctccatcgaaatcccattctcctgtccagaggcccagtgggtcatctcccaagggtgggtgtggaccctgggcctcagaggccttgctggtgctgtcacctcccacctgttccattccgaggcctcacccagaagtgggnaccccccccttcctcaccagagccaccgtgactgtttctgatgacctggagagtcaacaacaaccagaaaggtttctgcccagagccaggcttcttaaggcctttacgaagttttgtgccttccaagtgctgaagaagacctggtcagcctaaatcttcccagtcccgctgtggagctgtgcagtcaccggagtaatgagctcctggttcctcgggagt

SEQ ID NO: 1224 - DNA, 695 bp, Homo sapiens
gagagtctcctgagggccaaaggcctggaagtggaacagttatctactacctgtcaaaacctccagtggctgaaagaagaaatggaaaccaaatttagccgttggcagaaggaacaagagagtatcattcagcagttacagacgtctcttcatgataggaacaaagaagtggaggatcttagtgcaacactgctctgcaaacttggaccagggcagagtgagatagcagaggagctgtgccagcgtctacagcgaaaggaaaggatgctgcaggaccttctaagtgatcgaaataaacaagtgctggaacatgaaatggagattcaaggcctgcttcagtctgtgagcaccagggagcaggaaagccaagctgctgcagagaagttggtgcaagccttaatggaaagaaattcagaattacaggccctgcgccaatatttaggagggagagactccctgatgtcccaagcacccatctctaaccaacaagctgaagttacccccactggccgtcttggaaaacagactgatcaaggttcaatgcagataccttccagagatgatagcacttcattgactgccaaagaggatgtcagcatacccagatccacattaggagacttggacacagttgcagggctggaaaaagaactgagtaatgccaaagaggaacttgaactcatggctaaaaaaaa

SEQ ID NO: 1225 - DNA, 526 bp, Homo sapiens
gattaaaaaagaaacccaaaattaagttacacagaaagtaatttttaaaaactactttggacgttaaaatggggccaaaggtagaatccacggaggtaaaagttcttgacgagcagtcaggaaatctgaatgattctgtcctttgttctgcccatatccagctgtgagctcttgggcaaatcacatattccctctgcgattccattattgcatctttaatctgaaaaagtagaggagggattccatccaattttgttactataaatttcagttcaagcaaacttactcccactgttaccaacaaaagtttcaaaagactcatttaaataatttataacatagttctggttaggcatgatgagctaaaaatgagagttggggtattaaaagcaaacaaaaaaagctgaaatatgaagactatccaaaaaacaacagcatcaaaaaccatgaaatacacagggatacagttaaaggatatataggatctctgcactgaaaaatgtaaaacactgctgagaaaaaaaaa

SEQ ID NO: 1226 - DNA, 411 bp, Homo sapiens
  misc_feature (1)...(411): n = a,t,c or g
ttggaaaccttnnnnnnnnnnnnnnnnnnnnnnnnnnnnnnnnnnnnnnnnnnnnnnnnnnnnnnnnnnnnnnnnggcacgaggaaactctgaggaaggaccatggcctgagaggtggaattcatccttccgaggactgagatgaggacggaaaatgaaccatcggggggattgacggtgaagatgctaatacctgcccagcatcgaccctagtgcgggtcccaagaccatccccctgtgcaggctccaccaccgctgtgctaactggaccgcggcagaagagtgggtgtgtgccaggtttctgctgggccctgcagctcctccccccagccccatgtgatgtgcccctggccattgacactcagttcgagggaaggcactggggtgtacactcaaagacctaaacccagg

SEQ ID NO: 1227 - DNA, 751 bp, Homo sapiens
  misc_feature (1)...(751): n = a,t,c or g
gtggtgtcactgttgtaccagtgatgacacaaaatcccagatctacctgacgggcctgcgagggttgaagattgtgaagcaatagcctaagggactggctggcttcgagcagggcatcggaaccaggcctcctggcactggcctgggtagagccagggcgagcaccagctgacccccagtggaaccctgtgacagtcctgccagggcccaggccatcccaaccgacttccatctcatggaccctccagcggagaagccgggagaggctgggcggactgcagatcacaccccagctgctgaagtcacgcacaggcgagttctccctggagtccatcctgctactgaagctgcgtggcttgggactggctgacctgggctgcctgggagagtgcctgggcctggagtggctggacctatcaggcaacgcgctcacccacctgggcccgctggcctccttgcgccagctagctgtgctcaatgtctccaacaatcggctgacgggcctggagccactggccacctgtgagaacttgcagagtctcaatgccgcaggcaacctactggccaccccgggccagcttgcagtgtctggctgggctaccgtgcctggagtacctgcggctccgagaccctttggcccggctcagcaacccgctttgtgccaaccccttcctnactgggcttgcagttccggggagcttnttgcctgggccttgaaagttcattcgaaggttgaagcgtgttgattggg

SEQ ID NO: 1228 - DNA, 835 bp, Homo sapiens
aaaagaaaaagcaataggcttcaaccagaagacatgagttggagtatctgctctgccatgtagtagtttgtgtgatcctcatttgtaaaatggaaatactatttacacccttatgggttgttgtgagggtcagaatagattgtgtgcatgacagtgctttgtatacgcagacagaaggaaaaaagcggctgttattggctcaacttatttgacctttattttcatcatcatcggccactatttgatgtcaatctactatgctgtgagcaaacattaaaattaggaagccaggggtatgggaaccactgattaggcatcatatgccagatgtgcttccatccaaagcacatgaacagaatgatattaaattacaagcctatcaggaacagaccagctttctgcctccctttctatgaataccaagtcccatgaaccttgtattcatgtggagttttaagtgcatgcttggaagttatgaggagacagcctggtatgttcgggaaagaaaataaaggttaggtacatggtagggctttggctcagccatttgggcaaatgacttaacctctctgaacctcagtttctgtttctatgaagtggggaattgtaatacctaccttcttcagattgttgtgagggtttaaatgaggaaggtggaatgttattacccttggaggcacacagcgtgggttacacccaccaaatgctccaacccaaccggcaggcggatggacagttttagggccaactacccaccaggaaaggattttggaacctgttccccaatttcggatttttggtttcccattcaggtcctgtgattttaacccaagtg

SEQ ID NO: 1229 - DNA, 443 bp, Homo sapiens
gagcattcaaacaagggccgtcctaaacagctaaataagcctcatcctcacagaagcgaaagcttctagatgggcttggtgttgttcatcaacgaggttttatcaggatagtggcaattctggtgaatgacggactgagcccctcttgaggaactggatgtgtctgcttgggctgcatgccatttcccacccagtgcttaccatgctgctagcagcaattagggtcgactcaccttaggcagttgcatgagcagctgtttcttccaaagcaagttgggactggaatttggccatataatcacacagttaaggacagctctggcatttatatatgaatcctcagaattttaggtacacccatttcttttcccgtaaataaaatttctttcctgccttttaagtgtcttttccctgattcctacatagaaaatttgatgaatatt

SEQ ID NO: 1230 - DNA, 427 bp, Homo sapiens
  misc_feature (1)...(427): n = a,t,c or g
gcactggaatttgctggctcagtgacttagcaacccagttacagcctgacatttgcccttagcaccaactcttggttctccatagcacagcacggataagcttctccctgcgagatccccagttgcacggtgaaaatgagcagatcacagatgagaagcctgagagctacagaataggaagggccctcatttaatacagcccttgactgccaactactgtgctgacttaattcactgaaaagaaaggaggacgttctgattctggccagaacggagtaagcccactgctgcctctctcctgccgactgccagcaaaacctatggacaaaacacaaaaacaaacacctgaggactctggggagtcaacccaagctgatggattgcagaggaaaagtcaaacccatggaaatggctgtacangggaaaa

SEQ ID NO: 1231 - DNA, 1347 bp, Homo sapiens
acagccacctgcaacgtggagcagtccttcttcaacgactggttcagtggacaccttaacttccagattgagcaccacctcttccccaccagtgccccggcacaacttacacaagatcgccccgctggtgaagtctctatgtgccaagcatggcattgaataccaggagaagccgctactgagggccctgctggacatcatcaggtccctgaagaagtctgggaagctgtggctggacgcctaccttcacaaatgaagccacagcccccgggacaccgtggggaaggggtgcaggtggggtgatggccagaggaatgatgggcttttgttctgaggggtgtccgagaggctggtgtatgcactgctcacggaccccatgttggatctttctccctttctcctctcctttttctcttcacatctcccccatagcaccctgccctcatggggacctgccctccctcagccgtcagccatcagccatggccctcccagtgcctcctagccccttcttccaaggagcagagaggtggccaccggcggtggctctgtcctacctccactctctgcccctaaagatgggaggagaccagcggtccatgggtctggcctgtgagtctccccttgcagcctggtcactaggcatcacccccgctttggttcttcagatgctcttggggttcataggggcaggtcctagtcgggcagggcccctgaccctcccggcctggcttcactctccctgacggctgccattggtccaccctttcatagagaggcctgctttgttacaaagctcgggtctccctcctgcagctcggttaagtacccgaggcctctcttaagatgtccagggccccaggcccgcgggcacagccagcccaaaccttgggccctggaagagtcctccaccccatcactagagtgctctgaccctggggctttcacgggccccattccaccgcctccccaacttgagcctgtgaccttgggaccaaagggggagtccctcgtctcttgtgactcagcagagggcagtggccacgttcagggaggggccggctggcctggaggctcagcccaccctccagcttttcctcagggtgtcctgaggtccaagattctggagcaatctgacccttctccaaaggctctgttatcagctgggcagtgccagccaatccctggccatttggccccaggggacgtgggccctgcaggctgcaggagggcactggagctgggaggtctcgtcccagccctccccatctcggggctgctgtgtggacggcgctgcctcaggcactctcctgtctgaacctgcccttaatgtgtttaaactgtttg

SEQ ID NO: 1232 - DNA, 675 bp, Homo sapiens
caggaatacttaaagatgctggagtaaacaatttaacaattcaagtggaaaaggaggcatactttcaacatatgtctggcctaagtactggatttcatgatgttctggctatgacaaaacaaatggaatccatgaaatactgcaaagatggtacttacatcatgtgagataactcaagaattacccctggagaataaacaatgaagattaaatgactcagtatttgtaatattgccagaaggataaaaattacacattaactgtacagaaacagagttccctactactggatcaaggaatctttcttgaaggaaatttaaatacagaatgaaacattaatggtaaaagtggagtaattatttaaattatgtgtataaaaggaatcaaattttgagtaaacatgatgtattacatcatcttcaaaaatagatatgatggattctagtgaagaccaaaattacttctgtttactttctatcaggaagcatctccattgtaaatatgtatttacatgtttattacaaagacccaaatgaaaaatttttagtccattttttgcatagcctaaagataaaataggaataaaagttctatatttatggattttctgtatataaaactggtttctaattataacttaagtccattaagtaaaatctgtattgccactttaaa

SEQ ID NO: 1233 - DNA, 322 bp, Homo sapiens
attgtaataaaagttatatgaatgtgatctctctctttctcaagctatcgtactgtaccacaggtaactgagaccgtggaaagggaaatcttgggtaagggaggactactgtatatagcaggtgtctttctctttcatattaatttccaactaaaaccggatactgattcttgttgggtgcttggtctaggagatgttgcaatattagcatactagaatcctggaatcagaagggatttgttcctatctcagagaaggaaattattaaaacattgacatttgtgacttgtccaaggtctcacagatagtgttgaatgggaaa

SEQ ID NO: 1234 - DNA, 1611 bp, Homo sapiens
tttttttttttaggtcatcaccacagaactggcttttactaacaaaaccaaagaacctcaaacactttttgtggacttcaaattctttccttcagattttaaaatgacattatgcatgtacatatttttaaaatttagacacattttagagaacacaattgtgaacacaaatctaagaaatgaatgagatgttctgaaatctgattcaaacacttatcttaaactgacttctgtcaatcctctgtcctgtgaagtaagtcccgtttctcctttgcctggagggaccgagctggaattactgtcacatgttacagacatgaggcaggggttaatgcagaaccacggaacagcacctctgatgacatctagtggataagtaggaaggtgtcaacccaggtggcttttaaaaaaatctgtaaataaaatctcctcctttattccacagattttaatctttccctcagtgtgttagaaagactaatagtgtttttcaaacgtgtgtggatggactcacctggggagacacccgcatcctaggccacctttgtggctggctctgcagacacctggctgcacccgctgcctcctcgtctgagaggggctgccctggagagcaccgtgctggctgtgttgcctactggcttcccttgagaaatggggaggcaggacctctactgagtgctgtgatgtgttatgttttgatgtggtgggtggggaggatgggaacaatgttatttggatgagattggacatcgtgtgaggtcttcagcaaagcagctaccctcagctcattgacgacagcatcctgccctgcaggtgtgggctgctggactgccctgcaaagccccatcaaacaagccctggaggcccaggtaaaataggatcaggatgatttctattcacagaagtcatcaatctaacatgaaagaaaataatgactcaggagcaagggtgtctgcagcaaacagactctcccaggcatcgtttagaagctgaatgtcacacatttcgggtgcccagccccacacataaccacacaagtaaaaaggaagcttttctcctaaactgacattcttttttctcttttctgagaggtgtggacactggggctgggaaatgctcaggcctccccctgcagacaaggactgggctgttaagagaggcctcttgtctttcatgacacaagccttagctcacaagacgagaagtacctagtcccagaccacctcttccatgatgacagaaacccttctaaaaactgaaatctatgtgatagaattaatgaaggtaggctaacccaaattactgctcacattttttcaaataaaagtcacacaaataccataatgttgttggttagaacattatgtttctcatatctataaataagggctagtactttttatcacccaaaagtagacaaaaaataggaaatgcattcattccaaatttagattttgataactttccaaaaggttgaagtaagtttaattgcagggacatgagtccagttgagtgtctttctgttaatctgcaataacccatctggaactgtatttacttttcttagaacagtaacttataatgttgataaactgaggtggagcctgt

SEQ ID NO: 1235 - DNA, 445 bp, Homo sapiens
acaagatgcaggaccccaacgcagacactgaatggaatgacatcttacgcaaaaagggtatcttaccccccaaggaaagtctgaaagaattggaagaggaggcagaagaggagcagcgcatcctccagcagtcagtggtgaaaacatatgaagatatgactttggaagagctggaggatcatgaagacgagtttaatgaggaggatgaacgtgctattgaaatgtacagacggcggagactggctgagtggaaagcaactaaactgaagaataaatttggagaagttttggagatctcagggaaggattatgttcaagaagttaccaaagctggcgagggcttgtgggtcatcttgcacctttacaaacaaggaattcccctctgtgccctggataaatcagcacctcagttggactttgccaggaagtttccctgatgtccaat

SEQ ID NO: 1236 - DNA, 671 bp, Homo sapiens
ctgagcacatctttagtactcactagcatatcatccacagagagctgtaaaatttgacttgtaagctgcctcgcttttcaacagtactaacagatttcagaaagtctttcttttgctcactattgaaaaaccattccagacatacatcatttccagggcaggtaagatgagcttcacaggtgcaggtaaggaggcggagtaacgccgagccttcctcacagcaaacttctcagtagggatagatttcccggcaattctctgcttcaagctgtccacctgtctgaataaagttaccacattctcattcgttgctactacatcctcctctggaagcatactcaaaattgctgctttcaagaacacataagttgccttggaccatttactctctttgcaaagcagatctgaatagtaatatgcctgcatccagttttgttggaaaacattaatccacattagctcccagtagcagagatggtgaaactgtttccattcttcttgaactgaaatgcatttttgaaatacttcttgtgcctcttcaagattccctttcagcaactctattcgggcatgataaaacaacacgagtgagccatttggaaactgctggaggaagggtgccaggacgacgcgtctgtccgcaacattcacttctcctgtacctcgtgccg

SEQ ID NO: 1237 - DNA, 515 bp, Homo sapiens
  misc_feature (1)...(515): n = a,t,c or g
taaaattccattatcttatgaataagcacttgaatcagtttttaaaatatttagtctaagatgattcaaagtagttttattttaatacaggacttttaaatggcagtatttcatttcttgtcaattatgttggtactttccacaaatctataaagaaggataaattgtaccatcattttattataatcctcaagagaaaatgtgtaattcaaaagattaatgtgtattaaaacacattatgtatcttagttacatttctatcagtacttttattaatatttgtgaaagaagacagcttaatagtagttagcttaagtagtttctccaagtacttttgtgctatcaatgagttcttctcaaaaaataattagttaggccagggcacaatggctcacacctgtaatgccagccctttggggagggccgaatggggcagatncacttggagggtccagggagtttgaggaccagcctcgccaacatgggtgaggaccctgtctcttacttaaaacggt

SEQ ID NO: 1238 - DNA, 714 bp, Homo sapiens
atggatcctggggacgactggctggtggaatccttgcgcttgtaccaggatttctatgcattcgacctgtcaggagccactcgagtccttgaatggattgatgacaaaggagtctttgttgctggctatgaaagcctgaaaaagaatgaaattcttcatctgaaattacctctcagactttctgtaaaggaaaacaagggcttattcccagaaagagatttcaaagtgcgccatggaggattttcagacaggtctatctttgatctaaagcatgtgccacataccagattgctggttaccagtggccttccaggttgttatctgcaggtgtggcaggttgcagaggacagtgatgtcattaaagctgtcagcaccattgctgtgcatgagaaagaggagagtctctggcctagggtggccgtcttctccacattggcacccggagtcctccatggggcgaggctccgaagtctgcaggtcgttgatctggagtcccggaagaccacgtacacctcagatgtcagtgacagtgaggagctgagtagcctgcaggtcctagatgcagacacctttgccttctgctgtgcttcgggccggctggggcttgttgacacccggcagaagtgggcaccgttggagaatcgcagccctggccctgggtctggtggagagagatggtgtgctgaagtttgggagctggggccagggctgggg

SEQ ID NO: 1239 - DNA, 224 bp, Homo sapiens
gggagcagtgtctggagtctaggttttcctcaagttcagtgattctcagccactctatacttgttacctctagggtagcatgaatcttttttgatcattttcaatttgggagataaacatgtaattttaggaaagatttttaggttgggatatttatacagtagtgctgtggaaatttttaacttcttttaaacatggttatattattaaaagtatctgaaatt

SEQ ID NO: 1240 - DNA, 797 bp, Homo sapiens
agaaccttatttgtagcaatttattgaaaaaaaaaaaacgtatttgaaactttgacagcaactgtggtgctgctgcagcgaggtcactgacagctctaatggcccctttattatctctttcctgtttctgggcaaacctcttagccattcgttcctggttaactcggaaacacatccagaggctgcatgcagctgccacagtcatcaagcgtgcatggcagaagtggagagtaagtaagacccaagaagtcggggtgggcagtggatcaattttggggaccagatggacccgagtgggaatgctggctctgccactgcaatgcaggtggccttgggcaggttgtttagcctctctgagcctcatattcctcatgtatgcagtgggcacagtaacacctaccctgcagggtggttatgtaggtgaagagtggtataagcaactctgggaatataccaaactctgggatgtacactttagaagactgggttttatggcatatcagttatatcttgatggactcttatcttgttttcaagtagcatatgtaaggcctaagcacagttgcctggggtgtatagacttgtggcatatggaaccagtttggttcagggcagccagctgtttgcaaccaggtgccttcagttcaccttgttaagatgatttgttaaagatagttttgatttccattttctgctaagagggctagataaatctaaagctataaagggatatttgctttttaagatcagaatggcctccttgctgctaaagagctggatggtgtggaagaaaaacg

SEQ ID NO: 1241 - DNA, 1227 bp, Homo sapiens
agaaattggcagttgaagcttggaagaaacagaaaagtatagaaatgtcaatgaaatgtgcttcccagttaaaagaagaagaagagaaagagaaaaaacatcagaaagaacgccagcgccagtttaagttaaaattactactagaaagttatacccagcagaagaaagaacaggaagaatttttgaggcttgaaaaggagataagggaaaaggcagaaaaggcagaaaaaaggaaaaatgctgctgatgaaatttccagatttcaagaaagagatttacataaacttgaactgaaaattctagatagacaggcaaaggaagatgaaaagtcacaaaaacaaagaagactggcaaaattaaaagaaaaggttgaaaacaatgttagtagagatccctctaggctttacaaacccaccaaaggttgggaagaacgaaccaaaaagataggaccaacaggctctgggcacttctacatatcccaaatagggctattccaacctggagacaaggaatacagagaagagtatgagataatcaaattgctactcagttgataagaatgttaacatactaagttataccagggagagagtgacctacccacattctttaaatatcaatagcttagtcagattgattattgtgctatattgtgaattgagaggtattaagtttcatgaggctttgtccattagtattcctgcttctaccaagaaggtatttaatatatgtgttggcctattattgatgtaaaagttatttaaataagttaatgttagaaacattattcaatttaaatactgaaaacatttcaaagagattttgtttttgttatagcatagcaaagtaaattggaacaatcatacaatgacattttttaaaccaaaattttgtaacttttataacttggagttaagttagcttgagtaacaaaaaggtaaagtggtttttgtttagagttacgaaatgttagtactttttctatgtttaacaaattggcagtttgtcagttatgacatttttgtgtaataaatattttgtatttgtttgaagcatgctttgttttatatagagaatatttattttaaaaatatgtctctcatataccctattaattgtattattgatataatctttttggtttccttcagcaattccaaattttccttcagcctttctggatttcacagatttataaaatctttgtgtctttcacaaaaaaaaaaa

SEQ ID NO: 1242 - DNA, 791 bp, Homo sapiens
cccttgggttgggatctccaggaatacagtcccatgcaaagattctctggttttatggcttttttcccttttctttacaccatcctctcccataagcacccatgtctttgaatatgaatgtatttgtaaaataccacgtttcatgtgtgaatatgtgcttttacttgtacatagtgcttattgtgcaataggtcttatgctgttttcactcaatgtgtgctaagatctagccccattgactcttctagaaatgcagtattgctttgacctgccatgtggcactccacaatgtcaattgcagtttacacacattgcctaaagtgggggacacctgggtgcccctgaccccttggcaccggatacaggccacgataaacatcctttcgtgtgttcccttctgtgcttgtgtggcatgtgtacccaggatgggcctataggtcacagaggtcagtttctctttggttttccagattttctttagaacggtgactgaccctcctacttgaggccgccctttctccttatccttgccagcacttgtattgccagactacctaatttttgccagtctcatgggtagatagtggtgcagtgctttaacatacattcatctgatcagcattaatttggggaattttttcacttagcctttctggtttcccttcctgtgcattgcccattttctcatggagtttcttatcttttttggtttattctcaggagttgcttgtacattcttgggcaattgcagataattccaagaatgcatatttgggctgggtatggaggtt

SEQ ID NO: 1243 - DNA, 415 bp, Homo sapiens
  misc_feature (1)...(415): n = a,t,c or g
gggttgatgtggttgctgtgtggctagaagatcaagtctaacatgattaaaaccattactaaagccaaagctcattaaaattgcttgtgggagaagttatgtgaaacactttctatttgctttataataaatgcaatttgaaagtaccatgaaacagaagggaaaaaagttgataagaaagtttaaggagtaaaccatggcacattacagtttcttaacctgcactgaccgcattgctggtgcctgtaatacttcagagtttggggcaaagagagtgagattgtcttgccaaaagaaaaaccgggtgtcagttgcagagcacggggatggcaattttaaaggtgttgggtgcaaacgttncttgttgtgnacattanaaaggcnaatcagtgccagtgtcttttcccgcttttcc

SEQ ID NO: 1244 - DNA, 1889 bp, Homo sapiens
tttttttcacatttcttcacgaatttattatataaaacgccctcagagtatttaatttctcctcactttaattacacattaagaagcacagtggatgagaagcctttaagatgactacagttgcacgaaggtccctttcatcaaggtagcgtatgtaccctaacagtgttctaaaggctggcccagaaaaaccccatgttaccttatcacaatatggaaagcattgtcttctttttccactaaattaaattatggtgaaaagtgccacagttttatttagcattatggtacataacaaacagttctgtctcaattatgaaaaaaattaattaaaataatcctgaaagacatcctttttctccccccaatgatttgaaagctgcatttttcctgccaatttcaaacaaacaaatcatcaggttgatctacagtaatcagttaaaacaatcagtcaatcaatcaatcaatcaccaaggcacaagctcagcacattagctatagcttgtagcaaaaggatatatcaatgtctcaccttagttaaaaatacataatccttttattttataatgcaataaaagaaattaacaacatcacatacacagaagactaggaaaggggaaactacttacttctggaaatcagtaatgtaaacctacttgtacttttccatagtacatgaaagtaacgtttaacatgttttgaattaattaattaaatttaatctgtggggctatacaatgtaattcttaggagtaatagtttcattcatttccaggtcagcttactgtatgattaagtaacacaaggcacagtagccatctttttcattatgttgcaacactgatcacgtgcctcgataaaatggctgattcaacaagatgatggcaacacgaaggggagactttgggattgtctatttaaaatctaggtaataagtaagtaattaataaaaactctatcttaagtgcacttttcacatgctttttgtttataataaacaaacaacaaacttcctaactttgttgcaataggcttgactaccatttcatttggccaaatgcactttccccagtaaacttaaaacaacaacgagaacaacaagaacaaaaatccctgtcctttcatatactaagaaagaggattggctactgaaacagttcattgcaagacacatgaagacgacatactgtggcatgagttgtttttgtttttaatttgttgtgctgttactaaagttctgagggctgcagttaaaacattccaatttctcccttccttccatctttctttattgattgattctcaagattttgcacagaaaactctttgggggctagaacagcagtaattgcatcacactgttttcaagacttcaagtttcaaaagcaaatcattaaaaaaaatacagttcctgatttgagttagatacagggacaaaaaagtagcacatacttgaaggttacgtggtctacaaatggtggcaatattttccttgggagagtagttctgttggtatatattttttaaatactcaaaaggctcaacctcaagcagtaataaacacaagcaaaagtgatttaacccttaaaataaatattcagaaaaacctctctgtacatacaagtgaaagaatatgtaacactttcacgcaaaaaaataattataataataataaaggatttgttcatatatgtagctgaaatctgctgttccagcccacatgtccccaataaagaagggaggcacagacataggtgactactgtggttgactatcttacagcctttttgtactgggacactatcaccaccaaaaatttatccctcgttatatttttaaaattttttaaattttttctttttttttccttcctttttatatgttttatt

SEQ ID NO: 1245 - DNA, 438 bp, Homo sapiens
agataatgatagaacattacaacagcagccaggtgatcaaaatagaactatttcatcagtccatggtttaaacaatgatattgtaaaggccttggaccgaattacattgcagaatattccttctcaaacagccccaggttttactgcagaaatgaagaaggactgcagtcttcctcttactgtccttacctgtgctaaagcatgtccacacatggctacttgtggaaatgttctgtttgagggaagaacagttcagctagggaagctttgctgcactggagttgaaactgaagatgatgaagatactgagtcaaattcatcggtagaacaagcatcggttgaagtacctgatggaccaacactccatgacccagacctctatattgagattgtgaaaaatacgaagtctgtcccagaatattcagaggtggcttatcc

SEQ ID NO: 1246 - DNA, 346 bp, Homo sapiens
  misc_feature (1)...(346): n = a,t,c or g
ttcaaagaacaccgtcagctaaacagttagggtccacaaatctaagtcgtcttcaaggaaaagcagttaaggtaaaagctcaagaaagcgacaaaacttagtgatgaatatgtgtatgcaatccagaacataaatgtaaattcaaatgaaattgtacctttacttcataggnnnnnnnnnnnnnnnnnnnnnnnnnnnnnnnnnnnnnnnnnnnnnggaataagaattctgtcatagcacagtttactagtgtgtatgtatagatttcatatcttgtgaaacctaaccacacacaataagcatctaacgtaaaatactggcctattagggaagngattcctgcctt

SEQ ID NO: 1247 - DNA, 377 bp, Homo sapiens
  misc_feature (1)...(377): n = a,t,c or g
gcgtcgacttttttttttcctcttgcttttattaaggtataattggtatacaaagaaactgtacataatcaatgaacacaatttgtatacattatgtatacacacatatgtatacactcatggtatcatcaccgcaatccaggaagtaaacatattcatcatctccaaaagcttctgccactctgcggttgccttttcactttcataatggaatctttttgtcttagtccattagagcttctataacaaaataccagagaccaagtaatttataaagaacngaaantgnatttattatagctctggaggctggnangtctaagatcaangcatgtgcactgttgtctggtgagggcttctctctccttccaagatgg

SEQ ID NO: 1248 - DNA, 601 bp, Homo sapiens
  misc_feature (1)...(601): n = a,t,c or g
gagaaactcagcagtgtactgagatgtggctggctgtgccatcgtcatagtgcacagtgacttttctgtttcttatcactaaagactgaggtgaggttatgaaactttcattggtcccatcgttgtgcgcagggtgcaactggctacctagaagctgatggcaggagactgtttcacacacaggagattgtgagctgtgtaagtagtcatcgccactcaagtaggacaagggtcctacccaaggctaggaccgccctgcggaaacagaaacatagactgagaacaaacctcaagactatcagtgtgacctccccataacaagagaaccccatatatagttttgagactttcccttgagaaacttattattaaaactattactcatcagtcattcactgatcaggcagctaaagtccatgagaccaaatggttttatatggaaccaacgaagtgggagctaaaactgcacagtggtcattctttggcctctccttggctttatgacttaaaccaactacacttcctatagcttctaagcagttcatcagcattacttgggaaaacgtgntgnangnnccagncntangatttntncccatgc

SEQ ID NO: 1249 - DNA, 345 bp, Homo sapiens
  misc_feature (1)...(345): n = a,t,c or g
ggattatacagaagctgagaataaatttctggtgatgaagatgatgatccaagaaaatgaaatttgtgaaaactttatgtctttagtttattttggacgtggtttactgcggatgtgctcaaaagagatataatggaggactgctagaatttcataaaagcttacaagaaattggagacaaaaatgacccttggttttgacataggtcctacagaagatgaagatttacctacaacttttaaagatcttcttaataattttatcaagacaactgaaagcnatataatgaagcagacgatttgtagttacctagaatgngaaccgatcttgtgaagctgccttttt

SEQ ID NO: 1250 - DNA, 493 bp, Homo sapiens
aaatgtgccacgtcttctaagaagggggagtcctgaacttgtctgaagcccttgtccgtaagccttgaactacgttcttaaatctatgaagtcgagggacctttcgctgcttttgtagggacttctttccttgcttcagcaacatgaggcttttcttgtggaacgcggtcttgactctgttcgtcacttctttgattggggctttgatccctgaaccagaagtgaaaattgaagttctccagaagccattcatctgccatcgcaagaccaaaggaggggatttgatgttggtccactatgaaggctacttagaaaaggacggctccttatttcactccactcacaaacataacaatggtcagcccatttggtttaccctgggcatcctggaggctctcaaaggttgggaccagggcttgaaaggaatgtgtgtaggagagaagagaaagctcatcattcctcctgctctgggctatggaaaagaaggaaaagt

SEQ ID NO: 1251 - DNA, 530 bp, Homo sapiens
ggcagttgacggctcctgggactagatcccgcgaggtagcccccgaactatttctctacgttttctcttgatcctcccgaaatcttccagatccgcgtagtgaggaatcgtctccaccgtcatggggggcggagacctgaatctgaagaagagctggcacccgcagaccctcaggaatgtggagaaagtgtggaaggccgagcagaagcatgaggctgagcggaagaagattgaggagcttcagcgggagctgcgagaagagagagcccgggaagagatgcagcgctatgcggaggatgttggggccgtcaagaaaaaagaagaaaagttggactggatgtaccagggtcctggtgggatggtgaaccgtgacgagtacctgctggggcgccccattgacaaatatgtttttgagaagatggaggagaaggaggcaggctgctcttctgaaacaggacttctcccaggctctatctttgccccatcaggtgccaattcccttcttgacatggccagcaagatccgggaga

SEQ ID NO: 1252 - DNA, 425 bp, Homo sapiens
tttttttttttaaaagtagttaacgtttttattctttacttcaaggtatatctccatgaataacctaaatgatcccccaaattgggaatatccggcctaattccagggcggatggtggtgatggaagcaggtggaattatgccctgttggttccaatgctgggattggctgcttttcgttggatttggtctagggagtcccagaaagaagtagaaaaagagagagaagcctaccgtcggagaactgctgcttttcaacaggatctggaagccaagttaccacgccatgatctcagaaaatcggcgtgctgtcgctcagttgtccttggaactcgaaaaggaacaaaacagaactgctagttaccgagaagcccttatctctcagggacgcaagttggtagaagaaaagaagcttctggaacaggg

SEQ ID NO: 1253 - DNA, 454 bp, Homo sapiens
acagacattgtggtgtcaccatccacgaagctgctgtctctggcacatctccacaattaactcctatcagaaccatcggattttctgctgtatttttctggaaagaaaactttctttacccactttataaacagaagactgtgacaagaaggccaattatttccatcgctgaagactctaaatttggcaaatcttctaaataacaatcctgcatagtttattaaaaaaaattagtcgtaaaatttatccttcaaaaatctgcattttaaataaaccctgacagtgatttctcaagactgtaaagatattagtctgagaatgcaactctaacagactgctctgggcatcttttctctttgccttggccaggcctctcagaattgagtgagcgtgtgactccatttgcacagtgggacagatgagtacaactgaaataaaaagtggaggcctctgc

SEQ ID NO: 1254 - DNA, 433 bp, Homo sapiens
gcactccttcaggtgcagaaaaggaaagcatgactgtgtgtcactgacttaaaataggagtgaggtgagaggggcagctgggctcatggacgtcaagtggacagtttctcagctggtatttcctatatttcctgttttggacagcaggttcctgcccttctaagctgggggtaggggtgagggagtgtatgttaaaaagctctgtggacttgctttttctcttctccatgtgtgttctttccatcaataatctgcgttcatctttactggctgttcatgcattatctggagatacgctagttacagaaattcaaacaggcaactcttcctctttctccctagctttacactacagatccatgaagttttcttgactgccctgcctagggtacaacaaggaaaccactatttggataattcccctgatccatgg

SEQ ID NO: 1255 - DNA, 391 bp, Homo sapiens
atgattgatacataaaacaacatggaagaacctcaaagaagccagggcatctgggtctggagatttatcaggagattttaaattatgaatttaattctttaatggttataggatattcagattatttcatcttggttgagttttaatagtttgtggttttcaagaatcagattatttcttctaagttgtcatgtgtataagccgaaagttacagtatttcctcattatctttttaatgactgcctgatttatagtgatactcttcatttcattcttgataataatgatttgtgttttgtctttttgtcagtctttctacaggtttatgggattttcttgattgttttttgaagaaccagttttttgtttatgtatttttctatttgcagtt

SEQ ID NO: 1256 - DNA, 2812 bp, Homo sapiens
  misc_feature (1)...(2812): n = a,t,c or g
cggctgtgttgcgcagtcttcatgggttcccgacgaggaggtctctgtggctgcggcggctgctaactgcgccacctgctgcagcctgtccccgccgctctgaagcggccgcgtcgaagccgaaatgccgccaccccggaccggccgaggccttctctggctgggtctggttctgagctccgtctgcgtcgccctcggatccgaaacgcaggccaactcgaccacagatgctctgaacgttcttctcatcatcgtggatgacctgcgcccctccctgggctgttatggggataagctggtgaggtccccaaatattgaccaactggcatcccacagcctcctcttccagaatgcctttgcgcagcaagcagtgtgcgccccgagccgcgtttctttcctcactggcaggagacctgacaccacccgcctgtacgacttcaactcctactggagggtgcacgctggaaacttctccaccatcccccagtacttcaaggagaatggctatgtgaccatgtcggtgggaaaagtctttcaccctgggatatcttctaaccataccgatgattctccgtatagctggtcttttccaccttatcatccttcctctgagaagtatgaaaacactaagacatgtcgagggccagatggagaactccatgccaacctgctttgccctgtggatgtgctggatgttcccgagggcaccttgcctgacaaacagagcactgagcaagccatacagttgttggaaaagatgaaaacgtcagccagtcctttcttcctggccgttgggtatcataagccacacatccccttcagataccccaaggaatttcagaagttgtatcccttggagaacatcaccctggcccccgatcccgaggtccctgatggcctaccccctgtggcctacaacccctggatggacatcaggcaacgggaagacgtccaagccttaaacatcagtgtgccgtatggtccaattcctgtggactttcagcggaaaatccgccagagctactttgcctctgtgtcatatttggatacacaggtcggccgcctcttgagtgctttggacgatcttcagctgggccaacagcaccatcattgcatttacctcggatcatgggtgggctctaggtgaaacatggagaatgggccaaatacagcaattttgatgttgctacccatgttcccctgatattctatgttcctggaaggacggcttcacttccggaggcagggcgagaagcttttcccttacctcgacccttttgattccgcctcacagttgatggagccaggcagggcaatccatggaccttgtggaacttgtgtctctttttcccacgctggctggacttgcaggactgcaggttccacctcgctgccccgttccttcatttcacgttgagctgtgcagagaaggcaagaaccttctgaagcattttcgattccgtgacttggaagaggatccgtacctccctggtaatccccgtgaactgattgcctatagccagtatccccggccttcagacatccctcagtggaattctgacaagccgagtttaaaagatataaagatcatgggctattccatacgcaccatagactataggtatactgtgtgggttggcttcaatcctgatgaatttctagctaacttttctgacatccatgcaggggaacctgtattttggtggattctgacccattgcaggatcacaatatgtataatgattccccaagggggagatcttttccagttgttgatgccttgagttttgccaaccatggatggcaaatgtgatgtgctcccttccagctggtgagaggaggagttagagctggtcgttttgtgattacccataatattggaagcagcctgagggctagttaatccaaacatgcatcaacaatttggcctgagaatatgtaacagccaaaccttttcgtttagtctttattaaaatttataattggtaattggaccagttttttttttaatttccctctttttaaaacagttacggcttatttactgaataaatacaaagcaaacaaactcaagttatgtcatacctttggatacgaagaccatacataataaccaaacataacattatacacaaagaatactttcattatttgtggaatttagtgcatttcaaaaagtaatcatatatcaaactaggcaccacactaagttcctgattattttgtttataatttaataatatatcttatgagccctatatattcaaaatattatgttaacatgtaatccatgtttctttttcaaatctaaagttaaaaaaaaatagcagaagccagtgtcttaaagtctatcttttgtttctaagaccatgggatttcataatctcaagataaaatatgtatgaagtaattaatgtagaatttttacaccaaataataaataatgcttaataaactagagatatgagatgtgtaggaaatttggttaaacttttttcagatactttctggcccaaataataatttgttagcaaataatatgacccttgaactcaatggccatctattaaaagactgttgttcacactggaaaacatttaaagatgtgactatatccatgggtggattgaatcactcaaaatatattagtatccttctttaggggatggttgggttacagacatgtatttattcaggggggcagaaaatattccctttttaattgcttattaaagaaaacattaaattcctaaaatatttttgaggggcnttggaggccttttcataggggttanttttgggggccttgtcc

SEQ ID NO: 1257 - DNA, 322 bp, Homo sapiens
gcagggaccagtatgagctgctttgcctggacaacacccggaagccggtagatgaatacaaggactgccacttggcccaggtcccttctcataccgtcgtggcccgaagtatgggcggcaaggaggacttgatctgggagcttctcaaccaggcccaggaacattttggcaaagacaaatcaaaagaattccaactattcagctctcctcatgggaaggacctgctgtttaaggactctgatccatgggctaagaatctgaatgaaaaagactatgagttgctgtgccttgatggtaccaggaaacctgtggaggagtatgc

SEQ ID NO: 1258 - DNA, 807 bp, Homo sapiens
tgactcagcaattctagactctgcctcaaaaaaaactctggcaaaaaaatgaaaggactttacccacagagttcttttcacagcctgaatgtgtttgccacaaagttcttcactgtggcatttgtaaaactggaaacaatcaaaatgtccatcagtaggggattgggaacattaattcgtgcagtggggaactccgtaccagaaggaggaatgaggaacgcctattgataaggggcagagtacatatcatatgatgcaaatatatatttgctttttcttaaaacagtacaaagataaaaaactaaagtggttgctgtggaggacaggggtcaatggtggaagtgagactgcaatagactctgaagtaatatctggactttgaaattataagtgttttacatattaccaaactaagtttttaagatagtccctaaaattgaaagaatggtatctgaaatgaatgaatctaaattccttggattgcattctacaggcgccaaccctgagaccaaaatttggaaggtggccctgagcagcagctgaagggaagtgggaggtgagacaggaaagaggcggcggcatggggcgtccgggagccgggtcccatgtggacagctgggcccgtgctcactgtgggagctggtgcgttccttcaccagcccacgctgcacaggttcaggatggtcaattccgggcacccctggcctgctccaggacatgctgctgccaccagagaaagcccctaggcagcgtcccgggtgctggtggtgtcagaatcgagtttgagtctgaggagtgacctggggc

SEQ ID NO: 1259 - DNA, 540 bp, Homo sapiens
  misc_feature (1)...(540): n = a,t,c or g
ttggnnatttgnnnnnnnnnnnnnnnnnnnnnnnnnnnnnnnnnnnnnnnnnnnnnnnnnnnnnnnnnnnnnnnnnnnnnnnnnggcacgaggagactgcataggnnnnnnnnnnnnnnnnnnnnnnnnnnnnnnnnnnnnnnnnnnnnnnnnnnnnnnnnnnnnnnnnnnnnnnnnnnnnnnnnnnnnnnnnnnnnnnnnnnnnnnnnnnnnnnnnnnnnnnnnnnnnnnnnnnnnnnnnnnnnnnnnnnnnnnnnnnnnnnnnnnnnnnnnnnntgatacccagtcttttggtattttgttatagtagccatagcagactaatacagatggtttgtgggaagacaaggcaaatatctgaaaacaggatgcactggtatggttaccatatgcacacatcctattcttttatctttctagcttttaggaaacacagttaactagatattcccacctgccctcacagaaggcaacagacaaaatattagcattttgccttctttctttttcattggtgntgntacttcttattccaccatc

SEQ ID NO: 1260 - DNA, 439 bp, Homo sapiens
  misc_feature (1)...(439): n = a,t,c or g
ttcgatnaccatnnnnnnnnnnnnnnnnnnnnnnnnnnnnnnnnnnnnnnnnnnnnnnnnnnnnnnnnnnnnnnnnnnggcacgaggtgagaaataacttatgtgtgtaattggattgtttgtaattcnnnnnnnnnnnnnnnnnnnnnnnnnnnnnnnnnnnnnnnnnnnnnnnnnnnnnnnnnnnnnnnnnnnnnnnnnnnnnnnnnnnnnnnnnnnnnnnnnnnnnnnnnnnnnnnnnnnnnnnnnnnnnnntttaagaaaaaacaatttttaagtagtaaaatacaagctaccaaatttacaagaacacacaggacctttaaaaagaaaactacaaaactctcatggaggacataaaggattactcaaagaaatgattcttggcagattcatgtaaagattctcccttcatatgctagaaattcaaagntattta

SEQ ID NO: 1261 - DNA, 353 bp, Homo sapiens
  misc_feature (1)...(353): n = a,t,c or g
tttgaataccctttganacccttatgacnnnnnnnnnnnnnnnnnnnnnnnnnnnnnnnnnnnnnnnnnnnnnnnnnnnnnnnnnnggcacgaggggaaaattgtgaccatgtgttagagtatgatagggaaaatggaagaaatttagtagttactaggtcttttaagatagtttagtctgtcacttggctttatttcttccctcatgttggtctaaagctgtagtctctttgtggtagacaggattatccattgtggcatagagagaaaatgttagaattcctacttgtgtttatttttgtcctgtatacataatctcattggtatctgtattagtttcctagggttgccac

SEQ ID NO: 1262 - DNA, 598 bp, Homo sapiens
gctagggctgccgcgtcgcgaggaatgtctggaccagagcactcttccggcgtcgcccaggagatcaggggtgtggcgggcctgcgcgatcaatccgcaagctccctgtgatgcagaatgggaaggcagttcccggcccaagtccccaacgtgttctggccagtttaaaccccactgcgaaccggggaagtggccttattcctgtgacacgggtgagagctgaagtaggtctcggtccctggccgccaggaggtgcaagcaagctaccactactgcagacgctccaggcccgcccgctgtgggtgggactggggaaaggaccccatctcggccttggcaccttctactacaacgcagacaggaatagacaactgcctcaccctgctctgggcctcccctgagctagaccctgtgagattctgggacattgcaagtcaatctggtatggggggacagaattccgaaaatggccccctccgagatttccgtgcccaaatccccagaacctgtaaatacgattatctcacctatgaatagttacactacatggtgaaagggtttttgcggaaataattaaggttactcattagctgatctt

SEQ ID NO: 1263 - DNA, 503 bp, Homo sapiens
gtgacctagagaaatgagttgtggctgaggaccccggcggcagacgcaggttcgggaccatgagctggattccttttaagattgggcagcccaagaaacagattgtgcccaaaacagtggagagagactttgaaagggagtatggaaaacttcagcagctggaagagcagacccggaggctgcagaaagacatgaagaagagcaccgacgcagacctggccatgtcaaaatctgccgtgaagatatccttggacttactctccaatcccctctgtgagcaagaccaggaccttctgaacatggtgacggccctggacacggccatgaagcggatggatgccttcaatcaggaaaaggtgaaccagatccagaagactgtgatcgagcccttaaaaaagttcggcagtgtcttcccgagcctcaacatggctgtgaagaggcgggaacaggccttgcaggactacaggaggctgcaggccaaggtggagaagtatgaggaaaag

SEQ ID NO: 1264 - DNA, 650 bp, Homo sapiens
gcagaagccagtagaagcaatccacttgccaggttgccctcctggaaccagggtccacccatgagagccaacgacaaccacatcagcctttgtgctccttggggcatctggtcaatctcctgcatgggatagaagctccgggaataccccaaaggggagaaagcagagaagagggcctatgcccttccttgtcccaggcttggagtgcctcgcttggatgatactgctagccccaactggtcccagacatcagagaggaagtgaggtcctcctgaggtttggggcccaggacaggggctctgcttgctctgaatctaaaagcagtactgtttctaggtttactactcactactaactaccttattgattttgtgcttcttgatttaaaaattccagagaaaatggttgtcttagctaatcagttttgctctgagccaatggtattcaaagcatggcctgtggaccccttagtgggtctccaagaccctctcaggggtctatacagttaaaactatttttttcatgataatattaagatgtcatttgcctttttcactatgttgacacttgcaatgatggtacaaaagctatggtgaataaaactgctggcaccttggcacaaatcaaagcaaggccaccaaccattctaa

SEQ ID NO: 1265 - DNA, 414 bp, Homo sapiens
tcctccttttgggggaagaatgagagatgccacattccgttagtaaattgtgaacaacttgaaacaaaccccaaatcccaattgtgaatttaagaagtagagttaaaatgaaaggtagcccattcaaatacctatgccttgctgccttcacttattaagttaggattttcttccttttagccctttagggatacagtagtttaaaagagcagtagccacatatgaaaggatcagatttagcttagagggaattccttagaaccagccctgctgttaagacttgacattcaatattgtttgatcacattccaaaatatagcttagctaatggcaacatttgtaaacatataaattgcaaaagaagctttcttgtgtacatacatttttaaaagcttgaaattgatgtgaactttt

SEQ ID NO: 1266 - DNA, 396 bp, Homo sapiens
agcaagctgcagatctgattgatgctgagcaacgaatgaagaagtccatgtggggtcagttctggtctgctcaccagaggttcttcaaatacttatgcatagcatccaaagttaaaagggttgtgcaactagctcgagaggaaatcaagaatggaaaatgtgttgtaattggtctgcagtctacaggagaagctagaacattagaagctttggaagagggcgggggagaattgaatgattttgtttcaactgccaaaggtgtgttgcagtcactcattgaaaaacattttcctgctccagacaggaaaaaactttatagtttactaggaatcgatttgacagctccaagtaacaacagttcgccaagagatagtccttgtaaagaaaataaaataa

SEQ ID NO: 1267 - DNA, 340 bp, Homo sapiens
ccaaaccttggttcagattctctctttttccaagcccttgagctttggcccacccacagcttgtgccaacccgcagccctcctgaggttccctcctgagaacaggctgtccgcagggtaagacctcctcgatcgtgacactcttgctcagcccactttcccataacagttctttctagccacgtttacgcctccctatacaagatcagccctttgcctaacctctgagacacttgcagatcatatgggaagcctgcgagtggccgcactgcaacgtttccctattgcaatggtcacccccacaacaatcctttggaataaattcgctccttatataatcc

SEQ ID NO: 1268 - DNA, 520 bp, Homo sapiens
tgatgggagtcggagcccgggcgggcggcggcggcgcggcggccaccatggggaacaagcagaccatcttcaccgaagagcagctagacaactaccaggactgcaccttcttcaataagaaggacatcctcaagctgcattcgcgattctatgagctggcccccaacctcgtcccaatggactacaggaagagccccatcgtccacgtgcccatgagcctcatcatccagatgccagagctccgggagaatcccttcaaagaaaggatcgtggcggcgttttccgaggatggtgaggggaacctcactttcaacgactttgtggacatgttttccgtgctctgcgagtcggctccccgagagcttcaaggcaaactatgccttcaagatctatgacttcaacactgacaacttcatctgcaaggaggaccttggagctgacgctggcccggctcactaagtcagagctggatgaggaggaggtggtgcttgtgtgcgacaaggtcattgaggaggctgac

SEQ ID NO: 1269 - DNA, 319 bp, Homo sapiens
gcaaaaccaaagattctcctggagttttctctaaactgggtgttctcctgaggagagtgacaagaaacttggtgagaaataagctggcagtgattacgcgtctccttcagaatctgatcatgggtttgttcctccttttcttcgttctgcgggtccgaagcaatgtgctaaagggtgctatccaggaccgcgtaggtctcctttaccagtttgtgggcgccaccccgtacacaggcatgctgaacgctgtgaatctgtttcccgtgctgcgagctgtcagcgaccaggagagtcaggacggcctctaccagaagtggca

SEQ ID NO: 1270 - DNA, 815 bp, Homo sapiens
gtgagagtccgtaagagacagcttccaggatcctgagatccggagcagccggggtcggagcggctcctcaagagttactgatctatgaaatggcagagaatggaaaaaattgtgaccagagacgtgtagcaatgaacaaggaacatcataatggaaatttcacagacccctcttcagtgaatgaaaagaagaggagggagcgggaaagaaaggcagaatattgtcctgtggagacagccgctcattaccttgcagtatttttctctggaaatccttgtaatcttgaaggaatggacctcaaaattatggcatcgtcaaagcattgtggtgtcttttttactgctgcttgctgtgcttatagctacgtattatgttgaaggagtgcatcaacagtatgtgcaacgtatagagaaacagtttcttttgtatgcctactggataggcttaggaattttgtcttctgttgggcttggaacagggctgcacacctttctgctttatctgggtccacatatagcctcagttacattagctgcttatgaatgcaattcagttaattttcccgaaccaccctatcctgatcagattatttgtccagatgaagagggcactgaaggaaccatttctttgtggagtatcatctcaaaagttaggattgaagcctgcatgtggggtatcggtacagcaatcggagagctgcctccatatttcatgggccagagcagctcgcctctcaggtgctgaaccagatgatgaagagtatcaggaatttgaagagatgctggaacatgcagagtctgcacaagactttgcct

SEQ ID NO: 1271 - DNA, 462 bp, Homo sapiens
ctgggcttcttggatatggtttctgttcatttatttcattcctcccagccgtgtttttctgttcctttgtatatcttgtggtttctttatggaaaattggccgtttaactgttataatgtggtgattttggaaattagattttctctattctccagggtttgctagtgatatggctttgatgagtgggggaacaccagggtcttcgtctcgagtcgaattagaaaaaaactacaggaacacacgtggatcacataccgaaaggaaggagaacgcttttgttctcacttctctttctagatgggtaacagatcgtcttctctgcactccaacctgggtgacagaatgaggcttcatctaaaaaaattaatataatgaatcacattaatagaataaagaagaaaacccacataatcatgtaaacgcacaaaaaccactatctgaaatccattacttttcatgat

SEQ ID NO: 1272 - DNA, 308 bp, Homo sapiens
  misc_feature (1)...(308): n = a,t,c or g
gtcgacctgagctgctattgttccaagcactcttggaacttctgttaaaaatgatttatcacctatctactacatttgaaatctcattaaaccacaataaaataaaaaaatttttttgaattaaaaaaatttaaaccacattcaaaatgacttctggctataaaatgaagtaaataattcatcaatagataataataaagttaatcctcctgccaaaagtgaatacagtaatgtgccaaataacgatgtttcactcagtnnnnnnnnnnnnnnnnnnnnnnnnnnnnnnnnnnnnnnnnnnnnntatg

SEQ ID NO: 1273 - DNA, 2426 bp, Homo sapiens
  misc_feature (1)...(2426): n = a,t,c or g
acccactttccttttttacagttacagaccctgttgagaaaaagaagcacccagatgggtgaatggtgatagggcttgtggtggacacagggttgtgggtaagattcctcaagtgcttcggcgagcacctaagactattaccctggaactgactgctttctagagcttgattcatgcctctaagcnnnnnnnnnnnnnnnnnnnnnnnnnnnnnnnnnnnnnnnnnnnnnnnnnnnnnnnnnnnnnnnntgcagattctcagccccctcccagacatggtgaagtcagaagctctcagggagggactcagcaaatgattctaaagcgcatcaagtttgagaaccaccctaagccaatgagtctcccttttacttcccattagtcctccctcaccagatgattcctaggactcatggtgcaacatacaggagccaggctttagggaggggaggaaaggagcctggcggcaggggtctctgcaatggcaagaaagtgagtgaatccagcgctgccacctggttatccccttctcgttgaaaataggcagcgcggcgtgcaaattcctaaacacaggctgcctgcactcggtgttacctcgggctgaggcatgataatattttattttttaaagctgtgaggaaatgaaagtgaggctttggttggggcgaggcagttgtgaaagaaattaaaataaaagaccctttgtaaaatgcagacttagaagaaatactgaatttgtgtcagaagttctccagtgtttgtgttaatcgtgtggtgataatcctgtcctccttttaaagcgaattctctactgaaaggtctgctctgcttaaggagctacaaactgctctcaaaagaatgaaatactgagttccaattcagtgaggcacagtgttggactatggcacatttagttggagtcggggggaggtcaggaatatgatcagataatggattttataccttagagcaaaatctattagtctctctcagtttatccaatttaaatgggctttaggcttataggggggtgttaaactttaaggaatattaattctcccatttcaagttttaccagccaaacatctaggcccacctttcaaaaccaagaagatacagaccatcatttagcaatactaatacatgattttccttggggatggcaggtttgagaatcctttagcaacaggacatacttcccctaaattacagtgaattatttataacgagataaagctttcaggtacaagctgaaggtggggtgtctaacaactaaaaactatcactaaatctcaaagagaaagttcttgcaaaatatgtaaagttcacaaggtgcagacattttccttctttaggcttttatctaaggaagggctatgaaactgggcccatctgtatacaggctcaaatttacgtttttaaaggaagaatctatgcagctgaggcttattgcaggaaatacttcatttgtatgtaaatattattgtaaataaatagggggctgtatatttttgaagttgttgatctgcacttgaaataggaagtctctaggatctgcatataaacaataaatgtttcctagaaattagtggttttgtttgggaattagaaaaatttacattctctcccaggtaacatagttctctcaatgtaaacttggaacctgaaaccctacttaatttagagaaagaaatgtctgagaaatagttcccttgatttcttatgctggcattaagatcaattatttaacagatagtcctctgagatacaagtaaggaatatttagacacaaatccttgtcctatagaaacagatatacccaaatgacaaattgtttcttcataatgatcttccatttttaacactgataccactacacagtacatatgaaaacagaagctggggagaagaatgtttttttcacaattgaattgctgcatttctcaaactttgggatctatgaaagcggggagagggaacctgaatattaattatgagcacaaatttgaaggaaagaaaacaaagaaccattatctaatccaagctttgaaagtcctgcatgtttgccttttattttagtgttgacgccaacatagactgtctaaggtatttttttcccccaaacacttgaatcttggtcgttggtatgtaatccactctctagagtccagtgtactttagacttcatctgagtccaatacatgtaccacactactgttttattaatgtaaaaaccttgtaaatgaatttcagatgggtgatttaagtgagtcacaagtcacaaaactttgctattcatagttaatcaaatagaactgggttttttttttcagagtgtggtgtaaataaagaaatataagaagttctgttctataactgctctgttaacatagtttttaaacattaaaaaatgtgaactaaaagta

SEQ ID NO: 1274 - DNA, 641 bp, Homo sapiens
  misc_feature (1)...(641): n = a,t,c or g
attaaatgtggtcttgcctgattcatcctattaggaggcctagttctatgtgaccagcntgtgactggacattgttcttgggcattgcattgagtgctcgggtgctgaatacatgtttgtaaacatgggaccatgggagacttccattttataagcttgtttctgcctaatttgaagcagaggggcaacagcgttgaggttaagagcacggactttgggagcacacagaccaggtcccaatcctggttctgcccctgactggctggtgactctgagcaagttgcttgacctctccaagcctccgtttcctcatgtgcaaagtgtggacaaaacagtaccttcctcataaggaacgtgcgacgcgcctcagaagtacgtgttcataaatggtagccattgttgttaccttcccgtctgtgaacatggatcacatcatctctgtgggtaacccagtcctcgttgtatgacttgtcaaaatgcagttccacttgtattaatattgaccctgttcatcgtcaccaggactgcatcttgaaccactgtgccgtcttctaggcacacacgaccccgttatctcccttggaaaaattcctctcactggaaatgtacaattaaaggatgattgaaatgtttaaaaaaaa

SEQ ID NO: 1275 - DNA, 1574 bp, Homo sapiens
  misc_feature (1)...(1574): n = a,t,c or g
ttttttttgacaatgagaaaaaattttatttatgacgatcttgagcagtataaaactcagaagctccactgaggtgaaggaaacatggacatgatactaagcaaagcctagtcttttccataaaatgaataagaagtacatttggtnnnnnnnnnnnnnnnnnnnnnnnnnnnnnnnnnnnnnnnnnnnnnnnngcattaaagcattaatcctcgcatttcgatagggctatgtagcttttaagtaagcaatgttagaatgagttgtagagttttatttttgtgaatatagtgagtgacagatggcaattacatgaggatatttgaacgaaggtacataagcctaaacaatttcacctaggtaaaatattgatgtcataaccaaactatatggccccgtttcataaaggttactatattctatagagagtgaagaggtggcctttctatcccagcttaccctattcttgttattgttcaaattctcctgaagcttgcataactagctgccatcaggtaaatgctattggctagcagaagactgcagttctgttaatattagaaccagcagggggaacttgggaacttgacattaaaaatctagaaacagaattttaggatgggtctcgttagaaacctgaattgttaatggacttaagtaaaaaccatcccaaagaatttgagctttaaggtgataacgtcttttcagagatcatagcacatgaagaacccatggacactacacagactatgaaccagttagccagaaaaagatctcgtgactaaagtggggatgacagcaaaaaaaaaaaatttacaaaaggaaaaaagttgagaatacaggaatatttacaagatgttaaaaaattattaatcttcagccaaaatgaggccccttcgcattcccaaaacctttgctttcttctcctttcgttcttgctcgcgtttcttccgttgctcttcctttgtctggagatggggttgtttgtaagttttcttgtagaagttaattctgttgacatgttgatttagataattattttctttagattgcccccatggttttagctttcctttgtgtggttcatagttgaggggacgagacaaacttgctttaagatcaaacactggtttcttattggagactggagtctgcgttgcctcagttgtcaacttgaatggggtaataacagcagcagaattccccgtgatggtctttaatttgtgtgtcccaagcacagcctcgcctttttgggtgcccccagacacggtcacatgtgcagactttctggctggagtcttggtcagtgaacgcttatgctcattatctttagtagcagctgaaaacctgacacccgttttagctgcagagatagcagagcgcttgagtgaccccttcagacccaaggtactctgacttgcagggccacaagaccggccttgcgagcgtcgttggctgatgggagtagaagccacagagagtcttcctcttggaggtactggagtcctgacccctcccttattgatgggctgcttcagttcattcatggaattgtgttcttcaaaatgtttctt

SEQ ID NO: 1276 - DNA, 535 bp, Homo sapiens
aagaaactcagccactgagagatgaaacagtttgccccaagtcacacattttcatccaggcactgacagtcttccactggttttattagactttggaaagtggacaagatttgataagaggaaggagcactgggaaggctttttctccatggtttctgtgttagactgtagtgcctggctccgctggtgcgagcctctgaatgtcaaccaggcatacatttgatccagtagttcccaagacttgaacggcttgatgaatttcagcatttataaggaatattcttctgtggatatcactgctaattattcattgtgcattgtatttcagagattttttttcctacattttaaactgaaacccagaatcttttacacattcgtagtttcagagccaaagcaagtcatctagttggccagccccggttcttcacactcgctcagcgtacttacaacctcagtttcaccacgataggctggtacattttattatttgcacttattttggtttaaggtaaaaccacagctgaacaactac

SEQ ID NO: 1277 - DNA, 645 bp, Homo sapiens
cgtcgaccgaaggactctccgtttgatgcagacacaattgtaatggagatgtaaaacttcttagcaatcagatggataaattgtttgcttttcatttattcacatttcatggattgttacacttcctcgatgggagcattcaaaaactaatacaagctgagattatactgtctgacaattcaagtattttagttttagaaaacaatttcctatttaaagtaaaaagcaaacaatttatccatctgattgctaagaagttttacatctccattacaattgtgtctgcatcaaacggagagtccttcgtcctcagtatgattgttactggctgagaacatacggtgacctgtgttctgagtgcctgcttggaaaagacctccctgtcatctgccatactacgggacaaatcagtatctactcaaattcccacttccagaatgagaggactcatcaggggtttaggagtttgcaaagccttcaaaatgtatcgtgcttgaattttgactcttctgaaatagaataactgacaaatgctcaaaaaacaaacttaacttttactgaaaaggctctcagtgaaaacattgttttgaactctactagtaaggtagaatattactttttcttccccccatcgtgccagaattt

SEQ ID NO: 1278 - DNA, 2481 bp, Homo sapiens
  misc_feature (1)...(2481): n = a,t,c or g
cggccagcacaccccggcacctcctctgcggcagctgcgcctcgcaagcgcagtgccgcagcgcacgccggagtggctgtagctgcctcggcgcggctgccgccctgcgcgggctgtgggctgcgggctgcgcccccgctgctggccagctctgcacggctgcgggctctgcggcgcccggtgctctgcaacgctgcggcgggcggcatgggataacgcggccatggtgcgccgagatcgcctccgcaggatgagggagtggtgggtccaggtggggctgctggccgtgcccctgcttgctgcgtacctgcacatcccaccccctcagctctcccctgcccttcactcatggaagtcttcaggcaagtttttcacttacaagggactgcgtatcttctaccaagactctgtgggtgtggttggaagtccagagatagttgtgcttttacacggttttccaacatccagctacgactggtacaagatttggaagggtctgaccttgaggtttcatcgggtgattgcccttgatttcttaggctttggcttcagtgacaaaccgagaccacatcactattccatatttgagcaggccagcatcgtggaagcgcttttgcggcatctggggctccagaaccgcaggatncaaccttctttctcatgactatggagatattgttgctcaggagcttctctacaggtacaagcagaatcgatctggtcggcataccataaagagtctctgtctgtcaaatggaggtatctttcctgagactcaccgtccactccttctccaaaagctactcaaagatggaggtgtgctgtcacccatcctcacacgactgatgaacttctttgtattctctcgaggtctcaccccagtctttgggccgtatactcggccctctgagagtgagctgtgggacatgtgggcagggatccgcaacatggacggaaacttagtcatggacagtctcttacggtacatcaatcgaggcaagaagttcagaaggcgctgggtgggagctcttgcctctgtaactacccccattcattttatctatgggccattggaacctgtaaatccctatccagagtttttggagctgtacaggaaaacgctgccgcggtccacagtgtcgattctggatgaccacattagccactatccacagctagaggatcccatgggcttcttgaatgcatatatgggcttcatcaactccttctgagctggaaagagtagcttccctgtattacctcccctactcccttatgtgttgtgtattccacttaggaagaaatgcccaaaagaggtcctggccatcaaacataattctctcacaaagtccactttactcaaattggtgaacagtgtataggaagaagccagcaggagctctgactaaggttgacataatagtccacctcccattactttgatatctgatcaaatgtatagacttggctttgttttttgtgctattaggaaattctgatgagcattactattcactgatgcagaaagacgttcttttgcataaaagacttttttttaacactttggacttctctgaaatatttagaagtgctaatttctggcccacccccaacaggaattctatagtaaggaggaggagaaggggggctccttccctctcctcgaatgacgttatggggcacatgccttttaaaagttctttaagcaacacagagctgagtcctctttgtcatacctttggatttagtgtttcatcagctgtttttagttataaacattttgttaaaataggatattgggttaaatgatacagtattttaggtatgatttaagactatgatttacctatacattatatatattttataaagatactaaaccagcatacccttactctgccagagtagtgaagctaattaaacacgtttggtttctgaataaattgaactaaatccaaactatttcctaaaatcacaggacattaaggaccaataggcatctgtgccagagatgtactgttattagctgggaagaccaattctaacagcaaataacagtctgagactcctcatacctcagtggttagaagcatgtctctcttgagctacagtagaggggaagggattgttgtgtagtcaagtcaccatgctgaatgtacactgattcctttatgatgactgcttaactccccactgccctgtcccagagaggctttccaatgtagctcagtaattcctgttactttacagacaggaaagttccagaaactttaagaacaaactctgaaagacctatgagcaaatggtgctgaatactttttttttaaagccacatttcattgtcttagtcaaagcaggattattaagtgattatttaaaattcgtttttttaaattagcaacttcaagtataacaactttgaaactggaataagtgtttattttctattaataaaaatgaattgtgacaaaaaaaaaaccg

SEQ ID NO: 1279 - DNA, 770 bp, Homo sapiens
ctctgaaaaatctggataaccagaattatcacagcaccttctcattcccagcgcgtccttctgagctcagaccttgaacatttactgggtttctttttgaggaagagggaaagtgacaaaggacaaaacaatgcaaatcttcatgactgaagacgatcaaagactccctggagcgagaaaacagttactgccagaagcagaatggaagagccaaaaagtacacaaaatggacgccataaattctgaaataaaagtgtatgatgtgttctgagtcactgtagaagtcatgcatttattatcaagatagaaaagagcagagaatgacgtgggacattggtcctcggagaggctgcataggtggtgcggtccccgggggattctggatgctggtcttttgaccgtggcggcagctcggcgcctgcccggatggctccatccagacatttggcaaggctgtcatctgctcttgggtcctttttcaagctgatttcctgcctccccaagaggaggtttgagccccattctgccttggaaataaatcctgacagatgtggcacagcatatttgcagggaatttgcagggcctcgattattgggggaatcagagcccattccacaccgagccccatccacgtgggctgagcaacacccctgtgttcccctgtatctgttttcactgggttgtcttttcttgccagttttctttaaaaggaacccacaaccatttacttgcgttttgccgtttcggaagggtttgttcccaacaattg

SEQ ID NO: 1280 - DNA, 1720 bp, Homo sapiens
  misc_feature (1)...(1720): n = a,t,c or g
cgagtttgaggcagcgctagcggtgaatcggggccctcaccatgagttcctcgcctgttaatgtaaaaaagctgaaggtgtcggagctgaaagaggagctcaagaagcgacgcctttctgacaagggtctcaaggccgagctcatggagcgactccaggctgcgctggacgacgaggaggccggggcgccgccccgccatggagcccgggaacggcagcctagacctgggcggggattccgctgggcgctcgggagcaggcctcgagcaggaggccgcggccggcggcgatgaagaggaggaagaagaggaagaggaggaggaaggaatctccgctctggacggcgaccagatggagctaggagaggagaacggggccgcgggggcggccgactcgggcccgatggaggaggaggaggccgcctcggaagacgagaacggcgacgatcagggtttccaggaaggggaagatgagctcggggacgaagaggaaggcgcgggcgacgagaacgggcacgggggagcagcagcctcaaccgccggcggacgcagcagcaacagccccaacagcagcgcggggccgccaaggaggccgcgggggaagagcagcggccccacctcgctgttcgcggtgacggtggcgccgcccggggcgaggcagggccagcagcaggcgggaggggacggcaaaacagaacagaaaggcggagataaaaagaggggtgttaaaagaccacgagaagatcatggccgtggatattttgagtacattgaagagaacaagtatagcagagccaaatctcctcagccacctgttgaagaagaagatgaacacttcgatgacacagtggtttgtcttgatacttataattgtgatctacattttaaaatatcaagagatcgtctcagtgcttcttcccttacaatggagagttttgcttttctttgggctggaggaagagcatcctatggtgtgtcaaaaggcaaagtgtgttttgagatgaaggttacagagaagatcccagtaaggcatttatatacaaaagatattgacatacatgaagttcgtattggctggtcactaactacaagtggaatgttacttggtgaagaagaattttcttatgggtattctctaaaaggaataaaaacatgcaactgtgagactgaagattatggagaaaagtttgatgaaaatgatgtgattacatgttttgctaactttgaaagtgatgaagtagaactctcgtatgctaagaatggacaagatcttggcgttgccttcaaaatcagtaaggaagttcttgctggacggccactgttcccgcatgttctctgccacaactgtgcagttgaatttaattttggtcagaaggaaaagccatattttccaatacctgaagagtatactttcatccagaacgtccccttagaggatcgagttagaggaccaaaggggcctgaagagaagaaagattgtgaagttgtgatgatgattggcttgccaggagctggaaaaactacctgggttactaaacatgcagcagaaaatccagggaaatataacattcttgggcacaaatactattatggataagatgatggtggcaggttttaagaagcaaatggcagatactggaaaactgaacacactgttgcagagagccccccagtgtcttgggaaatttattgagattgctgcccgaaagaagcaanttttt

SEQ ID NO: 1281 - DNA, 482 bp, Homo sapiens
gggaagagataaggaacagaaacaaacaaataccgataaagaggaaataaaagagaagctccctttctctgacacaggcttgggtgatggaaaaatgaaatctgattcttttgctcccaaaacctgattctgagaagccttttcggggcagtcagtctcccaaaaggtataagctccgagatgactttgagaagaagatggctgacttccacaaggaggagatggatgatcaagataaggacaaagctaagggaagaaaggaatctgagtttgatgatgaacccaaatttatgtctaaagtcataggtgcaaacaaaaaccaggaggaggagaagtcaggcaaatgggagggcctggtatatgcacctccagggaaggaaaagcagagaaaaacagagggagctggaggaggagtctttcccaagagagatccaaaaaaggaagatcgggggcaagagaaagcgaaggttgggccccagggg

SEQ ID NO: 1282 - DNA, 1028 bp, Homo sapiens
ggagcgtgatgtgtcttgtaagatgtaagaagcttgcataacccctgtgaacaaccataggagaatgtgaagtttccaaaggaacgtttaaagttagttccgaagtagtcttcctgatcatgtgtgcaagacttcatgaccaagctcccagatgatccaggtcagtcctgtttgggcttttagaaaccagaggagttggaaattcagggacagtcttgtcaaaattctccatcttgatttgatattcacctttggaacctcgggtcaacagagatgcaaaacagtgatgtaacatgatttcagacggtaggtaggatgtcctcctttggcatatttctccagtgccctcctgcattgctgaaaggaatacaactaattcaaagtgagaaggattttcatgctggagcagagtagccagaggacttgatggtgtaatggagtgatagtacgttagtggaaagatgaagaatggacattcgtcagaactgatgccatcaaggtggaaatccacactggtctggtagagtttgccattttctctttcctgatagagtacagctgagacccggacactggttagagggctaggtcgggtgttggccacttggaagataagattaggtttgccatccatgtgagctactactgctgtgtcagtaaagcgaattgaaaaagctcgattttttggccgggcaatcttcgccacaaaagcacctaaataagaaattattgatttttttttagaatgaagactttaaatatcaatactttttctgaatgacaagtgtatatcaaatatttacacatttcttggtgccatgcctttcagtgagtcaggaattgaactcattgttaatttggtcagtcttatttgcctgaagcatttttcaaagtacatttctgtttaaaaaccatgatttcagaatagataagcaaaatgattttgttacagagaaatgtaaaacttcatcctctagtttcttacaaagtcaaagaattggtcatttcctatattcctgcctgtgctt

SEQ ID NO: 1283 - DNA, 789 bp, Homo sapiens
tatttgtggagggaattgtatttaagtttgtacagatcttggttgtggaatctttaattctggttgttttgtgcaaatgcatggaaagcaaaagaatcatcgttataaataaattgaagcttgaggatgacttcgtaaaagaactaatatttgcaaagaaaggggacgaggacattttctaataagcattagccaggagcagccacccccaagtacattttattcccaggtatatttattttgggactaatagcaatcaaaacagagtaagcggaaggtcttttttgtaagggtaagatgactgtgttcctgcagcctggacactgactgctgcaatgaaattggatctgttgagcatgtcttccaaggacagatttggatagtaagccaggtagaaggccagagctcccacaaagctgtcaccagcacccgtggtatccacagccttgactttctctgtgggaatgtgctttggctcaggttctgtctgtgacagcaccacacatccttcagcccctaaggtaatgattaccacctggcagccccttttcaagagcactaatgcagcctccccagcatctgcagcgctgcccaccgtgaggccagttaaaatctcagcctcactttcattgcagcagaacacatctgagagggtgtagaactggggatccaggtcagcaatggcaggggctggattgaacaaggttttcactccactcctgcgggccattgttagggcttccaaagaagttgctggagttatttcgagctggcagaccatgactttgg

SEQ ID NO: 1284 - DNA, 1016 bp, Homo sapiens
  misc_feature (1)...(1016): n = a,t,c or g
ggaccaccattcccttggctactctctccttcctcccccttttatcctacctccctgccttggtcccgccaacacatgcgagtacacacacacccctctctctgcttttgtcaggcagtggtaggactttggtgtgggtggtgagaaattgtaaacaaaaactgacattcatacccaaagaaccagcctctcaccccagggtccatgtcccaggccccactccagtgctgcccacactcccagctgctggaggagaggggagatgccaaggtgccctgcaggacctccctccgggccacaccctcagctgcctcttcaggaaccggagctcattactgccttccctcccagggaggccccttcagagaggagaggcnncaggagctgcattgtggggggacaggctcaagcaattctgtccccatcaaggggtcagctggagagacccaagaccctatctgttcaccaggggacccaaaatccaaggggatgcttccctctgccctctttcctgcccctccccatcatacctgcacccaccccagccagggctccctgtccagaattcggttctcctcaggacgccaactcccagagctaaggaccaaggagaagaacagcctctccacccccaagccaggcggttgaggaacatattgagaaaggttcagattgcagaaacccagccctgcccctgcctcctgcatccagcccccaacatggtgccaaagcttccagaagccaaaaagcttctgatttttaaggtagtgggcatctctctcctaatgacgaagctgctcagcaactccacctgcccgccgcaggaagggagcagtcccctgctatccctgcagccactcccagcacacccgcacacagccaggcaccaccgcccccaccgttgcacttcttctctctggggcctttggtttggggaccagggtacggagggattccccaaggcctttcagggcttgaggttcagaggccagattcagctttaaggttaacttcca

SEQ ID NO: 1285 - DNA, 1361 bp, Homo sapiens
  misc_feature (1)...(1361): n = a,t,c or g
caggctctgtgttggttggagcgagcatgtgggtctgcagtaccctgtggcgggtgcgaacccccgnccggcagtggcgggggcntgctcccagcttctggctgtcacggacctgccgcctcctcctactccgcatccgccgagcctgcccgggtccgcggcgcttgtctatgggcaccacggggatccagccaaggtcgtcgaactcaagaacctggagctagctgctgtgagaggatcagatgtccgtgtgaagatgctggcggcccctatcaatccatctgacataaatatgatccaaggaaactacggattccttcctgaactgcctgctgttggagggaacgaaggtgttgcacaggtggtagcggtgggcagcaatgtgaccgggctgaagccaggagactgggtgattccagcaaatgctggtttagactcaggaacctggcggaccgaggctgtgttcagcgaggaagcactgatccaagttccgagtgacatccctcttcagagcgctgccaccctgggtgtcaatccctgcacagcctacaggatgttgatggacttcgagcaactgcagccaggggattctgtcatccagaatgcatccaacagcggagtggggcaagcggtcatccagatcgccgcagccctgggcctaagaaccatcaatgtggtccgagacagacctgatatccagaagctgagtgacagactgaagagtctggggggctgagcatgtcatcacagaagaggagctaagaaggcccgaaatgaaaaacttctttaaggacatgccccagccacggcttgctctcaactgtgttggtgggaaaagctccacagagctgctgcggcagttagcgcctggaggaaccatggtaacctatggggggatggccaagcagcccgttcgtagcctctgtgagcctgctcatttttaaggatctcaaacttcgaggtttttgggttttcccagtggaagaaggttcacattccagaccagttcaaggagctgatcctcacactgtgcgatctcatccgccgaggccagctcacagcccctgcctggctcccaggtcccgctgcaggactaccagtctgccttggaagcctccatgaagcccttcatatcttcaaagcagattctcaccatgtgatcatcccaaaagagctggagtgacatgggaggggagcgggatctgaggggctgggtgcaggcccctcagttggggctcccaccttccccagactactgttctcctcactgcctcttcctattaggaggatggtgaagccagccacggttttccccagggccagccttaaggtatctaataaagtctgaactctcccttcca

SEQ ID NO: 1286 - DNA, 1422 bp, Homo sapiens
aaagatggcggcttcctagtgagtcggcggctgatttagaaggaggttcaggctacggtgagccgaaggggaggattctggcttcccctgtccgtgttccatctagccacacaggagccatggaagtggcagagcccagcagccccactgaagaggaggaggaggaagaggagcactcggcagagcctcggccccgcactcgctccaatcctgaaggggctgaggaccgggcagtaggggcacaggccagcgtgggcagccgcagcgaagggtgagggtgaggccgccagtgctgatgatgggagcctcaacacttcaggagccggccctaagtcctgggcaggtgcccccgccagcccctgaggtccaaattcggacaccaagggtcaacttgtccagagaaagtgattatctgcctggacctgtcagaggaaatgtcactgccaaagctggagtcgttcaacggctccaaaaccaacgccctcaatgtctcccagaagatgattgagatgttcgtgcggacaaaacacaagatcgacaaaagccacgagtttgcactggtggtggtgaacgatgacacggcctggctgtctggcctgacctccgacccccgcgagctctgtagctgcctctatgatctggagacggcctcctgttccaccttcaatctggaaggacttttcagcctcatccagcagaaaactgagcttccggtcacagagaacgtgcagacgattcccccgccatatgtggtccgcaccatccttgtctacagccgtccaccttgccagccccagttctccttgacgggagcccatggaaggaaaatgttccagtgcccatatttcttctttgacgttgtttacatccacaatggcactgaggagaaggaggaggagatgagttggaaggatatgtttgccttcatgggcagcctggataccaagggtaccagctacaagtatgaggtggcaactggctgggccagccctggagttgcacaactgcatggcgaaactgttggcccaccccctgcaagcggccttgccagagccatgcttcctacagcctgctggaggaggaggatgaagccattgaggttgaggccactgtctgaaccatccctgtacatctgcaccttcttgtgcaaggaagtccttggcctaaagccttggttctcaaactgggttccttgggacctccggggtgggggggttccaggaggcacgtagggtaccttgcagggtcctaggagggaaacccaggattccaggagggatcccaggaactgtgggcacccattttctgtgtctcccagcccatttccactcctagtttgtcatggataatttttgttcttccctgtgtgatttttgccatcaaaataaaaatttgagactcgttaaaaaaaaaaaaaaaaaa

SEQ ID NO: 1287 - DNA, 1049 bp, Homo sapiens
  misc_feature (1)...(1049): n = a,t,c or g
cggacgcgtgggcaaacttcaaattctacatgtgcgacttttcccccnccctgaagggtgtttagtagtccaccgttttcagaattgttttgttactatactttaacattttacatttcctgtatgtattattttgtgagagcaaggtgatcatgctgcttaaggtcccaggtacaacctatttgtaccttttgagacaatatttgtgttacttttgcaggttacggttccacatgtaattgctatattttgttttgtttttccttactaggcaaagttaaaatgttccatgctttgaggagtgacccatttcactactttgttttcttatcactaaaggcaaaaatcaaagcacagttgtccattaacacttataagttaattatgggtttatgagtctgtaatgttatatgctgcaaacatttactatgtaacgtgaagtagccaataatatctcaatagtagtaacagtatctttagcgacctttggaatagttaagcacaggtcattgtggaccatgaattcaggcctctgtactaaaatctatttcagggaatgttctgtctagtgatttgctcaccatttgatatataatgaattataggacaagtataagctgatctgctatagctgtccatcagagagaatacacgtggctataacatctataacaaaacgacgattcctctacaagaggctgtttctcactgctaacgttggtgtttctggcgtgggaagaaatgcacaggcgtgcatggcatgcacgttcagacagctgcattgtaagagttctgtcatgcagtctgaaaagggaagaaacaggatggctttctgtagccacacctgtgaggcgtgatgattgttgtattattagattactgatttttcttttctgaaaatacatttgagttttaatcacatctgtggaagctgtaacttttaaggtagtcaatttcatgtcttgttcaacgatgtaagcagaaactgaattgccctaattttgccaactggccattattgggattattgtttaaatttttggtaaagg

SEQ ID NO: 1288 - DNA, 2770 bp, Homo sapiens
cgcaaccggaactagccttctgggggccggcttggtttatctctggcggccttgtagtcgtctccgagactccccacccctccttccctcttgaccccctaggtttgattgccctttccccgaaacaactatcatgagcgcgaggctgccggtgttgtctccacctcggtggccgcggctgttgctgctgtcgctgctcctgctgggggcggttcctggcccgcgccggagcggcgctttctacctgcccggcctggcgcccgtcaacttctgcgacgaagaaaaaaagagcgacgagtgcaaggccgaaatagaactatttgtgaacagacttgattcagtggaatcagttcttccttatgaatacacagcgtttgatttttgccaagcatcagaaggaaagcgcccatctgaaaatcttggtcaggtactattcggggaaagaattgaaccttcaccatataagtttacgtttaataagaaggagacctgtaagcttgtttgtacaaaaacataccatacagagaaagctgaagacaaacaaaagttagaattcttgaaaaaaagcatgttattgaattatcaacatcactggattgtggataatatgcctgtaacgtggtgttacgatgttgaagatggtcagaggttctgtaatcctggatttcctattggctgttacattacagataaaggccatgcaaaagatgcctgtgttattagttcagatttccatgaaagagatacattttacatcttcaaccatgttgacatcaaaatatactatcatgttgttgaaactgggtccatgggagcaagattagtggctgctaaacttgaaccgaaaagcttcaaacatacccatatagataaaccagactgctcagggccccccatggacataagtaacaaggcttctggggagataaaaattgcctatacttactctgttagcttcgaggaagatgataagatcagatgggcgtctagatgggactatattctggagtctatgcctcatacccacattcagtggtttagcattatgaattccctggtcattgttctcttcttatctggaatggtagctatgattatgttacggacactgcacaaagatattgctagatataatcagatggactctacggaagatgcccaggaagaatttggctggaaacttgttcatggtgatatattccgtcctccaagaaaagggatgctgctatcagtctttctaggatccgggacacagattttaattatgacctttgtgactctatttttcgcttgcctgggatttttgtcacctgccaaccgaggagcgctgatgacgtgtgctgtggtcctgtgggtgctgctgggcacccctgcaggctatgttgctgccagattctataagtcctttggaggtgagaagtggaaaacaaatgttttattaacatcatttctttgtcctgggattgtatttgctgacttctttataatgaatctgatcctctggggagaaggatcttcagcagctattccttttgggacactggttgccatattggccctttggttctgcatatctgtgcctctgacgtttattggtgcatactttggttttaagaagaatgccattgaacacccagttcgaaccaatcagattccacgtcagattcctgaacagtcgttctacacgaagcccttgcctggtattatcatgggagggattttgccctttggctgcatctttatacaacttttcttcattctgaatagtatttggtcacaccagatgtattacatgtttggcttcctatttctggtgtttatcattttggttattacctgttctgaagcaactatacttctttgctatttccacctatgtggcagaggattatcattggcaatggcctttcattccttacgagtggctttactgcagtttatttcttaatctatgcagtacactacttcttttcaaaactgcagatcacgggaacagcaagcacaattctgtactttggttataccatgataatggttttgatcttctttctttttacaggaacaattggcttctttgcatgcttttggtttgttaccaaaatatacagtgtggtgaaggttgactgaagaagtccagtgtgtccagttaaaacagaaataaattaaactcttcatcaacaaagacctgtttttgtgactgccttgagttttatcagaattattggcctagtaatccttcagaaacaccgtaattctaaataaacctcttcccatacacctttcccccataagatgtgtcttcaacactataaagcatttgtattgtgatttgattaagtatatatttggttgttctcaatgaagagcaaatttaaatattatgtgcatttgtaaatacagtagctataaaattttccatacttctaatggcagaatagaggaggccatattaaataatactgatgaaaggcaggacactgcattgtaaataggattttctaggctcggtaggcagaaagaattatttttctttgaaggaaataactttttatcatggtaattttgaaggatgattcctatgatgtgttcaccaggggaatgtggcttttaaagaaaatcttctattggttgtaactgttcatatcttcttacttttctgtgttgacttcattattcccatggtattggccttttaaactatgtgcctctgagtctttcaatttataaatttgttatcttaataaatattataaaaatgtcaaaaaaaaaa

SEQ ID NO: 1289 - DNA, 843 bp, Homo sapiens
ttagaaacaactagtgtattgatttggggaggagagaaggggtgcagatgggaaatggggaggcaagggctctttagcgtttgccaaaaccactgccacacccctccaccccctcttgccttcctcctccacggtgggtgccagcaggctctcccctttccagtgacctccctctccctcctcccagcaccccacttggcttcaacctccagtgactgcacagagcccacccaggggtctaaagctagggaaggcagctcaaactcacctttcttctcccttcttccacctcccacctcattcccatctcttgtctaaataaaatacagaaaagcaagcgcagctggtacctgggagaatggactcaccccggggctgggggcaggggtggggactgggggcggggcaggcagaggaacctcagccaggtgtagtggaatcacagcaggccaagcccaggggcccggctcaagctgtcctctctctctctctctccctctcggaggctggcctggcagtgagcctgccgtccagaggaggctggcggagaagcctctatgcctgcctctcaggcaccatgtcacagggtccccggggtgggggcagcagccagggcagaaaagcagaagctagcctctataaaagcacccctttcccttggcttctagaggaagccctctttggttttaaggcagatgtggagtttcctggaagcagggaaaaggaagggaggagaaattaggattgagatagatgagatagatgctttttttttttttttgcttgtgtttttccttcagtataaaaccactgtagaaaataacttctcttagaaaaaaaaaa

SEQ ID NO: 1290 - DNA, 342 bp, Homo sapiens
gcttaagaaaatattggaaaggcatcagggggctaagctagaatataattggccttagtatggaaagtacaagcagcacaggccaggaaacctccacacatgtgagggttctcaggcctcttccctttagtgacatttctttaaagtttccattattggggactgtctctagtttctagtgtttgtatgctaggttccagtaatcaaagatgccctttatgaaatttaagtcagatttttcgagaaaaaatttggatgggccatcaggtcaccatgggacttcccttagcctcatgcattctctgcgatggtttactttggggcctatgaatagggaagact

SEQ ID NO: 1291 - DNA, 739 bp, Homo sapiens
  misc_feature (1)...(739): n = a,t,c or g
ttataccaggcaaattgcttagtagcaaagggaccaaactgaaaaggtgacnatctctaacttctaaaagcagacaccaatcggatgctcattagaggttaatgaagatgccattcttggtggcctctgcacccaaattgcatctggaaagaactagggtctcattcagaatgtccaaaaggaaattcttaagagcttaaattcagatttgtgtctcattaatgcagtgaacaattcaaaaccacacagattccttggcaggaaggataatggaataacagtgttgatgagacctttttagcttcaaggtttcggagtctaaacaaatggatgattcatttggaatgaaactcacaatgcaagtagaaggacctctccaaatcaggccagttgggttatcctggcttggaatctggtgtgaaaccataggtcttaacactctggagcagcacattgctgtggatatgtccaggagaccttagatatggcttaaaggctttcaagatgaggacagaaattgcttacaattgctcagtttctcaacagaaagactcataaggagtgccagcatggggtacatggagtgaagctgggtgggaagcatcatctgccagtccctgcctantgcaggacttttctctgatgtttcataccatgggattttggatatcaatgtatttggntcttgaaatagnctaatagctgtcacacattggtaggaatattatcccatgcatcc

SEQ ID NO: 1292 - DNA, 682 bp, Homo sapiens
  misc_feature (1)...(682): n = a,t,c or g
tgttaggtcagaaggagtactggtgcgtgggggccttaccccagggttgagtattttatctgtaaaatgttatctgccctttggctgcattggaatttcagagaaggctgcagaggcctgggttacacagcctgagtcacaacgtggggaaggaatctctgccacgggaaaggtgggcggaagcagctggcagcctgggggcttgctttcaggctcctccctctaagggggcgccatgggaacaggctccggagggagccggcgtctgaaaggcccccgggacctgctgcagtgccagaggggcctctggagcaggcctggcttttaaatggggggctgaattccagctcacacacacctcaagtccaaccttactttcttcagccagaatacatttcttgtaaaacctgggcttgttgcttggcttttaaagatggtgtatgtttgtaaaaatattcttctgggctcaaaaactagcttgagggggcagatgccagggtgtnccagcttcacagcccnggggagatcccagacccttngtgggcaggtcccagagcctaggtngtagggagttgatcttttttttctgcccttaacccttcagtagttggggttgcgaagtagttagacaggatgcccatttaagtttgaattttcagataggaaanttatttttagatta

SEQ ID NO: 1293 - DNA, 745 bp, Homo sapiens
  misc_feature (1)...(745): n = a,t,c or g
ggttgacacatatacatacttgaatgaataacttagggggttaggagacacttaaataagaattatttctgttattgaaacacagttccagttacagggtctttgaaatcatgagagagttgtacagttatatttctgtatagtgtgaagagctatcttattttttgcagattacttactttgttaatatacctccccctcctttaaccaattgggtccattattattgtaagcgtattacaaagaatactcctttggaagtcagaagaatgatacctaatctttaatttcttatcaggaactaggttttcattgtatgatggacacgatgtaacccctaaagacngaaaaagaagtgaaaaatagtcctcattctcatggatttatagctgtagtagaagaaaagatagattaaaaagggcataagttcctctaatgtttattgcaatgtgaagctagatagaaaaatagaagaaaacagagagaatcatgatcatggcaataaagagagagtagctaactcagctggaattggcctggagaaaacgatggtgagaactcccggagaacgttagaactgagctgaagcttgcagaatgcgataggagtctggcaggcagatgaggcagggaggacattaaaggcaggaggaatagcacatgatagtgggctgcaggctgggctgtagtttgaggggctgtaattcaatacaggcggatgcaggggaaaagcaggcggtgaagtg

SEQ ID NO: 1294 - DNA, 351 bp, Homo sapiens
cagcaattcatgctaaaaaagtgtcctgccctacttcaagaaatggttaatgtaatctccccttctgcagctccctcatattgaagaggacaatcttagacgggtttctaatcataagaagtataaaattaaaactatccaggatttggtgagtttaaaagaatcagatcgtcacactctactgcacttccttgaagatgaaaaatatgaagaggttatggctgtccttgggagttttccatatgtgaccatggatataaaatcacaggtgttagatgatgaagatagcaacaacatcacagtaggatccttagttacagtgttggttaagttgacaaggcaaacaatggc

SEQ ID NO: 1295 - DNA, 742 bp, Homo sapiens
  misc_feature (1)...(742): n = a,t,c or g
gaacaaaacccggaaaatctatgatttcctcatcagagaaggatacatcactaaaggctaaggctccaagagcttgggatcagaagtcagaagtttggaatgtggtgggtcaaaggacaatatgggtgggcattctggagagttgtttttcagctgaattctcatggtgaaaacaggggaaaggacaaaggaaaccttaagttgtattgtctactttcttctccatcctgctttaaaacactcctgttgttggtattatgctgcagagttgtgtgctacataagctattattaaatgtgagtgggcattcattcctaacacctcttgtaactaaaagaaccatagtacctcacatcacagtgctggtagaaatggaactaaaccacagtctgtaatcccaggagtccagctcagatccttatattgcgaggtaagtttgctgattatctgtcttgccttcaaacactgcagacagatttaaaataaagagaaaggttttagagcataagaaagctctcgttgaaggattttttaagctgacannnnnnnnnnnnnnnnnnnnnnnnnnnnnnnnnnnnnnnnnnnnnnnnnnnnnnnnnnnnnnnnnnnnnnnnnnnnnnnnnnnnnnnnnnnnnnnnnnnnnnnnnnnnnnnnnnnnnnnnnnnnnnnnnnnnnnnnnnnnnnnnnnnnnnnnnnnnnnnnnnnnnnnnnnnnnnnnnagtgagactctgttttcaaaatg

SEQ ID NO: 1296 - DNA, 657 bp, Homo sapiens
ttttttttttcagaaagatttagtatttcattttattcctctacctacaaaaccgattcaaattgtcgctggattagtaggtttgaaacttttctgtgtattgagcacaatcttagtactttattcttgaaatataaataaatttttgattcaaagtaatgcactctaatttttaaaagaatctacttggtcaggagtgcattgctttgctggtgtctgtgatcagctggagatggtggtgaacagcctgtttgcatttcttggaagaagatcttttattctgaggctcaacccaggtctctgccttccttagagactgaggcccatccttcagttttcctgattctggagaatggcccgcagcctcccactcaggtcttggctgtgctcatctagtccatcccagggctggaagggacatccctggtggtccacaaaggtgtcccagcagtgcttaaattcactgtatgtcattattgaaattttggccccagcctcggccagggtgcgcagcccctcctgacatcttccttgatcatcatagatgcgggcagtgaagatgcacaggctcacgtgtgtgttttttgaaatgaatttagacacttcctgggcacagctgaagcaggggctccaggaggtgaagcaggtaaccctgta

SEQ ID NO: 1297 - DNA, 1283 bp, Homo sapiens
ttttttgtaatttaaaaaccatttaatacacaaagtgaaaaactattagaatataaaagcatttcacattttttaagacaaataatatcttctaaattacttagcagatgatagaggtccacagtcctttctctgaaacccttggggcaagttgtttcagaattatgaaattttagattttagaaaagtagttttgtgcatataccatactacattaaccagccctcaccacagtctgtggcagcagccctccctctcatcatcaagcagcaaaataaaggaatattcacactaaatgggataaaaagattcaaggtcagttcagattagattgcaagcaaatgaattttgtcacccaagcttatggaaaccttgttttcagagctttttggattttggaattacaattacagataaaggagtgcagacctttataaatttgtatgacaagacatgaaagattgtttaaacaaatgactcatttttacaaatgaaaaaacatgtaattttcaaatacattataaattaacaggcatcttctctttgatattattaaatgtacatcttaaatacatatacacacaacaacatgatttatgaaagccaactaatattagaagcacagatacacaatcccttcgatgagaaggggatactgttaaattttcagtggaatttaaaatgattacaccaactccttatgatgccaggaagagaacctgttcagtgcaacacaaggaggtagaatttattcttcaagaaatagaacttgtgagcagcctttttagaaaaaaacacaggtagacttttacttaaaatgcctattacttgaggttttcttctctgtatacaaaactacatttggtcttacgcccaaaagttaaaagttgacactaatacatagaaggtatttttaatcagttaaataagtaatgttttaccaagactgaaggcaaatgtgtcgtgatgatgcttctaaatagctgtggtattaaaacaaatattcaaacaagtacattgactttttctaaattcctgtctgtttagaggcttgaattactcaaaactgttatacttgtaaaatcatgttcttctgatcatagtagaaatgtagtttctgttcatagccatttcttccattgactgatgtctgaagaatggtttcatgggggaaaaacacatttccaacatgtatagcaacaacttccataggtttggggacagtgaacaagtgacaactcattctgttaaccaactccaatcaagattcatcatactattgc

SEQ ID NO: 1298 - DNA, 1758 bp, Homo sapiens
tcagctctaggctgttctgtagcttatctgcccctcccccactttcaagacagatgagcaggagcttgggtctctctcggcccctgtctgttcccagcccctgcagattctgagcaaaggccctgggtaagaagggtgggagtggggcctttgccagcagagccagggcagggcgagctgcaggaatcacccctctgcccctgcagctggaatttgccacagaggccccacctgaagggtgtatgtgctggaggggtggcccagagccatactgcgtccaccctgagctcggggacaggtgacagtggctgctctgggaaggggcttttagatgtaacctacaattcagttaggctagagacagatgctggtggaggaagggctgggccaccagggatcacagaccacaggaagatgggaggtggaagcagaggccctgcccccaccccttcctgtctcactgcttctgtcttgtccccacccatgcgtccttcgtgcctgagaccagggtggccacacaggcagggcctggcctccagtctcatcctcccattgcccagtgagccctgctcttctctccccagccccctcccaccgctgcctcgtagagtgacctcggacagagcccccctaggcaatacagggaggctcccggggcctggacaggcggggctcggaggctacccgctgtggccggtgccagctgcccttgcagggtgggtgagctgttcaggccgagagccttatttacctagtgcaaaaactgtaaaagtgtacagactcttcacagatttttatcttaattggcaagtctgccgattttgtaaatgttcttggtgtttgactgtaatgtaactatctcacctaatggttgtacatatcctttggtcctgggtgctgccgagggctggccgggactgctgctctcccaagggttttattttatttctgaatctagagaacagtattggggcaggagggaaaaggcttggtgtctgcggggggtgtcttccctgcctgtggcatttgtgtgttggctttgcagctgctgtctgagtagtggccactggggtgccttcactgggccagtcaacggggggctcctgcccaggccacagagaacctgagttcccgggagctgggccctgcctgcagccagggctggggttgccagaggccctggagggaaggacagtccctgctggggaagaacagccccggggcccccctggtcaccgagactcagcctctgctggagaaagccacgccctccctgctagcacagaggcctgactgacttttttgcttaacttccatgttctgggtgatggaaactgccaaacctcctgtcagtgaggactctttccgactgcccagaaagtgggggtggaggaccgaggctacagctccacacgccccgggtcccccagagcatctgcccccaggtacacctccccctgcgccccgcacgactgcggggagcccagactgtccagggaaacagcctctctcttttctacacactcagccacaaagccccccagctcccacaccgcgtcccagctcccctcttttgtaagtatgtgaaaaggaaaaaatgcaaacgttggagtttgggctggagctcctccctccagctgcgacttttaactatgtaataatgtacagaggaagctgttggtgttctaagactctgtgtggctgtgcaatttctgtacatttgcaattagaaatattaaagatttatttagctatttt

SEQ ID NO: 1299 - DNA, 798 bp, Homo sapiens
ggcggccgcggctgtggtggttcccgcagagtggataaagaactgggagaaatcagggagaggcgaatttttgcatttatgtcggatcctcagtgaaaataaaagccatgatagttcaacatacagagatttccagcaagctctctatgagttgtcatatcatgtaattaaaggaaatctaaagcatgaacaggcatctaatgttcttagtgacattagtgaatttcgtgaggatatgccctccattcttgctgatgtattctgcatattagacattgagacaaattgtttagaagaaaaaagcaagagagactattttacacagttggtattagcatgtttgtatttagtttcagacacagttctaaaggaacgcctggatccagaaacactggaatcattagggcttatcaaacaatcacagcaattcaatcaaaagtcagttaaaatcaagacaaaactcttttataagcagcaaaaattcaatttgttaagagaggagaatgaaggttatgccaagctgatggctgaatgggggcaagatttatctggaagtattactagtgatttaatcttagaaaatatcaaatctttaataggatgctttaatctggatcccaatagagttttggatgtcattttagaagtgtttgaatgcaggccagaacacgatgacttctttatatctttgttagaatcttacatgagtatgtgtgaaccgcaaacactgtgtcatattcttgggttcaaattcaagttttaccaggaaccaaatggcgagacaccatcatctttata

SEQ ID NO: 1300 - DNA, 2978 bp, Homo sapiens
tcacaaagtctccccaatgctctacaagcaactgcgtcaggcctgtgaagaccacgtccaggcacagatccttccgtttagagaagactcactagatagtgttttatttttaaagaagattaacacgtgctggcaggaccactgcagacaaatgatcatgatcagaagcatcttcctgttcttggaccgcacctatgtgctgcagaactccacgctgccctccatctgggatatgggattagaactgtttagaacccatattattagtgataaaatggttcagagtaaaaccattgatgggaatcctactgctgatccgagcgcgagaggagcggccgaggccgtggaaccggagcctgttggcggagcctcctgggcatgctgtctgacctgcaggtgtataaagattcatttgaactgaaatttttggaagagactaattgcttatatgctgccgagcaaaaggttaatgcaggaaagagaggttccagaatatcttaaccatgtaagtaaacgcttagaggaagagggagacagagtaatcacttacttggaccacagcacacagaaaccactgattgcttgtgtggagaaacagctattaggagaacatttaacagcaattctgcagaaagggctcgaccacttactggatgagaacagagtgccggacctcgcacagatgtaccagctgttcagccgggtgaggggctgtgcagcatggcgctgctgcagcactggagcgagtacatcaagacttttggaacagcgatcgtaatcaatcctgagaaagacaaagacatggtccaagacctgttggacttcaaggacaaggtggaccacgtgatcgaggtctgcttccagaagaatgagcggttcgtcaacctgatgaaggagtcctttgagacgttcatcaacaagagacccaacaagcctgcagaacctgatcgcaaagcatgtggattcaaagttaagagcaggcaacaaagaagccacagacgaggagctggagcggacgttggacaagatcatgatcctgttcaggtttatccacggtaaagatgtctttgaagcattttataaaaaagatttggcaaaaagactccttgttgggaaaagtgcctcagtcgatgctgaaaagtctatgttgtcaaagctcaagcatgagtgcggtgcagccttcaccagcaagctggaaggcatgttcaaggacatggagctttcgaaggacatcatggttcatttcaagcagcatatgcagaatcagagtgactcaggccctatagacctcacagtgaacatactcacaatgggctactggccaacatacacgcccatggaagtgcacttaaccccagaaatgattaaacttcaggaagtatttaaggcattttatcttggaaagcacagtggtcgaaaacttcagtggcaaactactttgggacatgctgttttaaaagcggagtttaaagaagggaagaaggaattccagggtgtccctcttccagacactggtgctcctcatgttcaacgagggagatgggcttcagctttgaggagataaaaatggccacggggatagaggatagtgaattgcgcagaacgctgcagtccctggcctgtggcaaagcacgtgtgctgattaaaagtcccaaaggaaaggaagtggaagatggagacaagttcatttttaatggagagttcaagcacaagttgtttagaataaagatcaatcaaattcagatgaaggaaactgttgaggaacaggttagcaccactgagagagtgtttcaggatagacaatatcagattgatgctgctatcgtcagaataatgaagatgagaaagactcttggtcataatcttctagtttctgaattatataatcagctgaaatttccagtaaagcctggagatttgaaaaagagaattgaatctctgatagacagagactatatggagagagacaaagacaatccgaatcagtaccactacgtggcctgacgcatctgcagacggttccccttcatgaaacactagaatgtaccctcagagcaggaagcacacctgtgccatttctgggactctgattgatccagctgtggacattggaaggcgaaggaagggaggtggctcctgggtcatctttcacaaggctcaagacttcaacctgcagatgtatctttttccctccagtttttcctctagttcttttaggcatttaaattgtttctgttactctgtgcaaaataactttgagattggacaagaagatgttactaaagagaagttcctttaaaaggtcttgttcttgtgtcaaaaagctgcaagtttggtttgttctcgtgtgtgatcatgagtgcacaatgaagaagaccctagatgctgcattttttagctctgaagattccttaggtatccctgaagacagctcgctcagatgatcagcatttagagtgaaaacaagggcccttcatgggtgaacattagaaagagccagggttcaaagctggcgaatggatgacgcaccctagccactggcccctctctgtttcatgtatttccaaaagttgtaaactttgatggctgatttttcgtaagtcaggtttctaagtgagctccctgaggtgccaaggccatggtgtccgccctgctgcgtctgttcgtcagctgagttccttgtgaatctctgttttagggtttggggctagtgtgtttgtgtttccattctaagattgagtctggcagtccctgtttttttgcattggggtaactgctctttgattttttttaattgcagtatttgtgtgattgcaataataaagtttggtttggtttttacagtcatgcgcagggacgatccttgttctctgctgtaaactgtaaaaagtttatggagacttaaagtcttgatgttgtgaagcagaggttattttgtggaaagattaaaaggattttgttggtaaaaaaaaaaaaaa

SEQ ID NO: 1301 - DNA, 2049 bp, Homo sapiens
  misc_feature (1)...(2049): n = a,t,c or g
aaacattttttcagaggttaaaaattaaatttcaaaagaatacctggagtggaaaagagttctcagcagagacaaagaccccgaacacctccaacatgaagcttcttcatgttttcctgttatttctgtgcttccacttaaggttttgcaaggtcacttatacatctcaagaggatctggtggagaaaaagtgcttagcaaaaaaatatactcacctctcctgcgataaagtcttctgccagccatggcagagatgcattgagggcacctgtgtttgtaaactaccgtatcagtgcccaaagaatgggcactgcagtgtgtgcaactaacaggagaagcttcccaacatactgtcaacaaaagagtttggaatgtcttcatccagggacaaagtttttaaataacggaacatgcacagccgaaggaaagtttagtgtttccttgaagcatggaaatacagattcagagggaatagttgaagtaaaacttgtggaccaagataagacaatgttcatatgcaaaagcagctggagcatgagggaagccaacgtggcctgccttgaccttgggtttcaacaaggtgctgatactcaaagaaggtttaagttgtctgatctctctataaattccactgaatgtctacatgtgcattgccgaggattagagaccagtttggctgaatgtacttttactaagagaagaactatgggttaccaggatttcgctgatgtggtttgttatacacagaaagcagattctccaatggatgacttctttcagtgtgtgaatgggaaatacatttctcagatgaaagcctgtgatggtatcaatgattgtggagaccaaagtgatgaactgtgttgtaaagcatgccaaggcaaaggcttccattgcaaatcgggtgtttgcattccaagccagtatcaatgcaatggtgaggtggactgcattacaggggaagatgaagttggctgtgcaggctttgcatctgtggctcaagaagaaacagaaattttgactgctgacatggatgcagaaagaagacggataaaatcattattacctaaactatcttgtggagttaaaaacagaatgcacattcgaaggaaacgaattgtgggaggaaagcgagcacaactgggagacctcccatggcaggtggcaattaaggatgccagtggaatcacctgtgggggaatttatattggtggctgttggattctgactgctgcacattgtctcagagccagtaaaactcatcgttaccaaatatggacaacagtagtagactggatacaccccgaccttaaacgtatagtaattgaatacgtggatagaattattttccatgaaaactacaatgcaggcacttaccaaaatgacatcgctttgattgaaatgaaaaaagacggaaacaaaaaagattgtgagctgcctcgttccatccctgcctgtgtcccctggtctccttacctattccaacctaatgatacatgcatcgtttctggctggggacgagaaaaagataacgaaagagtcttttcacttcagtggggtgaagttaaactaataaggcaactgctctaagttttacggaaatcgtttctatgaaaaagaaatggaatgtgcaggtacatatgatggttccatcgatgccctgtaaagggggaccncgggaggccccttagtctgtatggatgccaacaatgtgacttatgtctggggtgttgtgagttggggggaaaactgtggaaaaccagagttcccaggtttttacaccaaagtggccaattattttgactggattagctaccatgtaggaaggccttttatttctcagtacaatgtataaaattgtgatctctctcttcattctattctttttctctcaagagttccatttaatggaaataaaacggtataattaataattctctaggggggaaaaatgaagcaaatctcattggatatttttaaaggtctccacagagtttatgccatattggaattttgttgtataattctcaaataaatattttggtgaagcat

SEQ ID NO: 1302 - DNA, 59 bp, Homo sapiens
gagaaattgagccaggatttaatcccagcatgccggtttacaaagcccagctttataac

SEQ ID NO: 1303 - DNA, 1226 bp, Homo sapiens
  misc_feature (1)...(1226): n = a,t,c or g
tttttttttttttttaaaacaaacatttttaattaaattttcaaacatgaaagtataaacgttaatatttgttgaaaaatatatacggcatttcccccgtgtgaacacaatggcttccggtaacactacccacttacaatgagatcttttaggcacttgggtgtagaatgtgcgagagggaaatgcaactttactttcctgctacctataggggcaaccacaattagatctcatgaaatattgttttcaaaactgttagcattaacaccgacttaaaacatacggtgaccggacatataacctttaaagtcccagtatatttaaaacaggagaaatctggtaagttgttaggattctaaattccttttagtctgttcactgagatattaaatttcagtagacagaacccaaaaagagatttcatttctttctaatcactttggcttctttcttttttgttaagtaggtaaaaaccttcttggtgggcacctaagcaggatgcagccaatagttcatgaaccagctgcgcacgtgaggcttaaaatctaagatgctgctgaagtggctgcgggaggagcggctgcgacttacttttaatttcaaatcagctgcagatgtttgggagccctctcgatgaacagaacaaatcacataacatgcagaatccactcagaggctgttattccagggaaagagcgggcaggtgtcctgaggagtacattcttgctgtcacagtctcactgctgggcacagaggtgccttgtttatgagatttaaaggccacaaactctggctcaggtggggacaagggtgtnccgtggctgaaaccagcgtggtcactgtgtggctggcacggcctgcacatgctgcaggagctgctcgcagtaggtggccgaacggtgcttgtggatgacggcctccgtctccctcaccaggagatctgggaacagcccgctgcccctctttgaggacctctaaaattgcatcctggatggccctctctggatcgtcaaggtgaaccagcaactctcggtacaggtactggacactgctctgatagtaggattttgcgttggcacccttgacacactgcagccaggtgaccaaggtggaggcggctgccatcctcacatcgttggacacgtcatctaggcgttttaagagttcaggataaatcctgatgagtttctctggatccgtcatgccgcccgaggtttttaagaacg

SEQ ID NO: 1304 - DNA, 245 bp, Homo sapiens
atttatgacaatgactcaacatataaggaatatcactgaagaaatagatactaaagaaccaaattgaaattctagtcaaattctctacccctgagccatacacccagtcatccaaactgaaattctagaggagaaaagtccaataagcaaaatgcaaaattcacaagattaattcaacagaagatttgagaacacagacgaatcaaagaacttaagatatatcaatggaaattatccaatttaaa

SEQ ID NO: 1305 - DNA, 328 bp, Homo sapiens
  misc_feature (1)...(328): n = a,t,c or g
cggctgtcgtcggagaggcatctgggttcggactggggccgccatgggggaaagtgaatgtggccaagttgcgttacatgagccgagatgacttcagggtcttgaccgcggttgaaatgggcatgaagaaccatgaaattgttcccggcagtttgattgcttctatagccagccttaaacatggtggctgtaataaagttttaagagaattagtgaaacataaactcatagcttgggagcgtaccaaaactgtccagggctatcggttgacatatgcaggatatgattacctagctttggaaacnctttcttntaagncangganttg

SEQ ID NO: 1306 - DNA, 748 bp, Homo sapiens
tttgtctgtattttcttaaggtaaatgtgttttttttttttcttttttcttttctacaaactatctcccgccctccccagccccacccacacacccattatccagtatactgaatgggagttgtaactctttaggaagacagctaattgatttacagtactctaaaaccaaccctgaaaactgataatctcattcacttactataacttcagtgctgtagttgacagaaaagaaaaagttaccttaaggctcaagggaaagtaacttattaaattgtgaatgcagcattatttactctcccatccattggaaactagcaaaatgcattctggatcaataatacaaaccttctaacattagcaaagatttctactcttcttacacagagttagaacaatattcataagcaattatctaagggagcctgagaaactatgatccacatcacacaaagatttcatgtatttcatgatcaaaaagtgctttatctttgagaaatgtcagggttacaatggaaatatacaatgtaaagtcacttgatattttttcaagtgaagtacaaagtagaaaaggagcaaaaagatggaggctctgctctctgaacaggccttatgcatgtgacttttagggtgtacgaaattaaagttgttttaagaattaaaaatagtgggactttacaccactatattctaaaacctgagattggacatcaaaacagtcaactttgttattcatcagagcaattctg

SEQ ID NO: 1307 - DNA, 377 bp, Homo sapiens
  misc_feature (1)...(377): n = a,t,c or g
ggaagctccatactgttctctccagagtggctgtactannnnnnnnnnnnnnnnnnnnnnnnnnnnnnnnnnnnnnnnnnnnnnnnnnnnnnnnnnnnnnnnnnnnnnnnnnnnnnnnnnnnnnnnnnnnnnnnnnnnnnnnnnnnnnnnnnnnnnnnnnnnnnnnnnnnnnnnnnnnnnnnnnnnnnnnnnnnnnnnnnnnnnnnnnnnnnnnnnnnnnnnnnnnnnnnnnnnnnnnnnnnnnnnnnnnnnnnnnnnnnnnnnnnnnnnnnnnnnnnnnnnnnnntgagtggctctttgacgttatatttgtgaattaggaaaaccactgaatttcttatttatttgataatatttactgataaaatatcactgga

SEQ ID NO: 1308 - DNA, 2167 bp, Homo sapiens
tttcacctcaagaatgccatcatgtttgggaagaagcggcacacggatgtgcagttctacacagaagtgggagagataaccacggacttggggaaacatcagcatatgcatgaccgagatgacctctatgctgagcagatggaacgagaaatgaggcacaaactgaaaacagcctttaaaaatttcattgagaaagtagaggctctaactaaggaggaactggaatttgaagtgccttttagggacttgggatttaacggagctccctataggagtacctgcctccttcagcccactagtagtgcgctggtaaatgctacggaatggccaccttttgtggtgacattggatgaggtagagctgatccactttgagcgggtccagtttcacctgaagaactttgatatggtaatcgtctacaaggactacagcaagaaagtgaccatgatcaacgccattcctgtagcctctcttgaccccatcaaggaatggttgaattcctgcgacctgaaatacacagaaggagtacagtccctcaactggactaaaatcatgaagaccattgttgatgaccctgagggcttcttcgaacaaggtggctggtctttcctggagcctgagggtgaggggagtgatgctgaagaaggggattcagagtctgaaattgaagatgagacttttaatccttcagaagatgactatgaagaggaagaggaggacagtgatgaagattattcatcagaagcagaagagtcagactattctaaggagtcattgggtagtgaagaagagagtggaaaggattgggatgaactggaggaagaagcccgaaaagcggaccgagaaagtcgttacgaggaagaagaagaacaaagtcgaagtatgagccggaagaggaaggcatctgtgcacagttcggggccgtggctctaaccgtggttccagacacagctctgcaccccccaagaaaaagaggaagtaacttctgaactttggccctgagctccattcttcctccagccaacccctgaaaattttacatgacatagaaactgtatttttcctttcgttttcatttgaagttttgccatttgtgtttatgggtttagggggccatttgtgtggaccaatctactcggggaattccaggcccaccaggacacgtgccaatggccccattcagatgggcaagggaggaggtgttcttgaagacaggagggaggctcccgctgttaataaatattgtttcattcttctctcttcctgtcaccttctgccaagacattgatggcttctgacatcttatttggtgtctcaaagctgtatttccaagacagtggtacaagggtgacccttaattacccgtatcatggttcttgaccagcacattcaatcctccaacctaccctactgccatgaccttccgcacatctctaagttttatctttgcaatactcaaggttctcggaaatttgctaatggttgtgataaaccatacagcttgagccagtgaggcagattgggctggtgccttcgtctgagttttcctgctttcctgcctcgtgcagattctgaggtatatctgctgccttggaagacataagaagcagtgatactccctggctcggttattttctccatacaatgcacacatggtacaatgatagaaggcaaaattgccactgtcttcttttttttctcatatatctaagggaagatatatcaggttgtgcctcatgtaccgcttctagtgaaatgtagaggaaggctcaaaggagtcaacatttagatctggaagggacaagtcatgccttgggcctagaataccctgatgagaaaagagaagaggaagggaggccatatctacaacacagcctctcggcactgctgctccttattttaactttgtcttgcattgtcctgtatttatcacagtttctgttgaacagcttttcaagtatttggggagtttatcttgccatcctccccttctggttctctgcacccacctgttcccactgcagttccttccgtgctctgtgactttaagagaagaaggggggaggggtcccggattttatgtttgtttgttttttctccttagcagtaggacttgatattttcaattttggaagaactaaaagatgaataaactgggttttttttg

SEQ ID NO: 1309 - DNA, 549 bp, Homo sapiens
ttttttttttttctgccaataaatactttaatgagaaccgaggtctgtaacacatatagcaataaccaccctggcctatgccttctgctctagcccaagtctggggctaaccaattacatttaaccacatttggaaagcaggccgttttcaatgtcacccatcagtatccatcttcatagaagataccaatctggggccagagtctcaatgttaacactttctctcggggaaaagttaacatggtaacacaaacatagaaataactttgaaccaccccactgttcttccatcaggaggcccttaggagaccaacggcttggtaaacacttacaacattgtcaaaatacattagaacacgggaaaagggcaaaggagtagaaaggctgggcaggggctggggctcacatataattcagttcttagatttgaagcctctttagctgctcgtatgtaataaaaaaaatgatgttccagggtccaagccgaagccagtttggccaaaatcctttatagagtgcaaaaaagccctcatgtttccacatctttaa

SEQ ID NO: 1310 - DNA, 500 bp, Homo sapiens
  misc_feature (1)...(500): n = a,t,c or g
ggacaatgaagtaaatagcaatcagtgaaagagccacatatgaccaacttagatttccttgagtaaagtctgtcaagggtaaagctgtgaaagtttataagaaaaaagaatggggaattatttggaagaccatttgagttttgtacacaagaatttaatgtttgcacacttgataatatatgtgaatatcatcaaaactaagtgaaaaaataaattaatgaggtgaaacacatgcctgtattccttgtatgaaaatccggtagaaatagggtttgtgaaataaatagggtaatcctcctgtaggattatgactttcactcttatcaatttgtagatgaacacagnnnnnnnnnnnnnnnnnnnnnnnnnnnnnnnnnnnnnnnnnnnnnnnnnnnnnnnnnnnnnnnnnnnnnnnnnncttcaacaaaaaaaaataaaggaggggggttattgaatatatttggcatgcttaccaaccatttatatttggggaagacaca

SEQ ID NO: 1311 - DNA, 183 bp, Homo sapiens
ggaagggtggaaaaggttataccatgctaccactcatgaaaagaaagttggagtggctgtattaatatcagagaaagtagatttcagagcaaaaaatattacctgcaataaagagggtcatttcataatggggtcattatgagcagtcagctcctcaagagaacataacagtcctaaatgctg

SEQ ID NO: 1312 - DNA, 1108 bp, Homo sapiens
gcatgtacagtagctatttcctgatgaccaaatctctcaacgaatcatgttattaataaatatttttagcactcatcagtattctccaatgtgaccttctcattggagtacacagaaggaaagcaaagaagagcatctgacttctagctctggcttacagcctctctaccaggccgaagcaagagacccgcggcagcagctccccgccactcagacctgggtggtgataacctcaaagaatggctctgttttctattgacagaaaacccacttgattttgcttctgagttagcagtcagaagaccctctaagtacaatagaagtgctcttaacggactctgcctgtgtgactcccaggccccggagtctccatctctctcgtaagccacctgccacagcacagctggaggctgttctctggtgttctcagcgctccggctccctccctggagttgtgcacccgtcccaaactcctccatgcaagttctgcttcctcttataagtacacaactcagttaagtattcacatacacacagaaaatacgggtgtgaaaagaaagaattttctgtaaaaattaagttgaatactttggtaaaaagtgataaaggctgagttgccaataaaagttgcttttaaattaggtgtggctgggaatattataagatattggggaaaatatacaaatcaagaaaatttctgagcttagattgcttcatagatttatttaagtactcatcccacctttaaaacctctaaactgagaagaagggacccaaatcatgttattggtgtgatttatgtgagaagtagaactgtagtcattggacccttaggcaaaggaaaatccgtgtctttatatcagaagatcggcaaacgaatgtatattacacagtttaggttatgattccctactttaacctacttactttattaaatgaccaactactgatactgatcacaatagttattagagattctaatttagttggaaggttctaatcactttcattacaggcatttgaaaaatagggattcatttcgaatatattagccaggagcatagttagatgttacccagggccatttattcatcctgttaatgatgat

SEQ ID NO: 1313 - DNA, 586 bp, Homo sapiens
agtatatatccaccactttaccatccacattagcatttcattagcttctctttgcccttttagttaataaccccatctcagggtgattcactttcataatccgtattaccatggattaattctgcatagcaaaaactatgataggtgtgttaagtaatgaagtttggggaatgttaataagatgatttcttttactgtagatgaaatacatcgtaagagaatccctcgtgagaccagatcagttacatgtatatcttgcctctcttaagtctctaccatttattactgtacttgagttaggatttgaaagtgccactgaacactaaaattattctgtctgggtatttgaatggtgtgagacaaaaatccattttaatgttttatcaagttgagatgtctcacatgagtagttagtgctgagaatcagacacaggcacatttgggagcatggcgtggcaagaagctttgctttttcctgttcctattgtactcaaacttgtttctacatttttcattgatttctcttcgtactagcactagggcgcaagagaagccgtactggaatattacactactcagcacaaga

SEQ ID NO: 1314 - DNA, 701 bp, Homo sapiens
  misc_feature (1)...(701): n = a,t,c or g
gcagtccacctggccctgagcgggctggggaactgcctcagtctggaagctgaccaggcactctcagggccgccccacctcccccaagtccccacagccttgcagtcaggtctcctgggatagggaggttcacttgcttgttgtccctcgtccttgtcatatccttttaactaggcatctcagagaagcagagacagggcagccttcgtcctgggggaaaagggaccctcaggatggcatgagaggtcctcattcccaagtgtggaactgtccccctcaacttgttaaaatgccagatttctgggtcttgcccaatggggcctgggactccatgtgacaactggcccaggagcttctgatgtcacacagaattctgcagtcccaagttccagccccgaacctgttctgctgttcctaggtgactgccctcacactgctgaccacagtggatttctccccctgctgcttcggggctcagcttggggtcagccctgcttataaggtcaactgtgcaaaaaccttatactggccaagaaacaaaactagtgctgggggaggagggcttgggtgccccggccactggtggagtccccaggaaatcctcagagctgttgcgaggatgagacacatttnggacacgtccacctgtcctcctgaccgtctggagagaataaacctgtcaaagccaaaaaaaaaaaaaa

SEQ ID NO: 1315 - DNA, 3734 bp, Homo sapiens
ataaagaaaatgattggggattttccaattttatggcctggagtgaagtgaccgatcctgagaaaggatttatagatgatgacaaagttacctttgaagtctttgtacaggcggatgctccccatggagttgcgtgggattcaaagaagcacacaggctacgtcggcttaaagaatcagggagcgacttgttacatgaacagcctgctacagacgttatttttcacgaatcagctacgaaaggctgtgtacatgatgccaaccgagggggatgattcgtctaaaagcgtccctttagcattacaaagagtgttctatgaattacagcatagtgataaacctgtaggaacaaaaaagttaacaaagtcatttgggtgggaaactttagatagcttcatgcaacatgatgttcaggagctttgtcgagtgttgctcgataatgtggaaaataagatgaaaggcacctgtgtagagggcaccatacccaaattattccgcggcaaaatggtgtcctatatccagtgtaaagaagtagactatcggtctgatagaagagaagattattatgatatccagctaagtatcaaaggaaagaaaaatatatttgaatcatttgtggattatgtggcagtagaacagctcgatggggacaataaatacgacgctggggaacatggcttacaggaagcagagaaaggtgtgaaattcctaacattgccaccagtgttacatctacaactgatgagatttatgtatgaccctcagacggaccaaaatatcaagatcaatgataggtttgaattcccagagcagttaccacttgatgaatttttgcaaaaaacagatcctaaggaccctgcaaattatattcttcatgcagtcctggttcatagtggagataatcatggtggacattatgtggtttatctaaaccccaaaggggatggcaaatggtgtaaatttgatgacgacgtggtgtcaaggtgtactaaagaggaagcaattgagcacaattatgggggtcacgatgacgacctgtctgttcgacactgcactaatgcttacatgttagtctacatcagggaatcaaaactgagtgaagttttacaggcggtcaccgaccatgatattcctcagcagttggtggagcgattacaagaagagaaaaggatcgaggctcagaagcggaaggagcggcaggaagcccatctctatatgcaagtgcagatagtcgcagaggaccagttttgtggccaccaagggaatgacatgtacgatgaagaaaaagtgaaatacactgtgttcaaagtattgaagaactcctcgcttgctgagtttgttcagagcctctctcagaccatgggatttccacaagatcaaattcgattgtggcccatgcaagcaaggagtaatggaacaaaacgaccagcaatgttagataatgaagccgacggcaataaaacaatgattgagctcagtgataatgaaaacccttggacaatattcctggaaacagttgatcccgagctggctgctagtggagcgaccttacccaagtttgataaagatcatgatgtaatgttatttttgaagatgtatgatcccaaaacgcggagcttgaattactgtgggcatatctacacaccaatatcctgtaaaatacgtgacttgctcccagttatgtgtgacagagcaggatttattcaagatactagccttatcctctatgaggaagttaaaccgaatttaacagagagaattcaggactatgacgtgtctcttgataaagcccttgatgaactaatggatggtgacatcatagtatttcagaaggatgaccctgaaaatgataacagtgaattacccaccgcaaaggagtatttccgagatctctaccaccgcgttgatgtcattttctgtgataaaacaatccctaatgatcctggatttgtggttacgttatcaaatagaatgaattattttcaggttgcaaagacagttgcacagaggctcaacacagatccaatgttgctgcagtttttcaagtctcaaggttatagggatggcccaggtaatcctcttagacataattatgaaggtactttaagagatcttctacagttcttcaagcctagacaacctaagaaactttactatcagcagcttaagatgaaaatcacagactttgagaacaggcgaagttttaaatgtatatggttaaacagccaatttagggaagaggaaataacactatatccagacaagcatgggtgtgtccgggacctgttagaagaatgtaaaaaggccgtggagcttggggagaaagcatcagggaaacttaggctgctagaaattgtaagctacaaaatcattggtgttcatcaagaagatgaactattagaatgtttatctcctgcaacgagccggacgtttcgaatagaggaaatccctttggaccaggtggacatagacaaagagaatgagatgcttgtcacagtggcgcatttccacaaagaggtcttcggaacgttcggaatcccgtttttgctgaggatacaccagggcgagcattttcgagaagtgatgaagcgaatccagagcctgctggacatccaggagaaggagtttgagaagtttaaatttgcaattgtaatgatgggccgacaccagtacataaatgaagacgagtatgaagtaaatttgaaagactttgagccacagcccggtaatatgtctcatcctcggccttggctagggctcgaccacttcaacaaagccccaaagaggagtcgctacacttaccttgaaaaggccattaaaatccataactgatttccaagctggtgtgttcaaggcgaggacggtgtgtgggtggccccttaacagcctagaactttggtgcacgtgccctctagccgaagtcttcagcaagaggattcgctgctggtgttaattttattttattgaggctgttcagtttggcttctctgtatctattgactgccctttttgagcaaaatgaagatgtttttataaagcttggatgccaatgagagttattttatggtaaccacagtgcaaggcaactgtcagcgcaatgggggagaagaggttagtggatcgggggtccctggctcaaggtctctgggctgtccctagtgggcacgagtggctcggctgccttcctggggtcccgtgcaccagccctgcagctagcaagtcttgtgtttaggctcgtctgacctatttccttcagttatactttcaatgaccttttgtgcatctgttaaggcaaaacagagaaactcacaacctaataaatagcgctcttcccttcattgtgtgcattgtcggcccttcctcgggttctcctcctccagctgcctgggggctttttaataaacttgtctcacctcgtcagccactactgtctgcagcccctttgcaaagtggatgcactgaatacagtccggacagacattgtgggggtctttttattaaatcaagaacattgttaaattcaattaaggtttactctgctgccttggcagacttacgatctcaacagttcatacgagcaggtgaaaggattataaatagaatttcgttaaagtggaacagacgacaagaaagccttttagcaagagggcatgctcactagtggttagtaagctgtcgactttgtaaaaaagttaaaaatgaaaaaaaagtcgacgcggccgcggaattttgtag

SEQ ID NO: 1316 - DNA, 4743 bp, Homo sapiens
aagtttttaatgatacctgccgctcaggtggcctaggtggtagtcatgccttgcttctacttacgtagttgtggttctctcttgcctgaactaaagcttgaagagagaacagaatttgctcataggatatgggacacacttcagaaattaggtgctgtgtatgatgtgagtcactataatgctttacttaaagtctatcttcaaaatgaatataaattctcaccaactgatttcctggcaaaaatggaggaagcaaacattcaaccaaatcgagtgacataccagagattgattgcttcttattgtaatgtaggagatattgaaggtgccagcaagattcttggatttatgaaaactaaggatctcccagttacagaggcagtattcagtgcccttgtgacagggcatgccagagctggtgatatggagaatgcagaaaacattctcacagtgatgagagatgccggaattgagcctggtccagacacatacctcgcattattgaatgcatatgctgagaagggcgacattgaccatgttaagcagactctggagaaggtggagaagttcgagcttcaccttatggaccgtgatttactgcaaattatttttagcttcagtaaagctgggtatctcagtatgtctcagaaattttggaaaaagtttacatgtgaaagaagatatattccagatgcaatgaacctcattttacttttagtcactgaaaaattggaagatgtagcgttgcaaattttactagcatgccccgtatcaaaggaagatggcccaagtgtctttggcagtttctttttacaacactgtgtgactatgaatacgcctgtggagaagctaacagactactgtaagaagttaaaggaagtccagatgcactcctttcctctgcagttcaccctccattgtgctttactcgccaataaaactgatttggcaaaagccttaatgaaggctgtgaaggaggaaggttttcctatcagacctcactatttctggccattgctagttggacgtcggaaggaaaaaaatgttcaaggtataattgaaatcctcaaaggaatgcaagaattgggagtacatcctgatcaggaaacatatacagattatgtgattccatgctttgatagtgtaaactcagcacgagccattttgcaggaaaatggatgtctgtctgatagtgatatgttttctcaagctggattgagaagtgaagcagcaaatgggaacttagactttgtattatcatttttgaaatcaaatacattgcccatctcgctgcagtctataagaagtagcctactgctaggcttcaggaggtctatgaatataaatctttggagcgagataacagaattgttgtacaaggatggacgttattgccaggagcctcgaggaccgacggaagctgttggctattttctttataacttgattgacagcatgagtgactcagaggtacaggccaaggaggagcatttgagacaatacttccatcagctggagaagatgaatgtaaaaattcctgaaaatatctacagaggcattcgtaatctcctggaaagctaccatgttcctgaattgattaaggatgctcacttgttggttgagagtaagaatttagactttcaaaaaactgtgcaacttacatcatctgaattggagtccacacttgaaacactaaaagctgaaaatcaacctataagagatgtcctaaagcaactcatattagtgctttgttcagaagagaatatgcaaaaagcccttgaattgaaagcaaaatatgaatccgacatggttactggtggctatgcagctttaataaatttatgctgtcgacatgataaagtagaagatgccttgaacttgaaagaagaatttgaccgcttagattcatctgctgtccttgacaccggcaagtatgtaggccttgtaagagtattggcaaagcatggcaagctccaagatgctattaacattctgaaggagatgaaagagaaggatgttcttatcaaagatacaacagccttgtcctttttccacatgctaaatggcgcagctttaagaggtgaaattgaaacagtaaaacagttgcatgaagccatcgtgactctagggttagcagaaccatccaccaacataagtttcccattggtcactgtacacttggaaaagggcgacctatctactgctcttgaggtcgccattgactgctatgaaaagtataaagtattaccaaggattcatgatgtcttgtgtaaactggtagagaaaggcgagactgatctaattcagaaagcaatggactttgtgagccaagaacaaggtgaaatggtgatgctctatgatctcttctttgccttcctacaaacaggaaattacaaagaggccaagaagatcattgagactccagggattagagctcgatctgcaaggcttcagtggttttgtgacagatgtgttgcaaataatcaggttgaaactctggaaaaattagtggagctgacacagaagctatttgaatgtgatagagaccagatgtactacaatctgctaaaactgtataaaataaacggtgactggcaaagagctgatgcagtctggaataaaatccaagaagaaaatgttattcctcgtgaaaagacattaagattattagcagaaatccttagagagggtaaccaggaagttccgtttgacgtacctgagttgtggtatgaagatgaaaaacattccctgaattcttcgtcagcctcaaccacagaacctgatttccagaaagatatattgattgcctgccgattgaaccaaaaaaaaggggcatatgatattttcctgaatgcaaaagagcaaaacattgtgtttaatgctgaaacctacagcaatctcattaaattactgatgtcagaagattattttacacaagcaatggaagtgaaagcattcgcggagacccacatcaagggcttcacactgaacgatgctgccaacagccgcctcatcataacgcaagttaggcgggattatttgaaagaggctgtgacaacactgaaaacagtattggatcagcagcagaccccttctaggttagcagtgacccgtgtcatccaggcattggccatgaagggtgatgttgaaaacatagaagtagttcagaagatgttaaatggactcgaagactccattggactttcaaaaatggttttcatcaataacattgctttggctcaaataaagaataataacatagatgccgcaatagaaaacattgaaaatatgcttacttcagagaataaagtcattgaaccccaatacttcggcttggcatacttattcagaaaagtaatagaggagcagttggaaccagcagttgaaaagataagcatcatggcggagagattggccaatcagtttgcaatttataaacctgtcactgattttttccttcaacttgtggatgcaggcaaggtggatgatgccagagctctcctacagagatgtggtgcaattgctgaacaaaccccgattttgttgttgttcctccttaggaattctaggaaacaaggaaaggcatcaactgtgaaatctgtgttagaattgattcctgaattaaatgaaaaggaagaagcatacaattccctcatgaaaagctatgtctcagagaaagatgtcacatctgctaaagcactgtatgaacatttgactgcaaagaatacaaaattggatgatctgtttctaaagcgttacgcatctttgctgaagtatgctggagagcctgtccctttcattgaaccccctgaaagctttgaattttatgcacagcagctaagaaaattgagggaaaactcttcttgaaataaccaggcgatactttgttttgtatatatttgtgattctgtgtctacatgttattttgaagtatatctgagggaaaaataaatgaaaattttctttatgtacttatgtatgtgtgatgcatgttcaaagtcttattgaccataactctgtgcacttggttattggacatttttggagtttttttctctgggaaaaatcgatagtgttttcttcaatgctgctgctgtgtgaagccatactttttcaggattcttcccctaattggctctttggtttccctgctctgtttcatttatttcattaaaatgttattcctttatttaagattcacttattagtctgctgtttctctgaaaaattttagagctaggtatagtgaccgtgaactttctaacgcataatattctgtgatacagccattccgtacatgtgtgaagtcctgcataactttcgaactttcgaactttgttaaatgttggcactaggagtcatcagatctaggcttcatcattttccagtgagaagcagagacccaaagggcctgttacttgtgcttggtcaggggactgtctgtcatgcctggaggctcttcggcacacttccccatctttcccttctgccactgtggcttcaagcacctctgttcatagagcgtctctgaaattgagtctcggtcatgacttatcccgaagtagagcaatgtgtttcctctcattgtagtttcaggactttgtcagtacaagctctgccctaggcttgttactttatactcatatcctgaaaagatgtgatttcatctatgaaggggtaaaatattggtttgtatttaattgtttgaaataaaagtgatccctatattgaaaaaaaaaaaaa

SEQ ID NO: 1317 - DNA, 983 bp, Homo sapiens
ttccgaggaggctcttactcactcaagaaagtggtgatgatgatccgaccgaaccccaacaccttccactaagccagctccccctcctgacctctcgtggccattgccaggagcccaccctggtcacgctggccacagcacaaagaacaactcctcaccagttcatcctgaggctgggaggaccgggatgctggattctgttttccgaagtcactgcagcggatgatggaactgaatcgatacggtgttttctgtccctcctactttccttcacaccagacagcccctcatgtctccaggacaggacaggactacagacaactctttctttaaataaattaagtctctacaataaaaacacaactgcaaagtaccttcataatatacatgtgtatgagcctcccttgtgcacgtatgtgtataccacatatatatgcatttagatatacatcacatgtgatatatctagatccatatataggtttgccttagatacctaaatacacatatattcagttctcagatgttgaagctgtcaccagcagctttgctcttaggagaaaagcatttcattagtgttgtattacttgagtctaagggtagatcacagactgtgtggtctcaactgaaaggatcacccttgggcatctgtgtgcctggattcttccagaatgtctacaatgctaatctctcacatagaggttcccagcttcttaagaaccccttttggcacctaatcaaatttcaaaatccctccccccacattttcatacttttccccattctcaggacttttcaccatccatcacccacttatcccttcatttgacaccattcattaagtgccttctgtgtgtcagtccctggccactcactgcagttcaaggccccctttccgctctgctgtactcctcgcctacctactccttgccttttctgtcgcacagccccttctttccaggcgagattcctcagcttctgag

SEQ ID NO: 1318 - DNA, 809 bp, Homo sapiens
agaggaagatcttacaacattccatgtcaaatctgttaccatttattggcatttagttttcatttaagaattgaacataattatttttattgtagctatatagcatgtcagattaaatcatttacaacaaaaggggtgtgaacctaagactatttaaatgtcttatgagaaaatttcataaagccattctcttgtcattcaggtccagaaacaaattttaaactgagtgagagtctatagaatccatactgcagatgggtcatgaaatgtgaccaaatgtgtttcaaaaattgatggtgtattacctgctattgtaattgcttagtgcttggctaatttccaaattattgcataatatgttctaccttaagaaaacaggtttatgtaacaaagtaatggtgttgaatggatgatgtcagttcatgggcctttagcatagttttaagcatcctttttttttttttttttttgaaagtgtgttagcatcttgttactcaaaggataagacagacaataatacttcactgaatattaataatctttactagtttacctcctctgctctttgccacccgataactggatatcttttccttcaaaggaccctaaactgattgaaatttaaggatatgtatcaaaaacattatttcatttaatggcacatctgttttgctgtttttgagcagtgtgcagtttagggttcatgataaatcattgaaccacatgtgtaacaactgaatgccagatcttaaactcattagaaaaataacaaattaggttttgacacgcattcttaattggaataatgg

SEQ ID NO: 1319 - DNA, 1398 bp, Homo sapiens
cgccgcagaaaccggcagtggcaagactctcagctacctcctgccgctgcttcaacggctcttgggccagccaagcctggactcccttcctatccccgcgccccgaggcctggtccttgttccttcccgagaattggcccaacaggtgcgggctgtggcccaacccttgggcgctccttgggcctgctggtgcgggacctggagggaggccacggcatgcgtaggatcaggctgcagctgtccagacagccttcagcagatgtgcttgtggccactccaggggctctgtggaaggccctgaaaagtcgactgatcagtctggagcaactctccttcttggtgttggatgaggcagacacactgctggatgaaagcttcctggaactggtggaattacatcttagagaagagccacatagcagaaggcccagctgacttggaagaccccttcaatcccaaagctcagttagtgctggtaggagccacatttcccgaaggtgtaggccagttgctgaataaagtcgccagcccagatgctgtcaccaccatcaccagctccaagctccactgtatcatgcctcatgtgaaacagacatttctgagactgaagggagcagataaggtggccgagctgggtgcacatccttcaagcatcgttaccagagcagaaagggactggtccctcaggaactgttctggtgttctgtaatagctccagcactgtgaactggctgggatatattctggatgaccacaaaatccaacacctaaggttgcaggggcaaatgccagccttgatgagggtaggaatcttccagtccttccagaagagctcccgagacatacttctctgcacagacatagcctctcggggcctgggacagcactggtgtggagctggttgtcaattatgatttccccccaacgctgcaagattacatccacagagcagggagagtgggccgtgtggggagcgaagtgccaggcaccgtcatcagttttgtgacccatccctgggatgtgagcctggttcagaagattgagcctggcggctcgcccgaaggagaagtcttccaggactagcatcctcggtgaaagagcctttgcccgcaagcaacctgattttgacaaatctgattaaaatgtgatgctagaacagggatctttccccagtatcttgagtgggtgacccacacttgtcagtgggaggctctgggctgccctgtcggctccttgagggcgggatgaactgctttgtgacttggaaaggtacgctgctggccagcattggagaagaagctgctgagcatggctttctgtagtctttagcaagacacaagtggattttgactttgtatcatgtcatgatttctaacaataaatgatgtttttatgtga

SEQ ID NO: 1320 - DNA, 686 bp, Homo sapiens
ggggctcgcaccgcagcacgctggagtcccgcttaggtaccagttagcgtcaggggagctgggtcaggcggtcgccgggacaccccgtgtgtggcaggcggcgaagcgctctggagaatcccggacagccctgctccctgcagccaggtgtagtttcgggagccactggggccaaagtgagagtccagcggtcttccagcgcttgggccacggcggcggccctgggagcagaggtggagcgaccccattacgctaaagatgaaaggctggggttggctggccctgcttctgggggccctgctgggaaccgcctgggctcggaggagccaggatctccactgtggagcatgcagggctctggtggatgaactagaatgggaaattgcccaggtggaccccaagaagaccattcagatgggatctttccggatcaatccagatggcagccagtcagtggtggaggtgccttatgcccgctcagaggcccacctcacagagctgctggaggagatatgtgaccggatgaaggagtatggggaacagattgatccttccacccatcgcaagaactacgtacgtgtagtgggccggaatggagaatccagtgaactggacctacaaggcatccgaatcgactcagatattagcggcaccctcaagtttgcgtgtgagagcattgtggagga

SEQ ID NO: 1321 - DNA, 324 bp, Homo sapiens
ggcacgagagagtggtgatggctacataacactgtatatgcaatgttactgaaatacatacaagtggttaaaataaatactgtgttacgtacagtttgccacaataaaaaacaacaaaaatgggactataccattaaatttaaaaagaacactgaatttggctttgggactgccgacaagctttgccaaatcttcctggattaaataaatgaccactaagacacttccgcacaaccttctctcccttttttctccacctagggtcagacttgcgtcgagggtctgatggctctcccagtcttccttggttccccacctatttcc

SEQ ID NO: 1322 - DNA, 3489 bp, Homo sapiens
  misc_feature (1)...(3489): n = a,t,c or g
ggcggagatcgcgtctctttcgctccgtgtccgctgctgctcctgtgagcgcccggcgagtccgtcccgtccaccgtccgcagctggtagccagcctgcccctcgcctcgactccctttcaccaacaccgacacccacattgacacctccagtccggccagccgctccactcgttgcctttgcatctccacacatggcgtcctcgcgcagagcggcggctcctccgggggacccgcggtccccaccgtgcagcggggcatcatcaagatggtcctctcagggtgcgccatcattgtccgaggtcagcctcgtggtgggcctcctcctgagcggcagatcaacctcagcaacattcgtgctggaaatcttgctcgccgggcagccgccacacaacctgatgcaaaggatacccctgatgagccctgggcatttccagctcgagagttccttcgaaagaagctgattgggaaggaagtctgtttcacgatagaaaacaagactccccaggggcgagagtatggcatgatctaccttggaaaagataccaatggggaaaacattgcagaatcactggttgcagagggcttagccacccggagagaaggcatgagagctaataatcctgagcagaaccggctttcagaatgtgaagaacaagcaaaggcagccaagaaagggatgtggagtgaggggaacggttcacatactatccgggatctcaagtataccattgaaaacccaaggcactttgtggactcacaccaccagaagcctgttaatgctatcatcgagcatgtgcgggacggcagtgtggtcagggccctgctcctcccagattactacctggttacagtcatgctgtcaggcatcaagtgcccaacttttcgacgggaagcagatggcagtgaaactccagagccttttgctgcagaagccaaatttttcactgagtcgcgactgcttcagagagatgttcagatcattctggagagctgccacaaccagaacattgtgggtaccatccttcatccaaatggcaacatcacagagctcctcctgaaggaaggtttcgcacgctgtgtggactggtcgattgcagtttacacccggggcgcagaaaagctgagggcggcagagaggtttgccaaagagcgcaggctgagaatatggagagactatgtggctcccacagctaatttggaccaaaaggacaagcagtttgttgccaaggtgatgcaggttctgaatgctgatgccattgttgtgaagctgaactcaggcgattacaagacgattcacctgtccagcatccgaccaccgaggctggagggggagaacacccaggataagaacaagaaactgcgtcccctgtatgacattccttacatgtttgaggcccgggaatttcttcgaaaaaagcttattgggaagaaggtcaatgtgacggtggactacattagaccagccagcccagccacagagacagtgcctgccttttcagagcgtacctgtgccactgtcaccattggaggaataaacattggntgaggctcttgtcagcaaaggtctagccacagtgatcagataccggcaggatgatgaccagagatcatcacactacgatgaactgcttgctgcagaggccagagctattaagaatggcaaaggattgcatagcaagaaggaagtgcctatccaccgtgttgcagatatatctggggatacccaaaaagcaaagcagttcctgccttttcttcagcgggcaggtcgttctgaagctgtggtggaatacgtcttcagtggttctcgtctcaaactctatttgccaaaggaaacttgccttatcaccttcttgcttgcaggcattgaatgccccagaggagcccgaaacctcccaggcttggtgcaggaaggagagcccttcagcgaggaagctacacttttcaccaaggaactggtgctgcagcgagaggtggaggtggaggtggagagcatggacaaggccggcaactttatcggctggctgcacatcgacggtgccaacctgtccgtcctgctggtggagcacgcgctctccaaggtccacttcaccgccgaacgcagctcctactacaagtccctgctgtctgccgaggaggccgcaaagcagaagaaagagaaggtctgggcccactatgaggagcagcccgtggaggaggtgatgccagtgctggaggagaaggagcgatctgctagctacaagcccgtgtttgtgaccgagatcactgatgacctgcacttctacgtgcaggatgtggagaccggcacccagttggagaagctgatggagaacatgcgcaatgacattgccagtcacccccctgtagagggctcctatgccccccgcaggggagagttctgcattgccaaatttgtagatggagaatggtaccgtgcccgagtagagaaagtcgagtctcctgccaaaatacatgtcttctacattgactacggcaacagagaggtcctgccatccacccgcctgggtaccctatcacctgccttcagcactcgggtgctgcccagctcaagccacggagtatgccttcgccttcatccagggtgccccaagatgatgatgcccgcacggacgccgtggacagcgtagttcgggatatccagaacactcagtgcctgctcaacgtggaacacctgagtgccggctgcccccatgtcaccctgcagtttgcagattccaagggcgatgtggggctgggcttggtgaaggaagggctggtcatggtggaggtgcgcaaggagaaacagttccagaaagtgatcacagaatacctgaatgcccaagagtcagccaagagcgccaggctgaacctgtggcgctatggagactttcgagctgatgatgcagacgaatttggctacagccgctaaggaggggatcgggtttggcccccagccccgctcacgccagtccctcttcctctgccgggagggtgttttcaactccaaaccccagagaggggttgtagattgggtccagctttgcttcagtgtgtggaaatgtctcgtggggtggcatcggggctgcggggtggggaccccaaggctttctggggcagacccttgtcctctgggatgatgggcactgctatccacagtctctgccagttggttttatttggaggtttgtgggcttttttaaaaaaaaaaaagtcctcaaatcaggaagaaacatcaaagactatgtcctagtggagggagtaatcctaacacccaggctggccgccagctggcacctgcctctatcccagactgccctcgtcccagctctctgtccaactgttgattatgtgatttttctgatacgtccattctcaaatgccagtgtgttcacatcttcgctctggccagcccattctgtatttaaagcttggggaggcccaataaaatagtacgtgctgtctgcagcccttattgatcacaaaaaaaaaa

SEQ ID NO: 1323 - DNA, 918 bp, Homo sapiens
tttaggagacccttttctaacataacagtcagggaagagtctttaaaatttaatccttatgattctagcaggagagaacagatggcagatatggccaaaataaaactatctgtcttgaattctgaagatgaactaaatcgttgggactctcagatgaaacaggatgctggcagatttgatgtgagtttcccaaacagcataattaagagagatagccttcgaaaaaggtctgtacgagatctggaacctggtgaggtgccttctgattctgacgaagatggtgaacacaaatcccactcacccagagcctctgcattatatgaaagttctcgattgtcttttttattgagggacagagaagacaagctacgtgagcgagatgaaagactctctagttctttagaaaggaacaaattttactcttttgcattggataagacaatcacaccagacactaaagctttgcttgaaagagctaaatccctctcttcatctcgtgaagaaaattggtcttttcttgattgggactcccgatttgcaaattttcgaaacaacaaagataaagaaaaggttgactctgctccaagacctattccatcctggtacatgaaaaagaagaaaattaggactgattcagaagggaaaatggatgataagaaagaggaccataaagaagaagagcaagagaggcaggaattgtttgcttctcgttttttacacagctcaatctttgaacaagattccaagcgattgcagcatctagagagaaaagaggaagattctgacttcatttctggtaggatctatgggaagcagacatctgagggagcaaacagcacaactgattccattcaagaaccagtagttctgttccatagcagatttatggagctcacacggatgcaacagaaaaaaaaa

SEQ ID NO: 1324 - DNA, 1394 bp, Homo sapiens
ggcggccgaggcggacggaccgcttaaacggctgctcgtgccgattcttttacctgagaaatgctacgaccaacttttcgttcagtgggacttgcttcacgtcccctgcctcaagattctcctcagcaaaggcctggggctgggcattgtggctggctcacttctagtaaagctgccccaggtgtttaaaatcctgggagccaagagtgctgaagggttgagtctccagtctgtaatgctggagctagtggcattgactgggaccatggtctacagcatcactaacaacttcccattcagctcttggggtgaagccttattcctgatgctccagacgatcaccatctgcttcctggtcatgcactacagaggacagactgtgaaaggtgtcgctttcctcgcttgctacggcctggtcctgctggtgcttctctcacctctgacgcccttgactgtagtcaccctgctccaggcctccaatgtgcctgctgtggtggtggggaggcttctccaggcagccaccaactaccacaacgggcacacaggccagctctcagccatcacagtcttcctgctgtttgggggctccctggcccgaatcttcacttccattcaggaaaccggagatcccctgatggctgggacctttgtggtctcctctctctgcaacggcctcatcgccgcccagctgctcttctactggaatgcaaagcctccccacaagcagaaaaaggcgcagtagagccagctactggagtcattccgtttccactcattcacccaacctcagggttctccccatctgagccagcctgctggtgtgacttactcatcctccattcctctgcacttgcagactttctgagccagggttttcttttagtggaaaccaaatggttgatggatccagatccttagaaaaggagaggatgggggtagagtctcccaagccaaaattttgacatttgagtgctttcgtaagccctgtacatgtactattaattcagtcattcagccaagcctcctcctctagcagcaatttccagctgtgtaacactatcctgggcaaatgttttaccctgtcctccagcctccctgcttcccttctggccctggaagactgagtctggacggcagagtggagggactgggaggctgtggctgcctccctccctcagcccggctgggactgtctcccggaccccagtgctggggtgggggaagggggacggagaatgactcaggcagggcccagggtggggtgaggaggttcctgctctggcaggtctaggcggaagggagtggagatggggctggttcctgctgcagtgaggggaacagatgggacaataaagactggagactcagttgaataatacaaaactgtttaatac

SEQ ID NO: 1325 - DNA, 778 bp, Homo sapiens
ctccattttgatttcagcaaagattttttctccttttctttgtcctcaaccatacttagaggaaagaaggaatggtcttccatgaactgatgatgcttaattaagcaaagtaaggaaattagtttcatggaagcctaaacaaagctggaatagaaactacacactagacacagcagtagtcatagtcttcacaggtttaggagctactggaccaacattcttgtttttgcttttgtttttttaaataattctagtctggagctaactgtggagcagccaaatagtagctggcatgttgattcaaaccatgggctgaatttgctcataggctgtgcatcagacaaaagcttgaatatttgtgttgtatgcttgttccaaccaccgcttgtgtgagcatttttgtggcttgtacagaaagtacacttttaaattgtctcttgcatcactaaaatttttttaaaatgagcataacaacgaaaggcatccagctgactttttgattccaagattattgattggattgacttttttgcattaaatttttcccagcaaaataaatcatatggcgagtcagggaataaaaagtcaaaagaaacaaatagaagctttttttttaaaaaaatgtattgcttctgaacttttttctgccactgctccctagccctgtttagtttgttattgctgcttttcttttttctttctgtatctatgcctttttttcacagtagtccttggctctgcacggaataaatgataccctcaaatctaaaaaaaaaaa

SEQ ID NO: 1326 - DNA, 558 bp, Homo sapiens
  misc_feature (1)...(558): n = a,t,c or g
gagataactacccacccccacccctgttgcctactatccagggccagccactcaactctacctgaactacacagcctactacccaagccccccagtctcccccaccactgtgggctacctcactacacccactgctgccctggcctctgctcccacctcagtgttgtcccagtcaggagccttggtccgcatgcagggtgtcccatacacggctggtatgaaggatctgctcagcgtcttccaggcctaccagctacccgctgatgactacaccagtctgatgcctgttggtgacccacctcgcactgtgttacaagcccccaaggaatgggtgtgtttgtaggagagaaagccaggaggtaagagccagctgatatcctcggcgaacatgtctctcctgagtccagaagaccagcaccctcaacctgggtagcttctttctgggcttgtcaaagcttcttcaggaaggtacctagnagggagcccaagccccagctccattccttccanttatttctggccttgttttcccccaaaggacaatgggctgggaccctg

SEQ ID NO: 1327 - DNA, 666 bp, Homo sapiens
cctcatattttctttaaaatttatcagtatagcatttcatttctatgcatgtatatgtatagtaattcataaaactaaatagcaaactgatattctacaccagttcatttatctcaatatatattttggaatataacggcaatattaaaaatatcaattccctctaagctgataatactataagattttacacaaagttaaagtttttgttttttctttttgaaaaagtttcattgtttaaagtccacatatttgacaccttgataaggaaaatgtaaatgtgtcatataacatttattccatcaatttaaactgaagtgtctcatggagctaaacactaaaagaatttaaataaaaaagcagtaacctgtatgtacacaaaatgatcattccataaatatttacatgacaagggaaaaaatggagaatcactaaaactggaaattgctacaggtgtgataatcctttctcatgacactttagttaggaatcatgtaagcttttaaaatgaaaatacttgtagaagcgttaactaaaatattccattttagttttcagttactatttaaaggagccagtaggtcataaacagtccaagatttcaggaaccaactattcagtttagttttcagtatcaaatcttttccttcatccctcatgatgaaa

SEQ ID NO: 1328 - DNA, 336 bp, Homo sapiens
gggcatctttaggtctctgtgaaatcatgttgatgtaattgattaacaaatcaagaatgtaattttaacttttgcttatggtcattcttatgactacacggaaagggatggaatcatacttacttgtcttatacatggactgtttttagttaacaataaccataacctacacaaaggaaaggaaatgtttacattttaaaaaattactgtcaattacatctggtatttttcagattatgcataaaataatatgagtttgactattgtatcagaatattttaatcaaatcctgcaatttatattaacttaaaaaaacatctggtaaagactgggtgg

SEQ ID NO: 1329 - DNA, 410 bp, Homo sapiens
gggcgattgtgcataggtttatatccaacaggtacgcattgcttatcttccctagcaatgttctgcctgcctacctaacccgtgcctaggtatctctctttttcctgagacatccttctttcaggattaagctaataagaccaggctagcttgagaaatttgcatgtgttcttgtgttttcatccccaaaacaacagtgtactatgctttcaactatagtctctgaaattgtgtagaccacaggctctgtatgggcctgggagttagatgctttgggtaggtgggcatttgaatacctctcagatcacagtgtggaaagcatcagactacaccacatggatcagctctcaatcacttctgataagacaaaaaaaatcattagcagggcacagacgtgcacctgtagtccc

SEQ ID NO: 1330 - DNA, 1298 bp, Homo sapiens
  misc_feature (1)...(1298): n = a,t,c or g
ttttttttttttttggagttgcatagtcttttatttttctaaagatgaccattccatgtttaatgtcttcagagaagatctaaaaatcaaagttaacaacccatttgtcccaactctaactcttcctgggaacaattcctcattctgttacttgatttcttcctttaccacccacataaaatatgtcttactgctcacaagatcaaaagaaaacagaacaaaacattgaaacatcagaattgtttaaaacactagatttcattcaatggtccaattggacacttgctcattggaacttatttctgcttcagctctagttctttgagaaacacaagaattcctttcaccaaaatattagcctgacacaagaatgttgaaaggttagctgccttagctttattgctgcctataatctccaaagatatctgaacacctagaagattaaatgtagcaagaagtggaagagaaacacagtttataagtcatttaataactataattgcatagaatttactcacttttcaaatacttattctgaatgaataccaaatttgtgaaacaaaatatattctatggtgcttagaatggttgttaaatggtgagttagttttccaagtaaaaactttacgtgcattaacagaggggaatgcataataatcctatgaggtaggccctattatcctcattgaatagaagagaaaaggaggctcaaaaaaattaagtaacccacaaaaagtcacacagctgtgactgtcagtgtcctgctgggcactgcaaactaggccacttttaaagtaagatcattttaaattgagtactcttacttacaaaatgaacacattaatgtgataattgacaaaatatttccagatgctggacttatagaaagtttagggaaaaccccaagattaaggattccagattcaggtaactctctttatcttttttttagacaggggtcttcactcttgtcagccagtacaagtggcggtgaatcttcaggttaaccggaaacccccttgctttcccaaggttcaggtgatcccccggacnnnnnnnnnnnnnnnnnnnnnnnnnnnnnnnnnnnnnnnnnnnnnnnnnnnnnnnnnnnnnnnnnnnnnnnnnnnnnnnnnnnnnnnnnnnnnnnnnnnnnnnnncaaatcctgagttcagcnnnnnnnnnnnnnnnnnnnnnnnnnnnnnnnnnnnnnnnnnnnnnnnnnnnnnnnnnnnnnattaggtccccttcaaattcaagatattcctaatttttctggtctactattgcagggtaaagg

SEQ ID NO: 1331 - DNA, 1159 bp, Homo sapiens
ctgcatgtgactagcatcactgtggaaattaatgctctgttcttcactagaatgtagtaagtggttaaactgagctatcccccacctgatgactattggcatccatttgcaagggccaatggccctggattaagggttaggattatttgtagctagaaggtaattttatttctgtgaaactaattggctcatatttgaggttaggtgtggccttgaccttaccagtacatttatacccactaccagttgactagcccagataattgttaaatggtgcttcttttctgcttctcagtagacttccatgccattacaaaggaaatttgaattacctagtgtttgtatattcccatggataactatgtataacttctgttacacagcttatgtattgttaacatttaagtgtaaaccaatgccacagctaacacttaaaaatgaaaactaattagttcttgcttagggaaaatgccaggtatgaagtatggcatatacttgacactgtcctgtgtaaccctttactttgctcaggctttcaagattgagtcttttttcccccaaattaggttaacatgcatttgaccccaacctgtggggtttgagtaagctggaaatctgtgacggtaggctttctagtgtcacgaggtggtggtgactgaaggaaaagctgggatcacaggttccttctgatggagaggaaggtttatttctatgcccctcccaccaccctccacctagagctcacccaagtctgctccagtcccaggggcaggccattctgcaaaagcaggacctcacagaaacaagggctgggttgaggtcacccccttcagagttggttcctgggccagatgggtaagaggcatttgtaattttaaaaatgtgaaacttgggtttggtgttttcttctaagtggcctaaataagcaagccaggctgttgatattttagccagagaaatcggcaagccaagattaacccgaatctgaagtttagaatcttgagtttgcatctgcatcatatcatgctgttttgatgaggaaacatttgccactgaggagttggaggaagggcaagacgacagtgttaagtcagttcatttaatggttcccctaagccctggaaaaatatttgaaagaatggcagcaaaaaggttaaga

SEQ ID NO: 1332 - DNA, 376 bp, Homo sapiens
gtacaaatctgttagcagtttgagtggctgggcttcaatattatactctggatgtgatacaatagataaagttttttacgtctgtaaaaaaaaggaagagcaaaagactcttgggaacatgtgaaatcttaaatgaagattaagtacaaccaaatgtaaacatattttaaaaggttcttcttggacatcataatttgctctcctatgaagatgtcatcgtttgagcctttaatgttggaaatagcttacagatgttggggcagaaaccaaagaccaacattgccatgttctgtgagaccacgtccaagtggatgattgctggataggtatgtttcatgcataacatttagttcataaaattatatgctactttagg

SEQ ID NO: 1333 - DNA, 369 bp, Homo sapiens
gcagccactgcccgtggccagtgggatgaagtccacattctgcaacaagacctacacgtgcccgtatccaccccctcacccctctgccctaaccattccccaaatgcactgaccctccctgattccgtcacacacgctgtgccctttgagcctagtcaccctctgctcctccttcaagcaccgcctgaatcttgggaagcccttctctgcggtgcttccccttgcaatcacccccactcccacccagggatctgccccactcctccaggtctgtggcctgtttgtccttgtgcgccaagagcctggcagagagatgggacaaggcagacttagagtgggaggaggagaaagaaaaacaggtcccacccc

SEQ ID NO: 1334 - DNA, 544 bp, Homo sapiens
catgaacctcaaccccatgatcctgaccaacatcctgtcgtcgccttacttcaaagtacagctctacgagctcaagacctaccacgaggtggtggacgagatctactttaaggtcacgcacgttgaaccatgggagaaaggaagcaggaaaacagcgggccagacagggatgtgcggaggggttcgaggtgttggaacaggaggaattgtttctacagcattttgcctgttatacaaattatttaccctgaagttaactcgaaagcaagtgatgggtcttataacacacacagactctccatatattagagcgcttggatttatgtatataagatatacacagccccctacagatctgtgggactggtttgaatccttccttgatgatgaagaggtatgtcaacaagggtaataatttgttttcttctgattactctcatatttttattatcttttatttattggtggtttaatgtcttcaagaacttcctgtacttaaatttatttcagtgaagatacttttggaaattaaatgtccttttaa

SEQ ID NO: 1335 - DNA, 1810 bp, Homo sapiens
  misc_feature (1)...(1810): n = a,t,c or g
aataatctctaattgcgccgggcgacttccgatccctatggccaaactttttcatcatctttttttctacgttgataaaagaacttaatggaagcactgtttccaaatcacatacgggtaagagcccacacgtaccaccctgctctcatacttctcaaacccacatccaccacccagacaggagggtgcagaccccacaggaaattacctcccggagcactgactgatatttttccttaaaacaaaaaaaatggctgtctcagactaataacagaacatcttaagagaaaaaaaaaaactataccagctattacagcctggtaatagaagcagctttctaagaattcccaagtttataagaggcccaagaaatgcatttattctgttgtctattaagcctccatgacaaggagaaagttatgagtaaatccttggttcatcaggagttaagagctgtgtgccctcatgaggagttaagagctgtgtgcataagcaggttcaagaaacaaactcctgtttgtttgcctcttgatggttcagaaacattcagctgctttcacctctaggacaaatgcttaagaatttactctcatcaacattggaactttacgaaaacaggattcctggttcatcagaagcctgtattaatgaaaaatgcattttgttctttagtgcttaaaaaaaaaagaaactcatctacttttttgcggaactttttttgggatagccattcctcctatggatagtcatcagcaagacacctaaaagacatgttttccctagttcttatcaaaaattcatctcacagaaaaagtcattcaagaaagcaaaactttgctttaagtagataaagtactgtttatatgcattaaaccaagcaatccactcagggttttaacggtgtaaaaactaaatcacagtacagctgaacagtgaatggatgggatggttctgatgaggtattattttgacattttggtctcagaaggtgtttccccagtatccaatgtcttcaacaaccggaaaagaccagcagcttctcgtatcctactgaattcaatacagaatgcctgcacttctataaacaaatcctgtacattaataattttgttacggatcaaggattggagaaacacacacacaagacgcaccaaccgattctgcatatatttatccttaatctgttcacaagtagagatgcaatttgatatataaaggtgaataaattcaggaggtagatcaacagctgtagttagtcgatttacaacttccattgaatgtaaagacatgtccatattgaccaggacagagaaatactcagtgatctggcttgactgcattaatttcagcaacatttctatagcgactaaagggttgttttccacaaggtcaggaagtttggctggggtgaggccaatatggtagacaagtttggggtctttttccaactcaccaagtagctgtgtttgttggggagaggataaggggcttttgaaggctttggcccattattcgtttgatctccacaccagtgctattcttaacacacatcgatttatcccactggatcgcgtggtcaggctccgtggggtttagccaagcaagttcatcctcacaaatgtggagtggaggcggtggacgaataaactctggtcgaaaatggctttcaataggtggctttggtccgctgactaaagcttctgtgatctgagaggcaactgagctgtcaaatccagaattagaagaatccgggtctgggtcactgagaatactggggaagcatcgctttgctttgcgttggcaattnaga

SEQ ID NO: 1336 - DNA, 1078 bp, Homo sapiens
ttttccgggaggcgcgtggggcttgaggcgagaacggcctctgctgccaccaacatggagactttgtaccgtgtcccgttcttagtgctcgaatgtcccaacctgaagctgaagaagccgccctggttgcacatgccgtcggccatgactgtgtatgctctggtggtggtgtcttacttcctcatcaccggaggaataatttatgatgttattgttgaacctccaagtgtcggttctatgactgatgaacatgggcatcagaggccagtagctttcttggcctacagagtaaaatggacaatatattatggaaggacttgcatccagcttcctatttacaatggggaggtttaggtttcataatcctggaccgatcgaatgcaccaaatatcccaaaactcaatagattccttcttctgttcattggattcgtctgtgtcctattgagttttttcatggctagagtattcatgagaatgaaactgccgggctatctgatgggttagagtgcctttgagaagaaatcagtggatactggatttgctcctgtcaatgaagttttaaaggctgtaccaatcctctaatatgaaatgtggaaaagaatgaagagcagcagtaaaagaaatatctagtgaaaaaacaggaagcgtattgaagcttggactagaatttcttcttggtattaaagagacaagtttatcacagaattttttttcctgctggcctattgctataccaatgatgttgagtggcattttctttttagtttttcattaaaatatattccatatctacaactataatatcaaataaagtgattattttttacaaccctcttaacattttttggagatgacatttctgattttcagaaattaacataaaatccagaagcaagattccgtaagctgagaactctggacagttgatcagctttacctatggtgctttgcctttaactagagtgtgtgatggtagattatttcagatatgtatgtaaaactgtttcctgaacaataagatgtatgaacggagcagaaataaatactttttctaattaaaaaaaaaaaagtcgacg

SEQ ID NO: 1337 - DNA, 704 bp, Homo sapiens
ctcgtcagagaacctcaccaagggaagatccttgtccttcaaaaccttcctcatctgggttttaataagtatttaccaaggcggcatcctcatgtatggggccctggtgctcttcgagtctgagttcgtccacgtggtggccatctccttcaccgcactgatcctgaccgagctgctgatggtggcgctgaccgtccgcacgtggcactggctgatggtggtggccgagttcctcagcttaggctgctacgtgtcctcactcgcttttctcaatgaatattttgatgttgcctttatcaccaccgtgaccttcctgtggaaagtgtcggcgatcaccgtggtcagctgcctcccgctgtatgtcctcaagtacctgaggcgcaattcttcttccttcccagctactgcaagctggcctcctaaggggctgtgcacccccagcgggctgggccccagcaccttctgcccttcccagcaccttgtgccctttgccagtgaacgcagggtttgccattgctaccaagcaaggcaccacaagaaagggagggtacgccaggcgagcccagggcacagatgctgagacagcctgtccttctcagtgcagggacgtcacccctgccaggcaagcccagggcacagatgccaggatggcttctccctctcagtgcgaggcttcacccctgccaggcaagcccagggcatag

SEQ ID NO: 1338 - DNA, 426 bp, Homo sapiens
ccctggcctccccaaagaccccaaagactacagacctgagccaccatgcccacctgttttcttgacaggacttgcatatgacaagctctctgcttctcctcacctatgcattgcaagccaggtcagaggcaggttaaacaccttaaggacatgttaggacaagtggcatacaagggaaaaaaacccgttcatttaagttacagaaacagaaaaaaaaaaactggcttattcccacacttactctactcaaagctttgagaagactaattttggcatcctctggctaaatacaaaacaacaaaacaaaacaaggcaaactctttcagcaagagctgtgcggggaagggactataagggacacacacaactgacaggcaaaagctctgagcacgtgattgctaagtttaattcaactgttacaccccc

SEQ ID NO: 1339 - DNA, 1565 bp, Homo sapiens
tgttttcttttttcttttttatttttattttttgcatttatttaaaaaatcccatcatgaccctggaagcctttagaacagttttatcctttgaaacacaggacacatttctcccagtgcgcagaatttcaagtttacgtggttcagcttaagaagtgtatgtttcacgttccttagaggacaacagacccaagttatcactatgagaaaggaacagctgtcccagcttcaatgggataatccaacaccaccagctacctgtacaacagtaagatggtcaatccctgtctgttacccacagggacagcatgacaaggagagagcccccatctgacttaatagcaaaccaacccctttattcttatctctgctgctaggggtcaagactggtatttgttgaggtttcagattccagagacccagggatcccatccctggctgtggctacagtcacatcttaacagggccacctctgcccaggtgtacattcccaacagcatgtccttcctggttctctacccccacagcacttcttagagcagaggcagagcccagaagctgtgtgggtcacagggcaagagctgaagtaagacctgcaagaggcggcagggagctaactgtagcacgaggacaaaaatgaacacggtaatactgaggtaaatgaacactcaattcatgtggaggctgtaaacgtcctgatgtcacctctgcctcaagagcagaaaatgtgactggagtggttacaggaggggcctgccagacccctgtgggaatactacatctgggacacctcaatcaaggaggcaagggagaatttctggccactggcaaatgaagcatactggcttgcagggaccttctgattcaagtacaccaagaaataagctcctcctcccccaactagatggtattgatcactctgcccacaaatggtacccccttcagcaagaactgcaagcccttcttggatttgccttcatgagaaaatggtggcttgggatggaggtgacattccttgctgtggtgaactgcaaagaaggaaaccaggcaatgtattccatagaggcctttaaagagacccgttggaaatgggccatggtctaatttggtgttgaaataaactaacctctttggctgtttctcccaaactgccaccagccaggcaaggccaatccaatactgactgctggctgggggagctcgtaatgggtgatgccgccctgctttttgcatatgtcaggctaacaggtgctttatttccagagaattgttaatgcccttttttgaaaagagcagcagaaattccggacaagaatctgaaaaataggtgtcaaaaactatttcccagaaggtagctgtacaggagtttgagtctccagctgccagggcattaggtgtctagtcactccactcttccccaaagccgctctgctccccacagctcccaggtgtcagttctcattctacccaccctcacactaagagaggttctgggggtcacttttttgttccactcagtcctctctcttggggtggtttggggcaaatcctgacggacgcgtggg

SEQ ID NO: 1340 - DNA, 232 bp, Homo sapiens
cagaagcttaatctataaagtcaaccactctcacttttagtgttccatagaagaaagcctgaaaatcattctagtcatatagttgtttcagtttaaaaaatatagtgaagaaaaatatttaaaaatcagaaataatgtatctgataaggaacacacatttagaatatgtaaagaactctcgcaactcaattataaaaagacaatccaatttaaaaataggcgaaggatctaa

SEQ ID NO: 1341 - DNA, 1045 bp, Homo sapiens
tttttttttctttacgtaagttttatattttattatgacattcattttttctacatgaagacacaaataaaaattataccaactacataaactattttgtactttccttgctaaaccacagatgtatttcatggaaagaggggcctttaaaggcacttatttatcattgtaggtgtgtctaaacaattgatattcaaaaacacaactttttgtgtacaaaattttacaatttttaacaaaagcagtgaagacactaaataacccagtggcgacctcttcaaagtgcagtgtccttggtcaccaatgcagatgctactggggcagccagcgggctcagagggtccaactccagacactgcatccatggctgtcctagactgagttgcacttgtaaaagagatggtcccacacctactaaaaaaacaagctactctagtatcaatatgacatcactcttttaccatcaatcatattgcaaaaccatagtatttaacgaccaataaacagccaaatacctaatgccacattgtcgttcaatttacctggctggttaatatcagtctgtgtttgagtatttcttttgagcacacaaaaacaaatgtatagtcacttgatgaggaaattcttcactttgactcaaatggattcaccatgctgtcagttatgaaaacaactctaattttaatctccacagggcaaccttcacttttcacagcagttctaaaactgacctacagaaaagttcaagattttttaaaaaatttggctaccatactatgtttcttatctaattttctataatcaatacgactcttacgttccaaatatttcatgggaaatttttccctcaaacttaatatgtttcttaaacaaattgaagccactaaagttcctgtttaaaccactgataactgccccagttaaaataataataatttaaaatgattacacttcaaataaaggtactaaaatcacgcccccccaatttgtaagcgcttttgttgttattgggtactcactgtgaatagaagtaaatgtacttgac

SEQ ID NO: 1342 - DNA, 432 bp, Homo sapiens
  misc_feature (1)...(432): n = a,t,c or g
gactacaagtaaagaagtatctgaaaatgaaaaaggaaagaaagtaaccacaggagaaacaagttctagtaacgataaaataggagaaaatgtccagctatcagaaaagaggctgaagcaagaacctgaagagaaggtagtttcaaacaaaacagaagatcacaaagggaaagaactagaggcagctgacaaaaacaaagagactggaaggttcaaaccggaaagcagttctccagttaagaaaacactgataactccagggccctggaaggttccaagtggaaataaagtcacaggcactattggtatggctgagaaacggcagtaacctttagtataaaacaaagaaaaacaagttgtaatcttttcttacagcagcatttttccagaaaaagcctttttttttttttcaaaaattttgaaaaanaaaag

SEQ ID NO: 1343 - DNA, 240 bp, Homo sapiens
gcaggttgcatgtgtgcggtgtgtgggtccacccagagaaaggtgcctttttcacagaagaatcctctgatcttcaaaggtctgatacaaaaatgatgaaaaaccattgcttttgaaagccccccttgaaatgctgaagacactgtcctgccctgaactgtgggcttcatcccaaggtatgtaggaaagcttattgagcaggcatagtccacgaccaaccatccttgtcgagaaaagata

SEQ ID NO: 1344 - DNA, 1275 bp, Homo sapiens
ttttttttttttatgtcactgacaaagaacttttatttctttttaatgacattaaacacaactgctacaagggaaaaaacatgataaagaggaggcaccaaacttcagtttcataattgaaactgacaacgccagtaaatcagggcctgcattcgaaactacaggttatttcaggctccttacttgtaagtaaacaatgtaaacagcatatttttactctgctttgtcaagacccccatggtgggaatgtcgtcatggatgaagaaagcagttaaatgcacctaacacttgcttaaaaaataatacagcaagaattccaactgcaatattagacttagaggccaataccaaatataagagatatgcagctttgaaaagagatgaaaactccagattctacccagtaccatctttaaggcgaacatgccagataatgagttttctttggctttgttttttcttcttaaagaataccatgttaaccactagagaacagctctctcctcccccagtccaacagatttaattaagcttgctaaagctttggaaaaacagaattatttgagctaagaggaaatgtgattgtcacattttctagttaacctgtcactcatttgatttggcaaaggcagtgctcctattacacattcagtcttaaaaccccatgtaccaggagggcacgagtcttagatttttgcctaggcaaaatcctgtcccttcactccttgggttttctgtagggaactagactacagttccctactgtagctgcaatgctagctattccaactacatttaattttaactatgctatggtcccaaaggtggatgtttggcatgtctcactccatcaacctaatttagggcagcctggagaagtgaccgatgtagtaaatgccaagtaggctaactaaaataatagatttcaactactgcctttgaatagaacttctcctttgcattttggccccagaatttaaaacaaatgttcaaggaaaagcaaatccttgactggataaaaacactaaacacttagggacattcacctaaatttattgttggcttaaatgaccaagcgttccccacgtccgtttctaaagtggggtaggatgtttagaatgcattactcacacagaaagatgggattgatgaaatcacaaaactaaacacaggctatagcaactatgaacagccttcacagagaatgaacaatagcacaaatgccagactgcaacacttcctaaaatgatgtctatagctatctgtaaagagaga

SEQ ID NO: 1345 - DNA, 604 bp, Homo sapiens
  misc_feature (1)...(604): n = a,t,c or g
tgaaacacagctttagtttttgtctcccattgccccatgacattttgcgtagtggggttatctatcactgctctcgcatggaaagttagaaaatttcaaggctttttagcctgcttttaagtgacagtccttgggtcctgctaaaaatacaaatagcctcaatttagaaattagaatgtcacctccaaccaaggtattgttcaaatatccccatctttgttgttaaaagaaaatctttaaaaganttatatttagcaaaatttaattgaacaaagaacaattttctaatcaagtaaccctcaaaaacgaaagaagttcagagagttctgctcagcaaagtgggcaggcagcacttataaacagcaaatggaaatgaggtccagaagcagcttgagtagttacaggtgagcagttgtcttactgggcataggctgctcagttggccacatgggattggctgtagcttggctgctgtgattggctgagactcacctcgttagtacaaaaaaaaaatactcctaagttaggttgcagtttgttatgtagcgactcaagttacgaggcatcctnagaccaaatttagtttaattttaacattatttat

SEQ ID NO: 1346 - DNA, 1288 bp, Homo sapiens
aatttaaaaagatgtcctcactgcacaagtgactacgggctacaggcaaggatgggagacggaggcttcaacacaactcattgcacttagaaccgttactaaccgaaacaccatttgcttgtcaacaatgtacccttgacagcagggagaaacttctttatagtctctgcttcagacaagatttacagctttctccaagggccagagcgaatgtgtgaccacaagtcttgtttcttgtccaccagacccaatcctctggcaccttgtaccccccgttcctcagcaatatgctcgggcctaggttccagaggcagctggaaggaagcagctatgggctcattcagttctgtttgcccaaatccagaagccctaggaaagtcccgtctgagtcttgactcctgacccttggaagtggctggagtcggtactgggtggaaaaccccactcccacggtgtggggtagtgctgtgaattggaaaccgcagataccctggaggcctggtagacagctgactgcccagcactgggcagactgatagtccgtaagtctgatggccaatgacgacctagagttctgaggaaaggaggtggaactcagagttcctgtgctgggactgagaaactgaatctgaggttggcgagtctgagggtccctgcagggtagggctagcagcactagaagggcagctcctccttggaagattgctgccagtgctgtttccagaatgtggctggctgctaaaataccctggtgtccccgtaaatggggccaacgagtctgtggacacagggtgggcggggctggaataggacgtggaagagagggatgattctgaagaaccgtgagagggggggtttccaggtctcagtgcagtagttcgataactgtatcctggagactgtgtaggatgtcctctgaagggggaggaactctgctgaaggaggctttgtgattctgtccgaggactatcacactgcaggagctggtagctgtatctggaagggctgtaaactgttgctcctttagagagtgctgagcttaatgtctctgggccttctccatctgcagggtctgagtctttctctgtgatgttactctcccatgtgggagagggctctcccttttgggccaccctcacgctgcttcggaggaccttggggatgctccctccttctcggagtcgttctactgatgtgggaacccatccacctactgctgatattctcttgaggtctgcagtgagatgaagaagtgcctctggaatctgtatggttaccgcctccaaat

SEQ ID NO: 1347 - DNA, 1732 bp, Homo sapiens
ttttttttccaacccggcttccttcctgcaaggaggtgccatgtcatttattcaaagaaaacaaaacgaaaccaaacaaaacagggcaaacacatttcttaataagtgcagtttgttaaaatcatgttaaaacatatgagtcaaggggaagtaaaaataaagggtatcactgtaggaaaagcttttgggtctggcacctgggagaccactggagaggaggcagtgggagaaacttcaagttctgaagggaaggagccccccaacctccccttcttccctctcacccactgaatcccaccagaaactaccaagacgcccggaataaaaggtttcaagttcaatagtcactctctccaaatacaaaaagcagttacaattcaactgaacacagaagcttgtgtgcaaagttatggggaactggggcatcgtataaaaagttgggttaaagatgattctgtggtttggttttgttgtgttttgttttgtggctcttcctcagtcaccctgaactcaggaaagaaatgcttatcttgatgaaatatcaacagcccacccacagtaaaaagacaaattctaaaaattaaaaaaaagcgcataattaccaaaaaaaagtcactgcttcctccccctccccattttgctttttaaacttttttttttttaagttttgattttttttttaatcctgaaaagtagacagtaaaacagctcctgggagaatttacaaccaactgcatgagggtctgggaagctgaggggctggagcagggttgggagagtgaacaggaggggattctcccctcagtcactgtagcctcactgtatgatcaagggaggtggggattatttagtcaaaaaggaagaaggtaggaagaacaggaggtggaaggctggggaggtggggacaaacagaaaataaaaggtcattgttgcctgtttgaatccagaaaaaaatgcctggccctatggaggggaaggaagcccctcagaggggaggcagtgggctggagggaggcagccctgggatgaccccatccccagcaccacgggatctggcgggggcagaggaggggccgaggcaggcgctggtggaggaagccggcaggggcctccgggagcctctgggtcacactggctactgtgtacttgtgccaccctgtgtgttcccggagtagctcccgtagtcgtagttcccgtagtatggcggccactggccctggttctgatagtactggttccactgctgggcatactgctgatactggttatagctgggctgagggtaggtctgtgcggtggggggtggcggtggggtatagggggccgggttgtaaccgccgtagctcccatagttgtaggcaggtggtggtggaggtggaggcggtggggctgtgtagccctggctgtaacctccctggttgtagggtggctggctgtaactcggctggaaagtggagggaaaaaagccaaagctctgtggagggctgtagctgctgacggtgggggtgctggtattggcgcttgagccagggatgttgctgttcttattgtaggtgctggcaccctggggggttccgagcagggctgtagctgggtggtggcggtggctgctggggtggtggctgtggtggcggaggctgctgtggtggcggctgttgctggggagcccggttgtagctgcctctgttgttggagttgttgttatctcggttttcatagcgtggaagccacc

SEQ ID NO: 1348 - DNA, 777 bp, Homo sapiens
tcttggaataattttttatttaaagttacatttcagaggaaactatcttcaggagggcatgaagcctatattggctactgcaaaacaaccagaagttttataaaatatttctgatttaaattactaaggcactatagataggcacctatattacatacaatcttcaaacatttttaaaagttgaaactatgtattagttgatatctaaaatattaaagcccctgacaaactgaacggctaagaacttgacaaaatgagatgcctgtttcaatgattctgttgccaggcatattaattaaaatacaatttgagattctaaattacacgatccagccttagtccagggaccttgtgatgatagttgtattagacttcaaaacaccctttccgcaggaaagggcatttttcaagatggcaactgctgtgtcatcattttcccttttctggactgtatcagaaatccttcagaaagccctacccttaaatgcacagctgcttttcccaactgcagttttctcttttcccattagatggcagtaacgcaccatctctcttcacacagggtcagcggtggagggtaagttgaacagaaggcccactgcacagcaggccaagtttctctagtccacgttagtggggcacaaaaattggaaatgagaatacagaagagtgattctaaccaggtcataaggccaaactagtgctagttatggaaaaataggagacaactagtgaacgagagatctgtgaagggtttcagtgcaatcctgctgagtg

SEQ ID NO: 1349 - DNA, 842 bp, Homo sapiens
gcccaagctgcctcggttcaagtctcagcccagtcacttcccagatgtgcgactcaggaaaacctcggatcaattctcagctggtggcacaacaagtggcacaacagtatgccaccccaccaccccctaaaaaggagaagaaggagaaagttgaaaagcaggacaaagagaaacctgagaaagacaaggaaattagtcctagtgttaccaagaaaaataccaacaagaaaaccaaaccaaagtctgacattctgaaagatcctcctagtgaagcaaacagcatacagtctgcaaatgctacaacaaagaccagcgaaacaaatcacacctcaaggccccggctgaaaaacgtggacaggagcactgcacagcagttggcagtaactgtgggcaacgtcaccgtcattatcacagactttaaggaaaagactcgctcctcatcgacatcctcatccacagtgacctccagtgcagggtcagaacagcagaaccagagcagctcggggtcagagagcacagacaagggctcctcccgttcctccacgcccaaagggcgacatgtcagcagtcaatgatgaatctttctgaaattgcacatggaattgtgaaaactatgaatcagggtatgaaattcaaaacctccacctgccccatgctgcttgcatcccctggagaatcttctgtggacatcgacctcttagtgatgctgcccaggataatttctgcttgccatgggcatctggccaccaaggaatttcgcaccctgacgattactcttgacacttttatgtattccattgttttatatgattttcctaacaatcatttataattggatgtgc

SEQ ID NO: 1350 - DNA, 546 bp, Homo sapiens
  misc_feature (1)...(546): n = a,t,c or g
gaactgggcaggggaagaggcactgcctgaagcctggagccaaggcccggctaaatccacctgatggtggcccanacctccccttcagactctcctgcagccccatgaggcctttctgtccctttccggacagttggctaagtaatttggaaaagaagggcaaaatcagtaatgggctgtaccttgtctttttccgtaaggcatgagtacctatgacttagaagaggaatctgcagatatcaaaaactgaacatcaggaatcatcgcaaccatccctccatctggaattgcacccccatgtgaaagtgacaatgaaaatttatcacaaactgtcattgccctctaggaactcccagggtcaagggggaaagaggtgttaaatacctggnnnnnnnnnnnnnnnnnnnnnnnnnnnnnnnnnnnnnnnnnnnnnnnnnnnnnnnnnnnnnnaattgcttgactcaagantcgaaccantctgggcacataccatctctacaaaaaacacaaaaattactgatgtggtggacatgcctatntcctaac

SEQ ID NO: 1351 - DNA, 705 bp, Homo sapiens
  misc_feature (1)...(705): n = a,t,c or g
taaaaaaaagattgaacttcaaaaccattttcttacatactcagtagaagttgttatgagccaacattttttgtgagctatactattttaaacatctaaagtaaattatttgacatataaaaagacttcttcatttaaaaatatatcttttaaaaataattttacaagtgatggcatctcattttagaagaagaggcatcaatgacagcagttacagtaactcgatgctgaatatgtttttaaatacaagatgctgtgttcagcattgtacatacattatcaaattttattctgataatatgctgcatgatgtattaggctgggttctctcagacagaacctacacgtatacatatatatatatacacatgcatatacatacacatacagagagagagaaagagagagagagagagatctctacnnnnnnnnnnnnnnnnnnnnnnnnnnnnnnnnnnnnnnnnnnnnnnnnnnnnnnnnnnnnnnnnnnnnnnnnnnnnnnnnnnnnagagtagagtagctttctccaagtcctgaagcttcagaactagggaaactgatggtataactctcagtcagaggttgcagtgagcagagatcgcaccaccactccagcctgcacgccagcgctaaannnnnnnnnnnnnnnnnnnnnnnnnnnnnnnnnttctagaaataaacaattcatgttttaaataaaaaaaa

SEQ ID NO: 1352 - DNA, 835 bp, Homo sapiens
gtgtgttgccatagcgaccattttgcattaactggttggtagcttctatcctgggggctgagcgactgcgggccagctcttcccctactccctctcggctccttgtggcccaaaggcctaaccggggtccggcggtctggcctagggatcttccccgttgcccctttggggcgggatggctgcggaagaagaagacgaggtggagtgggtagtggagagcatcgcggggttcctgcgaggcccagactggtccatccccatcttggactttgtggaacagaaatgtgaagtttttgatgatgaagaagaaagcaaattgacctatacagagattcatcaggaatacaaagaactagttgaaaagctgttagaaggttacctcaaagaaattggaattaatgaagatcaatttcaagaagcatgcacttctcctcttgcaaagacccatacatcacaggccattttgcaacctgtgttggcagcagaagattttactatctttaaagcaatgatggtccagaaaaacattgaaatgcagctgcaagccattccgaataattcaagagagaaatggtgtattacctgactgcttaaccgatggctctgatgtggtcagtgaccttgaacacgaagagatgaaaatcctgagggaagttcttagaaaatcaaaagaggaatatgaccaggaagaagaaaggaagaggaaaaaacagttatcagaggctaaaacagaagagcccacagtgcattccagtgaagctgcaataatgaataattcccaaggggatggtgaacattttgcacacccaccctcagaagttaaaatgcattttgc

SEQ ID NO: 1353 - DNA, 450 bp, Homo sapiens
ggaaactgagatgtaaggaggttaagtgacttgtccaaggtcacacaggaagaggctgagccaagattcaaagtctgacttcacagtactggttctgctctatcatgggaagtgtctcctcactgcacacacttccaggttcagacaaaccggaaaggaaacccaccatgcaggactgtccatgtgatggctcttcccgtggctccatttctaagcgcctccgaggacctcatcgtggcccaggaccgcaagccaaggccaccccagtgtccttaccatcctgggaatgggaggagtcaggcccagccttgtcctgtctgcccccctgggaagccttccctgagcactggcctcttatttacccgtctttgtctctggcttgttggtatctgtcccttgtctgattagggaacgcctgaggtcaggatctttgcctccccaatcagattg

SEQ ID NO: 1354 - DNA, 1210 bp, Homo sapiens
tttttttttaaaccttcccttaaaggactttatttctctatttttatatggatcatttattaaattagaagactaaaaagtaaaaatatattttacaatcaaagaaaaatctggacaatggaccccagtaaaataatcagaagcgcacgttctgagaccactcctgcctggcaccctgcagggtagcgcccagggagcatctgcagaggggagaggagaggagggggagcctccggcgacctgtcttctatctccggagccccgcctgaggctccaagatggcacagtcaggctgtccttagtgaccgctgccacggagctggcgatcggcctgcatcttcaaacccaggagcaggagcagcagaggctggcaaggcctgggccctcagacaccaggggcctaaacccagctcccaaacccactgcagcctccccttgtgagctggcagacaagcctgtccttctgagtgtgacgacctcatccacacctgacacaggcgggggcgggggagggtgggggttgtgaaccagctaattctggggaccgctcggaggggctcagcaagctgcttctacagtaagccacttctacagtaagccttcaaacaggaaataaagcataaaatgaaggaaagaagaatcttatttaattaaaggccttgcaaaatgtgatttgtctattaaaaaaataaagcgcttgtgaaaaagaaaactaagagatggcggcaagcgtggtcatcggcaaagggttgctctccctccagcgaggctggccccaactgtgtggtccctcgggcccccacacgggctgctcaagggctggcagcaggggccacgtcctctctaggagacacccacagagccacatgtgcacgcgtgtggcagtctcactgcaccccagcaacgcgaaggcagaaaccggtgctggtggccacacctgggcgcctggacaccgaagcccccagcacagtgaggcctctgagtgtggcttgtggtctgtcctgggttagagttgttaatatcacggaacataccatctagaacgttccagtcccacctgacaccttcattcccaatggagaagaaatctacacaggcgtaagaccaggccatctgagacagggaatcccaggggcccctccgtctgagtggtcggcgtctgctgaacaaataccatgtctttcttcttcaaaggatcaaaggcctttag

SEQ ID NO: 1355 - DNA, 418 bp, Homo sapiens
  misc_feature (1)...(418): n = a,t,c or g
gggtaagttgatcaaaaaaatgacacaataactccttcccttcctgaatccatatgccttgtgactttgcctctgttctaataagaggtgaagtccatttccttattcgttgaatcatgtttgggcattgtgacttgtgaatacagaaggcagcagaactaatggctatggggacatctggaggtctaggtcctcaccaggtctcccagctgctggatctcatcacctggaacgctgctcccaccatgtgtagaagcctgggttagtgtcctggaggatgagagacaatgngtagggtgacctnnccaacatncccncagnngnggctanntcaacnnnnnannctntnnnngnntnctnnngtatangagcnnnntcttctctnnnntnngattccnnnnnncactcatnngngtct

SEQ ID NO: 1356 - DNA, 1056 bp, Homo sapiens
  misc_feature (1)...(1056): n = a,t,c or g
ttttttttttttttgtactgcatgttttcaaaatattttttaatgtgatgagtggtctgggaaatcctcgcctaacaaagtggcttttgattcaaggcctgaagaaggggagggcccactccaggtagatgacatggccagggcaaaacctgaggccagagtgtgcctggggatatgagggacgtggagggcacccatgtccagcccacctcagtgcttctgcctcagtgagaaggggagggagttggccacaagggggcctgggtgcatcaaataggaagccggtgagtcaagcagctcggggccagtggggctggagagatgccagagccaggggctatgtgtggacttagggtttggaaccattaaagggctctgcgacgggagtggcaggatatgacctatttttgagacattgtgctgagaacaggccttaaaggcagaagcacagagcctggctcggggcgctgcagtactgaagccccatagttgaaaattatcttcctcccagctcctacccaggccctctccctctccagatgcctacagcacaccagacagtaggctccttgctggcacgaaccacagcctccagctcatggctctcaaatgcagtgcaggtatgcatggttctcttctgggcattactgggcagggtgccctgcaggagccacagttaactgcagtgcaactaatgagacactgcacatcagggaccacttgccattcatgactgcaggccccaccacagctccacgatgtgggccccactcacatcccatccagggcaggaacgtgagccatggggaggctaagagcagacccagggtcacacagtgatgaggctggcactgagggctccccacctcctcacaccctgcagcacaccacaggggctcaactgatcctgcaggcacaattgacctcccgaagagccaggccttggcggggaggggtgaaggtgggggtcagggggcagcatatctgcctggagacattcagtggccaggttgggggcagcccaatttcctgagtggaagtgtnttncacaggcag

SEQ ID NO: 1357 - DNA, 521 bp, Homo sapiens
gtcagggagtacaagagaaagtcatataagctctttctacttttcatggtttctatgtctgaacccatgaatcttccttctgaaaggtccaactttcttctttaataacaataataatggcaaaggcattgggggaccgtgagcaaagggcaggcctttgcaggggtgggaatggaaagggaagcacgtccctagaggtgggcctgggatgggggttgggggatgaagcaagtggaccttgaaggtctccacaggtctgagtgtcctatgctccctgggcctctcttcccccaggtcttctcgttcgcaactgcaccatcactgccaatgctgagtgtgcctgtcgcaatggctggcagtgcagggacaaggagtgcaccgagtgtgatcctcttccaaacccttcgctgaccgctcggtcgtctcaggccctgagcccacaccctcagcccacccacttaccttatgtcaagtggtaagttccaggcaactctctgtgccatcacgtggggtaacgggga

SEQ ID NO: 1358 - DNA, 460 bp, Homo sapiens
  misc_feature (1)...(460): n = a,t,c or g
attggannnnnnnnnnnnnnnnnnnnnnnnnnnnnnnnnnnnnnnnnnnnnnnnnnnnnnnnnnnnnnnnnnnnnnnnggcacgagctgaaactccctgttaaacacccactcccgaggccctggagctcccattgtaccttctggctccatgagcgtgcctcctctagggacctcacaggagcagaatcctacgggatttgtcgtttgcgacggcttatttcactcagcatagtattctcaaagtccatccacggtctagcatgtatcagcattttatttttatttttatttttatttttattttttgtaaagacagggtcttggtnnnnnnnnnnnnnnnnnnnnnnnnnnnnnnnnnnnnnnnnnnnnnnnnnnnnnnnnnnnnnnnnnnnnnnnnnnnnnnnnnnnnnnnnnnnnnnnnnnnnnnnnnnnnnnnnnnnnnnnnnnnnnnnnctccc

SEQ ID NO: 1359 - DNA, 506 bp, Homo sapiens
tcatgatagcaacttatcaggcctgtttcctctgatagatctggacttttccccttaagtgctttcctgttgggcttctcagactatggagaactgctcatagttgagatctaagagacaaattaccctatggtgttcaagaatggccgtatttagtatactgcctgtcctggaagtgttcacatttaaaaaggcatgactttccaatgggcaaatatcagacacctacatgcatagataagggaaatatgttttacttaagcaaacttctaggcattgaatctcagtgtttaggtgcagagatggaattcctataaggcaatgcagtcattcaccacatcaggaaggccaaaaaatgaacactctcgtaattttgttattatctggaaagttctgatatgataatgaacctaaaatactgaatagatagtgaacatcctaaaattccactgaccagaatccattcccatggtcatcatctgtagagggcatgatacaatgacagg

SEQ ID NO: 1360 - DNA, 1123 bp, Homo sapiens
tgggattgccagttcttccagcagccatgctctgaaaatcaaggtagaatccatggaaagggaccccaggaccccgggaccctagacgtatcttgaactgccatcgtcatttcaaatacatctccctcagggtttccaggtggccacccccaattattcattccttaccaacctctcaaatcctcttggctttctctctgcagtgtggacactgttggctagtcctccccactccctgagggtccagtaagttagcttagaaccttcctggaaacatttcatctgagcaggtttccccacgtgtgggatgctccttttgcctcatctgtctcagggatgcaggctcccccgcatgcatggggatttctccccagaccagcatacttgtgacctgagagttcaatgtgtaaagatgcccctggtcagccatatccatcttctcttgcctggtccttgattctctggccgctccctgaccttcctccttccactgccttgactttcttcctttttattcctggtgccatctgtccaggcagctagacaagaacttgttcaccagcagccggattcaggccttcccaggggcataataagtgaccagcccctcctctccggacatcagatccaacacataaggaccctggcctaccctccagcccaacagccagttctgggtcagctgccaacttaggggtggtttgattatcccattgaaattcaccagtgcctttgccaaagaccctctcatttggacatacccagattcattccctggctccaactgaaaagactcagtttcaatcgttaaaagttcctttagggccagaagaataaatgaattataatcccattttgaagaaccgatttataaccaatgaaaaggttataatgtaatttatattcttggaggaacaagattttcatttgggattatttccttcaaccattcaacaaacatttgttgtatgccactaagcgccaggcacggcgttgggctctgcaaacacagtggttagtagcagtctggacctggtccctactggcatggaacccatcactccccaacatgcaaagcccacatttaaaggccagcctctgccccttcagtgatgcgctcttt

SEQ ID NO: 1361 - DNA, 418 bp, Homo sapiens
ggcagttggaggtagcgcaagttgaaaaccagctgctaaaaatgaaggtggaatcgtcccaagaagccaatgctgaggtgatgcgagagatgaccaagaagctgtacagccagtatgaggagaagctgcaggaagaacagaggaagcacagtgctgagaaggaggctcttttggaagaaaccaatagttttctgaaagcgattgaagaagccaataaaaagatgcaagcagcagagatcagcctagaggagaaagaccagaggatcggggagctggacaggctgattgagcgcatggaaaaggaacgtcatcaactgcaacttcaactcctagaacatgaaacagaaatgtctggggagttaactgattctgacaaggaaaggtatcagcagtttggaggaggcatcagcagcctccg

SEQ ID NO: 1362 - DNA, 751 bp, Homo sapiens
aaaaaaaattcttttaattaaaaaaaaaaaaagctttactacttcctgtggagttcataaaaagttcttccctttgttttagtcatccagagtaaagtcatagggctcaaagtctttccggaagcggcgagccagggtctcctcgtcttccttgctgatctgacactgcctccagtcagacttatcaggaacattaaggatggcttcactggccaggacctcccttccaaactgcaaaggaaaattctttttaattctgtggaaaagcttttctcctgtgtcaagttcaacataaaaatatgctgctcctggctgtgcaatctgcttgatgtcagagtgctctgggatttccaacagctctatctgctgctcctgtgcctgggtaatgaaggcatctttaatgtcatcagtagtagagcagctgattgggacaggaatgacctgggggttggggagacaggagaaattccttgtgcaggtcccagagaagttgtgcctgcacagtctctgagaagtagcaaatccatcacaggggtggagaaacacccctcagcacagaatatcctcaggccagacaagcctgtgtcagcctgtctgtaaggacttaaacttatgagatagcctgacacatgtgggagccattctctgatgcaggaaaggcttaagagagatatctccgtcacaagcctttgccatctccgatattatatatgtggcagagttaggcccatttgaaaacttaacaaatgtg

SEQ ID NO: 1363 - DNA, 172 bp, Homo sapiens
acctggcccctcattttctgttttttaaaaactcagggctgcagcacacaggaataggataggcaagtgcacaaggttggagacaaagaaaccagttaagagacagctttggtaatctgaaatgatggaggccaagattagaaggcagtacaacagaaattaagagtaaatc

SEQ ID NO: 1364 - DNA, 621 bp, Homo sapiens
tagcagtagtcatagacttaagactattctagagatcttcatctccataagacttttacatttattttagtaaacttttctttctatgcctctttaatggagtggttctgttatttaagcctgttctaagtttgatcaaatggcaatgactaggtctagttttagtttttatttttgcaggagtctattgctaaagaattttattttgatccttgttaaatttttattttaattaataaggtagtcattcctgtagagggataagatgcttgtagagttgtgggtatcattccaaatagaactgttatgatttgggaaatattctttactacaaaggacttatttcataattacaaattttccttcatatttgcctttgtttataaaatcttcaggaatgacattctctagcaataaaaggaatgaaccgttatgtttctaagctgaaaagaggaacaggtgggtaattatcctgccatacttaaatatagtggaaaatcctctattgagaatgtggataaatgaacaattgtaagttttgcatcataaactgagaactttcttttgacaggggggaggcgggagggatagtaggtgggggtgatctgcttgcttctttta

SEQ ID NO: 1365 - DNA, 626 bp, Homo sapiens
aaaaaagatgaaaataaaataaaatatatatttacaggcctacaacttttgcctcagactgttccccttttctaagggtattcaagttttcaccttttaagcttcatatcctcagtgcttgtagaatgatgagcttagaggtaccaggtcattgcagttgtttgcttaaagacttattgaaatggttactgggcgtaaatacttggccaactcaactttattgcccctgatcttttccatttttgtttccaccttaacctatagcagctcctccaaatgaggaatgctgtaagtaaggactcatcaaacagattttaaccattttattatcctgtgtgtccttacattgcttctgtgagatgtttttttcttatctgagatgaactttcaggagcctatttgaactccagactggtgttctggggcaaagagctattagccaaactgattctatgcaggtgaaggacgcactaaagttctcactttagtgagaacttttctagctattccaatacagagttctttcttatagggctattgatattgacaccaaatggagtggcttctcagcctcttaatgtcttaagtaagtgcttaatttggaatagagaaaccagtatatttta

SEQ ID NO: 1366 - DNA, 6345 bp, Homo sapiens
ctcgtggggaaaaggcagggagggggtggtgtccccagccggtttggggggtgcgttgcccggagacggaaagtttgggagcccgagcaggctcggctgcagcctcggggagggggtccagcgggtggcggccctggggatggggaaggagcaggagctgctggaggcggcccgcaccgggcacctcccggcggtggagaagctgctgtccgggaagcggctctcctcaggctttgggggcggcggcggcggtggctctgggggcggcggcggcggcagcggcggcggcggcggcggcctcggctcttccagccaccccctctccagtctgctcagcatgtggagagggccaaatgtgaactgtgttgacagcactggctacacacccctgcaccatgctgctttgaatggccataaggatgtggtcgaggttcttctgaggaacgatgcgctgaccaacgtggctgactcaaaaggctgctaccctctgcatttggcagcctggaaaggagatgcccagatagtgcggttgctcatccatcaagggccttcacacaccagagtcaatgaacagaacaatgacaacgagacagccctgcattgtgcagcgcagtatggccacacagaggtggtgaaggtgctcttagaggagctgacggaccccaccatgcgcaacaacaaattcgagacccctttggacctggcagcactgtacgggcgactggaggtggtgaaaatgctccttaatgcacaccccaacctcctgagctgcaacactaagaagcacacccctctgcacttggcagcaaggaatggccacaaagccgtggtccaggtcctcctcgatgctggcatggacagcaactaccagacggagatgggcagtgctttgcatgaggctgctttgtttggcaagaccgatgtggtgcaaatcctgctggctgcaggaactgacgtcaacataaaagataaccatggactgactgccctagacactgttcgggaactgccttctcaaaagagccagcaaatagcagcattaattgaagatcacatgactggaaaaagaagtacaaaagaagtagataaaacccccccaccccagccacctctcatctccagtatggactccatatcacagaagtctcagggtgacgtggagaaagcagtgactgaactgattatagattttgatgcaaatgctgaagaagagggtccctacgaagctctgtataatgccatctcctgccattcgttggacagcatggccagcgggcgatcatctgaccaagactccacgaacaaggaggctgaggcagcaggagtgaaacctgctggagtgaggcctagggaacgtccaccacctccagcaaagccaccgcccgatgaagaggaagaagaccacatagataagaagtattttcccttgacagcttctgaggttctgtccatgagacctaggattcatgggagtgcagcccgggaagaagacgaacacccttatgaactgttgttaacagcagagacaaagaaagtggtgttggtggatggaaaaacaaaagaccacaggcggagcagcagcagccggagccaggactctgcggaggggcaggacgggcaggtcccagagcagttctcaggcctcctccacggctcctccccggtgtgcgaggtggggcaggaccctttccagctgctctgtaccgctggccagagccatccagacgggtccccccagcagggcgcctgccacaaggccagcatgcagctggaggagacgggtgtgcatgctcctggagcctcccagcccagtgccctggaccagagcaagagagtgggctacctcacaggcctgcccaccaccaacagccgctcgcaccctgaaactttgactcacacagcatctccgcaccctggtggtgctgaggaaggagaccggagtggggccaggagccgagcgcctcccactagcaaacccaaagctgaactcaaactcagccgcagcttgtccaagtctgactctgatctcctgacctgctcacccacagaggacgctaccatggggagtcggagtgagtccttatccaactgcagcattgggaagaaaaggctagagaagtcaccctccttcgcctcggagtgggatgagattgagaaaatcatgagttctattggagaagggattgacttttctcaggaacggcagaagatctcaggttcacggacgctggagcagagtgtcggggagtggctggagtcgattgggctgcagcagtatgagagcaagttgcttctgaatggctttgacgatgtccacttcctggggtctaatgtgatggaagagcaggacctgcgggacatcggcatcagcgacccacagcaccggcggaagctgctccaggcggcacgctccctacccaaggtgaaggctctgggttatgacgggaacagcccccctagcgtgccctcctggctggactccctggggctgcaggactacgtccattccttcttgtcaagtggttacagctccattgacaccgtgaagaacctctgggagctagagctcgtcaatgtcctgaaggtccagctgctcggccatcgcaagcgcatcatcgcctccctcgcagacagaccgtacgaggagccgccccagaagccccccagattctcccagctgaggtgccaagatttgctctcccagacgtcatccccactgagtcagaatgattcctgcactgggcggtcggcagatctgctgctgcctccaggggacacaggcaggaggcgccatgacagtctccatgaccctgcggcaccctcccgagcggagcgcttcaggatccaggaggagcaccgtgaggccaagctgaccctgcggcccccaagcctggcagccccctacgccccagtgcagagttggcaacaccagccagagaaactcatcttcgagtcctgtggttatgaagccaattatctgggctccatgctgatcaaagatctgcgagggacagaatccacgcaagacgcctgtgccaagatgcggaaatctacggagcacatgaagaagatccccaccatcatcctgtccatcacatacaaaggtgtcaagttcatcgatgcctccaacaagaacgtcattggcagagcacgagatccggaacatttcctgtgcggcccaggacccggaggacctctgtacctttgcctacatcaccaaggacctgcagaccagccaccactattgccatgtgttcagcaccgtggatgtgaacctgacctacgagatcatcctgacgctggggcaggccttcgaagtggcctatcagttggccctgcaggcccagaagtccagggcgacgggcgcctctgcagctgagatgattgaaacaaaatcttccaaaccggtgcctaagcctcgggtcggcgtgaggaaatccgcactggaaccacctgatatggaccaagatgcccaatcccatgccagtgtctcctgggttgtggaccccaaaccagactctaagcggagcctcagcaccaactgagccactgaggaaccacactgtgctgcggaaacatagacgtgggggcataggctcccgctgccaccaccgccatcgcctcacctgcagctctgaagacccaggcctcacctccgcctgcaggacctcctcttggccacttggcctgggcctgccaccaccacgtcctgcagaacgagccctgccttggctgtggagaagcactccaggccgctagcagatgggactggcattccagagggtcaagaagtgacttgttcagaacacattgtttttaacagaaaaaaaatctttttataaaatgaacttttaacacttggctcaaacctctaggtcatactgccaatctttagacaaatggccatggggcagaggacaggggagctgaggttggttcagaggccagcctgcatagcctctgtcctcaggacggaacttgggtgcagctcagtgggtcggaagagaaggcggtggcctgtgggtgaggggaacggagcaggctcaggcagaattgagtacggtgcgtctgcttttcaaacccaaccatatcagctgctgctctttatgaactgcccaacttcctgtccctttcaggggctagacacaggcttctcgtaagaacacagccttagaggcacctgagcaactcaaaggtttccggtccatttctggggttcccgatgggaaggttcagtggccaaatgaagataagtgtgcagtttctagtgctgggaagtcttagccagcaccagagcgccaggcctctccctggcctcttacctgtcagtgatcggagcactgccctgggctggccggcgccgtactgcctgcgttgtgtcagagaataggaaaagcagctttgtttggggcattaatgcttggagtggggtcagctaaggttgctacttgccaatttgtgatttgtctaatcagcctgtgtgattggggctcattttgattctctgaattatcggtttgacggttacacttggctgctgggcccatccctggcccccggtgtggaaaaggctaaataaggtgacagtgcatcgatgctcccccgcgtggcctttggggcaggctggcatcccggtgcgcctctgcttcttaagctttcctgctgctcgctttgtttttaaaagtaacttgggttgcattcttccctctggactagagtagaaatgcaggggaaactgctgtggatttgagaggcaaagttggctcagctgtgtgcccagttcctcctgtgggcactttagcaggctccgagctttcctggcataggtcaatcaggtcccaggatgaataatccaggcttcagcaacactcctctttcccagccagcaaaggctgtgaatttgaattctttgttggtatgtatgtgcagggagtactgttaggcacattcttaacccatgtggttggccagaaatcagaagtggggctgtgtctctgactggctagaggccaggccttgtgggtttctatctgctaagcacccagcaggttggggcctgggactcagctctctctgcggtagaggcaggccctcctccacttcttggtactaaacgaagatctcgacaccttgcagttttacttcatttcctgcccctttcagggcctgtgaggatgcccatgagctaccgctgtacagttctcggccccggctttcttccaagagttgaccaggaaccctaaagcatccagagtagactgcgctgccactgcgcacatgctggtgcccgtcttcctcctaaggggccaggccacatccaagtgggcctctgtcgggggcggggcggtaggtccgaaagaaaccgcagacactacgatgcactcctcaagctgtcttttgtgcttagatcatccataggtgtttcttctgcttgaagctgctatatcatctttatttattcagggtattttcatattggaagccttggctagtctgctctagctctgggttctgtttagagattggtttatttctgaatattcaagaaaggaaaatgactgggcctttctttcttttcttctcctctgggatgggtagtctccctttcctagaaaggttattataactttaaggacaggcttcaagtgggaaggcccctacttttgcacttctccaagtgcaggtcacaccaggggcagaccctgtcgctgcgtttctgaactgtgaaggagcccattcgggtgggagacttcagatgggctcagtacctgtcccagccacaggcttcttgtccacctcttctcccctgcccaccagctgctcagcgcataagaccttcccgacaggctctgcgtgtgcagctctctgcgtccctcctgggccctccagcgtcagacactaatgggagttcccgagatgctcgggtttgagcagggagcaggcagagctgcagtcagagacattagaaaaccagtctgaattgggtctgtctttgagatgcccaggccagcagaaagcagctcagaagtattgttgctcatggtgtggcaatggactgaactgtaatgaaaatgttatttaatctttgtctctgtattttgatacttgaatgactttcccttttgttttactgtatataaaattgttaatctgtctgattttgtctgaattataaacactttgaggtaccaaacataaccaatctgtgcaacaacatagactgacctcagtacccaagagagtgtaaatatttctgggcttccagctttggttttgttattttcataactgtacacaacttagaacagactgaattaataaatgagaagcgacatgaacgcaaaa

SEQ ID NO: 1367 - DNA, 750 bp, Homo sapiens
gcggcgctctgccaggtggggccggagctgcggggagggagttggcgcctagcagcgcagctccatccccgcctctgcagtggactcggccgcagaatcggggtcccgggctcctggaacttgtcccccccaggccgcggcgaggaggtcactccagccgatctctggaccggattcgtcccattctcgtcctcatggtggacaagaaactggtggtggttttcggaggcacaggtgcccagggtggctccgtggcccgcatactcctggaagatgggacattcaaggttcgagtggtgacccgaaaccctaggaagaaggcagcaaaggagctgaggctgcaaggtgcagaagtagtgcagggagaccaagatgaccaggtcatcatggagctggccctgaatggggcttacgccaccttcatcgtgaccaattactgggagagctgcagccaggagcaggaggtcactccagccgatctctggaccggattcgtcccattctcgtcctcatggtggacaagaaactgggcctccactatgtggtctacagcggcctggagaacatcaagaagctgacggcagggagattggccgccgcgcactttgacggcaaaggggaggtggaggaatatttccgggacattggcgttcccatgaccagtgtgcggctgccctgctattttgagaacctcctctcccacttcttgccccagaaagccccagacggaaagagctaaaaaaaaaaaaa

SEQ ID NO: 1368 - DNA, 528 bp, Homo sapiens
gaggcattcctttcatcctcctctcatcctacacacactataagagacaactgaaatcttgcctcctccagccagcttcttaattcatttgttctcaaagccctggtttgagctcacacagcatctagagtgttttacaaaatataaaatattattatccctgccctgaattttttgttttggtatgtgtgttattttcccctccaataagattgtgccttggagagggctgagaacatagtatcatagataaatgaataaaataacataaaataaaataaaaatacatataccctttgaactaactattccacttctatgtaagcacaattatatgccagtaacactcattttaacgctactttagtggcaaaaaattgtaaacacctcagatgcctattaaaagaggaatggtttaaagatactattatagccacactatgaaatataatacagtagttaagaagaacgagcttgatttgtatgtactgacaagaagaatctataaggtatgtaaacagttgatat

SEQ ID NO: 1369 - DNA, 614 bp, Homo sapiens
tttttttttttttttgagtcaatatgatttattgttttctcttctgccattaacattctagctactgggtaagttgttctccatccttgggatctcatggttgggaggagaggtctgggttccctcccacaaaactctcaacgatagaatagaagcacagctgcctcagttatctcacggctgctgctgtaaccaacatgagttccatatccactccaatccctgatgatgtggccatatcctacctccctctggctcatatgtttgagaggattgtacaggctgttgtgtacagctgtggagccagagttggattcttccaaggggatattcggttgctggctgacgacatgaagactttgaagcccacattgtttcccgcggtgcctcgactccttaacaggatctacgataaggtacaaaatgaggccaagacacccttgaagaagttcttgttgaagctggctgtttccagtaaattcaaagagcttcaaaagggtatcatcaggcatgatagtttctgggacaagctcatctttgcaaagatccaggacaagctgggcggaagggttcgtgtaattgtcactggaggctgccccatgtccacttcagtc

SEQ ID NO: 1370 - DNA, 841 bp, Homo sapiens
  misc_feature (1)...(841): n = a,t,c or g
ggtggcgtccgagcgccgagagtgagggtgcccccgcctcacctgcagaggggccgttccgggctcgaacccgcaccttccggaaaatggcggctgcaggcccagcctggcgangctcctcccaggatcctctgtcctgttcctgtgtgacatgcaggagaagttccgccacaacatcgcctacttcccacagatcgtctcagtggctgcccgcatgctcaaggtggcccggctgcttgaggtgccagtcatgctgacggagcaagtacccacaaggcctgggccccacggtgcccgaagctggggactgagggccttcgcggcttggcaaaagacctgcttcagcatggttgcctgcccttgcagcaggagctggacagtcggccccagctgcgctctgtgctgctctgtggcattgaggcacaggcctgcatcttgaacacgaccctggacctcctagaccgggggctgcaggtccatgtggtggtggacgcctgctcctcacgcagccaggtggaccggctggtggctctggcccgcatgagacagagtggtgccttcctctccaccagcgaagggctcattctgcagcttgtgggcgatgccgtccacccccagttcaaggagatccagaaactcatcaaggagcccgccccagacagcggactgctgggcctcttccaaggccagaactccctcctccactgaactccaaccctgccttgagggaagaccaccctcctgttcacccgggacctcagtgggaagcccgtttccccccatccctgggattcccaagagtgggtgcgattccaccagggagttgccgccccctttttgg

SEQ ID NO: 1371 - DNA, 1234 bp, Homo sapiens
ttttttgtttttttttttttatgtcgtatatacatatatataatattttattttaaaatgtcattgaacatatacatttctttagctttttccaggggacattgcacctaagtttcaaaacacacaaaatagatcccctttactaaacagttttcattttggggttacaaaaaagtcaatgtttcacaatcacaaagcataaaggtacatggttctgaaacaatttccaggcagatttctctcattcactgtactagggtagttttgggaaaccccagaccatgatccattcctggacaaatgatctccaccatgggcctccctgggtctccaggaaaaaaaacaaaggaaaactgggggcaaaacaggagtaaaataattaacctcaggactcaggaaacaaacacaaaatacttgtgggagatcagaaaagtagaggacacaggttctccttcaagtacatcacagtagaaaactacagcacatttacagccttatttggtcactgtctacctggttgctacatgaacaaaacttcacctaagacacagaagaaaaattaaagctatttacacagataacactgtggattcgaaagagcagtcctctgcagaccggcactccatctgacaaaagccacagtgctcacagaagaggcaagtcagtctgctgcgtagcgtcctttgaaaaatcccagtgtacaaacatgtgccacgtcaccacacaaaaccaaagtctgctcagagaggtgggctatggtgtgcaggctgcaacctttctctgcaattgttaagtcttcaaaaatctgagttcctcacataaaattctgtgctgtggccagagctcgttttaccattttcttagattggatcacttttaggatcagcttcgttgttctttgcgtagacaatgactctcacagctttctccaagtgtcccagaagcactaacttactgaaaatagaatctcatcaaagcttaacatattcactctgaaaacagcggagctgctgggtcgcttaaggaaagctgagaacctcaaacctgtggaaggaaaaccagtgaccacttgtggccttataaagttgattggcaggtgaggaaggggatctcaagaggagaatccgaatttcaaagacatgggagatttgtccctaatgttttcatactagtgctcttgttaaatggaaaacccttcctgaatggggaagatctgaggctaaatctggatcct

SEQ ID NO: 1372 - DNA, 282 bp, Homo sapiens
cttaagaaggagatacttttcaagagcagtttgaaatcaggctcttgatctactgacatctactcctcgaatttgaagcactgcagctcaaagtgcttctgataaaaataaagaaatgtcaatatgctacagaatggatggcctattggctgtcagggcacacggtcaaacggctgctcctgagcacatggtcaaaagcacatatgcaaaacacggctaagcaggagcatttggagctgtggggcgagctatggggcaagctgctcggggccattacagacc

SEQ ID NO: 1373 - DNA, 2048 bp, Homo sapiens
gtccatcaccatgtgggttttgaagaccctcgactgcctccccgatgctccgaagcctgatcttccagggtggggaggagaaaatcccacctcccctgacctccaccacctccaccaccaccaccaccaccaccaccaccactaccaccaccacccaactggggctagagtggggaagatttcccctttagatcaaactgccccttccatggaaaagctggaaaaaaactctggaacccatatccaggcttggtgaggttgctgccaacagtcctgcctcccccatccctaggctaaagagccatgagtcctggaggaggagaggacccctcccaaaggactggagacaaaaccctctgcttccttgggtccctccaagactccctggggcccaactgtgttgctccacccggacccatctctcccttctagacctgagcttgcccctccagctagcactaagcaacatctcgctgtggacgcctgtaaattactgagaaatgtgaaacgtgcaatcttgaaactgaggtgttagaaaacttgatctgtggtgttttgttttgttttttttcttaaaacaacagcaacgtgatcttggctgtctgtcatgtgttgaagtccatggttgggtcttgtgaagtctgaggtttaacagtttgttgtcctggagggattttcttacagcgaagacttgagttcctccaagtcccagaaccccaagaattgggcaagaagggttcaggtcagccactccctggagacacagccttctggctggggactgacttggccatgttctcagctgagccacgctgctggtagtgcagccttctgtgaccccgctgtggtaagtccagccctgcccagggctgctgagggctgcctcttgacagtgcagtcttatcgagacccaacgcctcagtctgctcatccgtaaagtggggatagtgaagatgacacccctccccaccacctctcataagcactttaggaacacacagagggtagggatagtggccctggccgtctatcctacccctttagtgaccgcccccatcccggctttctgagctgatccttgaagaagaaatcttccatttctgctctcaaaccctactgggatcaaactggaataaattgaagacagccagggggatggtgcagctgtgaagctcgggctgattccccctctgtcccagaaggttggccagagggtgtgacccagttaccctttaacccccacccttccagtcgggtgtgagggcctgaccgggcccagggcaagcagatgtcgcaagccctatttattcagtcttcactataactcttagagttgagacgctaatgttcatgactcctggccttgggatgcccaagggatttctggctcaggctgtaaaagtagctgagccatcctgcccattcctggaggtcctacaggtgaaactggcaggagctcagcatagacccagctctctgggggatggtcacctggtgatttcaatgatggcatccaggaattagctgagcccaacagaccatgtggacagctttggccagagctcccgtgtggcatctgggagccacagtgacccagccacctggctcaggctagttccaaattccaaaagattggcttgtaaaccttcgtctccctctcttttacccagagacagcacatacgtgtgcacacgcatgcacacacacattcagtattttaaaagaatgttttcttggtgccattttcattttattttattttttaattcttggagggggaaataagggaataaggccaaggaagatgtatagctttagctttagcctggcaacctggagaatccacataccttgtgtattgaaccccaggaaaaggaagaggtcgaaccaaccctgcggaaggagcatggtttcaggagtttattttaagactgctgggaaggaaacaggccccattttgtatatagttgcaacttaaactttttggcttgcaaaatatttttgtaataaagatttctgggtaataatgagtcaaaaaaaaaaaaaaa

SEQ ID NO: 1374 - DNA, 397 bp, Homo sapiens
gggcattttacatattaataaatttattccatcagtactcattgatctttcttgcacagtaaatggatcttttgctccatacttgcatttataatatcatgcattagttacttggaatatattggtttatgttttattgtgtcaaaaatcacttttagtttaaccaccaatcttactttaacaggcctttaagtattgaaaagctgccaagcctacagtagaaggaacaagtttttcaaagtccacaggaaagcttaaattttatcattgggaacaaatacgtatttcccttgaagtgacaacctctcacttcatttatttttgagaatgatagttgaactggtttttagaccgagtttcactctgtcacttggctgagtgcattggcatgatctca

SEQ ID NO: 1375 - DNA, 414 bp, Homo sapiens
gtaaacactgaccctttccccctttgctgctacctaggcagatgccagccccaaacctcatccctagtggaggccttgctgatgtggaagtggccagggccctcatggaggctgggcagaagcccaagagcaggctctaaagctgccaaacccggcagccctggtccccggaggctcttgccagtctgacagtgttcttggcactgctcagaggtgagtgtggctgagtttagcaactcccctgggctagcgttaatgctggggtttcctctcctgtgcccagggtctctctatgtaggacagctagggatctcgtcctgtccccaggaccagctcggtaaccaaggacaggttcctgtgctgtggctgtctagttggtaaaagtgaggggttggctgccttgggtgagtttct

SEQ ID NO: 1376 - DNA, 930 bp, Homo sapiens
tttttttttggacccaatttttaaaatattgctttagggagattttatttggaaaacattaatttccaaaaggaaggccccattttaaaaccatcagggttttggtgatcagggtaggtaaagtatttttattataaatttcaagatctaaaaaataatttattacatttactaagataaatctaagatgacctttttaaaccaagccacgtgtgccctgcatagtgacgtcgtggccctcgggcatggaaagacacgggtctgcccttcctttagggctggaaagacacgggtctacccttcctttagggctggaaagacacggggtctaccccttcctttagggctgggatcagccagaggaaagaaaattatgccgatgctcaactagcatatactgattaggactattttggtttattaccctggcattgaagaattcaggtgaagatgccaccactcttgaactctgaaagccaaactagaatctgcagagcagcctcagtcttaaaattcaagcttctttttcctactttttatttcagtgatatttaggacactctctatttcataagaattatgatctaactggctctataagcccaagaataaaaatccttaccccctagcaagagacccatagaactcatcagtagtaagactaaggtcccatattggaaaaaatatactagcccaaggttatagacagggaccatccagcaatagagatgttgctggcaagtaaccatggtggtgggtgaccactagcgaaaagggctgaagagacctcagaaggtcatccaggttatcctcctgccttgacacaagacacatgtgtctctctagccagagttacttgcagttgcactcacaagtggggaccccaggtctccttcatgtgattttctctgtgtacatatttcgaagatt

SEQ ID NO: 1377 - DNA, 88 bp, Homo sapiens
ggagagaatctcagtatctcagtcttcatttcatacgacattcttcgggctcctcttgttccatcttttgcagacttgaagtatttat

SEQ ID NO: 1378 - DNA, 442 bp, Homo sapiens
gacatggcgtcctcgacttggtctgagacgtgataggcctgccttctggttgaagatgtggcgagtgaaaaaactgagcctcagcctgtcgccttcgccccagacgggaaaaccatctatgagaactcctctccgtgaacttaccctgcagcccggtgccctcaccaactctggaaaaagatcccccgcttgctcctcgctgaccccatcactgtgcaagctggggctgcaggaaggcagcaacaactcatctccaagtggattttgtaaataacaagaggacagacttatcttcagaacatttcagtcattcctcaaagtggctagaaacttgtcagcattgaatccagatgaagcaagctctagatccaattccccaaattagctctactcctaaaacgtctgaggaagcagtagacccactgggcaattatatggttaa

SEQ ID NO: 1379 - DNA, 349 bp, Homo sapiens
ctttttgctctctgcctcttttcccttagatttatatgggttggtaaacctgggccttgtggtactcaatcatccttgcttcagtgattcactaagtaaccccttgcgagttgatttctccagcctctgggatttatttgcattgttatgcaatggggtgggaacacctcacttgctgttctggctcctcaggcagttagttctatcttctcttacagctgatgcttcttgaggggaaaggccaccttgtgtcttttgttagagataggatgttgccaagggtagggcaaccaggagggtatcccttagcatgtaactttgaagaatcaagattggtgctccccacaaa

SEQ ID NO: 1380 - DNA, 898 bp, Homo sapiens
cttcttccttcccctcctcgccgccaccgcccaggaccgccggccgggggacgagctcggagcagcagccagagtttattaaccacttaacctctcagaactgaacaaagacaacattgttcctggaacgccctctttttaaaaaagaaagcataacccctactgtagaactaaatgcactgtgcatgaaacttggaaaaaaaccaatgtataagcctgttgacccttactctcggatgcagtccacctataactacaacatgagaggaggtgcttatcccccgaggtacttttacccatttccagttccacctttactttatcaagtggaactttctgtgggaggacagcaatttaatggcaaaggaaagacaagacatgcctgcgaaacacgatgctgctgcccaaagcgttgaggatcctgcagaatgagcccctgccagagaggctggaggtgaatggaagagaatccgaagaagaaaatctcaataaatctgaaataagtcaagtgtttgagattgcacttaaacggaacttgcctgtgaatttcgaggtggcccgggagagtggcccaccccacatgaagaactttgtgaccaaggtttcggttggggagtttgtgggggaaggtgaagggaaaagcaagaagatttcaaagaaaaatgccgccatagctgttcttgaggagctgaagaagttaccgcccctgcctgcagttgaacgagtaaagcctagaatcaaaaagaaaacaaaacccatagtcaagccacagacaagcccagaatatggccaggggatcaatccgattagccgactggcccagatccagcaggcaaaaaagccgaagaagcctgggaatcaagtttgaaacaaagattaataaagttctttgcctagt

SEQ ID NO: 1381 - DNA, 4095 bp, Homo sapiens
cgcgacctcgtggtgggctgcggtggcttcgtcaagtcggacgtggagatcaactactctctcatcgagataaagctgtacaccaagcatgggactttgaaataccagacagactgtgcccctaataatggttactttatgatccctttgtatgataagggggatttcattctgaagattgagcctcccctagggtggagttttgagccgacgaccgtggagctccatgtggatggagtcagtgacatctgcacaaagggtggggacatcaactttgtcttcactgggttctctgtgaatggcaaggtcctcagcaaagggcagcccctgggtcctgcgggagttcaggtgtctctgagaaacactgggaccgaagcaaagatccagtccacagttacacagcctggcggaaagtttgcattttttaaagttctgcctggagattatgaaatcctcgcaactcatccaacctgggcgttgaaagaggcaagcaccacagtgagtgtaaccaactccaatgccaatgcggccagtcccctcatagttgctggctacaatgtgtctggctctgtccgaagtgatggggagcccatgaaaggcgtgaagtttcttctcttttcttctttagtaactaaagaggatgtcctgggctgcaatgtctcaccagtgccctgggttccagccccaagacgagagtctggtgtatttgtgctacacggtctccagagaagatggctcgttctctttctattccttgccaagtgggggctacactgtgattccgttctatcgaggggagaggattacctttgatgtggcgccttccagacttgacttcacagtggagcatgacagcttgaaaatcgagcccgtgttccacgtcatgggattctccgtcaccgggagggtcttgaacggacccgaaggagatggtgttccagaagcagtagtcaccctgaataaccaaatcaaagttaaaacaaaagctgatggctcattccgccttgagaacataaccacagggacatacaccatccatgctcagaaagagcacctctactttgaaacggtcaccatcaaaattgcaccgaacacacctcagctggctgacattattgcaacagggttcagtgtctgtggtcagatatcaatcattcgcttccccgacaccgtcaagcagatgaataaatacaaagttgtcctgtcatctcaagacaaggacaagtctttggtcaccgtggagacagatgctcatggatcattttgttttaaagcaaaaccagggacttacaaagtgcaggtgatggttcctgaggcagaaaccagagcagggctgacgttgaaaccccagacatttcctcttactgtgaccaacaggcccatgatggatgtggcctttgtacagttcttggcatcagtttctgggaaagtctcttgcttgaacacctgtggtgacttgctggtgactctacagtccctgagccgccagggtgagaagcggagcctccagctctccggcaaggtcaacgccatgactttcacctttgacaacgtgctccctggaaaatacaaaataagcatcatgcatgaggattggtgctggaagaacaagagcctggaggtggaagtgctggaggatgacatgtctgcagttgagttcaggcagacgggctacatgctgagatgttccctgtctcacgccatcactctggaattttatcaggatggaaatgggcgtgagaatgtggggatttatagcctcttcaaaggagtcaaccgattctgcctgtccaagcctggtgtgtacaaagtgacccctcgctcctgccaccggtttgagcaagcgttctatatctatgacacgtcttcacctagtatctttacattgacagccattcgccaccatgtccttggaactatcaccaccgacaaaatgatggatgtcactgtgactatcaagtcttccatcgacagtgaacccgccttggtctttaggccctctgaagtctgtgcaggagctgcggagggagcagcagctggctgagatcgaggcccgcaggcagggagagggagaaaaacggcaatgaggaaggtgaagaaagaatgaccaagcctcccgtgcaggagatggtagatgagttacaaggccccttctcgtatgatttctcttactgggcgcggtctggagagaaaatcactgttacaccgtcatctaaagagctgctcttttatcccccttcaatggaagccgttgtcagtggagaaagctgcccagggaagctgatcgagatccacgggaaggcaggcctgtttttagaaggccagatccaccccgagttggaaggagtcgagattgtcatcagtgaaaagggggcaagttcaccgctgatcacagtctttactgatgacaaaggtgcctacagtgttggccccctgcacagtgacctggagtacacggtgacctcacagaaggagggctatgttctgactgcggtggaaggaaccatcggagacttcaaggcctatgccctggcaggcgtaagctttgagataaaagctgaggatgaccagcccctcccggggagtcctcttatccctgagcggtggcctgtttcgttccaacctcttgacccaggacaacggcattctgacattctcaaacctgagccctggccagtattacttcaaacccatgatgaaggagttccggtttgagccatcctcacagatgatcgaggtgcaggaaggccagaacctgaagatcaccatcacggggtaccgaaccgcttacagttgctatggcacagtgtcttccttaaacggagagcccgaacaaggggttgccatggaagcggtgggccagaacgactgcagcatttacggagaagacaccgtgacagacgaagagggcaagttcagattacgtggattgctgccgggatgtgtgtaccacgttcagctcaaggcagaaggcaacgaccacattgagcgggcgctcccccaccatagggtgattgaggttgggaataatgacatcgatgatgtaaacatcatagttttccggcagattaatcaatttgatttaagtggaaatgtgatcacttcctctgaataccttcctacgttatgggtcaagctttacaaaagcgaaaacctcgacaatccaatccagacagtttcccttggccagtccctgttcttccatttccccccactgctcagagatgggcgagaactatgttgtgcttctgggactccacactccccagatcccagtatggactacatcttggcctcaagtttcttttcaccgcagtgggctaccataaacacatcaccttgatttttaatcccacgaggaagctgcctgaacaggacatcgcacaaggatcctacattgccctgccattgacgctgctggttctgctggccggttacaaccatgacaagctcattcctttgctgctgcagttgacaagccggctacagggagtcggcgcgctcggccaggcagcctctgacaatagcggcccagaagatgcaaagagacaagccaagaaacagaagacaaggcggacgtgaggaggaaggggacagttgcagtctcacttggggacaggccacagccaggggtccggccactacccgcccgtgggataaaagccaaaagcatgcgtcagctaacttcagcctgtgctgctgggcccgcaccccatgtcccttgtcactgtggcatcctgcacccatcctcacccctccgtagagcccctcgtgcaatgcaatgaatggaccctcctgtcactctgctgaacagaatttattttctgagtcaaatataatttattattatttttgtcaaagaagtatttaagctgtgctgtggtgtgagaatgtcattcttgatcttcagccttcgtttgcaagaagagttccagttgacgtggtgtttggttccatggcggggtaccctagggattcatctgttttcttcacttccctttgcatctgagatcctgctggaaaccacagcaacctgtatccactattaggaggtaaaaatcaataaaatggcccattcatttgtgttgtagctca

SEQ ID NO: 1382 - DNA, 1490 bp, Homo sapiens
ttgtgtcacacacctcatattgattccagtgtgattgattcagatgaaaaatggctctgtcggcagtgtgtttttgcaacaacaacaaagaggggtggtgcacttaagaaaggaccaaatgccaaagcattgcaagtcatgaagcagacattaccctatagtgtggcagaccttgaatgggatgcaggtcataaaaccaatgtccagcagtgttactgctattgtggaggccctggagactggtatttgaagatgctacagtgctgcaaatgtaagcagtggtttcatgaggcttgtgtgcaatgccttcaaaagccaatgctatttggagacagattttatacgtttatatgctctgtctgcagttctggaccagaatacctcaaacgtctaccattacagtgggtagatatagcacacctatgcctttacaacctaagtgttattcataagaagaaatactttgattctgaacttgagcttatgacatacattaatgaaaactgggatagattgcaccctggagagctggcagacacaccaaaatctgaaagatatgagcatggtctggaggcattaaatgattacaagaccatgtttatgtctgggaaagaaataaagaagaagaagcatttgtttgggttgcgaattcgtgttcctcctgtgccaccaaatgtggctttcaaagcagagaaagaacctgaaggaacatctcatgaatttaaaattaaaggcagaaaggcatccaaacctatatctgattcaagggaagtaagcaatggcatagaaaaaaaaggaaagaaaaaatctgtaggtcgtccacctggcccatatacaagaaaaatgattcaaaaaactgctgagccacttttggataaggaatcaatttcagagaatcctactttggatttaccttgttctatagggagaactgagggaactgcacattcatccaatacctcagatgtggatttcacgggtgcttccagtgcaaaggaaactacctcgtctagcatttccaggcattatggattatctgactccagaaaaagaacgcgtacaggaagatcttggcctgctgcaataccacatttgcggagaagaagaggtcgtcttccaagaagagcactccagactcagaactcagaaattgtaaaagatgatgaaggcaaagaagattatcagtttgatgaactcaacacagagattctgaataacttagcagatcaggagttacaactcaatcatctaaagaactccattaccagttattttggtgctgcaggtagaatagcatgtggcgaaaaataccgagttttggcacgtcgggtgacacttgatggaaaggtgcagtatcttgtggaatgggaaggagcaactgcatcctgactgtaggactgaacattatgttcactgcactctgattttctgtaggtacagttcaaagccctaaaggagtctggcttttactatctttcttaaagaaaaaa

SEQ ID NO: 1383 - DNA, 978 bp, Homo sapiens
gacggtctctacaagttcactctgtatgctgtggatacacgagggaggcactcagagctaagcacggtgaccctgaggacggcctgtccactggtagatgacaacaaggcagaagaaatagctgacaagatctacaatctgtacaatgggtacacaagtggaaaggagcagcagatggcctacaacacactgatggaggtctcagcctcgatgctgttccgagtccagcaccactacaactctcactatgaaaagtttggcgacttcgtctggagaagtgaggatgagctggggcccaggaaggcccacctgattctacggcgactggagagggtgagtagccactgctccagcctcctgcggagtgcctacatccagagccgcgtggaaacagtgccctatcttttctgccgcagcgaggaggtccggcctgcaggcatggtgtggtatagcatcctcaaggacaccaaaatcacgtgtgaggagaagatggtgtcaatggcccgaaacacgtacggggagtccaagggccggtgagggagggtattgccctccgtgagcacagagactctccatgggagggggagcagtattctcctggatcctggggcctgggtgggctgggggacagctgaggatgggcctagcagatgaagcttgccagcaaggccaaagcaaacggtttctcctgtggatagtggacagagacctttgtaaccaatggaattattcatttttctctatcttttattttttcaaagatattatttgactctatcaaaagtctctcctttttaaaccttttcttatggatggctgtcaatcccaaggcagaagttttcaggtggagaccaagcggcctttgctcttcttccttcttcctgccacactctgctttcttcctgccatggacccctggaggagacctatggagggacagttttgacctgacccctagaggagacagttttgacctct

SEQ ID NO: 1384 - DNA, 351 bp, Homo sapiens
ccccgggacacatggctgttcagattaaactgcattttttcagtctcctttgcaactctaggtctgactacgtaacgatactctagcccaatttaatgtgactaagataggaattcaacttctggattgtgctctaaaaacaaagaaagacttgctctccccttcctcttctcatttgtttgtattaataactggatactctgtggctatggaagtgatctatcttataccatatgatctatcatataccactctaggaatgcctggaccttagcagaagcgtgggcccttgtcaccttcactaaattgtcattcaaatttttacatgaagagaaataaactatcttgttt

SEQ ID NO: 1385 - DNA, 478 bp, Homo sapiens
tccttaggatacttctgaactggtgaggtatgctcacacttgaggtttcctctaaaagttatttttctactttcttctgctaccaaagcagttgccgctacagattgaattcacttgggccatccatgggttactgggttaaggatttttgataggaaggctacgggttatcagtggcctcagtgctttcgggatacgcccttgtttacactgactacactgacaacaaagtggtattagagtgttacagggttatggagaatacctttaattatcaattataggttttaaatttaccttggcttttaaaggaatagggtatactgtttttttcttaagtacttgtatatttctttctctttttctctctttgactttctgtctctctctctctgactttccttttgcctctgtctcttcctctttctgcctctctctttctctggtctctctttctcttttcttgactccttctttg

SEQ ID NO: 1386 - DNA, 830 bp, Homo sapiens
  misc_feature (1)...(830): n = a,t,c or g
atcagtttgtgggcacagagcctcaggagtaaatgaagttactagggctgttcttaccatctccttctggccaaatagcacaacatttcctcgttctgctctgacctcttagcttagaaggaagattcagaagtgaggggctaagaaggttgtccttgcctaatgctctgatctgtaagtgaatagggcagaacagttcagccttgaggttagaatttagcaggagctatcctgacttaatatccagttgtggggtttgcaaaacaaaacagctgtatgtaatcattgccactagttccatctagaactcctttctagtttgttatttttaaaatgtttatacataaaaccaccaaaatacatagcttcgacaagatggaagtttatttctctctcccataacagtgcagtgatagtcagctggtccaggccaggcaaggggctggtccatgatgtcatcaggcacccaggttcctactgtcttgccatgtgncacagttagcaacaaaggaggctgtaaatttagtttctacttgggcagccaaaactctgaggaaggagattctgctagtaaaaaggagtgggggaagaatggccattgggagacaacaagcagactcaaccaggcctctttgttggcttcctttcctcctgctgcacatgagccttcgccgtgcatttggagccatgacagctgatagctccagacctgnatcctccntagcttgggggggctctgangtgaaaaggttttctttcccttccagttcgaatttggaaactcccaaagttctcaatgggtttgttgtgagttccatgtcctcttggat

SEQ ID NO: 1387 - DNA, 343 bp, Homo sapiens
  misc_feature (1)...(343): n = a,t,c or g
ggagagctgtaaaaaagatatgtaaatgctgtccttgcttgcaaaaggctgacactagcaataagtgaaagacaataaactagcatataactaagcaggacaatttcaggtagtaaagaatgatataacaataaagctatatttgagagcaatatcatgctccaggtactcttctaaatagtaactagtttaatcctcttaacaactctacgaagtatgtacctctttcattaaccccacctttatacatgagaaaataganaaaaagaacagtcagtgctagaaaaaaacagaacataggaactgtgagagggcgagtgtctagtgcactgttaagagtcta

SEQ ID NO: 1388 - DNA, 1518 bp, Homo sapiens
ggattgtcactagcattgtgctctacttccaatacgtttactggctccacatgctctatgctgctctgggggccatttgtttcaccctgttcctggcttacgacacacagctggtcctggggaaccggaagcacaccatcagccccgaggactacatcactggcgccctgcagatttacacagacatcatctacatcttcacctttgtgctgcagctgatgggggatcgcaattaaggagcaagcccccattttcacccgatcctgggctctcccttccaagctagagggctgggccctatgactgtggtctgggctttaggcccctttccttccccttgagtaacatgcccagtttcctttctgtcctgggagacaggtggcctctctggctatggatgtgtgggtacttggtggggacggaggagctagggactaactgttgctcttggtgggcttggcagggactaggctgaagatgtgtcttctccccgccacctactgtatgacaccacattcttcctaacagctggggttgtgaggaatatgaaaagagcctattcgatagctagaagggaatatgaaaggtagaagtgacttcaaggtcacgaggttcccctcccacctctgtcacaggcttcttgactacgtagttggagctatttcttcccccagcaaagccagagagctttgtccccggcctcctggacacataggccattatcctgtattcctttggcttggcatcttttagctcaggaaggtagaagagatctgtgcccatgggtctccttgcttcaatcccttcttgtttcagtgacatatgtattgtttatctgggttagggatgggggacagataatagaacgagcaaagtaacctatacaggccagcatgggaacagcatctcccctggggctttgctcctggcttgtgacgctataagacagagccagggccacatgtggccatctgctccccattcttgaaagctgctggggcctccttgcaggcttctggatctctggtcagagtgaactcttgcttcctgtattcaggcagctcagagcagaaagtaaggggcagagtcatacgtgtggccaggaagtagccagggtgaagagagactcggtgcgggcagggagaatgcctgggggtccctcacctggctagggagataccgaagcctactgtggtactgaagacttctgggttctttccttctgctaacccagggagggtccctaagaggaaggtgacttctctctgtttgtcttaagttgcactgggggatttctgacttgaggcccatctctccagccagccactgccttctttgtaatattaagtgccttgagctggaatggggaagggggacaagggtcagtctgtcgggtgggggcagaaatcaaatcagcccaaggatatagttaggattaattacttaatagagaaatcctaactatatcacacaaagggatacaactataaatgtaataaagtttatgtctagaagtta

SEQ ID NO: 1389 - DNA, 886 bp, Homo sapiens
agaggcctgcgcccacaccctctcctgtccagccttcgcccgcctgggcagggcccggcgccgtccgtggatgagccacagaacctcttccaccttccgagcggagagaagtttccattcctcttcttcttcctcctcctcttccacctcctcctcggcctcccgtgccctcccggcccaggacccgcccatggagaaggccctgagcatgttttccgatgactttggcagcttcatgcggccccactcggagcccctgggcttcccagcccgccccggtggggcaggcaacatcaagaccctaggagacgcctatgagtttgcggtggacgtgagagacttctcacctgaagacatcattgtcaccacctccaacaaccacatcgaggtgcgggctgagaagctggcggctgacggcactgtcatgaacaccttcgctcacaagtgccagctgccggaggacgtggacccgacgtcggtgacctcggctctgcgggaggacggcagcctcactatccgggcacggcgtcacccgcatacagaacacgtccagcagaccttccggacggagatcaaaatctgagtgcctctcccttccctttccctgtccccccgccccacgcctgccagcaaagcctcgctaaccccattacaacagctccaggacatctcagcccaggttctagcccccacgcaccccagaccccagggtggaccatcctcccaaactagggccctccactctatccagggcaggccagggactccctggcctgaacaacatggatggcccagattttcaggatttgggcctccgttcactttaattccaggagttacagggggtttggggttcaggggaagggaagatttttaaaggaaccca

SEQ ID NO: 1390 - DNA, 528 bp, Homo sapiens
cccgtagaggcagaaggtgaggcgtctacgccctctctcaccagattttgggcggccctgtggagacaccctgtgccctttaagggacatggattgagtccggatctcaaaaatgtgagcctttcctcagacccagctttgacccacgtactcgcctttcctcaactcattttcatactttcacttgactatatattttttaaaaattgtgttaagcacttgaggttcatttctgcccctactgtatgtcaccctgtgccagagggtggggtgaacacgtgtgtagcagtcatgcgtcctgtccacaggggccgatgcacctccttgcaaccctttacattccactgtgaaacaaacctcaactttttcttattcctgtttttacaccgtgcttatagctgccttaatccatgttcttcgggatgctggtatccaactgagaagttgacggagcatctatcgtgtgccagacactgtgctaagtgctaacgagaaatcggtgagcaaaacagaaaagaaaaaaaaaaa

SEQ ID NO: 1391 - DNA, 1097 bp, Homo sapiens
atcatttagagttgtgagtgaattgcatttttatttacgtttaagagtctctctccctccttgtgttctagtctgtgaatggctcacacttggacttagtgtaggctcctatgggaggagcgggcggtagtgagaatcttcatcaaatggagtaacatgacccaaatctctagaggtttcataattttgctcttgcttctaaaaacataatcatctcttatggggtgttatgtgctttgtaatcctgaaaattttccaacttgcctgctttctttggtgtgaggcgagaaatgccaccacgtggcactgcaggaggagactggtggaagcccacagggctaaggcctttcacttcccagtgacactggttcccaattccctccaggataagctgagactcctcaggatgtggttctgcagcagatgaggtgcgaacaaagcctgctctgccctgggcacccaggatggcactgagttctaaaaggcaaagggtatgtggtgaggggccaggctgaggccctggtgtggtaccatcatgggcagcagcaccatttgaggccgggtaggagagacgtgccagggcctggccccccaagagaccagcagacaaactgaggcggcagagagagagattccagtgtcaccaggaagactgcagatcataacaacaatggttgctgatttggcatcaaagaggtggcaactgtcaaagccgtaattgctgaaaatggcaccaacatgctgcagctggagagagtgggtgacccaacatttgtttgaagaacagatgatgctctttgaatggctcagccaacagcccaaagttttaagggaagacctctctgccagcttctcttggacagtgtctcatgtaaaacctccaaggcacttacatagcatatttttgtgtccactctcttgctagtctgttgtacttctctctgtcggccttgtaggtgtgtgctatctctggcaccagggggtcatcggggttggggtcgcagagcagcgagcagatggacaagagaacttttgacacagtcaacgctggagaccactgagaccgcaggatatcaaggcagatgctgccattgctg

SEQ ID NO: 1392 - DNA, 1125 bp, Homo sapiens
gtgactaggaagagccgagactgcgaaggagaacgcagcaagcccaggcggcggctggaaaggctggaggacacacctaaacatgtggaatcccaatgccgggcagccagggccaaatccatatccccccaatattgggtgccctggaggttccaatcctgcccacccaccacctattaatccaccctttcccccagggcccctgtcctcctcccccagggagctccccatgggcaatccagctttccccccagggtggggccccctcatcctgttgccacaggccagggtatccaggatgccaaccgttgggtccctaccctcctccatacccaccgcctgcccctggaatccctcctgtgaatcccttggctcctggcatggttggaccagcagtgatagtagacaagaagatgcagaagaaaatgaagaaagctcataaaaagatgcacaagcaccaaaagcaccacaagtaccacaagcatggcaagcattcctcctcttcctcctcctcttccagcagtgattctgactgaatacaggccctggacccttccctcaagtctcaccagttctgctctcccatcaagcttcagatgccatgttgtactgggggaatgtagcccttgtgctccccaccccctacctgcacctgagcctcaccctgctgttgagccctgaagtggctaggggaaatgggaagaggattgccatggcctggccatcttgttgctgcttggttagatcatatagctaatgaattaggcaggggagctattttttgaagatgatgaactaaatgttgaagacaagtttgagatctgtaaaatgtgattttttacttccacttataatacttgtgattggggaggtttgtggaaattcaattatgatgaaaaacctctatcttttttgtaatgttggcatacttggggaatttagtggcaaatacattccccagcaggccttttgttggttgcactaactgcaaggttgctgggaagtagagtccatttggttgatgagctttgactgcggttttggaaccttacctctcctccttagcccaatatgctgtcttgggtcctattcaaataaagttatttctcctggtctcaaaaaaaa

SEQ ID NO: 1393 - DNA, 3162 bp, Homo sapiens
  misc_feature (1)...(3162): n = a,t,c or g
tttttagtgtggaattgttttttttaaaactgtgtgtaatacaaatccagccaaaacaatagtgcaaaaagttacaaagcaacaatctcttgggctaatgcagtataggctatacagaaacagccacgatgaaatgtgcagatcaggcacggtgaataccaaggaaccaaggagacggttaatatttcaacccacagtttgtgttttggattttttcccccaaaatttccatacaacaaacagacatctagatcaacccagcaagctatggtggaagtgtgcagtccagaagagcccatggagaaacaagtctcctgaggccatgaagatccgcaacaggctgagtgagagtagcacttggaacatagccacgttctgtggtggaggaggtgggcctcgttagactgctcagattactggaacctcgttatcacatcccattctacaagtttttcactgaatgtttcctgacatctataaatgagggtgcctgcccatgttaatgctgattaaaaaacacaagtacacaaatctatctccttcattgctggtgtatggacccagaacaccatcacaaaatatttccttggcctaaaagatcactggattaacaaggagttttaacagaggaacaggagtgctgtactgagaggctttcgaagggaaacacaggtaccgccatttccgatgagtttctgaaaatgctagaaaaatgacagactgccaaagacagctgtcatgctgttctccatgataacggcactaatattaaaaaaaataagaacttttaatgattgtaatgtatacagtttgggctgtttggcaaacccctgcagatgtgcattaatgatgctttatttaaaaacaaaaaaccaaaaacagtccatgttgaaattgatcagtgtaagttaaatggtggtttttaggctggacccatgatttaagctgtacccatccagctcaaaccgaaaaaaaaaaatcatttgactgttaaagcaattgttcagagtcttgaagaagaaaccaggcaggaaaatgccaataatgatgattggcgaaatcaaaatcgaaaacaaagaaactgtttatcaagccgccgacaaagaaatcttgcatggagactacaagtctggagtttctgggatgaaattgtacaggaatctcagtccacagtttcctcaatcgctgcggagacggagctggtcactgaatctgacagagccctgcactcccccggtccgccgaccctttctgtaatcccagtcttcactgtagcctgaggaactgtttcaacctgctcctttttgatcttcttctttggcacaacctcagtggatttctctgattcagaacgagttctaattgatcttctctgttgcttcttttctactgagcctgtagaaccagatgttgcttcaggagatgatacactctgcgttggcttttcatttctctggtttggtgtagaaattataagcctgtcttgccccctgacacttatttctgttttgttaccaattccctttgttgaataaacaaattgatcgataaatttcccatcccctgtagcattctgaagagcaaacacttgttcaattttcacaactggagacatgttacacttctgcaaatccaggctccctttgtgcatcgtaatggaagctggtaaggatttccttgctgccgcagttttccaggctattttaacaggcggtggctcttcctcttccgcacttgtgtgccgcctctggctatgtctccgaatttcagtacttgagagtgaggaggccacctcccctgcattggtctgttctggctgagtattcagcacagatcttggtcgtcgggtttttttaacttcggttttggaggcaacactcttttttgcttgggataaagcctcttcaggctgtttatcaatgtaaataaaagtatactgttctattctttcttctcgagtcattttcaatgctttctctgcatgggcaatgccaatatcccactgagcacgttctctctgaggtcggggtttccgaatcttttgtttctcagagtgattgctgncttgtttggttgcctcagccagtaattcttcatactgtttatgacctttatactctcgtacccgtttttcatgaacccacgccctctctggctggttgctaaaaaactggacatgatattctcgggcacctcttgtgttaattttagtatgaacctcaagctggggatcacttgaaaccatacaggccaccaaggataggttcccaccttggaccacacaagatcgccaacctgaaacttaacaccagtggacacttccgttgttggaacagaagatagtattggctgaactggggcttccctcttttagtactggttcttcccttggtttttctgatacagtgtcaaccctctcatttggtctattttgttcctctggttctaatttggggattttgtgtgacttgcgctcttcagatcttgatgagtcatgcttggtgctttttttcctcttttcttttctgctttcatgctttgatttcgtgtgctcacttgcctgtacttcatttaaaaggtctccacaaagggaagactcaaacaattccctgccattctggatagttttggttatttttagtttaatttcaggtgagccagtcttctttggaatcacagtttgtggtaccgaaggaggaggtggtggctgtggaggggaaggtttttccagaatttcatgtggtcttgtgtttggaatttctgaatgataatagtcagtggggctaaagtttctaactgcaccaaagccattggctgacccattaggatactgattatatgactggtatttggtttgagtttcatacacactgattgatgatggatacccatttgtgagtggaggaagatcttctgttgtagctgggtactgaaagccttgctgcgaaagtagcttcatatggtgtctggccaccatcttcagcaatgtcactgttgttatcaaaggcatcctcctgacggatgttggccggagtcaatgagttgaggtggttgctgaattgtgtttcccatgatcccttgcatgaaagagaaagagaaatccattgttctgctccagcatccttaactttccctttctctcatcgggccttcagtttgttc

SEQ ID NO: 1394 - DNA, 383 bp, Homo sapiens
  misc_feature (1)...(383): n = a,t,c or g
ggcacgagactgcataggnnnnnnnnnnnnnnnnnnnnnnnnnnnnnnnnnnnnnnnnnnnnnnnnnnnnnnnnnnnnnnnnnnnnnnnnnnnnnnnnnnnnnnnnnnnnnnnnnnnnnnnnnnnnnnnnnnnnnnnnnnnnnnnnnnnnnnnnnnnnnnnnnnnnnnnnnnnnnnnnnnnnnnnnnnnnnnnnnnnnnnnnnnnnnnnnnnttttaaaagctaaataaaatccctccacctctgaaaacccctgcaaagggtgtggaaatggctcattttacccctatgatggttatgctataaaacaattggttttagactagagcttttcagtatgagaagtcnattgctgaaatcaagtatttggtgacacatattttc

SEQ ID NO: 1395 - DNA, 445 bp, Homo sapiens
ggtggctaaatttggggattgcagtggggcgaggcagggtgcaggtcagagggggccagaagggccccagccatcctagatggagccacaagtaccagtgccaaggctcttggtctggaattctgaaaacatttacctctgaccctggcagcccactggccattgcttgtgtgcagcccagttggcagggaaccctatccatgatttgccgcctcttttctggtcccttcagtatgaacccagcatcacagtgcacttgtggcagatggcagtgcatacccgggagctactctcctccggccagatgcccttctcccagctgcccgccgtgtggcagctctaccccgggaggaagtaccgagcagcggattccagtttctgggaaatagcagaccatggccagattgactctatggagcagctggtcctagcatatcagccggag

SEQ ID NO: 1396 - DNA, 663 bp, Homo sapiens
  misc_feature (1)...(663): n = a,t,c or g
ttgagaccagcctgggcaacattgtaagaccctgttccttgaattgccctgggagatttcctcagcttgtactggaggtgtgtggccccatgaagcccatagtcaccgttcaccctgagagacgctggctttggggctcacacgcctgctgcggggcancccaggagatggccaccctgtttctcctggagctggagctgcacgtgttctcagcaactgtggtggctgtcctgttttgtttgcatcttataaacctttacctgattacattttcctcttcaatttagctgctagaaaacttaaagtcagattggtggctcgccagtaatgagagtttagagtagaggtaaactttatgacatagtcttagactcttcactttctcctcagccaacatgattcacatttactttattttgctgtactgtgagtgtctttgtgtttcctgaattccttctggaataaggcaggttgttagtaagcacaggtttctggtccatctcatagcctcaggcagtgggcggtgctgtccgtgctccctttctgggttacctgtggtagctctgaagttgcagggctgcgatttgaagcctgatttagtacaccgtgtttctgttgtgttctgtggtggtttgctcctcacatgtgagcattcaccctgtg

SEQ ID NO: 1397 - DNA, 1719 bp, Homo sapiens
tttttttttttgtcagtttacacatacatcatgttaatattagaccaaggcacaaaacgtttagtgcataaacccagtttcttttaagatttagcattttattttagtctcttatcttagtttggaccacttgtacccagtactctacctactacagactatttaacttacccaacaaaatcaaaagaggttgctgaccagatttataggggacataactgtttatattatcaaagtgtttgcataaccaaaagtacaataataaagatggaaaatgcctcctatttcttttaggaaaataatacttaataggcttggctggcatctttggatgtttttactactactgcatgacaatgaatatctgatagaaaaaagaaatgtatacttgaattatgatagctcatccatcacagtttaatctaaaaatgaaatttctacagaaacaggaactattttgacaaagaaaaaaaaaatccctcatccaaacttctttgtagtggtaaaggctgcaaatttgcagcgtttagaaaactacactatcaacaagctttgctttatggactgagatgtacaaaatctagaaagcagatgaaagtgaattatttcaaagttttagtaaaacttctgataatcagagttcaaagcaaatatggcacataacaactcaagcataaatcaagatggagagcctggagagtttcttaaattttccaaaaagctatcattccaacatgtaggatttctcccctattttaaccttaccagtttcaaaggaaagaaaagggagtggcttccatatagacagcacgtgcgcgagagcacacacacgcagagtggcaggcagagtgtctaattccttcttcccaccttccttcttcccaccacccaagtctcactttacttattaaaagaaaactgcagaactcctcattggttttcctttacctaatgatttctgtgaccttaattgctgccatcattgttatttcttgcatttcaacataacaaaattcaaaagcagcttcattcaggaacacgtatctaaacacctgtgtaaacagcgggggtacctaggtaataataactgccaaattcagtgatcaaacttttgagttccacagttaagatattatgtgaagctcagaatcatgtttcagaccattgaaattactggttaaaatacaaatagctgaagacatgatgtaaaagattaagtacttggttttgtaacatatttaccaattaaagtcacaaaatatttctcattatttattcatgcaggtaactgagaaaaagatagtgcagaaatcaactttaaataaaaaattattcctccccttcctcccactcccctatactctacaaaatgttttccctgggactaggccttgaaaaggccactacatattagtgtgacatgcattactgtctgcaattaaaaaagctaaccttgtggtgattgtaattacattataaaaatgtccacatgcataaatctaaaaaaggttgaaaacctacagtaaatctacaatatagtgtttacatttgaccactggtttgtgttatgtagaagtcatagatttggtaaagcattgtaacaatttaggaaggcatctaaatctttaagttctggacaaattttatgttttaatctacaaaattgcatgaaggctaactcgagaaacttcctatcattctaaaatttctcaagctgaa

SEQ ID NO: 1398 - DNA, 1180 bp, Homo sapiens
gcctcgctcgggcgcccagtggtcctgccgcctggtctcacctcgccatggttcgtctgcctctgcagtgcgtcctctggggctgcttgctgaccgctgtccatccagaaccacccactgcatgcagagaaaaacagtacctaataaacagtcagtgctgttctttgtgccagccaggacagaaactggtgagtgactgcacagagttcactgaaacggaatgccttccttgcggtgaaagcgaattcctagacacctggaacagagagacacactgccaccagcacaaatactgcgaccccaacctagggcttcgggtccagcagaagggcacctcagaaacagacaccatctgcacctgtgaagaaggctggcactgtacgagtgaggcctgtgagagctgtgtcctgcaccgctcatgctcgcccggctttggggtcaagcagattgctacaggggtttctgataccatctgcgagccctgcccagtcggcttcttctccaatgtgtcatctgctttcgaaaaatgtcacccttggacaagctgtgagaccaaagacctggttgtgcaacaggcaggcacaaacaagactgatgttgtctgtggtccccaggatcggctgagagccctggtggtgatccccatcatcttcgggatcctgtttgccatcctcttggtgctggtctttatcaaaaaggtggccaagaagccaaccaataaggccccccaccccaagcaggaaccccaggagatcaattttcccgacgatcttcctggctccaacactgctgctccagtgcaggagactttacatggatgccaaccggtcacccaggaggatggcaaagagagtcgcatctcagtgcaggagagacagtgaggctgcacccacccaggagtgtggccacgtgggcaaacaggcagttggccagagagcctggtgctgctgctgctgtggcgtgagggtgaggggctggcactgactgggcatagctccccgcttctgcctgcacccctgcagtttgagacaggagacctggcactggatgcagaaacagttcaccttgaagaacctctcacttcaccctggagcccatccagtctcccaacttgtattaaagacagaggcagaagtttggttggtggtggtgttggggtaatgggtttagtaatatcacc

SEQ ID NO: 1399 - DNA, 536 bp, Homo sapiens
  misc_feature (1)...(536): n = a,t,c or g
gaacttgtatttgagaattgctccaggactctaccttcagatgctggttagtagcattgactggatttatgaaattggatgccagttaaggaataagagaatgtatttgatttgccaccctatatggtctgtgcagactgtcatgatctcattgaaatccaagaaaagattatgtcagggatgaagcacatcacaggtggttacaaggtcacccaccatccagatggctcagaaagccaaacctatgggttgacttctcctcacccttctggagaatcagtgtggtagaagagcttgaaaangtgctgggtgtgacgctgccagnaactaacctctttggactgangaaactcaananattattggtganatctatgtnncaaaagcttttgaaangctcnacctcanancatatcaggcgccttganaaactgtcnccgagtcctgaagtgncttactcagtccanantacngttannactgcannnngagcncnntgnnannngnccccnnnnnggnccactgancncttgggc

SEQ ID NO: 1400 - DNA, 559 bp, Homo sapiens
gacaaactagagaacatgttgagacaaggtgttcagggaagagttcttttgagaaggtgatattaaagcgagtttggggaagaacgtcccaggccttgcgctcagggtcgtcaactctttgatttctcttccttttgaagcagggcagggaggtcatcaaacaacagaaggacaattataactgctggtatggcaaagccaggactctgaattcaaactctgctccattctcaggaatcccgtctgttaagcaggttctggggaagcgatgtgagtcatgaaatcacaggtcggaggaggcatcgagaatatggtcagttctcaactttcagggaaatccatagctgaggaatgaaggacaacgggcttctcgtgctctcactaggaagactggttcaccggaggctggaacacttgtctaggtggcacgttccttaaaagcgaaaggaccaggagtttcttcctgcctcgtctcttccggatccctcctgcaccgcccacagcagcatctcctttcaagcgctgtcctggttcccggctctccatctcctgcacggcc

SEQ ID NO: 1401 - DNA, 1662 bp, Homo sapiens
gagttatggagggggcgggctctgcagggaagtgcgtcagaggaggcgcggggagagtagggtgctgtggtctgagctagagggtgaagctggcggagcaggaggatgggcgagcagtctgaatgccagaatggataaccgttttgctacagcatttgtaattgcttgtgtgcttagcctcatttccaccatctacatggcagcctccattggcacagacttctggtatgaatatcgaagtccagttcaagaaaattccagtgatttgaataaaagcatctgggatgaattcattagtgatgaggcagatgaaaagacttataatgatgcactttttccgatacaatggcacagtgggattgtggagacggtgtatcaccatacccaaaaacatgcattggtatagcccaccagaaaggacagagtcatttgatgtggtcacaaaatgtgtgagtttcacactaactgagcagttcatggagaaatttgttgatcccggaaaccacaatagcgggattgatctccttaggacctatctttgggcgttgccagttccttttaccttttgtgagtttagggtttgatgtgctttggggggctttgatcggactttgtgccttgcatttgccgaagcttatatcccaccattgccacgggcattctccatctccttgcaggtctgtgtacactgggctcagtaagttgttatgttgctggaattgaactactccaccagaaactagagctccctgacaatgtatccggtgaatttggatggtccttctgcctggcttgtgtctctgctcccttacagttcatggcttctgctctcttcatctgggctgctcacaccaaccggaaagagtacaccttaatgaaggcatatcgtgtggcatgagcaagaaactgcctgctttacaattgccatttttatttttttaaaataatactgatattttccccacctctcaattgtttttaatttttatttgtggatataccattttattatgaaaatctattttatttatacacattcaccactaaatacacacttaataccactaaaatttatgtggtttactttaagcgatgccatctttcaaataaactaatctaggtctagacagaaagaaatggatagagacttgacacaaatttatgaaagaaaattgggagtaggaatgtgaccgaaaacaagttgtgctaatgtctgttagacttttcagtaaaactaaagtaactgtatctgttcaactaaaaactctatattagtttctttgggaaacctctcatcgtcaaaactttatgttcactttgctgttgtagatagccagtcaaccagcagtattagtgctgttttcaaagatttaagctctataaaattgggaaattatctaagatcattttccctaagcattgacacatagcttcatctgaggtgagatatggcagctgtttgtatctgcactgtgtctgtctacaaaaagtgaaaaatacagtgtttacttgaaattttaactttgtaactgcaagaattccagttcagccgggcgaggattagtattatttttaactctcccgtaagatttttcagtaccaccaaattggttttggattttttttccttcctcctcacataccaggggttaattaaaagtg

SEQ ID NO: 1402 - DNA, 462 bp, Homo sapiens
  misc_feature (1)...(462): n = a,t,c or g
ttgannnnnnnnnnnnnnnnnnnnnnnnnnnnnnnnnnnnnnnnnnnnnnnnnnnnnnnnnnnnnnnnnnnnnnnnggcacgaggacggactcaggtccaaatccctggtttcctgtcccttagtggtgtggccgtgggcaaacgccttaacttccgtgagctttgacagtctgtctgggaggcagggctcaggcatccctggcctcttggggttgggtgagagggagacagaggtttgtgaagcgctttgcacacctgggcatctggtcagtgttcagtaaatgccnnnnnnnnnnnnnnnnnnnnnnnnnnnnnnnnnnnnnnnnnnnnnnnnnnnnnnnnnnnnnnnnnnnnnnnnnnnnnnnnnnnnnnnnnnnnnnnnnnnnnnnnnnnnnnnnnnnnnnnnnnnnnnnnnnnnnnnnnnnnnnnnnnnnnnnnnnnnnnnnnnnnnnnnaaaaacc

SEQ ID NO: 1403 - DNA, 1103 bp, Homo sapiens
  misc_feature (1)...(1103): n = a,t,c or g
ttttttttttttttagagaagctcaggtgtcatttttattctgtggttttaaaatgaaataatcttggttagtcacttacaactttgacgactttaaccacctgatgaaacctaccagtttctgcagcctcaggtctccataagggtcttcttaaattggctcctctcatttcaccaccagcttttggggcccaaggtcctaaggttgtgttcttgaagccaaattcccacattaatccatgttaaccacatgtgggttaaacccctgtttaccatatacagatctatcaggcttggtgctacagagatgaggaagacagtccaggcctcccggggggcttagagcttgggggtgagagtgggggtggcagacgttaacaaaatctcccatgcagtgtgatcagcattggcactgcgctgctgtcaccaaggttgatggcctcggattcccctctgcatccaccggtgggacagctggggttgcaggattgagaggaaccctgccagctgctctgcatcccaaggctctgaggctgagggagtcacgtgcgagatgttaggtccaaaccagcccgccctaagtagcaagaatctagaacctgaaggaagctggtgcagtgtccatcaaatcagtttccacaaagctactccccgtctgcagctcagtttctgtgagacttgcccgaggtcttttagaggcttaaaatggttggctggtgtcggattccctgagaagcagcagttaggaagcgtggttcctccagcacttagatggttttctgaaattgctcaagtatttcttcataatcatgttcatcatcatctagatcctgcctttggggcctttaaaggnctgtggcccttcctgtgggcaggaatcttgctgtacgtactggagccatccttgatgaactctggcaaggtcttcgccttgggtttgggcagccgagcgtgttgctgcaatcctaagacttgagaagacttgacgcctccctcactgctgtgtctcctctgcttgctgaggccctgatttttagggggcctgggtgggggggcttggatctcacaggctggtaacttccgaagacgataatagaaggtgc

SEQ ID NO: 1404 - DNA, 1393 bp, Homo sapiens
  misc_feature (1)...(1393): n = a,t,c or g
aaaaacctcaaaaatgcattgccatgattttattattagtgtcccaaaatggggccncccaagtaataaatgatttattccagccacagccaaaaaagactttgcctgggctaaaaagggtctccctctaaagtatgtaatatacaaggaaatacaattcaaagagatgttcctataagtacattttttacacggcatatatttaaaaaggaggccccttttaatataaaattccggttatataccaatatggttaattagcatttacactatagtttgaacgtattttaaatagcatgatgtgtatacaatgtctcccgcgcccattggcaaccagggtcgtgggaagcttggtgaggagttaaccaggtcctgtggtttaagcagtggagcacccgggattcctgcccccctttctgctcacacaattgcactccattcttccgccttccttgttttctccaaaaccacctgataggggggatgtcctgatttctgaggtgtgcttctcatcatgactgcttcgttttgcccttctgatttccacggcacaagattataggaggaaactcattctcatcatcaagacacactggtcccgtcgcaaactcatgttcaggaataacttctcctcgcagcgccccgccgtcctcagaataacctggcaccgtggaggctgaagatgcacttggtctggctacggtcgctgcataagactgaggtaaggaaggtctgaggtcattttctttattctcttctgttgttcctgagccaagcaagctgtgggttttgattaagacacactctcctccatcctgaggatccaaattgtacatataaaggtgtccactggatgacgcaactagcagccgtggcaacttctggatcgttgagagggtacagatgttcctctgtccggagaagttcaagcgtgcagtggcaaaagccctgtcctgatgcatcatgtctgacacctgggtagggaggtagttggtagcagccataaacatctttcccatgtagccactccaggtcgaaggctcttctggtcgactgttggtgacctgttccagcttgaagatgtgtaccgtctcggtgttactggaggcgcagaggaattgtgaatccatactgaacactagagagctgattgtcacataccttttcatccctctccggaactcatagagcttttgcccatcagggacagagaacacccggatgactgtgcctttttcagacgcacttgctagtttggagcctgaggcattgaaggtgatggcagctagtgttccctcatgggcagcaatagtgcagactgttttcagggagtttccatcataaagcacaatctcccctgaagtcaggcttccaggataggccagctcgtgcc

SEQ ID NO: 1405 - DNA, 1495 bp, Homo sapiens
ttttttttttttttttgtttgaaaaatagtttgtagaccattttatttaaatatatgaacaaccaatggggctactgcaatccaagtaaactcttcacattttagaacctttgtgaagtatagtaagataaagtaagactgttggtctttggcagattcctcctgccccccagacagggacatagatatacagataaatgtttatatagttaaagagcggaggcccaggtgaaaattccccaccccaagctgggctccccaacccaaaaattaccattggcccctgagaacacccaaagacccaccttcccagatttcacacaatatcaattgcaggaacagtcgtgcatggcaaagtatagttctatgcatttcacagcacagaaaacccttctttcagagggcatgcaagttgccggagattacacccccaagtctggtgctcttgtgatgagcaacttactggcaaacacatctcccagtgttgtaagcaggcaaatacattgagcacattttgctgtaattccatctatttgcaatgcctgcacagtgtctgtctctggctgttaacttactcattcttgacagaactctgctttattgattgcacttttttaaaaatgccaaaggcattttcacacttgttagcttgaccgccaccactagggtataagagcaagtgttctctatgccttacttgctacagtctcctccttctttggagaggattcccgtaatggtaacggtgatgggggaggctggtgccaacgacacaaatacatttctgtggtggaaaggtacggcaaatcttctatctcacttgagaaggctttctccttgggatgggtgctgggtcccttttggggagtggagagtcttggtggggtgtccactgaagaccggggcttttctggggtttcttggctcctcaattcacgtttacaaacagtttcagataaggaaccacagggttcctctttaataggagagtgcttaggagtttttgttttgacttttgaaaattcaggagccagctttttaacaggagtctttctttctgtacttccaaatggggatttccttttatgtccctttccactccgcccacatgagaagggcttgggaggcagagtctgggatgtctcggaaagctccgggctggcactccagtttaattttctcagatagctctgtttcctctctctcttcagtttcatagccctgaaacagcttgtgcctttctttctcgttatccttctttaccagctgcatccgcctttccatacgttcaatccgagcaaggagcgtgtctctctctgacttcagctcctcgatctccttttccttggcctcagctgctgctgctgctgttcgatgaggtccaattgcagcagaaggatggtgccgggggaggaagtgggcttcggccgcccaggctcgtcctcgggcccgcccagcgccgcagcccgctcgtagtccagtcgctgctcaggac

SEQ ID NO: 1406 - DNA, 496 bp, Homo sapiens
  misc_feature (1)...(496): n = a,t,c or g
ggtttgggcacagaggtactgatactgttattctggttttaagaataagaggctgatggaacctgcaggtaagggaagagctttgacttggacagagaagtgggccagcttcttaataaaaagtgggtaagatggaggtgaaacttggacacatgcaatatctgacattgtaaatccttttttcttgtgaggctggattttgttgcttcatatgtgataacagaccaattatatcagtagttcaatggtgatgttcagtttaatctcttttcctctcttgtacagtactcttgttttagctttcgtaaactctgggctttcaccggaccaggttttcttatgagcattgcctacctggatccaggaaatattgaatccgatttgcagtctggagcagtggctggatttaaggtgaacatctagtcctacccctgtccttttaagcacataataccctctcacatccttttctccaccctgcatnttggatagtagc

SEQ ID NO: 1407 - DNA, 426 bp, Homo sapiens
cctgttccagtgcgcgggtctgtggagagccgggtgcgagcggcggcagcacgaggggaaaagagctgagcggagaccaaagtcagccgggagacagtgggtctgtgagagaccgaatagaggggctggggccacgagcgccattgacaagcaatggggaagaaacagaaaaacaagagcgaagacagcaccaaggatgacattgatcttgatgccttggctgcagaaatagaaggagctggtgctgccaaagaacaggagcctcaaaagtcaaaagggaaaaagaaaaaagagaaaaaaaagcaggactttgatgaagatgatatcctgaaagaactggaagaattgtctttggaagctcaaggcatcaaagctgacagagaaactgttgcagtgaagccaacagaaaacaatgaagaggaattc

SEQ ID NO: 1408 - DNA, 270 bp, Homo sapiens
  misc_feature (1)...(270): n = a,t,c or g
ccgggaaggacggggatgcgganaggagaaagacgcccctcttgggggagctgcgattccgggaggccatcagagtggcagcagcggactgagccctggaccttccgggcaggagctggtcaccaaaccagagcatcttcaagaaagcaatggacatttgatttctaagaccaaagaccttggtaaaactgcaagcagcatcatggagattgcagaatccttccagggaagtcttttgacaattcaagagaacatgttccttcttggaca

SEQ ID NO: 1409 - DNA, 310 bp, Homo sapiens
  misc_feature (1)...(310): n = a,t,c or g
ctttattttaatgtaaaatatgaaaagaaaaatttatatactcatatataacaacttccaaaatgttttctgtggtacaaatggatcatcttaaaaagtctgtaaagaattcatcctccacccccatatgccaaaatatgatttcacataatttatcttcagaacttatgaacagacttggaatcacaaaagcacaggaaacaccagaaaaagtgatggtacaaacaacaggttttgttttaggttcccntacagatggaacaggagaacactttctgaaggancccagtcaggagacaggttanaagag

SEQ ID NO: 1410 - DNA, 527 bp, Homo sapiens
  misc_feature (1)...(527): n = a,t,c or g
gctaaatccgctgtggggacggctatactcctggagctggtgcggaccttttcctccatggtgagcaacggcttccggccccgcagaagtctcctcttcatcagctgggacggtggtgactttggaagcgtgggctccacggagtggctagagggctacctcagcgtgctgcacctcaaagccgtagtgtacgtgagcctggacaacgcagtgctgggggatgacaagtttcatgccaagaccagcccccttctgacaagtctcattgagagtgtcctgaagcaggtggattctcccaaccacagtgggcagactctctatgaacaggtggtgttcaccaattcccagctgggattgctgaggtgatccggcccctacccatgggacagcagtgcctatttccttcacgggcnttttttggggagttccttgcccttcgagtttttccttttattggagggacggaccagggcttacccntttccttgcacaaaaagggagggacattttttggaggaacctgcagt

SEQ ID NO: 1411 - DNA, 6363 bp, Homo sapiens
  misc_feature (1)...(6363): n = a,t,c or g
aatatatgtgtgttgacctggtcctatatggccaagctatggctagcagatgccctgtgtatgccagtcccagggcttgttctttgacccttgggagccagagtcagatgctcagtgtgagactgaaaccccaagagccatagctatagctatagtcagctgttttgtgagcagcctcaggaggaactttttggacctggaactacccgcttccaggtccatggagcacatttatctcgggcgctgaggctccccctggaaatgagggtgctgtttttgtgtgcatctgtggtagtggcagctacagagccccacctgtctgttgaagatcaggcatcacttttttctttctaaacttttattgaaaaaaaaaccgaggaggtgtgctggatcccttttcagaaaagccgcttctcatacctgcaggcagaaggaccacctgtgaggtgagggcaggagaaaggaggcatgaggtatggcagaggccccaccaaggacagggtgacttacgaatggaggctatggacgccaccttccacctgggctgaggacgttctcttctcaaacttaagctccccagagtacatcatggctctgaagaagggcagaggtcaaatgtgggtagctggccctggaccagcccctctacccatgtcccagctccccaagctcaccggacttgggtcaagctcttggcaccaatgtcctggcatgagtgttggatgccagcaatcaggtaagggacaaatttgtggattgaccctttgtcctgcacagcaccagacactccctgggccactttgattttgtcagcttcactgcagggagaggcagagagcacaggcaaggtcacagcagagatgagactgtcagtgcaggattagggtggggtaactggcttgcctgtcccacctgaaatatctgttctggctgctgaggtgcttgtccatggcatcgagagaacccataccgcgatatttctttagccggatcccatcggaaaagaagtattcaccaggggcctcagtggtggcagccaggagagagcccatcatgactgtggaggccccaagggccaaggctttcgcaatatgacccacattttggattcctccatcagcaatgaccggaacaccaaagcgccgtgcatactctgacaccttgtacactgctgttgcttggggccgcccacaggccagcactgttgagatggaggaacacatgggtggatagggttaatggggacgggcagtggaccctgtggccatatttaggacccaggagcttttggctacatctgcatcaggactgcagcttggctgaggaacagacgtgtctgggatggctgctgccacatctgccttaaatagtacaaacagctgtgctgacctctactcacccccacatgtgcacgtgcatgtgtgcagtgcccagggcagcctcaggcacatgcagtcttagcagccgggaaagccccgtccagctggtatcagatggggcaggagtcaccgtgcagttagtccccagaggcactgaggtcaggcccagcccttcctccctgaatggtgggcagctcaggcaagataagggcagtggttgtgtaggagagcaggctgtggttgtgtggagcaggcagtggttgtgtgggagagcaaggaccacacaaaggagttggtccctgaactatgcctgctgcagaagatgtgggcagaaaaggtcctgcctagggaagaaggtcctgccctatcagcaccccagaaggaagagggagctatgttcttgagcaccacccccaaaccatggtctgtgtatcagttggccttgcccacccatcagcaccacaaaccccgggagctacagctacgtcaaccaagcagccgggcagtgggcagctgggccgggccagtgggccgggctggacttactatagcaacccgtgacagtagaagggcatttggggctgtgggactttatgtctggagggatcttgggagccactaaataaaacaaacagaccagagtttagagaaggtgcagagcaggagcaagaaggccaggctaggcaagggagtggcaggtgttggatgacaagaccttgtcttgcttccagccatgtcacccatccaagaggccaatttggccccagggttgcccctattggagggctctattgtccccataagagtgcttggttccaaggtatgtggggcctgaaactggggtctctgtgggccctatcaaagtatattcttaccttcctgcgtaatgcagatggagccacttcccatgcccacccgcagggcatccacacctgcatcaatgaggttcttggcctgggcagcagtgaccactatggtgaaggaaaggaaagtgctcatgtgaaggttaaggtgggagcccagcttacccactcccaccacacatccttcagggcacaatcttgccttaccattgcctccaatgacttggagattagggtatttgtctttgatgtacttgatcatattgatctggaagatggaatttccctgggaagagtctaggacaagaagtaagtctcagactgtcatgtggcagctgcccctattgccccaacccacctgtgtagcaggctcacccaaaaccactacatccacaccagcctgggcgagcaagtccagcctatacttgtcatcctcatgagtgccaatggctgccccacacagcagctgtttcttggcatctttggaggctagtgggtagtcccgattcttcttcaggtctgtccgggcaatgatggccacaagctcatcatcttcatttacaatgggcaactttcctgtggtcagggcaggacatgaatcaggaccctaggcattagttccaggccctttcccagctctaggacttacccttcttgctgcgctgcagaatttcatttgcctccttcagtgtgatgcctgcaggggctaccaccaagtcttccctctttgtcattatctacgtgggaggtgagatgtgaagaagggccagtcatcgactatgaccagttaactcttttctttcctnnnnnnnnnnnnnnnnnnnnnnnnnnnnnnnnnnnnnnnnnnnnnnnnnnnnnnnnnnnnnnnnnnnnnnnnnnnnnnnnnnnnnnnnnnnnnnnnnnnnnnnnnnnnnnnnnnnnnnnnnnnnnnnnnnaagtctcccaaagtactgagattacaggggtgaagttctatggaccaccacgttcatacattcacacccaaaacacccttcctcaagggatcccaataattcttagcagtatggtattgagtgagggatgagtagaaaggacaacatggcacagggagcaccctcttacactatggaataaggaggacaacacaggaacaatggcaagaaaatcagggcagacctcaagcactgcccctaccttaggggtttaaaagaacaaagcatgaatactagcaagcatttgggcagtttgaaagcctctggaggggaaggatgcaggaacccaataaaggagtcagaaacttggtttgacactcctttcccagagagaagaggctatcagagatgtcttagacaacagaagccccttgtcttcaacctgggctgctagagcttggatctactctgccagtggcacccacctcttccaagaaacagtcatgttcctcctctttgagaaaatcaatgtccctggaggagatgatgcccaccaagcggctccccatccggcctgtgtctgtgattgggataccgcagaaaccatgccgggccttggcctcaaaaacatcccgcacgcgatccttggggctgaggaccacagggtctgtgatgaatccctgttcatatttctggaaagggatggtgagaaagggcatcgcatctttgaactactttcatcaggctcttgatctgaagcatggggtctctgcttatcgatccctttggcagtgccacaagaccaaatcacaccaacacatcttagagacatgggtaggctggaggcactgtacacctggtctattgctgctgctttaagaaacagaatctcagggtcttctcagtaactgaaccccatggtgggaagaaagaatactaaattagaataaacccctactcccaccccaccccacctcagtgcaattcccaggagcgcttgctaatgatcgttgcccttctgaccttcactttccgaacttcattggcctggaattcaggtgtacagttgtggtggatgaagccaataccgcctgtaagctacaggataaaaagagactactactaagtgacaagaagcaggactgaatgcctttggggaaaggcgatggagtccttgctccttcccccacaccccatggggctcaccgccattgctatggccatcccagcctctgtgactgtgtccatgggagaggaaaccagtggggtcttaagagtgattttcttggtcagagcagaagtcaggtcctgaggagacaaacgtcaaccagtgtgggaaagcatcccttacacctcaaggtgttactgagtcccccacaaaaggcacttttgtatgacctgcatgctaacaagcaacatgatcctataaaatccacccccaagcccaatctggtgagttagcccagagaccaggtgatagtagcaccttagctcaccttatgttcaggacccaattcctgatcatactcaccacctggtctgcagtgaagtcgatgtacccagggagaatgagaaagtcactgcgagggaagggagtgaattgggagtaaagctctcagcttagggcagcatgagactccatccccatgtaccaatcaacccgtaacgcatgtcagcagagagtggcactgacagagtctgtgtgtcacaggcacagcacaaggtggaaatgggtacaggggaccttttctgccaccgagctgtcatcagtgctcctggcaccctgacaattccatgtgtctggagcatggaatctccggcctgagattccaagcactactgagatgcttctccgtaccccaagcaccgctccagatgtctcaaagtgagccccggaggtgggtggccaattcccgaaacctgtcccccacgcccacgcccaaggcggctctcggaagcccccatctggccttttccccaggtgccgcccctctcttcgcccaggtgagccccataggcccgcacttgtaggtgaggccgtctccgcagttgaagagctgctgtgctgtgagtccgtcgtctggcacgtaggacgtgcccccactaatcaggtagtcggccatggccaacacaggacaccgccgcgtgtctccgaggaccgcgccgcagagacctctgccgtctgggccgcgccaatataaaccagccgatttcgtcactgctgcgcgcgacgctgacgtcagggcgtagtgcgcgcgggcggaacctacccgcctcgctgcggcgggggcggagctggcgctgaagaaacagcgcatgcgtatagcacatagtggccttgtcactgaggagctgccacttcacgtcccaccccacactccccgcaggacctcggccagttcaattaacaggcaagggtttacttctactgtcccaccgggctcctccccaaaataaagagacgttgttcactaacatgttgaaaagacgtgcttgtcattcttaataaacaactagagtaagaatacataagagaaacagagtggtatctttatatgatacacaagtgtatgttacaagaattccatcaggcacaggagcctcaggttttaaggcctcaatgttaggccaacaaaaaaaaaaaaggcatggtaaagtttttacttttacatctaaaatgtcacttgtcataaaggagggtgtaatagaaattgtctttaataaatcataattgaagttcccctcatttttcttccattaagatgctaagtttatgtctgatcatgaagaaagaaaagaacatcgttcccctgtggtcagcaaagtctgtcagcccagtggaagtcggctggggagattccctccagggtccatccatcattaattccatctctcttgaagatggaaaggggccacatttcttttcacagtccaagccctttccccaggccccagacaaaaaagagtcagccagcaactttctaggacatatgacactcaaggaaacccagagccaccatcggctgaggagtctgccgcagcaggtttatgaagatgcaaagggggcaaagttttcttttatattttaaacagaagcagcctgaaaggcttcgtaactacaccaataaaaaaaagaaaaaaaaaaatggaggcctcttctttagtgtgaaagtctgtctggtttttcctggctggtttctcttggcc

SEQ ID NO: 1412 - DNA, 771 bp, Homo sapiens
  misc_feature (1)...(771): n = a,t,c or g
agatcaatgaacttgaagctgctcttcagaagaaagatgaagatatgaaagcaatggaggaaagatataaaatgtacttggagaaagccagaaatgtaataaaaactttggatcccaagttaaatccagcatcagctgaaataatgctactaagaaagcagttggcagagaaagagagaagaattgagattctggagagtgaatgcaaagtagcaaaattccgtgattatgaagaaaaactcattgtttctgcgtggtataataagagtctagcattccagaaactggggatggaatctagacttgtgagcggcggtggtgcctgcagtgacactggtgcgtgcactcctgcgcggtctttcttagcgcagcaacggcacatcaccaacaccagaagaaatctctctgttaaagtccctgctacaacatctgattaaactgcaaaaaaaaccaaaccaaacnaaaaaaccacataaaatagaagtgtccttaaaatattttgtacctttcaactaactaccagattgaaaaagagtttatgatgcgggatatcaggtattttaaaatcaacatgcatcaaattaattttgccagttgactttaaaaacaaattatagaattagccatctctctgagggagcacatttgaataattggagatgcagttatacacacatttcaaacaaacatttgtcttttgagagtattataatttcaaattggccttgtatattttagttaaatgttttcagttgtattagtaacttaatt

SEQ ID NO: 1413 - DNA, 310 bp, Homo sapiens
  misc_feature (1)...(310): n = a,t,c or g
ctcgtgcctgtaatcctagcacgatgagggggtgaaannnnnnnnnnnnnnnnnnnnnnnnnnnnnnnnnnnnnnnnnnnnnnnnnnnnnnnnnnnnnnnnnnnnnnnnnnnnnnnnnnnnnnnnnaaacctactataaaacataactttaaaagaacacttaatgatttctcaccattctgcatgagggcgctgctgtatgactttcttccatgtgatgtgggttgggacttgttgggaatctccccacgtggtctctcatccgtccatggcttagcctgagcttctttacatgccagcaggaccccat

SEQ ID NO: 1414 - DNA, 1689 bp, Homo sapiens
gaattggcagccaacatggcggcggaacgcggcgcggggcagcaacagtcgcaggagatgatggaggttgacaggcgggtcgagtctgaagaatccggcgatgaagaagggaagaaacacagcagtggcatcgtggccgacctcagtgaacagagcctgaaggatggggaggagcggggggaggaggacccagaagaagaacatgagctgcctgtggacatggaaaccatcaacctggacagagatgcagaggatgttgatttgaatcactatcgcatagggaagattgaaggatttgaggtactgaagaaagtgaagactctctgcctccgccaaaatttaattaaatgcattgagaatctggaggagctacagagtcttcgagagctggatctttacgacaaccagatcaagaagattgagaatctggaggcgctaacagagctggagattctagatatttcttttaatctgctgagaaacatcgaaggggttgacaagttgacacgactgaaaaaactcttcttggtcaacaataaaatcagtaaaattgagaacttaagcaacttacatcaactacagatgctagagctgggatctaaccgcatccgggcaatcgaaaatatcgacaccttaaccaacctggagagtttgtttttggggaaaaacaaaattactaaacttcagaacctggatgcgctcaccaacctgacagtcctcagtatgcagagcaaccggctgaccaagatcgagggtctgcagaacctggtgaacctgcgggagctgtaccttagccacaatggcatcgaggtcatcgagggcctggagaacaataacaaactcacgatgttggacattgcatcaaatagaatcaaaaagattgaaaatatcagccatctaacagagctgcaagagttctggatgaacgacaatctccttgagagctggagcgacctcgacgagctgaagggagccaggagcctggagacagtgtacctggagcggaaccccttgcagaaggacccccagtaccggcggaaggtcatgctcgccctcccctccgtgcggcagatcgatgccacgttcgtcaggttctgagtccttcttggctcctcatgtggtccctctcctcggaagaactgcccagccacgggtttttaacccacctgttgctcctgaggtcgtcactatatcaacagtcacaaacccaatggcaataaaggcactgacgatagctggcgcgcgcgacgccacacaccattttcagatgccgttgcaattaaatcttgccacactgtcctcctgggtgattgttgacagttattgtagccacagagagaacataagacacgttgcgttcattcgctagaaatccctgtttccttctctcagaaggcagtcacagtccctacctgagtcgtgtgaaacacagggcctgagagtgctttacaggcattcacgggctgtccgagtggcattcgggggctggcctagctggccctagtcctggtgtgcagggttcaggcagtcttgacctgcaacaaccgaggttttttagtcttttaacccagccattttcaattttttaaaaattaggtaagttaaaaaagctggggtaaaagctgacttcagccctgtgtggcttgtgttccttagagctctccttccaaagagcgccgggcagggctg

SEQ ID NO: 1415 - DNA, 528 bp, Homo sapiens
gcgtggagagcatacgaaaggcacatgtttgaaccaatagtgacatacgggtgctaagttctgcagtagggaaagggcagagagccatggagagagcctggcccaatcctggagcctcagaaaaaaagttccttattaaattgctgttttagctgagacttctgggatgggtagtagttggagatcccagacaggaggtgaccgagttagcaagggaaaaattgggtcctggcacccatggcagagttgagtgatccagtctttctgtctccactggctggaagtccaccagatctgggaatgtccagttgggggagggggctgacaatgatcatgaccttcacctgtcctcacatgtcctctgtgtatctgcaaagcctctgcctcagtctcctcttctggaaagtgggattggaaaccaacatctgcttctctcccaggactgctaaggaagacaagattagatggcaggtgaagagctctttgaaaatgaaaacattctgctatttgaatgcaaagtgttcttct

SEQ ID NO: 1416 - DNA, 784 bp, Homo sapiens
  misc_feature (1)...(784): n = a,t,c or g
ggacccattaaaactttaaatatctgtgggaaccatttttcctgattttcccttttttaacatcatggcaaagatgggtttttttccaacaaaatttaatttaatatctttccacttgaagattttaggtttgttttcaatacttaatgaatataaaactaaaggagaaaagccaacctgaaataatttaaactttatatgaacatttcgataagagtttgtggattttttctgtagataatatatttgatccagaactcaagtgcatggaaacatgattttgatttttaaaatctaaaaaaaaaaaaaattaaaatcatgcttccctctattgcagtatcagttatttagtcacagaatggtattttatgtaaattaaaattaggtgaatgcaatgcaggtaactggttttggaatgggaatgtgcagtgctttatgtttggggagttggagcagggtatcttttcatcaattaggaaggaaagtttggaaacttnctgattaccnttatgttggtttccccttattatttgtctcttgctagatctgctaaaccaacccagcttgctcagagatctcatattgaagcaacatacaggcaatccacatctttctttccctttgaagtatagtcattggatgggatgagggacagggcctgttgggttcacagggccttgcactgccaggggccncatacttaaaagctcttgtgcatggaatccctgtctgttagccacaggcctctttagctctatacattcaaaataaactactgtagtag

SEQ ID NO: 1417 - DNA, 383 bp, Homo sapiens
gcttctgctcctggagaaaccacattcttttagatttggtgggcacgtaattacagtgtaggtggtatattcttcttgacgaaaatcttataaagcacttacaggaacttggatatttgtaatgaaatatagtattagattttcatttttatacattttcttttcctctaaccatagccattaggactgttttgaaagagtttttagctcctataaaaacaaagtgcccccccgaaaagaaagggtcttttaactcttcaaggatcatttgggctgcctgggtccttgctttagagttggagaaataatattaagcagtcataaaaagggattcttaggcacaatacacaaaagctgttttatatactgtttttcattaagtg

SEQ ID NO: 1418 - DNA, 408 bp, Homo sapiens
gctggattgtatatttgcaggcaagtgtaaaaggacactctactttctattattccaaaaagctgagcatttatagactttttgaaaatatgttacatactttctgaaaggaattattcaaatgtcagtttaagcctataaagcaatacaactagatggcatttattattattccacttcacttcctttctcctttaggagcaagggatcgctttacatcaggttccaaggctcagaaacatttgggctacagtcctttctaatctttgagtcagaaatttacaaaggaacaaaacaaaaggatggattctctcccatctctttccatgtattccaaattcttcactgaaaatccagggaaaggagttattaccagtgttttgggttgggatatttcagtttttaaaa

SEQ ID NO: 1419 - DNA, 1108 bp, Homo sapiens
ttcttttttcttgtcttcagactctgatattctttcttccacttggttgattcatcagttgatacttgtgtatgcttcaggaagttctcgtgctgtgtttttcagctccaacatgttgtttatgctcctctctaaactggttattctagttagcaattcctctaaccttttatcaaggttcttagcttctttgcattggggttagagcgtactcctttagctcagtgaagtttgctactacccaccttctgaagcctacctctgtcaattcatccatctcaacctccacccaggactgtgcccttgcctgtagaggtgttgtgatcatttggagtaaacaagtcactctggccttttgagttgttaggggtttttcattcctttctcatcttcatgagtttgtctcattttgatctttgaggctgctgacctttagatgaggttttcgtggggactttttggttgatgttgttgttgctttctgtttttctttcgacagtcaggtacctcttctgtagggctgctgtggtttgctggggattcacttcaagccctatttatctgggtccctcccacacctgaagatgtcaccagagggtgctggagaacagcaaagatggggaccccactccttcctctgggatctctgtccttgaggggcacccacctgatgccagtagaaatgctcctgtataaggtgtctgaacaacctctaattggagggtcctcacccagttgggtggcacaggatccaggacttgcttaatgaagcacttttgatttgtccctttgggaagggggtatgctgtgctgggggaaatcccactcatctgggctgcctggaatcctcagagtgagcagggggaaagaacaagtcttccggtttgtggagacaacagccagccacccctcccactagggactcagacctagagagatcagagttctctccctaattccctggcttgagttgctggagttcctgcagggaggccccacccagtgaggagggatgggtcagggtcagcctaaagaggcagtctggccatgatctgccacagccagtaatctgcgctgtgcggaatacctcttgggaccaagccgtcca

SEQ ID NO: 1420 - DNA, 399 bp, Homo sapiens
gcagatactgtgatcctgttgttttaacatatcaagctgaacggatgccagagcaaatcaggctgaaagttggtggtgtggacccaaagcagttggctgtttacgaagagtttgcacgcaatgttcctggcttcttacctacaaatgacttaagtcagcccacgggatttttagcccagcccatgaagcaagcttgggcaacagatgatgtagctcagatttatgataagtgtattacagaactggagcaacatctacatgccatcccaccaactttggccatgaaccctcaagctcaggctcttcgaagtctcttggaggttgtagttttatctcgaaactctcgggatgccatagctgctcttggattgctccaaaaggctgtagagggcttactag

SEQ ID NO: 1421 - DNA, 600 bp, Homo sapiens
attcggcacagcctgtgcctcttgcctgggagaggggaagcagatctgaggacatctctgtgccaggccagaaaccgcccacctgcagttccttctccgggatggacgtggggcccagctccctgccccaccttgggctgaagctgctgctgctcctgctgctgctgcccctcaggggccaagccaacacaggctgctacgggatcccagggatgcccggcctgcctggggcaccagggaaggatgggtacgacggactgccggggcccaagggggagccaggaatcccagccattcccgggatccgaggacccaaagggcagaagggagaacccggcttacccggccatcctgggaaaaatggccccatgggaccccctggggattgccaggggtgcccgggccccatggcgatccctggagagccagggtgaggagggcagatacaagcagaaattccagtcagtgttcacggtcactcggcagacccaccagccccctgcacccaacagcctgatcagattcaacgcggtcctcaccaacccgcaggaggattatgacacgagcactggcaagttcacctgcaaagtccccggcctc

SEQ ID NO: 1422 - DNA, 504 bp, Homo sapiens
gtttctccatcaaaggccaaggcactgtgatgacagggaccatcctttcaggctccatcagcctcggtgacagtgtggagatccctgccctcaaggtggtgaagaaggtgaagtccatgcagatgttccacatgcccatcacttcagccatgcaaggagaccggctgggcatctgcgtcacccagtttgaccctaagctgctggagcgcgggttggtgtgtgcccccgagtccctgcacactgtccatgcggccctcatctctgtggaaaagataccgtatttccgggggcccctgcaaaccaaggccaagttccacattacagtgggccatgaaacagtcatgggccggttgatgttcttcagtcctgctccagataactttgaccaggagcctatactggactccttcaacttctctcaagaataccttttccaggagcagtacctgtccaaggatttgacaccagcagtgacagacaatgatgaggccgacaagaaggccg

SEQ ID NO: 1423 - DNA, 656 bp, Homo sapiens
tgtggctgctttagtttgccttttattttaccaaaaataacaacaataaagtcttccctctgtttcataaaaataaattttccaaccctccccctatcccagaaatcagcccttgccacagcctagaatccatcatgcaagtcacagcactctgggaaaagctcctactaccctcgctccacagcctctggcaaagctgccaggccactctggaggcggcagaggcagaagtcccaggcccagctggctgggcctatagagctccatctgtttccccaaagtacaggcagcttctaggccattgagtggggcatgatattggatgcttggctcaggaaacaaccccagccaacccaaggggcagtgggacatgttggcctcaggttagaaattattgctcaaagcagaaacagttgtgtcctagagagggtctgttaaaccctctttccatgtgtatctctatgtagcaattgatgggccctgcggtcaggatccctggtttctccagctccatgaatgcctccctgtgaggccctggacagtttctccctcttcttctcctggcttcagtttccccgtatgtacattgagacagtaagactggatgattctccaggttccctctggctttccattctggcatccccagagtggag

SEQ ID NO: 1424 - DNA, 1954 bp, Homo sapiens
aattatgtcatcatgacaactgcacataaagggaaatataaatgcatacttccccttgtgacaagtggggatgaggaagaaggaaaggattataaaggccctaatccaagagagcttttggagccactatttaaacaaagcagttgttcctacagaattgagtcttattggacttacgaagtatgtcatggaaaacacattcggcagtaccatgaagagaaagaaactggtcagaaaataaatattcacgagtactaccttgggaatatgttggccaagaaccttctatttgaaaaagaacgagaagcagaagaaaaggaaaaatcaaatgagattcccactaaaaatatcgaaggtcagatgacaccatactatcctgtgggaatgggaaatggtacaccttgtagtttgaaacagaaccggcccagatcaagtactgtgatgtacatatgtcatcctgaatctaagcatgaaattctttcagtagctgaagttacaacttgtgaatatgaagttgtcattttgacaccactcttgtgcagtcatcctaaatataggttcagagcatctcctgtgaatgacatattttgtcaatcactgccaggatctccatttaagcccctcaccctgaggcagctggagcagcaggaagaaatactaagggtgccttttaggagaaataaagagggtgtcggttggtggaaatatgaattctgctatggcaaacatgtacatcaataccatgaggacaaggatagtgggaaaacctctgtggttgtcgggaccatggaaccaagaagagcatattgaatgggctaagaagaatactgctagagcttatcatcttcaagacgatggtacccagacagtccaggatggtgtcacatttttatggaaatggagatatttgtgatataacttgacaaaccaagacaggtgactgtaaaactaaagtgcaaagaatcagattcacctcatgctgttactgtatatatgctagagcctcactcctgtcaatatattcttggggttgaatctccagtatctgtaaaatcttagatacagcagatgaaaatggacttctttctctccccaactaaaggatattaaagttaggggaaagaaaagatcattgaaagtcatgataatttctgtcccactgtgtctcattatagagttctcagccattggacctcttctaaaggatggtataaaatgactctcaaccactttgtgaatacatatgtgtatataagaggttattgataaacttctgaggcagacatttgtctcgctttttttcatttttgttgtgtcttataaactgactgtttttctttgcttggatactgtgattccaaaataaatctcatccaagcaagttagagtccagcctaatcaaatgtcataattgttgtacctattgaaagtttttaaataatagatttattatgtaaattatagtatatgtaagtagctaatgaagtaaagatcatgaagaaagaaattgataggtgtaaatgagagaccatgtaaaatatgtaaattctagtacctgaaatcctttcaacagatttttatatagcaactgctctctgcaagtagttaaactagaaactgggcacatggtagaggctcacatgggagttgtcctcacccttgttaatctcaagaaactcttatttataataggttgcttctctctcagaacttttatctattacttttttcttcttatgagtatgtttactctcagagtatctatctgatgtagacagttggtgatgcttctgagactcagaatggtttactctaacaaaacactgtgctgtctatcccttgtacttgcctactgtaatatggatttcacttctgaacagtttacagcacaatatttattttaaagtgaataaaatgtccacaagcagtgttgtcatgtagtcaatggcagatt

SEQ ID NO: 1425 - DNA, 939 bp, Homo sapiens
gcaggatgatcaagctgttctcgctgaagcagcagaagaaggaggaggagtcggcgggcggcaccaagggcagcagcaagaaggcgtcggcggcgcacctgcggatccagaaggacataaacgagctgaacctgcccaagacgtgtgatatcagcttctcagatccagacgacctcctcaacttcaagctggtcatctgtcctgatgagggcttctacaagagtgggaagtttgtgttcagttttaaggtgggccagggttacccgcatgatccccccaaggtgaagtgtgagacaatggtctatcaccccaacattgacctcgagggcaacgtctgcctcaacatcctcagagaggactggaagccagtccttacgataaactccataatttatggcctgcagtatctcttcttggagcccaaccccgaggacccactgaacaaggaggccgcagaggtcctgcagaacaaccggcggctgtttgagcagaacgtgcagcgctccatgcggggtggctacatcggctccacctactttgagcgctgcctgaaatagggttggcgcatacccacccccgccacggccacaagccctggcatcccctgcaaatatttattgggggccatgggtaggggtttggggggcggccggtgggggaatcccctgccttggccttgcctccccttcctgccacgtgcccctagttatttttttttttttaacaccatgtgattaaggtcggcgctgcctcccccgacccactcagcgatgggaaatgaattggcttgtctagcccccctgctgggtgcttgttcagcccccactctgggctgtggagtgggtgggcaacgggcctgggtagctgggcccaggcaacccacccctccacctctggaggtcccaccaggctattaaaggggaatgttactgcaaaaaa

SEQ ID NO: 1426 - DNA, 1260 bp, Homo sapiens
gaacatggcggcgcccgttgtcacggccccgggcaaagctctgctgcgggcgggcgctggacggctgcttcggggaggcgtccaggagctactgcggccgcgacatgaagggaacgcccctgacctggcctgcaacttcagcctttctcaaaatcggggcacggtcatcgtggagcgctggtggaaggtaccgctggccggggagggccggaagccgcgcctgcaccggcgacatcgcgtctataagctggtggaggacacgaagcatcggcccaaagaaaacctggagctcatcctgacgcagtcggtggagagtaaggcccgggccgaggcgcttcctctcaggctgatgttggagtccggggtgacctgggtctcagtgaagaaatcttttaggccggaatcgactccttcctccagggactggctgtatatgcatcccctgaaaacaagaagctgttttgaagaggagaaattgctgagacaagaaggaaaattagagaagatccagaccaaggcaggtgaggcgacagtgaaatttctaaaaagctgtcgcctggaggtagggatgaagaacaatgtcaaatgggagcttgaaccctgaaatagttgcccgccacttctttaagaatcttggtgttgtggttgccccacatacattaaagttaccagaagagcctatcacacggtggggcgagtattggtgtgaggtgacggtaaatgggcttgatactgtgagagtgcctatgtctgtcgtgaactttgagaagcccaagaccaaaagatataagtactggttagcccagcaagctgccaaggctatggcccccaccagcccccagatctaaatctactctccctccaaggcagcaaagcagaatcgggagcagtggagcagaaatgtgcaagcacccctgatctcactcccagctctgaccaaatacagaattttagagaacatctgaagacatcagacttgcactgcgtatacatgttgaattcttcatttttgccatctttaactgtcatcactggggcagggaagtcctgttccagaagtaccaggctgtagatttgataagctagatgcagtagaccgaaaccatccaaaacctgtttagcttcttcctccattggagtttattgggacaaacaggagagccagccattgtctccagtacttgcctcattctcatcatccaaactgaacatttgtatcccaagcagaaataaagagaatatgttctttttaagtaaaaa

SEQ ID NO: 1427 - DNA, 1330 bp, Homo sapiens
  misc_feature (1)...(1330): n = a,t,c or g
atgtcttctcaaactgttggctctaaagggatgttccagcctccctctccagagctgcctgcagtttcccttattcagctgtctcctgcctagtctctccagcggcctccttaccaagaccctttttcctaaacagttgtccttccctcagaaactccatggctgcaagtgtgaatagacttgtctttaggatccctctctctggtcatccctgatcatcttagggccgtctcccttttctgatttttgacagctctgtttattttgcccatggctagtcctcttgttttgtgtctgctgtgtgttcttgcccttccattgtcagttctgtacatcctggttcagcttgtctcactgtgggtagccccttctgcttgtcttcagccatcttggtttaatcctcataggtcatggatgaatggagccttgctgagcactttgagggcatttctgttgggcacaacctcagaaacgggaagtcttgaggcctggggcgtgtggtcagtgaggcctccagaggtgggttaggggtgggcacctacaagggccagttgaggggagaggtgcagggattgctgaggagactttgtgagaatgatgtcaggcccgggaagctggtgtggaagaactgagctgtcagaaggagataccaatatcccctttgcaggggtggtgatgggcatcaaacatgacgtggaacatgtccccttcatggagggtttccatctaaatgcatctgtgtgccttagggatcagtagttcaggggtggtggacttttttgagtgtctcctaatttctctgaggtgtctttggctctgtgtcaccaaatgtgcctgacctctgcatcccagtggttgctgaaagggaaacagtatattgcgtagtcagatgtcaggagtagagatcttaatgagaaaggccctggcagctggagagatgagaggacctagtggtcagcttatacccagactatctctccactcctccaagagtttgagtcccatagctgatgaaagaatttacatatgggctcccccctgctttcccactgaaaatctattctcatattttgggaaggagcatatgtcctttaactttcaatggtaaacaatctaggatagtgtttaaaggcatggattttggagtcacatatagttggtttgaatttctagcttcactacttaccagctgggtttgaccttggttgatttacttanccnctctgngcctcngtntcctcnactatnntnacntgggtggagggaggcatgttgaaaatatctacctcagggttgttggaataactgaaacaatgtttgtaaagcttta

SEQ ID NO: 1428 - DNA, 519 bp, Homo sapiens
gaccatgagcttcaccctgatactgttgttaagtttcactgattttccttttttctcaactaacatacatactctgaggggaagaaaaaggaggggagcaatccgtccctccctgccttctgtgagcactgtactgagcactgctactgacctggcccatgccagtcccaagaacaatccttcagaggagcgccgctccctatgttcaccaacatggacactggggcccggcccaggcactcccagatgtgcagtcctccaggcagtgtggtttgggggcttgacatttgttatcttgtgacttttaaaataattcttgagtttaaaaactcccagagatttctttgtcataagacaggaagtagattaaagacagagaacaaaggagagggccagacacttccctgggtaagagaaccaatggtgggctcgggtcctcctcagggaacaccttacttagtgttttctgagaaggaaaagtgacatctccagggtactcaggctagaggaggagaatga

SEQ ID NO: 1429 - DNA, 1271 bp, Homo sapiens
atgaccgcaacccttgccgctgccgctgacatcgctaccatggtctccggcagcagcggcctcgccgccgcccgtctcctgtcgcgcaccttcctcctgcaacagaatggaattcggcattgttcctacacagcttctcggcaacatctctatgttgataaaaatacaaagattatttgccagggtttcactggcaaacagggcacctttcacagccagcaggcattggaatatggcaccaaactcgttggaggaaccactccagggaaaggaggccagacacatctgggcttacctgtctttaatactgtgaaggaggccaaagaacagacaggagcaacggcttctgtcatttatgttcctccgccttttgctgctgctgccattaatgaagctattgaggcagaaattcccttggttgtgtgtatcactgaaggaattccccagcaggacatggtacgagtcaagcacaaactgctgcgccaggaaaagacaaggctaattgggcccaactgccctggagtcatcaatcctggagaatgtaaaattggcatcatgcctgggcccatattcacaaaaaaggaaggattggcattgtgtccagatctggcaccctgacttatgaagcagttcaccaaacaacgcaagttggattggggcagtctttgtgcgttggcattggaggtgatccttttaatggaacagattttattgactgcctcgaaatctttttgaacgattctgccacagaaggcatcatattgattggtgaaattggtggtaatgcagaagagaatgctgcagaatttttgaagcaacataattcaggtccaaattccaagcctgtagtgtccttcattgctggtttaactgctcctcctgggagaagaatgggtcatgccggggcaattattgctggaggaaaaggtggagctaaagagaagatctctgcccttcagagtgcaggagttgtggtcagtatgtctcctgcacagctgggaaccacgatctacaaggaatttgaaaagaggaagatgctatgaaagaaaaaaaaaattcctaaaactgtggaatggatcacgtagacatgtaacccagcagcagtttgcttctgttgtccactgattaatcagcctatgtgcctgacactggtcttgcagtacaactggaagccaaaacaaggtggaagatgtcctgaattaagacgttttcaccacattgtattacagagacagccaataaatctactatttgatttcaaaaaaaaaaaa

SEQ ID NO: 1430 - DNA, 1369 bp, Homo sapiens
aaacaggtctgggtcactacaatatcaccagctcgcccaccaagctgggtggagacctggcgggagtgaacgttatccaagttgccacctacggtgattgctgcctggccgtgtccgccgacggaggactttttggttggggaaactcggagtacctgcagctggcctctgtcactgactccacacaggtgaatgtgccccgctgcttacacttctcaggagtggggaaggtgcgacaggctgcatgcggtggcacgggctgtgcagtgttaaacggagaaggacatgtttttgtctggggctatggaattcttgggaaaggtccaaacctagtggaaagtgccgtccctgaaatgattccacccactctctttggcttgacggagttcaacccagaaatccagggtttcccgcatccgatgtggactcagccactttgctgcactgaccaacaaaggagagctgtttgtatggggcaagaacatccgagggtgcctgggaatcggtcgcctggaggaccagtatttcccatggagggtgacgatgcctggggagcctgtggacgtggcatgtggcgtggaccacatggtgaccctggccaagtcattcatctaaacctccctcacctgcttgggcggccccgtcccgggaaccactggcactccttggcagaggccagccgcgtggccagccccccggggttcttggatggtggtggcggaggaccctgcgtgcagtgtgacgctctgtcctgaatcccttagcgggtacctaccaggaggatcagggcaaggtccctctccagctgcaggtgaggcctgcggaactcagcttggatggcagcctttggtgggccgctgtggcccgcacgtctctgttctctccaagtaacatgcgacggtgtcgtggtgtcacgtctcgcctgagaagcccgtcttaggaaagcttagcttgaacacagtgctcgggaggtttctgctctgtctgtcatggcagtctcttggtttgtgtctgggccaaggccatgcgtgtgcctcggaccgagccccagcttaggcgagggagtcaggctggcttcggccctcggttttcattcaggccaccctgctcatggcccttcctggccgcctgccacaccgcaagctcgctggggggacactagaagcaccgtggcctgggattccatctggagctgtccgcaggcaccagccccagcctcccaccacgctcactgcctggcttggaaaagttaagaagcccctcaggaagagaatcgaggctaagttcctctgcgccgagggccccgagcatatccgccaaggctcagctgcagtgccaggcggaggaggaagatccagaaattgtgaac

SEQ ID NO: 1431 - DNA, 349 bp, Homo sapiens
  misc_feature (1)...(349): n = a,t,c or g
gggtcatgatcttagtaaaaatgactttttannnnnnnnnnnnnnnnnnnnnnnnnnnnnnnnnnnnnnnnnnnnnnnnnnnnnnnnnnnnnnnnnnnnnnnnnnnnnnnnnnnnnnnnnnnnnnnnnnnnnnnnnnnnnnnnnnnnnnnnnnnnnnnnnnnntaaaaatgacttttaaaaagataatactacattttataagatgacctaaggtatatctgannnnnnnnnnnnnnnnnnnnnnnnnnnnnnnnnnnnnnnnnnnnnnnnnnnnnnnnnnnnnnccttggttcantatagccctgatctactgggctcaggtgattctccctcagcctccacagcagc

SEQ ID NO: 1432 - DNA, 1038 bp, Homo sapiens
gaagtaattactcagagcgcaggggccggggcttggctttactgttgcaggtgataaccttgtcaactgcttattagtgaatgctgaacaaatttcccaaagtttgtatttttaaaaatagaaaaccgtgaggacatactgaatgccggtgacaaattaacagaggtccttgaagaggctaacactctgtttaatgaagtgtcccgagcaagagaagcagtcctggatgcccactttcttgttttggcttcagatttgggcaaagagaaagcaaagcagctgcgctcagacctgagctcctttgacatgttaagatatgttgaaactctactcacacatatgggtgtaaatccgctagaagctgaagaactcatccgtgatgaagatagtcctgattttgaattcatagtctatgactcctggaagataacaggcagaacagcagaaaacacctttaataaaacccatacattccactttctgttgggttcaatatacggagagtgccctgtgccaaagccacgagttgatcgtccaagaaaagttcctgtgatacaagaggagagggcaatgcctgcccagttaagaagaatgggaagaatctcatcaagaagtcaacagagaaagaagtagaaagaatcttgggattgttgcagacatattttcgagaagatcctgataccccaatgtccttctttgactttgtggttgatcctcattctttcccccgtacagtggaaaacatctttcatgtttccttcattatacgggatggttttgcaagaataagacttgaccaagaccgactgccagtaatagataaatgatactatgtttggaaaaattagttttagagtaaatatatttgttagtagaatttaagtattttactaaatgtaaatgaattttcaatgtagattaacttttacaatattgtatcttgctcaactacctgaagatactgaaaacatggccagcgtctaaaattttgatggattcatctatatcattgattcaacatctgctgtaaatattaac

SEQ ID NO: 1433 - DNA, 359 bp, Homo sapiens
gtggaggggctgtttgctaaatcaatcagatacattctctttttgctattaaagtcatctatttagaatgttattttcattccatctactaatttttttttaaatagcaatttaattcccaggtttggggatagtactttttggttttgtcttgtcatacttaacattttatttttgagactgataatgtcttcagtcagatgtgaatgaatgttagcacataacccctccaaattcatgtatttagatagctactgctacagtgcactgtatggtgtgctgatgagaaccagacaaaagggaccaaaaccacctttctgtccccagagctgcttatacctttgtaacaggggatgtgt

SEQ ID NO: 1434 - DNA, 305 bp, Homo sapiens
gaccaaggaaagctccgagtacctcaagtgcctgacccagcaggccgtggcctgcaggcgaccatgaacgagatctaccgcaacggctccagcgccaacatcccgcccctcaagttcacggcccccagcatggccagcgtcttggagcagctgaacgtcattaacggcatcctcttcattcctctcagccaaaaagacctgggagaatctgaaagccgaggtggcgcggcggcaccagctccagggaggccagcagaaacagggatagagccgaggagcccatggttaccgagcccgcgccaggg

SEQ ID NO: 1435 - DNA, 444 bp, Homo sapiens
tctttcgtcttttcaagcaaatgaatacttttattaacatggtaagtttttgtttgttttaacatggtagggttttgacctcaaatatttgttaggtctgctactcaaatgaacttacagctggacaacgtatgaaccttgaagatgcctcttctagtccagtttagggtccaatgcagacagttccatactctcatccccaagcccctcaagggcctttgccaatctttcattttatgccaagtcctctaaaacgcatcagggtattacatcaacttgtacagaatatcaagatcttatcttctattttaggttccatgtcaaataaagctgagttaggttgtccaaacaaactcaccagacaggttacataagatagtgtaccacaacaaatttaaattttgaacaaaacacatctctcctcctttggtctcacacagaaat

SEQ ID NO: 1436 - DNA, 400 bp, Homo sapiens
  misc_feature (1)...(400): n = a,t,c or g
ggcatagtggtttgcacattaaaggtcaacaaatgtttgttggttgaatatacctttcctagatttagcaaaatttcaaaccataaaagtcccttatgtgcttttatattttaaatcaagtctttcatgttataaactttaaaactcaggctcatcgaagtgaagtgatttgcccaagcataccttcccacacaaggcttaacaccgactcccactttagtacaataaaaaaaaaaaagtcatgtancattaanagcncatacctggaagncccctaaaacataggttgttgaactctgactntgccanttcctcgctatngatgtgngctatggtctggatatttgattcctccaaatctcatgttgaaattcgatccccaattggaaatggggcttaa

SEQ ID NO: 1437 - DNA, 569 bp, Homo sapiens
ggcaagcgacttcttagatcagaactcaccaaatggaagcctagcagctgctccataaacctagccccattcttcatatcaattttgtataaatatatagaaacacacacacagcctcagacttacaaactgattatactctaaaagtttgtatgtcagttagctaaaacttcagaatacatttctccctataaagagttataaatgatggtttagttctcaggcagctacaaatgcctatttattccctaatgtacctgaacactagtaccatagaactgaaccaccatctgtatcagcgcatggggagtgtgcattctgaggtctaacccggggtgccaggaacacacacatcctccatcccagcatagagaatggggactccctgagtaatgggagttctttcatggcctctgcttggggtgggggagtcagcagcacccatttgtacatataggtcattcatacatcacattttaaattggggactgtgtgtgctggtgtgtgtgtgagttctacgtttctaccatatgtgatccagtttaatagtaacttttattgtattttaa

SEQ ID NO: 1438 - DNA, 742 bp, Homo sapiens
gcttgccaggtatggatcccggagcgcgcagaggagtccctgaggagctagggaccccaaaggcctttcaccgctgcgggccagtcctcagtcagctggagggtgggtcccacggaatcctgttagtttctaccacctcctcccccttctctggagctggtggagcttcagaagtcctgtggagcgtcggctgggatcagtttgtctcgggtgaaaagtaaactttgaaagctttccagagtgttgaatcttccaccagaaaacttgatcacatcaatatctgcagttccaatttcccaaaaagaagaagtagctgattttcagctttctgtggattctttattggaaaaagacaatgaccattcaagaccagatattcaagttcaagccaagagactagcagagaagctaagatgtgatacagtggtgagtgaaatcagtactggtcaaaggactgtaaatttcaaaataaacagagagctcttaacaaagacagtgctacaacaagtaattgaagatggctcaaaatatggattaaaaagtgaacttttctctggacttccccagaagaagattgtggttgaattcagtttcacctaatgttgccaaaaaatttcatgttggacatttgcgttctaccatcataggtaagtgtttagtttcacataaaatgctaaacgttcctttgaggaagtatttgatagttcaatttaatgttttaatgcttaaataacaaaatagc

SEQ ID NO: 1439 - DNA, 491 bp, Homo sapiens
  misc_feature (1)...(491): n = a,t,c or g
tttcttaacatttcttagtagtcagaactagccattatgtagaaagttggaaaaggggatgtccacagtagaaattttttattttatagatgccacctaaattgctggttatattgaaaagacactttacctctgtgaataaaacaattgtttccttctcactcaatttcttggattgggcctaatttattttttatatttcaaaaatctttcattaataattattccattagggtttagtaactacagactcatttactaatgatttactatgataccctaaaaatagagaaaaaaccctagaatatgagcgtatgccaagtaagtgcaatttaatatatgaattgcaggaaaaattttaaacaagctttaaaaatatctctaaaaggaggcttaaagttaattgctgtagcctcctgtcatccacagagaagacaaaattttaaaaacatcaaacatactcaaaaacagggcaaggctggganagggta

SEQ ID NO: 1440 - DNA, 2507 bp, Homo sapiens
  misc_feature (1)...(2507): n = a,t,c or g
ctttctttggtctgatacttcatgtatttgaatatagttaaatcgtattatttttttcttaacagaaatatttttaaaaatgaaaaagtactcaaaagtgagaagagttaacttgtcaaagcagaatggttctctttgacccactctggtctattgtgtaaatatttatttagactattttaataatacatattatttaccccactgtaacatcatgtaaactaagtatgtttttaaacaatttttaagacttgtaattaccctgaaaataaggtttataatgcaaagaccagctcctttgcggtggccagtgctctagggctgccattacacggtcttgtgatgtgactaaaagccactttgtggactcccttcatgtaatcctcttttcctccccactcctccacagaggggcagagctcaggacatttgccagttccagatctctttttcagcattttgatggaattaatttacacgtaatgagggaagtcctaggatggatagaaaacaagcacttacattggggcacacaggaaatcccagtgtctagcaatggtttggtttgcagagaacacagcctgatacttaattttcttaaaactatttttaatgatccactaaacaaagcaggggatcctggaagctgatataaataagtctagctctataatccccaagttctaaaagttatggttagatgctattctgtgggttgctttgataattcttactaacacagattagggtataggcatctagagatgcactgtccactgtaaatactataatgagagccacatctgtaatttaaatgtttctagtaaccacatttttttaaaagtaaaaagaaacccatggtattgatttaaatatattttatttaacccaataggctcaaaaacactatcatttcaacatagggatcaatattaaaanttattaatgagttattttactttttttcatattaggcctttgaaattcagtgtgtattaaacacatctcaattcaaaccatcaccatatttcaagtctttgtaggcaaatgtgactaagtggctaccatattagacagtgcagatctatactcattccttcaaatacattactctgttaatctcaaagtgtggccaactcccatttacttagaggctgattatctagttttgtagttcctcaggcctctaatttattttttgctttctgctttattgatcttttgcatgtcccccaaagccagaatctgctcatggaggaaggaaggctaagaactgtccttgaggaacttcatcagtaactctgggtaaagcatcctgtgggaggggagaggagagcccagtcatttgcttaggatgggtgtttgtggggatcacctggcaggattttaaagcctactctggccacaggactcggagttaaggaaaatgttctcttgatgacacagtgctcctactctatccacattaagtagcacttttgtggtagaactgattcttaaggcaggcctgaaagccaattactaatagaaacacagcctttccaatcctctggaacatattctgtctgggtttttaatgtctgtggaaaaaaactaaacaagtctctgtctcagttaagagaaatctattggtctgaaggtttctgaacctctttctggttctcagcagaagtaactgaagtagatcaggaaggggctgcctcaggaaaattcctagatcctaggaattcagtgagaccctggggaaggaccagcatgctaatcagtgtcagtgaatccacagtctttacttcctgcctcataaagggccaggtctccccagtaccaagtcctttcctcatgaagttgtgttgcctcaggctgtttagggaccattgcctgtcttggtcacatgagtctgtctccttactttagtccctgggcaatccttgcttaatgcttttgttgactcaacgaggggcccgaggccttaggttttctattaaggtctctgccccaggcatggtgctctatatcttggccaaataaattactttccttgaatatccaggaatcttttagtctaaagcaatgaggagttatcacctcatcctcaaactccaacaagatctatgccttagtgttgtttttgttgtctgctttgatgtaaaagcaagagtatttggagcaagaagctgcaatgcgccaaatacacaataggccttttctttatcattcatacgacatttctggtttaggtgtatgtagttgggccatgttacttgtccagaggaagagactaaagatataagaataattttttagtcctaaatgctgttttgtttactttctgtcaagatatttacccgtgtcaaattcaaactacagtactgtgtaattatgtataaagtttttttatttatttgaagttagactagatatacgtttttaaatttaacatctggctggacagtgttctattaactcattgaatgtgtttcctttgtcttgtgttaataaatattgat

SEQ ID NO: 1441 - DNA, 288 bp, Homo sapiens
catctcctgaacttgattttagggcacaacttggacttgggcaaatagccacagtacacagttcattgtctttttcccaggcactgccaaataagcagagtgcattttaaacctttgaaaagaaatttgattcaatttctgtttcatacatcagattttttgtgtccagaacttttaaaaatatatgatggctaaaattttgcctttcagatatcatttttgttatttttgaactttttttttttttgcctcatattgaaagatttaaatataatatttgaagttgtc

SEQ ID NO: 1442 - DNA, 2410 bp, Homo sapiens
  misc_feature (1)...(2410): n = a,t,c or g
gtagagatggccgcgcttgcaccgctgcccccgctccccgcacagttcaagagcatacagcatcatctgaggacggctcaggagcatgacaagcgagaccctgtggtggcttattactgtcgtttatacgcaatgcagactggaatgaagatcgatagtaaaactcctgaatgtcgcaaatttttatcaaagttaatggatcagttagaagctctaaagaagcagttgggtgataatgaagctattactcaagaaatagtggggctgtgcccatttggagaattatgctttgaaaatgtttttgtatgcagacaatgaagatcgtgctggacgatttcacaaaaacatgatcaagtccttctatactgcaagtcttttgatagatgtcattaacagtatttgggagaactcactgatggaaaatgtggaaacacaggaagtatgccagatggaaggcaacatacatccataattgtttaaagaatggggagactcctcaagccaggccctgttggaattgaagaagataatgatattgaagaaaatgaagatgctggagcagcctctctgcccactcagccaactcagccatcatcatcttcaacttatgacccaagcaacatgccatcaggcaactatactggaatacagattcctccgggtgcacacgctccagctaatacaccagcagaagtgcctcacagcacaggtgtagcaagtaatactatccaacctactccacagactatacctgccattgatcccgcacttttcaatacaatttcccagggggatgttcgtctaaccccaggaagacttttgctaagagcttccagaagtacttgcaaatatggctgggcagttgcttttggcagtatggaagatgtaagcacttgctggtccagaatctacaaaagggctctcaagtttactgacgacaggcagagaatgaagcctttgtatgacagaccccatgtattttnggcatgaggaactaacagcccattacccctancttcagcctatcaggatcacagttttaaggaagacttggttttgttgaatatgacaatgaaatctgtgtgtatcagatttttattgaagcattcatcagcagcctcaaccagttttcattgtccatttactagattcaatcgtctctgagtatatagggctgatgttagcaagaccctaaaaatgtccattgaaccctgcttcaaaaaatgaaaacacacctctataaaatgtgtactgggaataagctttgtatttacatacattaggggaattttttaaaatctgtaatgtttggacaaacagatgatattactttgctataaaattataaatgtaacttttaataaagatagccagaatattctaaattagaaattacgtttttgtttccctcaagacataaaacaaatataacattctaaactgctggatgaatctgaaaagacattaagttcaaattttaatttattctcatattaaatataactccattaaaagtttaaaatttcatgggagaaaatataataaggtaaagaggtagaatcactttcagacttaagaataatgttgatttcccaagtgctttaccttatctgttaaagcgtaagatgaattggtatttgcttcataggcagtttgactgccatgtattagagaatgaaaagaagatatttgtagtaatgcctggaaacttggtgctttaaattaaggtactcctctgctgctgtagaatggattccacacagtggatagctatgggtgattcagaatattatgtttagattcccatttgttaagtttataagttttgtggggaattatgaacttactgtgtactacctgcatttgtgctgtgtgaaaaataaatacaaggattcgtttagctaattcaacttactacaaagacaaatgtctgtttttatttgcctgctaggattgtcttttttaaaagtcatttttatttataggaatatgggtgtttctataggaagaaacaggttttttgttttttgttttttaagataaatttgacaaagttaactgaaatttatctggtccattttattcatgctactaagatgggaatctttaaacacaagggtcagcaagctttggcccatggattggccacctgttacgtaaataaagtttctttgaaacaagcctacactcattcatttatgttttgtctgtggttgctttccacaactgcagagttgtatgacttgcaagtctaaaaacatttactatttggccctctaagaaaaagttaagacacctagtctaatggccttttgggaaaaaaccaatcactaactccataatcatttatatcccntaatttccnggcataaatggtaatgcnaattgngacaaggggntttggtagaat

SEQ ID NO: 1443 - DNA, 385 bp, Homo sapiens
ggcatatggcaagggagtaaagccaaactttttaccacatggcaaaaataattgtattttgcaacagactaaaagcttaatgctatacagactttgggttggtggagttacttgaggatttactccagcaaaacaaaaaaaagaatgaaagaaagagaaagataaaaatatgaaagaagcaacagacctattccagaaatgtaatgaaaaaaggccacgaagtttgacaactatgtattaaatttacaatcagtccaaattagactggtagtcagattgatatgagaagtacattttcaaaaagatgtactataccaaataatatgagtgcaaaactctggatgattttagtaataatgtgaagacacatatttcttttgacaaa

SEQ ID NO: 1444 - DNA, 340 bp, Homo sapiens
gcaaaggcacttgttttccttggactagatgtgggccacgaaagacaggtggcattggctaggatctcatctggagaggtgaagagatggcgggtgaaacatgttggaggtgtaggggtggatgacatggaactgtcataggcagccagcaggacggtggattatccgtttcagaaaactgctggtgaaaggacttcagccataagcgtctgcacagagccagtgaaagattccatgagatccacaaaacacttcatgaatgagaacagcctttagttcccaccgtgcccagagatcactgaactcagttcacgccagtgccagtcgaaaagaatatttt

SEQ ID NO: 1445 - DNA, 460 bp, Homo sapiens
ggaaactcctacggtcgatggcacttggaagaccccttccttcccaaaaaagaagacagctgcttccagcaatgggtcaggacagcccctggacaagaaagctgcagtgtcttggttgacccctgccccttcaaaaaaggctgattcctgttgctgctaaagtagatttgctgggggagttcccagagtgcccttccaaagatcaatagccacccaacccgctctcagaagaagagctcccagaagaaatcctctaaaaagaaccatcctcagaagaatgccccacagaactccacccaagctcattcagagaataaatgctccggagcatcccagaagttgccacggaagatggtggcaattgactgtgagatggtgggcacaggaccaaaggggcatgttagttccttggctcgatgtagcattgtcaactacaaaggagatgtgctttatgacgagt

SEQ ID NO: 1446 - DNA, 987 bp, Homo sapiens
ttttcagtcattgtgtgtcctttgttgctgccaatgtctttggactgtaatcagtgcatccacacctcccaggatccagtgctccctctcagctcagtctcccctctctccctgtcctgcattccatcccagctcctcagcatggcctcagtgggcgcacccatgcctcccgcagtccaggtgagcaggggagcaactgagcaggaagaggatggatcaacaagggtcacggggaataggggacccacggggtgtgacctgcttgctagagaactgtgaacatgtggctctggatagagtgactgctgctccatattagcttccagagggtgagtgagggacagaatatttccttcataatggtcatgggtgaatgctttctgctgtaagtgtcttttagagtaggaatcagcatagtgggatgcccagcaggcacaaaccatgggtccagggagtctcagcggggaacttctatcagtatcaataaccattggaaggagaaatgattcatgtgtgaaaaaattctcagatccatcaataaatttttttcagagccattgtatcagatgttgataaaagcaatttttttctaataagctgtcattctataattgcccatcacagtctttagtgaacacatagaaagcctatacagttttggtcctgaatagtctcttgtgactaggatgattgaggtgttaattcctcttccttataaaaaggcttggaatcaaaaatattttaaaaggccgtggtttcgtttcagacatcaaccatctaaaacgggattttaaagcgatattttacaagaatgaaaggcacaattgttgatctgtaatgtttttacacttcagtttctaaatcatgaatcgttgccttccacaggaaccctcccttatacattacttgagtgttgtgtagtttttcttcagccaggtatttctctgcctagagaggggaagagaaatgtgttctccagggactgat

SEQ ID NO: 1447 - DNA, 1735 bp, Homo sapiens
tcgggccgcggcggcgcttggcagccaggagctctgcattgaaggcactggggtaaagtgaatgccgaagacagaagatttggatgatacaccactgactttctttgtttggaatacacgttatgaaccctttctggagcatgtctacaagctctgtacgcaaacgatctgaaggtgaagagaagacattaacaggggacgtgaaaaccagtcctccacgaactgcaccaaagaaacagctgccttctattcccaaaaatgctttgcccataactaagcctacatctcctgccccagcagcacagtcaacaaatggcacgcatgcgtcctatggacccttctacctggaatactctcttcttgcagaatttaccttggttgtgaagcagaagctaccaggcgtctatgtgcagccatcttatcgctctgcattaatgtggtttggagtaatattcatacggcatggactttaccaaggatggcgtatttaagtttacagtttacatccctgataactatccaggatgggtgactgtccacgcttgggtgttcgatattcctgtctttcacccgctagttgatccccacctcaggtgagctggatgtgaagagagcatttgcaaaatggaggcggaaccataatcatatttggcaggtattaatgtatgcaaggagagttttctacaagattgatacagcaagccccctgaacccagaggctgcagtactgtatgaaaaagatattcagctttttaaaagtaaagttgttgacagtgttaaggtgtgcactgctcgtttgtttgaccaacctaaaatagaagacccctatgcaattagcttttctccatggaatccttctgtacatgatgaagccagagaaaagatgctgactcagaaaaagaagcctgaagaacagcacaataaaagtgttcatgttgctggcctgtcatgggtaaagcctggctcagtacagcctttcagtaaagaagagaaaacagtggcgacttaagagatggtgaatctggtgcaccatgcactttcctgctagactctggcctagttcaagctgaccaatggcagaggactgcctgaagagtaaaactgtgtgaacaatgactgactgccagtgttttccatgtatgcataggttctaacagcagggtttggaaacctgtctctaagtaatgcattacttctgtcagaagtgtcttagggtggttatctagttcagtactccaaattattggggaccttgaggcttaagtaagtatttttctgaatataatgctaaaggtaagttgcattcatttaaactaatagagcagacagaattcagcactacttaatagtttataaatcagtggtttcagttgtatatatgttaggaaatggagaggtatagagagagcaggttccatagctcagcacttttaagtggaagatcatttgaatctcagtcttcagcctgcactgatttgtagcctgcactgtcttactgatttacaaactgaaatcactgagaaatgtctttagttcagtgagaagaaaccagaacacttgttcctagtgttgtgttgttttttttaagcaaattacttactgtatttttatggcaggagggagaaaaagtgttacaacggtttctaatgaagtccggtatttaaatgataaatgactaatgtgtttagtagagacaaaataaaccaataaatgattgttctttgccatttaaaaa

SEQ ID NO: 1448 - DNA, 234 bp, Homo sapiens
atctttctgttgattcgtcttttctggagattgggacagagcatctgtggtccagggaagttagtcctctggcctcaattctgttgtggatgtgcagtgataagcgggcattgcgtgcctcgggggatgcctagttcgtggcttcctggctgttttgtccttctgtgtcttgtagctgtagggtgccagctcagggagtggggtgttggcggcgtttccgcggttggcctcctt

SEQ ID NO: 1449 - DNA, 1304 bp, Homo sapiens
ccggcgcctgggttggcgctgcggggcggaggcggtgtctgagcgccgctccggctctgctctctctcgagcttcggcacccgcccgagccgctcgcgcgcccgccacctgtctgcccactcggctgtctgtctgccctcccgccgccagctcctgcctcgggcctgccctctccggtctcggtgctccgaggggcgacgagaagcgcgacggggccgtggcgcaccgggcagggcgcgcggggcgcacggcctgggggcgcacggtgcggcgccggcccatgaggctttccagcgcggggagcggcagcgccggccggccatggggggtagcctgcgggtggccgttctaggcgccccgggcgtgggcaagacggccatcatccgccagttcctgttcggtgactaccccgagcgccaccggcccacggacgggccgcgcctctaccgacccgcggtgctgctcgacggcgccgtctacgacttgagcatccgcgacggcgacgtcgctggccccggctcgagccccgggggtccggaggagtggccagacgctaaggactggagcttgcaggacacggacgccttcgtgctcgtctacgacatctgcagcccggacagtttcgactacgtgaaggccctgcggcagcgcatcgcggagaccaggccggcgggcgcgcccgaagcgcccatcctcgtggtaggcaacaagcgggacaggcagcggctgcgcttcggaccgcggcgcgcgctggccgccctagtgcgcaggggctggcgctgcggctacctcgagtgctccgccaagtacaactggcacgtgctgcgtctcttccgcgagctgctgcgctgcgctctggtgcgcgcgcgccctgcacacccggccctgcgcctgcagggggcgctgcatcccgcgcgctgcagcctcatgtgacccgatcggacagtgccatccatgggccccaccttgtgactgggacaatcagggacctggattggacgggatcgcccaacttcactgggactggacagggaagtctccgccctgattggatgaggaaagctccaacccagtctcctaagcgactggcccccttttgaacctcattggacccaaccaggtcccaagctccattggagatgaccagtcctttctgggacctcaatgggtcacaatcccattggatggaaaggacttggctatgaacttgactggaaacacgcagcctgctcctggagcttcactggacatattctttatgccacacctaccacgggataataaaagggaaaataatttgaaaa

SEQ ID NO: 1450 - DNA, 380 bp, Homo sapiens
ggaccagacatgtacagactgagataaataatgaataataatagggaccgcagaggcagatttattgtgaagctaatgaagctccagccccagggcccctgaacttgtacaacgcattccttgccgtttttgaatatattgccagggcccacccagcactttcccagggccctggaggagccctagcagtatacgtagctgggccttcatgggatcataactggtaaaattggaagaagattttaagcaatcctttaatgtttttctttctcattctgacttccctgctgtcacatttctgtttgggtttgatgacattggacttgaaagtgcttttgagatatagctagggggaagtcgaattgggtccacattttgtt

SEQ ID NO: 1451 - DNA, 483 bp, Homo sapiens
attcggcaagaggcgactcagaggtcagagatactactgggggggaggctgagtttgagagtatgcttaagatgccagtggctcgacctgtggttggtttaagttttaatttttaaaaagctagttagagaacagaaaatcattgggccaagtcacacctgtacttttttttttccccctcctctgtctccaacctctttctaggttcttcacacacccccattcggcgtagtacccagagagctcaagatgtgtggcagttttcggatggaagctcgagagcccttaagttctgagaaaatttgaagcccccaggggtggggtggacgcgtgccgcccagtcgacgtcagcgtggtctgtcatcctgctagtttgtgatgttttctgacagtagcctccaagaagccgttgtgcgaagacagagtcctgcagagtccttccagcctaggccctgcagcgcccattttatttatattttttaa

SEQ ID NO: 1452 - DNA, 657 bp, Homo sapiens
gggaagcaggagggagggagaaaaagagagagactgactgtatctggggattctggcaaggtgaagagctggtctgtttggcaggaccttcccatctgggatccatctgtgtttccctggaatgggacaggcagctctagtcagtgagaaatcgcagatgtgagagagctgacacatgtccagctaatgaaaggaggaggaaggctggtctccgattgagctttgaagattaggaggagaaaaagaggagctttggaatatctatttcaaataaatttggtgtatttaagaatctggattgtttataatttgggcatttgggttggtcctgagaaaagggtgccagcgatgcctggatcgcctgtggaagtgaagatacagtccagatcctcacctcccaccatgccacccctcccaccaataaatcctggaggaccgaggccagtgtccttcactcctactgcattaagcaatggcatcaaccattctcctcctaccctgaatggtgccccatcaccgccacagagattcagcaatggtcctgcctcctccacatcatctgcactcacaaatcagcaattgccagccacttgtggtgctcgacaactcaggcaagttgaaacgctttcttaccactctggcaacagtttggcaatg

SEQ ID NO: 1453 - DNA, 438 bp, Homo sapiens
gaaatgttagacatgacttcatggaatctttttgagggatataacttggagagttttgtcataaaaatgagaacattctttcttgcttaaacctttttccttaacagaggaaggcactgaagttgtagatattggaaatctctcagaaatctaatgtagaacagtcttttgaggagggacagagcatttccaaattaccaacttcaaggctataaaggaaatgcaagcatcatcaagcgcagttcaacctccttaccttacaaatggaggcccccagacaaaaacgttacatgccaaacctaggcataaatccaagcctctctgtgcctgttcatccaggcctctgcatgcgtatccagtagtctttccatgacgtggcaagttgcccctgtgcagagagcaagagaaatgtgaatgtttaattcattacaacctaac

SEQ ID NO: 1454 - DNA, 598 bp, Homo sapiens
  misc_feature (1)...(598): n = a,t,c or g
ttttaattggggtggcaacttaaattcaattaaaataactcatgtgtcacaagagtaaattttacataatctgtacgtagttctaatctgtatatagtcttgggaggttatgatttgccacagattggttgggatccacatacatttaaggatcatattattaaataatatatgcacagacatggagagaattagtttttactaaaacatttatcagaaattttaatactctgcataaccagtattagcattagaaattagccacttttaaaatgagaaaactgtgtcactcttcaatttttttataagccattgaggaaaacattaactcctggatttcagcttcacttttaacctgcagactaaatttctttctcaattatgtcagacacacccaagtcaatcccaacccccttgttaccttgggaagacccgtgctgaaaaaggagatcttccacctaaacacgtgttctcttatttgaagcaaatctttttgagaatttgtttacttgatttctttccacaataaactgacagagaacgctactaatgatttttttttttttttggagacggggttttgttcntggttggccca

SEQ ID NO: 1455 - DNA, 442 bp, Homo sapiens
  misc_feature (1)...(442): n = a,t,c or g
gggaagttggaagagacaaggaacaggattcttccctatataccttggaaggagcatggctttgctggatattggacctgatttcccagagagtaagaatacatttctcttgttttaagttattctgacannnnnnnnnnnnnnnnnnnnnnnnnnnnnnnnnnnnnnnnnnnnnnnnnnnnnnnnnnnnnnnnnnnnnnnnnnnnnnnnnnnnnnnnnnnnnnnnnnnnnnnnnagctattgtgcccagccacaggttctgtaaaaagaggcatcctcgggattggagacagagcaagaaggaagggcgagcatggagctgagatggaaaatgaatttgggtttggtatctgactgctgggagtgtgaagatgggatgacgtgaagaggacacagaactttttgctttgggaacagatgtaggctgggcagccatataatg

SEQ ID NO: 1456 - DNA, 528 bp, Homo sapiens
  misc_feature (1)...(528): n = a,t,c or g
gctgtcctccaactaaaaaanacaaaaattacccgggcatggtggtgcangccctgtaaatcgggaggctgaaaattncaggtgtgaagcccacccatccccggaccttttcttttcaaaaacatacataaaaatggaaatgaataggaccagccagtggctgtgatgcagccaaaacgccctgtctggaaagcatgcgtcctaggtaatcttcctcagctttgcccaggcggtctgaggtctgggctggaggcagcgggagggacagggtgcccagtttgtgatcttcttcaactgcggcggccacagacacctttcttttggagatcttcagcctcatggctttggctatctccatcatccttttctcactgagcttcaagtccctctgtaacactgtcaggtcaatttggaagtcatgtatgtgcaaggcactcgtgccnnnnnnnnnnnnnnnnnnnnnnnnnnnnnnnnnnnnnnnnnnnnnnnnnnnnnnnnnnnnnnnnnnnnnnncaaannnnnnncacc

SEQ ID NO: 1457 - DNA, 744 bp, Homo sapiens
ttttttttttttatagagaatattttattagactttacaaatgacaactgcataaaacagaaaccagtttcatgatctagtttagggagtatgtattttatacaactcataatcctttacaaatagaaaaaaatcagtaatacactgaatcaacttgaagaatcttcagcataaagttcaacaaagtcccttagatgcaatttcttttggatttacagcaacactttttgttatgttgtatgtcttgtaaattccaataagtctatccgaaatctcaaacatattatttcgaagagaaattattatgaactgtgcattttttgtttgttcatatatataaaatgcaacaatggacacatttttaaaatcaagggctgcatcaatctcatccatgaagtaaaggggagtgggcttgtagtggtgaagagcaaatactaaagccaatgaactaagtgttttctctcctcccgaaaggttgaagatctttttccaacttttcttaggtggtcgaacactgaacatgattccttcagagaaaggatccaagctgtctacaagctcgagttcggcgtcccctcccaaagtaagcatttggtaattttcctttaatttatttgttattatataaaaacctgccataaattcattaagcctttgtttccgaagatcttcatatgcctgtctaaaactgtctctttcataagtaattttgtccaattctgctacccgttgcaaatacaattc

SEQ ID NO: 1458 - DNA, 416 bp, Homo sapiens
gccattgaggaaacattagaataagaaccccagcaatgggacttatacgtaggtttcttgcctggggttgctcacaccctatgttctatctactgaggccacaaagcagcttttccaggcatcagctctagggtggaggcacagcagcagagagcttaatggccctgaccacaaatggctgggaatgtgccatgtctgtgcatttgactcaggccacgtgttcatagaccagcatgcacacgtccacacctgctgagtgtctgtactcaggtatagtgttagcacaggtttttttcttcagtgtggcgggtaaggactcaggtataaaagctaggtagtctcagtaaaaataattgggccaaatagctatttactacccatgagatcaaggagacgccagggtaaaagaggcagca

SEQ ID NO: 1459 - DNA, 496 bp, Homo sapiens
ttttatttttccaattaaatcttttctttttttttatgaaaaaagatcacacagaatttgccaacaaacaaaattccaaaagaaacataaaaaaaaaaaaccaataattcccccaaaaaacaaacccaaagtctggcttttccttccctcaagattgtctggttgaggccttggtttcccttgaaggcttggggcctggttaagtgctttctggggcccaagcagggaccctgggcttgggccggctcctgcctctccctcttctctccctaacaaacacttctctatcctggggggtgagtacagtacacttggcggggtgggcggggggtgtgctggggactgggaggccggtgaagccggtgctagacactataatctaacaggaaataaaaaataatattctgcacgtcagaatgtttttttttataatttcatagctatttttcacagttttaaaaagtttatatatatatttatatatatttatctttat

SEQ ID NO: 1460 - DNA, 604 bp, Homo sapiens
gcacctctaaattgccctaatttggattaaaatgtgggttcacatttctaatccttatagttttgcagccattgcattgcccgtaagattttttttttcttcattccaggcttatgattttactgggtatgtatttgggagaaggaaattctgtcagctcccaaaggataaagcagcagttgctttattggtcttcagatgtggctgcaaacacttgagactgaactaagcttaaaacacggtacttagcaatcgggttgccagcaaagcactggatgcaagccttgccttccagaagcttaccagtcgggttgccagcaaagcagtggatgcaagacttgccctccaggagcttaccatcacaacgaagaagacaaataaatgcataatatatagacgacataaatccatactgtacacatttaagaataaacagtccagtagtaagaggcagtacatattcaatctgctgagaaatgtagacaataactactataagaatcctaatgctacagaagtcactggctgctgggaaaccggggaaaacttggctatggacgtgggggcttgtgtcggactctgaataaagagcagaatgattggc

SEQ ID NO: 1461 - DNA, 537 bp, Homo sapiens
gttcgaattatcaacttagtcctttattaacaacttcaaggtgcaaatttgtgagattccagacaggcagttcaatgagcagctggattttgctggttcccaagagcaaggaaaattcccttgttttaaaaagccagatccatttggaatagtctttcttccccacatattacagcatgaacgtgactctaaagtacctgccgagggtctttctttttgtgacggtgggcgctgttccccactgtcgtggacttctcacagcgctcagtgtgcattcggttgcttctctccataacgcctctcagctaactgtgctgtttctgtgctcctgggttgttaatgttcaagtcttggctctataccattttccttatcatttaggattccactgggaagacatcactaagttgtgaaatcaaacttcatgagttggctgagatcatagggttgggtgtcctctgagcacttgcaggctgggggaagacagaaaacctggacaccttgcaattgtttgcaacaaagtggaaaaactaaagt

SEQ ID NO: 1462 - DNA, 529 bp, Homo sapiens
ggggcactggtagcagcaattctttatcaagttataggctgaagatgagccttgaagccagggtgccgggaggaagggacatctcatgccccttgctgttttcttccttttttctccatgccccagagcctgaaagtgctgtcctgtgcctgcctccacctctttaacgagcctcttttcctttctttttctgtgtcttgtctgtcttttcttcttcttgtcttccccgccctgtcctccggattcctgctaccccttctaaagatactacgcggacttcctgtatcccccggagctgagcgctcgtttaagtgacctgacgctagagggggagcagtcctccagttctgacacccagaccccggggacactggtctgaccccagttggtccgcggcggccccccacagcccgcgcctaccctccaccgcaccccaaccaagcacaccactccttgtgccctgctgaggagctggctcttgaggccctggaacgcgaggtgtcagtgcaacagcagatcgcggcggccc

SEQ ID NO: 1463 - DNA, 835 bp, Homo sapiens
cttgaaaaaaattaccaattcactgactgtgctttgcagtgaaaaacagaagcaagaaaagcaaagcaaagccaaaaagaagaagaaaggtgtggttcctggagggggattaaaagccaccatgaaagatgatctggcagattatggtggttatgatggaggatatgtacaagactatgaagacttcatgtgacattttatcttttcttggtgtcatctttatgttgcccacaatcccttgaacatgtagcacaacttcctttcctttcagttctgccaaatgctacaatcagaagtgcagtatcttttgtgctggttatttaaccccttgacacttaggtgctaatgtgcaaatgagggaacttggatcttgctgccaaggggttaaaattgggaacctaagttgctactaaatcatagttcaaaacctaataatgttgtcgttgttgctatctgatttcatagcagcagtcactaaattggaaacaaaaggttgcaacgtgacaaaaaaaattgtgtagtatttaccagcaccattcagtaatacagccttaaccatacctccttgaactacttcataacttgtcaagaaaagcagtttgcagcaagggcatgtggtgtgcacctagtattaaaattgctttgtcttaaaattgaacatgaggatattaaaaatacattgtgaagaagactgcttatctcagagtgaagatactgcggctgaaaagcactagtttgatataaaattaaaatgaccaaaaccctccaactttgaagctaaagaaggtaaacctttccattattgcattacatgttgtggaatctctcgagtgca

SEQ ID NO: 1464 - DNA, 1631 bp, Homo sapiens
acttaagctactgcatgcttggtgtagcttgcaatttctctgtatttaaaagcagctgtgtttattttcttcaaaataacctgtatattatttagagcaagcaatgtaaatattactgagaagttactgcagggatttttgtgacagagtttgtatgggtttttaaaaaaatcttagacacccctttttaagatggggagaacagggttgactgcaccgttgaagcccgcccagcattataaggaaatgtttttaatgactgctgcatctttgtaaaaccgtttggtcatctaacagatggttttaaagtgtacaatatccaaaataaccgatgagccctgtatccatacattgtttcattgaaagaattctctatgtgcctcttcttggtagagccagagtccttaaggaaaatcaggaaaattaagaaaatgatggtgccatcttgaccagacttctgcacagtaatttaacgctatcctagggagacttgggttgaaggcacagttcctggggatcagggtctaaatgtgcagtttctgagaaccttcaagaccactcactgggcagggctctgtggagcactggagctgtttggattccccagccctttggtcatatcctggaattccgtggaggctgcagaacttagatgcagctgttttttacagcacctatttttgtcagattggtaaggaaacactgagtcacagaatacttaagaattggagactccagtaatgtaggatggcctgagaggacgtccaagtcccaaggggtggacacggcatgttcctcgggcacagcctcagtgggggccttccccaggcgcagctcggcccacctgaggaaagggtgtttcggagggcgcagccacacacacagcgctggcagcctcacggtcacgcccatcactccctgcccccactgcccttgagaagttagtggtgtcacatccttagttttatagacagctaggaatagattgtgaagaacactcagttcactactgtgttacatttatatcacaagcttcaattaaaatggattttaaaggattttaggatttacctttagtattaacaacgtatctactgacatactgttaggattcaaaaccagttaagtataagaattacttcatgtggttttcctagggtacaatttataaaaggtagaaagcatccaagtggctcctcaacaattacaattcttaatgatttttctcacagctgtgcccttctgtcagggtcagtgtcaaaattcgttatcaaaggcaaaacctactgtgccaagctggggcgctatatgtgaacggagtggaaatgcttcagtcacctctgccgcagcttgtgattccagcagttctcacaaacgttctgtcacatgatgaaaagaagcagcttgtataattccaactggtgtttcatttctgttctaatgctaagtggtaacgcttaacaaacagactaaaagctgtgtgcagaagaatagggctgaatgagtaccgcctccctaggttccagcacagcgcccgggtctaagaagtagagccccggggtagggtgggccatccactgtcaggccagtgtctcaagaaagcctgaccagctgagctgctgctttttttt

SEQ ID NO: 1465 - DNA, 905 bp, Homo sapiens
aaaagaatgtttttataacttgtttggggagtatgagagggatatttccttaccttcttccctaaaatgcctggagagggagttgctttgagaaaatgcctacctcccttgaatgactcgtgcatgagctagtgctgtctgtacctgtcctccagagatcagcaggaccggagttaaatatttaacagcaagtctgtaaaccagagcagctctgacagtgcctgcaggtcacaccccttctcagtcctgcattgtgaggtcatttcctgcttctccctttccccaggaagatggttcccacttgtgctgcaagactcttttttgtttggcttaattgagccccactaaattggaatcaatctctcttacagcttcctggctccaaacattaattgatttcagaattcccccaaactaaaaccttatctgtctgcattttgaatgcattttggtcaaaagtatacgttttaaagatttttaaagataaaaatgtggcacaactggtttttttagcttgctgaaaatgaccatatctctaaattaatctttctctccagagcaagacttcaccagtatttgtaactaggagaagctaacagtgaatgtttaattgtgaattttaatcattgcttgttaggaataatgactgtgatactagaatgggcttttgaaacctgcatgtcccagtgtgaaatttcagcacgggcattttctgcatcctttcatgggccatccaaagggtttccgctggcaggaaattattggatgtgctatttttggctgtcttgtggatgcaggctgctttgggcccctgggtcactcttccaaggctgctgtagagcacagagacatggggctggccagtgttgactgacctgaggagacccctttgttgtggcttcata

SEQ ID NO: 1466 - DNA, 648 bp, Homo sapiens
agaagatccatcaaagaatccatactgtaattggagacatagtcttatatgtcaatacgtatatgtcaatactacttggacacagcccttggaaatcacctgactgtaccaatacaaaccatactttggaaaccaccattctctgggtagaaacatctatggactatcaattttgtcagaaatcagtgaacaagtgaagagtcaattttttttagtcaaatattttctcttctcaatgaagagaagactaggacagtgacattttgaagcataccttttatactccttgtggttcttatgacagtctgtgatggtagtagggtaaagtaggctaaatccttgattcagagaggggggaaaacatgtggaaagaaactgaacgacttatccaagttcacatgacaagttagtggcagaaccattattgcaatccaggacttaagacatcttgtcctaggatttttcctccacattatattgcactgctctgaggcttgcttatatttttcatacctggatttccagggtggtgacgtgggggagggaagtattcaattcagaaccaccgtgaaccaagatctctggaaacaaactctgtactatttctccttcatctcctattttcataactagtgccaagctcaggac

SEQ ID NO: 1467 - DNA, 573 bp, Homo sapiens
  misc_feature (1)...(573): n = a,t,c or g
gccagttagtgtagaagttttagagtatcttttggtgtaactataaatttactgacatctctaaatttaaaaaatgcatgcccttcattcacatttgaaacattcggaatgtcattttaaaattacttctctttttttgaaaaataaattttaaaaattaaagtaacttctcagtctttcagcatggaaagattggggacatttagagacttggtaatttccatgcgagggcaggtggattgggttcctttgcccaaagcagaacgtgggacaggatcagcctcgtgagatagcacgtctggcctttggtccccttctccattgcttcctctctttatgtttctcttcctatctctccgagtttgctgtttctttgtgaagtctttttctaattcagtctttgtgggaagttgggtcaaccttttccctccaanctaaggttttttaatcctccttcaacttttttttttttttttttccgnccctaagttttaaggtaatcaaactccccggtggccccaatttttttttttgcttggaccttccccgtttccctttaatcctgaaaaaatc

SEQ ID NO: 1468 - DNA, 738 bp, Homo sapiens
agactctacgcttccccgatggatggtacttcttctgctctcagcatgggaccttttgttcccttcattatgaggtgtggtcactcacctgtctaccactcccgtgaaatggcagctcgtgccttggtcccatttgttatgatagatcacattcctaataccattcgatctctgttgtccacactccccagctgcactgaccagtgtttccggcaaaaccacattcatgggacacttctccaggtttttcatttgttgcaagcctactcagactccaaacacggaacgaattcagacttccagcacgagctgactgacatcactgtttgtaccagagccaaactctggctggccaagagacgtctcaggaatgtctaaggtcatgatatctccggatgagatcctgtttgtgttttttaaatacaaaaggaaacattatcgtatttcaacccaagccagtgggacaaggcaaaatccatgtttggtgaccagagctgtatatattgatattctcttcctattgacttgctgcctcaacagatctgcaaaggacaaccagccagttctggagagtcttggcttctgggaggaagtcagagggattatctcaggatcagagctgataacgggattcccttgggccttcaaggtgccaggcctgccccagtacctccagagcctcaccagactagccattgctgcagtgtgggccgcggcagccaagagtggagagcggga

SEQ ID NO: 1469 - DNA, 404 bp, Homo sapiens
ccaagcccctcgcagtcataaattatggtgatggtctccaccttcctccccaactgcagggaacagagagcaggaagtcttgtcaggctgtcctacttcagaagcccgttccagtccaggccaaatgattgcactgtgcatccagagagcaatcagagctagttagggccggacctagagttttccaaactgagataatcaccccaggccagaattgtggtctaggcgagtcactcttcctgcctaggtctctgtgttcttttccagtacatgactgggtggatctagatgacatctgagatggctttggttctgcagtttggcctggatggcttcccccctttcctgagttcactgtgtgctctgttgcacggtaccctaggagccactttttgcccgaggtt

SEQ ID NO: 1470 - DNA, 564 bp, Homo sapiens
caaagacctgacgggagaggtggaggaaaatgagagatatgcatatgaatggccagagatgcctggggagtgccctgaatgtcattaagaaggcaaatgataccttaaatggaatcagtagtagttctgtttgcacagaagtaattcagtcagctcaaggcatggaatatttattaggtgttgttgaagtgtacagggtaaccaagcgtgtggagctggggataaaagccactgcagtgtgcagtgagaaactccagcagttgctgaaggacatcgataaagtgtggaataacctaatcggcttcatgtcactcgccacactcacaccagatgaaaactcgctggatttttcctcctgtatgttacggcctgggattaaaaatgctcaggagcttgcctgtggagtgtgcctcttgaatgtggactcgaggagccggaaagaagagaagcctgcagaagaacatcctaaaaaagcattcaactcagaaacagacagtttcaagctggcctatgggagggcaccagtatcacgccagctgtgcccaactttctgggatccaactg

SEQ ID NO: 1471 - DNA, 380 bp, Homo sapiens
ggagagctagcacatgagcttcaataccctggacttcaaaaataagactgctttaatgagcatatccctccctttattagtagtcactcctcacccccaggataaagttcaatttccttaatgtagcaaatgaggcccttggaaatctaatttagtgcactgcctattacagatgactaatggagcaacaagcctaactcaaaatagccctctccattaccatatttttgctgtacaaccctttgccattgctaattgaaccatgggtagacaaaactgggtcacaaaggctttctctctaggggattctgaaacctgacaggagagatcaaagactgggaattatggaagataggccagcactctaaagctgtagctcc

SEQ ID NO: 1472 - DNA, 59 bp, Homo sapiens
gacgaaagtttggggaaatacttttgacatcccacaatacagaatgtcttaacatgaga

SEQ ID NO: 1473 - DNA, 439 bp, Homo sapiens
  misc_feature (1)...(439): n = a,t,c or g
gggaattttaatttccccctgtgagtattgtgagtgggggtaggggctctggggtctgttttgctctgacaccaattttactcacttaaatttgtctttattcatagagatttttgttcaccaagaatgggtgctgatggtagcatgtaggggtaaagtgggtaatagaccagtgaagttgtggattaaaaagcatatatcctcaagacagttggtgggcaacaccatttctatataaggaaaactgtatctcattactgttagggagtttgttaatgggaattaaggaaacacagtctattcgttgtgctacctataaacttctgaagtcctctgttatgtatagtgctatccacatgtaaaggcccaactgacaaaataacttacaaaggaactacttttttcttcactagtcagagaggtgaanctcttgttatca

SEQ ID NO: 1474 - DNA, 517 bp, Homo sapiens
  misc_feature (1)...(517): n = a,t,c or g
ggagcccactannnnnnnnnnnnnnnnnnnnnnnnnnnnnnnnnnnnnnnnnnnnnnnnnnnnnnnnnnnnnnnnnnnnnnnnnnnnnnnnnnnnnnnnnnnnnnnnnnnnnnnnnnnnnnnnnnnnnnnnnnnnnnnnnnnaatattagccgggtgtggtggcacgcgcctgtggtnnnnnnnnnnnnnnnnnnnnnnnnnnnnnnnnnnnnnnnnnnnnnnnnnnnnnnnnnnnnnnnnnnnnnnnnnnnnnnnnnnnnnnnnnnnnnnnnnnnnnnnnnnnnnnnnnnnnnnnnnnnnnnnnnnnnnnnnnnnnnnnntcccactctgttgacttaaaaataaataaataaacattttttggcaataaagctatgtattagggaaaatctcctacttacctgttgctctgcctttccattagtatgtctgccattttatggncaggtcaattttgaaattgttaaagcccaatctccaaagggtgttgacttgatgtgatgttanacnaaatat

SEQ ID NO: 1475 - DNA, 1315 bp, Homo sapiens
cgccgccactggggcagccagcacaatcgggcggaggtggcgctgccccttcagacctgaaagatgtctgaaaattccagtgacagtgattcatcttgtggttggactgtcatcagtcatgaggggtcagatatagaaatgttgaattctgtgacccccactgacagctgtgagcccgccccagaatgttcatctttagagcaagaggagcttcaagcattgcagatagagcaaggagaaagcagccaaaatggcacagtgcttatggaagaaactgcttatccagctttggaggaaaccagctcaacaattgaggcagaggaacaaaagatacccgaagacagtatctatattggaactgccagtgatgattctgatattgttacccttgagccacctaagttagaagaaattggaaatcaagaagttgtcattgttgaagaagcacagagttcagaagactttaacatgggctcttcctctagcagccagtatactttctgtcagccagaaactgtattttcatctcagcctagtgacgatgaatcaagtagtgatgaaaccagtaatcagcccagtcctgcctttagacgacgccgtgctaggaagaagaccgtttctgcttcagaatctgaagaccggctagttgctgaacaagaaactgaaccttctaaggagttgagtaaacgtcagttcagtagtggtctcaataagtgtgttatacttgctttggtgattgcaatcagcatgggatttggccatttctatggcacaattcagattcagaagcgtcaacagttagtcagaaagatacatgaagatgaattgaatgatatgaaggattatctttcccagtgtcaacaggaacaagaatcttttatagattataagtcattgaaagaaaatcttgcaaggtgttggacacttactgaagcagagaagatgtcctttgaaactcagaaaacgaaccttgctacagaaaatcagtatttaagagtatccctggagaaggaagaaaaagccttatcctcattacaggaagagttaaacaaactaagagaacagattagaatattggaagataaagggacaagtactgaattagttaaagaaaatcagaaacttaagcagcatttggaagaggaaaagcagaaaaaacacagctttcttagtcaaagggagactctgttgacagaagcaaagatgctaaagagagaactggagagagaacgactagtaactacggctttaaggggggaactccagcagttaagtggtagtcagttacatggcaagtcagattctcccaatgtat

SEQ ID NO: 1476 - DNA, 338 bp, Homo sapiens
ggatcaatgtatgtagcatgtctttgtcttgtgctaagtggggattattaaccacttagaatataaaattgtacaacaatttcacttgtttatttgcattttgttttttataactcttactcccttttcccctcaaaggagaactgtgtttatgaaactgtagttttgcctttggatgaaagggcatttgagaagactttaacaccaatcatacaggaatattttgagcatggagatactaatgaagttgcggaaatgttaagagatttaaatcttggtgaaatgaaaagtggagtaccagtgttggcagtatccttagcattggaggggaaggctag

SEQ ID NO: 1477 - DNA, 433 bp, Homo sapiens
gctcttctgttcaaggggcattggaattgtttctatgtagattctgcttgtaattctctcctagggttcttctaagaaaagtgaggaagctgattagcattctgtctgtgtgacctttcccctactgatagcatcctgcagggtgtccctctgtgattgtaagtgaaagtgaaccctggagatgtcgctgcaggtggatggggatcagagtgactgctgccccaggtagacactgtgatccaatagaatagaaatgaaaggcctatgggaatattctgtttctggaacataccacacccaatgcctccaggacctaaggctctttaaaagaaaaacagtgcttaaaaaattataagcgttatacacaggatgagccaccaagcccggccgaccttgtctttcaaagaaagaaagaaagcaagaaaaaacaaaa

SEQ ID NO: 1478 - DNA, 877 bp, Homo sapiens
ctcagacctgaatcatttaacaaactaaggcagaaatactaaaaatatctggttcaataacataggggcatggagtagacatgcagaaaatgcttgttcacttgccttgaaatggctccaggtggcctgaaggaatcaatgaaacttctcaagtatctacattacaaccactggtccccactacacatttatttctaaataaaggaggagaaactctagcaaagtaatatttaacattttcattgcttccaggataaatcttattgaatatgggaggatctgatagtggtaggtctatcaggaatatcagggaaaatgcttttgatgttgttggcaaagtcaattcctatcatttgtacttgacaccagctacctagcaggctcattgtgaacttcaggtttcgcccacgttatttatataaagtatctcagtgtaatatagggagttgctggttatttgaaaatagtaacaaagataacccaaacgagaaactccatttccataattagctttcctgaaagtcaggcatgtctttgaggacaggttttggcagtattatttttgtgcacaggaggaaaattgttagtaggtttatagatgttatttttataatagaatgttaaacccctgaaaaacatcaaaaattgtctcctagaactaattctatgttttaaaaacttgttttaaaaaggattctaaatagcaatagggtctttcctcctttctccactccaatggtttaatgggatagaggaatcaatgtttatatttttaaacctgtaaatattttattttgggtattttgtatatttgttgatataattccattttgtgcatatgtaccattgtgcatgttgctgtttttgatagtcactc

SEQ ID NO: 1479 - DNA, 355 bp, Homo sapiens
gcatcatctcaacctatagggagggttctgcgcatcatctcagcctatagggagggttcagcgcatcatctcagtctatagggagggttcagcgcatcatctcagcctatagggagggttcagcgcatcatctcagcctatagggagggttcagcgcatcatctcagcctatagggagggttcagcgcatcatctcagcctatagggagggttcagcgcatcatctcagcctatagggagggttcagcgcatcatctcagcctatagggagggttcagcgcatcatctcagtctatagggagggttcagtgcatcatctcagcctattgggagccttcagcatgccatctcaacc

SEQ ID NO: 1480 - DNA, 859 bp, Homo sapiens
ctcgcaacactcgtgccacgggtgcaagattggcccgtccatcctcaacagcgacctggccaatttaggggccgagtgcctccggatgctagactctggggccgattatctgcacctggacgtaatggacgggcattttgttcccaacatcacctttggtcaccctgtggtagaaagccttcgaaagcagctaggccaggaccctttctttgacatgcacatgatggtgtccaagccagaacagtgggtaaagccaatggctgtagcaggagccaatcagtacacctttcatctcgaggctactgagaacccaggggctttgattaaagacattcgggagaatgggatgaaggttggccttgccatcaaaccaggaacctcagttgagtatttggcaccatgggctaatcagatagatatggccttggttatgacagtggaaccggggtttggagggcagaaattcatggaagatatgatgccaaaggttcactggttgaggacccagttcccatctttggatatagaggtcgatggtggagtaggtcctgacactgtccataaatgtgcagaggcaggagctaacatgattgtgtctggcagtgctattatgaggagtgaagaccccagatctgtgatcaatctattaagaaatgtttgctcagaagctgctcagaaacgttctcttgatcggtgaaaccataaggagcccagtgttcctgttcatgaaatctcccttttactggaaaacaggaatattgactaccaaatcacaatgcaattgaagccgtactgcttttttgagcagttattcattccagtgattaaaactgattgtgcagaataaaaaaaaaaaaaa

SEQ ID NO: 1481 - DNA, 388 bp, Homo sapiens
  misc_feature (1)...(388): n = a,t,c or g
ttttgatnccntcnctgatnccatnnnnnnnnnnnnnnnnnnnnnnnnnnnnnnnnnnnnnnnnnnnnnnnnnnnnnnnnnnnnnnnnnnnnnnnggcacgagagagttttcatgaattaagtggaaaaatgcacagcttgtgcagtgctgagtagctgggtgttctgagtacctataggtcccattcctgccctacatccatttcctcggtcagcctgcagtgtttttggagttaagtgtatgttatcatttctcagcatctccctactctgactcaaagagcagagggagataagaggaaagtgaaaaaaggtgcactgacttgcttctccattgcttctgggcattagggaaaaaaagtccggggccccagaaaggctgttccaa

SEQ ID NO: 1482 - DNA, 307 bp, Homo sapiens
gcctgatgcagggcatgaatcccctcatctgatctgacttctgcactgccattattcccccattgcctggatgaaaaaactgaggcctgtagaggttaagtgacctgtggaggctgcagcatctcccaggtcacattccagacatcatgaggtctaaggaagtctcggaaaaggcgggaagaggtggcaggctgaaaaggatgctcagagccagcaccagcatccggctcatcaacaaacctgaccggaagctgcactgggctgatttgtgggggcaggcctggagggtggaggtagggcagaccct

SEQ ID NO: 1483 - DNA, 394 bp, Homo sapiens
acaaggaagaaaatattttgcagaagcacttgtcaactttagggtgcttgaaagcataccctcattgctccatagaattaaatgtaaatgatcctgaaaacaagtagagtctctatgagaaaggtcttggttggcatagactcagtataatttgctgattctgctctttctaagtttcatttgtgatttctaatattgaaatcctggttatttgcaggtttcagttagtttgttataccttaaccacaagtttctacctctgccagtttctgtctcttatgggcttaatttggtgagtcatattaggaaaagtcaatcagaaattaattaccaggattcagcttgtccattttgaacacttaaagtaggtggaattaaaaggttaccattggaa

SEQ ID NO: 1484 - DNA, 597 bp, Homo sapiens
gcggagagattcgggagcccgctctggagatgcgcagtggacttttgaatcagctgtgcaagagaatatcagcattaatgggcaagcatggcaggaagcttcagataattgttttatggattctgacatcaaagtacttgaagatcagtttgatgaaatcatagtagatatagccacaaaacgtaagcagtatcccagaaagatcctggaatgtgtcatcaaaaccataaaagcaaaacaagaaattctgaagcagtaccaccctgttgtacatccactggacctaaaatatgaccctgatccagcccctcatatggaaaatttgaaatgcagaggggaaacagtagcaaaggagatcagtgaagccatgaagtccttgcctgcattaattgaacaaggagagggattttcccaagttctcaggatgcagcctgttatccacctccagaggattcaccaagaagtcttttccagttgtcataggaaaccagatgctaaacctgagaactttataacacagatagaaaccacaccaacagagactgcttccaggaaaacctctgcgtgtattgaaaggaagcaactaaggttgccccg

SEQ ID NO: 1485 - DNA, 1280 bp, Homo sapiens
gccaaaatttttgtaaaccctgtcttgtcaaataagtgtataatattgtattattaatttatttttactttctataccatttcaaaacacattacactaagggggaaccaagactagtttcttcagggcagtggacgtagtagtttgtaaaaacgttttctatgacgcataagctagcatgcctatgatttatttccttcatgaatttgtcactggatcagcagctgtggaaataaagcttgtgagccctctgctggccacagtgaggaaagtagcacaaataggatacagttgtatgtagtcattggcaacaattgcatacaattttactaccaagagaaggtatagtatggaaagtccaaatgacttccttgattggatgttaacagctgactggtgtgagacttgaggtttcatctagtccttcaaaactatatggttgcctagattctctctggaaactgactttgtcaaataaatagcagattgtagtgtctggtttggtttggacagtagtgctttctatcatattgttgtgtgcaatggtaatttgttctactggccaaagcctctttcagcagtgccttgccatcatgcttaaaagtttggctagtatatcttgctggatggagccttgaactccggcaaggattgaaccatctgacttccaaatttgccttcccctctggacctcactattaacaagcaaacctttcagggccctcttagctctcagaagctatgtatgggctttcccagattttaaagctgctgcctcgagaactactcatttctctcctggtcagcagacagaaatagccatactaatctcatagggctcaaatgcatcttcaggcagcagggaaccaagcagcgtggcacaggccttcttgactggaggaagagcttgctggcatggtgggcagtattccaggagaggccatgtccgtgttcacttcttggcacatttcagttccgttttcctcttgtttaaaactgcctctttagatgtggatgccttaatgctgtaacacatttgaaaacattggcaatacttaagttgctgccatgattacagatggaattattggctaccaaagagacgcaattgatgatgagaagcatgattcttgcttccatataaccaaagttaatcttaattgcaatttgactccgtttccttggtagggatagactttcttcagattccaagtgctctcttaaatggcaaattaagttaaagaatactactgctccattcccctcacttattgtccagc

SEQ ID NO: 1486 - DNA, 4602 bp, Homo sapiens
agccgccgccggggctgtaggcgccaaggccatgtccgactcgtgggtcccgaactccgcctcgggccaggacccagggggccgccggagggcctgggccgagctgctggcgggaagggtcaagagggaaaaatataatcctgaaagggcacagaaattaaaggaatcagctgtgcgcctcctgcgaagccatcaggacctgaatgcccttttgcttgaggtagaaggtccactgtgtaaaaaattgtctctcagcaaagtgattgactgtgacagttctgaggcctatgctaatcattctagttcatttataggctctgctttgcaggatcaagcctcaaggctgggggttcccgtgggtattctctcagccgggatggttgcctctagcgtgggacagatctgcacggctccagcggagaccagtcaccctgtgctgctgactgtggagcagagaaagaagctgtcttccctgttagagtttgctcagtatttattggcacacagtatgttctcccgtctttccttctgtcaagaattatggaaaatacagagttctttgttgcttgaagcggtgtggcatcttcacgtacaaggcattgtgagcctgcaagagctgctggaaagccatcccgacatgcatgctgtgggatcgtggctcttcaggaatctgtgctgcctttgtgaacagatggaagcatcctgccagcatgctgacgtcgccagggccatgctttctgattttgttcaaatgtttgttttgaggggatttcagaaaaactcagatctgagaagaactgtggagcctgaaaaaatgccgcaggtcagcggttgatgtactgcagagaatgctgatttttgcacttgacgctttggctgctggagtacaggaggagtcctccactcacaagatcgtgaggtgctggttcggagtgttcagtggacacacgcttggcagtgtaatttccacagatcctctgaagaggttcttcagtcataccctgactcagatactcactcacagccctgtgctgaaagcatctgatgctgttcagatgcagagagagtggagctttgcgcggacacaccctctgctcacctcactgtaccgcaggctctttgtgatgctgagtgcagaggagttggttggccatttgcaagaagttctggaaacgcaggaggttcactggcagagagtgctctcctttgtgtctgccctggttgtctgctttccagaagcgcagcagctgcttgaagactgggtggcgcgtttgatggcccaggcattcgagagctgccagctggacagcatggtcactgcgttcctggttgtgcgccaggcagcactggagggcccctctgcgttcctgtcatatgcagactggttcaaggcctcctttgggagcacacgaggctaccatggctgcagcaagaaggccctggtcttcctgtttacgttcttgtcagaactcgtgccttttgagtctccccggtacctgcaggtgcacattctccacccacccctggttcccagcaagtaccgctccctcctcacagactacatctcattggccaagacacggctggccgacctcaaggtttctatagaaaacatgggactctacgaggatttgtcatcagctggggacattactgagccccacagccaagctcttcaggatgttgaaaaggccatcatggtgtttgagcatacggggaacatcccagtcaccgtcatggaggccagcatattcaggaggccttactacgtgtcccacttcctccccgccctgctcacacctcgagtgctccccaaagtccctgactcccgtgtggcgtttatagagtctctgaagagagcagataaaatccccccatctctgtactccacctactgccaggcctgctctgctgctgaagagaagccagaagatgcagccctgggagtgagggcagaacccaactctgctgaggagcccctgggacagctcacagctgcactgggagagctgagagcctccatgacagaccccagccagcgtgatgttatatcggcacaggtggcagtgatttctgaaagactgagggctgtcctgggccacaatgaggatgacagcagcgttgagatatcaaagattcagctcagcatcaacacgccgagactggagccacgggaacacattgctgtggacctcctgctgacgtctttctgtcagaacctgatggctgcctccagtgtcgctcccccggagaggcagggtccctgggctgccctcttcgtgaggaccatgtgtggacgtgtgctccctgcagtgctcacccggctctgccagctgctccgtcaccagggcccgagcctgagtgccccacatgtgctggggttggctgccctggccgtgcacctgggtgagtccaggtctgcgctcccagaggtggatgtgggtcctcctgcacctggtgctggccttcctgtccctgcgctctttgacagcctcctgacctgtaggacgagggattccttgttcttctgcctgaaattttgtacagcagcaatttcttactctctctgcaagttttcttcccagtcacgagatactttgtgcagctgcttatctccaggccttattaaaaagtttcagttcctcatgttcagattgttctcagaggcccgacagcctctttctgaggaggacgtagccagcctttcctggagacccttgcaccttccttctgcagactggcagagagctgccctctctctctggacacacagaaccttccgagaggtgttgaaagaggaagatgttcacttaacttaccaagactggttacacctggagctggaaattcaacctgaagctgatgctctttcagatactgaacggcaggacttccaccagtgggcgatccatgagcactttctccctgagtcctcggcttcagggggctgtgacggagacctgcaggctgcgtgtaccattcttgtcaacgcactgatggatttccaccaaagctcaaggagttatgaccactcagaaaattctgatttggtctttggtggccgcacaggaaatgaggatattatttccagattgcaggagatggtagctgacctggagctgcagcaagacctcatagtgcctctcggccacaccccttcccaggagcacttcctctttgagattttccgcagacggctccaggctctgacaagcgggtggagcgtggctgccagccttcagagacagagggagctgctaatgtacaaacggatcctcctccgcctgccttcgtctgtcctctgcggcagcagcttccaggcagaacagcccatcactgccagatgcgagcagttcttccacttggtcaactctgagatgagaaacttctgctcccacggaggtgccctgacacaggacatcactgcccacttcttcaggggcctcctgaacgcctgtctgcggagcagagacccctccctgatggtcgacttcatactggccaagtgccagacgaaatgccccttaattttgacctctgctctggtgtggtggccgagcctggagcctgtgctgctctgccggtggaggagacactgccagagcccgctgccccgggaactgcagaagctacaagaaggccggcagtttgccagcgatttcctctcccctgaggctgcctccccagcacccaacccggactggctctcagctgctgcactgcactttgcgattcaacaagtcagggaagaaaacatcaggaagcagctaaagaagctggactgcgagagagaggagctattggttttccttttcttcttctccttgatgggcctgctgtcgtcacatctgacctcaaatagcaccacagacctgccaaaggctttccacgtttgtgcagcaatcctcgagtgtttagagaagaggaagatatcctggctggcactctttcagttgacagagagtgacctcaggctggggcggctcctcctccgtgtggccccggatcagcacaccaggctgctgcctttcgctttttacagtcttctctcctacttccatgaagacgcggccatcagggaagaggccttcctgcatgttgctgtggacatgtacttgaagctggtccagctcttcgtggctggggatacaagcacagtttcacctccagctggcaggagcctggagctcaagggtcagggcaaccccgtggaactgataacaaaagctcgtctttttctgctgcagttaatacctcggtgcccgaaaaagagcttctcacacgtggcagagctgctggctgatcgtggggactgcgacccagaggtgagcgccgccctccagagcagacagcaggctgcccctgacgctgacctgtcccaggagcctcatctcttctgacgggacctgccactgcacaccagcccagctcccgtgtaaataatttattacaagcataacatggagctcttgttgcactaaaaagtggattacaaatctcctcgactgctttagtggggaaaggaatcaattatttatgaactgtccggccccgagtcactcagcgtttgcgggaaaataaaccactggtcccagaaaaaaa

SEQ ID NO: 1487 - DNA, 1280 bp, Homo sapiens
gcggaagtgtggcatactccagtcctgtgtttaccgatagaccggaagtgtggcttcgtttacagttcggcacgtaggacggagggtagtgcgtctagagacacatattcccaacggatttgacgatggtgttcggtcttgaatggaaatgtagtcttaggccagtcttaggtttttgaacaggatagtaggtatccggagtcgattgagggccagagcaggcactggggttcaggatcctgggcaaagtttcccacgttgagggtctcgaggacgcctagatctctttcccagggccatggcgaaccccgaagctgctgggactggagctaagcgaggcggaggcgatcggtgctgattcggcgcgatttgaggagcctgctgctgcaggccttcgaaggagctccagcaaagcccagacaaccagaccagaatcgacacaaatccagcctcagcctgggtttctgcataaagaccaactcctcggaagggaaggttttcatcaacatctgccactccccctctatccctcctcccgccgacgtgaccgaggaggagctgcttcagatgctagaggaggaccaagctgggtttcgcatccccatgagtctgggagagcctcatgcagaactggatgcaaaaggccagggatgtaccgcctacgacgtagctgtcaacagcgacttctaccggaggatgcagaacagcgatttcttgcgggagctcgtgatcaccatcgccagggagggccttgaggacaaatacaacttgcagctgaatccggaatggcgcatgatgaagaaccggccattcatgggctccatctcgcagcagaacatccgctcggagcagcgtcctcggatccaggagctgggggacctgtacacgcccgcccccgggagagctgagtcaggccctgaaaagcctcacctgaacctgtggctggaagcccccgacctcctcttggccgaaattgacctccccaaactggatggagccctggggctgtcgctggagatcggggagaaccgcctggtgatggggggcccccagcagctgtatcatctagacgcttatatcccgctgcagatcaactctcatgagagcaaggcagccttccaccggaagagaaagcaattaatggtggccatgccgcttctgccggtgccttcttgatcagggtgtctccttgtgcttctgagatgtggagaagaggctgctggctaccctaaaagttgaaataaaagatttttgccttaaaaaaaaaaaaaaaaaaaaaa

SEQ ID NO: 1488 - DNA, 535 bp, Homo sapiens
aagatttgtagaaatcaaaatatttattcacataattttaaactaaagttgaagctaatatatcttccgtggtaatgatttaagtgcaagtgatgcttggctttctttcacattcatttcttttcttctgagtgaaggcatatcagttattcttgaacaagtcaatacagctctgcaaaagggagacattgttctgtggggaaaaaaggcaaggcagaccagtgaattattaaaacttgccatatacctggaatgactcaagtacaccaacacggcttttcacgggaggtttaaagtcagccagagcaagctggcccttctcttcatcaaatcccaggtgaactgcaacgtaccacgcatccccatttcatgtttcagctcctctccctcagtgggtaaggctaccagccaaagagccgacgttcactccagcacctctgccctcacctgcttgctcctaaatgtgatcctgcttactgtaacttcttaagacactatcagtgcgttgttccatgaaggcgagggcttggaaaga

SEQ ID NO: 1489 - DNA, 1120 bp, Homo sapiens
ttttaggagagagacggggtctcgctatgttgaccaacctgcttttgaaattcactgggataagaggcaaggtagagaggctccctcagagaaactataagtcatttgtctccctaccttccttccctctaggtgctgtgagaagccatctttccgacttcaaaaaacaccgagctgctagaattgaccactatgttgtggaagtcaataaactaataatcaggttagagaaggtaaattttgttgtcttaaaacatttttttctacaaatacacattttctggggaaaaataatcacatttctatagcctgtgttgtatatatcatatacatctgatggtggcagagaaacaccttctctagagaggtgcaaaggacatggtggacagttctagcctgggccagcattccttaagagaatggcccaggttgacaaacttgccacatggcttagcttcccttttcccacctatgaatccccactcagggtgctgggaaaacctttcttccttcagattcttccttttggggtggtcccaggcacaatcatccagtgaggtgtagtgtgtgatggcaaacaaagaagtggtcaccaggtctcacgggtgtattttcatcctagttgtgcttgttgtgtgtaacctggattgtgtgctgggcatagtagcaagcacaagtacagttctttatgtgtattttgtaaggcagaaatatgtggccagttttagggtccaggagcaccgtggagaatggagagttttctgttgctttcagtcgttgcccttacccatccttgcctaccccatggttattgctaaaatgggtaactgacaataaagagattagaagtgggtttataggaagcgaggtgggttctagatgcaaaactaataccctgtcccatgtgaaattgtttttgtgattttgtggcgttggggatgacagatgagacttgaggaatgcaaatgtgctaatttcccacttgatgtattggaaagtgtggagcatgtatacatcacctggttaatttcatttggcactattttcttccggtcagctcactgcatttgacagaacaaatactgagtctgcaaagattcgaggtaactttaaatttgcc

SEQ ID NO: 1490 - DNA, 491 bp, Homo sapiens
  misc_feature (1)...(491): n = a,t,c or g
tcataggctaatcataattgataggtcatattagatatagaaaaacaacacaaaatattgtcagttctgcagttatatgtatgtctgtggcatatagacataccctataataaaaagaaatagaacgtgttgagttcaaactaaagggtacctcaaaaatcatttaaatctgcctttggtatcattatttaagattttgtgtgcccgggtgtggaattgtcacgccctgtaatcctcagcactttgggaggccaaggcagcccagatcccattaagctcnnnnnnnnnnnnnnnnnnnnnnnnnnnnnnnnnnnnnnnnnnnnnnnnnnnnnnnnntttaaaaattnnnnnnnnnnnnnnnnnnnnnnnnnnnnnnnnnnnnnnnnnnnnnnnnnnnnnnnnnnnnnnnnnnnnnnnnnnnnnnnnnnnnnnnnnnnnnnnnnnnnnnnnnnnnnnnnnnnnnnnnnnnnnnnnnnnnnnnccctgtctca

SEQ ID NO: 1491 - DNA, 2044 bp, Homo sapiens
atggccgcggccggctggcggacggctccggccaggagaagtaccggctcgtggtggtcggcgggggcggcgtgggcaagtcggcgctcaccatccagttcatccagtcctattttgtaacggattatgatccaaccattgaagattcttacacaaagcagtgtgtgatagatgacagagcagcccggctagatattttggatacagcaggacaagaagagtttggagccatgagagaacagtatatgaggactggcgaaggcttcctgttggtcttttcagtcacagatagaggcagttttgaagaaatctataagtttcaaagacagattctcagagtaaaggatcgtgatgagttcccaatgattttaattggtaataaagcagatctggatcatcaaagacaggtaacacaggaagaaggacaacagttagcacggcagcttaaggtaacatacatggaggcatcagcaaagattaggatgaatgtagatcaagctttcccatgaacttgtccgggttatcaggaaatttcaagagcaggaatgtcctccttcaccagaaccaacacggaaagaaaaagacaagaaaggctgccattgtgtcattttctagaatcccttcagttttagctaccaacggccaggaaaagccctcatcttctctttctctcctcagtttacatcttgttggtacctttctagccttagacaaatgatcaccatgttagccttagaccaagaagctggctagtcctttctgtgaagctaatacaatggtcatttccagacaaatttaaaggaaacactaaggctgcttcaaagattatctgattcctttaaaatatatgtctatatacacagacatgctctttttttaagtgcttacattttaatagagatgaatcagttttggaatctaagctgtttgccaagctgaagctacaggttgtgaaataatttttaacttttggaatcatactgcctactgttactctaaatagaaatatagggttttttttaatgtgaatttttgcctatctttaaacatttcaatgtcagcctttgttaaccttaaatacactgaattgaatctacaaaagtgaaccatctcagacctttactgatactacaacttttgttttctgatggccaaaataccaaatgcctgttgtatttatggattaaaaactgcttataaaaccctgtgttactactcctactcttggagatgataatattctatgtggtcaaatatttggactcatttaggacttagatatttcagtgtacttgattttttaatttaactctttttcacagccacgctaagggtaaaaaggaataatttccttctgtcttccttttcaagtatttctgggtaagggattcaaaaaactaaaactgtttttgtttgtaatataaaatatggaattgatctttccagggtcagagatgattaatgtttttgctatatacttttatacattattttcttatcaaactagttaacaagtatttttatatgtttgtaagcagatatgctttcatagcataccttgtgtatatgtaaagataagtatttaattctcactgttcacttttaactgacaaagaaaaacaagtggaaactacagaaactgtggtagaacttttacttgctggtctggtcttggttgtacccatctttggccagtcacataactactcaagaaaccttcccaatagagtacaacaggatgagactctgaaatcactttcagtattccctgctagatattgattgttatttcaagtattaagtgtaagcttttaatggataattagtataactgtggatggcatctgattttgtttttaattctgtggattgtgtttaagcaattcaatagtatgttcctgattttgagatgctaagtggtattgcacagttgtcactttatcaagtgtgtacaacagtcccatgaagtttatagagcatacccttgtatagcttcaggtgctagaattaaaattgatctgttatcacaaaaaaaaaaaaaaaa

SEQ ID NO: 1492 - DNA, 1002 bp, Homo sapiens
ggaaaacacctgagaaaaagaaaatgtaaactaaggaagggttttcccacttaatccaacccagatttctattcaacttaaaggatttaattggcatttgtgagaaataatagtacctgtgtcactgagttgattgatttgggacatagacggttgactttcccagacagcagcttagcggaaagcagcatcccgaagacggtgtcgcatgtcctgagcctgcttgtcacctgggcctcacggtttctcgtcagccccgtcactgatgggaagcagcactgaagtgtgagggcagaaaggacaccgctgggagtcaggcgctcccctgcctgtgacccttttccaacaagctgatgctgagccagcggctgctttgtccctcatactcctcccaacagtccaaacccctaccagacagaagccacgtcgcttctgcacacgtgtctgagagcgtctgccatagacgtctgtgcgtttccgtgaagcactgcgccctaaggacccaactctgactagcagctgcctcccactcccaaacactaaccccgctcaggagactcgcactgggtgtagactgcgtctttgcagagggagatgatagaggcttctgatgacgccagagctgtaagtgtcgtgacgagctgggcgccccagccccttcttaagctgttctgtttctgtggctttaactgacatatttctgtagcatctgccttcatctcatctcagcgtaatgaaatattaatgaaatcgctgaaaagctttgccttcgagaggccagaagcctcgcggaatgtctgcaagtccaaagacgcgtgtgggttgtgccctgaagtgccgtccagcaggcgcgattgcgccgggcccggcctgtgcgtgtggcctttgccttcttccctttcttcctgttttctgtttttttaatttggggattgagaaagctgtacgattttgttaaagaaaaaaataaaccattttttaaagttgtagcccttaaaaaaa

SEQ ID NO: 1493 - DNA, 436 bp, Homo sapiens
ggaaacagtggattagtgcctggttcttacccaggaaatagaagaattctgtattataataacaccattgtaaacagtagaagctttttttccacataacattttcctcagataaggttttacaaaatttgggatgcacttccgaactccttcccttttggatgccctggcccttgccagccctccccttcccaggagcatggtgccccctcttcctagctgttcagggccccacccccattagaatcttcctttgcctgagaaccctactctctgctagatgacagcaaatgcagtgaattcatgttgtaattatggactttctggcaccttgaaatttgggtgactgggaaattttagggcattgctgttggattagtaggggaaacatacatttaatttttcttcctctgctcctgtctgcctgcaaatagaa

SEQ ID NO: 1494 - DNA, 579 bp, Homo sapiens
  misc_feature (1)...(579): n = a,t,c or g
gacaagattgaacttggacaccaaggatgaaaaatgccacacaggcctcctgagaagggcccagggtatgcctagtcagcaggattcagttcagggtaccagatttttacagatattttaataatgactcttaaattattgaaataaatatagacaaccccaaaccttggacactgtatataaaaagaaacctaagaagactctgaaaggtagaaagaagacagacaggccagggaccttgggaactgaagaatgacacactggtgagttcctggggttttcctcttggctcagatatcccagacttggagctaaagaaactggagacccagaaacaccatgaggcctgagcagacaaacggagccccaacaaaagtccactctttctagccagtgggaccaggggaaggggcagcctaggcaagacagaaaactcgagacagtagctactttcctccaaccaaaanacctctgcaggaactgtagccagaccccaaccaacaatccagccggaggcccaatnaagggcctagacagtgcaaggncccaacacccaanagggtggtntcaanggaactt

SEQ ID NO: 1495 - DNA, 438 bp, Homo sapiens
  misc_feature (1)...(438): n = a,t,c or g
ggtgctctccagttcagggcacaggcttaccaaaagactgagacctagccataggactatggaatgcttcccactccccaacaccttgccaatgcattactaaaggcctgtttaccacaattcctcttacccagtacacatcatgttcaccnnnnnnnnnnnnnnnnnnnnnnnnnnnnnnnnnnnnnnnnnnnnnnnnnnnnnnnnnnnnnnnnnnnnnnnnngcggagcctggtgggaggtgtttgagtcataaggaaggatccttcatgaatagatgaatgacctcccttgggactgagtgtgttctccttctaatagttcccaaaacagctggttattaaagacgctggcactttttaccactccttcactccaacttcctcttttaccatgcaatggcttacataccttacntcatttttcncttccattttt

SEQ ID NO: 1496 - DNA, 4466 bp, Homo sapiens
ttttgaaagcgacactttccttttattagattcacaatgcctttgtaacgcccaacctctcctttgtagaatttttctttgttagaaaacagacaaactctgtccttaggaaccgtcttctacttggtacagcactggcctcaggccgccctgcatctgccgtggaccagtaagaatgaagtccagcagcatagagaaaagcatcataaaggctgggaggtcatcccccagggcctcccctacttcacatacacagagacgtgtgcatatgtcacacacacacacatattatatatagatatcgtatttttttttttttttacaaaaataacagggtttgcacagctctattaattttttaaaattacacaggcaaggtttatgcttcagtataaccatttttactttggatttaagtgggaattttaggcctaaaaataagattaccaagcagaggccatctagccacacagacacaagacatcttgagctccatgaaactagaaatgtggtgatgtcatcctcacacgggggggctacacatccccatcgattattttaactaaaatacaaaagcaaaatagtgtgttaaaataatcctctactcaagtgcattagcacatataccaaattatactatctgcatgacagtctctaggtaccaagactgtatttttgcaagtgctattctctacttcattaaatacagtacccagccagcaaccacaaaaagagaacgcatgctgtacagcaatgagaatggggagggagacgattttcagggccataacttccatggcaaccaaaagaaaaataagtaagacaaatctcacatgacagatataaaactaatttgcagtgacatttgatatatagttttatcagaagtaatacatttaggttacagttacatgaaaaagagaaactatgtgaaattataggctttctcctagaatatccaaaatgctcatcaacagttaattagtacaagaaagatgaccaccaggtgattgaatagacagaatgtcatgtagtattttaaaaacacagattctgggactagaagctaccaccaaaatatccagaaatctgagttaacaggtcctttattttgcacacttgctgctgatatatagaaccacgaagtgtttgcacagaccacgaatgcagccgctagcctagaggctggtcacagaagagaatgcgatgaacaccgtcctgccagtgtgaggacggagtgtctgatgtgtttgtgtccccccaccacccccccatatacaaaggccatctctagggcagaaatctctcaacagctcaagcccatcctcgctgccccctccacgaaacgacacagctcaagcttggtgctgggaagtctttccgatgctggtttgattcctgatcacccaactggacagggccctctccaggacctcccaggttctccctggtaccttccctccctcaggaggaggcagcactgtctctgaagccaccaacgagtaatgctagaagaatcagaagaaggaagtatctgatgaaaaggcacctgcaagtctaaagtcctctttggtgagaacactgtacatccgctgaggcagagctttggagtagggagcagggcgcggcacagtggtgcgcaaaatgaattcccggccagcagggggtgggaagtctgacacggagttctgccttctttcctctggggagcccattctcttcaattcctcctctggtggagtcatagctgcagccctctggggcattcacaaacagcttgtgaatgatcctgccagcatgtcctcttcctgcaccggtgactaacacttcaggctgctccagcaggcaactcacaaacctttcaagatcttccttttcctcctcctgttcacatttctcagttccaaacttggcttttagtgaccgagctctggcaatgagagcttccacattagtaatctggtgaatgatttcttccaatttcttgtcttctggattggggaagtgcaaaactttactggaatgggatattatctgctttatgatcttcttaactgaagaaatgttttcgagactttcttcttcctttaccttgagtacagctgcatgaatcacacaaggtaacaggtgccgagcaaggtctgcaggtttctggattgccagatagtgcagcaccttttctgcttcccgtgtatcatcaaagagtctcctttgccttctagcaggaattggcttagctgtttcccaggcttctacccacatattgcttggaatcttcatccgggcactcagttctcctttcagcaccacattgcccttttcatcaatcacctcctcttcaatataatcccggggtgaataccacctcacaaaatcttccagggagcaacctggattagctgccttaaaagactccatatctgagagcagacaggcactctgcatgcgtgctcgaaggtgagccccctctgccgatgtacctaatttagctaaaacttcagactgctcttctagcagatcttctgtcataggtgctggttcctgggttactggaatgtagagaggttctccattatgcagcagtgtaagtttcccatgctgatagagccgtccttccggccttaaatttgccatctccttaggtcctcctttcttgccactctcttgtccatttcctttaagttcttcagtatcacttaggcattcaaaaaattcttcttcgctgtcactccaggaatcccaagattttcctacctctcccttttccttatctgtttcttttagattatctggcaccaactggtctcctgcttttccagcatcccctggatatatattagtgacatctgaagcacttgtctttttcccctcatcacgtgccttctttctttcaatacaacaatttaacatctgtagtttctgatgcagtaaacaacacctcagatctgggggtccacttgctaatcctggaatcagaaagttgttttcccatcggaaacgcatttcaagaacaaattcctgccagaggtgtgccactcctttcaaccctccatggtaaaaattgatcatacagagacacaaagccagtttgtatgttaaactgtcagatggtgcagacttgaactgattgtagagattatagtcttcactctctgatggaggattattattatctgttgaagtagttccatctaatggtttctcagaaacagcatcagggaataagaacaggagaatagtattaagaacatcattatttagcggtgactcctctacacctctgtgttttcggattttcttctttgcagtgtgtaccatatttgaaactgataatttatgaattggaactgatgccggctctgtcaattttgacaaagcatgagttatatcagcagtttctttgccttcttcctcaaatgcagatcgtccaagaatctcatcagttgactcctttcgacggcaaattttaaaaaattcagtgacaaaatcacctagcaaacactgaggattctcagcttttcgaactctaacagaccaatgtggagcttgaataggatccaaatcagaataaacatcattatccacaatgatcccttcggtcagatgaggccatgtagtagctaaatggagttcactaataggatcttcgcaggcaccaaatggtaacttgccaaactccaagcctccaacttctcctcctacaagggcatctatgtctggaggttgctgaggccaaaaatactgctgccaatcttgaagtacataggtaaatcgaatagcaatactaactggaggcaatggagttaaaggacatccaatctttgatttgaagatatccagcagacctgataagtgagtgtactgatttggcacttttctaagatgaaccatttcgaaatcagttcgtacaccaggaccttgacattctcctacatacattcttcgccatttgtggtgaatttgcacaaagagtggcacctgacagccagtgtttcccaaggcaatagaaacagaactcagaagaaggttgcacttagattcgctgagaacagcgtcactgtgtgcagcaggggcaatcaccacgaactcacgtagcccataccatcttaccaggcaatgtgctcttggaggaaagtcattattcatacccagcaaatcttgcatagattgtggaacaacatcctctaataactcatcctttccttctttatcagtggactcttgtacaagataatgatgagtgactgagaacttgaagtcagcaaaggaaatttcatctgatttctcttcccatgtgccagaagtaaatatacccttttcgagtggctttcccaaagagtttccaatcagtttccagtcattcaagacttcttcaactttggaaataaacctttcccattccgaggcagtggtgaagtccgtgatctcaaatacctcggattcgggctcactgtcggcagccatct

SEQ ID NO: 1497 - DNA, 659 bp, Homo sapiens
aggggtgtggcctagaccactaagggccgtgacgtggtgccgctgagcttggaccccgaccagaagatagagattgaaacgatgaggaaaacgaagtgcctaatccccgctggacgctaactgcaggcacccagaaatactctccacaccatgctgcactgctgcggatgagggaaggatggtgtcggggcttcaagactgtttttcctacctcttcagtgcctctttcagtgatatgaagttaaaaccaggaacatggaggagacatatttccacctatttctctccataagtataaaagaccataaaagaccatctagggacttcagaacccaaataatgacacaatgttaatttgcaggttctccctctgcctgccaccccacccagcaaggaggagaggaagtgttgagaagggaagagatgagtcctggccctgtcacttcttaggggtgtgcttttgaacaacctgctcaccatgtatgaacttcactcttcttgtttataaaatgaggacaatgacacctgcaagactgtgaggtttaaaaacaaaatctgtgttgagaggtaacttgcctcttttacttaccaatgatttcctcaatgcctggtgactggggctggttcatactagacgatcaataaatgctccttgaatg

SEQ ID NO: 1498 - DNA, 584 bp, Homo sapiens
caggcgcactcttgataaatggttaattcagaataaaggtgactatggatataattgagccctctggtccaggtctcagtttacctaatattacctcagaaaggatatggagggaagatgatctttttgccaggtctgacttttcttcctgctccgccctccattaacgctcagtaccctttagcagctgacggccccacgttctactccatgcttggcttcctttccaactagctctgaggtgctgtctcaccggtgagacctggaagcgggcgagtctcgtgctgtgtcggacctgcagcccctgcgcttccgccaccatggagtacctcatcggtatccaaggccccgactatgttcttgtcgcctccgaccgggtggccgccagcaatattgtccagatgaaggacgatcatgacaagatgtttaagatgagtgaaaagatattactcctgtgtgttggagaggctggagacactgtacagtttgcagaatatattcagaaaaacgtgcaactttataagatgcgaaatggatatgaattgtctcccacggcagcagctaacttcacacgccgaaacctg

SEQ ID NO: 1499 - DNA, 2242 bp, Homo sapiens
gaattccggcctggcaaaaagaaacctgactgagcggcggtgatcaggttcccctctgctgattctgggccccgaaccccggtaaaggcctccgtgttccgtttcctgccgccctcctccgtagccttgcctagtgtaggagccccgaggcctccgtcctcttcccagaggtgtcgggggcttggccccagccctccatcttcgtctctcaggatggcgagtagcagcggctccaaggctgaattcattgtcggagggaaatataaactggtacggaagatcgggtctggctccttcggggacatctatttggcgatcaacatcaccaacggcgaggaagtggcagtgaagctagaatctcagaaggccaggcatccccagttgctggtacgagagcaagctctataagattcttcaaggtggggttggcatcccccacatacggtggtatggtcaggaaaaagactacaatgtactagtcatggatcttctgggacctagcctcgaagacctcttcaatttctgttcaagaaggttcacaatgaaaactgtacttatgttagctgaccagatgatcagtagaattgaatatgtgcatacaaagaattttatacacagagacattaaaccagataacttcctaatgggtattgggcgtcactgtaataagttattccttattgattttggtttggccaaaaagtacagagacaacaggacaaggcaacacataccatacagagaagataaaaacctcactggcactgcccgatatgctagcatcaatgcacatcttggtattgagcagagtcgccgagatgacatggaatcattaggatatgttttgatgtattttaatagaaccagcctgccatggcaagggctaaaggctgcaacaaagaaacaaaaatatgaaaagattagtgaaaagaagatgtccacgcctgttgaagttttatgtaaggggtttcctgcagaatttgcgatgtacttaaactattgtcgtggggctacgctttgaggaagccccagattacatgtatctgaggcagctattccgcattcttttcaggaccctgaaccatcaatatgactacacatttgattggacaatgttaaagcagaaagcaggcacagcagggcagcctcttccagtgggcagggtcagcagggcccaaacccccacaggcaagcaaactgacaaaaccaagagtaacatgaaaggtttctaagcatgaattgaggaacagaagaagcagagcagatgatcggagcagcatttgtttctccccaaatctagaaattttagttcatatgtacactagccagtgggttgtggacaaccatttacttggtgtaaagaacttaatttcagtataaactgactctgggcagcattggtgatgctgtatcctgagttgtagcctctgtaattgtgaatattaactgagatagtgaaacatggtgtccggttttctattgcattttttcaagtggaaaagttaactaaatggttgacacacaaaaattggtggagaaattgtgcatatgccaattttttgttaaaaccttttgttttgaactatactgctttgagatctcatttcagaagaacggcatgaacagtcttcagccacagttgtgatggttgttaaatgctcacaattgtgcattcttagggtttttccatccctggggtttgcaagttgttcacttaaaacattcttaaaatggttggcttcttgtctgcaagccagctgatatggtagcaaccaaagattccagtgtttgagcatatgaaagactctgcctgcttaattgtgctagaaataacagcatctaaagtgaagacttaagaaaaacttagtgactactagattatccttaggactctgcattaactctataatgttcttggtattaaaaaaaaagcatatttgtcacagaaatttagttaacatcttacaactgaacatgtatgtatgttgcttagataaatgtaatcactgtaaacatctatatgatctgggattttgtttttattttgaaatgggagcttttttgtttacaagttcattaaaaactaaaaactgtttctgtaaggaaatgagattttttttaaacaacaaaaaatgccttgctgactcactattaaataaaaatctccccaattttttgatagactacttccaagccatttggttacatgggtattcctttgccaaggccaattttagggttt

SEQ ID NO: 1500 - DNA, 944 bp, Homo sapiens
attattcttctttccccagtctcccctcaggacctgcagccatttgctggggtggctagtggaaagggggatcatcagactcagggggattactggactctaactctaacctgacacccactcctggggacacaaacacccatcggatctaatagtcagaggaggggcgtatggaggtcagtgggctcacggagttctagctcaggtccaaccctcggtgggtgcagaggtcacttccctagcctcagatgggtgagtaaacagacgtatgtggcagccagcagagcccccacatttgttccctgacctgagggtgggggctactatgctgggaaaggccaggtggaagccattggggtgaactctgcctaggaaaattgtcagtcaaaagcaacctgcagccctggagggactgcaaaggtcagtgccgccatcgaggacttggaagatgcagggtggtgacccccactgcagcctcgtttccactcgtctaattggcttgtgtggaagacaggggggtcccggagaaagaaggacagtgaatcctggtaaacttaaccaggactccaattgcaactgctgttccagatatgactactgatcactggggcaaatcaaagcatccccggacacctggtctacagccattgatctggtgaaagctttaatttttaatatagattttattttttagagcagtttcatgtttacagagaaattgagcatatttgagagtcctcatatagcatctctccctacacacagtttcccttattattcatatcttgaattactgtgatacatctttgcaattgatgaaccaatattgacctagtcattgatcaggttacatgagggttcactcttcttgttgtacatgctgtgagttcgggcaaatgtgtaatggcatatctccactattacagtgtcacacagaattattt

SEQ ID NO: 1501 - DNA, 585 bp, Homo sapiens
ccgggcacgtggtgagtccgggctcccgtggccgcgtgctgggaggagactggagcccggttaggaagaatggagttggcgactcgctaccagatccctaaagaagtggctgacatctttaacgcccccagtgatgatgaagagtttgttggcttccgagatgatgttcccatggaaaccctctcgtcagaggagagctgcgatagttttgactcactagagtcagggaaacagcaggatgtgcgctttcattccaaatacttcacagaagagctaagaagaatttttatagaggacactgactcagagactgaggattttgcaggatttacgcagagtgatctgaatggaaagactaacccagaagtaatggtcgtggagtcagatttgagtgatgatggcaaagcatctttggtgagcgaggaagaggaagatgaagaagaagataaggctacccctagaagaagcaggtctagaagaagtagtattggtcttcgagtagcctttcagttccccaccaagaagctggccaacaaaccagataaaaacagttcttccgagcagttgttttctagcgcacgctta

SEQ ID NO: 1502 - DNA, 505 bp, Homo sapiens
  misc_feature (1)...(505): n = a,t,c or g
gtgtggccacttttgtaaaccattaataatggtctagatgaggccagctatttttgtatgcatttctgcaaacaaaaaataaatttccctccttcattacatttgatctttacccatgaactaagttatctaatgctcatcaatataaaataagaaatgcttggcaaaataaggacacattgggttctaaaacacaaataaatgcagtattatttatcaataatttaaacttctatatttaaattcttgctttattacaattatcagttaatttcttgtggcaaccttgtagaagagattgatacctttcacattattgctgatgatgtaaaaactaaaccataaatgttatgagaaatatttagtgaggccatgaagatctgaaattagaattccagttatgtcagctgaatgaattccttctcactcatgttttttaaaaatgggcagattgttcaagttagaatataccggtantacncnggttnngcaacccaaaaccttg

SEQ ID NO: 1503 - DNA, 794 bp, Homo sapiens
  misc_feature (1)...(794): n = a,t,c or g
aaaaactatttaagtaggcacccaccccattcccacccatgaccaaaaatgcaaaataagtacatcccttaggtgtataccttcccttttgcttagggcaacagttaagataaactaatacacgtatatgattttaagagttaaaaactcatcacccataatcaataaggatgctaaggaatggcaataccttgaagctttttttaaaattaaaaaccaaagctttagatggtaaactacacttacagaaacacaaaccaaaatctttatgcccttgctttgtacgtgaaagttctattttaaatacttgtttgaaaaactcattatacagttcattcagtactatggtgataacaggagtaaagatgttcacttccattagacaatgaactaatctacttagagaggactattatagcgactctcttctcatatacgtttacatatactctactcatggtatgtgctctaaggaggttttattggaggtttgtacctctggaacttaaaacctctacattttcctttccactaacctctattcaaaatggtcatatactttgctagttgctctgggagaagtcatggacatttaaacagcttatcatgcagttcaagattatatggcaaaataatgaggaaagtgccttaagaggtaggaagtaggctctcatcccaaccctcggtatgccctgttatgaacagttaaaaaactagaatcaaagtggtaaatgtgaggctgatagtaataccaggcttaanaaaattaagttgacttagttactagaaatctt

SEQ ID NO: 1504 - DNA, 455 bp, Homo sapiens
  misc_feature (1)...(455): n = a,t,c or g
ggattgaaagtggaagaccctgccacaatttactaccagaagtgaattaatgaaaaagcatcaaagctaagccagaagatttatcacattttcatcatcagctacaggattagaaaggaggctgggatgaatgtgacatagaccacagcagctctcttaagactcctggtattaccaacataaagaggcaggtggaatgagaaggactctgtctagattggcttttttaacattctcattttcccaggagttatcactgtaaaagtatgcatggatatttatgtattaataaatcatgcactctaagatgagttcatcaacattgtaaaagccctcttttctgttttcaggtttttttttttcttatcgacaaggtctcactctgtcgcccaggcanaagcncaaaggtgcagtattggctcattgcagcctcnaactgcctgggctcatatttt

SEQ ID NO: 1505 - DNA, 2711 bp, Homo sapiens
gccattctcatccctgtgctcagagctctcaagcacccacgatggccttctcaggccgagcgcgcccctgcattatcccagagaacgaagaaatcccccgagcagcccttaacactgtccacgaggccaatgggaccgaggacgagagggctgtttccaaactgcagcgcaggcacagtgacgtgaaagtctacaaggagttctgtgacttttatgcgaaattcaacatggccaacgccctggccagcgccacttgcgagcgctgcaagggcggctttgcgcccgctgagaagatcgtgaacagtaatggggagctgtaccatgagcagtgtttcgtgtgcgctcagtgcttccagcagttcccagaaggactcttctatgagtttgaaggaagaaagtactgtgaacatgactttcagatgctctttgccccttgctgttcatcagtgtggtgaattcatcattggccgagttattcaaagccatggattaacagctgggcattccggagtgcttccgctgtgacctctgccaggaagttctggcagatatcgggtttgtcaagaatgctgggagacacctgtgtcgcccctgtcataatcgtgagaaagccagaggccttgggaaatacatctgccagaaatgccatgctatcatcgatgagcagcctctgatattcaagaacgacccctaccatccagaccatttcaactgcgccaactgcgggaaggagctgactgccgatgcacgggagctgaaaggggagctatactgcctcccatgccatgataaaatgggggtccccatctgtggtgcttgccgacggcccatcgaagggcgcgtggtgaacgctatgggcaagcagtggcatgtggagcattttgtttgtgccaagtgtgagaaaccctttcttggacatcgccattatgagaggaaaggcctggccgtattgtgaaactcactataaccagctatttggtgatgtttgcttccactgcaatcgtgttatagaaggtgatgtggtctctgctcttaataaggcctggtgcgtgaactgctttgcctgttctacctgcaacactaaattaacactcaagaataagtttgtggagtttgacatgaagccagtctgtaagaagtgctatgagatttccattggagctgaagaaaagacttaagaaactagctgagaccttaggaaggaaataagttcctttattttttcttttctatgcaagataagagattaccaacattacttgtcttgatctacccatatttaaagctatatctcaaagcagttgagagaagaggacctatatgaatggttttatgtcatttttttaattaaaaaagaaaaattcatataatcgtgtttaaaacacaaatgaagtcagtatttgcctttgttaacccttatccatttgttgacatgtagactgtttacaaaaaaaaaacacatggttaaatgttaaattttaattaaggcccccaaaaattaaatataactttttaaaatgaaaggagtcaccttttacatgactcaggtgaaaaaacagtataaacattaatttactttgtgttcaaaagaaaattccaactgctgttggggaaggacacagaaaagaaaaataaccacccaagaaaaacaaaaacaagaaaaacaaatcttatacaatcttagtatatttatcaaactagtagctagaaagtgaatatgcacattactaagacaaaaaacaagtgtaattcagaactacttgattttttttagttaaatgcaataattattatgcttagttttataacctgctctccttgtgaattcttccttcaaatgattacttaacgcagtagtaatagctagctgtaggatgtcctttaaatttttgtgcaaaaaaaaatttataccaggtatttggaaatatactttacaatattgggaaaatgaagtatttttaatgtattacagcaattatggttcttaagcttaatgttaagcatgtagtcttagaataggacatgaaattaaattgtatgtagcttggaatatattgcttcagaaaactgaatgtgtatgtcggtcatattgcctttataaccatgctaatatctatgctttatacatactcaaacttgccttgccttaaaaaaatacatactacatacttaaatcaggaattctagccatctcacagaataccaactaaaactaagtgcattgagatctgagattggtaaacccagattcatttaccacagctgtaattaagtttttagaaactattctctttttggggaaatccattgaagttaatttctgttatcttattagaagaaaatgatgttgatatgtgtttcagattttccatttgaaatcttataattaatttgatttatttactgtaagtaggaggtataaatgacactcttaaattggaaggaggggtgttttagtgtctgttttaggtcaaaattagtgattctatttttatcaaaagttttatcctgaagtttcaggaccactcttccttaataaacttgttaatggaaagcgagctttatgaacatttaaaaatgttgctgctgctttgttgcttaaaaagaaagttgccaagagagacttcttagggaaaatatttgggtttttttttccaaaaattgctgaaatattgttttgccatttttaaaaagtctcaggttattaccac

SEQ ID NO: 1506 - DNA, 651 bp, Homo sapiens
attagggctctggtggcggcggcggctgacccttggggtctggacgcaacggcggcgggagcatgaacgcccctccagccttcgagtcgttcttgctcttcgagggcgagaagaagatcaccattaacaaggacaccaaggtacccaatgcctgtttattcaccatcaacaaagaagaccacacactgggaaacatcattaaatcacaactcctaaaagacccgcaagtgctatttgctggctacaaagtcccccaccccttggagcacaagatcatcatccgagtgcagaccacgccggactacagcccccaggaagcctttaccaacgccattcaccgacctcatcagtgagctgtccctgctggaggagcgctttcgggtggccataaaagacaagcaggaaggaattgagtaggggccagagggggctctgctcggcctgtgagccccgttcctacctgtgcctgaccctccgctccaggtaccacaccgaggagagcggccggtcccagccatggcccgccttgtggccacccctcaccctgacaccgacgtgttggccacccctcaccctgacaccgacgtgtcctgtacatagattaggttttatattcctaataaagtatagcgggagagacctggaaaaaaa

SEQ ID NO: 1507 - DNA, 9256 bp, Homo sapiens
ctcggcccaacaaaatggcggcggcagcggtgtcgctttgtttccgcggctctgcggcggtggcagtggtagcggcctttgagctgtggggaggttccagcagcagctacagtgacgactaagactccagtgcatttctatcgtaaccgggcgcgggggaggcagatcggcgcccagcaatcacagaagccgacaaggcgttcaagcgaaacatgaccgctgagcccatgagtgaaagcaagttgaatacattggtgcagaagcttcatgacttccttgcacactcatcagaagaatctgaagaaacaagttctcctccacgacttgcaatgaatcaaaacacagataaaatcagtggttctggaagtaactctgatatgatggaaaacagaaggaagagggaactagctcttcagaaaaatccaagtcttcaggatcgtcacgatcaaagaggaaaccttcaattgtaacaaagtatgtagaatcagatgatgaaaaacctttggatgatgaaactgtaaatgaagatgcgtctaatgaaaattcagaaaatgatattactatgcagagcttgccaaaaggtacagtgattgtacagccagagccagtgctgaatgaagacaaagatgattttaaagggcctgaatttagaagcagaagtaaaatgaaaactgaaaatctcaaaaaacgcggagtgctgtggtgatatccttatatttgattccttgtgcacatgtgggagaaaatctccaaagaattacctagttttgcttaattcttgagcgatgtatgcaccaaagcacatagaagatacttaaagatgggcttcatgggattgtgagctgcactgcttgtggacaacaggtcaatcattttcaaaaagattccatttatagacacccttcattgcaagttcttatttgtaagaattgctttaagtattacatgagtgatgatattagccgtgactcagatggaatggatgaacaatgtaggtggtgtgcggaaggtggaaacttgatttgttgtgacttttgccataatgctttctgcaagaaatgcattctacgcaaccttggtcgaaaggagttgtccacaataatggatgaaaacaaccaatggtattgctacatttgtcacccagagcctttgttggacttggtcactgcatgtaacagcgtatttgagaatttagaacagttgttgcagcaaaataagaagaagataaaagttgacagtgaaaagagtaataaagtatatgaacatacatccagattttctccaaagaagactagttcaaattgtaatggagaagaaaagaaattagatgattcctgttctggctctgtaacctactcttattccgcactaattgtgcccaaagagatgattaagaaggcaaaaaaactgattgagaccacagccaacatgaactccagttatgttaaatttttaaagcaggcaacagataattcagaaatcagttctgctacaaaattacgtcagcttaaggcttttaagtctgtgttggctgatattaagaaggctcatcttgcattggaagaagacttaaattccgagtttcgagcgatggatgctgtaaacaaagagaaaaataccaaagagcataaagtcatagatgctaagtttgaaacaaaagcacgaaaaggagaaaaaccttgtgctttggaaaagaaggatatttcaaagtcagaagctaaactttcaagaaaacaggtagatagtgagcacatgcatcagaatgttccaacagaggaacaaagaacaaataaaagtaccggtggtgaacataagaaatctgatagaaaagaagaacctcaatatgaacctgccaacacttctgaagatttagacatggatattgtgtctgttccttcctcagttccagaagacatttttgagaatcttgagactgctatggaagttcagagttcagttgatcatcaaggggatggcagcagtggaactgaacaagaagtggagagttcatctgtaaaattaaatatttcttcaaaagacaacagaggaggtattaaatcaaaaactacagctaaagtaacaaaagaattatatgttaaactcactcctgtttccctttctaattccccaattaaaggtgctgattgtcaggaagttccacaagataaagatggctataaaagttgtggtctgaaccccaagttagagaaatgtggacttggacaggaaaacagtgataatgagcatttggttgaaaatgaagtttcattacttttagaggaatctgatcttcgaagatccccacgtgtaaagactacacccttgaggcgaccgacagaaactaaccctgtaacatctaattcagatgaagaatgtaatgaaacagttaaggagaaacaaaaactatcagttccagtgagaaaaaaggataagcgtaattcttctgacagtgctatagataatcctaagcctaataaattgccaaaatctaagcaatcagagactgtggatcaaaattcagattctgatgaaatgctagcaatcctcaaagaggtgagcaggatgagtcacagttcttcttcagatactgatattaatgaaattcatacaaaccataagactttgtatgatttaaagactcaggcggggaaagatgataaaggaaaaaggaaacgaaaaagttctacatctggctcagattttgatactaaaaagggcaaatcagctaagagctctataatttctaaaaagaaacgacaaacccagtctgagtcttctaattatgactcagaattagaaaaagagataaagagcatgagtaaaattggtgctgccagaaccaccaaaaaaagaattccaaatacaaaagattttgactcttctgaagatgagaaacacagcaaaaaaggaatggataatcaagggcacaaaaatttgaagacctcacaagaaggatcatctgatgatgctgaaagaaaacaagagagagagactttctcttcagcagaaggcacagttgataaagacacgaccatcatggaattaagagatcgacttcctaagaagcagcaagcaagtgcttccactgatggtgtcgataagctttctgggaaagagcagagttttacttctttggaagttagaaaagttgctgaaactaaagaaaagagcaagcatctcaaaaccaaaacatgtaaaaaagtacaggatggcttatctgatattgcagagaaattcctaaagaaagaccagagcgatgaaacttctgaagatgataaaaagcagagcaaaaagggaactgaagaaaaaaagaaaccttcagactttaagaaaaaagtaattaaaatggaacaacagtatgaatcttcatctgatggcactgaaaagttacctgagcgagaagaaatttgtcattttcctaagggcataaaacaaattaagaatggaacaactgatggagaaaagaaaagtaaaaaaataagagataaaacttctaaaaagaaggatgaattatctgattatgctgagaagtcaacagggaaaggagatagttgtgactcttcagaggataaaaagagtaagaatggagcatatggtagagagaagaaaaggtgcaagttgcttggaaagagttcaaggaagagacaagattgttcatcatctgatactgagaaatattccatgaaagaagatggttgtaactcttctgataagagactgaaaagaatagaattgagggaaagaagaaatttaagttcaaagagaaatactaaggaaatacaaagtggctcatcatcatctgatgctgaggaaagttctgaagataataaaaagaagaagcaaagaacttcatctaaaaagaaggcagtcattgtcaaggagaaaaagagaaactccctaagaacaagcactaaaaggaagcaagctgacattacatcctcatcttcttctgatatagaagatgatgatcagaattctataggtgagggaagcagcgatgaacagaaaattaagcctgtgactgaaaatttagtgctgtcttcacatactggattttgccaatcttcaggagatgaagccttatctaaatcagtgcctgtcacagtggatgatgatgatgacgacaatgatcctgagaatagaattgccaagaagatgcttttagaagaaattaaagccaatctttcctctgatgaggatggatcttcagatgatgagccagaagaagggaaaaaaagaactggaaaacaaaatgaagaaaacccaggagatgaggaagcaaaaaatcaagtcaattctgaatcagattcagattctgaagaatctaagaagccaagatacagacataggcttttgcggcacaaattgactgtgagtgacggagaatctggagaagaaaaaaagacaaagcctaaagagcataaagaagtcaaaggcagaaacagaagaaaggtgagcagtgaagattcagaagattctgattttcaggaatcaggagttagtgaagaagttagtgaatccgaagatgaacagcggcccagaacaaggtctgcaaagaaagcagagttggaagaaaatcagcggagctataaacagaaaaagaaaaggcgacgtattaaggttcaagaagattcatccagtgaaaacaagagtaattctgaggaagaagaggaggaaaaagaagaggaggaggaagaggaggaggaggaggaagaggaggaggaagatgaaaatgatgattccaagtctcctggaaaaggcagaaagaaaattcggaagattcttaaagatgataaactgagaacagaaacacaaaatgctcttaaggaagaggaagagagacgaaaacgtattgctgagagggagcgtgagcgagaaaaattgagagaggtgatagaaattgaagatgcttcacccaccaagtgtccaataacaaccaagttggttttagatgaagatgaagaaaccaaagaacctttagtgcaggttcatagaaatatggttatcaaattgaaaccccatcaagtagatggtgttcagtttatgtgggattgctgctgtgagtctgtgaaaaaaacaaagaaatctccaggttcaggatgcattcttgcccactgtatgggccttggtaagactttacaggtggtaagttttcttcatacagttcttttgtgtgacaaactggatttcagcacggcgttagtggtttgtcctcttaatactgctttgaattggatgaatgaatttgagaagtggcaagagggattaaaagatgatgagaagcttgaggtttctgaattagcaactgtgaaaccgtcctcaggagagaagctacatgctgcagaggtggcaagaagatggtggtgttatgatcataggctatgagatgtatagaaatcttgctcaaggaaggaatgtgaagagtcggaaacttaaagaaatatttaacaaagctttggttgatccaggccctgattttgttgtttgtgatgaaggccatattctaaaaaatgaagcatctgctgtttctaaagctatgaattctatacgatcaaggaggaggattattttaacaggaacaccacttcaaaataacctaattgagtatcattgtatggttaattttatcaaggaaaatttacttggatccattaaggagttcaggaatagatttataaatccaattcaaaatggtcagtgtgcagattctaccatggtagatgtcagagtgatgaaaaaacgtgctcacattctctatgagatgttagctggatgtgttcagaggaaagattatacagcattaacaaaattcttgcctccaaaacacgaatatgtgttagctgtgagaatgacttctattcagtgcaagctctatcagtactacttagatcacttaacaggtgtgggcaataatagtgaaggtggaagaggaaaggcaggtgcaaagcttttccaagattttcagatgttaagtagaatatggactcatccttggtgtttgcagctagactacattagcaaagaaaataagggttattttgatgaagacagtatggatgaatttatagcctcagattctgatgaaacctccatgagtttaagctccgatgattatacaaaaaagaagaaaaaagggaaaaaggggaaaaaagatagtagctcaagtggaagtggcagtgacaatgatgttgaagtgattaaggtctggaattcaagatctcggggaggtggtgaaggaaatgtggatgaaacaggaaacaatccttctgtttctttaaaactggaagaaagtaaagctacttcttcttctaatccaagcagcccagctccagactggtacaaagattttgttacagatgctgatgctgaggttttagagcattctgggaaaatggtacttctctttgaaattcttcgaatggcagaggaaattggggataaagtccttgttttcagccagtccctcatatctctggacttgattgaagattttcttgaattagctagtagggagaagacagaagataaagataaaccccttatttataaaggtgaggggaagtggcttcgaaacattgactattaccgtttagatggttccactactgcacagtcaaggaagaagtgggctgaagaatttaatgatgaaactaatgtgagaggacgattatttatcatttctactaaagcaggatctctaggaattaatctggtagctgctaatcgagtaattatattcgacgcttcttggaatccatcttatgacatccagagtatattcagagtttatcgctttggacaaactaagcctgtttatgtatataggttcttagctcagggaaccatggaagataagatttatgatcggcaagtaactaagcagtcactgtcttttcgagttgttgatcagcagcaggtggagcgtcattttactatgaatgagcttactgaactttatacttttgagccagacttattagatgaccctaattcagaaaagaagaagaagagggatactcccatgctgccaaaggataccatacttgcagagctccttcagatacataaagaacacattgtaggataccatgaacatgattctcttttggaccacaaagaagaagaagagttgactgaagaagaaagaaaagcagcttgggctgagtatgaagcagagaagaaggtactgaccatgcgtttcaacataccaactgggaccaatttaccccctgtcagtttcaactctcaaactccttatattcctttcaatttgggagccctgtcagcaatgagtaatcaacagctggaggacctcattaatcaaggaagagaaaaagttgtagaagcaacaaacagtgtgacagcagtgaggattcaacctcttgaggatataatttcagctgtatggaaggagaacatgaatctctcagaggcccaagtacaggcgttagcattaagtagacaagccagccaggagcttgatgttaaacgaagagaagcaatctacaatgatgtattgacaaaacaacagatgttaatcagctgtgttcagcgaatacttatgaacagaaggctccagcagcagtacaatcagcagcaacagcaacaaatgacttatcaacaagcaacactgggtcacctcatgatgccaaagcccccaaatttgatcatgaatccttctaactaccagcagattgatatgagaggaatgtatcagccagtggctggtggtatgcagccaccaccattacagcggtgcaccacccccaatgagaagcaaaaatccaggaccttcccaagggaaatcaatgtgattttgcactaaaagcttaatggattgttaaaatcatagaaagatcttttatttttttaggaatcaatgacttaacagaactcaactgtataaatagtttggtccccttaaatgccaatcttccatattagttttacttttttttttttttaaatagggcataccatttcttcctgacatttgtcagtgatgttgcctagaatcttttacacacgctgagtacagaagatatttcaaattgttttcagtgaaaacaagtccttccataatagtaacaactccacagatttcctctctaaatttttatgcctgcttttagcaaccataaaattgtcataaaattaataaatttaggaaagaataaagatttatatattcattctttacatataaaaacacacagctgagttcttagagttgattcctcaagttatgaaatacttttgtacttaatccatttcttgattaaagtgattgaaatggttttaatgttcttttgactgaagtctgaaactgggctcctgctttattgtctctgtgactgaaagttagaaactgagggttatctttgacacagaattgtgtgcaatattcttaaatactactgctctaaaagttggagaagtcttgcagttatcttagcattgtataaacagccttaagtatagcctaagaagagaattcctttttcttctttagtccttctgccattttttattttcagttatatgtgctgaaataattactggtaaaatttcagggttgtggattatcttccacacatgaattttctctctcctggcacgaatataaagcacatctcttaactgcatggtgccagtgctaatgcttcatcctgttgctggcagtgggatgtggacttagaaaatcaagttctagcattttagtaggttaacactgaagttgtggttgttaggttcacaccctgttttataaacaacatcaaaatggccagaaccattgctgactttaggttcacatgaggaatgtacttttaacaattcccagtactatcagtattgtgaaataattcctctgaaagataagaatcactggcttctatgcgcttcttttctctcatcatcatgttcttttaccccagtttccttacatttttttaaattgtttcagagtttgttttttttttagtttagattgtgaggcaattattaaatcaaaattaattcatccaatacccctttactagaagttttactagaaaatgtattacattttattttttcttaatccagttctgcaaaaatgacctataaatttattcatgtacaattttggttacttgaattgttaaagaaaacattgtttttgactatgggagtcaactcaacatggcagaaccatttttgagatgatgatacaacaggtagtgaaacagcttaagaattccaaaaaaaaaaaaaa

SEQ ID NO: 1508 - DNA, 652 bp, Homo sapiens
ccttgagtctccgggccgccttgccatggctgcccgtgggtgtcatcgctccagttggcgagagtttgcgctacgctgagtacttgcagccctcggccaaacggccagacgccgacgtcgaccagcagagactggtaagaagtttgatagctgtaggactgggtgttgcagctcttgcatttgcaggtcgctacgcatttcggatctggaaacctctagaacaagttatcacagaaactgcaaagaagatttcaactcctagcttttcatcctactataaaggaggatttgaacagaaaatgagtaggcgagaagctggtcttattttaggtgtaagcccatctgctggcaaggctaagattagaacagctcataggagagtcatgattttgaatcacccagataaaggtggatctccttacgtagcagccaaaataaatgaagcaaaagacttgctagaaacaaccaccaaacattgatgcttaaggaccacactgaaggaaaaaaaaagaggggacttcgaaaaaaaaaaaagccctgcaaaatattctaaaacatggtcttcttaattttctatatggattgaccacagtcttatcttccaccattaagctgtataacaataaaatgttaatagtcttgctttttaaaa

SEQ ID NO: 1509 - DNA, 4074 bp, Homo sapiens
ctttccccttactccgctcccctcttttccctccctctcctccccttccctctgttctctcctcctcttcccctcccctcccccgtccggggcactctatattcaagccaccgtttcctgcttcacaaaatggccaccgcacgcgacacctacggtcacgtggcctgccgccctctcagtttcgggaatctgcctagctcccactaaggggaggctacccgcggaagagcgagggcagattagaccggagaaatcccaccacatctccaagcccgggaactgagagaggaagaagagtgaaggccagtgttaggaaaaaaaaaaacaaaaacaaaaaaaacgaaaaacgaaagctgagtgcatagagttggaaaggggagcgaatgcgtaaggttggaaaggggggcgaagaggcctaggttaacattttcaggcgtcttagccggtggaaagcgggagacgcaagttctcgcgagatctcgagaactccgaggctgagactagggttttagcggagagcacgggaagtgtagctcgagagaactgggacagcatttcgcaccctaagctccaaggcaggactgctaggggcgacaggactaagtaggaaatcccttgagcttagacctgagggagcgcgcagtagccgggcagaagtcgccgcgacagggaattgcggtgtgagagggagggcacacgttgtacgtgctgacgtagccggctttccagcgggtatattagatccgtgggccgcgcggtgcgctccagagccgcagttctcccgtgagagggccttcgcggtggaacaaacactcgcttagcagcggaagactccgagttctcggtactcttcagggatgagtcatgtggcagtggaaaatgcgctcgggctggaccagcagtttgctggcctagacctgaactcttcagataatcagagtggaggaagtacagccagcaaagggcgctatattcctcctcatttaaggaaccgagaagctactagaggtttctacgataaagacagttcagggtggagttctagcaaagataaggatgcgtatagcagttttggatctcgtagtgattcaagagggaagtctagcttcttcagtgatcgtggaagtggatcaaggggaaggtttgatgatcgtggacggagtgattacgatggcattggcagccgtggtgacagaagtggctttggcaaatttgaacgtggtggaaacagtcgctggtgtgacaaatcagatgaagatgattggtcaaaaccactcccaccaagtgaacgcttggaacaggaactcttttctggaggcaacactgggattaattttgagaaatacgatgacattccagttgaggcaacaggcaacaactgtcctccacatattgaaagtttcagtgatgttgagatgggagaaattatcatgggaaacattgagcttactcgttatactcgcccaactccagtgcaaaagcatgctattcctattatcaaagagaaaagagacttgatggcttgtgcccaaacagggtctggaaaaactgcagcatttctgttgcccatcttgagtcagatttattcagatggtccaggcgaggctttgagggccatgaaggaaaatggaaggtatgggcgccgcaaacaatacccaatctccttggtattagcaccaacgagagagttggcagtacagatctacgaagaagccagaaaattttcataccgatctagagttcgtccttgcgtggtttatggtggtgccgatattggtcagcagattcgagacttggaacgtggatgccatttgttagtagccactccaggacgtctagtggatatgatggaaagaggaaagattggattagacttttgcaaatacttggtgttagatgaagctgatcggatgttggatatggggtttgagcctcagattcgtagaatagtcgaacaagatactatgcctccaaagggtgtccgccacactatgatgtttagtgctacttttcctaaggaaatacagatgctggctcgtgatttcttagatgaatatatcttcttggctgtaggaagagttggctctacctctgaaaacatcacacagaaagtagtttgggtggaagaatcagacaaacggtcatttctgcttgacctcctaaatgcaacaggcaaggattcactgaccttagtgtttgtggagaccaaaaagggtgcagattctctggaggatttcttataccatgaaggatacgcatgtaccagcatccatggagaccgttctcagagggatagagaagaggcccttcaccagttccgctcaggaaaaagcccaattttagtggctacagcagtagcagcaagaggactggacatttcaaatgtgaaacatgttatcaattttgacttgccaagtgatattgaagaatatgtacatcgtattggtcgtacgggacgtgtaggaaaccttggcctggcaacctcattctttaacgagaggaacataaatattactaaggatttgttggatcttcttgttgaagctaaacaagaagtgccgtcttggttagaaaacatggcttatgaacaccactacaagggtagcagtcgtggacgttctaagagtagcagatttagtggagggtttggtgccagagactaccgacaaagtagccggtgccagcagttccagcttcagcagcagccgcgcaagcagcagccgcagtggcggagggtggccacggtagcagcagaggatttggtggaggtggctatggaggcttttacaacagtgatggatatggaggaaattataactcccaggggggttgactggtggggtaactgagccctgctttgccagtaggtcaccctgccaaacaagctaatatggaaaccacatgtaacttagccagactataccttgtgtagtttcaagaactcgcagtacattaccagctgtgattctccactgaaattttttttttaagggagctcaaggtcacaagaagaaatgaaaggaacaatcagcagccctgttcagaaggtggtttgaagacttcattgctgtagtttggattaactcccctcccgcctacccccatcccaaactgcatttataattttgtgactgaggatcatttgtttgttaatgtactgtgcctttaactatagacaactttttattttgatgtcctgttggctcagtaatgctcaagatatcaattgttttgacaaaataaatttactgaacttgggctaaaatcaaaccttggcacacaggtgtgatacaacttaacaggaatcatcgattcatccataaataatataaggaaaaacttatgcggtagcctgcattagggctttttgatacttgcagattgggggaaaacaacaaatgtcttgaagcatattaatggaattagtttctaatgtggcaaactgtattaagttaaagttctgatttgctcactctatcctggataggtatttagaacctgatagtctttaagccattccagtcatgatgaggtgatgtatgaatacatgcatacattcaaagcactgttttcaaagttaatgcaagtaaatacagcaattcctctttcaacgtttaggcagatcattaattatgagctagccaaatgtgggcatactattacagggaaagtttaaaggtctgataacttgaaataggtttttaggagaattcatctacttagactttttaaatgcctgccataaatgaaattgaaatggtagaatggctgaccacagcaatgaccagccctcattagggccctggatgatttttggtctaataacgcatgctagtgttgatgttttttggtcaagagggtatgaacaggaagaattaaatgcagcaggctttattttaaatgccgattcacattactctgttcaagctgcgttgagatgttaaactgggcttactattaggacttcgtaaaaatggctccagaagagtaacaaactgaaatctttgagatcacacaggttggaaatatgtacataactggcacaaggtgtcaattctggctctacagtgcagg

SEQ ID NO: 1510 - DNA, 2076 bp, Homo sapiens
ccgcaccgctggcagcctgaagagagtcgctggccgtggtcgccgctaggtaggatatatctgcatcttgaaaggaagataaaacaaaagccttctttggaatagatggatttttgtcactttctgtgtgaactaaagtgattcaatgtctcttttggattgcttctgcacttcaagaacacaagttgaatcactcagacctgaaaaacagtctgaaaccagtatccatcaatacttggttgatgagccaaccctttcctggtcacgtccatccactagagccagtgaagtactatgttccaccaacgtttctcactatgagctccaagtagaaataggaagaggatttgacaacttgacttctgtccatcttgcacggcatactcccacggggaaccactggtaactataaaaattacaaatctggaaaactgcaatgaagaacgcctgaaagctttacagaaagccgtgattctatcccactttttccggcatcccaatattacaacttattggacagttttcactgttggcagctggctttgggttatttctccatttatggcctatggttcagcaagtcaactcttgaggacctattttcctgaaggaatgagtgaaactttaataagaaacattctctttggagccgtgagagggttgaactatctgcaccaaaatggctgtattcacaggagtattaaagccagccatatcctcatttctggtgatggcctagtgaccctctctggcctgtcccatctgcatagtttggttaagcatggacagaggcatagggctgtgtatgatttcccacagttcagcacatcagtgcaggccgtggctgagtccagaactactgagacaggatttacatgggtataatgtgaagtcagatatttacagtgttgggattacagcatgtgaattagccagtgggcaggtgcctttccaggacatgcatagaactcagatgctgttacagaaactgaaaggtcctccttatagcccattggatatcagtattttccctcaatcagaatccagaatgaaaaattcccagtcaggtgtagactctgggattggagaaagtgtgcttgtctccagtggaactcacacagtaaatagtgaccgattacacacaccatcctcaaaaactttctctcctgccttctttagcttggtacagctctgtttgcaacaagatcctgagaaaaggccatcagcaagcagtttattgtcccatgttttcttcaaacagatgaaagaagaaagccaggattcaatactttcactgttgcctcctgcttataacaagccatcaatatcattgcctccagtgttaccttggactgagccagaatgtgattttcctgatgaaaaagactcatactgggaattctagggctgccaaatcattttatgtcctatatacttgacactttctccttgctgctttttcttctgtatttctaggtacaaataccagaattatacttgaaaatacagttggtgcactggagaatctattatttaaaaccactctgttcaaaggggcaccagtttgtagtccctctgtttcgcacagagtactatgacaaggaaacatcagaattactaatctagctagtgtcatttattctggaatttttttctaagctgtgactaactctttttatctctcaatataatttttgagccagttaatttttttcagtattttgctgtcccttgggaatgggccctcagaggacagtgcttccaagtacatcttctcccagattctctggcctttttaatgagctattgttaaaccaacaggctagtttatcttacatcagacccttttctggtagagggaaaatgtttgtgctttccctttttcttctgttaatacttatggtaacacctaactgagcctcactcacattaaatgattcacttgaaatatatacagaaattgtaatttgcttttttttaaaaaagggggctaaagtaacactttcctacttatgtaaattatagatcctaaattcacgcaccccgtgggagctcaataaagatttactgaattga

SEQ ID NO: 1511 - DNA, 309 bp, Homo sapiens
ggcacgagattgtgttgaaaacatttattaacattcacaatttttgataggcaacattactgttagtcataacactacatttattccaaatttctaaatagccaggcttatccaagcgtaccgcccaccatagcttaccacccaccatactgtgaaattcaactgcagttgtggtactaagaatacctgtgggaatgtaactggaaaggaaaaaggcggtggaaggggggcgggggggcttccgtgtggcgaaagtcaacaatattctttgcatacaaaagactccacatcgtgtaaaacaggggtcct

SEQ ID NO: 1512 - DNA, 914 bp, Homo sapiens
ctgaagagaagtgaaagctttaacagacttttagagttagttcttcttgatggaaactacatgaactcaggctcaagaaatgcccagtctttgggatttaagatcaacttcctttgtaagatcagagatactaaatcagcggatcaaacaacaacccttttgcattttattgccgacatttgtgaggaaaaatatcgagatatcctaaaatttcctgaagaactggaacacgtagaaagtgcaagcaaagtttcagctcaaattctcaagagcaaccttgcatcaatggaacaacaaattgttcatctggaacgtgacatcaagaaattcccccaagcagaaaatcaacacgataagtttgtggaaaagatgaccagctttacaaagactgcccgagaacagtatgaaaaactctccaccatgcacaacaacatgatgaagctctatgagaatcttggagaatacttcatttttgactcaaagacagtgagcatagaagagttctttggtgatctcaacaacttccgaactttgtttttggaagcagtgagagaaaacaataagagaagagaaatggaagagaagaccaggagggcaaaacttgcaaaagagaaagctgaacaagaaaagttagaacgccagaagaaaaagaaacaactcattgatataaacaaagagggtgatgagactggtgtgatggataatcttctagaagccctacaatcaggtgcagcattcagagaccgtcgaaagcggattccaaggaatccagtggtaaatcatccctgtgcaacaagggctaatccaagatcagctacataaacggcctgagtgctgttttaaacaggattgggtgatggtacaacatgactttttaagataatcaagtagtaaaagtttctagtggaaacatg

SEQ ID NO: 1513 - DNA, 818 bp, Homo sapiens
tgaggtgtcacccaacctctttgaagaaattgacaaggatggcaacggagaagtcctcctggaagagttctcagagtacattcacgcccaggtggcatctggcaaagggaaactcgctcctggctttgatgctgagctgattgtgaagaatatgttcaccaaccaggaccggaatggagatgggaaggtcacagccgaggaatttaaactcaaagaccaggaagccaaacacgatgaactctaaacctggcatctggcaaagggaaactcgctcctggctttgatgctgagctgattgtgaagaatatgttccacctttctatcccatagaacactcttttttatcttccctgaaccatattgatgagataaatagggctgggggctgggccccgctggtcactcaacagagtatttcccttggccgagatggaagttttgtcccaatagatgagctgctgagtatcaacaaggtgacatttttctgctgcccatttgtgtcctggagacggtggtacccctgaaggcagaggccagctgccgcaagacagcaatgacagtccacctgccgacctgattcctgcatcatggaataaccacatggctaccttctatcctctgttcccaaatggtggtggcacttatcctgaagtcgtcaatgatttccctttgaaactactttattttactaatttaaactattttgtactgatgtagccctgaggtagttcatgaaaatgctgtgcactcattccatggaataaatgttggaaagctgatcttttctgatataaaatgttgaatgataaaaaaaaaaa

SEQ ID NO: 1514 - DNA, 897 bp, Homo sapiens
gcccagtgatggattcaagcctcgtgaacgaagcggtggggagcaggcacaggactgggatgctctgccacccaagcggccccgactaggggcaggaaacaagatcggaggccgtaggcttattgtggtgctggaaggggccagtctggagacagtcaaggtagggaagacatatgagctactcaactgtgacaagcacaagtctatattgttgaagaatggacgggaccctggggaagcgcggccagatatcacccaccagagtttgctgatgctgatggatagtcccctgaaccgagctggcttgctacaggtttatatccatacacagaagaatgttctgattgaagtgaatccccagacccgaattcccagaacctttgaccgcttttgtggcctcatggttcaacttttacacaagctcagtgttcgagcagctgatggccccccagaagcttttgaaggtaattaagaatccagtatcagatcactttccagttggatgtatgaaagttggcacttctttttccatcccggttgtcagtgatgtgcgtgagctggtgcccagcagtgatcctattgtttttgtggtaggggcctttgcccatggcaaggtcagtgtggagtatacagagaagatggtgtccatcagtaactaccccctttctgctgccctcacctgtgcaaaacttaccacagcctttgaggaagtatggggggtcatttgacagtagtagaacctgttctgaaaccagaaactgttgatgtcacatcctttgaccctggtctgagctgactgctggaagatgatctttctgcactgagactgtggagtttggggaagccaaggctgtacatttgctatttgtttatcctatgaatactgttcttgcaaac

SEQ ID NO: 1515 - DNA, 2445 bp, Homo sapiens
gtggcttcggcagcgccccctctagatctcagtgacctgcttcagctgaacaaccggaacctcaatcttgacatatatgttattggtttgcaggaattgaactctgggatcataagcctcctttccgatgctgcctttaatgactcgtggagcagtttcctcatggatgtgctttcccctctgagcttcatcaaggtctcccatgtccgtatgcaggggatcctcttactggtctttgccaagtatcagcatttgccctatatccagattctgtcttattaaatccacccccaattggcctgtttggggtactggggggaacaaaaggttggagtcaacatctgcctgaagctttatggctactatgtcagcatcatcaactgccacctgcctccccacatttccaacaattaccagcggctggagcactttgaccggatcctggagatgcagaattgtgaggggcgagacatcccaaacatcctggaccacgacctcattatctggtttggagacatgaactttcggatcgaggactttgggttgcactttgttcgggaatccattaaaaatcggtgctacggtggcctgtgggagaaggaccagctcagcattgccaagaaacatgacccgctgctccgggagttccaggagggccgcctactcttcccgcccacctacaagtttgataggaactccaacgactatgacaccagtgagaaaaaacgcaagcctgcatggaccgatcgcatcctgtggaggctgaagcggcagccctgtgctggccccgacactcccataccgccggcgtcacacttctccttgtctctgaggggctacagcagccacatgacgtacggcatcagcgaccacaagcctgtctccggcacgttcgacttggagctgaagccattggtgtctgctccgctgatcgtcctgatgcccgaggacctgtggaccgtggaaaatgacatgatggtcagctactcttcaacctcggacttccccagcagcccgtgggactggattggactgtacaaggtggggctgcgggacgttaatgactacgtgtcctatgcctgggtcggggacagcaaggtctcctgcagcgacaacctgaaccaggtttacatcgacatcagcaatatccctaccactgaagatgagtttctcctctgttactacagcaacagtctgcgttctgtggtggggataagcagacccttccagatcccgcctggctccttgagggaggacccactgggtgaagcacagccacagatctgagccaggatgggagtgaatcccaggcggaggccagagctggcagccagctctgcctttccactgccgggagtgctgggggcccagcctggccccctgaagagacagccaagtgtcgtccacatactcctcccagagtgagctctaaccaggctcatttgctctctccactactcatctctggaattagccgcttaaatacaggtttttgttgctgagatgtgagtgaaaccagctagtgtgtcaacagtgaagacctggggacagttctgcgtctcatttctggattcctaccccctcttctagtcttgcccaagtagtcctgccagggcacatgccccatttggcacaggcctgcattcttgtcgtgccgtcctgggcctcaggctgtctgggaggggagatgctcacatttgtacaggctacatagactggtgcaagcagtgctgggattccagggagtcttggcatctcatagcttgtccccgtgaggagtgagcagagggtctgggatttctgctttcagcaaaagcagtctgactcagtgggcagaatggagggggcccctctagccaggctcttacgccatggttatgagcaggttgatgagggtccttcggccagcacaaccttcctccctactcacggcatggagtctgactgcatggaagttccagatcctgacagagagaactgggaaggatccaggttcgcttccgttggtagcttgagtcccatgcctccaccctgccatctgaggaaggggtgacaagtggtcaaggagctgtggccacagacttttccagggtggtccttggcaggtgaggtgcgtctgtgccacccttgtcaggagccattgacgacgggccccccctggacccccccgggacctcagagtgggggcaggcagaagggagaaccagctcaagacattttggaggatctggccctggggttcttcagagaacaccctctaggggcttttggggacatggcctgtccccacatccagcacttgcctccgccatggtcactcggcagcccttttcccaggagaagacacctctgggaagcctgctcagtgcttgtcctgccatcctgtgtcctgggactgagggttactccagttgctctgtgttgcatactctcccccgcaagcct

SEQ ID NO: 1516 - DNA, 972 bp, Homo sapiens
  misc_feature (1)...(972): n = a,t,c or g
ttttttttttttagtttagcaccatttattaagtgatctcagctgttgttgtagctgctgcgtgtcagcctgttcttaaaacataaaatgctcttccaattcctcttgtccaggacagaaggatcttccaggtagcacgccaacagaacaagagactccgatgacgccagcttcaatgatggtgccatccagagagggagagggtcatggcacattcaaccgcggcttccagaggttttgaaaaaggagcctttgggggcccagcctgcctggcattttgatgctgtcggtgtgagttttgtattccataatggtgttgggaggtaggttaagcactcgccgaagtgtgtcccggattcgggctgtggttgcttggtcactggcagtcttattccatattgaaataatgtcttcctgaaagcggacagacaccacagccccacagatctcctccccaaccatgaactgttcccccagcatggccaaaatgagattctcccagcaacgggaggccaagcccttccgcagccgaataatccacttgccaccatttttatttgcatcatcctcccacatgggtttaattccttctttgaagagatggaagtcactgtggcctgtcaggtccccaggacgtaccatgtggctataaaacctccagaactgctccacagaggcaaaggtgccaatctgtttgatattctgttcatagctctgtgagctcgtgggacggccgggggttctcctggagtaccaaaaagtgtagttgtactgcaggggatgctctgccggtccagggacaacagcctttctcttgctactgctctgattcttgtctcgttccgttttttccttctcaccatctttctgtgtgctgttttcttcattctgatcatggtccccactgtcatcatctttcaaagcgtcgaacttgttgttcatcctcntcgccgccntgtcgccactgcctca

SEQ ID NO: 1517 - DNA, 504 bp, Homo sapiens
gatccaaggccacaagtaaggctatggctctaattctagaagacaaccttccaagatgcctggcaaaaccacctccctgtgccacacagacacactaggcctgtgtatttatttccccttcaaagcagactgaggagggaggagacgaggttctcttggcatcactttctccctggctgcagaactagacacccttgaagatttggcctgggccagtgagactgaaatcaagaaaaacagaagggatgtgcagggtgggggggtccacttcctgctcccatgtcaacccccagggcctccagcgtgcagacgcgtgtcctactcatctgctcccacggatgaccctggtcttcaatggttagcagaagggagaaaagaaagcaggaaaatgtgctattgagattccagtggtgacttcactgatatttagtgaatatttgatttagccaacatgcctttctttatgtgattttgtattaaagtaaaatgatttttatactttca

SEQ ID NO: 1518 - DNA, 674 bp, Homo sapiens
tttggtgcgagcttgctgtggtttttgctctgggtcctctgggatggcgcctggctgtggccgcgtggtctctcacgcaggggcgccgggcgggggaacgcggccaccctgagtctggtgagtcgactgcggcggcctgtgtccgaagtgtccggggccgtgaaacaagggcagcggcctggcctcaggcctgcgttcccacgtttggaaacggggagcttcgtcgatttgtgtttacatcatcgactatgccagggagttctccagataagcctggttttattttcgtcagtgaaaaggccttaccgtataactgactttatgcttgccctgcccccgtataaaataacttaaaagcagcgtgcctggttacagctgtttccacgtgcggtgctcgtcgggagtgatcacctaccctacaggtggaagatggatgcctgaagtgtagactgctgctagctgaataccatctgggagcataaaggtgacctgaaggatgtccttggtgaggattttgaaaatttgatcttcacaagagttgcctggatcatttgaaatttctgggagtctgaggagtactgacataattacctgctggagtctgtaaatacacatttaagacagtgaggatgtgaataaatatattaatgcactttggcaaaaaaaaaaaaaaa

SEQ ID NO: 1519 - DNA, 385 bp, Homo sapiens
  misc_feature (1)...(385): n = a,t,c or g
ggcctcaggagttcttactggcttctctggtggttctggattaggagagacctctagggaggtcctaggacttgcagtcccagtccccaaggaggccctagggctggtgggtgaaccccctccagaggctgtagggctggaaggtatgttccctgaggagggcctggggcttgcagtggctctgggtggaggaggcctactagggggtgctgaggtcctctggatagaggctctcttctttggttgttcagatccttcacttgcggtgcgggttcgaaggactnacttctgtggcagatgatgaaggctgccctgaaggcttcagggctccgctnggttgatggagttgtggagctggggagaacttcctcctgggaacttggcc

SEQ ID NO: 1520 - DNA, 630 bp, Homo sapiens
cagtgcaccagaatggagacgctcccatttttgatgaaagctttgaatttcaaatcaacctgcctgaactggccatggtgcgctttgtagtgctggatgatgactacattggggatgaattcatcggccagtacacaattccctttgaatgtttacagacgggctaccgccatgtccccctgcagtccttaactggagaggtccttgcacatgcttctttatttgtccacgtggctattactaaccgaagaggaggagggaagcctcataaaaggggcctttctgtgagaaaagggaagaaatccagggaatatgcatctttgagaacactgtggattataaccgtggatgaggtattcaagaatgcccagccccctatacgggatgccacagatctgagagaaaacatgcagaatgcggtggtgtcattcaaggagctgtgtggcctctcctctgtggccaatctcatgcagtgcatgttggcggtgtctccccgctttctggggcccgataacacacccctagtggtcctaaatctcagcgagcagtaccccacaatggagctgcagggaattgtgccggaggttctgaagaagatcgtaacaacttatgacatgatgattcatctca

SEQ ID NO: 1521 - DNA, 806 bp, Homo sapiens
  misc_feature (1)...(806): n = a,t,c or g
tgacagaccccagcgccgactgagcctctaaagcgacttcagctctgccccaccaacaccaccgcgcgcccgggaacagccgctccgggaagaaacctgaggggactgcggggggcacgagggacagctgagggaagggaggacgcgagagaaacagcgcgagcacgctgagggccgggggttgccaggagaggggcccgcggacccgcatagctggaggaaggtccgggagaaaaggggcgggacggaggagaatccgggatcgcctggcagaaaaagagaagggagtttctgaatcctgggaagaggaggcgtgggtagggatgcttagccccgagatccgacagcagggaaccggagcgctccggggggaaggggcttaatgctggggaagggatgtcttaaaagaggagaagctttaaattagaccgatcggagaaggctgagggaattgctatgaaggggcgggacttgaaagtgtagaggactcctttagacagcagaaagggaaagccgttgagaagttcccttcaaactccacctgcctcctctccaattcaaactccactcccttctccaaaagttaaaaggaaagccaattttgccacgctcccctgttcctactcaataaaatacttcttctactccgccaccgggaaaacagaaaaaaaaactaatttccttcccaatattaggacttagaaaantcnaggcccgcaattgattttanccaagggaatccaaattantagngcattacncctgttccnttttcaaaatccaaactcatccttcctggaanccat

SEQ ID NO: 1522 - DNA, 1975 bp, Homo sapiens
ttttttttttttttttttcttttcatttgcgtttatttaaacacagttctcaaaacatttgagtgaaattgggcctcctttggtaagcaaaggacctgaaaataatatttaaaaaatgaacaggcaaagtcttcagttcatccatgacaggtatagtgttcccttatcatgtactttgaagcacccggttttttcatatagtctaaaagctagaagaacaagagtgtatttgtggtggaatgtattgtcacttgctgataactagttgaaataccattatccccttgtaacacctttaagaaacagccttttaaggcatacactgtgtaactcttcgtatttcctgctatacatattacagattacataaaagccgacaaatccacattgatataagcattaaggcactggctgtattttaagatttttagttctaatactagcagtacagagttacagagcataattttaaacacttagttgcaggtatataagtatggtatgtttcatggactggaggaaaacgggcatttgtctttaaatttactactgacaatctgaatagttctgctaaggcattgatatgttagaaagaaaagtaaaaatcaaactgtttattgttgctttttgccatttggtagcattttacacaggcttcgatcttcagaataccctggattcagtagaaaaaccttttaaatgaagttttgtacaatagaaacttctcagcagtcaaaatttagactgtaaaaaaatacatgcaaaacatacttttctgaaaacacttaacttggaacaaagcaccaaactacacaaatgcagaatgaaaacagcatttcaactccaccaaaagtagtcatcgtaaaaggtgtaaaagtcacctaacttcactaggcactgttcactttttaaacaagagacaataaaaaatattgcccacaaacaatatcccagctctagggcaggtttcagaaagtcttcatgctttaatagcgacgaggtgagtatgatcgagatctggaacgtgatctgtatcctccacgactatagtaaggagaaggtgaccgccttctataaatctgatccctgtcttgggcagctctccatcctcctcctcctccacctcctcctctgtatgatctgctatagtagtcccgatcatcatagccccgatcatatcctctgtcatagtaatcccgacggcgagagctgccataggtaggtctccccatgtaaattcctggtgttggcgtatgtggtctttttgttatagagaaatcaactctgatcctacgcccatcaagctccattccattggcacgttctttagcttccttggcatcatctacattttcaaaatatacaaaggcaaatcctcttgaacgcctagactgctggtcatatacaatagacacatcggcaatgggaccatatttagagaacacttctcttagatctctttctgtggtgtacaagctcagcccaaatactccaagacaacagttaggatcaggatttgcccgattcccaacatgacgcctgcgagtagacatgggagaatggctgtggctgtgccgtctacgataatctcgactgtaagacctgctacgtgatcgtctatgggagcgggagcgagaccgtgaccgggtataatgccttcgggagcttcttctggatctagacctagattcagatcgggacctggactttgatctggaacgcctggaatcttccttggagcgagagacttgcaggggtatgccttgcagatttccccgatccgtgagcacttccacttctggaagcagaacgggattcccgctcgccgtagttctgctcgccgctgtcgctcatgactcctggctgctgtcgccggtcgatgtgcttcaatcgaagctgccaacctcttgcaccttccttaaggaggctccgccgcagccccgcacgacgcgccggtcgccctcgtgccgaattc

SEQ ID NO: 1523 - DNA, 1931 bp, Homo sapiens
  misc_feature (1)...(1931): n = a,t,c or g
ggaagctactccaagttgcattgcctcccgcgcccagatcctggctttccatttcgagaacataaatagattggcccagcccctccagtacaatcccactggaagaaaaggcaatggcgggcttcagccagacctgctgagacctaggttgccacggtaacagccaaagacatcaacccaagtgctgggtcaagtgtctcatcatactggcactgttgctggggtgacggcagaattcagaacttcaatttcagtgacgcccaagcttgatgtgtttctgttattgttttgaagaaggtagctcttgtggaggacttgggagaaggatggggtcttaggaaggaggtgacagcacttgcatggtcacttgagcccacacacacgctcaaccccaagtcctttatgctttgtcacagtgaagatgagacctctgacgtccaagccttgttcctgtgctgcatcacccactcagccttccaaagggaacaggaacaaatttccccagcaccactgtttgggtcccgcttttcctatcttctgctgcccctgagcacatccaagcagacagggaaagaggagtcagacatggcccagtcacatcctgagctgctcctgggctgataaccacgatgggagcccgtgtttgtcctgccatctggcactgcactgagtgtgggcacaggcaccgtcctgttgatctcacaacacagttctaagttaggacgttcttggctccgttagacaggtgaggaaactggggcacagagaggtgatgtcatctgcctggtgtcaatcagctagcaagtgatggagcccagatttcaaaccaaagggggttacgtccaggggctgagttcccactcacctgtgtagagtgccatctgggcaccattgctccagacgtgttccgacccctttcccagcccacagggtttgaagtgaaggaacagaggcagggggtgggccagccccaggggccagggtccccttggtgaagccgtgccagggggctcagctgcttcagggaatgtgtccctcccaccatgggccagagcttcagcccttctttagctcagctagagttcacaggagagccaaaaaagaaaaggaagctgagcatctcccgagtcctgggcagggaaggggagggaaattgctgcttctccaactcttgcttggggccaagccctggcaccagttgcttcccagctgttatctgccagatcttcccatcttgtggcatgtggtgcccccaccaacatcccaaggggaccaatccccttgccaccactttgcatcacctgggaccacagatttggacaggaagggctctgagaagagggccaaagccctcattttacagatgaggaagctgaagcccggggaggggagcgaccctcaaggccacccagctggacacgggagacttgaggcccaggcttctgactgcattcagccctctctaggacgcagcagcctctccccagcactgagtcccccctcctttgtgtgtcccagcacccttggcctgagtaaacttggaaaggggctccctcccagagaagggactactctcttcacccctttattccagctgcctgccaccccagacccccacctcccaccctgacccccgacccctgggtggggaaggggctcacatgggcccaggctgagtgtgagtgagcatgtcaagttgtctgacactgtgacattagtgcaccctactgacaacccctccccagccttgcccctttctcctctccctgttttgtacataaattgacatgagctgcaacnnnnnnnnnnnnnnnnnnnnnnnnnnnnnnnnnnnnnnnnnnnntgcatctgtgtcatggttttgttacctttttgtttttgtaaacttgaatgttcaaaataaacatgctgtttactctgaaaaaaaaaaa

SEQ ID NO: 1524 - DNA, 358 bp, Homo sapiens
  misc_feature (1)...(358): n = a,t,c or g
ttttaattgtaataaaatacacatcaaatacaccattttaaagtatacaattcactggcattttggcacattcacaatgtgcaactatccccactatcttgttctacaatattttcatcaatccaaaagaaaaccccatacccatgaagcagtcactcccattcccccagcaaccatgaatctgatttannnnnnnnnnnnnnnnnnnnnnnnnnnnnnnnnnnnnnnnnnnnnnnnnnnnnnnnnnnnnnnnnnnnnnnnnnnnnnnnnnnnnngttttttatcctccaaagaatatcacatctttctgcatttaaggtaacaacatttatgtaaatcatgagaaaaggaagctaaa

SEQ ID NO: 1525 - DNA, 680 bp, Homo sapiens
  misc_feature (1)...(680): n = a,t,c or g
gcctaaatgactgacactgaatagccatcctttcaggagagagtccatttcagacccacaggaagtatgaccttagtctcaagacacctttatcaaaatacaacagttctaatagctgcctaagacttattcagatgaatctttttgttatacaaccacataagcatatggagaaagagaatattttgggaagtacctgtttatgcaacatgttttagcctttcagatagttcctgtggtacacatttggcttgtacactcaaaagatggatgtgaataccactctatcagagtaagttcatgaagcagccctgagagagaataaactagaacccatggggcgtagcgtgaaggacagcctggattgttcctttctcttaataggcttgtaccaactggactgcattttctgtctagttttaggtgaagtagatctttcagaacctgtcctggcccaaacctgaaaatggtcctgaagtcacaatgtctccagaatctaggagtgcctctctgaagtgcttggttgagagcggaannnnnnnnnnnnnnnnnnnnnnnnnnnnnnnnnnnnnnnnnnnnatgaaaatccttacaagatgccagcaccatgctcttggagttcccggcttccagaactgtggaccaaataaaacactattgtttataaaaaaaaaaaaaaa

SEQ ID NO: 1526 - DNA, 393 bp, Homo sapiens
  misc_feature (1)...(393): n = a,t,c or g
ccggtgtcgactatgcctttcaattgtgccgacagaccctgtcagaagagaatggtttcgcactaatccaagtttacaaccaaaatcatcctgttttcagtggtgtagatccagtgtctgtatctgtcttgtcaactcacaatagcattagcacagggggctggatttatgctctaagaaatgcaatttacctttctaagctcacttatatatatttgtatctaacatattgtaaatttcttaaacttgttacacatttaattttataactagaaatcaatnnnnnnnnnnnnnnnnnnnnnnnnnnnnnnnnnntggaaaacagaaaatgaagtgcaagagaccctcatttcggggcaagaattctgagttccttggcttctttcattcttg

SEQ ID NO: 1527 - DNA, 643 bp, Homo sapiens
ggagacattctgtggtctctgaatgtgccttccccctcaccgtgtgttaaaacacaaaagccgaagttccatggcatcatgattccgaggggctggagggataggacccactccacatctaaaggggatctgctttgggctcggtcccattagcgagtgggggactcttgctgtgtgctaagaggctgctaggactcacccagttggaattctgggtgggctcaggaagtttagagccacgtaaaaagctggtaggcatgagtgtgccaggtctttgccagcctgcgtctccttttgcaccccccaatccagagtttgctttcttttgactaaattggctcctgcagggggaagggcagaaagctaggccctctgctctggaaagtcggcctgaggtttccggcaagttaacccttaaaatggacacccctcagcccgccctcccctttggccttcccagaatctccttcagtggttgctctcacacctgtgccataacatcatcttccatgacttggacgggcacttccttgacaattcctattgggcatcacacgggctacaaattatgctgttttctaaagaatttgaacttttttttttttcctttgcttgagacacggttcttgctctgttggccagg

SEQ ID NO: 1528 - DNA, 768 bp, Homo sapiens
tttttttttttttttttttaaaactaaaattggttttaataaaagttttggagtcatctaaatgagtaactatacacattcctcctctccagcaagtatacagaaatcttcccttactccaatttgacgctgcaaaatcatacatgcaccccaaactgatctgttattgaaatttctttttctggtctcacccattactttaacatatcagaggaattaacataacagcctagagaacagaaataagagataataggtgcttcagtaccacccaaattatctactaagaccacagtgtgggcaacagaatgcagattcatggtagtagttccttgaatgaaagagttcagacagaatcttccacaaacacaaatttttgcggtatccaaatcttggcagagatggaatggaatgatatgagagccatatggaatccttacttagacagatatccacaggaggctcctttaaccgaacagtggctttcccctcatctacaaatttggtgaagaattgctcaatgttctcccttagctcatagcgggtcccgcgcttgtccttcagggtggagatgagcaggaaggctcggaccggcggctgactcctggaagtctgctgacagaggctcaatacggctcggacgcccttgccccggttcctaagccccaaggcgcgcaagtgccggctgatcacctccacctcacagtgtagcttcatctcgcccaacggccacaaccaggtcaagctggctttgaaacttcctccttc

SEQ ID NO: 1529 - DNA, 1457 bp, Homo sapiens
  misc_feature (1)...(1457): n = a,t,c or g
tgcgcaggcggccggactccgctcagtttccggtgcggcgaacaccaaagtccgggaacttaagcattttcggtttctagggttgttacgaagctgcaggagcgagatggaggtggacgcaccgggtgttgatggtcgagatggtctccgggagcggcgaggctttagcgagggagggaggcagaacttcgatgtgaggcctcagtctggggcaaatgggcttcccaaacactcctactggttggacctctggcttttcatccttttcgatgtggtggtgtttctctttgtgtattttttgccatgacttgttcgctgatatctaaattaagaagttggttcttgagtgaattcctgaaaatggctacaaacttcttgaataaagaagacaggactctcaatagaagaatttcacatctccaagggacccttcctttcattttacactttgttactaatttgcagaactctattaattgggtaggatttcacccattcctagctaagttcttaaaattaaaccctttggttcgtgtttaaaaactttcaaacatctgatggctttacaggggctgaatataaaagcatttgtacttaaaggtcttgtgtattcattaagaaatatagtaatgtcttttaatgttttaagagttgatcagggtttactatgatgcaagtaatagggatgattaataaggggaaggtttttatggaatttcaaaagtcaattattcaaaagcagggaaagattttgagagagggaacaaagtattcttagattgcgtagaagctgctaggttccagttttaatttttaggtttagttggactctgttatgaaaagataggttatgggtgggccacaggttgatacagtcttaggaaaaagcaggtaatatcaaagtattggaaagctagcatgcatgccctcttacctgggtatcttcccccttttttccttttaaactcttgagcctcctataacgaaggattatgtgtttcaaaccttttttttttttactgtttcattaagtgtgcttgtgcccaaaatatttacttgtataatatctgtaacttgcttaaatacttcagcaaagtcagcatatttactcattcaacaaatatttgagccaggcattattttagacacagcagtgaacaaaacaaaaaggcattcttgccttcatggagcttacattcttattgttatttaaatctaaatgttataaaacaagaatttatattctagggttgatcagctagtatttaatcaaaaaggccacactcccatagcagctactctaagctgtagtagctaataaaaaatattaatgttggccgggcacaggtggnnnnnnnnnnnnnnnnnnnnnnnnnnnnnnnnnnnnnnnnnnnnnnnnnnnnnnnnnnnnnngtgacaccgagcctggccaacctggtgaaaccctatctctatta

SEQ ID NO: 1530 - DNA, 640 bp, Homo sapiens
  misc_feature (1)...(640): n = a,t,c or g
caaaatgccagttaatgaaaacagaacgaccaaagccaaacacatttataatcagatgtctccagtggactactgttatagagagaacatttcatgtagatactccagaggaaagggaagaatggacagaagctatccaggctgtagcagacagactgcagaggcaagaagaggagagaatgaattgtagtccaacttcacaaattgataatataggagaggaagagatggatgcctctacaacccatcataaaagaaagacaatgaatgattttgactatttgaaactactaggtaaaggcacttttgggaaagttattttggttcgagagaaggcaagtggaaaatactatgctatgaagattctgaagaaagaagtcattattgcaaaggatgaagtggcacacactctaactgaaagcagagtattaaagaacactagacatccctttttaacatccttgaaatattccttccagacaaaagaccgtttgtgttttgtgatggaatatgttaatgggggcnnnnnnnnnnnnnnnnnnnnnnnnnnnnnnnnnnnnnnnnnnnnnnnnnnnnnnnnnnnnnnnnnnnnnnnnnnnnnnnnnnnnnnnnnntgctcggcccccgagtagttgagact

SEQ ID NO: 1531 - DNA, 452 bp, Homo sapiens
tttttggatgttcctgacttggacaatgtgatcaagaaaatgataaatattaatattctttctgtttgtaagatgacacaattggtactgcctggcatggtggaaagatccaaaggggctattctgaacatttcatctggcagtggcatgctccctgtcccactcttgaccatctattctgcaaccaagacttttgtagatttcttctctcagtgcctccatgaggagtataggagcaagggcgtctttgtgcagagtgtcctgccatacttcgtagctacaaaactggctaaaatccggaagccaactttggataagccctctccggagacgtttgtgaagtctgcaattaaaacagtcggcctgcaatccccgaaccaatggatacctgatccatgctcttatgggcttgataatctcaaacctgccttcttggaatttatttgaaaata

SEQ ID NO: 1532 - DNA, 1276 bp, Homo sapiens
aaacgtgcattcaacctcaaacttttgcataaaatagaatgaatcgttttgctctgatgaaatgtaggccttacttgtatataagactgttcctgccttcggtctgtcattttcccacctgcctcccctacccaccccccacccaccacctggggcttcctctgggggtccgagggtcttcccatcacatgaagacatcaggttgggtcctgccccactgcccctccccctgttcctgccccaagccgtcaatcagattgtggagcagtacacagtcagatgaaaatactgtaaatgcactcattgggggttttttggttttacttcatatcatgtgcaatgttgtggctttaacattttatgcaactatttatgaagacctctgttgtacctgtaataaatatatagaaaaagcacatacttcgtatggtgagctttatggttttgtgtgtgtgtgttggggttggcgggtgggtgggtagggtcgtagccctgtgccatcggttcaaagagacttttcgtgaaatttgttggttttgaggactgtaaaagtgatttcatactctgaatataaaactggataatagggtaatgttttaaaatttattatgctattattcagaatgccaaagtattattttttttcccaaaatcagtctggacatttactactttttagactttttgacgttgaactttctgtataaaaattggctgggttttgagcttttggtaagaaataaaagccgattaaggcactggccgccccgcgtgggttacccaatgcccgagtcactgtggcagcattcgcactggtgtggggagtcctttcaactcaaggaggctgggtttctgggcaccctcgaagttttctggatgtctttttatctttctcgtgtgaactgcactacaaaagagaccagcccgcttcccaagccagccagacacctgggtcttgagccataaactggcgtagttaagctttgccagcttccagtgtattttatttattcttttgttgggtttttgtttgtttcttcttgtaaaattgtacagaaactttttaaaagaaattggattcgaaactggatgtgtattcgtaacctcataatttttatttgtgtattgtttcttttattatttcagttaaatttttacattattttgcatgtatatttctttgtacagagaccttacatgtttacacagtatgatgtgatgtaaatattttatttcgccatcagttattttaaaaaattaaacatatttgcctgaa

SEQ ID NO: 1533 - DNA, 1329 bp, Homo sapiens
ggctgcctagggtctggaaagctcgggcaccctccctctccggggctcctgctcccacccctccggcccccccaccgtcgcgctcctccaggctgggcctgtggccgcggtgctttttaattttcccccagctcagaatcttgctgctcggcccccaggagagcaacaactcaacgggaacgatgtggaaggtgtcagctctgctcttcgttttgggaagcgcgtcgctctgggtcctggcagaaggagccagcacaggccagccagaagatgacactgagactacaggttttgaaggcgggcgttgccatgccaggtgccgaagatgatgtggtgactccaggaaccagcgaagaccgctataagtctggcttgacaactctggtggcaacaagtgtcaacagtgtaacaggcattcgcatcgaggatctgccaacttcagaaagcacagtccacgcgcaagaacaaagtccaagcgccacagcctcaaacgtggccaccagtcactccacggagaaagtggatggagacacacagacaacagttgagaaagatggtttgtcaacagtgaccctggttggaatcatagttggggtcttactagccatcggcttcattggtggaatcatcgttgtggttatgcgaaaaatgtcgggaaggtactcgccctaaagagctgaagggttacgccctgctgccaacgtgcttaaaaaaagaccgtttctgactctgtgccctgtccctgagctcgtgggagcagatgacccgtggaacacttgcctggcccactcagaatccacggtgacctctccgcttgccaaaataaccgaaggaaagaccgttcaccagacttggctcctctaaacatttgctgttcaaacatgtttttgaatatacattctataaaagattatttgaaagacaaaattcatagaaaatggagcaaaactgtataaactgatttgtaactaacactggaccattggatcgatattacatgctgtaaccatgtgtctccgtctgaccattcttgttattgttaaaatgcagaggaatctggaaatatttatatccacggagtccttggatccagtgctacgtcagtaaatagcaccagcattttgcaattgctgatctgctgaaatgtacacattctggtctagtttggtctatcttttaaagcctgatctggtgtgaataatcaactaggaaatctaaacttggataacacgtgggtggaacaactgcctttagctggtccagattaatcatttcaaagacatccattttagatcacaagcaggaagtcgatagtctcaaaggcctttg

SEQ ID NO: 1534 - DNA, 676 bp, Homo sapiens
cttgatccaagttgtcagctactaaggtatctcgtaaagcaaaataaaaagcttggcgaattttctcatcttttacttttactaaatcaaataaacgaggagtattttcaggagtttgaatttcggtcatctttttcgcccatacagccatcttatctaaacctataaaggttgcaactccaatattttgtcttttaaggaagtttacacattcttgggctatatcaatagaatcaacaacaatgtagtccagtgcatgacaacaggatgatatagccacgtcgtatttttcatcaatggctcctaagtcccccaatcttccatatattcctggaatcctgccagattttttttcttgaattattgcatcaaggactttccccctacttcgattcattgctaatgagctctttgcttcttcaactttttgaaagagatcatgaaccaaacttttaaagtttgtttcttcttgtgtaagtttttgaagttctttttctttctcctttaattcttgttcagtttgagggagttttccttctatatctctgattgcagctttcctttctttgagagtctcagaagctgcaattagagcttccttagccttagttaattgagacactgcagtattatgacgactgagatagatatcaagttctgactggggctacatcca

SEQ ID NO: 1535 - DNA, 623 bp, Homo sapiens
caaataatggattggaattgcacaataaacattgcttgatgttttcttgtatgtctacattaaacttgaggaaaagtaaaaattagaacactgtatgtagtaatgaaatttcagggacccagaacataatgtagtatatgtttttaggtgggagatgctgataacaaaattaataggaagtctgtaggcattaggatactgacatgtacatggaaaattctagggacaggagcatcattttttccttacctgataccacgaaccagtgacaacgtgaatgctgtattttaagtggttgtatgtttattttcttgagtaacaaatgcatgaaaaattaatgcttcacctaggtaagatcattggtctgtgtgaaatcacaaatgttttttccttcttggttgctgcagcctggtggatgttcatggagaagctctgttctctatattatggctgtgtgccgttgcttctccctctgcttttatcttttccacagttgaggctgggtatgttctttcaaagaaatggccatgaatatgtgtaagtatacttttgaaaatgagctttcctaaactattgagagttctttccacctcttgcggaaccaactcttggaggagaggccc

SEQ ID NO: 1536 - DNA, 484 bp, Homo sapiens
  misc_feature (1)...(484): n = a,t,c or g
gtatcctcactatcctaaagaactgctcaaagcagcaaagcacaaagagaagcagctccaggagaggatgagcgtgtctgacacattcttgtcagggagagggggctctactgttctgctttttcatgaaaggaaaatgactaagattgcagcaggagctgtgtgggttatacactaggaaacttttcactaggaagtatggaagacctgagtcctagaaaaattgaaaatggacgtgactttttctctaaggtgctcttgtctgcatagtacgctgtcccaaagggtcaagggtcaaggtagtctccagaagtcctcatccatccctctaagaccaaaggcctgtaaactctatgttgctgnnnnnnnnnnnnnnnnnnnnnnnnnnnnnnnnnnnnnnnnnnnnnnnnnnnnnnnnnnnnnnnnnncccaggagttgaggctntaatgagtgaanaatgggccaatgccctcaaactngggg

SEQ ID NO: 1537 - DNA, 350 bp, Homo sapiens
ggttgctttccagtctggaagcacagcattttattcatttcaggaaaacatcggtcctaaacctgctggtgcattcctgctgttagtaggtagaaaggctggcatttggtatttggagggcagataagattttacaggagtacatgagttaaagaagggactctcatgaaagagagtatagagtgtatctggaagtgtaagtatcaggatagttcatgtggaaggggttagttagataatatttgcaatcaagatgagcaagcttcttctcagaaatacacttgtaatgataatatagttggagcagcattgtagtttctgcaaactgttcatgattgatattcctttat

SEQ ID NO: 1538 - DNA, 396 bp, Homo sapiens
tcgagcgccaggcgtccggccgccgtggctatgttcgtgtccgatttccgcaaagagttctacgaggtggtccagagccagagggtccttctcttcgtggcctcggacgtggatgctctgtgtgcgtgcaagatccttcaggccttgttccagtgtgaccacgtgcaatatacgctggttccagtttctgggtggcaagaacttgaaactgcatttcttgagcataaagaacagtttcattattttattctcataaactgtggagctaatgtagacctattggatattcttcaacctgatgaagacactatattctttgtgtgtgacacccataggccagtcaatgtcgtcaatgtatacaacgatacccagatcaaattactcattaaacaagat

SEQ ID NO: 1539 - DNA, 1074 bp, Homo sapiens
ccctgcaaaaccacattccccattttaacgggcgttgctctcactctctctctctcttactcttactgacatcgtgtcggactagtgcctgtttattcttactccatcaggggcccccttcctccccccgtgtcaactttcagtgctggccaaaacctggccgtctcttctattcacagtacacgtcacagtattgatgtgattcaaaatgtttcagtgaaaactttggagacagttttaacaaaaccaataaaccaacaacaaaaaaagtggatgtatattgctttaagcaatcactcattaccaccaatctgtgaaagtaaagcaaaaaataataataataaatgccaagggggagagagacacaatatccgcagccttacaccttaactagctgctgcattattttattttattttatttttttggtatttattcatcaggaataaaaaaaacaaagttttattaaagattgaaaatttgatacattttacagaaactaattgtgatgtacatatcagtggtgacatattattacttttttggggacggggggtgggtggggtgaagagatcttgtgatttttaagaacctgctggcaagagtttaacttgtcttcagcatattctgattgtatcataatcattttctgctgttgcagaggatgtgaatacacttaaggagctcacagaatcccagtagcacaaattgggctttggcaaatcgtgtattttgtgtatagaaggaatttaaggagaggtattacttattttcatattgtattttaactgtttctctgatcaaatttttttacttcctcctcctgttcctccccacctccctccttttccagttcagtatttggagttcaacactgtctctcaatcagatcatcttgatctttttctttatctcccttccccttcctaagtcccatttcttggtcataaatattgcattattcacactttcaaactgtgtattttcttacaataaaaaatgatgaaaaaaaaaaaggctttacttcttttgcatgcactttaaaaacaaaacaaaacatttttcaggttccaa

SEQ ID NO: 1540 - DNA, 1544 bp, Homo sapiens
aattcggcacgaggccgtgattgaagaggaaagactacagtccaagctttcagacccccatgccattgaagctgaaaagtttcagtgcaatttatgcaataagacctattcaactttttctgggctggccaaacataagcagctgcactgcgatgcccagtctagaaaatctttcagctgtaaatactgtgacaaggaatatgtgagcctgggcgccctgaagatgcatattcggacccacacattaccttgtgtttgcaagatctgcggcaaggcgttttccagaccctggttgcttcaaggacacattagaactcacacgggggagaagcctttttcttgccctcactgcaacagagcatttgcagacaggtcaaatctgagggctcatctgcagacccattctgatgtaaagaaataccagtgcaaaaactgctccaaaaccttctccagaatgtctctcctgcacaaacatgaggaatctggctgctgtgtagcacactgagtgacgcaatcaatgtttactcgaacagaatgcatttcttcactccgaagccaaatgacaaataaagtccaaaggcattttctcctgtgctgaccaaccaaataatatgtatagacacacacacatatggcacacacacacacacacacccacagagagagagctgcaagagcatggaattcatgtgtttaaagataatcctttccatgtgaagtttaaaattactatatatttgctgatggctagattgagagaataaaagacagtaacctttctcttcaaagataaaatgaaaagcacattgcatcttttcttcctaaaaaaatgcaaagatttacattgctgccaaatcatttcaactgaaaagaacagtattgctttgtaatagagtctgtaataggatttcccataggaagagatctgccagacgcgaactcaggtgccttaaaaagtattcccaagtttactccattacatgtcggttgtctggttgccattgttgaactaaagcctttttttgattacctgtagtgctttaaagtatatttttaaaagggaggaaaaaaataacaggaacaaaacacaggagaatgtattaaaagtatttttgttttgttttgtttttgccaattaacagtatgtgccttgggggaggagggaaagattagctttgaacattcctggcgcatgctcccattgtcttactattttaaaacattttaataatttttgaaaattaattaaagatgggaataagtgcaaaagaggattcttacaaattcattaatgtacttaaactatttcaaatgcataccacaaatgcaataatacaataccccttccaagtgcctttttaaattgtatagttgatgagtcaatgtaaatttgtgtttatttttatatgattgaatgagttctgtatgaaactgagatgttgtctatagctatgtctataaacaacctgaagacttgtgaaatcaatgtttcttttttaaaaaacaattttcaagttttttttacaataaacagttttgattta

SEQ ID NO: 1541 - DNA, 1877 bp, Homo sapiens
attttctcccacaggcctctctttctttctaggttgctggggagaaatgggtaccctatgatccccctccccttctcctccagtaaatacctggaagagggaacctgaatccctgggggagacagaaggggcaggggccaccagcctccccttcttgtggtgagactgaattttgggctcagacaccagcaacagcctcttgggatgccctgagttgcttcccatttcctctttctagccgtccttttctagtgtgtgctcactcttcctaggaacttttaagacttcttggtacctatgaacataggtcctcccctcaccccaactctaggtttccaggcctcacagccaagctgaagcttggagaaaactctgcattcccatgagggcaaaggcagctgccctccctgaccctatagccccaggcctcatggggggtatgtggggaagggatggggtatccccatggatgctgggatgaggacagaggaagacctgatggggtctcctattccagggaataagccaaattaacactaaaaacggatcaaagctcccacgccagtccactagggccccagtagttgacagccttgctcctctcccaagttctccttcagaacctagttgcttttattcttccagctaccacttgggcacttcacagccagcctagggtcttcggcacctccaagagctgaatctccctccaacccttcttgcctactcctcactgccagctgggacctaggctcagtcctgtgtggtgcccatgatccttctggtgggggaagagtttaagttatagggcatttggctcaaattttaaaaggccttttgtttacctatatttctggaggctcctgtattctagaacccaatctctcacctgcttggttgcaaggctcatatttttttgtacctttcctatagattctgtaggcatttgagtgtggcaatattttaattgtgtatagatttctaaggaaccaacactactcagtctcctgctagtctgactcctgaagcatcagcccttgtcatactgtattgactgtgtacgtgcctttcaccttgagcatgcttcaggatttttttttaaaccacagaacttgaatacatgagggaaccagagttcaaagtcctatgcaaccttaggagggggttagagagtctgttttgattgatgttttctgaggccctagaggagtttgtatcaatttgtgagtattaatgtcagtactaccagcactttgccaaaactgtcagaggggacccgtttctagagtgagtcccagttacatcaaacagtgacttccagttattccccagtaagtctgagtggttccttcaagctgggtgtctttccagcctttgccagtctagccccagcagggcaccgtgtatgaatgcagtttggtgctgttttagagtatgcctgctccccagccccctgcctggaaccctctgagcaacttgctctgacctataatgtcttaggtgcaacacggacccccaccagagctcttggatacccccctagatccatgtggctttatgtgagggggactgaatgcagacacaccatagcccccttctactactttccctctcgccctgccacctagttccacatggaaccaacaagttgagtgcatccctgttgggtgttttgtgttgagactggctgaaatgaggagactttgaccatgtgacgtgtcaacagactcaaggagacaaccacctcaactgggtcatgtggcatgcctgtgtatgtgtgtaacagaattctgattgttagactgtaatgctattcctctatgggagaaaaaaattaatataaagaaaaacaaataaaaatatatttaaagcacaaa

SEQ ID NO: 1542 - DNA, 1100 bp, Homo sapiens
gggcaaaaatatccacgtagcaacagctcatgaagatttggcctactcttcttatgtccaccagtatagctctgggaaatttgacaatgcactatttcatgcagaaagagctattggtatcattacccacatcctacctgaagatcatcttcttttggcttcttcaaagagggtgaaagcacttattttagaggagattgcaattgattgtcataataaggaaactgaacagaggctgcttcaagaagctcatgatttgcacctgtcttcactccaactagctaaaaaagcttttggggaatttaatgtacagactgcaaaacactatggaaaccttggaagactttatcagtcaatgagaaaatttaaggaagctgaagaaatgcacatcaaagcaattcagattaaagaacaacttcttggtcaagaagattatgaagtagccctttcagtgggacatctggcttctttatataattatgacatgaatcagtatgaaaatgctgagaaactttatttgcgatctatagcaattgggaagaaactttttggtgagggctacagtggactagaatatgattatcgaggtctcattaaactttacaactccattggaaattacgagaaagtgtttgaatatcacaatgttctgtctaactggaaccggttgcgagatcggcaatattcagtgacagatgctcttgaagatgtcagcaccagcccccagtccactgaagaagtggtgcagtccttcctgatttctcagaatgtcgagggaccgagctgctgagggaggacctcagttaaccaattaccttttcccggattccagggaattcatactgtgaaatcaaaaccatgttgttttggggggctggaatttgcattgaaacactggtccagtccattgaagaccctattttgggtgatccctatcttgcagaatgtctgtaggaataagcatatattcagttatattcagcatgtaccgcatgtgtaagtagtctggcccacattttcaacctagtagaacaaacaacaggaaatcttttttttgttgtttttaaaaaattcattttgcagaaagcctgaaaaaaaaa

SEQ ID NO: 1543 - DNA, 398 bp, Homo sapiens
agcagccctcaccgcagtggccctgaagccacctcccgtggagctggaagtcaacctcctgacccccggggccagttcccccatacagtggtctcctttggaacggtgaccaccccagctgaccggctggccttgatagggggcctggagggcttcctgagcaagatggcagagcacaggcagcagcccgacatcaggacccatcacgctactggccgaggtggtggagtccgggagtcctgcagagtccttgctgctggccctcctggatgagcaccaggtagaggccgacctgacattctttaacacgctggtgagaaagaagaacaagctgggagacctggagggggccaaggcgctgttgccggtcctggcaaagaggggcctcgtccccaacc

SEQ ID NO: 1544 - DNA, 732 bp, Homo sapiens
cggccggcacctgctcccgtcgccctacagcaagatcacgcccccgcggaggccccaccgctgcagcagcggccacggcagcgacaacagcagcgtgctgagcggggagctcccgccggccatggggaagacggccctgttctaccacagcggcggcacagcggctacgagagcgtgatgcgggacagcgaggccaccggagcgcgtcctcggcgcaggactccacgagcgagaacagcagctccgtgggcggcaggtgccggagcctcaagaccccgaagaaacgctccaatccaggttctcagagacggaggcttatcccagcactatccctggacacctcttcccctgtgagaaaaccccccaacagcacaggcgtccgctgggtggatggccccttgcggagcagcccgaggggccttggggaaccctttgagattaaagtctatgaaatcgatgatgtggagcgcctgcagcggcgacgagggggtgccagcaaggaggccatgtgcttcaatgcaaagctgaagattctggaacaccgccagcagaggatcgccgaggtccgcgcgaagtacgagtggctgatgaaggagctggaggcgaccaaacagtatctgatgctggatcccaacaagtggctcagtgaatttgacttggagcaggtttgggagctggattccctggagtacctggaggcactggagtgtgtgacggagcgcctggagagcc

SEQ ID NO: 1545 - DNA, 340 bp, Homo sapiens
gaatttaaaaaggatggtatgcagaggggctatagcaagaaaaacttgttatgtaaagacaggggttttatatctctgttttctacagaaactcttgaaaataggtaaaaaataaaaatacaggttaagcctccctaatccaaaaatctgaaatgctccaatagctgcaactttttgagggctgatatgacaccacagtaaaaaaatcccacacctgacttcatgtgatgagctgcagtcaaaattttgttttatgtacaaaattattaccaattcatttacattagcttcagtctatgtgcataaggtatatataaaacataagggaattctgtggtta

SEQ ID NO: 1546 - DNA, 691 bp, Homo sapiens
  misc_feature (1)...(691): n = a,t,c or g
tgcggccgcggtcagagaaggagagacaccagcagaggacgcgaacgtggaccggccaggttcagagcccgcctcggttgctcccaatcagaatctgctttgtgctccacggcctccaagcactttcatgagcgttctgctcctacgtggccaggtcctaccttccctgacggctctggccaggccagctcggtttccctctaacccatgaggcctgggggggctgtgacagaggctggaagcgtggccagagcccaggggcaggcccgcctggtcacagcaggatgaggctggggtggcgcagctgccggtacacctgtagcagcctctgggcggtggcacaggagctggcctcatcctccgtgcagagccggtcgcgcagggtctgcacctcccgcagcagtgtctcgtggttggcgtggatctggcggaggtactgcacacggagatcaggagcgctggagccctgggcggcctgctctgtcaccatcgtctgcatgcgcccgacaacggcatggtgcgccctgcaaatgtcggccagagaggagctttccacttgaatctccacggcctggatgngccctgctgggcacaggtcggtcatggccacctctcggacgatgaggtgaacgttggcgccatcaggggccactccctggatggaagatagtgctcgggccctcacgacgtc

SEQ ID NO: 1547 - DNA, 691 bp, Homo sapiens
gatgcacccatcttccgggccctccacatgcaggtcccaatctaccaattgcctttttaaagaaactatgacgtacagttccctgttgtaaccacgggcaggtatttgctgacttgcctacaacctggagggttatgagctggcgtcgccccatttcacagagggagagccgaggtgcagagagacgaagctgctgactggaggagacatagacccaagcagcgagcccgcgcgggcaatttagggaaccaactgtgtgtgctgcgggggtcccttgccacccaaactgggatataggctgctgttcgtacacttgcagaagtttctccctgcaagtaccgccaccaataatattcacacagccttcccaacatgctatgtaaagactccaaccttccccacctcccaagatgcatccgtgttacgtatagccattttacagatgaggaaaccgaggttccaagaggggcagtctctgctctctaaacttcaccttccaaaggattctaagctgctgaatgaaggctgcaggcagggtggtctgtacaggggagggagggtggaaggcacggggtctggaagtctaggaggagtgtctgaagtcaactgcaacttttaaatatctgtgaattttagatttcaccctgtatgtgtccctagcgtgttttaataaaataaattgcttcacgtt

SEQ ID NO: 1548 - DNA, 73 bp, Homo sapiens
cagttgtgttctttatcgaatgtgtcttttgcaagtattttctctcagtcagtggcctgtcttctcattttgg

SEQ ID NO: 1549 - DNA, 579 bp, Homo sapiens
ttttttttttttcgcatctttgaaatgatttattgttcacttttgcacacgcgtgctgaggacagggcaggtccagcctggggcctgctccccactgcagcatttccaggcccccagagtgggccgaagggggacatgggcgtgtctttccacattaagtagcaggagattccctgagtaaaaggcattttcttaagtaggacgtgtccaggctccagcagcagtcctgggggtgggggttgtgggccttcaggcccagggcactgcccatgacttcggagaagccacctggtgttccaggtgctgctggctgaggctcctgcagctcaggctgggcctctttccaggccagagacttctccaatttggttttaaaaagcaatccgtgacctgggcagtctgcagtctctttggaggctcgcttcttgcagcagccgcggcacaggctgaacacacatctgttgccctttgggtttccacactggtcacactttgcatattttggcttcagagaggggtcgaaggtcttgtgggggttcctcagctgcttcttttgcttgttcttggacaggacctccg

SEQ ID NO: 1550 - DNA, 596 bp, Homo sapiens
cttgcggccgcatcttttttttttttttttttttcaggtgtggcaacacgtttaattctgtggccaggctagcctgtctccaaggcctggtggacagcacgtcaccagaggctgccgcaggagcaggcagggccagccctgcaagaggagtgcaggcaaaggcgggggctctgaagtggctgctggaggcagcaggccccgggctgggagtgctcagtagccgtcgttagcccaggtgacctcgtagtcggggtacttggctttgattttctcagttgaaatggcgtgctgggcaggaccataggccatggaatagccgtacacgtgaatcttcttgtcctgactctggtgggagatgcgcccgccgcccagacactcacagtcgcagccttgcttctgcatgtcgcccgacactttgtcgtagatgtccgcatggtactcagcccacttgtagccgcgcacgatctccttgctctctgcagccggagccccggagcggggagccgagtggactcggatcagcacatacttgaagacgccgtcggagtcgatgtccacatcaggaatgagagcgaggtccgccaccgccatgttcc

SEQ ID NO: 1551 - DNA, 395 bp, Homo sapiens
  misc_feature (1)...(395): n = a,t,c or g
ggtaattcagctcnnnnnnnnnnnnnnnnnnnnnnnnnnnnnnnnnnnnnnnnnnnnnnnnnnnnnnnnnnnnnnnnnnnnnnnnnnnnnnnnnnnnnnnnnagttttgtgtatagttttaaggagattctgtctccttgactgtctgggaagttttgttaacccattttagagaagttgtttgtttcttagcagcagctgcttgctgcacagatgtgtagactgttaaggaaagcagcagctagtggcttacagaaatttccaaataattaaaaactcattcccttcaaatgtactcagcccctgtcgccttatctttctaggtgatactactaaaggaatatttttgagaatttgaagcatttcatttcataatagcaaaaatgttttcattg

SEQ ID NO: 1552 - DNA, 499 bp, Homo sapiens
  misc_feature (1)...(499): n = a,t,c or g
ggtcttagtgcctttcttcccaccatctaaataatctctccctccacagtatggctgtgacccgatccaaagacgctcctcctttcggcccccccatccccagtggaaccacattccgcaaatccgacgtcttcagagacttcttgctggccaaggtgattaacgctgagaacgccgcggaacaagtccgacaagttccacaccatggccaccaggacccgccaggagtatctcaaggacctggccgaaaactgtgtctccaacacccccatcgactccaccggcaaattcaacctcatctccctgacctccaagaagaaggaaaagacaaaagcacgggctggcgctgagcagcacagtgcaggggccatcgcctggagggtggtggccaggactacgcccagggggtggaaatcgactgcattttgggaatttccaatgagtttgtggtgctcctggacttacgcccaaggangtggtggtcaactgntactggggg

SEQ ID NO: 1553 - DNA, 1554 bp, Homo sapiens
gggagaacctgaaggtgtacatcagcagtcggcctcccctggtggtcttcatgatcagcgtaagcgccatggccatagctttcctgaccctgggctacttcttcaaaatcaaggagattaaatccccagaaatggcagaggattggaatacttttctgctacggttcaatgatttggacttgtgtgtatcagagaatgaaaccctcaagcatctcacaaacgacaccacaactccggaaagtacaatgaccagcgggcaggcccgagcttccacccagtccccccaggccctgggaggactcgggcccggtggaatatctcagtctcaatcaccctaaccctggacccactgaaacccttcggagggtattcccgcaacgtcacccatctgtactcaaccatcttagggcatcagattggactttcaggcagggaagcccacgaggagataaacatcaccttcaccctgcctacagcgtggagctcagatgactgcgccctccacggtcactgtgagcaggtggtattcacagcctgcatgaccctcacggccagccctggggtgttccccgtcactgtacagccaccgcactgtgttcctgacacgtacagcaacgccacgctctggtacaagatcttcacaactgccagagatgccaacacaaaatacgcccaagattacaatcctttctggtgttataagggggccattggaaaagtctatcatgctttaaatcccaagcttacagtgattgttccagatgatgaccgttcattaataaatttgcatctcatgcacaccagttacttcctctttgtgatggtgataacaatgttttgctatgctgttatcaagggcagacctagcaaattgcgtcagagcaatcctgaattttgtcccgagaaggtggctttggctgaagcctaattccacagctccttgttttttgagagagactgagagaaccataatccttgcctgctgaacccagcctgggcctggatgctctgtgaatacattatcttgcgatgttgggttattccagccaaagacatttcaagtgcctgtaactgatttgtacatatttataaaaatctattcagaaattggtccaataatgcacgtgctttgcccctgggtacagccagagcccttcaaccccaccttggacttgaggacctacctgatgggacgtttccacgtgtctctagagaaggattcctggatctagctggtcacgacgatgttttcaccaaggtcacaggagcattgcgtcgctgatggggttgaagtttggtttggttcttgtttcagcccaatatgtagagaacatttgaaacagtctgcacctttgatacggtattgcatttccaaagccaccaatccattttgtggattttatgtgtctgtggcttaataatcatagtaacaacaataatacctttttctccattttgcttgcaggaaacataccttaagttttttttgttttgtttttgtttttttgtttatttgttttcctttatgaagaaaaaataaaatagtcacatttt

SEQ ID NO: 1554 - DNA, 595 bp, Homo sapiens
  misc_feature (1)...(595): n = a,t,c or g
ctgaatggtgccattaaccatctgcatttgagcattttgagaaaataaacctctatttcttaaagttctgtatcagtcagggtttcccagagaggcagaacaatagggatagagagatacatagagagagatatgagagggatagagagagacacagagagagatatgagaggggnnnnnnnnnnnnnnnnnnnnnnnnnnnnnnnnnnnnnnnnnnnnnncacaggccattcataacctgggagaccttgggatgctggtggtctggctcagtacaagtccaaaagccttgggaaccaggggaaacttgatggtgtaattctcagtccaaggctgaattttcaagtctgagaacctgggggtgggatgggggagtgatagttttaagtcctggagtcccaaggttagaggatctggggtcctaatgtccatgggcagttggagaagagtgtatccctgctgcaggggagagagagaagccaattctcctttcttctgtttttattctacccaggcctccagtggattggaggtgcctgcccatattgagggcagatcttctctggctagtccacggtaactcacatgccaatct

SEQ ID NO: 1555 - DNA, 882 bp, Homo sapiens
gcggcacgagcaagaacatctcccctatccaaaaggcacccactgaggatccgcagttctctggaattatgctgagcacccagatgtgtgcaactaagccctgagcagtcgatgtggagcgcacttgaaggcacttcatttttttttaagatacactcttaggagtttacttttaacccacttcccagctcatagcacacgaggagaggcagacattttaaccttggtaagacctgacaaatgacaatagttggaccccacagcaatcattacttttgtagacagcaaagttatgctccttggcttcaggtgaagacccccagatccaggccagtggatttacaagtgagagtcagcagcactgggcatttcaggcaatagctctgaacaagccctttaccatgcgggtaggtaaaccccagaatatacagatgccccttacgatacatgggtggggagggtatgtggccgagagagcataagcttaggagacagagtggatttgaattccactgagcttttggctgtggacccatggggacgtggcatatgtctcgctgagccttagtttcctcctgcatggaatagggagagcaatagtacctgcctcattcagctaacgtgaggatctagagcagcatttgcataaatgacgcgtggggcacagagcagactcaacacagagcagcttacgttatgaggcttggcaggctgggagctcctgtcggcctctctcctcagctctgtgcccactgagctcggcacaagggttggcccatgacaggtgtttattatgtggaaataaatgagagggacaagacatttgctgatttcttcacttgtttccaactgggaattccaaatgtatctcacgttcccata

SEQ ID NO: 1556 - DNA, 798 bp, Homo sapiens
ggggccgtctgtaagaaatcattatgcactatggcttcttcctctggtctgggaagaagcggggactggctggccctcaggggatctgtaaatcccagaaaacagtatttttaacagcaagatgtcattcaacattggtggggaaggaagagaaaaaaatcaaactattccatagaactagctggccccctcactcccatgcccttcccactcagcctggggcccctccccgctccattcataaaagctgagagggttgagctaatcttcacaaattgtaatatttttgtagtatctgttagttccttcgtcagttctgcagaaccttgccctttccttttgtaatgtgaataggaagacaaaagacaaaaaaaaatccaccaccaccaaaatatccctttgtacatgtatgtgcgtgtgcgcgtgtgctttgtgtgtgtggttgtgtgttaaatcatgcagtattgtcgtaatctggtgttgcagcaatggatggtactaaatcagcacctggatgccccacccaaccccgtgggccctgcagaccccagtagggaggtatggggagagctcaggggagtgtggtttctgagggctactgtctggggacacctctgaacttactgtaccttcctctccccatgaagacacctgaatagagtctaacatgcctccttctccaacttcctaccctacaaccaacagaacaagttctaaatgttgcacgggcctaagtggccaaggggggcaaagcctaagaggctgtctggaggcttttatatgtgtctggagtagggg

SEQ ID NO: 1557 - DNA, 457 bp, Homo sapiens
tttttttttttttttttgaacattctacaagtatttatttcattgctgaccattaggttgcagcatgcaactctcaacaatgagctgcccctctccactcctatagaagctccaaatactatggtaccactatgtaggttttcagcctttcaaaggcttttattattaacatcatcattacttcagcaggagccttttagggacttaaaagcactgattatctataaaaagtaacttcatatttcatgcacaaaattcccaattggcagatttaggtccataaaagaaaggaaaaaaattattctagttatataaattatcaggaataaaatagcatttctccttgccttgttataaggaaataatatatttttccttaccaggaatcaggatagtatctttgatgatccctcagggttataaaattgcttactggttaaagttttttgccaaagat

SEQ ID NO: 1558 - DNA, 1496 bp, Homo sapiens
cgcttctctttcggagggagtgttcgccgccgccgcggccgccacctggagtttcttcagactccagatttccctgtcaaccacgaggagtccagagaggaaacgcggagcggagacaacagtacctgacgcctctttcagcccgggatcgccccagcagggatgggcgacaagatctggctgcccttccccgtgctccttctggccgctctgcctccggtgctgctgcctggggcggccggcttcacaccttccctcgatagcgacttcacctttacccttcccgccggccagaaggagtgcttctaccagcccatgcccctgaaggcctcgctggagatcgagtaccaagttttagatggagcaggattagatattgatttccatcttgcctctccagaaggcaaaaccttagtttttgaacaaagaaaatcagatggagttcacactgtagagactgaagttggtgattacatgttctgctttgacaatacattcagcaccatttctgagaaggtgattttctttgaattaatcctggataatatgggagaacaggcacaagaacaagaagattggaagaaatatattactggcacagatatattggatatgaaactggaagacatcctggaatccatcaacagcatcaagtccagactaagcaaaagtggcacatacaaactctgcttagagcatttgaagctcgtgatcgaaacatacaagaaagcaactttgatagagtcaatttctggtctatggttaatttagtggtcatggtggtggtgtcagccattcaagtttatatgctgaagagtctgtttgaagataagaggaaaagtagaacttaaaactccaaactagagtacgtaacattgaaaaatgaggcataaaaatgcaataaactgttacagtcaagaccattaatggtcttctccaaaatattttgagatataaaagtaggaaacaggtataattttaatgtgaaaattaagtcttcactttctgtgcaagtaatcctgctgatccagttgtacttaagtgtgtaacaggaatattttgcagaatataggtttaactgaatgaagccatattaataactgcattttcctaactttgaaaaattttgcaaatgtcttaggtgatttaaataaatgagtattgggcctaattgcaacaccagtctgtttttaacaggttctattacccagaacttttttgtaaatgcggcagttacaaattaactgtggaagttttcagttttaagttataaatcacctgagaattacctaatgatggattgaataaatctttagactacaaaagcccaacttttctctatttacatatgcatctctcctataatgtaaatagaataatagctttgaaatacaattaggtttttgagatttttataaccaaatacatttcagtgtaacatattagcagaaagcattagtccttggactttgcttacattcccaaaagctgacatt

SEQ ID NO: 1559 - DNA, 662 bp, Homo sapiens
gcggccgcagagttgtcgctactggagaagtccctgggactgagtaaggggaataaatacagtgctcagggcgagcgacagattccagttcttcagacaaacaatggtccaagtctaacaggattgactactatagcagctcatctagtcaagcaagccaacaaagaatatttgctggggagtactgcagaagaaaaagcaatcgttcagcagtggttagaatacagggtcactcaagtagatgggcactccagtaaaaatgacatccacacactgttgaaggatcttaattcatatcttgaagataaagtctaccttacagggtataactttacattagcagatatactattgtactatggacttcatcgctttatagtttttaatctctacttaggttgacctgacagttcaagaaaaggagaaatatcttaatgtgtctcgctggttttgtcacattcagcattatccaggcatcaggcaacatctgtctagtgttgtcttcatcaagaacagactatatactaattcccactagaagctgtccatgccatacagaagatctattaaaaatgttttaaatggaaaatgtactctagaccacaggactaatgtaaattaatatacagtcattcattatttgttggaggttgatagaattt

SEQ ID NO: 1560 - DNA, 766 bp, Homo sapiens
gtcccggtcacctgagctccgggtgacgcggctgcggtagctgcggatacaagccttccgcgggtcctgcctggcgaccccgacctcctcctgctgtctctccgctccgccaccccgaacccgccaaggtcctgtccttttcctcctgtcctttgccagcgttgggccggaccgggccgagccgggccgcccgggcgcagtctttaaccatggcgtccctcttcaagaagaaaaccgtggatgatgtaataaaggaacagaatcgagagttacgaggtacacagagggctataatcagagatcgagcagctttagagaaacaagaaaaacagctggaattagaaattaagaaaatggccaagattggtaataaggaagcttgcaaagttttagccaaacaacttgtgcatctacggaaacagaagacgagaacttttgctgtaagttcaaaagttacttctatgtctacacaaacaaaagtgatgattcccaaatgaagatggctggagcaatgtctaccacagcaaaaacaatgcaggcagttaacaagaagatggatccacaaaagacattacaaacaatgcagaatttccagaaggaaaacatgaaaatggaaatgactgaagaaatgatcaatgatacacttgatgacatctttgacggttctgatgacgaagaagaaagccaggatattgtgaatcaagttcttgatgaaattggaattgaaatttctggaaagatggccaaagctccatcagctgctcga

SEQ ID NO: 1561 - DNA, 2496 bp, Homo sapiens
  misc_feature (1)...(2496): n = a,t,c or g
tgacccccatccggccctcatggctttgtgtctggagctcttgaagcaatgttcatcatgcctagtggcgtataagaagaccccgccaccggtccctccacgcaccacttcaaagccgttcatctcagtcacagtccagagcagtactgagtctgcccaggacacctacctggacagccaggaccacaagagcgaggtgactagccagtcgggcctgagcaactcgtcggacagcctggacagcagtacccgaccgcccagcgtgacacggggtggagtcgccccagcccctgaggccccagagccacccccaaaacatgcagctctgaaaagtgaacaagggacgctgaccagctctgagtcccaccccgaggccgcccccaaaaggaaactgtcatcgataggaatacaagttgactgcattcagccagtgccaaaagaggagcccagtcccgctaccaaattccagtccatcggggttcaggtagaggacgactggcganagcagtcccctctcacagtatgtcctcccgacggacacagactcggatacccaggatgccaatgactcaagctgtaagtcatctgagaggagcctcccggactgtaccccatcaccccaactccatcagcatcgatgccggtccccgatggcccccaagattgcccagatcaagcgcaacctctcctatggagacaacagcgaccctgccctagaggcgtcctcgctgcccccacccgacccctggctcgagacctcctccaagctccccagcagagccggcacagccaggggcctgccgccgagacggctactggttcctaaagctactgcaggcagaaacagagcggctggaaggctggtgctgccagatggacaaggagaccaaagagaacaacctctctgaagaagtcttaggaaaagtcctcagtgctgtgggcagtgcccagctactgatgtcccagaaattccagcagttccggggcctctgtgagcaaaacttgaaccctgatgccaacccacgccccacagcccaggacctggcagggttctgggacctgctacagctgtccatcgaggatatcagcatgaagttcgatgaactctaccacctcaaggccaacagctggcagctggtggagacccccgagaagaggaaggaagagaagaaaccaccccctccggtcccaaagaagccagccaaatccaagccggcagtgagccgcgacaaggcctcagacgccagcgacaagcagcgccaggaggcccgcaagagactccctggcggcccaagcgggcagcttctgtgcggcagaactcagccaccgagagcgcagacagcatcgagatttatgtcccggaggcccagaccaggctctgagaccatgcaggaggaaagaaacgattttaaatcattaaaaacacaaaaactaagtgcgaacggaacagagttttctcaacctttgctatggttattctgtctagagaccctgagccaactttcaaattgacgcatacaagggctcacaatttggcttttttgggtccctcccagctttaggttatgaagattttactcacaaaaaaaatcaacaaaaatcacgaaactagaaaactttttttttcctcttgctggccgtggtggactagatagatggacgtcggcaactcccggcccagcctccatactgcggtctttttactcgttctatctgatgagaactcacactagcttgtttacaagatgacgacagtcccaagggcagccttgggcacctgccatgtccctcctttccccagctatccccgctctgaccttgattttcattcttatgtttttctcttttcccttcagagctcacacagtggtcaccattgtggcaagcggctttctgggtctcagccctctctgcggttgagggcccagaggacagagagatggacatgcgtcccctccctccccccgccaagtgctcacacacaacctcacgcgcacacacacacacgcagatggaggcgcctcactgggaggtgccccgccagccctgggcagtgtcaggcaggactcactcaccgctgagcagatgagggaagttttagtcttggcgggtggaaatgagacgaagccacagttatcacactccagactcctgcccttttattttctccagccccttcttccttcagcaaaatctaggactcccgagtggcttccagggggccgtcagtcctcagccgcgcctgtgtccggtgcccgaggggcgggcggcggtgtctgtatgtatgtgtacatatgcacatagaccttagagtgtatagttaacaaacgcccatctgctcacccatgcccacccagcgccgccgccgctggctctcggggcacctggcaggaggcgggtgtgtgaatagcatatatttttacatgtactatatctaggtgtgtgtacaagtgtgtgtaaaaatatataccttgtgtgtaagcaaaaaaaaaaaaa

SEQ ID NO: 1562 - DNA, 504 bp, Homo sapiens
gggagacatggcccttcatcttggggacctataaacccaagcggttgggacaggtagtcactaggaaggacccatcatgacacaaaaaatagaaaccactgctgcacaggtgcaaaccactgagctacccacaaagccaacaagggacacctgctctcccactcctccaaatttttttttaaaaactgtcatctttattttagttcataaatacattaatatactagtctaggtgagttttgttgggtgaattacaaatatttacattagaaatcaaaaccaacatagatctcttcaaagatatctagcttcttaatggcttgtgcactttttataccagtcttgttacttggaaactccactgcctacttgagaatggtgaaaaaagccaagtaatcttagtgctgtgactaattttcactttacagggcacttcgaaaaggcctttgggtcaaacgatcatattttcttttttgggggataggttctttgtcacccaggctg

SEQ ID NO: 1563 - DNA, 996 bp, Homo sapiens
cagaaacctgcggaaaatggtagcgatggcggctgggcccgagtgggtgtctggtgccggcagtttgggcctacggttgttgttggcgactgtgcttcaagcggtgtctgcttttggggcagagttttcatcggaggcatgcagagagttaggcttttctagcaacttgctttgcagcgtcttgtgatcttctcggacagttcaacctgcttcagctggatcctgattgcagaggatgctgtcaggaggaagcacaatttgaaaccaaaaagctgtatgcaggagctattcttgaagtttgtggatgaaaattgggaaggttccctcaagtccaagcttttgttaggagtgataaacccaaactgttcagaggactgcaaatcaagtatgtccgtggttcagaccctgtattaaagcttttggacgacaatgggaacattgctgaagaactgagcattctcaaatggaacacagacagtgtagaagaattcctgagtgaaaagttggaacgcatataaatcttgcttaaattttgtcctatccttttgttaccttatcaaatgaaatattacagcacctaggaaaataatttagttttgcttgcttccattgatcagtcttttacttgaggcattaaatatctaattaaatcgtgaaatggcagtatagtccatgatatctaaggagttggcaagcttaacaaaacccattttttataaatgtccatcctcctgcatttgttgataccactaacaaaatgctttgtaacagacttgcggttaattatgcaaatgatagtttgtgataattggtccagttttacgaacaacagatttttaaattagagaggttaacaagacagatgattactatgcctcatgtgctgtgtgctctttgaaaggaatgacagcagactacaaagcaaataagatatactgagcctcaacagattgcctgctcctcagagtctctcctatttttgtattacccagcttt

SEQ ID NO: 1564 - DNA, 107 bp, Homo sapiens
gccatgagctcttccgtgggctctgattgttggttaaaatatatgtgctcaaatacagaatcgttgttatactgtgactttttgctatgtttgtgtatgtatgaaaa

SEQ ID NO: 1565 - DNA, 1054 bp, Homo sapiens
aatgcaaaaacgtccatccgaactgcggtaaacgctgggctccctgtgaaaggggggtaatgaccctgtcccgtctgggactacgcccaccagcacggcatccctgacgagacctgcaacaactaccaggccaaggaccaggagtgtgacaagtttaaccaatgtgggacatgcaatgaattcaaagagtgccacgccatccggaactacaccctctggagggtgggagactacggctccctctctgggagggagaagatgatggcagaaatctacgcaaatggtcccatcagctgtggaataatggcaacagaaagactggctaactacaccggaggcatctatgccgaataccaggacaccacatatataaaccatgtcgtttctgtggctgggtggggcatcagtgatgggactgagtactggattgtccggaattcatggggtgaaccatggggcgagagaggctggctgaggatcgtgaccagcacctataaggatgggaagggcgccagatacaaccttgccatcgaggagcactgtacatttggggaccccatcgtttaaggccatgtcactagaagcgcagtttaagaaaaggcatggtgacccatggaccagaggggatcctatggttatgtgtgccaggctggctggcaggaactggggtggctatcaatattggatggcgaggacagcgtggtactggctgcgagtgttcctgagagttgaaagtgggatgacttatgacacttgcacagccatggctctgcctcacaatgatgcagtcagccacctggtgaagaagtgacctgcaacacaggaaacgatgggacctcagtcttcttcagcagaggacttgatattttgtatttggcaactgtgggcaataatatggcatttaagaggtgaaagagttcagacttatcaccattcttatgtcactttagaatcaagggtgggggagggagggagggagttggcagtttcaaatcgcccaagtgatgaataaagtatctggctctgcacgagaaaaaaaaaaaaaaaaaaaaaa

SEQ ID NO: 1566 - DNA, 240 bp, Homo sapiens
ggataaaaggagatgatatgcgtaaggtgctttgaacagttcctgatgcagtgagcacttagctaatatgcttactatggcaatctgattgctgggacaggaatagaattacatacatgtaaaaggattatggttggttgatatctttttcttgttttatatggggacgaagttaagaagtttagggatgaggggacaggagtttcaaatcagctcagttctgtctcattccccaaggaa

SEQ ID NO: 1567 - DNA, 1150 bp, Homo sapiens
tttttttttttttttggcaatataacatgtctattttattttaaaaaacaaaacccaaaccacctgaccccttccccaggaggctcttgacgaaactctagggaagggcctggctccagccaagcaggggacagtcagaagatgtcaacatggatgccaggctggtgggctccgcccttctccaagccccccatccaccccctttgctcctcggtgctacaggcactgccgggttgaggggacaggcagggcaggactgtgggcatgcagagcctcctggcagccagggagggctgccgcccccctgcatctggcgaggcaggcagctgtgtgcgcagtgatggagctaggaggaggaaacatgcgcagacaccccgtgttcccgcttccccacgtggccaggagagtgttcaaacacgaacaaggatggctgggcactcaggccccagcccccaacccaggagaggaagaggggggtcccgccctcctggttcttttgttcgtccttagatggatggtgttctcggtccactcggcagaaattctgcagactgaggcggaggcccgggaggagggcgtcatccgcagcgacagggctcggaccatctgcccccagcgacctccattcgctactgtcggcagatgcccagggtgccggcacctgatctggatccctggagtggagggaccctgtcttaagccacactcggtggttctgccgcccagggcaggggtggactgtaggctcccgacagcatgacaacagccgtgacagtagtccgtgccggctggcgtgccttcctttcctgcccaccagggacgccaaccagctctgcctcagcaccaggggtctcgggaggctcggccgcggcagagactgtcgatccgctgccaggcgctgtggatgaggctcaaggcatcctcgaatttcttcttgttggaggcttcctggatcgccgtgtgggggaggtccacctgatagatggttttccacccagagttcagtgcagacagcaatcggtccagttcagaagtgcagctcaggtagatgacccagggcgggaggagctgctggctgtcctgggagaactccaagacgcagtactccttgcccggctcggtggagacggcgctgatgtcgcccagcttg

SEQ ID NO: 1568 - DNA, 1224 bp, Homo sapiens
tttttttttccttttgggagtttctctttaaagtcttcagaatgcctcatactgtccatctctatgctgttaataccattcatttcctctttcggatgaggtatttcttctaccttagtaggtaattctgccacattttttacttcttctttttttaggagttggcatgtttcttgaatgtttcccaaaatacattgtaatacttcctgtgcatcatgctgtagatatccttcatacatagggttgagttccctcagtgtgttaagcagtcgccttggctgagtggcaagttcatcagtatatttctctggatttaagagaaaactagcctggagctgttcaaccgaaatgattaaggactgtaaactgcatatcaattcataacttgccaaagaatcttctttgcaatttcccttgtctttttgattggcttcatcctttagagcttctttcttccttgaaataatattaaataagtgctttactccagatttaaaaccgggacaaaaatataatacctgaagtatactattaagatagcaagtattgccgagattattcagtcccacaaatggtaacaagttttctcccttctcacagtttataggtgaagactgtgctgcaggaacaacttgatcaatttcagatgctctatattcagaagctttttcttcattttcttgagaatctgtgaaatccaaagctctcttagtttcctttttctgaaaaaactttaaggaaagtctgtttttctttgaagggctacctcttgaaagtccattactttcactaggtatgacaccaggcatttttttcttcaaatcccaaggagtgtcaagagttaatttatagaggaaagttgtaatcaccaattatatctggtcatggcccaaagcgaagtccgcggcggtgacgccggcaagtccaacccgaatgagtgtgggtgcgacaggtgagtccctgccccgagcccgccgggtccccggcccccaggaaaatctggtcggctcggccctccccgcgggggagtgaccatccgctcccaagagcgggaaccccgaccgccgcttcgtcccgccttgcaccaacaccaactacatcccgggagcggcgcccatctgcgcccgccccgggagagccaggagcgcaacaagcagcggccccgctcgccgaacgcctgaaccgctagggtctttagcactccgccaccgaggggaacttggc

SEQ ID NO: 1569 - DNA, 968 bp, Homo sapiens
  misc_feature (1)...(968): n = a,t,c or g
gactgccagcctcaccctctgcagttagcatggttggcctgatgcagggatcccgagggattactttttagaccttctttcacattcagaaaagtagtatagattcaggagaggcaagaaaattatgctgtccatagaagtcacccatgaagactgatgccaccacctgaaggctcatgattgttaaaaatgtccacgggaacctcttcgtccacaggaggtttgtctcaacacttcccatttttacggcattggcattgcaaggcatgggggaagtatctgctctttctcatgtttaaaagtgggcccagcttttctttaacttcagtccaagctgacttgtttagctgcactggaatttcttaccaaccaaatatttgcatcgagcaaagggggctgtgtgcacctccctaatggcagcgatgatggctgctgtcattcaagcccatcttcagacgtcacagtctggaagtgaaatgtccacaaacatctgtggcagaaaaggctatacggaccacccagttgtgctgcagctttacagagcaaggaagggttgtggcaaataaatgattaacctgcctcgactgtgctgagggcaacaaaggccatctcaccaaaggattattcgatgccattaaatcatcccgtgaccttcctgcttccgagtccatggcctttgcccagggcatgtactcccctgagaggccttctgcctagaaagatctatgactgggttccaaagttgaggcctaggtttttgctgggatttagatattttcaggcaccattttgacagcattcaggaaaacggttattgaccccatagactagggtaagaataaaggcaataaatttggtctgactcagaatataggagatccatatatttctctggaaaccacagtgtacactaaaatgtgaaattgaaggttttgttaaaaagnaaaagataatgagcttcatgcttt

SEQ ID NO: 1570 - DNA, 563 bp, Homo sapiens
ggatttcagtacatggatttaaaaggcaacaatccatcactggtttgtgtgtttttggttaagtttctggaagaatacaatgcttttatattggaagtataagttttgagtggcattgttgccttctaacaagctctctgggacttttaaagttttattactattattgctaatgtatgattatggtcagagactttcaacccaccccttcctgcctacccctggcttttcctcacaaagaatgtctagacaaacagcagcttagtctcctgacacctcttgtggggtgcatgttcctgctccaggtatgctgttcatgtggattcattccattcagtggccccttggggtttgcatgccagtgaagcgttaccatagaagagccagccgtttgtgttcgcttggtaggtgtaagtaatagcagcccttagccacggagtctttatgtggtttattcctgcaaggttgttttaaactgaaatagaactgctagtgtgattggttgatcagcaaaacagctgctctcattttgttttggaggaaccctggtggtttgacagcca

SEQ ID NO: 1571 - DNA, 10693 bp, Homo sapiens
acacagtggtcctccgccggctacggcgctgcgtcactggtttgcaggcgctttcctcttggaagtggcgactgctgcgggcctgagcgctggtctcacgcgcctcgggagccaggttggcggcgcgatgaggcgcagcaaggctgacgtggagcggtacatcgcctcggtgcagggctccaccccgtcgcctcgacagaagtcaatgaaaggattctattttgcaaagctgtattatgaagctaaagaatatgatcttgctaaaaaatacatatgtacttacattaatgtgcaagagagggatcccaaagctcacagatttctgggtcttctttatgaattggaagaaaacacagacaaagccgttgaatgttacaggcgttcagtggaattaaacccaacacaaaaagatcttgtgttgaagattgcagaattgctttgtaaaaatgatgttactgatggaagagcaaaatactggcttgaaagagcagccaaacttttcccaggaagtcctgcaatttataaactaaaggaacagcttctagattgtgaaggtgaagatggatggaataaactttttgacttgattcagtcagaactttatgtaagacctgatgacgtccatgtgaacatccggctagtggaggtgtatcgctcaactaaaagattgaaggatgctgtggcccactgccatgaggcagagaggaacatagctttgcgttcaagtttagaatggaattcgtgtgttgtacagacccttaaggaatatctggagtctttacagtgtttggagtctgataaaagtgactggcgagcaaccaatacagacttactgctggcctatgctaatcttatgcttcttacgctttccactagagatgtgcaggaaagtagagaattactgcaaagttttgatagtgctcttcagtctgtgaaatctttgggtggaaatgatgaactgtcagctactttcttagaaatgaaaggacatttctacatgcatgctggttctctgcttttgaagatgggtcagcatagtagtaatgttcaatggcgagctctttctgagctggctgcattgtgctatctcatagcatttcaggttccaagaccaaagattaaattaataaaaggtgaagctggacaaaatctgctggaaatgatggcctgtgaccgactgagccaatcagggcacatgttgctaaacttaagtcgtggcaagcaagattttttaaaagagattgttgaaacttttgccaacaaaagcgggcagtctgcattatatgatgctctgttttctagtcagtcacctaaggatacatcttttcttggtagcgatgatattggaaacattgatgtacgagaaccagagcttgaagatttgactagatacgatgttggtgctattcgagcacataatggtagtcttcagcaccttacttggcttggcttacagtggaattcattgcctgctttacctggaatccgaaaatggctaaaacagcttttccatcatttgccccatgaaacctcaaggcttgaaacaaatgcacctgaatcaatatgtattttagatcttgaagtatttctccttggagtagtatataccagccacttacaattaaaggagaaatgtaattctcaccacagctcctatcagccgttatgcctgccccttcctgtgtgtaaacagctttgtacagaaagacaaaaatcttggtgggatgcggtttgtactctgattcacagaaaagcagtacctggaaacgtagcaaaattgagacttctagttcagcatgaaataaacactctaagagcccaggaaaaacatggccttcaacctgctctgcttgtacattgggcagaatgccttcagaaaacgggcagcggtcttaattctttttatgatcaacgagaatacatagggagaagtgttcattattggaagaaagttttgccattgttgaagataataaaaaagaagaacagtattcctgaacctattgatcctctgtttaaacattttcatagtgtagacattcaggcatcagaaattgttgaatatgaagaagacgcacacataacttttgctatattggatgcagtaaatggaaatatagaagatgctgtgactgcttttgaatctataaaaagtgttgtttcttattggaatcttgcactgatttttcacaggaaggcagaagacattgaaaatgatgccctttctcctgaagaacaagaagaatgcaaaaattatctgagaaagaccagggactacctaataaagattatagatgacagtgattcaaatctttcagtggtcaagaaattgcctgtgcccctggagtctgtaaaagagatgcttaattcagtcatgcaggaactcgaagactatagtgaaggaggtcctctctataaaaatggttctttgcgaaatgcagattcagaaataaaacattctacaccgtctcctaccaaatattcactatcaccaagtaaaagttacaagtattctcccaaaacaccacctcgatgggcagaagatcagaattctttactgaaaatgatttgccaacaagtagaggccattaagaaagaaatgcaggagttgaaactaaatagcagtaactcagcatcccctcatcgttggcccacagagaattatggaccagactcggtgcctgatggatatcaggggtcacagacatttcatggggctccactaacagttgcaactactggcccttcagtatattatagtcagtcaccagcatataattcccagtatcttctcagaccagcagctaatgttactcccacaaagggcccagtctatggcatgaataggcttccaccccaacagcatatttatgcctatccgcaacagatgcacacaccgccagtgcaaagctcatctgcttgtatgttctctcaggagatgtatggtcctcctgcattgcgttttgagtctcctgcaacgggaattctatcgcccaggggtgatgattactttaattacaatgttcaacagacaagcacaaatccacctttgccagaaccaggatatttcacaaaacctccgattgcagctcatgcttcaagatctgcagaatctaagactatagaatttgggaaaactaattttgttcagcccatgccgggtgaaggattaaggccatctttgccaacacaagcacacacaacacagccaactccttttaaatttaactcaaatttcaaatcaaatgatggtgacttcacgttttcctcaccacaggttgtgacacagccccctcctgcagcttacagtaacagtgaaagccttttaggtctcctgacttcagataaacccttgcaaggagatggctatagtggagccaaaccaattcctggtggtcaaaccattgggcctcgaaatacattcaattttggaagcaaaaatgtgtctggaatttcatttacagaaaacatggggtcgagtcagcaaaagaattctggttttcggcgaagtgatgatatgtttactttccatggtccagggaaatcagtatttggaacacccactttagagacagcaaacaagaatcatgagacagatggaggaagtgcccatggggatgatgatgatgacggtcctcactttgagcctgtagtacctcttcctgataagattgaagtaaaaactggtgaggaagatgaagaagaattcttttgcaaccgcgcgaaattgtttcgtttcgatgtagaatccaaagaatggaaagaacgtgggattggcaatgtaaaaatactgaggcataaaacatctggtaaaattcgccttctaatgagacgagagcaagtattgaaaatctgtgcaaatcattacatcagtccagatatgaaattgacaccaaatgctggatcagacagatcttttgtatggcatgcccttgattatgcagatgagttgccaaaaccagaacaacttgctattaggttcaaaactcctgaggaagcagcactttttaaatgcaagtttgaagaagcccagagcattttaaaagccccaggaacaaatgtagccatggcgtcaaatcaggctgtcagaattgtaaaagaacccacaagtcatgataacaaggatatttgcaaatctgatgctggaaacctgaattttgaatttcaggttgcaaagaaagaagggtcttggtggcattgtaacagctgctcattaaagaatgcttcaactgctaagaaatgtgtatcatgccaaaatctaaacccaagcaataaagagctcgttggcccaccattagctgaaactgtttttactcctaaaaccagcccagagaatgttcaagatcgatttgcattggtgactccaaagaaagaaggtcactgggattgtagtatttgtttagtaagaaatgaacctactgtatctaggtgcattgcgtgtcagaatacaaaatctgctaacaaaagtggatcttcatttgttcatcaagcttcatttaaatttggccagggagatcttcctaaacctattaacagtgatttcagatctgttttttctacaaaggaaggacagtgggattgcagtgcatgtttggtacaaaatgaggggagctctacaaaatgtgctgcttgtcagaatccgagaaaacagagtctacctgctacttctattccaacacctgcctcttttaagtttggtacttcagagacaagtaaaactctaaaaagtggatttgaagacatgtttgctaagaaggaaggacagtgggattgcagttcatgcttagtgcgaaatgaagcaaatgctacaagatgtgttgcttgtcagaatccggataaaccaagtccatctacttctgttccagctcctgcctcttttaagtttggtacttcagagacaagcaaggctccaaagagcggatttgagggaatgttcactaagaaggagggacagtgggattgcagtgtgtgcttagtaagaaatgaagccagtgctaccaaatgtattgcttgtcagaatccaggtaaacaaaatcaaactacttctgcagtttcaacacctgcctcttcagagacaagcaaggctccaaagagcggatttgagggaatgttcactaagaaggagggacagtgggattgcagtgtgtgcttagtaagaaatgaagccagtgctaccaaatgtattgcttgtcagaatccaggtaaacaaaatcaaactacttctgcagtttcaacacctgcctcttcagagacaagcaaggctccaaagagcggatttgagggaatgttcactaagaaggaaggacagtgggattgcagtgtgtgcttagtaagaaatgaagccagtgctaccaaatgtattgcttgtcagtgtccaagtaaacaaaatcaaacaactgcaatttcaacacctgcctcttcggagataagcaaggctccaaagagtggatttgaaggaatgttcatcaggaaaggacagtgggattgtagtgtttgctgtgtacaaaatgagagttcttccttaaaatgtgtggcttgtgatgcctctaaaccaactcataaacctattgcagaagctccttcagctttcacactgggctcagaaatgaagttgcatgactcttctggaagtcaggtgggaacaggatttaaaagtaatttctcagaaaaagcttctaagtttggcaatacagagcaaggattcaaatttgggcatgtggatcaagaaaattcaccttcatttatgtttcagggttcttctaatacagaatttaagtcaaccaaagaaggattttccatccctgtgtctgctgatggatttaaatttggcatttcggaaccaggaaatcaagaaaagaaaagtgaaaagcctcttgaaaatgatactggcttccaggctcaggatattagtggccagaagaatggccgtggtgtgatttttggccaaacaagtagcacttttacatttgcagatgttgcaaaatcaacttcaggagaaggatttcagtttggcaaaaaagaccccaatttcaagggattttcaggtgctggagaaaaattattctcatcacaatacggtaaaatggccaataaagcaaacacttccggtgactttgagaaagatgatgatgcctataagactgaggacagcgatgacatccattttgaaccagtagttcaaatgcccgaaaaagtagaacttgtaacaggagaagaagatgaaaaagttctgtattcacagcgggtaaaactatttagatttgatgctgaggtaagtcagtggaaagaaaggggcttggggaacttaaaaattctcaaaaacgaggtcaatggcaaactaagaatgctgatgcgaagagaacaagtactaaaagtgtgtgctaatcattggataacgactacgatgaacctgaagcctctctctggatcagatagagcatggatgtggttagccagtgatttctctgatggtgatgccaaactagagcagttggcagcaaaatttaaaacaccagagctggctgaagaattcaagcagaaatttgaggaatgccagcggcttctgttagacataccacttcaaactccccataaacttgtagatactggcagagctgccaagttaatacagagagctgaagaaatgaagagtggactgaaagatttcaaaacatttttgacaaatgatcaaacaaaagtcactgaggaagaaaataagggttcaggtacaggtgcggccggtgcctcagacacaacaataaaacccaatcctgaaaacactgggcccacattagaatgggataactatgatttaagggaagatgctttggatgatagtgtcagtagtagctcagtacatgcttctccattggcaagtagccctgtgagaaaaaatcttttccgttttggtgagtcaacaacaggatttaacttcagttttaaatctgctttgagtccatctaagtctcctgccaagttgaatcagagtgggacttcagttggcactgatgaagaatctgatgttactcaagaagaagagagagatggacagtactttgaacctgttgttcctttacctgatctagttgaagtatccagtggtgaggaaaatgaacaagttgtttttagtcacagggcaaaactctacagatatgataaagatgttggtcaatggaaagaaaggggcattggtgatataaagattttacagaattatgataataagcaagttcgtatagtgatgagaagggaccaagtattaaaactttgtgccaatcacagaataactccagacatgactttgcaaaatatgaaagggacagaaagagtatggttgtggactgcatgtgattttgcagatggagaaagaaaagtagagcatttagctgttcgttttaaactacaggatgttgcagactcgtttaagaaaatttttgatgaagcaaaaacagcccaggaaaaagattctttgataacacctcatgtttctcggtcaagcactcccagagagtcaccatgtggcaaaattgctgtagctgtattagaagaaaccacaagagagaggacagatgttattcagggtgatgatgtagcagatgcaacttcagaagttgaagtgtctagcacatctgaaacaacaccaaaagcagtggtttctcctccaaagtttgtatttggttcagagtctgttaaaagcatttttagtagtgaaaaatcaaaaccatttgcattcggcaacagttcagccactgggtctttgtttggatttagttttaatgcacctttgaaaagtaacaatagtgaaactagttcagtagcccagagtggatctgaaagcaaagtggaacctaaaaaatgtgaactgtcaaagaactctgatatcgaacagtcttcagatagcaaagtcaaaaatctctttgcttcctttccaacggaagaatcttcaatcaactacacatttaaaacaccagaaaaggcaaaagagaagaaaaaacctgaagattctccctcagatgatgatgttctcattgtatatgaactaactccaaccgctgagcagaaagcccttgcaaccaaacttaaacttcctccaactttcttctgctacaagaatagaccagattatgttagtgaagaagaggaggatgatgaagatttcgaaacagctgtcaagaaacttaatggaaaactatatttggatggctcagaaaaatgtagacccttggaagaaaatacagcagataatgagaaagaatgtattattgtttgggaaaagaaaccaacagttgaagagaaggcaaaagcagatacgttaaaacttccacctacatttttttgtggagtctgtagtgatactgatgaagacaatggaaatggggaagactttcaatcagagcttcaaaaagttcaggaagctcaaaaatctcagacagaagaaataactagcacaactgacagtgtatatacaggtgggactgaagtgatggtaccttctttctgtaaatctgaagaacctgattctattaccaaatccattagttcaccatctgtttcctctgaaactatggacaaacctgtagatttgtcaactagaaaggaaattgatacagattctacaagccaaggggaaagcaagatagtttcatttggatttggaagtagcacagggctctcatttgcagacttggcttccagtaattctggagattttgcttttggttctaaagataaaaatttccaatgggcaaatactggagcagctgtgtttggaacacagtcagtcggaacccagtcagccggtaaagttggtgaagatgaagatggtagtgatgaagaagtagttcataatgaagatatccattttgaaccaatagtgtcactaccagaggtaggaagtaaaatctggagaagaagatgaagaaattttgtttaaagagagagccaaactttatagatgggatcgggatgtcagtcagtggaaggagcgcggtgttggagatataaagattctttggcatacaatgaagaattattaccggatcctaatgagaagagaccaggtttttaaagtgtgtgcaaaccacgttattactaaaacaatggaattaaagcccttaaatgtttcaaataatgctttagtttggactgcctcagattatgctgatggagaagcaaaagtagaacagcttgcagtgagatttaaaactaaagaagtagctgattgtttcaagaaaacatttgaagaatgtcagcagaatttaatgaaactccagaaaggacatgtatcactggcagcagaattatcaaaggagaccaatcctgtggtgttttttgatgtttgtgcggacggtgaacctctagggcggataactatggaattattttcaaacattgttcctcggactgctgagaacttcagagcactatgcactggagagaaaggctttggtttcaagaattccatttttcacagagtaattccagattttgtttgccaaggaggagatatcaccaaacatgatggaacaggcggacagtccatttatggagacaaatttgaagatgaaaattttgatgtgaaaccatactggtcctggtttactatccatggccaatcaaggccagaataccaataattctcaatttgttataacactgaagaaagcagaacatttggactttaagcatgtagtatttgggtttgttaaggatggcatggatactgtgaaaaagattgaatcatttggttctcccaaagggtctgtttgtcgaagaataactatcacagaatgtggacagatataaaatcattgttgttcatagaaaatttcatctgtataagcagttggattgaagcttagctattacaatttgatagttatgttcagcttttgaaaatggacgtttccgatttacaaatgtaaaattgcagcttatagctgttgtcactttttaatgtgttataattgaccttgcatggtgtgaaataaaagtttaaacactggtgtatttcaggtgtacttgtgtttatgtactcctgacgtattaaaatggaataatactaatcttgttaaaagcaatagacctcaaactattgaaggaatatgatatatgcaatttaattttaattccttttaagatatttggacttcctgcatggatatacttaccatttgaataaagggaccacaacttggataatttaattttaggtttgaaatatatttggtaatcttaactattggtgtactcatttatgcatagagactcgtttatgaatgggtagagccacagaacgtatagagttaaccaaagtgctcttctctagaatctttacacctcctgtgtggttacaagttaactttgtaagtagcgtaccttccttccttaaaatatctagcttcctgtgccctttcatagatattcgattaatttttacattttaaacaagttgactatttcctttaggggttttgtttcaaacttttctgtcatctgtctctactacctcagaaactgcagcttggttctgatgatagaaattgaatttttccttgtagttattgtgataaagtatgaatatttttagaaagtctataccatgttctttcgttaaagatttgctttatacaagattgttgcagtacctttttctggtaaattttgtagcagaaataaaatgacaattcctaag

SEQ ID NO: 1572 - DNA, 5367 bp, Homo sapiens
  misc_feature (1)...(5367): n = a,t,c or g
ggcagctcggccgactgggcccggagcggcgcggaggccgggcgctgacggtgtgtgtggaggccagtatgaagctgaaaaagcaggtgacagtgtgtggggctgccatcttctgtgtggcagtcttctcgctctacctcatgctggaccgagtgcaacacgatcccacccgacaccagaatggtgggaacttcccccggagccaaatttctgtgctgcagaaccgcattgagcagctggagcagcttttggaggagaaccatgagattatcagccatatcaaggactccgtgctggagctgacagccaacgcagagggcccgcccgccatgctgccctactacacggtcaatggctcctgggtggtgccaccggagccccggcccagcttcttctccatctccccgcaggactgccagtttgctttggggggccggggtcagaagccagagctgcagatgctcactgtgtcggaggagctgccgtttgacaacgtggatggtggtgtgtggaggcaaggcttcgacatctcctacgacccgcacgactgggatgctgaagacctgcaggtgtttgtggtgccccactctcacaatgacccaggctggatcaagacctttgacaagtactacacagagcagacccaacacatcctcaatagcatggtgtctaagctgcaggaggacccccggcggcgcttcctctgggcagaggtctccttcttcgccaagtggtgggacaacatcaatgtccaaaagagagcggcagtccgaaggctggtgggaaacgggcagctggagattgcgacaggaggctgggtgatgccagatgaggccaattcccactactttgcattgattgaccagctcatcgaaggacaccagtggctggagagaaatcttgggtgcaaccccccgctctggctgggcagtggacccctttggatacagctccaccatgccttacctgctgcgccgtgccaacctcaccagcatgctgattcagagagtgcactatgccatcaagaagcactttgctgccacccacagcctagagttcatgtggaggcagacatgggactcggactccagcacagacatcttctgtcacatgatgcccttctacagctatgacgtcccccatacctgtggcccagatcccaagatctgctgccaatttgatttcaaacgcctgcctggtgggcgcatcaactgcccttggaaggtgccaccccgggccatcacagaggccaacgtggcagagagggcagccctgcttctggaccaataccggaagaagtcccagctgttccgaagcaacgtcctcctggtgcctcttggagatgacttccgatatgacaagccccaggagtgggatgcccagttcttcaactaccaacggctctttgacttcttcaacagcaggcctaacctccatgtgcaggcccagtttggcactctttctgactattttgatgccctgtacaagaggacaggggtggagccaggggcccggcctccagggtttcctgtgctgagcggggatttcttctcctatgcggaccgggaggatcattactggacaggctattacacttcccggcccttctacaagagcttagaccgagtcctggaagcccacctgcggggggcagaggttctgtacagcctggctgcagctcacgctcgccgctctggtctggctggccggtacccactgtctgatttcaccctcctgacggaagctcggcgcacattggggctcttccagcatcacgatgccatcactggcacggccaaggaggctgtggtggtggactatggggtcaggcttctgcgctcccttgtcaacctgaagcaggtcatcattcatgcagcccactatctggtgctgggggacaaggagacctaccactttgaccctgaggcgcccttcctccaagtggatgacactcgcttaagtcacgacgccctcccagagcgcacggtgatccagctggattcctcgcccaggtttgtggtcctattcaacccactggaacaggagcgattcagcatggtgtccctgctggtcaactctccccgcgtgcgtgtcctttcggaggagggtcagcccctggccgtgcagatcagcgcacactggagctctgccaccgaggcggtccctgacgtctaccaggtgtctgtgcctgtccgcctgccagccctgggcctgggcgtgctgcagctacagctgggcctggatgggcaccgcacgctgccctcctctgtgcgcatctacctgcacggccggcagctgtccgtcagcaggcacgaagcgtttcctctccgtgtcattgactctggcaccagcgacttcgccctcagcaaccgctacatgcaggtctggttctcaggccttactgggctcctcaaggggtcagggctgtgttttttggcagagcatccgaagggtggatgaggagcacgagcagcaggtggacatgcaggtccttgtctatggcacccgtacgtccaaagacaagagtggagcctacctcttcctgcccgatggcgaggcaagccctacgtccccaaggagccccccgtgctgcgtgtcactgaaggccctttcttctcagaggtggttgcgtactatgagcacattcaccaggcggtccggctttacaatctgccaggggtggaggggctgtctctggacatatcatccctggtggacatccgggactacgtcaacaaggagctggccctgcacatccatacagacatcgacagccagggtgcagccccgacggtatctgaagaagctccccctccaggccaacttctaccccatgccagtcatggcctatatccaggacgcacagaagcgcctcacgctgcacactgcccaggccctgggtgtctctagcctcaaagatggccagctggaggtgatcttggaccggcggctgatgcaggatgacaaccggggcctaggccaagggctcaaggacaacaagagaacctgcaaccgtttccgcctcctgctagagcggcgaaccgtgggcagtgaggtccaagatagccactctaccagctacccatccctcctcagccacctgacctccatgtacctgaacgccccggcgctcgctctgcctgtagccaggatgcagctcccaggccctggtctgcgctcatttcatcctctggcttcctcactgccctgtgacttccacctgctcaacctacgtacgctccaggctgaggaggacaccctaccctcggcggagaccgcactcatcttacaccgcaagggttttgactgcggcctggaggccaagaacttgggcttcaactgcaccacaagccaaggcaaggtagccctgggcagccttttccatggcctggatgtggtattccttcagccaacctccttgacgttactgtaccctctggcctccccgtccaacagcactgacgtctatttggagcccatggagattgctacctttcgcctccgcttgggttagggcttcttgtggcctgaagagaaagttcattcacagagactgcctcttaacatgaagatcattggacaagccacacgggtatcccatcccgatctgcctcccagaactgtgacacactgggctctgccctcattttctgtttattgctgctgctgtgttttcggcgcaacccacaaacccagtgatgggtaaatagggcagacgccagtgagatcagggagagaaggcccttggtcagagtgggcagtgccagggttctgctttgggttgtgagtggacacccaactgggcacaggctcaggcacccatcctttttccaaacagggatatagaagtggtggaagcagacagaagaggtaagggaggctaagtgggtaaccaacccagcatcagggtcactgtggcaaccagcaggctctaggggaatcctgtggttatgtagagactccatgtcctggtgtgatgagcaggatcagagtgactctgggaggacaggggtggggacccagagttagcagtggggatggagcagtagaaggaatcactgtttctcctaggagtctgaaggcctcgctgctttctgtgatggctttgcagtaagtgccgcctggcctgcatgcattggctaacaggctgcagaatggcaggaaggactcgctagagattgtcatggccagagatcataggtcacttcaggtagcaagacccctggcaaactgggcacttggcctatgtactgatttgtgggatggtggcaggggtgtggggtccttcaccctgcctgaattctctttggcttctgtgctctgtatgctgctgtccccaagggctctttcttattatggcagggagtggggattggtcctactttctttctctggaaaggaaagcctccaagactccatgtgcttgggcagcttgagaaggcgttcagcaccacgcctagcaggcagaccttgaagcctcacctttagtctatctgcagaggtattccagttcctggcacagggggacctnggggcatgtagagtatatgaggaggccagtatgggctgtgccaggagcccttcatttcagcttcaattaatagggaagaatttatgatagctctatagatgctgaaaaggtatttcgtaagatttaaaatccatcccttattaaaactcttagtaaattaagtctggaaagaaacaccctaatctagataaaggtctgtttcagaaaccaacagtgatggcattctaaagagtcagacgccacaggcattcccattaaagtcagaaactagccaagggcaagctattattcagcagtgtcccggcactactaacccctgcaacaagccagatgaggaacataaggaagaattataattgtcattatttgtagacaataaaactgcctacctgtaaaacctaagaatcaactgaagacctgttaagagtattctgtaagtcaacccaatgatacacatcatgttcctgtccacatactggttttccccaaatcagctgataaattcagtgtaattccaatgagattgaaactttggaatttgacagttcctaaagtgcatttggcagagtgaatgtgtgagaacactaagaccactctgaacgatgataatgagttggggggtggactgctcgggggtgatcctgccagattcccagaggattctcacgccaccattacctcactcagtgtgacctggagggggtcagacagacgggagagtccagaaacagacccagggctacaggaatttagtatatggtaagagggatgttttaagtggggaaanaggtggattatttaataaacagtacttttagacaactagctatcaaagc

SEQ ID NO: 1573 - DNA, 640 bp, Homo sapiens
gctcataaaatggctttttcagttatttcaaaattgcaatatagtataaattaactaattataatatttttaaatagaagtgggacagagaggggaccaaacataaaatgtaatgaattatttctgctcctttattttgtcttttttttaaaagatttcctcgatcatttcaaagatgcctaaagcagatttctatgttctggaaaaaacaggactttccattcagaactcatctctgtttccaatactgttacattttcatatcatggaagccatgctgtatgccttattaaataaaacttttgcccaggatgggcagcatcaggtgctgagcatgaatcgaaatgcagtggggaagcattttgaactgatgattggtgactcccggactagtggaaaagagctagtgaagcagtttctcttcgattctatactgaaggcggatcctcgggtgttcttcccatcagataaaatagttcactacagacagatgtttttatctactgaactacaaagagtagaagagctttatgattcattattacaagctattgccttctatgaattagcagtgtttgactctcagccttagaattctgaggttaacgtgctaaagtataattattagctctaacgtaac

SEQ ID NO: 1574 - DNA, 730 bp, Homo sapiens
atttttttttttttttttgtattgcaaaatgtacagcatttattcacatacagacaaaaaggcacaattctactaaatagttcaacaaaaaaatacagctgtcctcaactagttttataaatactttcaaaaagggggtagaaataaatacaggattgggtcatgtaatataaaatagtcatctctacatatactttgatttttaactcttcatgcaccttttttttttttcaattttagctgaatggacaccaagctaggcacatagtgaaaaatcctctgtacaaggttacaaatgtaatgacaagtttgtccatttcaaaataagatttgtacacaacacataaaacccttcatttagatcttgtgtttataacctaacaaatgacattccaggcaactttacaaaagtttaactagcctacattttgacataatacattaatcataatcaaagatatttcttggtcaggatgcacaaggaaagataaagcttaaaaaaaacaaatgcaaatggttccatactaatagaacgcaagtgggtgtttgggctggttgctgcttatggccacctcatagagagttcccagcatgacatgaaactaactcacaaagctatcattatactgtcagagaaaccgtgctctatccatttgcatttcgaagcaggaataaaaagtgtggggccttttaatttttgtgtggtttggtttttggtgtggggtttttt

SEQ ID NO: 1575 - DNA, 1092 bp, Homo sapiens
  misc_feature (1)...(1092): n = a,t,c or g
tctgctgaatcatccctgctgagtcatccttgctgaggggcggtgctgagtcatccctgctgagtcatgtctgttgaggggcagtgctgagtcatccctgctgagtctgctgagtcatccctgttgaggggcaatgctgagtcatccctgctgagccatccctgctgaggggcagtgctgagtcatctctgcagagtcatgcctgttgaggggcggtgctgagtcatccctgctgagtcatccctgctgaggggcagtgctgagtcatccctgctgagtcatccctgttgaggggcagtgctgagtcatccctgctgagtcatccctgctgagggggcagtactaagccatccctgagtcatgtctgttgagcggcagtgctgagtcatccttgctgaggggcagtgctgagtcatccttgctgtgtcatcactgctaagggacagtgctgagtcatccctgctgagtcatccctgttgaggggcagtgctgagtcatccctgctgaggggcagtactgagtcatccctgctgaggggcagtactaagtcatctctgcagagtcatgcctgttgaggggcggtgctgagtcatccctgctgagtcatccctgttgaggggcagtactaagccatccctgagtcatccctgttgagcggcagtgctgagtcatccttgctgaggggcagtgctgagtcatccttgctgtgtcatccctgctaagggacagtgctgagtcatctctgcagagtcatgcctgttgaggggcggtgctgagtcatccctgctgagtcatccctgttgagaggcggtgctgagtcatccctgctgaggggcagtactaagccatccctgagtcatgtctgttgagcggcagtgctgagtcatccttgctgaggggcagtgctgagtcatccttgctgtgtcatccctgctaagggacagtgctgagtcatctctgctgagtcatccctgttgaggggcagtgcggagtcatccctgttaaggggtagtgcttaataagccctgctgaggggcagagtcatcaaancatctctgttgangggantgctgancatcccatctatnggca

SEQ ID NO: 1576 - DNA, 640 bp, Homo sapiens
  misc_feature (1)...(640): n = a,t,c or g
gggacaaagaatttccttactcggtacgttgaagttagggaatgtcaattgagagctttctatcagagcattattgcccacaatttgagttacttatcattttctcgatcccctgcccttaaaggagaaaccatttctctgtcattgcttctgtagtcacagtccccaatttttgagtagtgatcttttcttgtgtncttgtgttggccaccctaaaactctttgcattgagtaaaattctaattgccaataatcctacccattggattagacagcactctgaaccccatttgcattcagcagggggtcgcagacaacccgtcttttgttggacagttaaaatgctcagtcccaattgtcatagctttgcctgttaaacaaaggcaccctactgcgctttttgctgtgcttctggagaatcctgctgttcttggacaattaaagaacaaagtagtaattgctaattgctcacccattaatcatgaaggactaccagtcgcccttgcatttgccntgaggcagcgctgactacctgagatttaagagttcctaaattattgagtaaaatccaattaccanaantcggtagttaacaatgggcctttgcaaaaaccttgcataaaacnagtggacngaccaa

SEQ ID NO: 1577 - DNA, 402 bp, Homo sapiens
  misc_feature (1)...(402): n = a,t,c or g
taccaaatttttattatgtttaccatgtaagtgtggtgttttaaagtataaacacaataaagatcttttgacagttatgaatagtattataaattaacatttttcttgtaataaagggaacatttttgtcttggtgcttgtctttgtttcctacctttttaattgctttaaattagtgttatatttttgttcacttttttatctttttttaaatagctggggctctcagtgcacataggtatttccgagataatccttccgaattatgctgtatcattgttgatagtggatattcctttacacatatagttccttattgtagaagtaaaaagganaaaaggaaggcaattattcgggtggagttgtatttaaatttttcatgttgtttcctaaaggtttaaa

SEQ ID NO: 1578 - DNA, 438 bp, Homo sapiens
ggttcctgcccagctttccattttctaggggaatatgggggaaatttaaactattgtagtcaatagtttctattattccaatctctgctcagttagtagcattagcaaactgcctaatttgagattcctttatttccttaaccctctctcctttagagagtccagaaattaaaactactgagcagcatctggaggcgggggccagggcgaaggtataatgcaagaccgagcctcatctcctccacgaagcctccctactccatcatagaacccagagaatgtcccttcggtcatttcccctcagtatcatcattggtgtcatcgcacttaggctgagttcctacatcccacagaggcagatggtcagacccaggaggaggcattgccagctctccaggctggttgctcaagcctagagatagaggagacagatcctct

SEQ ID NO: 1579 - DNA, 367 bp, Homo sapiens
gaacagcattgcgcagtgatgaagtgattgatttaatgataaaagaatatccagccaaacatgctgagtattctgttattctacaagaaaaagaacgtcaacgaattacagaccattataaagagtattcccaaatgcaacaacagaatactcagaaagttgaagccagtaaagtgcctgagtatattaagaaagctgccaaaaaagcagcagaatttaatagcaacttaaaccgggaacgcatggaagaaagaagagcttattttgacttgcagacacatgttatccaggtacctcaagggaagtacaaagttttgccaacagagcgaacaaaggtcagttcttacccagtggctctcatccccgg

SEQ ID NO: 1580 - DNA, 411 bp, Homo sapiens
gctggaggagtgatgacagctcagcgtccccactcagtgtatctgaccatgtgtgtaagtgcacaaaaatgtggttgtagatgttgctctacattcaaaccttccaggctacactcttccatcagcatgagtcctggagagctgggggaaggtaggaagaggagccttgccttgagttcctaaaccgacccactgcagacacaggctctgattctcttacccagagatgcccatgagctgacattttactcatccctctgcctccaagaaggcctgtattatacgtgtcctcctgggggttggagatgatccctcaagtacacaaaggtcccctggcccttcatctgggaatcatatactccactctagctcccagaatctacagacctggctcctcggatctgaagccca

SEQ ID NO: 1581 - DNA, 493 bp, Homo sapiens
  misc_feature (1)...(493): n = a,t,c or g
ccagggggtgagctgtgccagatgtgccccagccctgccatgcgcttgtggacctctatgggcagtgtgagcaggtatcaaagagagtgtgtgctggggtccaccacctgccgctagtcctctaaagagctgcgagtaccatgccctttgctctcgcttccaagaactcctgctgcttcccgaagattatttcatgcctccgccaaagcgaagcctgtgctactgtgagtcttgccggaagctgcgaggagacgaggcccacaggcgcagaggggagcctccccgggaatatgcactgccctttggctggtgcaggttcaacctcagagtgaatccccgcctgggaagctgggacaatgaaccaagaagtggcacatggcatattcaacgggagcaatgttgccgctgtacggagagtgctggaccgaggggagctgagagcaggtactgcctccatncctgagctgcctnccctttgnaagggagaacctgg

SEQ ID NO: 1582 - DNA, 1466 bp, Homo sapiens
gaacgcggagggggcggagggagcccgcggcggcggcagcagctacagcgaaatggcggagaccgtggctgacacccggcggctgatcaccaagccgcagaacctgaatgacgcctacggaccccccagcaacttcctcgagatcgatgtgagcaacccgcaaacggtgggggtcggccggggccgcttcaccacttacgaaatcagggtcaagacaaatcttcctattttcaagctgaaagaatctactgttagaagaagatacagtgactttgaatggctgcgaagtgaattagaaagagagagcaaggtcgtagttcccccgctccctgggggaaagcgtttttgcgtcagcttccttttagaggagatgatggaatatttgatgacaattttattgaggaaagaaaacaagggctggagcagtttataaacaaggtcgctggtcatcctctggcacagaacgaacgttgtcttcacatgtttttacaagatgaaataatagataaaagctatactccatctaaaataagacatgcctgaaatttggcaagaaggggcaaaaacgtgactattaatgattgataagcaccagtgaagaagttctaacttttagcatgctgcacagaaactggtataacatgccttcagtatactaacactcatatgctcagttttgttttgttttggcagttgacaagaagttaatttgctttagtaaaaatccctcattccagcctttctatataaatagctctttcttgctgttttaatgtggtgcacactatagcctcacaaacctgttattccagtgtaatctgcagtgtcgtaactaaagttactggcttggtcttatttgcacagtttttgcgtcttgtttgcttcttgcatctgattaactagaatatttctctttcccccttttaatttgtgatgtcacttgaccccatttatgtgtaggagcactacaccattggtttccaatactgcacacataagatacatacttgtgtgcagaaagtatcttcctccaggcttgtaatacccttcacatggaagattaatgagggaaatctttatattctgtataaaaacaaaagcaaatttatatactaaaatcatttgtctaaaaatttaagttgttttcaaataaaaattaaaatgcatttctgatatgcactgattgtgttgcctccagctttttttgctctctatgagtgactacttaagtcacttgttgagagggattatttactaattatatacttctcattcctgtaactccattccctttaaacagtggtgatatcaaatatacttccatccattgaatggggtatttttaacaacaacaaaagtgatatactaaaaaatgtattgcttaaggcttattgaatcattttgaagcactttgtgtatttgaaaactgctttataatctcatttattaaaaggactttcaaagat

SEQ ID NO: 1583 - DNA, 1202 bp, Homo sapiens
ccagagggctggactgtgcgggcagcttagcagggacagtggacgtgcacctgacgctgacctggactgcctcagtctagaagcaggccagagagcagaggcacgtggcatcccagggcgacctcagacggccagccggttagctagttctgctgttgcttcacgagttctgagcattctctgctagcctatggaagctgcagccctcggaggacagaagtgttgtgcgcccaacagaaccctctgagacgcaagctgctcccttggctagctcatatgtggaaatagccctgtaattcgaggtaactccttccgctcgtgtccacatccctcttgttgagagctcactgaaagtcatgtgcccggggaatgttcctgtgactgttttttgtttttccttttttttttaactttgtttttgtttttttcaattaagctggaactaaagtcaggcccagccattacgctccccacgtgcagccaggtgcagcctgggcccagtcatgcctggctcatagatgaaatcccttaagcaggattgaagaccagtgaacgcccccgccttttggattttttgctcaattgaccgtcttttccagacctctttaagtcacactcttaacttagctttctctgatgtctgttgccgccattagtttttttctagagcccacactgggcccacatagctccatcccatacgggtagctgggttccagctgcgccaagggtgcagacccgccctgggcatgctggcctgtgacggagcctgaggtcacagccccctgactagcctgagaccttcctaggggctgtggctgtttccggggaggccgggaggggcagctgtgagccctgtggaggacgttgggagtaacgctgctttgctttggcaggttgaaggggcccggccaggactcggggaagggtggcctgagagcagcgatgacctctggggtcactgtcccaggagggacttcacctggaacaagagctggaggcagccgcttgcccaggaggcttgtcccctgaggcgttcgccagtgaggtgcgggctcagggcctcgagtctctcctggagctcgggctgcggtgcgccggcagcttacggggcggccagtccttgcccacaacgatgtggagccctgtgaaagtcggattcgaataaagggccacgtgtgcaccctagaaaaaaaaaaaaa

SEQ ID NO: 1584 - DNA, 418 bp, Homo sapiens
gccggatcttggcagtaaatggatgttccatcaccaacaaatcccattcagacattgtgaacctaatcaaggaagcgggaaacacagttaccctccgcatcattcctggggatgagtcctcgaatgccaccttgctgaccaatgcagagaagattgccaccatcaccaccacacacaccccttctcagcaagggacccaggagacaaggaataccaccaaaccaaagcaggaatctcaatttgagttcaaagcaccccaagcaacacaggagcaagatttttacactgtggaactggaaagaggagccaagggatttggctttagccttcgaggaggccgagagtataacatggacctctatgttctgcgcttagcagaggacggtcctgcggagaggtgtggaaagatgaggattgg

SEQ ID NO: 1585 - DNA, 958 bp, Homo sapiens
tttttttttgccattcttgtggtatttaaaaatttttttttgttctttttgtctgcagcacaaacatccccacatgagagagcggacacagggcaccgaaacaaaggcaggggtggggaggggcgcacacacgaagggaggtgtcagcccgggaccggaaatccaacacggcaaaggaaaaaaaacacaacccgtttcccaaagactaggaaaactgatctgtggggtggggggctggtaatacatagtactcggcgggacaaaagtaaaaacaaaaactgaaaaaaaaaaaaaggaaccaaaaaacccctacaaagggctatccttagaaagggggtcggtgggcagattgttttctatggggctggatttccttatacgatgggtgttctttttggcagctactggccagtgagagctgtgctttttctatacgaacctggagtgagcgtgtggcgggagtggcttagggccgccaggtggcgtctgtggtgtctgggcggccggcaggcagcagggtttgcagtggcctgtggccttctggaaagcccggcctgagcacactcctcggaccagtgcaccgcaccggagccccaggcggcagatgggccctgccccccagcaggagctccaggggctgcgccgcgaggtgggacgggggcaggccgtcggtgcagatgggtatgtttgttttgcaagaaaaagaaatatggatgaaatggtgagttttcctttttttaagctacaaagcacatgagaaatgttctgtttttcctttcaaattctaaatgtgaagactcaactaaaaccggattctacagcattctacagaaatacacagccgtcagtcactctggggtcgtaggttagacaggggcttgatacagaaaggctgtgtgtcttacaaaggccaaaaggtcatgctaccaggagatcaacgtcaacagcaaagagtccg

SEQ ID NO: 1586 - DNA, 1653 bp, Homo sapiens
gcggcgcgccgccgcagacagctggtgtcccgccggagaaggccgagtatccccgccggcggaggagcagccccagcgccaggcctcccgacgtccccgggcagcagccccaggccgcgaagtccccgtctccagttcagggcaagaagagtccgcgactcctatgcatagaaaaagtaacaactgataaagatcccaaggaagaaaaagaggaagaagacgattctgccctccctcaggaagtttccattgctgcatctagacctagccggggctggcgtagtagtaggacatctgtttctcgccatcgtgatacagagaacacccgaagctctcggtccaagaccggttcattgcagctcatttgcaagtcagaaccaaatacagaccaacttgattatgatgttggagaagagcatcagtctccaggtggcattagtagtgaagaggaagaggaggaggaagaagagatgttaatcagtgaagaggagataccattcaaagatgatccaagagatgagacctacaaaccccacttagaaagggaaaccccaaagccacggagaaaatcagggaaggtaaaagaagagaaggagaagaaggaaattaaagtggaagtagaggtggaggtgaaagaagaggagaatgaaattagagaggatgaggaacctccaaggaagagaggaagaagacgaaaagatgacaaaagtccacgtttacccaaaaggagaaaaaagcctccaatccagtatgtccgttgtgagatggaaggatgtggaactgtccttgcccatcctcgctatttgcagcaccacattaaataccagcatttgctgaagaagaaatatgtatgtccccatccctcctgtggacgactcttcaggcttcagaagcaacttctgcgacatgccaaacatcatacagatcaaagggattatatctgtgaatattgtgctcgggccttcaagagttcccacaatctggcagtgcaccggatgattcacactggcgagaagcatctacaatgtgagatctgtggatttacttgtcgacaaaaggcatctcttaattggcacatgaagaaacatgatgcagactccttctaccagttttcttgcaatatctgtggcaaaaaatttgagaagaaggacagcgtagtggcacacaaggcaaaaagccaccctgaggtgctgattgcagaagctctggctgccaatgcaggcgccctcatcaccagcacagatatcttgggcactaacccagagtccctgacgcagccttcagatggtcagggtcttcctcttcttcctgagcccttgggaaactcaacctctggagagtgcctactgttagaagctgaagggatgtcaaagtcatactgcagtgggacggaacgggtgagcctgatggctgatgggaagatctttgtgggaagcggcagcagtggaggcactgaagggctggttatgaactcagatatactcggtgctaccacagaggttctgattgaagattcagactctgccggaccttagtggacaggaagacttggggcatgggacagctcagactttgtatttaaaagttaaaaaggacaaaaaaaaaatctaaagcatttaaaatctagtgaaataaaaaaaaaaaaaaaaaaaa

SEQ ID NO: 1587 - DNA, 536 bp, Homo sapiens
tttttttttttttttttattgatatcaggtggtttattgatattgaaactccacgcccctttcaccacagaccacctgttggccataaggctatggtgccagcgatctctcccactaacagagctggccaggtcccagggcctagcaaacctcccagagtggtctctaggtatggaggaccccagaaaggggaaggggctgtgattgaagggatgctactctctgattaaccgacagtatgaccgtcacattagggtcagctacactgcagggctggggtgtgtggatatctgtgctggggtctgggctccgtggagagatgtgtaggggtaatgagaaattgatcagcaatgagaggtggactctgagccacctccctgaccctgaatcattcaagcgaggagcagaggagctcttgactgggggacggggatgtgaggatccccagggcctcagaagttgttatcaatgttccagacatccccgctaagcgcattggctgccccttgcagcgtccaggtgagcagggctagctg

SEQ ID NO: 1588 - DNA, 1033 bp, Homo sapiens
cgtcgacgcattattttcttttgcttttgtttatggacaatgttcagctgacataagcagaagttggccaaaatactgcctgtactgttaatttcctgtataattcacttaaacaaatatacaaataccataagcattatcaaataaaataactggcactagtgttataagcatattaatggacctggtagggaaaagtgatggaagaagactgcagcccatggcatttttctttttaccaaaagaaaacgctcagtagcaccataatggtaatacttaaaagaaatacataagatagaacattttaactgctatcattgaggttaacctgcttttatttaagtgaattatacaggaaattaacagtacaggcagtattttggccaacttctgcttatgtcagctgaacattgtccataaacaaaagcaaaagaaaataatgctaatcatacatggaccttttgtacttggtacaagttctgcaccgtgctttgatttcatggttggagaagatatgcatgtgttaaaaactgaggttatgtaaagttattcactaaagcctgagtgtgtctttggtaggctaatactttttcagcattattaatcacattcatgtttatctatttcctgtatttttatatataatccaaggtgaccagagaagacatggaaaacaacacagcaaaatcctcaaataactaggccattaaaacccagtcgatcccaaaggcaccaagaatcaatggggtacaaacttccccttagagaaaggtggattttttgtaatacttataacctaatgggactttattttgtagttttatgtatcttatttgttgctgtcatatgcttaattacttacctttacattttttcctctaagatggcatcaacaataaacaagatagagtaccaggtatttctatttcaaagttgtgcaaaaactgccacaatcttgctcaaagtgtctaagtatccaaatggtagcaaatgagctgcattaagctttatataaccacattgcatatgaaga

SEQ ID NO: 1589 - DNA, 1391 bp, Homo sapiens
  misc_feature (1)...(1391): n = a,t,c or g
aaaattccctataaaccaatgaaaagaaacttgtctggcaataatttccaacattttaaattctaatttttagttacaaagaaaaaggatagaatgaggcttttcaaggaattcttgctcatcccttcaattatttggcaggtaaaacagtcctagaattcagcttcctttttggttttattactattaaatagatactttcatataaatggaaacacttttcctcaaaacattaattcaaaacatactccttatattaaggattatagcaccatattttttgtatattccctatgtgtaactttttcctgttggtatgtgatatttttcatttaatatgactatctgctggtgttggggccaatagatttgtgaatattctgtgggatgtgtctatgtataggtgtatatatatatatatatatttntnnnttttttcccagctaattacctcaaatgtgtgattgtttaatatataccacactatgtttgcacagagcagggcttccattagcagtggatatttttatgtctgactttgaaaatcagtcaacacaatttcattggtgtgaattatttgttgctctttttcatattttaatggagagattcctattataaggcccatgcttcaaacataattatatctttctatatccagccatctggaaatacataggggtaagaagtatttcttgaaatgtccttgtttagtaagttagtaaaaactgggatgactagttgccaagatgtcttgtaactgcatagcagatgacacctggcatggcaagtctcattcacttcagcacaacactctgtacatttcagtctgatattctactttgccatttaaggacaccattaaaatcatagagattttcagtgacattggagtattgtaattattactttcaaaaaattatttttaataggatgattaaaccaatgagaagaaacacacataaatgatattttgcagtttatctgtattaagaaatgcttcttgccaatttctagttttagtttttggattgctacataagactttctttccatttactttatgtgtttttaaaagctgcaggtaatttttaaggtttgatggaattataatggaagccttgtataagttaaatgaaattggtaaaggagagcttactttgtctataatgcattcaggattaaaaattagatttcaaaatgaaatgtctgatttgtaaaatatttaatgttatatcagacttacataaaattttctgtgagaactcaaatgcatttgatttttaatgaatgttctgaatgaaatatgaatttttgtctttcagtctctgtagtttatctcaatatattaataaaaaggtctgttctcactgtaaaaaaaaaaaaaaaaa

SEQ ID NO: 1590 - DNA, 717 bp, Homo sapiens
tttttttcccaggtcaatagcaaggccaaggccaaggttattatttagctctgaactggtggtatcttgaatcccgagcaacgccgaacactggccactcctgggcagcagaggggggaatcccagacctcggggtatggaggaggggcccagaatcaccaggcctggggtcagcagtcctgctctggcgatggagagctcctcagcaggcggccggggagaagtcagccccacagcggggccatctcagatggtctcatcatcgctcatgtcccagatctcagcagcttgggtttcttgatgcagcaatgtaagaccagtcaagtcttctaagaaggaatgtgaagaattaaacaccttggctaggaagttaaatccttctcgttcatattgatcaagaactttggaagaacaagctgtacatttgtcaaatgccaggctgacgggaaggacattatcaaaccgtgaaagaaatccccggatctggtgaggcacaagcccaagagaggttggaggctcattcatccgatcgtcactgctgctggcaatggcatagcccccttctggatgctgcaaaacagataccatcaattccacggccagggctcctgcaatcacggccagtcctggacgactcacagtgcactgctggtccaaggtccggtctctggttgaatctcctggggccaccacatcattgcagaagtagcagccaag

SEQ ID NO: 1591 - DNA, 1437 bp, Homo sapiens
gaaatgtaagtatacagattttaatttatttttaagaataattgtatattttaaaaacaggacacgtactgtatgagtaaacagcgtggctaacaccaagtccacactggtaagcttttgagaaccatttacactatgttgacagtagtactgccgcaagcaaacagccggagaataaataatagtgcttcaagaagagtagtgattgagaggataggtaaagagggcgcctcatcgtggaagctagagcaggaacacctccccagtagtgacatgtgcaaagttccagatctccacgacaaagacagctcaacccactggaacaaacagactcccaatgtgggctgggcaactgcgggggtagaagaactcaggcaaagtaggcacaggaatgggggagatgagagccaagggacaaacgccgagaaagcgttccgacaagcatgtgtgttcatacatgcgtacccccaacaaagggcaatgccactgtgtaacagaactgaacacaatttaacaaaagctgctcccagccttcctgtcacctctttggcagtagggcaggcccatctcaacttcggacacacaaagacattctcttcaggaggaaggctgtcctgtgtggtggggacaaggcttcaggtcagagcaaagctatgatagctacagcattaattgaacatgcctaaacaaaaaagatgttaattactagttacaggtatacatgccaaaattacccccagggatgggcatagtcaatcattttcctacagtggtgaaataaaacaagctttgatcatgcttcagcaagtagaattatgtggtagagaagtcaggcccccatatgctaaaatttgcacttcttgcccataaactttttcatgtatataagtcaaaaccaagtctcctaggaccactaaacctatgatgggctttcaactgtaacactcattcacatctttaagttaggcccatggtcatggaacctggccaaggtttcaagcacgcctaagctgaagaaaaactaaagtcacccccatataattaggtccagtctaggcacaggaagccacagctggttgactgatcagggcttctcaggactggatgttggttgaattgaggattccagaagtagcatcagatttggaagcctttgaaagttctcgctgttgaaaaataaataacatcagtggccatactgcctctcttacacatggcccacccttctaagtttggttaagtgtcagcaaaaggtcccttgaaggtagtttctctgagatccctagcctgcaataggctgcgttaggagtaaaaggtgaggaactctgagcaccattctattagtcacagacagagtgcatgtgcacgcatgcccgtgacccctttttcctcagccagtccattctgttacacctcacagaagagaaatccttcata

SEQ ID NO: 1592 - DNA, 471 bp, Homo sapiens
caaggcttgctttatactttgttatggaagctccagaatagtttttattctgagactaaattagtcccactactcttcacactggctggtgggaatacaaatcatgaattttgtgaattattcagtcaattgctttctgaaggttccatcttgggctttgaggaacttcatctcattcatgcacagattactatatatacaaaaaaccaaggggctgtctctgtagagagttccagccttttcagcactttgccttactcttctcagactgtcatctctgtctctagtcagtaaggttgccagtttcagttttggttctctttcccttgctgtagcctagaaactgtgcctaagcagtaagccagggcaactgtagggatcaccttggttttttcccttctcttagagataacagtcccatgttgcctgttgttcaatgtcaaaaactgtggtttcatatattttatctag

SEQ ID NO: 1593 - DNA, 667 bp, Homo sapiens
acattctcttggactgccagggacacgtggtgctgacggattttggcctctgcaaggaaggtgtagagcctgaagacaccacatccacattctgtggtacccctgagtacttggcacctgaagtgcttctggaaagagccttatgatcgagcagtggactggtggtgcttgggggcagtcctctacgagatgctccatggcctgccgcccttctacagccaagatgtatcccagatgtatgagaacattctgcaccagccgctacagatccccggatgccggacagtggccgcctgtgacctcctgcaaagccttctccacaaggaccagaggcagcggctgggctccaaagcagactttctttgagattaagaaaccatgtattcttcagccccataaactgggatgacctgtaccacaagaggctaactccacccttcaacccaaatgtgacaggacctgctgacttgaagcattttgacccagagttcacccaggaagctgtgtccaagtccattggctgtacccctgacactgtggccagcagctctggggcctcaagtgcattcctgggattttcttatgcgccagaggatgatgacatcttggattgctagaagagaaggacctgtgaaactactgaggccagctggtattagtaaggaat

SEQ ID NO: 1594 - DNA, 342 bp, Homo sapiens
tgttgcttcagatatcctaaagaaggatattgtaggaggtggaacgtttctggtgaaagtaactatacagtctttttaatcgttgtgtttgggttctgccctgcatttaggtattatcctgcttggtacagatcgcttcagtcagaagatccctgtttaacaatgcagagagggccaagtttctctctcatcttgttgatggtgttaaacgaatactggaaaacccacaggtaagtttatctgagaatttacatatgtataggattagtgtatggcccagctgttatgagtcagaaggaaatcccatccccaaggccccagtaaacaattcagtctgttctt

SEQ ID NO: 1595 - DNA, 1012 bp, Homo sapiens
  misc_feature (1)...(1012): n = a,t,c or g
aaggccatcccggcagattcacaaaggggacatcacattggtgcctaccataaatggcactctgcccatcagatctcatcacagatcgtctccatcttcatctcctaccttagaaagagggcagatgggcagccggcagagtcacaacagtcaccagtcactcaacagtttggtgacaatctcatcaaaccacgtgccagagaatttctcattagaactcacccacgccactcctgctgttgaggtctctcagcttctttcaatgcttcaccaggggcaatatcagccaagaccaagttttcgaggaaacaaatattccaggagctacagatatgcccttcaagacatggacaaatttagcttgaaagacagtggccgtggtgacagtgaggcaggagacagtgattatgatttggggcgagattctccaatagataggctgctgggtgaaggattcagcgacctgtttctcacagatggaagaattccagcagctatgagactctgcacggaggagtgcagggtcctgggacactctgaccagtgctggatgccaccactgccctcaccgtcttctgattataggagtaacatgttcattccaggggaagaattcccaacgcaaccccagcagcagcatccacatcagagtcttgaggatgacgctcagcctgcagattccggtgaaaagaagaagagtttttccacctttggaaaggactccccaaacgatgaggacactggggataccagcacatcatctctgctctcggaaatgagcagtgtgttccagcgtctcttaccgccttccctggacacctattctgaatgcagtgaggtggatcggtccaactccctggagcgcaggaagggacccttgccanccaaaactgtgggttacccacagggggtagcggcatgggcagccagtacgcattttcaaaatcccaccaccaactgtgggccgccacttggaactcactccagtgtgcagccttcttcaaaatggctg

SEQ ID NO: 1596 - DNA, 329 bp, Homo sapiens
gctgtatgtcagtggcaggtggtacgaaacagaagaggacactggccaccagaagaggggaagcaagagtgcgctagcacagtcttcagggagtagagagccactgatttaaaatgcaagtagccaaaaagacagcacccttttcagtcacttttgtagaagagtgaaagtctaccttaagcagttacctgggcttcaagttgcaaactgaccttctgtcatgaagatgtgaaaagcttattttgtccttgaatataaccagtttagcatacatggatggcctccccaatgaccaggtgaatttaggatgaactatggcatggtgctgt

SEQ ID NO: 1597 - DNA, 765 bp, Homo sapiens
aatggctgcttccaagacccagggggctgtcgcccgaatgcaggaagaccgtgatgggagctgcagcacagtcgggggtgtaggttatggggacagtaaggattgtatcctggagccgctttccctgccagaaagtccaggtggcaccaccactttagaaggttctccatctgtgccttgtattttctgtgaagaacattttcctgtggctgaacaagacaaacttctgaagcacatgattattgagcataagattgtcatagctgatgtcaagttggttgctgatttccaaaggtacattttatattggaggaaaaggttcactgaacagcccatcacagatttttgtagtgtaataagaattaattccactgctccatttgaagaacaagagaattattttttgttatgtgacgttttaccagaagatagaattcttagagaagagcttcagaaacagagactgagagaaattctggaacaacagcagcaagaacgaaatgataccaattttcatggcgtttgtatgttttgcaatgaagaattccttggaaacagatctgttattttgaaccacatggccagagaacatgctttcaacattggattgccagaccaacattgtaaaatgcaatgaatttttgtgtacattacagaaaaagcttgacaatttgcagtgcttgtactgtgagaagaccttcagggacaaaaatacacttaaagatcccatgaggaaaaaacagcatcgtaagattaatcctaaga

SEQ ID NO: 1598 - DNA, 226 bp, Homo sapiens
gaggttccttatgagacacctgggggactccaaacagccggaatccatctgcccactggtccggagacagggatcctccgcctccttccagggttgatggctcaggaggccttctctgcaggggaccaggacacaggaaagccaggaagagatgagctgggaagggagctgttgggggccattctggttttaaaaataaagcaggactttcgttgcttgttataaa

SEQ ID NO: 1599 - DNA, 515 bp, Homo sapiens
  misc_feature (1)...(515): n = a,t,c or g
taaaatttgaanccttnggaacaacnnnnnnnnnnnnnnnnnnnnnnnnnnnnnnnnnnnnnnnnnnnnnnnnnnnnnnnnnnnnnnnnnnnggcacgaggagagctagcaccatgagctttaccctgtaataattttctattgccccaagttattatgataaatttagcagcttaacacacccacatttattatttcacattttccatgagccagaagtctggcacagcatggctcagctgattcctttactccaagtctgacaatactgaaaccatcctgttgacagggctgcattcctttctggaggctctgaagaagaatccacnnnnnnnnnnnnnnnnnnnnnnnnnnnnnnnnnnnnnnnnnnnnnnnnnnnnnnnnnnnnnnnnnnnnnnnnnnnnnnnnnnnnnnnnnnnnnnnnnnnnnnnnnnnnnnnnnnnnnnnnnnnnnnnnnnnnnnnnnnnnnnnnnnnnnnnnnnnnnnnnnnnnnnnnagaatccattttcaagcac

SEQ ID NO: 1600 - DNA, 517 bp, Homo sapiens
ggcttctgacccccagaagtcctaccttttcccctgctcagtccttatctattttaggcatttagggaaaacaccctaatcagctgctggtggctgagatccaagagaaactcagcttcctctttagtgggtgcatcagggttggggctccttaggagccacctggcatatggcagccccccaaacaccttttcagggggtagtttgcatcgtcttccccttcttgcttctggctgcaaagtggttcctatcacctctcctcacacccttaagttctcaaggttactatgggctactcctgttgcggtttaggtttggttgttgacttgggccagaggttgccagtttgtgggatgtgtgtgtgggctgcccatggcctggaggctggcacccacccatgttggttgtgggcaagtgttctctggacttgattaagggcaaaaacgaggcagggatttttcaaatttggccttaactgttcacaggggcctcagctgggttgtctgctcttttcctt

SEQ ID NO: 1601 - DNA, 444 bp, Homo sapiens
  misc_feature (1)...(444): n = a,t,c or g
tttggnctntggananccnnnnnnnnnnnnnnnnnnnnnnnnnnnnnnnnnnnnnnnnnnnnnnnnnnnnnnnnnnnnnnnnnnggcacgagggagagaaaaggcagtacattagcttggctaatgttataataatggctctgttgccctgtggcgtcatattccatcttgctgacctggccctcctggattgggcaggctgtatgattgggcttaaaacattcaaaatgaaatgtggtagccagtacagtggagattggtcgccagcgggggggttagataaagaaaaagcccaggtttatttaaccatgtaggctgtctgactattaataaatgtaaatgttttctgggctgatatatacagaatggaagtactcacattgaaaaagttgatcacgtgcagaataaagtcagtcttgcgccttcgtaagggccagtaaaatc

SEQ ID NO: 1602 - DNA, 1343 bp, Homo sapiens
  misc_feature (1)...(1343): n = a,t,c or g
atcccttgaggtgatggatatatttaatatcttgactgtgccagtgatatcatgggtgtatgcatatttccaaaatcatgaaatcgtatatgttaaacactttgtatgacagatgcatccgacagcattaactcaagcataccctgagaatgactgtatggtctaagaagaatatgtgttcagagtctaagctaaggaatccgggaatggccaacccagagagattcacttcttatctgtgaaggacacttgaactccctgcctgtccgttggaactcaggatgtgcaaggaaccaaggccttttattttgggttaaatggaggttgctaagtggagagtgctaagtagaaatgttatataaactacatactctttacaaatagtagcggtcctgtccagcccactgccactggaccacatctgtatttaagtcctaaataaaccctatgtcccattcactggctctgggtctcttcttggacaaggcgccatccctgttggaatcaatagggctccagccatgacacatgtgcaggattttttaaattatatcaattatatctcaataaagctgttgaaatttttaaagggcctgacctgtcctggaatagggaaaaacttaatgtgacaaaaatgtaggttatagtgaagggaacaggaaatggtactgggaccatttttactccagctaaaaaatttgaatttaagaaatttggatatagataggaaggagctaatgttaagcaggaagtaagttgataagagttttctgttaaatgtgatggcaaagccggtaggtgagtatgggctccagtgggacagaacttgtggcagagaaaccaggtcaaaagttaaagttggatttggtgagtaattaaagagagtagtagcatttccaagacagaaattaatgagctttgcttacatgaaaagattaagaggataagcttaagaacaataagtaccataaaaatgggtggcaatgatgatacattaggggtggaggacctagggtcataaggttgcccgtggcgacttggagtgaagtgttgagatgatatgcccatttcatggggagaagtagaaagaacagaaaaaccacttttactttagttctggtgtaactatgaagaaaaaaaagcctaattgaggacaagaatagacctcgtttctatgggcaacaggcatattctgctccctatttcattatttcgcttaaaaaacacttggtgaagacttgatgcagattgtcctcttggaatctctgatcctggatgtttattttaagtgggcagagtggtgggcttttccatggtatatagtcagaatcctttttnttttt

SEQ ID NO: 1603 - DNA, 737 bp, Homo sapiens
gtaaaagaggtctagatgtggatggcatttatcgggtgagcgggaacttggcagtggtccagaagcttcgctttctggtggacagagagcgtgcggtcacctccgatgggaggtatgtgttcccagaacagccaggacaagaaggtcggttagatttggacagtactgagtgggatgacattcatgtggtcaccggagccctgaagctttttctccgggagctgccccagcctctggtgccaccactgctgctgccccatttccgtgctgcccttgggtgatagcacactcagataagaatcgcatgacaccccacaacctgggaattgtgtttggaccaaccctgtttcggccagagcaggagacatctgacccagcagcccatgctctctacccagggcagctggtccagctgatgctcaccaacttcaccagcctcttcccctgatgcagggaaggaagaagagaaaacatatttccggtcatctctggtggtgagaggctggtgttctgttttgaggatatccctttaaatctcccaaatgactgtctctatcttcatgagtgtgacttgaggtgttgggatgggtgagggagcttctctaaagaggaaagtgagtggattaacccctgcttctcttcttgttccctgttatcattcctccccaacataataatacataaagtggcatggtatttttaaaaaaaaaaaaaaaaaaagatctttaattaaagcg

SEQ ID NO: 1604 - DNA, 530 bp, Homo sapiens
gcggcggggtggaaagctaaggcctttgaagacctgggaccccgtagtttcgggagagggtgaggggtgaatggtgctgaggtgcgaggagagggaaggacagtaaagagcaggtgggcaggagggtctccgactccagagacctgagcttttggggcgcgggtgggagcgcgggggaaccctcaagacggctttcttttggcgactgagggtttttctgccacaggaagctgggccgggctgctgtgcctgggaggagggaaggaggaatgagaaagcggtgacggtccctgccccccctcgccaggtgactgtcccacccatttagttgaatgtagcggccagagaggcactcgcggcagcccgtacgggtgggacctctcggtgtccttcgggaaacaggaggagcaagttcgactccagcgagggaaaacggaggtgggagactgaaccatctccacatctagttgcccaggcaaggagtttatttttcacatgtagttacagagaaaccatagccactttttggg

SEQ ID NO: 1605 - DNA, 707 bp, Homo sapiens
gcacctacaccttgggcttccgcaatgaattccagaatctactcctggccatcatgctctcggccactttaaccattcccatctggcagtggttcttgacccggtttggcaagaagacagctgtatatgttgggatctcatcaggcagtgccatttctcatcttgggtggccctcatggagagtaacctcatcattacatatgcggtagctgtggcagctggcatcagtgtggcagctgccttcttactaccctggtccatgctgcctgatgtcattgacgacttccatctgaagcagccccacttccatggaaccgagcccatcttcttctccttctatgtcttcttcaccaagtttgcctctggagtgtcactgggcatttctaccctcagtctggactttgcagggtaccagacccgtggctggctcgcagccggaacgtgtcaagtttacactgaacatgctcgtgaccatggctcccatagttctcatcctgctgggcctgctgctcttcaaaatgtaccccattgatgaggagaggcggcggcagaataagaagggccctggcaggcactgagggacgaggcccaacagctctggctgcttcagaaacagactccacagagctggctagcatcctctagggcccgccacgttgcccgaaggccacccatgcagaaggccacagaagggattcaggacctgt

SEQ ID NO: 1606 - DNA, 284 bp, Homo sapiens
  misc_feature (1)...(284): n = a,t,c or g
ccctttgaagaaatgtcctattcggggctggcctgcaggggcctcatgccctgtaaattgtagtgctttgagagtgcaagggaaggaggatcgtttgagcccagggagttcaaggacccagcctgggcaacaaagcaggatcctgtctcctacaacaattttttttttttaaaaccaactaactgggtgtggtggcacnacccgttgtcccaagctactttaaangnaaggggggaggatngcttgaaacngggangtgctgtgagccttgattgtaccaccgc

SEQ ID NO: 1607 - DNA, 1237 bp, Homo sapiens
tttttttttttttttttttaagagtagttaaaatgtgtttattcatttacaaacccagtaacatgagaagaaactcagtggaaaccttgcttggtggagacagtgcacagtgttagtgccacattcacaggggcagaaatgctcggtcaccctgtgcacccaaagtcacccaggatctctagaaaagatcccacttactgaagtgcctcggatgtcttcagggccagattgtaactacacaggaacagggaagggctaagctgaactgcacactgacaaacacaaacgatgagtcacaggactctacagtagttacaatggcatttttatatgtcccaagtgttgactggagagtaaagtgttaactgagctgctagaacacccttcactgaaagagctttctaccccacgcccattgttccgaagaaggagaggctatgtggggcggatgggaacccacacaccgagatgaacttttctctttcttccaatctgcacccaccatctgacattctggagtgtaaggcactagaacctggcttagagaatagtggggctctaagctccagttcttggtgtgcaaaggaaattctgacatacatcttttgaaagagatgctaaaaaaccctccctatctcctgtaatttctgtctttgacagacaggaaaataagaaggcagaagatggtctgcaaaggataaaaacaggtgcatctaagaatgagaaaaatggctcatgaagaaatgtgtaactctccaagagatgcagacactctgctcagagaagtcaagaaccataaacaactcttcatgtttcatggacaaagggaaggcaaaggcatacaaaaatactcagttgtcttgaaaagtgtactggtagtgatcagggctacaaaggcgagccctgtactgacaatggaggagccttacaactcagcaccttaaattgttggcctgaagtggtggcggggagggaggcgctgacggagagacccatggctcaccacttattgcgtgtacacaaggcctggggcaagcctcacaagtctaccatttcttccactcaactgtgcttctcctgaatccatgtgcctgaaatgacatatgcaaggtgaacattctttatactgtgttaatactgcttatatcaatgttcgtgaggggtgtgtgggggatggggtgcagcaggaaaattagaatggcaggaggttcttatttattattaagcacttgttgac

SEQ ID NO: 1608 - DNA, 560 bp, Homo sapiens
ggagacgcatccagcaggacgtttaggggatcagccttctataggattggctcagacactggagaagttagggtttgtggtgggaaggttgaagactgggactccaccccgaattgccaaagagtccattaatttcagtattctaaacaagcatataccggacaatccatccataccattcagctttaccaatgagacagtatggattaagccagaagatcagctgccatgttacttgactcacaccaaccctagagtggatgagattgtccttaagaaccttcaccttaatagtcatgttaaagaaacgacaagaggacctcgatactgtccctccattgaatcaaaagttttgcgttttccaaaccgtctacatcaggtttggttggaacctgaaggaatggattctgaccttatctacccacaggggttatctatgacgctaccagctgagttacaagagaaaatgatcacatgcatcagaggcttggagaaagctaaagtgattcagccaggtaaagaagatcacaagtgcccttcagtataaggtcagcattgtt

SEQ ID NO: 1609 - DNA, 550 bp, Homo sapiens
accaattctccagacctggacacccagtccttgtcccacagcagcgggaccgacagagaccctctccaaaggatggcaggggacagctttcactcacaatacaagatctatccgtatgactccctcatcgtcacaaaccgaattcgcgtgaaactgcccaaagacgtggaccggacgagactggagagacacttgtcgcccgaggagttccaggaagtgtttgggatgagcatcgaggagtttgaccgcctggccctctggaagaggaatgaccttaagaagaaagcccttttgttctgacggctgccagcctgccccactggtgtgtgccgggcgccgaggccaggggcccctggcgagaaccgcacacacccctcccacacaccttgctctggcttctctgtgtccatggggtgggcgggagggggtcccccagcaggtgcggcccctgcacctgccggcgacactcctgccggtagtttagggccgagacggctagcttcacgccacccttccccgctgtggcttggtgtcagggagaggctgtaaa

SEQ ID NO: 1610 - DNA, 505 bp, Homo sapiens
gacctaatatggccccatgtccactcagatacccccactcccacactgcctgtcatcccccttgatggagaataacctgcctttagtgttacgtgaaggaagattcagataaatactttgaatgctgaaagacaggaatgcgggacctagtttggtatggggtaccctgtaccgatgctttagcaagggaccagcagacttgttgccttgaggcagcttcagggcagacctcagaggcaactggatttacttgagaaccttcttgctttctgtttcttgcagctgcagctgttggacttgtgccccaggagcacgttcctctatggccacagtcctgggagtcctctgctcctctctcctccctactcccaaactccagacagcttggttagggcccttagccaagcctaactgacctttgagtacttcagcctcttagcatttcccagcttcttcccagaatgacatttgccaaccaaatagcacaagggaaggaagagtacaa

SEQ ID NO: 1611 - DNA, 246 bp, Homo sapiens
  misc_feature (1)...(246): n = a,t,c or g
gtatatagtaccagacggtggaaatctcatttatttattcacatgcttcacaattaaaacaatctgatcactttaagtgactcaaaattacacgagccatttattacacatgattaagtgacgtaactgtagctagtaagcatgtgaagaccctgtaagcnnnnnnnnnnnnnnnnnnnnnnnnnnnnnnnnnnnnnnnnnnnnnnnnnnnnnnnnnnnnnnnnnnnnnnnnnnnnnnnnntagga

SEQ ID NO: 1612 - DNA, 1738 bp, Homo sapiens
ttttttttttttttccagttagaaaacgttttatggacacggaacgctccactgtaacgggcaggcagaacacactcctttcccaggctcatcaattaaacagaaaacaggggagctctcctcaccccagcctggccctgtgctccccaatggcccctgcgaggcccctaccatggcctgcctgggagacacaaactatgacaggaacacactggactgatacagaatgaggccagacacacccatgcctgtgcctcccaagagcgaccccaggacagtggggcagacagaggtgtctacactggcagaaacaagggctggagccacacgtgatgctcggacacaaacggcacgcagctctgcagcctggccacacacccttcgcgtatgactccactcctcagggttcacggggctgtgtacagagactctctctgctgacacgatggccacacgcccttcgtgtatgactccactcctcagggttcacggggctgtgtacagagactctctctgctgacacgatgggccatatggccttcgcgtatgactccactcctcagggttcgtggggcttggagactctgctgacatgataccacagacaattcattacctccgccgcggctgcttcccgcatgccaaaggggacaggatcaaagtccttgtctgatgacaaaaactctacacgtgcaaaataaaactaaaaaaataaaataaaagagctgaaggtggtctagagttaggtcttggcagatggcgcaggctctggagactgaagaaactcataggggtcgtgggtgacgtctggctgctccccgacactcaggcgagaagggcttcccaggtggtgctggtccctctcggaggcgttggacagggagctgaggttggacgacggccgagagccgccgcgctccgcctgtgcttcgtgcaggtcctgcaggagcttcgtcgtctcatccaagttcaaatggctgtcgtcagggtccagctccttcttcaccttccccagagagctgagcatggagatatccacagaaacgtcgggataggacttcatcgacatgaactccagaacagagctgctgctgtctcctagggtgtcccaaccttggcttcatctggaggcttcatgggaacatttcttctctgcttcagctggaagagcgtcctagagtggtctccgcctgtgatctggtccaggaggtcgtccaccactttcttgctgtagctcccagcatccttcacaaactcctgcaggctcagcgcacactgcacgcctgtctcatctccgtaggctgagtagagcagctccatctcgtccgacttcaagtcgccaaatactgaattattctgcatcgaaagcgcagtagtggcactggagagaaaggtgactttgtttcttctctcgtctttgaagcccagcgtggtgaagcctgggagtagcttactggagagcgagctcaagtccaccgggtgggtctcctcctcatcagcgtccggctcggccgtgttgaccacgctgtagagcaggctcccgtccccgttcctcttcagatagcccatcttgccgcctgggaggaaccggttgatcctgtcccgagcttcgtcagctgcgtgctccaccagcgccagcacgtgctcctctgcggtactgtccgtcaagctgcaggcattcccttcaggctcaaacatgcagctgataacttctctactcggctttttggatttcttc

SEQ ID NO: 1613 - DNA, 475 bp, Homo sapiens
  misc_feature (1)...(475): n = a,t,c or g
gagtnnntnnccctttganaccttttgnatgncntcnnnnnnnnnnnnnnnnnnnnnnnnnnnnnnnnnnnnnnnnnnnnnnnnnnggcacgaggaagatgcttaacagaagtcagtcattgaatgaatgaatgaatgaatgaatgaatgaatgaagagatgccaaaggccctgctcagaggtgctgctcagatgttccagtggcaagctcctaaaatctgcaacactctcggcaagtactgatttaaggaagcagggataagttgcctgaccaggaaggccagggtggatgtggggaagcagagggcttgactgcctctctgcccctaggaaataccactgggccagatggggcagctgctgtgacaccactgatgtccccggcagggagccgctttttccagcatcccagaaactgcctgaactgtgctgtaggcatgaatcccactccctgacaccctcctctgctccactg

SEQ ID NO: 1614 - DNA, 2264 bp, Homo sapiens
atgaatgcccctcgcttttctaaggccatgtgaaaatcacggcactgccttagccttgtgtcatctgctttttcgttctgcgatatgcccagttcccaaatcaattataggtacctgtttaggagagaggaagattttacctctcaaagggtgagatttgaaatttacactaaaaagacaactttacatttaatgcttcacttaatgagacattctttttttataagtctatttttctactcagtttcagaacactaatctgattttcactctgatttttaacgtttctttaaatatttataatgtagcttctttcaaaatattttcatgaaaaattacttttattataccattatgtgcatgttattggtagcaggcatagtttattatttagtactgaaacatgctcttttacctaacagtaaacaagtatgttttgatatatatctgttaatatgcttatagtggtaagaaatggacttgaggtcccaggagatttcattttattcaccctggtcagatacaataaaggctatgagtataaatacataacttcctaaccaggtgtagggcatgttcatgaatatcaaatcttttgatgctggacccaagagaggaaaagttgtagctaaatgttgatttacttataactagacgtctatgtgagaaaatatatgtatacatatatatgatatgcagaagtcactttttttatcaggctttattctccttacaaagccacagtttaactgtctgcaacagttggtttatgttaatgatagacaaatacccagtgtttgttactttttccaactaccactgtaatgataatctttctcacgtatatacatgcaacttcttggcttcatttccatgaagctgtttcaatatattcagtatactttgtccttaatgctgcttctgttaacagtgatctctttctttttttcattcttatatcttcattagttcatcataaatctgtccagttgaggcctcaggaccacggcatgatttcatgactccgaagtattttacagaaacattttttaaataagggaaatattttatataccagatggttcacaagtgatggctcatagctagttttttttttcttctaaaaaatgtcaggtttttaaaatcatttaccttattaaaatgaaaagtgccatacttaacttttaaaggaaagacctgacttgctttttctctatttagactgtttttgtactttactaatctttaaactatcaggaaaaaaaccaaaactttataccaatgatttagtaattttgaggcatagggtagcttacgtagtgggaggatgtgccaaatattctcttcaaatgccaccttctcaatttataactaaaatagtgttatctgactaattcctctggaattttgatgtaagatctatatagggcccccaaaatgatcgtagtacatgccagtcatttctcagtgaaataaatacaataccagagtacattatgggttttattgctttcttttatggtagacctgttaatggggaaaaaatacatcaaatcaaatagaatcttatatctgtatgttaaaatagagcacttacctggaagtcagtggcctggatcatagccctggatcatttcccagtctgtcctgtgctgtgtgaccttggacaaggcgcttcatctctctgggcctctatttctccatttgtaaaacaagtggctgcagtagatgatggctgagagcccttcctgttcccagatgccttggtccaaagaccccacccctctgctggtcctgccaacgtgttggtgctataagctgcttcagatataaaattggtttatctataatgtttgttcatttaatagcttctaaaaggcctttttgttatacagtgctttttttctagttttatggacttgattactgtaataatgtcttgtttttagccatgtaactacaaacagatattctcttgatgtccttagtaaatttgcatttgatatatcattgatgagattttgttgttatgtaatattctttggctacgcatctgtccagcatcttattaaccataatactgtgatcattatttggaaatatgtcctatggaaagaataaaagcatgtacttcacagctagcatgttcacagatttgaaagaagtttcattaaaagcaccattgctttctgtactgcgtcagtgcctcattgtatcatcctacttgtgttttgctcaataaatgaataaaagaccaaaaaaaa

SEQ ID NO: 1615 - DNA, 976 bp, Homo sapiens
  misc_feature (1)...(976): n = a,t,c or g
ctagtggaacccaaaaagtgttaattggaagccttacgccgtgggagatgtggagaaaatggctctggtgaaactggcaaagcttcatgaacagttgactgagtcagaacaggctgccccagtgttacatcaaatatatccaagatatctattcctgtggggaaatagtagaacacttggaggaaagcactgcctttcgctatctggcccagtactattttaagtgcaaactgtgggatgaagcttcaacttgtgcacaaaagtgttgtgcatttaatgatacccgggaagaaggtaaggccttactccggcaaatcctacagcttcggaaccaaggcgagactcctaccaccgaggtgcctgctccctttttcctacctgcttcactctctgctaacaatacccccacacgcagagtttctccactcaacttgtcttctgtcacgccatagttggctactctcaagccagcacattgttagacccatcttaattaagccttacctccatgtaaagaacagcacgtctgttccaaggacctcagctcttcttgtttctacagatggcaacagctccatagggacagcttgtataattaccttcagaggccaactgacagaatcctggcaggaacagacattatcttgccagttagaagtacttctgtctcacttatgtccaaagagtggctatagatcttggccttcttccctgaatgcttttttttttttggcccccaagaaagtcccttttataggcactttaggcacagggcaatgctacaggaacaaagtttcaatgctgctgaggagtgaaagaaaggagggaaagtctgccactctaccctggaggctgggcagtaggggcactgagttaccctagggaaggaagttcagnggcaatgggataacaaatggaccttggctcttggggttttgctgaggcatgattccctattctggatgttcagaggttg

SEQ ID NO: 1616 - DNA, 1105 bp, Homo sapiens
tttttttttccttaactttataaagaaactttacaactataccaatagacatgctatggtgtgaaggtgtcttctccaaaatgtaagtgtcttcagtgtgttagtatgaagaccggagctaggctgtgagaactcctccctttgaaagggatcaaaggcccttggaggagaggctgcctgggggttgctctttcctcttctgccctgggaggacacagggatcttccccttggggattgcatctatcagcaggatggatgtgccttaaccttggacttcaggcctccaactgtgagaaaaatttctattcttcctaagtcgcccagtctacagtattctgttactgcagcataaaaagggctaagacaaacaacaacccaaagatgcgacaaagattctcaaagagggattctcatactcccaatataaagtagccctctgtcactactgccacaccctgttttaattctctgcacagcaccaatgccatcccatctttttctggcttatcatgtgaacatcttcttcattaaaatgtaagctccacaagaacaaagcctagagtgcagcagctccaagcctgggctccggattcccacctcagccatggtgggatcccacctccggattcccactgcctgcaggattcccacctcagccatgatttaggttcatcgccatgggcagcactgactcccctgctctgtgctattatctccagttataaacggggatgataatactgcctacctcacaagctcgtcataatacatacaaaacacttagaacagtcccagacacacattaagtgccccacaaaggctggctattcctagcactaataccgtctgttatgggagacggcatacagcagcagtcaatacatatttatttaatgaatgtaaatcctgtggctgaattcacagtatgtacagaactacataaacatcctactgggaaagtgcttattagaaaggtaaatttggtagcaagagcaaacaagatattttgagaagccaaacgtacctgcgtaacgcagcaagattgccgagggtataaaacactgcaaaaagctttatgccgcccggaagccacagcaatccag

SEQ ID NO: 1617 - DNA, 971 bp, Homo sapiens
  misc_feature (1)...(971): n = a,t,c or g
ttttttttttaacgatagacactaatgtttattattgagtgcataacacgccaggcattgtgcaaagtgtttcagcattgagtttaagtctcctggagcacagaccgacagtatccattctcttcccttcccttaccaagcgaacccctgaattctagctgaatatcttggctatacagtctcccctcaagctgaactgtagctgtgggaatcagttctggtccacaggaattaactgaagaagtgtatacaatttttgaggctatgctctttagaagagtgtggaggggtgtctttcttcccttcctcctgtgatgtgatggctggatggagctggaatggccattttggaacnatgaggaatctgatgtcctgcgttggggagacctcaggcttcagttgcacactcagggggcacccgttgctctgccagcagatgcacacttcattgccacctgttcatccccgcccgccactgctcgggtgaggctcagggccatttcctctgctttcttggtcttctcgtccatctggcgttggctgtgccccattcccctgggggggaccgtgcctcctgggaaatgctacctccgggtcgcctgggagaggcgggagaccaggagcaactcagccaaggccggtgtggcctccggcgcggcccaagccctgtgtgtgcctcgctgtccccgcggcagtcgggaagcatcacactgcccggtgaccaggccgggatcctgcgtggggcggtgagagggcagcgggcgccgagacaggtccgcactgggcgcaggaggaaacgggaccagccgaggtgggaagaagcggggaaaggacgcccggacaccacccagccggggcgttccaagtcccggaggacccccactttgcgggatgcccctggcgtcccgggtttcaaggcaaagccctctctcatcccgggaggccccagttcttcgcaaggggagcggttc

SEQ ID NO: 1618 - DNA, 763 bp, Homo sapiens
acaaaacaaaacaccctgcaagactgggatagagggcaatggatattcccacaatgcacttttcctaaccctatgagaaacaaaccaaagacatttttggagaaagctgctttctggagcagtttcagttttatttttgtatttaaggctgaaggacagtttcaataaacatgtcttcttcccagagggatttcaaagaaagatcgtttttgcatgtcatataggggagaatgaggacatgagacaccaagaagatgaagttttcaggagcagaggagaaactttacaccaacatgtctgaacttcattgactcactacctggagccattttttagctgttgagttaagaaacagaaaaaggagcctggggcttctgactctttcaccaggcttaggggagtgagaggagggtttagacacgggtagggcctcttggccccttggtgcagccccgctgagccatctcctcctttggctgggtgactcctttctgctgccttgacaactcctggaggagaaacagatggggcctctgggctcctcccagccctgtagggtggggctcctgccctccttcttgaagtttacctgttgctgccacaagttctgctcccttcgtctttcctttgaatcctgggtggtgcaggaactagccttgttcagtggacttggggagaactggaggggaaattcgctgtgtttttctgtttaagccagcactgaccccaacaactcccctctctagtccaacttcccaaaagt

SEQ ID NO: 1619 - DNA, 1301 bp, Homo sapiens
atgttagtatttactaaagttttaaatataatcacgtagaaaacaaacatttcaaaaatgcaaaatattagaagtctaatcagtgctattaatctttccatgcaaacaatctcttttgctgagataagtgatactagttctgcagctgggaatatgtacaaaatgatgctgtaccagagtttaaaaatagggttggtctagagattgcacatgatacaaatgaagcagcgcaaataatatatgactaaatacaggatttcaatcaagcttatcatcctgggaatatacagctataataccatgaatagacaagatataaagctctttcacagttacccacccctcaccactaggaaagaaacatttcttaatacaaagagtggtttatctggctatccaggggctatgctgtccatctttggttatagggactcctctgcttatcctttggtttactcttaaatagcacctattctgccaataggaagagtaaacataaatttgaagaccacaacttggcaaaagcttccccttaatatacagtgaatacttaattctcaataactcagagtttatatacctttaaaaaaataaagtattccatatatctgaaacttagtggcatacttagcactagactataagcagatgacaaagaaaggccaggcctgacctataccccaaccttacctctacaatctccatggtgacagtaattacccttcattttccttttctttccagaaagggataaagaccactgctgtctaaggaatggcttcagtaaatattaaatgtcagtggctttgaataccataacatttataaaaaaatttataaacaataaaccacagctcgcctgcctttgccactctataaacagaggcctgtggaatctgagagcaagtataaaggattatcataaagagaactacaaagacaatgacaaactgccaatgaagaagaaaaatctacagcaaagtagtgaaaagatgccttgacaaaattagtgtgcagtcacttgtgttcttagaagtaaacctcacttcatatgttccagactcagctgacactgactctggaatagctgtttcttggaccctacagacataagtttttctttcagaacaagttaaacatttccccctagccaaacctacctgctcaaccaatgctgcccgtgccaagagccttttaaatatgctttgtggattatggatacctaagaaggaaagaggatacacaatactaccttagctcaagtagaaatggcaggtgacaaattctgtttcaccataaag

SEQ ID NO: 1620 - DNA, 648 bp, Homo sapiens
caggctggatatttgttggcagggcagcctttaaggacctgtatattttcttctagactctatatattccctgtgagtattagttgtatggtcaaactggcaaattttaccataggtataaataatagagaatgtggaagaatagtgaatagtgtcagagatagttaaaagtccatacaatagtagagaaggtagtaagtaatagtggcttggactaaatatttgttgaataaatgttttaaaaaacaggctacctacaatttgtgttgaagatatgaatgaatgaagtttccacacctttatgtggagacctgataagtaagcaacaataaggaagggtccccagggttggggaggagccccaaggttgagaacaataatgaacaattattgtatgaacaattgttaggagacagctaatcacaaacaacctgcgggcaccattgacctcattccacacggtaggcacccttcagcaggaccctataaaactttcctccagcccttgcctctttgcaggtagccccttctctgctgagctgcccactgcaacatattttcacaatttctctaataaatctgcccttctttacctacaactatcttggtaaatggctttaccacctgcaaaactgaccctaggttgtt

SEQ ID NO: 1621 - DNA, 1102 bp, Homo sapiens
accaggtacagttaaatgacacaggacacacatccaatgtaaaatcaagttttatatgattcaaagagaaaagttacattacacatgctcgtttaaataatgtcaaagtctgttacataaaacataattatgaaacattttaagtcttatcattcaaactacttaaaaggctcaaagtcacaaaagatcaagcaaaactgcccaggcaataaagtgcacgaggggagcccacctctccagcggccgtcagcacccagagccgccagctgagggctccatgccgaatccatacacaaggtttgtggttctcagaagagttttcagacaggaactgtttccaacttaaaatctttcaacagacaaatggaggtggaagggggatggtttacacaaagtatttccaaatgtaatcaggaaatggaagtgtaaattaaaaccgttttcaacatgtatctcctctttagaaatatcactgcttggagaatgttgtgacaagcaaccaaatactcaaaagaccttatccaccagaatactggcaggactcacattactttgcatgtcataattaagaaaaatatccaaatttgatgccatttatagtgtgtacagtcaaaaatgtgtatgctgattttgatgagcaggagaaaggactgggtggtgaggaaacatgaactatgcacaacatgagacaactgtgctgtctcacgaagacacgacactcacctatggagtgtccagactgaaaacctctgaataacacacacatttgtgtcaagtaacagctgatactaaggggcaagttaacgggtatcaagtcacacacaatgaatgaccaggtggagattttatcagactacaaagaacaaaacacaaaacctaattttattcaatattccaccttaccatcatttaaataaaggtaaatgctggtaattaacatagacaaaatttaaatacatactgcacaataaaaaaaattcccaggctaccaaattagtgcaacattctgtatgttcctacatttattccattgcctgaacttccaatgtttaacaaaaaccagtatcagtggcttcttgaacacaggtggccacattctctc

SEQ ID NO: 1622 - DNA, 271 bp, Homo sapiens
gctgctttttaaaaaacaaatggtgttgaggctgcagccctgtgcgccctccagtctctgattttgagcagttccattggaatcaaacccgactggatcgcagcatatgctatgcctcgagagagccttttcaaacaaagctcgaggtgaaagactgggaatgtatcttatttaaggaaaacttaattcctcttctttattttaatataaacttctacatatacagggagagaatggatgagtcacggggggcatgggattggaaaggttt

SEQ ID NO: 1623 - DNA, 603 bp, Homo sapiens
agcagatcacttttttgataatgaaagttaagcatactgaatgctacttttgattgacaaactggctataatagtctaggggaaaaatccctaaacagataaagattcctaaagtaatggtggcagctgatgtttcagtgaacttttatcttgatgcgtttaaatggaagtaatgccagacctgagatttttaaggcatttttacagcttgtattgaaatgattggagacatggtttctttattagctattttgagacctgtggagttaagcaagacttttaaaaattggcaccatatacatctagttagttcctttactcttatttttttaaataaaagtagtacacatcatttccagggttgtaaatatatttggggcttgtttttggtatggatttaaaaggaggatattaagtattcattctaattttgttatttttctagttgccagagatggttgcactgaaatagaacagggagttgcatacaaagcctaaatgtgtattggatttcgaaaatactaggttggtgcaattggttttgtaccaacctaacatgtctttaggaaagtaccatcatgtggaaggaaacaacaggtgtta

SEQ ID NO: 1624 - DNA, 498 bp, Homo sapiens
  misc_feature (1)...(498): n = a,t,c or g
ggtgatcctgaaggacctggaggtgctggcagaaatcgcttcctcccccgcaggccagacggatgacccaggccccctcgatggccctgacctccaggccagccactcagagctccaggtgcccacccctggcagagccggcctactgaacacctctggtaccaaaggcttagaatgttctccttcaactcccaccatgaattcttacttttataagttcatgatcaaccttctcaagagattcagcagcgaacggaagctcctggaggtcagaggccctttcatcatcaggcagctgtgcctcctgctgaatgcggagaacatcttccactcaatggcagacatcctgctgcgggaggaggacctcaagttcgccttcgaccatggttccacgntcttcaacaccattcctgnttgaaccttcacagagntttttccagttaaggaaccaggtgaaggacctgaaagacctgggagagccagaactgtttttttttg

SEQ ID NO: 1625 - DNA, 191 bp, Homo sapiens
aacactagttattatctgactttctggttataatcattctaatgagtgtgaagtagcctctggtgtcatttggatttgcatttctctgatgagtgatgctatcaagcacctttgctgggtgctgttggccatatgtgtatgttccctggagaagtgtctgtgctgagccttggcccactttttaattaggc

SEQ ID NO: 1626 - DNA, 1050 bp, Homo sapiens
cccgcgggtgccatcatggcggacgcggccagtcaggtgctcctgggctccggtctcaccatcctgtcccagccgctcatgtacgtgaaagtgctcatccaggtgggatatgagcctcttcctccaacaataggacgaaatatttttgggcggcaagtgtgtcagcttcctggtctctttagttatgctcagcacattgccagtatcgatgggaggcgcgggttgttcacaggcttaactccaagactgtgttcgggagtccttggaactgtggtccatggtaaagttttacagcattaccaggagagtgacaagggtgaggagttaggacctggaaatgtacagaaagaagtctcatcttcctttgaccacgttatcaaggagacaactccgagagatgatcgctcgttctgctgctaccctcatcacacatcccttccatgtgatcactctgagatctatggtacagttcattggcagagaatccaagtactgtggactttgtgattccataataaccatctatcgggaagagggcattctaggatttttcgcgggtcttgttcctcgccttctaggtgacatcctttctttgtggctgtgtaactcactggcctacctcgtcaatacctatgcactggacagtggggtttctaccatgaatgaaatgaagagttattctcaagctgtcacaggattttttgcgagtatgttgacctatccctttgtgcttgtctccaatcttatggctgtcaacaactgtggtcttgctggtggatgccctccttactccccaatatatacgtcttggatagactgttggtgcatgctacaaaaagaggggaatatgagccgaggaaatagcttatttttccggaaggtcccctttgggaagacttattgttgtgacctgaaaatgttaatttgaagatgtggggcagggacagtgacatttctgtagtcccagatgcacagaattatgggagagaatgttgatttctatacagtgtggcgcgcttttttaataatcatttaatcttgggaaaattc

SEQ ID NO: 1627 - DNA, 939 bp, Homo sapiens
gactctcaagaagaggaagaagtcatgcctacccaaacgaggaagaccacaagttagattgccagttaaaacaagagggaaacttagctcttctttctcaagtcgtggccaacaacaagaacctggaagatacccttcaaggagtcagcagagcacacccaaaacaactgtttcttctaaaactggtagaagcctaagaaagataaactctgctcctcctacagaaacaaaatctttaagaattgccagtcgttctactcgccacagtcatggcccactgcaagcagatgtatttgtggaattgcttagtcctcgtagaaaacgcagaggcaggaaaagtgctaataatacaccagaaaatagtcccaacttccctaacttcagagtcattgccacaaagtcaagtgaacagtcaagatctgtaaatattgcttcaaaactttctctccaagagagtgaatccaaaagaagatgcagaaaaagacaatctccagagccatcgcctgtgacactgggtcgaaggagttctggccgacagggaggagttcatgaattgtctgcttttgaacaacttgttgtagaattggtacgacatgatgacagctggccttttttgaaacttgtttctaaaatccaggtcccagactactatgacatcatcaaaaagcccattgccttaaatataattcgtgaaaaagtgaataagtgtgaatataaaattaggcatctgagtttattggatggacattgagttaatgttttcgaactgctttgaatacaaccctcgtaacacaagtgaaggcaaaagctggaactaggcttcaagcattttttcatattcaggctcaaaagcttgggacttccacgtcacacccagttattgtgggaccaagtttaggcacaccaccggctgcgaaaaagtcacgaatctgactttgt

SEQ ID NO: 1628 - DNA, 880 bp, Homo sapiens
gtttttttctttaaggaaaaaggagctttttttcaagtgaaatgtattcattggtaatactttggtttaaggcatactttaatttttacgagtttcagaaacagaatttttgtactagggaattcattggtgagagtgttcttttaacctcagaatgtcaaattttggtcttgaaccacagacatccaattacagaaagaatataagcaatctcacaggcctgcaatcggacactgtctctgtgtggttcataggagatgatttttgaggtttgcactcatgcaatttgagaacaccgttgacaagaaggctgagtttacataaatgatctagattgaaactcagctacctttcttcctcatgtggtgtaattacagccctatctggagacagcgaatacagcaaacagattttattacctagttcgctcaaacactacatgaagttattttagttaaagccctcccccaaaagttataaaaccattttatcagggcccaacatgtggcatgcaatgaagagaaaatgtaaagctacagaggttaatgtattgtattataaaatattttaagtgtactcaaaatatcataattgtacagtttatgccaccataatttgaggcctatagatttagcttaagagaacactgttctgtttgaaatgctttctgtcactgaaattggcttaattagtaaccatggataagatgctttagatcagactaggttttaatcattaacttccacaaagaagtcatactttgcgttaggtgtgctggttggatgtgcaggaacttcagcgagcagtaggttttactaagcagatggtcgggcactgcagggcaccaggcaggatcctagggcgcctcttattctgcgtt

SEQ ID NO: 1629 - DNA, 767 bp, Homo sapiens
ttttttttttttttaatgtttttagatttattttatcatatgtgcatacctaaacacagaagtcttaatatctttcataaatatctttcataaacatttcagtatttattcatatgcattttttccatgttctttggtcattcagtactcataatagacttcatagttatctgagggaagtcggctgtgtagtcaattttttgttttaacctataaaatggctaataaaggattttcatcctgtggtcacagtgacaattcaaagatttatggaggtaaattgatctgtaatcctaaatgatcataaaataatatcagtaaatttgtcttaagcttttccaaatacattctgccctcaacttgtttttattctcctgagtgtcaaatcaaaatttgtttctgaaatgctgcagttgagacccactaaagtaaaaagaagtgggattttttactccctgccaagacaaggccatggaatgggaagtgtgaggtcacagggcaacagcatgacttggtgtgatagcagcgaattctggagactgtgttctattaaagtatcctttataacttgaggaaggatatttaattcatgtttcagactgtacttctattcatttatgaccctttcttccctaaaagcccctccacacacatcctattctcatctcagatactctcagagctgggcagcagagtggagaaagttctttgttgactaaaggaatataatgctaaagaagagaggagctatcacccccacgcgtccg

SEQ ID NO: 1630 - DNA, 687 bp, Homo sapiens
  misc_feature (1)...(687): n = a,t,c or g
acagttagccaagtttgccagaacttcacgttcgtgctcactgacattgacagcaaacagagattcgggttctgccgcttatcttcaggagcgaagagctgcttctgtatcttaagctatntcccctggttcgaggtattttataagctgcttaacatcctggcagattacacgacaaaaagacaggaaaatcagtggaatgagcttcttgaaactctgcacaaacttcccatccctgacccaggagtgtctgtccatctcagcgtgcattcttattttactgtgcctgataccagagaacttcccagcatacctgagaatagaaatctgacagaatattttgtggctgtggatgttaacaacatgttgcatctgtacgccagtatgctgtacgaacgccggatactcatcatttgcagcaaactcagcactctgactgcctgcatccacgggtttgcggcgatgctctaccccatgtactggcagcacgtgtacatctcccgtgctgccgccgcatctgctggactactgctggtaaggtggctggccctgtcctctgcttctcctttgccctgatctgactgggcgtgttaggtgtgtcacttgttaatgcagttggtgactctacattaaaaatattaacttcatccagcctggacaaaatagtgagaatccatctgtacaaaa

SEQ ID NO: 1631 - DNA, 3055 bp, Homo sapiens
ctccaacatgagagtcacaatagtaagtttctcctagggatgctgagaaggctacatgaagcaatgtacagaagggacaagtatcactatcagctccctccagcagaatcctgggatttaagcaggacccagtcttgcatctgaatgtccagtcagcaatctctctcttccattctcctccgaggcaaaccatcttggcccttaggcatcttctgccttatactgacaggtgtgtatcctggataacaaccaggactgcatccccctaagggtaaggactaggtctgatactcatctagtggacactcaaatattttgccagttctattattaagaattttatttttgagcattctatatacatttataagtgtacatatgatgtattttatgtacatggattaggaagttcttcaagggcaccattaagtgcccactggaaaattttctacaagagaatagtttggaaaataacagatcaatttaggagactaaaactatacattgatataaagaatggatataggttttctcaatccagaatagtaccctcaccccctctgccctcccctctcctagatggtcaccatagggcagtaaagtttaatcagttgagcacggagcttcagggcgctggcacccagactatgatggagagaaggaaagagcaacaaacaaacaggcacgttggtagttggctacagcctgggtataagcccatggcatcttcttcccccgagactggggatgtcccggcaactgagtaagggatgggcctcctgctgctgacttctccatagtgaactcaatctccttgcctcacaagaacatcagagaggtcctctgttccttccagttttagattcttttcattggctaaatgtaggagacaggcaaaagccagaggtatggagaggttctgagccatgacagggggcaggctcctctgcaggtccttcgtgagcccgctaagcatcttctcgtcagccacttctgccagggccgcttcttttccagcttccctgtggtttgcctctgcatctgcctcctttccggagagcgctgtcagcagactccacatgctctgcttcagtttcttcatgtccatctttttggcagtcttggcatagtgaatttcaattttatttaccttctgaggctcagctaccaagtttgactccccatatgttgtgatgtctaatccttgggcttctggagtgtcaccattctgttgtgctgtcttaggtggatggcaaggataaggtgagaggtcagagttcccaacaggtcccacaaataagtcatccaaatcttcatcatcactgtcagcagcctgtaatccagggcaaaagttggaggtgtcgttagggttgttgtaatcatagtcttcaatttcttcataatgctcagtctctaccctatggccctgggccatcttaagtaacctggtgcctggtttgaggtgaagctggaccagagtgtcaacattgtagttgaaatctgtaggaagggtggtagctctccaattctggttctccaaagtggacttggtcagaatagtagcagcctttgtttttctaaaatatacatcaaagtcaatatcatcttcaaagtcaatttcaaaatctttttttgtactcttctttttgttttctgattgggaaggagcatcttgtttgcgtcgaggcctaaagcgccagtgatccgggccagcccacatcgacatggtccgaggactgaaataagaatattctccaggtttcatagacagaagggggcacatggtcctgatgtctccatccccaagggaaatcatttcttcctggcagctctgaacctggcagggctccttccagctcctgaactcttcatgatccccaactgcggtgtggtcaggttcatcgttggcatcaaagtcatcccccagggacccatcggggaagtctccacagtcactctcgtcaacttcagcattgatgtcaaatacctggtcattcttcttaaacttgtctaccagggccgacacagactcattatgtgtttcactgtcccactgtgtaaactgggaacccggccagggaagggcagatctggcgatcttctgcacactgctgcaagggcgcttttaaatctgtcatttctacacaacctaactctggcaactcgagaggttctcccgtggagagagtctggacatcagagggaaacagcagttcacttctgtagtcctggcagtggagagtggacagaaacacccctgctgtgctgcactcatcaaatgaggctgctgtcttctgaaacatgggatcaatctcacacttccgatctgcttcggagacattgaggttgtttatgttctgctcaatagttctgtgtaagtgcttcttctttggctttacagcctttttggttgttcccatttcagtagcacttccatcagcaacatggccttctacttcttccaaagacggtgcatctttgccccagcccccccaaggactctgtatacatcggcatggacggcatccacgcgcacagccatagatcttggtgctggcatccagagtacccgcagccactttaaagttggttggttcggtgtctttctgtttaagaatctctgacataaaatcaatcaagtgcaaacccaaaagcattcttggtagtgattttattttcagtggacagtttgatacaggtggagtaatgttccgtaatctgcgtgtttgtaaacttggggatagtagctgaaatgtcaatactcctgctggagggggaggccaataagcgaggtgagtcagtgctgaactgcagatcaaagaccctcgagcgcctccgctgcagccgctccttctcatcgtcattctgaggaaagtcttcgaggactggggtgccaggaatattgagaggcgccttcctgggcaggggcatcgggaacacacgctctgaaggagaggaggcactgtgggggtgtcctcgcgtctctgaagaagagttattcattgtggctggcagtgctgggccgggaggtcccatctttccttggcgtctcctg

SEQ ID NO: 1632 - DNA, 644 bp, Homo sapiens
gaatagatggatctcttgtgcaactcttcgttatctatttttctcctcgtttttcatcaattattgtattgttgccttcctggttattttttaatcaagtgctgaacgttgtgcatggaaaattatagttaatttgatgatgggataatgccttcttcctccaaagaagatttatttttgcactggcagatggtttgtgtgcatgcagaggtagatcatctgatttcattcaggttttgggttgtatttaattttttggtgagggctgatccatttttagttcactcttacttgtaggttgtatcttttcagcagtaccaatggaaaccctggaatgtttatcaaagccagtatgctttggcaaattaatttttgccccatcagtccagtgaaactgcccaaagctctactcaggttttcagccttcccagttttctggcttttaaaatcagctaatactttaaggggatagtggtgtcaaataatgtatttatctcataaaattttctgctctatgaaatcttggcccctcaagtcttaattgtctttggcatctaatgtggataccttctaacaaatgtttaaattttgccagcttttctaattattgtaggtaggcgtattgcctaaacccttaaaatttt

SEQ ID NO: 1633 - DNA, 298 bp, Homo sapiens
gaatgtgtgttgattgagtgaatcaatgattgagtgaaaccatttattctctatagggttttaaaactgatttaataataaataaaaatttccaagaaaacagcactgaaggaaagccacaggaccttgtgaaatttaaaaaagtagacagagacaatgcagtgtccatagaagctgtgaagttgacagattgggtttgaatcctgcatctgtcacatacggagtttcggttgcctcatttataaaatgggcctgataatagtaccatataggatggctgtgaaaaagcaaaaaaaaa

SEQ ID NO: 1634 - DNA, 1370 bp, Homo sapiens
tttttttttttttttttacagatcacaggaattttaaattgcagatcagtcatgctacttggggtgatcagaaagacttgaacacttaccaagtgaataattttattaaggtcctgaaggtgagtgtccggaggtgctgggtaaaacacatcacaggtaagaaatgggaaacctacctcagcatttctgaaaggcacaatctatggaagggaaacctagcgtaataaaaccctcactggatgtacatggaaaggagtatggtgagctatttcctttttaaaggatgagaccttcataaattggcccctcggattctgggtgattcccgccgcaagcgcaaatgctccagtgtgttatgaaaatgtttgttaatctgctctgtttcttcactggattcaagattcgggaggtcttctcgaatcttttgggataagctggtttaaaacctgaattgttaccgcatcattttccttttcataaaaatagatatatctgttcagaatttctataaaaagctgcacttgtagagaggggtccatgcactgatttgctatttttagagctttttttaggcactccattaccctcttgcctccgtgaagctcctccccatttttgtccgtgtttctgccagaccagaagagatgtgcacaggtgctcacagctcgggccctgatcaggtttctttagaagtttggatgcagcaagggcacactgagtcctcagaggttcatgattctcttcactgaagcacttcatcctttcaaaagtgccaatgatcaaggtgatggcagcctagctgtgctttggaatcgctgatttcatcttcatacagagaaaatgccctgggacatgaattcatatgcgactgtctcatgattttcaaaaccaatttccccagcagctagtgcctccttgaagaaaaagtcttaagggcaattctgcccagctctgctttgatcaaagcactgatagtctggtgggcaaatgaaaaaatcttctggcatttcttttcccatttgtcatccactttagaattctctttatatcgaaaagccagctggtaagctgcaaataccaaaggtggcagtgtgaagcgaatccgctgatttccaccagctccaaaatgttttcgtgctgtgttcaaaatcaagtactgctggtcagggtcctcagagcgcagcagatgaatgaagcggcccacaaggctctggctcatcagcaaaatcttctggatcagggtcttctacaggttgatctggctgatcttgaatcaacgtggataccaaattcattatggaatccacctggtcttgagagacaatttctgtgttataatccagaacattactaagcacataacaactcat

SEQ ID NO: 1635 - DNA, 116 bp, Homo sapiens
taagtgcagaggccctaaggcagaagttcctggtgtgcttgagaaaggctaatgtggctggaacagagtgaggggggagagtggcaagaggtgaggtcgacgcggccgccaattcc

SEQ ID NO: 1636 - DNA, 188 bp, Homo sapiens
ttttttttgtgtgtttatttttttcatctaatgcttactgtatgtcttactaagtcccttatacaaagcataaatgaatcaaataaatgctacctgtacattagatcaatcaacatttcaggatcctcctggtgttccttcattttcacagtatcagaaagaatcatatggagattgaaaaccagatc

SEQ ID NO: 1637 - DNA, 6191 bp, Homo sapiens
gggggtgaaaaagggggtttgcagaggctgccctggggctggtgctgaaagaagagcccacagctgacttcatggtgctacaataacctcagaatctacttttcactctcaggagaacccacagtctaatatttagacatgatggcaaactgggcggaagcaagacctctcctcattcttattgttttattagggcaatttgtctcaataaaagcccaggaagaagacgaggatgaaggatatggtgaagaaatagcctgcactcagaatggccagatgtacttaaacagggacatttggaaacctgccccttgtcagatctgtgtctgtgacaatggagccattctctgtgacaagatagaatgccaggatgtgctggactgtgccgaccctgtaacgccccctggggaatgctgtcctgtctgttcacaaacacctggaggtggcaatacaaattttggtagaggaagaaagggacaaaagggagaaccaggattagtgcctgttgtaacaggcatacgtggtcgtccaggaccggcaggacctccaggatcacagggaccaagaggagagcgagggccaaaaggaagacctggccctcgtggacctcagggaattgatggagaaccaggtgttcctggtcaacctggtgctccaggacctcctggacatccgtcccacccaggacccgatggcttgagcaggccgttttcagctcaaatggctgggttggatgaaaaatctggacttgggagtcaagtaggactaatgcctggctctgtgggtcctgttggcccaaggggaccacagggtttacaaggacagcaaggtggtgcaggacctacaggacctcctggtgaacctggtgatcctggaccaatgggtccgattggttcacgtggaccagagggccctcctggtaaacctggggaagatggtgaacctggcagaaatggaaatcctggtgaagtgggatttgcaggatctccgggagctcgtggatttcctggggctcctggtcttccaggtctgaagggtcaccgaggacacaaaggtcttgaaggccctaaaggtgaagttggagcacctggttccaagggtgaagctggccccactggtccaatgggtgccatgggtcctctgggtccgaggggaatgccaggagagagagggagacttgggccacagggtgctcctggacaacgaggtgcacatggtatgcctggaaaacctggaccaatgggtcctcttgggataccaggctcttctggttttccaggaaatcctggaatgaagggagaagcaggtcctacaggggcgcgaggccctgaaggtcctcaggggcagagaggtgaaactgggcccccaggtccagttggctctccaggtcttcctggtgcaataggaactgatggtactcctggtcccaaaggcccaacgggctctccgggtacctctggtcctcctggctcagcagggcctcctggatctccaggacctcagggtagcactggtcctcaggggaattcgggccttccgggtgatccaggtttcaaaggagaagctggcccaaaaggggaaccagggccacatggtattcagggtccgataggcccacccggtgaagaaggcaaaagaggtcccagaggtgacccaggaacacttggtcctccagggccagtgggagaaaggggtgctcctggcaatcgtggttttccaggctctgatggtttacctgggccaaagggtgctcaaggagaacggggtcctgtaggttcttcaggacccaaaggaagccagggggatccaggacgtccaggggaacctgggcttccaggtgctcggggtttgacaggaaatcctggtgttcaaggtcctgaaggaaaacttggacctttgggtgcgccaggggaagatggccgtccaggtcctccaggctccataggaatcaaagggcagcccgggaccatgggccttccaggccccaaaggtagcaatggtgaccctgggaaacctggagaagcaggaaatcctggagttcctgggcaaaggggagctcctggaaaagatggtaaagttggtccttatggtcctcctgggccgccgggtctacgtggtgaaagaggagaacaaggacctccagggcccacaggttttcaggggcatcctggtcctccaggtcctcctggagaaggtggaaaaccaggtgatcaaggtgttcctggaggtcccggagcagttggcccgttaggacctagaggagaacgaggaaatcctggggaaagaggagaacctgggataactggactccctggtgagaagggaatggctggaggacatggtcctgatggcccaaaaggcagtccaggtccatctgggacccctggagatacaggcccaccaggtcttcaaggtatgccgggagaaagaggaattgcaggaactcctggccccaagggtgacagaggtggcataggagaaaaaggtgctgaaggcacagctggaaatgatggtgcaggaggtcttccaggtcctttgggccctccaggtccggcaggcctactgggagaaaagggtgaacctggtcctcgaggtttagttggtcctcctggctcccggggcaatcctggttctcgaggtgaaaatgggccaactggagctgttggttttgccggaccccaggggtctgacggacagcctggagtaaaaggtgaacctggagagccaggacagaagggagatgctggttctcctggaccacaaggtttagcaggatcccctggccctcatggtcctaatggtgttcctggactaaaaggtggtcgaggaacccaaggtccgcctggtgctacaggatttcctggttctgcgggcagagttggacctccaggccctgctggagctccaggacctgcgggacccctaggggaacccgggaaggagggacctccaggtcctcgtggggaccctggctctcatgggcgtgtgggagtccgaggaccagctggcccccctggtggcccaggagacaaaggggacccaggagaagatgggcaacctggtccagatggcccccctggtccagctggaacgaccgggcagagaggaattgttggcatgcctgggcaacgtggagagagaggcatgcccggcctaccaggcccagcgggaacaccaggaaaagtaggaccaactggtgcaacaggagataaaggtccacctggacctgtggggcccccaggctccaatggtcctgtaggggaacctggaccagaaggtccagctggcaatgatggtaccccaggacgggatggtgctgttggagaacgtggtgatcgtggagaccctgggcctgcaggtctgccaggctctcagggtgcccctggaactcctggccctgtgggtgctccaggagatgcaggacaaagaggagatccgggttctcggggtcctataggaccacctgggtcgagctggaaaacgtggattacctggaccccaaggacctcgtggtgacaaaggtgatcatggagaccgaggcgacagaggtcagaagggccacagaggctttactggtcttcagggtcttcctggccctcctggtccaaatggtgaacaaggaagtgctggaatccctggaccatttggcccaagaggtcctccaggcccagttggtccttcaggtaaagaaggaaaccctgggccacttgggccattgggacctccaggtgtacgaggcagtgtaggagaagcaggacctgagggccctcctggtgagcctggcccacctggccctccgggtccccctggccaccttacagctgctcttggggatatcatggggcactatgatgaaagcatgccagatccacttcctgagtttactgaagatcaggcggctcctgatgacaaaaacaaaacggacccaggggttcatgctaccctgaagtcactcagtagtcagattgaaaccatgcgcagccccgatggctcgaaaaagcacccagcccgcacgtgtgatgacctaaagctttgccattccgcaaagcagagtggtgaatactggattgatcctaaccaaggatctgttgaagatgccatcaaagtttactgcaacatggaaacaggagaaacatgtatttcagcaaacccatccagtgtaccacgtaaaacctggtgggccagtaaatctcctgacaataaacctgtttggtatggtcttgatatgaacagagggtctcagttcgcttatggagaccaccaatcacctaatacagccattactcagatgacttttttgcgccttttatcaaaagaagcctcccagaacatcacttacatctgtaaaaacagtgtaggatacatggacgatcaagctaagaacctcaaaaaagctgtggttctcaaaggggcaaatgacttagatatcaaagcagagggaaatattagattccggtatatcgttcttcaagacacttgctctaagcggaatggaaatgtgggcaagactgtctttgaatatagaacacagaatgtgggcacgcttgccccatcatagatcttgctcctgtggatgttggcggcacagaccaggaattcggcgttgaaattgggccagtttgttttgtgtaaagtaagccaagacacatcgacaatgagcaccaccatcaatgaccaccgccattcacaagaactttgactgtttgaagttgatcctgagactcttgaagtaatggctgatcctgcatcagccattgtatatatggtcttaagtgccctggcctccttatccttcagaatatttattttacttacaatcctcaagttttaattgattttaaatatttttcaatacaacagtttaggtttaagatgaccaatgacaatgaccacctttgcagaaagtaaactgattgaataaataaatctccgttttcttcaatttatttcagtgtaatgaaaaagttgcttagtatttatgaggaaattcttcttcctggcaggtagcttaaagattggggtatatagagccacaacacatgtttattttgcttggctgcagttgaaaaatagaaattagtgcccttttgtgacctctcattccaagattgtcaattaaaaatgagtttaaaatgtttaacttgtgatcgagacctacatgcatgtcttgatattgtgtaactataatagagactctttaaggagaatcttaaaaaaaaaaaaacgtttctcactgtcttaaatagaatttttaaatagtatatattcagtggcattttggagaacaaagtgaatttacttcgacttcttaaatttttgtaaaagactataagtttagacatctttctcattcaaatttaaagatatctttctcctcttgatcaatctatcaatattgatagaagtcacactagtatataccatttaatacatttacactttcttatttaagaagatattgaatgcaaaataattgacatatagaactttacaaacatatgtccaaggactctaaattgagactcttccacatgtacaatctcatcatcctgaagcctataatgaagaaaaagatctagaaactgagttgtggagctgactctaatcaaatgtgatgattggaattagaccatttggcctttgaactttcataggaaaaatgacccaacatttcttagcatgagctacctcatctctagaagctgggatggacttactattcttgtttatattttagatactgaaaggtgctatgcttctgttattattccaagactggagatagggcagggctaaaaaggtattattatttttcctttaatgatggtgctaaaattcttcctataaaattccttaaaaataaagatggtttaatcactaccattgtgaaaacataactgttagacttcccgtttctgaaagaaagagcatcgttccaatgcttgttcactgttcctctgtcatactgtatctggaatgctttgtaatacttgcatgcttcttagaccagaacatgtaggtccccttgtgtctcaatactttttttttcttaattgcatttgttggctctattttaatttttttcttttaaaataaacagctggggaccatcccaaaagacaagccatgcatacaactttggtcatgtatctctgcaaagcatcaaattaaatgcacgcttttgtcatgtc

SEQ ID NO: 1638 - DNA, 295 bp, Homo sapiens
ttgaggaaggaatctaccttgaagtctgggcattggaaggacaatttggaagggcaaaaaatgcctgcccagtccaaatcaggctaaaagaccccaccacttttccttatcaaaggcaatatcccttaaggcctgaagctcataaaggattacaggatattgttaaacatgtaaaagctcaaggcttagtaaagaaatgcagcagtccctgcaacaccccaattctaggagtacaaaaaccgaacggtcagtggagtctagtgcaagatcttagactcatcagtgaggcagtaat

SEQ ID NO: 1639 - DNA, 3567 bp, Homo sapiens
ctcctctgtttcctgtgcagtagctcccgttgcggcggcacccgtggcagccctggcggacgcaggagcgatggcagcgaccgatatagctcgccaggtgggtgaaggttgccgaactgtccccctggctggacatgtggggtttgacagcttgcctgaccagctggtgaataagtccgtcagccagggcttctgcttcaacatcctgtgcgtgggagagacaggtttgggcaagtccaccctcatggacaccctgttcaacaccaaattcgaaggggagccagccacccacacacagccgggtgtccagctccagtctaatacctatgacctccaagagagcaacgtgaggctaaagctcacgatcgttagcacagttggctttggggaccagatcaacaaagaggacagctacaagcctatcgtggaattcatcgatgcacaattcgaggcctacctgcaggaagagctaaagatccgaagagtgctacacacctaccatgactcccgaatccatgtctgcttgtatttcattgcccccacgggtcattccctgaagtctctggacctagtgactatgaagaagctggacagtaaggtgaacatcatccccatcattgccaaagcagatgccatttcgaagagtgagctaacaaagttcaaaatcaaaatcaccagcgagcttgtcagcaacggagtccagatctatcagtttcctacagatgatgagtcggtggcagagatcaatggaaccatgaacgcccacctgccgtttgctgtcattggcagcacagaagaactgaagataggcaacaagatgatgagggcgcggcagtatccttggggcactgtgcaggttgaaaacgaggcccactgcgactttgtgaagctgcgggagatgctgattcgggtcaacatggaggatctgcgggagcagacccacacccggcactatgagctgtatcgccgctgtaagctggaggagatgggcttcaaggacaccgaccctgacagcaaacccttcagtttacaggagacatatgaggccaaaaggaacgagttcctaggggaactccagaaaaaagaagaggagatgagacagatgttcgtccagcgagtcaaagagaaagaagcggagctcaaagaggcagagaaagagctgcacgagaagtttgaccgtctgaagaaactgcaccaggacgagaagaagaaactggaggataaaaagaaatccctggatgatgaagtgaatgctttcaagcaaagaaagacggcggctgagctgctccagtcccagggctcccaggctggacgagaagaagaaatccctggatgatgaagtgaatgctttcaagcaaagaaagacggcggctgagctgctccagtcccagggctcccaggctggaggctcacagactctgaagagagacaaagagaagaaaaattaactctgctgtttgctgcatgctgcatgagacccagggtcctgtttgggcttcctgtagacacccttttcctgcgcaacagagctgggcctccctttctctaatttcccccttaacatgcctggggggcatacaatccaacccgcgccctctcctctcttcctgccaaggtttatagaaacctgagaatctgagggtgatgtctggccgctggtcaagaagccaacagtcatgtggctcgcagatgcatcctgcatcccagtccccctcccagcacccccagccatcccccctgtcttcccccacatctttgccagaggtgtgacatggtcagggggcccatctgctactctttcccaccagctcccctgttccagttctggttgctgttagtttccctgaggtatttgcaaccaccatggctgggtaaccaccgatcagcacagctgtccccttggtctcctgtatcccagtcactagtcctccctggtccaccccaccctcatcctcaggagccacagccatttcttagagggtttcaaaaggacagcctttggcgccttttccttctaacctttgagtccagccctttccagttttcattcactcgaagtaactgcactcaagctgtgctcaaaatcggcaacgcatttatttacaccaagcccttcccataaaacacaactgctgaagaaaatagcagacgtttcccctctctctaactctgggtatcccacagatgcaaaagggagaataaacctgaatattattaccagcctagagtcttgaatgatagccttaccgaattcttcttgtgaggtatttcagcatctcggggggtaatttccggaagggctccatactgtcccaataaggtgaggccagtagcaggaataataaatcccactttgtaggctggaaaactgagctgtcaaaagaatcaagtgtttgggggtttgctctgatgagtcttctagttcatttggtgaatgtcatgatgatttttaacatgcattttgcatgcatcccccaataagaagagatgagactcggccggagagaagaaaaggcccttaactttctttccaatttaaggagttgagagtttaaaaatattccagccctaagtttttatcatgggtcccatctgatagtggctttgggaacctctgtgaagtagagagccctcccttgtcagggttatgaggcacagtggcctttggtgtttggccagtgacagtgtgagagatggagttgacctggcaatgatctgtggctaacatgccgtctctctgcccttcctttgcagtaatccatggctgtgtactgaatagtattccccgctacagctggactggactccatttagccttttaagccgaggttcctattttaactgacagctttcctttggggtgccaggcagcgaggccccccacccctatcctgccatgtacttcaagctcacttcttctttttgagttccgcaacttgctcctgcctcccagccccactggcactgaccatgaccacctacttctattttttttttagagtttctttttttgatcacttactttcaaagcacacagtcaaacaaggttatgccaaatttccaggcctttttgaagtattgagaaggggaaggggatttctcacttcaattatagatcataataggaagcaaaaagaaaaaaatgaaaagcaaacatatgcacgcacttttcttgttgacaaagcaagaatataggtttgctgtgtaggtttggtgctctattgattggtgagtgaccagagcaagtatgaaggtgatgctgccaaagcacaagcctttttgaagtattgagaaggggaaggggatttctcacttcaattatagatcataataggaagcaaaaagaaaaaaatgaaaagcaaacatatgcacgcacttttcttgttgacaaagcaagaatataggtttgctgtgtaggtttggtgctctattgattggtgagtgaccagagcaagtatgaaggtgatgctgccaaagcacaagccagtttcttgggaaaattcaagttacagtggagtatttttttgaagaccatatgcttggaggtagaaacaaacccacggccca

SEQ ID NO: 1640 - DNA, 333 bp, Homo sapiens
gattttgggggctggtacacatccccatgtttgtgttttattgtcttcagtgtgggccgttggtccttatagttagcagggtggaaactgcagcaggctgcaagcaggctgacacagttagttgttcattaacttacctttgaggagaagccagaggctgacagctcagggaatccactcaggtgctataggggcaaggaagaaggaatatttaatgtatctacttaatagtgaaaggcatgcattttatgtattattgaaataactgctaaggtcctattttgaatttgaagactaagaaggaaggatgttctttatttcttatagatggaa

SEQ ID NO: 1641 - DNA, 913 bp, Homo sapiens
tttttttttttttttttttcttacaaatcacatatatttacattgtggatctgggatacacttatcacagtaggagctgctcaaatcaatctgaatgctacgcaatctgggaacctccccataactgtttgagccagcatttcagattatagataagctgtttccagctggactgggtttggaaagttcactctaaagaatgaagtcacctgttgtcactgtcctcctctccaggattccttttggggccaggtaccatcctgtggctccttaaggaggcttctctctttaattctccatgaggcatccagggtggtctgggctatgggaagaacccttcaacttgggagtagacaggtgctccaattcatagtgcccattctcagaggccttgtgtgtgagtttctccttcatgccttccttctggctcttcttgtgctccataatctgctggagctggtgcccagcatagtctggcttggtggtcagcgggccagccggcacagctacaccaaggacatctgacaccatgtaggggcgcagccagcccaccaagggagtgcttccggggctgtagtgggtctgtttgtggtagaagagaagtccatctacctcaaaagggaaatccatagatagcacatcacacaggctttcgggagtgcaagggaagttctttagccccacaaatttaaaaggattaagcttggttttctctcccagtccttcttcttctggtaactttgaatgcatccagtagaatcggaaatcagtctggcaatcataaaaagggtgtccccgccagcacatcacatccagaacgtagtaggtctggtttacctcattgtaaatgcaatctagaatggtgtagtcttttgctgttgagtttcgcctgttcctcctggcagaagtgaag

SEQ ID NO: 1642 - DNA, 132 bp, Homo sapiens
tgctggtatagataacagaccattagcattttctcctttatatgaaacatttattatttgatttatttgtgtctattttgctctgtggcttggacccagaaacacttgtataataggtgaaatgaacaaaga

SEQ ID NO: 1643 - DNA, 259 bp, Homo sapiens
tatacctaaaacaagcagaagagaagacgtaataaaaatcagcaaaaatcaatgaaattgacaaagaaaaaaccaatgaaatcaaaagctggttctttgaaaagatagataaagttgataggcctctggtcagactaaaaaagacagaaattattaatattagaaatgaaagcaggaccattagtattgattccacaggcattaaaaggataaaaaaggaggtcgggtgcagtggctcatgcctgtaatatcagcactt

SEQ ID NO: 1644 - DNA, 547 bp, Homo sapiens
tcagaatttttaaagtaccatttgaatgatcttaatttttctttcatgacaacacattccaaaatgaatcatgcttatgtactaagagggaaaatgtatttaagttaagggtgagagacttaagttataggtgaccttagagacctaaggtgagagacttgacacatggaaggagtaacattagggtctacctctacctcaatttagttagcgatttactacaatttcagagctttaacaaaagataaaaataaatcgtcaccaattgttattgcttctcatctttcatttttcaatgaacaagtaaggtattttcattcttatttttaggattttagtttttagtgtatggtacaaatgaacacagtttatattctaattcttactgcagctcattttaatttttaggatgcaagcacaatttagtattcaaagtgagtagcaacatattcaacttgatcccattgtcttcagttactcttgcccatgaaaaatgttcataaatgaacagggtattgaagctcatggtgctagctctcctcgtgcc

SEQ ID NO: 1645 - DNA, 391 bp, Homo sapiens
  misc_feature (1)...(391): n = a,t,c or g
gtggttctgcgacgacatactgtctcctaacacaaagtaccaggtcacctggtacacatcttggagcccttgcccagactgtgcaggggaggtggccgagttcctggccaggcacagcaacgtgaatctcaccatcttcaccgcccgcctctactacttccagtatccatgttaccaggaggggctccgcagcctgagtcaggagggggtccctgtggagatcatggactatgaagattttaaatattggtgggaaaactttgntgtaagggattaaaaaccaantttcnanttctgaaaanaaggctacggaagagtattccntgagggggntccctggncctnatgnnctgnttncnnnntnnnntggnnatcttnnnnnntnnnatcc

SEQ ID NO: 1646 - DNA, 987 bp, Homo sapiens
ccagcctggtctggacatcctgggtcacgcgattctcccacctatgcctcccaaattgctgggggattacaggcgtgagtcaccatgcccagcctaggatgagtttagtaagatttggttatgctggggagatgggaaaagccagttatggggcacgcaggctggaggaacggggtctgtgggggtggatggatagccatggaggcagaaaggagcctctgcaggaagagtctggaagagcgaggaggaagcggtgaggcaggggagcactgtgtgaactgccctgaggccaggcaggggctcaggatgaccaggcagaaacagagcgggtccagggtggaggggaggcccgtgcagcatgagcaggaggctagaggagacagaccatgaggcccagggagacccctcactggagactctcccgtagccttcttttcagaagtcgaaagttggtttttaatcccttccaaggcttgaatggctcattatcattgtacacaaagttttccccagcaatatttaaaatcttcatagtccatgatctccacagcgaccccttcctgactcaggctgcggagcccctccctggtaacatggatactggaagtagtagaggcgggcggtgaagatggtgagattcacgttgctgtgcctggccaggaactcggccacctcccctgcacagtctgggcaagggctccaagatgtgtaccaggtgacctggtactttgtgttaggagacagtatgtcgtcgcagaaccaagagaggaagcacctttctgcatgacaatgggtctcagaatccacctggtttcggaagacgcccgtcttccaggagacaactgagcggcgctttataccttccacggtgaagcacagccaagtttcgttccgatcgttggcttcccataggtttttaaattggaagtagaatgtgcctggatacattgccttcatcgggtttctgatctgtggattcatgttcac

SEQ ID NO: 1647 - DNA, 2318 bp, Homo sapiens
ggggtttggagactgcgtcaccattctttattgcgctctaaagaacagctcgagacacacagagacagtggattttcaaagaggtgttttcttgacccagttaaatttttattcagtgaaaaaagttgacattgagacaaaaattatcttaaagttgtgcaacaatacagtaaaaccttcagcagatttcagtgacttggaaacttatcgaggcaattgaaattataaatacttaatttcgctttggagagaaacaagtatacagtgtttcactttaaataagagtagaataggcctttattttgccgcaaatacttttgattttgcctaaagtttctaatagttcataacaagagtctttaaatgagaagtgacatagaatatttgaggataatggtccactccagcattcatgcttattccatttgagctattacacatgaaactcataccattcttgggttattacttggctgtgacgatttaattcataatatggctgctcaaaattagtgggcagaaacatacatacaacccatcctccctcaacccattttcggtgctggtactccatctgaaaacacacttactgtccatgtacccagcagtacatatctcttcctatctattccatatctcagtcttgcatagaaagtagtctatataaacttaatgcactggcttttattacacaaaaattgtacctgaaaggcagcacacactccagttaagaaaaataacacaacaggaatgtcaagatacaattcccaacacaagattctgcacagagttttagagtcaattccttaaaaatcaaatatgggatgatattcagtttagttatgtctctggatgccttctctaagggactcatccaactgtctgcagaaggaagaaaattttcaggaattccccatgactcccttcatgaagaagggactgaccaaacctgataggatggtgtttctgccctaaggaagtgtactggaaatataatcttactagatgcagtgaccacttggtaagcatctgaaggcagcattcgccaagaaggagtaggcgctcatctctaaggggctcaccatactattgctctcccaagcttcccctgaaaatggccagttctgagaagggttacattccctaaattgctgagtacagcttcatctagtgggccaaacatgatgggcaggagagaacaggcagctgtgtgtcttctgtctgtcccacccaaatatccctggtgatgctaccaaagacagaaccccaggaattacttgtccaaaagtcagagtttcaaccagttacccagaatgataactatttacccagcttgtcaaggtagccagtagttcctggagcttctcacctgtctggaactaggactgcacagacatggcctcttcctggaatcctctgtagaactccactctctaacattttatccatgtggactcgtatctcataaagctcaaggggcattcaatacatcccaggagtaaaatcggtttccagagaaaactcataagcaaaccccctgcccaccaatttttagaggcccatcgtggtccacatgggatgcaggcatcctgacattcctaatgtatgccaggagagaataaaacctttttccctgcacagtgtgaacttctgaggtggcatctcccaacaaggtacaaaagccccttcttcacaagcaagcagggactccgactggtcacagtgaagacagttatctggtcaccttcagaggctgcctgtagtacaaggcatttgttttcattttctattggcactccaacctctggattctttcagacagcatatatacatgaaatccccacaaagctacacagagggaaacaggagtgtgtgcttcaaaagttcataaaaatatacaatttacatatagctgcagcctatctagcttagtcttcaggaacttagctcttctgtttatataaaatactctagccctaaaaggctgctttttttcaaacagcacagtggcattttccaaggagaggggtgatggccagtctacagtactgtgcactaagcattgggaggcactggtagctagaaccggatgctcggaaatatctcaagctgccaactggagacatatgctctgtaaaaaggcttgcctatggaataactgaaaataacatctcagagccttttatatcagcttttacaaatgccaccaaaaagttggcagaaaaaaaaaaggaaatacacttcctagtggttcaattaaatgacttgcctcccaccaggttgttaatgattcaactatttaaagagcttattaaagg

SEQ ID NO: 1648 - DNA, 377 bp, Homo sapiens
cagttatcacagtgacttctcttttgtcagcaaaaaaagccttctttcctcctatatttccagttccaaggtggtatgtgaccgttctctgctgtcatcgtgtcgctgacatttattcctctagtgtggagacggggctgtccatctgcctggtggctgctgaccccctagctagtgaggcgtgaggtgggctccgaaagagccagtgaggaggacaccaagcaggggctcctctgccagcctcttaaaaagaggaggtgctatttggttatgtcatggttccatttggttacatgagttccttctcagacccttctctgtgtgtccaccttggggtgatgtgtgtgcgtgaaccaacctgccgaaaattaaacaga

SEQ ID NO: 1649 - DNA, 465 bp, Homo sapiens
taaaagtcaataaaaagagaattatttattaaaaagatctaatgttacaaggaacagtacacagaactattatttgactgtgccttccacacggtatatgccttatatatagtatatatacagatcgtacacaatatatttaacagtttgacatggggtccacagtaccttcatttgggtatgcaaaacttttgctttcatgaaatttctaattataaggactgttgctttcttcatattcaatggacattatacaaaaatacagtctctttagtgatttaagactgtggttactatcccatagcagaaaaaactcagtactgtagctgaaaaataatgtaccttgataagaatgctcttctggtttctacaaagtaacagatatgcagcacataagtacataaacattgaaaacctgttttttaaatgggtttgatgcaaaatacatattctgtgtatgttagg

SEQ ID NO: 1650 - DNA, 463 bp, Homo sapiens
  misc_feature (1)...(463): n = a,t,c or g
cctttganaccgctatgacnnnnnnnnnnnnnnnnnnnnnnnnnnnnnnnnnnnnnnnnnnnnnnnnnnnnnnnnnnggcacgagcggcacgagcggcacgaggagcagttttacgagttttctggtggaatctttaggtatttctgtatataagatcatgtcatctgtaaaaagtgacaatttgtcatcttcctttcctgtttggatgccttttatttctttctcttgcctgatctgtttatgtgatatggtttagatatttgtnnnnnnnnnnnnnnnnnnnnnnnnnnnnnnnnnnnnnnnnnnnnnnnnnnnnnnnnnnnnnnnttagagttgtgggggcagatccctcatggcttggtgctatcctcatggtagtgagttctcctgaggtttggttaaaagtatgtgacacctcccccactcattacttccactctctctatgtgaaaagctgctccc

SEQ ID NO: 1651 - DNA, 359 bp, Homo sapiens
gattgagcaaaagaagccagactcaagggtatatactctgtgattctattcataggacttaaacaggcacaatcaaaaccatctcagtcagaagtcagagcgtggtacctgggagagacacccgaggggcatctggagtgttggggccatgttggtgatatggacgtacttcacttgtgaaaattctcaccaaaatgttcacaagttcttttgaaggagaggggatgtggggagggagaagaggttatatgagattgtctttaatgttttgtactttttgcatttttaagctttttgacaacatgtattttataatcagagaaaaatgctgacttttataaagtgccattattatgatt

SEQ ID NO: 1652 - DNA, 864 bp, Homo sapiens
ggcaggtgaatatggttttattcagcaacagctctcatcaacagcttacactagctctctcacactgtccacctgccttggctgcttgagcccgtggcttccacacacagctgtgcagcctgctctcccttgccttcagggtcagcagcttaactttttctctctctgggcgtgagcaagctgagctgtgtcctggctccttcctgtccatctgcaaaacggacagctttggctctctctctctcttactgggcgccagtgtgcccaccatgtcaagccatgttgagctgagccgaaccccaagagcccctgtacagcattagcaggacaattaccttttacagacaacagtggctcagaccaagtatgaacttacacaaacaggttatataacaagtggaggtgtgtgcctgtgcaccaaacccactgagtcatgcaggcatggatctctgccttggcctattccttgaccaaagcacatccatgtaccttacacctgggtctgaagtagggttgccagatgaaatacaggacacccagctaaatttgaatttcaggtgaacaacaaatcattgtttagattaagcatgttccatgcagttctggggacatacttaaccttatagatttatttcatttatctaaaattcaatgaactggggcagtctgtatttgctaaatctgctgaccttagtctagaggcagtggtatgttccagctgactccaatcagctcatgagagtcaactgtaaaatatttaggagatttatgagctggttattaaaccactggtggcttgaaatcaaccatggtgggagtatttacaccacagaaattggtgactaccacacactcagtgctttt

SEQ ID NO: 1653 - DNA, 500 bp, Homo sapiens
  misc_feature (1)...(500): n = a,t,c or g
gcacaaattgtacataaggtggagaataagtatcttggaaaagtggtcaataaggaaacacagataagctcagggtaaatggactgattcaagggttctaatctcatagttctcagccaaactgtgggcctgccaaaattggaccaaaccaagcctgcaacccagggtcatcattcctaaacactgtcctgctgatggtccgaaaccttctactctgctttgagaagttggcgcttctacttggttcattctccacgcaggatctgggtatcttgtataagacaaagttcaggcactgcttcaaagcagttatgcctcttaaaattgtcaagcctacctaccctctgagaggaanagattttttttttatgagacaaagtntctgctgccaagctggggtgcattggtgtgacatagcccactgnagcctngaactcctgggtcaagagaatcttntgcctaaccttccaaagaactgggctacaggcncatgcccccat

SEQ ID NO: 1654 - DNA, 1875 bp, Homo sapiens
gctactgagcagcgccatggaggactctgaagcactgggcttcgaacacatgggcctcgatccccggctccttcaggctgtcaccgatctgggctggtcgcgacctacgctgatccaggagaaggccatcccactggccctagaagggaaggacctcctggctcgggcccgcacgggctccgggaagacggccgcttatgctattccgatgctgcagctgttgctccataggaaggcgacaggtccggtggtagaacaggcagtgagaggccttgttcttgttcctaccaaggagcttggcacggcaagcacagtccatgattcagcagctggctacctactgtgctcgggatgtccgagtggccaatgtctcagctgctgaagactcagtctctcagagagctgtgctgatggagaagccagatgtggtagtagggaccccatctcgcatattaagccacttgcagcaagacagcctgaaacttcgtgactccctggagcttttggtggtggaacgaagctgaccttcttttttcctttggctttgaagaagagctcaagagtctcctctggtaaggcagagtcacttgccccggatttaccaggcttttctcatgtcagctacttttaacgaggacgtacaagcactcaaggagctgatattacataacccggttacccttaagttacaggagtcccagctgcctgggccagaccagttacagcagtttcaggtggtctgtgagactgaggaagacaaattcctcctgctgtatgccctgctcaagctgtcattgattcggggcaagtctctgctctttgtcaacactctagaacggagttaccggctacgcctgttcttggaacagttcagcatccccacctgtgtgctcaatggagagcttccactgcgctccaggtgccacatcatctcacagttcaaccaaggcttctacgactgtgtcatagcaactgatgctgaagtcctgggggccccagtcaagggcaagcgtcggggccgaggcaataggggacaaggcctctgatccggaagcaggtgtggcccggggcatagacttccaccatgtgtctgctgtgctcaactttgatcttcccccaacccctgaggcctacatccatcgagctgggcaggacagcacgcgctaacaacccaggcatagtcttaacctttgtgcttcccacggagcagttccacttaggcaagattgaggagcttctcagtggagagaacaggggccccattctgctcccctaccagttccggatggaggagatcgagggcttccgctatcgctgcagggatgccatgcgctcagtgactaagcaggccattcgggaggcaagattgaaggagatcaaggaagagcttctgcattctgagaagcttaagacatactttgaagacaaccctagggacctccagctgctgcggcatgacctacctttgcaccccgcagtggtgaagccccacctgggccatgttcctgactacctggttcctcctgctctccgtggcctggtacgccctcacaagaagcggaagaagctgtcttcctcttgtaggaaggccaagagagcaaagtcccagaacccactgcgcagttccaagcacaaaggaaagaaattcagacccgacagccaagccctcctgaggttgttgggcctctctggagctgagcacattgtggagcacaggcttacacccttcgtggacaggcgaggctctggtgcttactgcacagcctgaacagacagttctggggccggcagtgctgggccctttagctccttggcacttccaagctggcatcttgcccccttgacaacagaataaaaattttagctgccccaaaa

SEQ ID NO: 1655 - DNA, 935 bp, Homo sapiens
cttgcacagccccacagcatgcctgagacaagactccaacaagtaataattagctttttttctcctgccgcctacagtacctgtctaactaaagagcttcccaaagtggagggaaaggccatagaatccaggtgtcattcagagccagtccttgctgaaatgtggtcttccagtggaagcacctgtattattgagaggaaaaagtgttggatgcaaagtaacaccaggactagagagaaagagaaaggtgaaccatcctaaggagctttggatacttttttagaaggataaatattatgcttactgaggagaaaaaaaaaagcgatcacagaaaaatttcacagctaatatttttacaaaagttgtgccagacattacagagtgaaaacgtctctcaaggtggaatgctttagagagcaaaggcttagcatagacctagacccttgtgtgggtatgacatgacatgacatgtccatgtcaaaattcactttagtcagaaccagagtattgataaacaaaatgtcagttacctggagcagtcctggagaggttaagacattctatactgttctacgtcaaccatttctacaaagttgtccagacacctaaaagcagctttcttggttatccagatgccagaatcaaccttgtatctgacaatgcacatctgttgattctaaagtatatttatgtgtgtgtgtatgtgtgtgtatacagcacatatttacatctatgaagacatagacacttacagagacccacatgagctggcactttctgagcctttacagcctttaagactcggaggttgagaattagagacacaagagaggctgtggatggcctattaaaatgattaaagatgtaaattcagtgccattttaaaactgttcatatttatcaaacaattactgtctacagctacattttttgtt

SEQ ID NO: 1656 - DNA, 597 bp, Homo sapiens
ccgcgcccagcctggagtggccttttatgagaggggacccgtcaaatctgtgccttatggaggggtccggcagcggccacaattgtcttgtcccctcaccccccaactccccctggaacacctctcccaggcaagacattttcacagcaccattcacaacggttgggccaaaaagaaacttttccttcatcatttcctgcactcgctgaccacaactttggacaccccaggctgccacccctccccacccgttcacccccaggatgctgttgctgtaggacgcctgctgccctggagccctccccaggatgtgagccagtcccctcgctggtacggaatgccgctgggtgcccggaggcggccatggtgtctcgatggacggcagccaggatggagcacccatgggtctcacggccatgcttcagggtcttcaggtcctggcccccggccagtctgccaagaggcacccccttccccagcctctcgcctgcactgatgcagacaaaatctcacctggcaggcccaacccccaccccacccctcccccgccgtgtgtggcccctcgccgcatcgttggggttttgttatgtggaaata

SEQ ID NO: 1657 - DNA, 408 bp, Homo sapiens
ggagagatccagagtcgccaaggcagcagattgagcagaactccatggttattgtgaggcacacagccttctgctgcacattctgatctcacagttaccagaggtgcaaatggagatgggtatacagtagtccccttatccgcaattttgctgtctgaggcttcagttacccttcagttacccttcagtcaaatatggtctgaaaatattaaatggaaaaattcccagaaataaacaattcataagttttctgttgcatgccattctgagcagcaggatgaaatctctcactgtcccgctccttcctccccaggacatgagtcctccctttgcccagtgtctccacactgtagacattcccactcattagtcactttcatagccaccttggtgatcaggtttactgtc

SEQ ID NO: 1658 - DNA, 2663 bp, Homo sapiens
gaagctgccgctgtcgctgctgctcgttcgagtcgcagatccttgccagcacattacagaatatttttgttgaaccttcttgagaattcagagaaactgctgagtgaccactgaacgaaaagatctaatcttaaggcttacgcgtgttccatccaccacatcagaacaatgtcgtatgtttttgtaaatgattcttctcagactaacggtgcccttgctgcaagcctgtattgatggggactttaattattccaagcggcttttggaaagtggctttgacccaaatattcgtgacagcaggggcagaacaggccttcaccttgcagcagctcgagggaatgtagacatctggccagttactggcataaaattcggtgccgattcttctgggccacagatttattcaagggaaacacagctctttcacctctgtgggccatgtgggatactatccaatttttggtttccaatgggactcaaaattgatatttgcaatcatcaaggtgctacccctttagttctgggcaaagcgcagaggagtaaataaagatgtcatccgattgctggaatctttggaagaacaggaggtgaaaggatttaacagaggaacccactcgaaactggagaccatgcaaacagctgagagtgaaagtgccatggaaagccattcactcctcaatcccaacctgcagcaaggtgaaggagtcctctccagcttccgaaccacgtggcaggagtttgtggaggatctgggcttctggagagtattgctgttgatcttcgtcattgctttgctgtctcttggcattgcttattatgtgagtggggtgctacccttcgtggaaaaccagcctgaactggtgcattaaaggagctcatggaagatgaggcaattaattgcctgtttcctggcttccaatgtttgttctcagtttctcagaatttttcttagcgcaaagcagtgagggcagtacatgttctttttgcatttttaattattgtaatccttttagataatgatgtgttcatttgaactaactacatactatgatcaagtatattgcatcctaacgctacctctgacttcaacctgactttgtagggaaagcctacacgtaggccttgtttggattaaaaacacgggaagtgactagagaatggaagataaaggaagaagctaggaagtccttgcttatcaaaaccttatcctaatataggaccaattgaagtattcaaaaagaaaaacagtatcttatatgattagtttttgttggtggttttgttttcatttatttttgcaagagccactttttatttactttctctagggataagagataaaacttgaaggtacttttttcaaatcttgtgtgcaaattagtattgttagcatctatttggcttattttagtatttttaagtctagtcacaaaccaaacaaaacttttgaaaatgagctatattttgttcaaagataattgatttgatcttatatttatttgtttttaggataatttttgatctttttgtaaactgctttgcttgttaatatctgtgaaaaataaatgagttcattttgttcactttccaattttcccgagtatcctagtcatcaaagataacagttcatcagaattacagtcagaaaatcctttttctactgaatagttagcagggaaaaataattctgatatttaactgtcataattctgtagtgctattatagtgaaaaactcagttctataagctaggctgtgttgtcacagttttatcatagttcataattatttcatgtgcaatcctatttggaggccctgttagacttttaacaatcccatccatatctgtaattctctgatggcaagaatggatggagcatttctgagttaacagtgctgggacagtatcgtactgggtgtcataaactctttatgaatggtaatattatgtaaattgaaatctggccctcaaactatattgcaggctttcagcagtatgtttgaaggcctcttttgttaatgattctgtaatgtatgaatttatgttcttgagtggttaaaaaagaatatgaaggcttgataattatttattgggtaaagtcaggaaaattgtagtgaaagaactaatggttttgttttttggaataaaggcacctaagctattgctaattgaatttgctgctagaattagaaattatgctttagatagaattggtatttctgtgattctttttgcttcttggtattttctcttgtatctatgtatctagtattgaggcttgcctctttcatgtggctttatcctctctttaatagctgttgtaaaattcctgagtaactggctgcttcaggatcagccttgcagagtcttgcttttaggttagatacaaacaaagtaaatcatagttggtgtaaatccagcaaaaaacagcctggctttggaatggagaacactacaattcaaatttgaagtatattcagaagaaaactttggaattagctttacatttgtttgtaaatctaaacaaatatgcaaaattggtcaaaatgtaagtatatagcatttttaaagattaatggttccttttatgtgctgatttctttgtattctgttctctgcattcatcattcaggaataccaccaataaatgtatttatatatcc

SEQ ID NO: 1659 - DNA, 572 bp, Homo sapiens
tagaattgtgttttcactatgttgccattgtatgtctcaaattcctgggttctatcgatctatttgccttgtcctctcatagcattgggcaggcccattacgccatgagccaccacacctgctggtttttgttttttaaatggaattgaaaggaactagccttggctagttgcagaattcacacatatggggctatggcaacagcagattctggagtctcagggtcttttctttctagataagttacagggcaattgcttttcagagtacttttacatttctattccattcttgtcagtaaagacaaggatcccataagctgatggagaaactgaggcctctagaaactaaacgctgggaatgggcacccagggtgctgaattccagggtctcctcttttctgccacaggcacacatgccccagcagcccctttggagagccccctctctatagggtactagccgggggctcagactctggagtcagacggcttccgagggatgaggcctcagacaagtaactcagctttgaaatgtcgagcggccgccaatttagtagtagtagcggctgc

SEQ ID NO: 1660 - DNA, 1047 bp, Homo sapiens
agaaaatcaaatcaatgtgccattcttccaggcgcgaggcagcagcggctgcagttcaacatgaaaggaggcttcctccctgcctgctaattacctgctcttcccgatctcatcgtttctgcctttgcaaagtgctactgagaagcgggaagaaacgtccgccacccatcccccttgctgcctgggggttcagacttgattgtgaaaccccattggcttcattggctccttgatttaaaccacgcccggctttctgccctctttgctgctgctggggccaggttgcccagccatatcccagccccgtctgcagggagccggaggctgctgctgctgctattgtgtggatgccgcgcgtgtcttctcttctttccagagatggctaacaggggcccgagctatggcttaagccgagaggtgcaggagaagatcgagcagaagtatgatgcggacctggagaacaagctggtggactggatcatcctgcagtgcgccgaggacatagagcacccgccccccggcagggcccattttcagaaatggttaatggacgggacggtcctgtgcaagctgataaatagtttatacccaccaggacaagagcccatacccaagatctcagagtcaaagatggcttttaagcagatggagcaaatctcccagttcctaaaagctgcggagacctatggtgtcagaaccaccgacatctttcagacggtggatctatgggaagggaaggacatggcagctgtgcagaggaccctgatggctttaggcagcgttgcagtcaccaaggatgatggctgctatcggggagagccatcctggtttcacaggaaagcccagcagaatcggagaggcttttccgaggagcagcttcgccagggacagaacgtaataggcctgcagatgggcagcaacaagggagcctccccaggcgggcatgacagggtacgggatgcccaggcagatcatgtaggacgcggcatcctccccctggtagagaggacgaatgttccacaccatggtctctacgaaaaagaaata

SEQ ID NO: 1661 - DNA, 580 bp, Homo sapiens
gccttaagttaccattaattgtcgtgaataaaaagttggtctcagtgagttttgcagttgacaacgaaagatgggtgttcgtgtgtgacagcgactcctggtttctcctccactttacctgccgctccacatcaagttttcttctgctggtgccactttctctgctttaccttcaaggttggcatcctccaagtaatggcgattctcattccctatctacgctcttcctatggtctttgctgaattcttggctttaaatatccctgtgccccagcaccgccccccccgccccttatttcactaattcatgttttcagcttctgagctcaggatctgtaattcagacacctgcttgatttctccagacgcatgtctaatagtcacgtcaaacttgccctgcttctcaaacctgttcttcttccagtccttcctccttatttgtggccccatcttgcagggcctctcatgcttgaaacctgtgaccatcttctattcttccctctcttttgtccggtaatctgtctagcagcagccattgactctggccaaagcatcttgatctcaccttgctctccatctc

SEQ ID NO: 1662 - DNA, 711 bp, Homo sapiens
ttttttttgacattttctcctaattttatttaaagccatcattatatattaaaagagcagaggtaattctgtcttctccggttgtgcagcacgatctgctccagctcgtcatgccagggcccggaaaacctccaccttctcccggtacagctggtggaactgcttggcaaggcagtggaaaggggcttcgaagttttccatctctttctggaaagacagtttaaaaagttggctgtgttcttttagaagggtcagagggccagctctcactcaatgcttccctcattcgggggctacctactttccacctcatttcatcttcacgcccttcgaggtagccactttcatggatgccagttttacaagaaggaaactcagatggagtcaggtaactcagagatgaaggtaccttgcaggaagccacacaccttgggaatggtggagctggggcctgaacccatgtctgtttctacaaagcctgtgcttttagttgcagtcactgtacgtgtgacgagatgtgaaaatgacacctttcctcagttttgactgaggctccaaaggccaaagcaaaataccaaggaacctggagccccccatcccgaagaagagctagacagcatggggcaccctcttcctaggctggtgctggacccaggcctgggaggaatcgaggtgaggtggtggctgggcaagccaggagagggctaccac

SEQ ID NO: 1663 - DNA, 839 bp, Homo sapiens
ggattttgagaatggacttaactttcctggaatccaatgctcctggagatttatgactttcccagccatcagccagctatctagagaagatttttgtttttcttttgcaacagtttcttcagtcaactcattcactttcaaataggagcagcactttgaaatcctttttcttcactgtggattaaaaacatccaagaagccatctctgtcaagcagaattgtcatctgtggtaataagtgaccatgtcctaaatacctttttcttagtgaggagttggtcattgtctttggcatctgcaacccctgttcaggcatgtgacctgctaaagaaatacagcctacactaccttgactactggggaaaatggatacttcgtaaaatgtaataaggcaacctgttccttggcctttatcttatgttttccaactattactgtatctgttattggtctactattacaggatgattcttcttcctccattgatctcaactaaatatggaattagggtcatgcatgaaatctgaactgccgtgtcctgagttatggttaagaggtatgtgctgccaccccatgcatgtcttccccatccccataggattttaaagtgttcaggtaccaaacacagttctgtgtgaggttttatgcctacttcctcaacaccaattcagaggcaacacctgtgcatctgtcccaacaaaggtgctttaatacctaccttcactatttgagaaaggacactcacagttgcctgtgggttatgaaagaattggccctacgtcctgcatgtaagatgttacaggggacattgggccaggcattattatatagagaagtctt

SEQ ID NO: 1664 - DNA, 513 bp, Homo sapiens
  misc_feature (1)...(513): n = a,t,c or g
gatcagatggcaggggaggcgtcctgaatcttcaagttcccctttccacccattgtcgtcacctgagcagctgttttgttttaattttgctttattgtttaaggaagttcattcatactgattttctcactcaagcctcatggcccctgggtgaggtaggtggccctattcctccttttacaatggaagagaaagctcagcgttcagtcctccctcttctccacggctgctcactcccattcccatgttcttcactgcagaatgacgtggctcctgtgtgtcaatccccaggggaggaggggaatagcatctctgccctcaggaaccttccagtctcactggggggtgtgccacatacataaagctgattaccagcactcanggcaacaatgcccatanccgtgctganagcccaagacttggagttcaagnggagaaaaggtcnctgaaacaagaaaaanggcggaagtanatgcttaaaaaggngggnaaanttggggnacaagggctggc

SEQ ID NO: 1665 - DNA, 1250 bp, Homo sapiens
ggcctctcataaagtagttttatttagatttcaaacaaaccaaagcagggaaaagagtcggccacggtgaatccgtccactcagtgctggacgtggctccaggacctggagctgacaggcaggaccgggcccctcggaccgctacacctgggcctcccaggctggtagtgtcaggaaacggccccccgcccacgttcccagcagcgcccccgtggctcctccggggtgcggccagtccggaagctgggggaccccggtagaagtcgggctcagctcccctcccgaggggacaggtgggccggccgctcccaccctgggcccgtccaccgagccccgagtgacgtgagtggcggtggggcagcccctcttctctgaagcacgtgaaaacccagaacagacatggggagggagaaaaagccaaaacgaaacaaccagaggagacggggaccagcacaaaacctccgtgaggtagtctgtcgtctaaggagccacgggtccggccctagtgaggtaaactcggcaagtttattctggtggtgtcaggactcctccgtgccagagtcatcctcatcgtccccgaagcagctgtcggcctcctcctccacctcgccgtcctcgtagtagtcgtcgtagaagaggtctgagccctcgtcgggcgccggcgccttggtcttcacgcagtactcggccagcgtggtgggcaccttcacgccgtcacgctccgcgtccaccttggtccccaggacctgcttccggatgatgtctgtgtactcccgatccttccccttgctctctttccacttcctgtacatcacggaggcgtccacgtttgcgggcgagaaggtgttgggctcgttcaggagggagatcacactcaggagaatggtcctgacgttctgcgtggggttccacctctctgagggcagctccccgctctgggggtcgtccaccggcgggtggaggatggagatacacacgtcccccgtctcgtagatgttagggtgccacatcttggtcaggaaccgaaaggctggtggagagtatgggtagtcgatggggaacttgaggcgcgccttgaagtagccgccctcgtagtaggtgttggggggcccgaagatggccacctcccagttgtatagatcgccctcgtccaccagtgtcacgcggaatccctcgaccggctcttcctgcagccccttgagctccagcagcagcgccttctgcgagctgggcactagcggccgagccat

SEQ ID NO: 1666 - DNA, 738 bp, Homo sapiens
ttttttcaataaaatagtaaagaaatattttatttacctaaggtgttagtataccattaaaattagggaaggaagaaaattttgtacatgggcatagcttcaaaaattctgaagggtatttctgggtatttagataggacttttaagattgaggcctgtgcggttttttaatgggtctaaaattaagacaattcatgtcctttccttgatagtatttgcacaaatcatcattaccagtcacgactgtggtcagatgctgactcccaagtaagtcgaagagggaggcaaacagaaggaaaagagaaatcttcctgagatatctgggtaagacatgaagaggacagagaattgaggttaaggatttgcgtatatgtacctaataagatacaagtgatttcattcaccagaaatctggggcggggcggggaatatgtatctatatatggtagacttttctgggaatgagacgtgagacctcccccttaagaacatggtcaggtacaacaggtcactaaattgcctcctaatgttcaaatgaatgaatggtgaactaggggaagttttgctgagcaggaatgggtttaagagggtaattgagctagggccaggggaggcgaggtgatggattggatatctagtaggcaaaaagaagttgaggtgactgagccttgagaggggaggacaagaggaaaaccttcattggtttggccagtaaggtacttctgagaacaaaatgtc

SEQ ID NO: 1667 - DNA, 4002 bp, Homo sapiens
ttactggaaatagacattcaacttggatgtcccttttggaaatgtgcctgcgtccagggctgggttggggccccattgaactttggctctgacacagctgttgccacactcagtggaactgaatctatgtttgtcttccccggcatccttcaccccaactctccccgccacaacatacatcccatgccagcgtggggaccctcaaaggtggcttcatcattaggtttgtggctgggtcccactgaagtaagtcttggcactcagagggataggaattgaatgaagacatgagattcctctgcgggaggcctctctaggaaatctgtggactcacacgtttactaatgttgctgcagccccgcacccaccttggccttgggcagccatactctagggcttttgtaacgtctccatgtgaggaactcaaattagacctgggtttggaggcggtgctccgagctggcctttgggggaggttttgtgcgaggcatttcccaagtgctggcaggattgtgtcacagacacagagtaaacttttgctgggctccaagtgaccgcccatagtttattataaaggtgactgcaccctgcagccaccagcactgcctggctccacgtgcctcctggtctcagtatggcgctgtcctgggttcttacagtgcctgagcctcctacctctgctggaagcccagatcccattgtgtgccaacctagtaccggtgcccatcacaacgccaccctggaccgggtgagtgcctgggctagccctgtcctgagcacatgggcagctgcctcccttctctgggcttccctttacctgctggctgtggtcgcacccccactcccagctctgcctttttctcttctgggtccccagggtgaaattctcaccagcccaggggactctggaggcaccccctgcctccaaacacagaagcctcactgcagagtccttcacggaggacggttctgtgctgggcctggaggggctgcctggggggcaatgactgatcctcagggtgagctcctgcatgcgcactgcccaccaggggcctcatctccccatctgcaaaatcagggagagatctgcctgagtctcctcccagctgacagtcaaagattcagcatcaagcccccatcaccagctccccccttctccccagatcactggcaagtggttttatatcgcatcggcctttcgaaacgaggagtacaataagtcggttcaggagatccaagcaaccttcttttactttacccccaacaagacagaggacacgatctttctcagagagtaccagacccggtgagagcccccattccaatgcacccccgatctcagctgtctggccagaagacctgagcaagtccctccttcttcctggccttggccttcccatgggtggaaccgggagggttggctttaatctccaccagaactcttgccccgggactgtgatgggcgattggccacttctcctcgataacattactgtttttcttccgccttctggttgactttagccagaaccagtgcttctataactccagttacctgaatgtccagcgggagaatgggaccgtctccagatacggtgagggccagccctcaggcaggagggttcaccgtgggaacagggcaggccagcataaggtgggggctggatgtagagccctggaggctttgggcacagagaaataaccactaacatttttgagctcttaccacgtgctcagaaaaaatccctaagaagacactgagagaattagatgaggaaacataagaacagagacctcaaatagtttccccaaggtcacacagcttataattagaactagaattggaactccaggctggcttcagatctgcctctctctcacgccctctttaagatcctttgcaaaccaatggtagaagcctgtatgttggagaggtggtaccttcaactatgtcccccatcaccgcagaggtggcacatggcagggatctgatggagctgaactgacatcatttagcatcccgagcctcctctctgggcctcattttcctcctctgtaaaacggggagaaaggccctgacagccacagtctgtgtgaggctcctgagatctcatgtacagaaagtgcttggcgtggagctgggcacgcagcaggggctgggcacacggtggcccaaaggagacccgggccttcactgatgggctttgtggccccggacacacctaggactcctcacctgtaagacaggcaccattgtgccatcccatgttctcacccagaggctctttttctcttccagagggaggccgagaacatgttgctcacctgctgttccttagggacaccaagaccttgatgtttggttcctacctggacgatgagaagaactgggggctgtctttctatggtaggcatgcttagcagccccaaactcatgcccctctcaggcctcaccccccattcacccacccctgggctggcccctagaaccccagccctccctggcctccgccgggccccaccatgtccccagtcagtctccttgctccccctgcagctgacaagccagagacgaccaaggagcaactgggagagttctacgaagctctcgactgcttgtgcattcccaggtcagatgtcatgtacaccgactggaaaaaggtaaacgcaagggattggacattgcccaccttgtccatggcccaacttgggcagccccagaggcccagagcaggaaagctgccaggcaaggctgcacagctaggcagatcttctgcttttaggcacctgcctcactgtagggacagctgagctctacagaggcccaggggtggtggatgagagcccaggagggagaagtccctgtgaaaccagggaggacctgaaagctaacaggagggaacagcgtgagccacggggttgggggattggcaattggaggggacgtaatgcggggagttaccacctacagacgcgtcccaaaccccaggctttcaccccaacctccactccccgctcatttttaatacccgtgcagtggggaattgatactgtggttttcaatgtcacccacactgcagcacggccacagtcaccatcccgatttttgctacaaatgaaaattactgtataatgagctccttaacacttttctttaaacctgtgtttggaagacttgtgttggtgtggccctgtgccctaatacctgtgaaatcacagcaccgatgagctggttccaatttttaaaatatatacatgcagtacttccatgactattcaaagaaaaacaattccttccatttgccacctgagatgaccaccagggatgtgaactacctcctgccccatccccagccccaggatcctgggacagggcttatgaacgcaaccactgtagtcagctcacttgatccacagcctggcacctccactgtctggctagggagcctcgaatgggtcccaaggccaccctgctcctcagttacatcatctgcatagtagtggtggttgtgaggaattcaggagctgcagcataagggccctgcaggtactatgtgctcagtaaatgccagtggttcttaagggtctgagctcccattgtagaggcaagtaagctgaggttcagagacagaaaatgacttgcccaagatcacccagctgggaagtgacagtgccagggttggagccctggttgagctggttccacaggccagagctcattctgccctctccccggaagacctcccaccctgtccccatgcctctgcttctccctcaccccaattaattccccgctgccttctaggataagtgtgagccactggagaagcagcacgagaaggagaggaaacaggaggagggggaatcctagcaggacacagccttggatcaggacagagacttgggggccatcctgcccctccaacccgacatgtgtacctcagctttttccctcacttgcatcaataaagcttctgtgtttggaacagctaaaaaaaaaaa

SEQ ID NO: 1668 - DNA, 356 bp, Homo sapiens
cacagagcaggtaaggcacttgaccgaggtcaggcagcatgggacttgaacccgggtggtctggctccagagttcatgctcttacccactcgactctgccatctcctgaacagaaaaggcagcttttttcttttttgtattttgtatttttacaaaatacaaaagggagagcttccagagtggagaggggcctgctccaggaaggatcaggaaggttttgtggggtggaggtgttgagggcggcaggcagaacctctgcagaaaagagaatggaaggcagccttgacagaagcgtgaccgaaggcagagaacaggagggtagagcgtgttcagaggcttagaggagacagtcagac

SEQ ID NO: 1669 - DNA, 323 bp, Homo sapiens
  misc_feature (1)...(323): n = a,t,c or g
gaaaaatgcttacatcttaaagaagtctcggatctctaagaagcctcaggtcccgaagaaaccccgagaatggaagaacccggagtcccagcgcggcttgtccggggcccaagatccattcccaggccccgcccccgtccctgtggaagtggtccagaagttctgtcgcattgacaaatcccgaaagctaccacattctaaagccaaaactcgaagccgacttgaggtggctgaagctgaggaagaggaaacaagtattcaaagcttgcttcgttctgagctgctgcttgctgaagaacctgggtttctggaangggangatg

SEQ ID NO: 1670 - DNA, 515 bp, Homo sapiens
  misc_feature (1)...(515): n = a,t,c or g
ttttttttttttttttgcacagagacgtgtcctccttttatttcttttaacagccgcttaatgttttatcctagcaggaaccctaccatgggccatttaaagtgtttcaaatcttagggggctgagcatgnnnnnnnnnnnnnnnnnnnnnnnnnnnnnnnnnnnnnnnnnnnnnnnnnnnnnnnnnnnnnnnnnnnnnnnnnnnnnnnnnnnnnnnnnnnnnnnnnnnnnnnnnnnnnnnnnnnnnnnnnttagacctgtagtcccagctactcggcaggctgtgtgaatagtaaggggtcagtctggttgggagtctgtctggcgggggtctggctggggtctgcctagataggtcctgatttgctgggggtccatctgtctgaatagctggagatgtgtactcatttgggggacttgtctgtcaatctggaggatcatgtctgactagctggggtccatccatcaagacatcaagatgagagtctggccggctggctgggatgtcaggattc

SEQ ID NO: 1671 - DNA, 740 bp, Homo sapiens
ttttttttttttcgtacaaccccagaccttttcttttggtagtcaacaattggtcacattgcacatttcaaggttacagaggcccaccatacacatgcggggcaggaggagataaatcttgcttggggctaaacaataaagctacagcgagtgttccagaagttgaccacatctggaagcaagaagacagactctggaagaagcaccctagagactccaggaacccccttcactcctgggctttcgggactctacagcgtggggcctctttctcagacatcgaaaggcctccttttctggaccacagtggagcgatgtgcaggtcatcggctaagctgggcgggtcggggagggcagggggagtacagttccttcggatcccagcaaaggtagactatcaatggccaagggttcagaggcaggaaaaaaaggccgtttctggggggttggctggggacactccccttcccttctctctccgattaaatataaaagccgatgatgatgaagattgaaaagatgaggaaaatggcagccgtgtctcgggtatcctcccagcggaggcctttcatggaccgatactcctgccgtttgcgaaggcctcccgccggccctcaggcgccgttcccgctccagttgttccccgtagtgggcctggtagaaggcgtcaaagttgaacatcgtgcggttggcgccgggggaggcccgagaaccgtcgtgggtccgcctcgttccgaatc

SEQ ID NO: 1672 - DNA, 627 bp, Homo sapiens
gacagactgacgtgtgagctgcatcgcgggaggcgcatggcggggatggcgctggcgggggcctggaagcagatgtcctggttctactaccagtacctgctggtcacggcgctctacatgctggagccctgggagcggacggtgttcaattccatgctggtttccattgtggggatggcactatacacaggatacgtcttcatgccccagcacatcatggcgatattgcactactttgaaatcgtacaatgaccaagatgcgaccaggatcagaggttccttggggaagacccaccctacgaagttggaatgagaccatcagatgtgataagaaactcttctagatgtcaacataaccaaccttataaagactaaaattcatgagtagaacaggaaaatcatcctgactcatgtgttgtgttctttatttttaattttcaaagaggctcttgtatagcagtttttgtctattttaacattgtagtcatttgtactttggatatcagtatttttcttaacctttgtggactgttttcaatatttacccccgtggaaagcttttcttaatgtaactttgagtacattttaattgccttctatttttaaaactcaaaatcattaggtggg

SEQ ID NO: 1673 - DNA, 1492 bp, Homo sapiens
gacgtggagcccgcagcctttctgatcctcttaaagtacatgtacagtgatgagatcgatctggaagccgacacggtgctggcactctgtacgctgctaagaagtacatcgtcccagcattggcaaaagcctgtgtcaactttctggagacaagtttggaagccaagaacgcctgcgtccgtgctgtcccagagccggctgtttgaggagcccgagctgacgcagcgctgctgggaggtcattgacgcacaggccgagatggccctacggtccgaaggcttctgtgagatagaccggcagacgctggagatcattgtcactcgggaggccctcaacaccaaagaggcggtggtcttcgaggccgtcctgaactgggccgaggcggagtgcaagaggcaggggctgccaatcaccccacgaaacaagaggcatgttctggggcgagccctctatctggtccgaattccaaccatgaccctagaggagtttgccaacggcgctgcccagtcagacatcctgactctggaggagacccacagcatcttcctgtggtacacggccaccaacaagccccgcctggactttcccctgaccaagaggaagggcctcgccccgcagaggtgccaccgattccagtcttctgcctaccgcagcaaccagtggcggtaccgcgggcgctgcgacagcatccagtttgcagtggacagaagggtatttattgcagggctgggcctgtatggctccagctctgggaaggctgagtacagcgtgaagattgagctcaagcggctcggggtggttctggctcagaacttgaccaagttcatgtcagacggatccagtaacaccttcccggtctggtttgaacacccggtccaggttgaacaagacaccttctacacggccagtgccgtcctggacggcagcgaactcagctactttgggcaggaggggatgacggaagtgcagtgtggaaaggtggccttccagttccagtgctcctcggacagcaccaacgggactggggtccagggtgggcagatccctgagctcattttctatgcctgaggtgcccggggaggctgcagcaggtcagcgagtgagtggaggggaagtcaagatgctaactgcttcttgacaccatgaaaggctgctcttaactttgtctctctttgacatgtagtcagctgaagcttgactgtgtagagacattttccacacagccagaacccagggattggagtcttaggcatctctggtacagtggggtgcacgtctcaggtggaggaagatttacggctcaagacaggccccagatcccctcccaagtggcacccatgccacctgctttgaggggttggatcttcctgctaccctcttggattctaagtggttccaagcttaacttgagaccttcccttcaaatctaaaattggcaaaaagtcacttaaaatagtggacttctgtaataaaggttgcctaaaataacaaa

SEQ ID NO: 1674 - DNA, 591 bp, Homo sapiens
  misc_feature (1)...(591): n = a,t,c or g
ggcatgagccaccacacctanactacaacttaattttttagtgccagtgacaacccactggactgatttcatagcccattagtagaggaatgcgccatcctgactgcaggttagaattttctcagagaatctatgtagcactgatgattgggtttcacatccagacattctagttatgctaatacaggggccaagcaaactatagcctgtgaacggctggccccctagttttgtataccttacaagttacaaatgatttttacttttttaagtgcttaaaaaaatcaaaannnnnnnnnnnnnnnnnnnnnnnnnnnnnnnnnnnnnnnnnnnnnnnnnnnnnnnnnnnnnnnnnnnnnnnnnnnnnnnnnnnnnnnnnnnnnnnnnnnnnnnnnnnnnnnnnnnnnnnnnnnnnnnnnnnnnnnnnnnnnnnnnnnnnnnnnnnnnnnnnnnnnnnnnnnnnnnnnnnnnnnnnnnggnaggananggcttncccggggangcggagtttgcantgancggagntcgggccacngcactcnagcctgggtgcagacangctccacncaanannngnngggtgaggagggg

SEQ ID NO: 1675 - DNA, 707 bp, Homo sapiens
cttatttttctctctggactgtgcatagcagtagctgttgtttgggctgtgtttcgaaatgaagacaggtgggcttggattttacaggatatcttggggattgctttctgtctgaatttaattaaaacactgaagttgcccaacttcaagtcatgtgtgatacttctaggccttctcctcctctatgatgtattttttgttttcataacaccattcatcacaaagaatggtgagagtatcatggttgaactcgcagctggaccttttggaaataatgaaaagttgccagtagtcatcagagtaccaaaactgatctatttctcagtaatgagtgtgtgcctcatgcctgtttcaatattgggttttggagacattattgtaccaggcctgttgattgcatactgtagaagatttgatgttcagactggttcttcttacatatactatgtttcgtctacagttgcctatgctattggcatgatacttacatttgttgttctggtgctgatgaaaaaggggcaacctgctctcctctatttagtaccttgcacacttattactgcctcagttgttgcctggagacgtaaggaaatgaaaaagttctggaaaggtaacagctatcagatgatggaccatttggattgtgcaacaaatgaagaaaaccctgtgatatctggtgaacagattgtcccgcaataaatattatg

SEQ ID NO: 1676 - DNA, 454 bp, Homo sapiens
cccacgcgtccgcccacgcgtccggtcctgtgggtatgaaggaaggaaaaggggctgtggttaagtgggctgggggcagagtggtttggggtcatggggggtcgccgagctcccctgaaacgccgccttctcagcagaccctcaagaatcgacccatcaggacgccagagctgcttcagcggtgaccaccttctccctctaacacattcttcccttcttcacaaacggcccatgtcagacgaaggctcaagggggagccgcctgcccctggcgctgcccccggcctcccagggttgctcttcagggggcggcggcggcggcggcggcggcttcctcggctgggggctcgggcaattcccggcccccacgcaacctccaaggcttgctgcagatggccatcaccgcgggctctgaagagccagaccctcctccagaaccgatgagtgaggagagg

SEQ ID NO: 1677 - DNA, 597 bp, Homo sapiens
tagaatggtaatagaataattttctgcagaaaggacatttaaaaataatctgtttttgaatgccagacaggaattattttgtagcaatcagttttcaactgttgttttcaaagctcctttaccaggggaagctgtctgatcatctcccatctctagccagtttcaccctacatcatgagctgtctttgcctttccgtacaccattacatgtaactcttgccctaagttgttccatgcatgtaaacaactttttcctcctgcttttcacacctcaactcaatcttcaagttttgatttattttcacttgattcctttatttagtctcccattgggttataatctcatcaagagaagagagttagtactacttactattagttcaaaaataattcctattccctttaagttttagacttttcagagcactttcatttttgtcagagcattataacattcatgtgttagtttttagagagctcactatcctcattttcccaatgaggtcactgaggcagaggcagccacacttctcccaaggttacatgtaatccaaaactaaatgcctagactctgggcccatgatttttttttttttt

SEQ ID NO: 1678 - DNA, 181 bp, Homo sapiens
gggcaaatgtagaaaagtaggaaagaaatcatccatagtaccaggacacaatcactctggatattttggtgtgtttcctttcagtcttttttccatgcacaaccattttcatataattttatcatactgtatctgcaacttttatgtcctgcttttcccttgaatattgtgtcataagcaa

SEQ ID NO: 1679 - DNA, 1107 bp, Homo sapiens
  misc_feature (1)...(1107): n = a,t,c or g
atatttttaattaacctttatttaagggggaattaatttccaggtttaccatatgagtaacctgaaatatttgagtaaaaaagggccaaaagtttaaatttggaatgctgtatatattaggagaatatggggaatcatggtgtgaccaactgtacaaggaagattcatatgaaggtcttaggggaaaaagataattctgaagggtgaaaaaaaaatctctcccatggagattcttcacattatatggtttgacataagggtttataaggttgtttgtccaactaatgaaaatgcgcttaataaaaaattctgaccttgggtaagaattcgctttttaccgcattgccgctttcatgtacatacatgagtgcatgcacctatcaatgtgttttcttcccaacacttattaaatataaaacaacctgattttgtgctcgtttctcgtttttcttgaggccctgaagcttccaagataaatataagactaaaatttgcttgttccttcacacctgatttctcctagaaccataaatacctcctatggggaactaagaaatcatgaatactgggattttcttattgggattttttacttttgttttgtggggataacgagacagaagtgaaaggaaaactggtgccggtattactgttgaaattaatgtacagtgaatgtttttaaagtattaattttaaaaaaccatgttctctagaaacaagttttaaaaatctatatgaaagttttaaaatgttccagctaactaatggataagcataccagtaaagccaaagtaaaggttagtgcctttaaaactaacctgtgttagagttacatgaatctggctctaaagtatctattttgcatccatttatatatagatcttaaacagaaatactcctaggttgccacaccacagttttaagaagttatgctgctgctgttactcctcttctaggatttggtggtaaagtaagaaactcggacactatattaacctnatgaaacatgctttaaatcgtgtctaaaatctgatttgagcaagtcactgccgagcttctgagtctgcattgacactgctactgactcacctctccttccctgggata

SEQ ID NO: 1680 - DNA, 458 bp, Homo sapiens
  misc_feature (1)...(458): n = a,t,c or g
ggatcatcaggggttgtcaaggcctgaacgtgatgggctgtgatcttgtcgaagtttcaccaccgtatgatctttctgggaacacagccctgctggcggctaacctgctgtttgagatgctatgtgctctccccaaagtgacaaccgtctgagtcttgtgctcttcaagacaaaacagattgcgtcgctgacaagttctcaagaagaacttatgagtaagcagtctgagaactaaagagtttatgccaagaaaactttctgctgaaagtgtcattgctggctgtgaagtcgggataatcagtagaattctcacccaaacagcaacatttctaaggaacttggattaattgggggaaaaaaaaaggagtacttgtactgctttgatttttttttcctttggatggaaagatgggagggttaaagggtaagtgagggagnatttcttttcaagttatcta

SEQ ID NO: 1681 - DNA, 743 bp, Homo sapiens
  misc_feature (1)...(743): n = a,t,c or g
ggggaaagaagccggatgctttttcaccttaggtgaaagtcagtaattggagttaccctttctgaggccctgctttgcagtataactgaggatcaggtgctgttctgtttctgcttcaaattcaagtcctagaggacagtctgaacaaaagcatcattaaaccagggaaggaccaacctctaagccaaaaactaggcaattatatgaatcctcagaaaaagaaatgagcccagagacctgtgtccccaaacatccgtaaatctcatagtaaggcaggacaggataaccagaaaaaaacaatgtccaactggtctggtttctggtctcaatggtaccaaagggatagtcaccacctcaatcaactgggaatccaaacaggcagctgctttcctacaaggaaagacatcaagaactactgagtctgaagggtgacataatcaaccacaagaaaatgttacggtttagcctgggcacagtggtnnnnnnnnnnnnnnnnnnnnnnnnnnnnnnnnnnnnnnnnnnnnnnnnnnnnnnnnnnnnnnnnnnnnnnnnnnnnnnnnnnnnnnnnnnnnnnnnnnnnnnnntcaaaaattagagaaatataaaaattataaaattaaaaaagaaaatgtcatgatagcttaggtttcagagaggatgctgcactactctgggaaaaaagtgaagtgacagctcagccctgacagcaggacctagaagggctgagatgaagaggctgacct

SEQ ID NO: 1682 - DNA, 703 bp, Homo sapiens
gctcgacgtggagccaggactcaaagccagtctaggagccatgtccactttgttcccctcactcttccctcgtgtgactgagactctgtggtttaatctggatcgaccctgtgtggaagagacagagctgcagcagcagggaacagcagcatcaggcctggctccaaagcatcgcggagaaagacaacaacctggttcctattggcaagccagcctcagagcactatgatgacgaggaagaagaggatgatgaagatgatgaggatagtgaagaggactcagaggatgatgaggatatgcaggacatggacgagatgaatgactacaatgagtcaccggatgatggagaggtcaatgaggtggacatggaaggcaacgaacaggatcaggaccagtggatgatctaggtagacaaggcagggtggcctcagggagattccaggccagcccaaactaccctgcatcccaacccccaacccctgcccacagaaccagctgatggccccagtgcctgaaagtgcccttgggcacctcctcagctgctgccaggatctggtctctttggcccctcccaggccatcagtctgcacttgaaatccccagggcctgaaacctactccaccttcctggccagtacctcaccccttgattgccaggtctggtctaagtttctttaataaagacaaaggagtgattttccaaa

SEQ ID NO: 1683 - DNA, 837 bp, Homo sapiens
ttttttttttttgcatttccacgtgtgcatttattgttattgctcagtatagtgttgaaaaggcagacaaatcccattaattacaaagagcacaagccaaagatacagagaaataaagagtgtacaataagagcacagtcacttcccagccccgattgtcccagagccccccagagcccgggcagcttacggaagctggaggcggcaccattccctcgctactctattataaaatatgtgcacacaagagttagcaaagtgtgggtgacccccgagagggaaaggtccaggagggagagcaccacaagcattacaaaacagactttagggggcttgagaagggcagtcccaaagcagcctccaatattgttttcagtggagggggtgatggctgctgccttggggctggggaccctcctcccccacctgggttggtatgatctctacattaaaatcaggagagcttggtttggaactttgaaaaggcctggggacttcctgctattgtctgacttccctcctggctctggaaggcctaaaagccttcaagaaacgctcttccctacaagagcctctaatggtgggattttggacacaatggcaggagagagatttgggtgggaggcttgtcagaatgcaccaggttggcagcctcctgcaggtagcgcaagagtgggctaggggagtgagggttccgagaaggcccaggcaagaactgcctgcatcccaaaggtactggagactccaaattaaagagcaagaaactatccccccaaaacaaaatgaaacaaaaacaacaaaaaaccagttcaggaaagggagataggaataaaggtt

SEQ ID NO: 1684 - DNA, 641 bp, Homo sapiens
  misc_feature (1)...(641): n = a,t,c or g
gcctttttttttattttcaagattattctgtgcactttaaatttacttaacttaccataaatgcagtgtgacttttcccacacactggattgtgaggctcttaacttcttaaaagtataatggcatcttgtgaatcctataagcagtctttatgtctcttaacattcacacctactttttaaaaacaaatattattactatttttattattgtttgtcctttataaattttcttaaagattaagaaaatttaagaccccattgagttactgtaatgcaattcaactttgagttatcttttaaatatgtcttgtatagttcatattcatgggctgaaacttgaccacactattgccggattgtatgggntttcaccgggggcaccgtgtagaatgcttgattacttgtactcttcttatgctaatatgctctgggctggagaaatgaaatcctcaagccatcaggatttgctatttaagtggcttgacaactgggccaccaaagaacttgaacttcaccttttaggatttgagctgttctggaacacattgctgcactttggaaagtcaaaatcaagtgccagtggcgccctttccatagagaatttgcccagctttgctttaaaagatgtcttgtttttta

SEQ ID NO: 1685 - DNA, 454 bp, Homo sapiens
tgtctggtgaggccctcaggaagctttcactcatggcagaaggcaaggggagccacgtgtgatgtggtgagagaaaggagcaagagagagagcatggagggaggtcccagactctttaataaccaggtttcatgtgagctaatagtgtgtgaactcactcgttactgcagggaggccaccgagccgtttgtgaggaatccatccccatgacccaaacacctgccacttaggtcccacctccaacactggggatcacatttcaacttggagattttggagtggacagatatccaaacaatatacccattagaggttacccaatacctcccacccacttgcagtctactttctgtttctatgggattttgcctgcttttatagttcaatataaatgggaatcatgtaagatataatatagtcaggtaacatataatgatgtttcgggtcaatgacc

SEQ ID NO: 1686 - DNA, 1515 bp, Homo sapiens
gcgaccgccgctctatcccagggcttccatctgcgtcagcatcggcgatccacgcccccgatcggcccttcgtgtgtcccgactgcggcaaggccttccgccacaaaccctacctggcggcgcaccggccgattccacaccggcgagaagcactacgtctgccccgactgcggcaaagccttcagccagaagtccaacctcggtgtcgcaccggcgcatccacacgggcgagccggcctacgcctgtcccgactgcgaccgcagcttcagccagaagtccaacctcatcacccaccgcaagagccacatccgggacgcagccttctgctgtgccatctgtggccagaccttcgacgacgaggagagactcctggcccaccagaagaagcacgatgtctgagacggtgggcggggccgtgttggctgagagagggctggggtccttcgtggtgggagtcgcagtgggctgggggtgcctgcctagtgctggagtaggggacaatgggaatcctagaggggatggaagacgcggggagtgagctgggtgggccctgctagcgagagaggtcaaccccggtggccagggaacccacttccaagcgcagggacgccggcctccagctggtgtgtgctaaggctccgtcctgactgccctgtgccctggaaaagcagcaatagcatccgccccttagagccctctggctagaggagccaccagtggaaaggaagaccctccatcctctggtattaacgccttaatgcccctgtcttttactgtaagttacttaagatcatttttggaagcaggcgtggtagagtcctgtaaatgaatgctctgggctagatacagcttggagaacctgctggccttgttagacagcacttggggcctttgccagcagcaagaggtgaagcgaagccactcttacctctcccttcccctcccacctgccccctgcgtaggcacccagacttggagagacccgtctgctgttaatacttccatcctcttccttcccaaagagcagatcccaaggcatttactccttggtctgtctcgctttatctgtcgcccctcccagcgctgagagcctcccctggctgtcagcagcactgtgtccaggctcttgtctgaacaccgcagcccctccttcgctccttccagagctcagcatgtcacggcaaggactgccgcattggtgatggagggccagctgaggggaagttgctggtgagtttccttttctccatttctagcatatggacacctggcctctgcttgagcacttaggtgacaggaacttccgcacctcctgaggccctggatgattctaattgttagaaattctaattgttagaaatccttccttataatgaatgaattctgctttcctataatttctacctattgggccttgttctgttctctggaactaaacagaacaaccatttacccctccttttcaaactagagaataaagatttggttttagaactggaaaaaaaaaaaaaaaa

SEQ ID NO: 1687 - DNA, 409 bp, Homo sapiens
  misc_feature (1)...(409): n = a,t,c or g
ggggtacatcattacataaatgcaagaacatcctgtttcaaatgatgacccagaaaaccacactgatggcagtgatggccagccctgaggtcttgtccccgccaccatgtcgagagttttagtggaatcactccgtgaaggtgctgttcagataaagccaaaaaccacgccaacaaacgtttcctgagtgctgctttgagcaaggtgcaagctaggttcagagaggggagggcacgagagccgtatttatctcaccctgggagctgcttaaatctggcaaagcaaggacacaaggaaaattcattgacgttacatgtcttattacaaggtttaggaaagctcccagacggaggantagttaggagctgttcacttgtccctttcgggcaaggtgttttaggcctgttct

SEQ ID NO: 1688 - DNA, 740 bp, Homo sapiens
ttcggcacgaaggatggcggcgcccgggctgcggctgggagcgggaagactctttgaaatgcctgcggtgctagagcgactgagccgctataatagcacgtcccaagcttttgctgaggtgctgcggctgccgaagcagcagctgaggaagctgctgtacccgctgcaggaagtagagcggttcctcgccccctacgggaggcaagaccttcacctgcgtatctttgacccaagcccggaggacatagccagggcggacaacatcttcacggccactgaacggaaccgcatcgactacgtcagctccgccgtccgtatcgaccacgcccccggaccttccgcggccagaagtgtgtttttataggcagaagcaatgttggaaaatcatctctaatcaaggctttattttcactggcccctgaggttgaagtcagagtctcccaaaaaaccacttgaagagaacatttttattagtggatagcgttgttggaattcaaaaaacagacaatattgccatagaaatgtgtgaagaatttgcattaccttatgtgattgtattaacaaaaattgacaaatcttccaagggacatcttttaaaacaagtgcttcagatccagaaatttgttaacatgaaaactcaaggatgttttcctcagttgtttcctgtaagtgctgtgaccttttctggaatccacctgttgagatgctttatagccagtgtaacaggaagtcttgactaa

SEQ ID NO: 1689 - DNA, 1714 bp, Homo sapiens
  misc_feature (1)...(1714): n = a,t,c or g
cccggggcgtcagtcgatattcccagggccgcttctcctgcagtctgtggagcgtccttgtccccgccgccggaatgaatgagcattctgcagcccgatgtccctgtcccctcctcgccgggccattctgattggacctggcccagtgcaatctgtccagacaagccctgcttgctggaaaactgccacaagcacaattgatctctttttatcgccattccaggggcctcaggtcctactggggaaacttcctataccggagctccagtttctcttaagctgcccagtttcacagagtacaaaatagttgtaggggaaatcaaggtgaaggatctgtccgacagtcaagacggatccacagtaatctttcggtctccttaaactaccaccctcgctgccacccaccccaaggtgnttgccgcctcaccttccttgaaatttctcagcgggagtctcctcactgccactaaaacccacccagcccactaactgaggagctagtgttaatccagagaaccccccgcaatgtgcttccgagattcagactgcttcattggaagtatgatttgttcctttctggaattgggctccgtggtggcggcggcacttcaagcaaagacagtttcttgcaagctccagtagctccgcgtgtctcatttgccaggaagatggggttcccacgtagcaaatcgtacattgtgccctgtagctccttagctagttagctcacaagccgtgttttatgactaatccttaataactatggtaaataactgtgactgtggggtttttaatctcttgtcattctcatccaaaagtgaccagcataccagttcttgcaataagatattaccctcagaatattaagcacattattgtagagaaaaaaaaatatgtgtacacatatgaacgcacaacatgcacattcatcctcacgtgtggcacgtaaggtctcatttgatattgtgtaggaaatctgaagccttttcctgaggtcatctgtaaaatagtctcattgccaaggcatccccagtgccagctggtgaatccatgatcaaaatgcatacgtattgttaaatgataaggtttagaatgacaggaacccatcactgtgtctcatggtcccacttccccatctgtgtgtgaattcctttagactaagggcaggaagacttccagctttctctttgttcttcaatgtgaaactgagaccaagtctctctaagacaaatgcagtgtatttaatgtttgtaagcaattctaagtgagatgtttggcaagaaatcccctaactgatttccatccaaacctaccttatagagcacaatattaagtgttgtacaattactgtgagaactgtgaatatgtgtaacttttttttagtatttgcccggggggaaaaagatattgtattatcatatatgcttttttgcaataaggatttattctcagaacaccaagtaaatctatctctatataaaaaatattatgtaatatatacatattcaaagtatatacagagcctgttttaaaaaatacagtattatttagtaaaattatctgttctatggaccaaatgtaaaatatttataaatgaagatgcattttaaatgtctataaatggtgtcataactagagcacgggcgttatgtaagtttctaagaatttagaggataaataataaaggttctatgatatacaaaaaaaatnaaaa

SEQ ID NO: 1690 - DNA, 529 bp, Homo sapiens
gggctagttatgtgagtttctatattagacatagtctcaagtttcaggtagggtttaaagtagagacactggtcagtatttcttttttggggggaactaggagagcaggagtagaagtgagatgttaagatcttatggcactaaagacttactattctgttcctacatactctgttaggatcagatagatgttatagaaatgccttttgtttctcctgcccttcttgatgtcacagttttttgtacttccagctgtctaaaggcatgaatctcctcttggagcattctcccagacccttctttagaagagtctatactaagttcttggtgccctcttcggcagccaagggtgaaggccccatagaggagaggatccaaaggagcattgaggaggcccaagaggaaaaggatgtggctcaggctgggagggacttcagttagcatggtggggggagaaccagtaccacatacccagtaggtaataaggtgtccagcagaggatgaaggtcagcaagttaagcagggccag

SEQ ID NO: 1691 - DNA, 722 bp, Homo sapiens
gctcggcgatggagctgttatttttagatacttttaaacacccgagcgctgagcaaagttctcatatagatgtggttcgttttccatgtgtggtttatatcaatgaagtccgagtcatacccccaggagtaagagcccatagcagtctgccagacaatagagcatatggagagacatctccccatacatttcaattagacttattcttcaacaatgtaagcaaaccaagtgcccctgttttcgataggttgggaagcctggaatatgatgagaatacttccatcatctttagacctaactcaaaggtgaatactgatggtctggtgctaagaggctggtataactgtctgacactggcaatatatggatcagtggatagagtgataagtcatgacagagactctccaccaccaccacctccaccgccaccacctccccagccacaaccaagtttgaaaaggaatccaaaacatgctgatggggagaaagaagatcagtttaatggaagccctccaagaccacagccaaggggaccaagaactcctccaggaccccctccacctgatgatgatgaagatgatcctgtgcctctgccagtgtctggtgacaaggaagaggatgctcctcatagagaagattactttgagcccatttctcctgatcggaattctgttccccaggaagggcaatattctgatgaaggagaagtagaagaggttttt

SEQ ID NO: 1692 - DNA, 231 bp, Homo sapiens
  misc_feature (1)...(231): n = a,t,c or g
gaagccacagatcccttgctgcaaggcgtagcatttttagcagaactgccagggtagagaattcaatttcaacttaacacacacttgaggcacctatttaattatttttattacaaagttcctgtttcacctgttatggattactgggtgttttattttaacaaattttggattttgtttggattttattcttacaaaaccttaggatttttttcccagaattgncaacca

SEQ ID NO: 1693 - DNA, 1299 bp, Homo sapiens
tcgtccaactaaaacaactgtaatgtacttgatacatttatatcaagttctaaagtatttagacaaatccaaatactttgtttttagttttttcctcctttccatcctgttaaccacagtgaaacgctgcagtattttgatttggtcagtgctacggaggaagaccatgaaagctgaattggtctgtgccacccagagtaaacctcttctcttcttctggaaagatggcgtgatgtttttcaaggattctaataaatatcccgcagtcatctcctgagcagctttcctctgtttcacttcggaactccttcccccactttcttcactccagtttcttcacttgcagcgttttctgctaagaaagacttatcatcttgtatctgtttatgcctctcttctttggggcccctggatgtttttgtggatttttacagagtatttatatctgcacagcgtgtattttgttatacattcttacaagcattgatattggggggtacattcataatagtgagaatatctggcagaatgtgtgaatgccatatctgtagatgacgatgaatgtgaagggttaatgtagaaatgtttgtttattctgttacagctcaaaatggaggctgagaatctctaccaccattcccttctctatttgagaatctctaccaccattcccttctctatttgggaaacaatactctcttattttgctatttttaccttcccattaactggcttcactcaacagtgccagatacctatggagaggggaagtaaaacaccttaggtcaggaataataaaccaatgagttagctcagggccggtggacatgttcactggtggaccagttggcattgacctaaacggacagagaaatgcacatggaggagaactacgttgaaatcaagatcctatgtctgttgtattttctctttgcctggagtaaatagcattataagtcattccacccttattagataaccaaagcatattggtctcaatagctttctcctgaaaaatgtgattgaatcttacctgtagcagttcactcttaaggttgaaagaactgtcaatatagataaaatccattccttattattattgattggtgtgacatttgaaaatgtgtctaaacaatatttgtaagtaaaagaaccagtcataagcctcaaatgtgttcagtgtgtaccaagctggaatgggagactggcccctcttggctttaaagtagcatgttgtctttttctagcagcttcttcctagtagacattccagggatgggaggggccagggatcatgtc

SEQ ID NO: 1694 - DNA, 1939 bp, Homo sapiens
  misc_feature (1)...(1939): n = a,t,c or g
ttttttcttttttgaaacaatttttctgaaatttatttctaaaagtcagagacaaaactttagaagtgacacatttatactaagcatacatgcgtgagcanaaaaaaataagcacagaatacaaaaatgaaatagtaaaattttaatacagtattctgaatacaagtagaataccactagataagaattgtatttacctaagaaatctatgatagtgtgggtggagataaaccagtttaggatagccacttcactattcacattttaatcagtgctgaccagaaggctaaagcaatttcttttaggctaagattggcaaaaaatcatagacccaattttccttgttatggatcaaatgaacatgttttaaggtgatttgccctcatttaacggtagctggagtaagtcaaaccacagagagcccttacaaagactaagcaccaaatgatgaactgtatgtggcttttgttgtgggccatcttaggtcttgacgtttccataacagtcatgtggcaattctacaggcaagagttaacggggaagttcagcttggagatcttggcaactgtacttaccaaccagttttaaagcaattgatactttcagaacaatctcaagcttaattggttaccattataagatgcagaactttttaatgttttctggtccctgaaaattcaatagggccaaatgcattaactggaaatagcatttttttaaagtcttaatcaaagatgataatggataaaacaactatataggctctcatacacattctttcttaattttcaccttgtaagaaatgattacaatgtccttcaggcttgttatacacccccacagaatcaagaagaaagccaacaaagaattgaacatttcaacaagctaggaaatatttactgtaagcatattgtgaaattctggaagacatactatcaatactttgagaaaacactattaacatgtgttgaagaaggcagtttataaatgaaacattacaaatcttatgtttatgcatacaacttataaaatagaaaaaagctgctatttttccaatagtatagcatcacactaacactatatagttaagattgaaaacttctgtacacacgttcactacacctccaaagcagcatatgccctcttagacatccctcatttgttatctaacatatgccaatcatggtttcagggatttgtatcagttcgagcaggctaaaacaatcattctgctgtatttatttaactttagacacagttaactagcttcagggaacaaaagttccataatcaatgaagaaacattaataccaaatccccacaacaggatggaaaacatttctaaggagaggatataatcctaacagaatggactatgcccctagttacagtgaatgtgggaattaattaggagtctgaaaaaatacattaagatatataaaatttaagtgattatcaaatcagtagtaactactaaaacttaaatatgaattattgatgtttttctaatgcaacatcatccagtttactgcttaggaccactctcaaagctgatctgccattacattttgctattagtgcaaattaatacccaaataatagggaacagtttgaatcacatggaatttcaaaaaacagaatgattgtgtatctttttgtattctgaaaatagtgctataaaactcaattattcctagcttctaaaatctaccatcttagatagttcaaattaaacatggttgcctgcaaattcttttctagaggaagtaaacgcaaaacacatatggttatgttttgctgctggtctcctcatacatgtgcttcatcaacgagagcactactctaggcatgcatttatcatactactttaacataactgaacatgaggaaaacagttcacattttgataagtgatttattttggcggcaggcttatttt

SEQ ID NO: 1695 - DNA, 731 bp, Homo sapiens
  misc_feature (1)...(731): n = a,t,c or g
gcagccttctctggcttaacccttgttggcgaaaactcttccacagtggcctccttggggacccagaacccggaggaaggggcatgaggcaggaagtggggccgatgtctgcaacccagaccacttcgtggaatgggctcttgaccaaatccctttttttgcgatttacccgttcaagcaaaacaacgttttggttaactaaggattgtgctaaagccgataccaggtccttcacacgtgtgcactaggaacaggagcgaacagcacagagagacgctccctgtgggacgcagcagccccgtggccccggcccagttcccagccaccctccctgggctctgctcacaccagagatttccatagcaggagcgtttgtgcagaagtaggttcagatgaacctcagttaacgtcgccacccctcctcccaccatggtaccctgtaggagccctgtatgacatctgagcgtggtggaggtaggagggttgccagctgcagtgaccctgccacagaggcaggtcagntgcagaagggtcgctttggttccgcttccctgggccacagaacggaacacagcataggttctgcagcagggagccgcagtggcaggatgggagggtgcgaaggggcaagggagtgcactgctggggcatttcctgggcccagccccggccctntggttgcttgttttctgttgatttcagaaggcaggttggacagagcttncttttgg

SEQ ID NO: 1696 - DNA, 371 bp, Homo sapiens
gcgtctccatggcacgaccctggcctccgacttcaacgacttcataaggcggcgtttctgggcgcagccgtgtcgctcctggtttccatcgtgtgggaagaacggagtaacgagtctcacgcagaaaaaggtcttgagagcaccttgtggcgcacccagtgtaactgtgacgatcaaccatttttgtgttgtcctcccccacctgccagaagccaaccatgaaggaccgctcttcaactccccccttacatgttcacgtggatgagaacacccctgtccacgtccacataaaaaaactcccgaaaccatcagcgaccagcagccagaaatctcacaagcgaggaatgaaaggggacactgtgaatgtgcgg

SEQ ID NO: 1697 - DNA, 827 bp, Homo sapiens
gtcaagagcttacagctaacatagtgaaattagaaaagatacaaaataacttacagaagttgcttgagaatggtgactgatcgaccagattgcttgggccatcggaatacctcatgtttccctttgaagaaggtgcttcctgaggcgttttgtttgagtgcaccctgctggtcagaggtgcaagcagatgagaatccagacattgcatgtggaggtctccagctcaggaaagtggggagggaaataattttggttcttgtgcaataaaagttgaccttgactctctgaggaagattttgctgcttttgcctgaagaaaacagacccatctctgggaggtctcaggaaggggcccagcgaacacactctcttggataattaccacgatggcgtcagcaaacactccaccctgtggcctttttagtccttcccgccctccttcctctcccttacacccctcttaacgactttcaaactaaaggatacatcatatactgacaaactcaatgtggtcctttcaagaattagccatgagtctcaaaaaggcaataaatggctctaagtggacaggtttgcttcaaacaagtaacatctacattttgtcttttttttttcagttctcctgttatgttctggttgaaatcacctgtgtgtcttaatttctcaattcctttttggcaagaatatcaagcaaggtgaatttaacattatgtttatgttttgttttgttgctgtaactattagttaattggactgattcttacccagccctggtcaagaatctgtgaggcatgtgactgaagtactaaattaaacttattttgaaac

SEQ ID NO: 1698 - DNA, 400 bp, Homo sapiens
gcaagccactcagctagctgaggaacgtattggaaatgtaagaactgttcgagcttttgggaaagaaatgactgaaatcgagaaatatgccagcaaagtggaccatgtaatgcagttagcaaggaaagaggcattcgcccgggctggtttctttggagcaactgggctctccggaaacctgatcgtgctttctgtcctgtacaaaggagggctgctgatgggcagtgcccacatgaccgtgggtgaactctcttccttcctaatgtatgctttctgggttggaataagcattggaggtctgagctctttctactcggagctgatgaaaggactaggtgcccatatttcaggatttcagcctttccattccgtcaggatctgtcacggcactggttggccc

SEQ ID NO: 1699 - DNA, 235 bp, Homo sapiens
ctgcagtgagctgtaagtgcacagctgcactccagtttgggtgacagagcaggacctgtctcacaatacaaataaaaatacaagtaaaataatatctcaagtcagagccttttgggtctgcagcccttgcaacccctcagccgtgcagtggggtttgcatccctgggaatgaggagacccctgcccggtgttgttgcctgattaatcagtgttttaaaacatatattaatcgggg

SEQ ID NO: 1700 - DNA, 1429 bp, Homo sapiens
ggcacgaggggaaatgagagggtcctgcaggcagagctggaatcaacttccactctgcctcttgcaagctgtgtgaccccgggcacaatttctccttcctctggtaacctctgttttcttagatttggagcagggtggtcacactgaccttgcagagttccgagaatcagagacagaacataaaaggcctggaaaacattctccaaaaagaagctgcaacatctgtcggcagtactcagtggaagggtgatattatgacactgacactgctattttgaaacctggaggatggaaaggtgcaaaaatctatcaccagcaacagaaggtcagaatggcggcagtggagcatcgtcattcttcaggattgccctactggccctacctcacagctgaaactttaaaaaacaggatgggccaccagccacctcctccaactcaacaacattctataattgataactccctgagcctcaagacaccttccgagtgtgtgctctatccccttccaccctctcctcttccaccctcagtggatgataatctcaagacacctcccgagtgtctgctcactccccttccaccctcagctctaccctcagcggatgataatctcaagacacctgccgagtgcctgctctatccccttccaccctcagcggatgataatctcaagacacctcccgagtgtctgctcactccccttccaccctcagctccaccctcagctccaccctcagcggatgataatctcaagacacctcctgagtgtgtctgctcactccccttccaccctcagcggatgataatctcaagacaccttccgagcgtctgctcactccccttccaccctcagctccaccctcagcagatgataatatcaagacacctcccgagtgtctgctcactccccttccaccctcagcggatgataatctcaagacacctcccgagtgtctgctcactccccttccaccctcagctccaccctcagcagatgataatatcaagacacctgccgagcgtctgcggggagcgtctgcgggggccgcttccaccctcagcggatgataatctcaagacaccttccgagcgtcagctcactccccttccaccctcagctccaccctcagcagatgataatatcaagacacctgccgaggcgtctgcgggggccgcttccaccctcagcggatgataatctcaagacacctcccttagctactcaggaggctgagggcagaaaaaccacggcaaacccaagagggcagagggcggctgagatggaaccacctcccgaacccaagaggcggagggtcggtgacgtgggaaccgttcaaggcaaacccaaggagggcggacgggccgttggaacgtgggaacccttcattcacccgaacccaagaggcggagggtcggtgattttggaatt

SEQ ID NO: 1701 - DNA, 384 bp, Homo sapiens
gaggacaatgttgggcttttctccatgttataagccactactcagcaatgcatcagtaaatacctattcacccactgtatgccagccactgtgccttatatgcaggggatgcaaaggtgccatgagacctgccctctacctttaagaacagtataatggagaaggggagacaaaccttgtgacagattccttatgtactgtgataatacacagtggcagcagctaaaatgtctaggtttgcttagctttgtattcagtaataataagttgatctaagagttcagcataaactgaatgaaatgccatttaatggtagaggaaccaagcattaaggcgagtactacacttaattttttaagcaaatatgtaaagtatattttcaaa

SEQ ID NO: 1702 - DNA, 2486 bp, Homo sapiens
ttcttcctccctccttccctcctctcctcctgccttcccttcccctttcctcccctctctcctccttctcccctcggtcagccggagcctgctggggcgagcggttggtattgcaggggtccggggaaggcggcttcgggggttcggcggcgacggcttcgagcggcaaatccggcggcgggggctgtggaggcggtggcagttactcggcctcctcctcctccgcggcgttaccggtgaagaagtcgaaaatggagcacgtccaggctgaccacgagcttttcctccaggcctttgagaagccaacacagatctatagatttcttcgaactcggaatctcatagcaccaatatttttgcacagaactcttacttacatgtctcatcgaaactccagaacaaacatcaaaaggaaaacatttaaagttgatgatatgttatcaaaagtagagaaaatgaaaggagagcaagaatctcatagcttgtcagctcatttgcagcttacgtttactggtttcttccacaaaaatgataagccatcaccaaactcagaaaatgaacaaaattctgttaccctggaagtcctgcttgtgaaagtttgcccaaaaaaagaaaggatgtaagttgtccaataaggcaagttcccacaggtaaaaagcaggtgcctttgattcctgacctcaatcaaacaaaacccggaaatttcccgtcccttgcagtttccagtaatgaatttgaacctagtaacagccatatggtgaagtcttactcgttgctatttagagtgactcgtccaggaagaagagagtttaatggaatgattaatggagaaaccaatgaaaatattgatgtcaatgaagagcttccagccagaagaaaacgaaatcgtgaggatggggaaaagacatttgttgcacaaatgacagtatttgataaaaacaggcgcttacagcttttagatggggaatatgaagtagccatgcaggaaatggaagaatgtccaataagcaagaaaagagcaacatgggagactattcttgatgggaagaggctgcctccattcgaaacattttctcagggacctacgttgcagttcactcttcgttggacaggagagaccaatgataaatctacggctcctattgccaaacctcttgccactagaaattcagagagtctccatcaggaaaacaagcctggttcagttaaacctactcaaactattgctgttaaagaatcattgactacagatctacaaacaagaaaagaaaaggatactccaaatgaaaaccgacaaaaattaagaatattttatcagtttctctataacaacaatacaaggcaacaaactgaagcaagagatgacctgcattgcccttggtgtactctgaactgccgcaaactttatagtttactcaagcatcttaaactctgccatagcagatttatcttcaactatgtttatcatccaaaaggtgctaggatagatgtttctatcaatgagtgttatgatggctcctatgcaggaaatcctcaggatattcatcgccaacctggatttgcttttagtcgcaacggaccagttaagagaacacctatcacacatattcttgtgtgccaggccaaaacgaacaaaagcaagcatgtctgaatttcttgaatctgaagatggggaagtagaacagcaaagaacatatagtagtggccacaatcgtctgtatttccatagtgatacctgcttacctctccgtccacaagaaatggaagtagatagtgaagatgaaaaggatcctgaatggctaagagaaaaaaccattacacaaattgaagagttttctgatgttaatgaaggagagaaagaagtgatgaaactctggaatctccatgtcatgaagcatgggtttattgctgacaatcaaatgaatcatgcctgtatgctgtttgtagaaaattatggacagaaaataattaagaagaatttatgtcgaaacttcatgcttcatctagtcagcatgcatgactttaatcttattagcataatgtcaatagataaagctgttaccaagctccgtgaaatgcagcaaaaattagaaaagggggaatctgcttcccctgcaaacgaagaaataactgaagaacaaaatgggacagcaaatggatttagtgaaattaactcaaaagagaaagctttggaaacagatagtgtctcaggggtttcaaaacagagcaaaaaacaaaaactctgaaaagctctaaccccatgttatggacaaacactgaaattacattttagggaattcatcctctaagaattatgtttttgtttttaatcatatgttccaaacaggcactgttagatgaagtaaatgatttcaacaaggatatttgtatcagggttctacttcacttcattatgcagcattacatgtatatcacttttattgatgtcattaaaacattctgtactttaagcatgaaaagcaaaa

SEQ ID NO: 1703 - DNA, 914 bp, Homo sapiens
gtgtataaaaaagtgatatgtctttaatttaaaattatgacccggaaataactagtcagtttaagtgatccagacttcctcttcatacccaaatggaacagacacaatattggctcagatttccaaccccagaaaaaaaccaaaccaagtcctcaggaagtccctgcagcgaccttgctggggccatcagaccgcacagagtggaggtgcccaagctgctaggctgctcttaatccagccacactgagaagagctttccttctaccagcaactccctcgctgggtccgatatcccccttcacctcccttttagctggcactgcacgaatgcctccacagagaggctgacagtacagcagtcacctcccagctgtcttcggtgcatcttcagggccaccttcctgtggtcacaatagaggagttgagcattctaaacgttcgtgcccaggagggcagcgtcttctctttttagctgaggtctggagccctgagttgtaaccattggtcatatgtggctgaggcaagggccttggtaattgatggtgagtaagtccatggagttttcatcccatcatggcagaaggctggcctgacccctgccctcactggatgatgctgtctggctcgcattctggccacctgcccagggtcagaggcaggggccgggttagctgtgttgtctgcaggtagcggcggaaatctttgatcataggccggaggacctggatgaggacgctcagggcagcctgtgtgccctccatggcctgggcctggcgctcctgggcacaggcctgcacttcctgggagcggcggatcatctgcagtaggtcgttctgctgttccaggtgctgtgcgatctccttcacatgcaggttggtgacccgctgctcctgtatcagcttggcggagttgag

SEQ ID NO: 1704 - DNA, 939 bp, Homo sapiens
tttgttaaactgacttctgttcccctaagttaatatctgtcggccttgcgggataccagtcattactgggtgtatgctgataggtatgtatatacattcatatcagttctctaggtcatgttccctggactccagatttatatctttaattgcctagtgaacaagttgctttgacatcccaaaggcatttcaaatgaaactcatagatccctccaggcttgtttttttaatctcggtaaacgacactaccacctactcagttaccctaaagaccccatcggtaaatcttgaatggcgcctaattttccctcaaactatacctaaatacatttaatccctagtgaatctagctcccttaatatcactggatattatctcaatgtttccccactttattgaagaaacacaggtggtgtaaatccctggcatatgtcccacatacttaaccattctatctcagggaaggtggaatgacctatgatttgtaaatttggaaaggacaaactgggcatgctagtttctgccacccttcctcctcgtggctgctggccacaggggacacacattctaatcctccaggtatagtttttctcaaggggcatcacaggttggattccctgggaagtagattctgaaacggaaattagtgtgtaggaggttttattggggaatgctcttgggatcgacgctttttcccaagggacaggtgtttccttgtggatcctaaggaaaggaaaggagaaggaaggggaaagaatgagaagagaagggtagaacggaaagggtagaaacaggaaaagaagggaagggagcaagattgggcaaagggagaagttgagctgagattcagtctcaatgcagacctcagctggactttggggagcaccaaagctgggatggcctttcgaaattgtctcaaattgggatcaagactttacc

SEQ ID NO: 1705 - DNA, 618 bp, Homo sapiens
gtgtttggggtgggggagctgcttagagactgtgcccgtcctcggccccccaccctgaagtgccagcaccaccagcaccagatcctccgccgccacaccgcactgaggacacgccggccgggccgcctcgtctcaagttgtataaagttgtctccgtgtcccctcctccctctgcccccagtgtttcttctgatttttttttcccctttccctccctccctctccgcattcttcccttggttcagcacaggtaaaacggttcccctccctccctgccttcatggatcaccagctcacgtcatgttgccttctcttttctttgtgtgtgtgtttatttaagttatttttcttcctcctctcccttttctttttggccctccctccctccctcttctgccatgtaactggaggatgtgctatgagtttgcaaacagctggactgtcaggctgctttttttccagatgttcctcctctgcctccccttcccctcctctcccctccttttccttccttccttcctttccttggagcactgagcaccatttggaagcttgagagaaaccaaaattaaagagagaaagagagagcgtgcacgctcctgctttgtctttcctgtg

SEQ ID NO: 1706 - DNA, 428 bp, Homo sapiens
ggggggccgctggagccgagtagcgtacagagcggcgtgtgacgcggggacgccgcgtgctcccaacgtcgccccggtttgacgcacacggcaccaaactgtctgattctctggcctttgtgtccctgggaagttactctgccagaggaaagcaggtgtgctccacttctcccgtgaacctgaagatgagttgtcccagactcttctcagtgattggaaacttaggtggtggagctaaaggttacttgttacgagacttctacagacaactcttgttgggatccatctatggtttagcaacattagtgggaaaagttttcttgaatattgactttgaatataaaaacgtttatatttaggacttcagattttgtgtgatcatcaaactcaacgaaggggataaacataattgggggccaatgatggct

SEQ ID NO: 1707 - DNA, 328 bp, Homo sapiens
  misc_feature (1)...(328): n = a,t,c or g
gacagtgactgaactaacttacactcccacctacagtgtgtaattgttctctnnnnnnnnnnnnnnnnnnnnnnnnnnnnnnnnnnnnnnnnnnnnnnnnnnnnnnnnnnnnnnnnnnnnnnnnnnnnnnnnnnnnnnnnnnnnnnnnnnnnnnnnnnnnnnnnnnnnnnnnnnnnnnnnnnnnnttttttaacagtttgtncctcttgtttggagaantatctgntcatgtcttttggccattttttaatggnattgtntgnnnttttgcttgttcaattgttaaaagttccttaaggattctggatattagacttctgtcagatgc

SEQ ID NO: 1708 - DNA, 318 bp, Homo sapiens
acaaggagatgaagaaactacattctcatgctgatccgttcctctgtgggggtcttcaaactggttgttggcattcagggtctgaaaaacatcttaagtgatccttaaacaaaagccttatgattctaatgtcagagatcctgtctacaggaacaacagggatgcaaatcaattcttagtctgatgtctgaaatcctatctataggaacaatagagatgcaaatgtcagtatctagtgccttgtgactattagcaacaaggaagtaggccgaagtgcagcctgattaatgcttaattataactatatttctgtccaaa

SEQ ID NO: 1709 - DNA, 503 bp, Homo sapiens
tttttttttttttttgagatggatgatcaagtttattcacaaatgattttgaatatatttctttaaacaaactgtttctcaagaatttccattttccttcaaaaaaaatttacacaataccatatagctcacacatacagtgcagagcaagaatgtacatattcttaagtactcacgtatgagaagagagtgaaatgggacaaaatatcagtaccagtataacaaaagttagtaatttagaaaggaggaacatgaagtaatatttttattccactttttcttctgcctttgtttttatgaagaactctggtttgtagatacaacgataggccaagagctgaggaagaactccatatgctatgtttaatgctaaaaaaaggatttttgcttcttcagggactctgtagacataagcagttctagcatgaagagatgcaccaatgtgagaaaactgagcctgagccagacctccagcatgtatcaatgtgatgtcaggcatccag

SEQ ID NO: 1710 - DNA, 445 bp, Homo sapiens
  misc_feature (1)...(445): n = a,t,c or g
atttgataccntatgacnnnnnnnnnnnnnnnnnnnnnnnnnnnnnnnnnnnnnnnnnnnnnnnnnnnnnnnnnnggcacgaggtatgacattttgggtttggcttttttcactcagtgtaattcccaggaagaggttcacacagttgtttttgtatcggtagtttagtctttttattgctgagtgttattccatagtatgtaccatgtatatttaaccattcactgcacaagggacgtccaggctgattccaagctctggctattacagataaagctactgtgaatattcatgtacaggttttagtgtgaacctaagttttcatttctctagataaatgcccnagngtgcaattgccacgtcatgtttagtgntttntaagaaagagctanacctgttcatcaannnagctngnataanannaangntnttnattannacatcc

SEQ ID NO: 1711 - DNA, 954 bp, Homo sapiens
cctttactcgcctttgtgaacctaaagaagcttcctacagtctcatcaggaaatatgtgtctcagtattatcctaagcttagagtggacatcaggcctcagctgttgaagaacgctctgcagagagcagtagagaggggccagttagaacagataactggcaaaggtgcttcggggacattccagctgaagaaatcaggggagaaacccctgcttggtggaagcctgatggaatatgcaatcttgtctgccattgctgccatgaatgagccgaaggacctgctctaccactgctctgaagaagtatgtcctagagaatcacccaggaaccaattctaactatcaaatggcatttgctgaaaaaaaccctgcagaaatgcgaaaagaatgggtggatggaacagatctctgggaaagggttcagtggcaccttccagctctgttttccctattatcccagcccaggagttctgtttccgaagaaagagccagatgattctagagatgaggatgaagatgaagatgagtcatcagaagaagactctgaggatgaagagccgccaccctaagagaaggttgcagaagaaaaccccagccaagtccccagggaaggccgcatctgtgaagcagagagggtccaaacctgcacctaaagtctcagctgcccagcgggggaaagctaggcccttgcctaagaaagcacctcctaaggccaaaacgcctgccaagaagaccagaccctcatccacagtcatcaagaaacctagtggtggctcctcaaagaagcctgcaaccagtgcaagaaaggaagtaaaattgccgggcaagggcaaatccaccatgaagaagtctttcagagtgaaaaagtaaattttataggaaaaaagggtatcatgatgaaattcaaaatcttattttctaaggtcagtgtgcatttgtttagttttgatgcttt

SEQ ID NO: 1712 - DNA, 597 bp, Homo sapiens
taaaagagtattattcagttgaacacaagagggcactgtagaaccttgtgtccggtttatttctgaccttgaaggctgacaatcttttagtaacttgtctcatctccacacaagtgtgtgatagcacacctgggtgctgtatgtggcaataacacttgtgttccaggtgtgaagtgctgggacattggcaggcccagtgatggaagcagctagtgaaacgattccctttgctaatgcctagtgcattaagttccattgctttgcgaaaggtaaggaaagaggcccagttgtttgagcggtggggaagattttgttttttctagccagcttaggatctcaggattggttttatccaagctagtgctttgaagaacactatctcttgccaggaaaagatgagtgataggtcaaagcttttacttgagtctcccctagtgtcagagatcaggagaaaagacataagagaatttacaaaagctattcagactgctattgaaaacatgagaagaacttgtctcccattttgagagttcctatctaaataaagccaattcctcagactgaggggctgttcttaagtgttctttatacattcca

SEQ ID NO: 1713 - DNA, 460 bp, Homo sapiens
gatgatgctcagcaaattactactgaggttgttagaaaagccattgaaaagtatttagaatacttagtggcgagcctctctcacatttcataagcatgtccttacatgacacagactgagagctttttggaataaattggatcaaattacccagcctatcctgcctgccaaagatgttccagtctcctttgtcccctagactggtataaaaatgagaaacacaagcacacttttgtattcttcaggcttggaagccatttgttgtcctggctgaacagacaggtagatatcaagactaaagagtgacatgcaactcagtctgaaagcaacacagtacacgctttaaattttaaaagtataccttgggaaaggctgatcttacagatacatgtttatctgtcaataggcatgcttttcagcttggatatatacctttaaaatgcacccttttatccgcctg

SEQ ID NO: 1714 - DNA, 342 bp, Homo sapiens
tttttttttaaactaattagtacctaaaagagatttgccaaagcttaaatggaaacaaagactactattaccacatggcatatattctaccatgctgttgaaagtatattcaaaattacaatggtacttatttaactttctaataatacaaacaagaaacattctggaaatcaatcctaaggtagcactatttggagacattagcaatgaagaatgaacttggagtaaagagtcaacaagagtagcgtgattcccttctttctcctcataaaaacaaagctcttctggtctctggtccgccctcatccctccccattcctggtgtgcatttgtgttattctg

SEQ ID NO: 1715 - DNA, 790 bp, Homo sapiens
tgtttgaagttgttacttttgtttacagcaaagtttgatgtagtgtgcagtagtgagctctagactgatctttttctaaatcagaaagtgattaaagtatgcacaaccaaaggcaggtttttctttttcatttattcagcaactatttattaagcatcaactctgtgccaggcacgttactagctgctacatactgtctgaacatgacatacggttaagtaactttacaattattatcaaatacttcaatgtagatatttcttaagttgaaatagcattaactaggataatgctttcatgttattttattgtcttgtgatagaaattcaacttgtaccatctaaaactaggttgctataaaaataggaggatgaagtcaataaagtttatgccagtttaaaaactggaaggaaaaggtaagagctctccattataaaatagttgcattcggttaatttttacacattagtgcattgcgtatatcaactggccctcaatgaagcatttaagtgcttggaattttactaaactgacttttttgcaactttgggagatttttgaggggagtgttgaaaattgccaaacactcacctcttactcaaaacttcaaataaaatacacattttcaagagggagcaccttttatatttgataagttttcattataaaccttataataccagtcacaaagaggttgtctgtctatggtttagcaaacatttgcttttctttttggaagtgtgattgcaattgcagaacagaaagtgagaaaacactgccagcggtgatt

SEQ ID NO: 1716 - DNA, 382 bp, Homo sapiens
  misc_feature (1)...(382): n = a,t,c or g
gctggagtgttttagttcttgggggaggccaccccaaaccccagccccaactccaggggcacctatgagatggccatgctcacgtccccaaaacggggctgccngctttgnggacntgaacgttttaataatttttgntgaattcntttacaantananancncatatattggtataaatnaaattgtannaaaaataagaagnnncntccntttnaangaattcntatngggcccnnatttnnncnttnnnnttnantntnaaanttttctcntnntattgatncantantnntccntaattnttntcntnnttnnnntattnttttntaagnttcatnantatntttgcntcngntttttttntnngtnntncctttttt

SEQ ID NO: 1717 - DNA, 685 bp, Homo sapiens
tttttttttttttttttttgaatataaattaactttattacaaaaagcaaaatgttagtttctcattgtgagtgattcaagaaaacaacggtaacagccctggcaggagctgggaccaggataccagtatgcaggctgaggggtcaaaggccaggctcaggagcgggctgacaggcactgattcacaacctccaagaggtgggtgttctccagggcagctgccacccgctccttatctgcaagttgcttgttcactgcatgctctgaggcatgggtccccggagtaatgtgcacgtccatcttgaaacgctgaggaagggagcgcagaagcttgaccttgatggacagaccaataagggtggccatgctgcagtgcggaatggttggtgtgaaagccacagccactgtactctcggggtcgctaacctgaacccgcacctgctctactacgttcaactcctctagcgtcagtggatgctccgggtcattgatggagcgaatcagatcgaagatctcgcgtgcgtcgatgctgtcgggaacctgctcgtcctcctcgcctgccgtcacaggccgctccccagagcgctggtagatgagggggttggcattctccaggaggccgccgccgaccccgccgccgcctaccatcgcggaaccaccaccgctgatcctatgcgagcgtgcg

SEQ ID NO: 1718 - DNA, 704 bp, Homo sapiens
  misc_feature (1)...(704): n = a,t,c or g
cagaagtgtaaaaatattgcacattgacaaataccaagaatttttgcgtatgtttatattgtattgttctaaataatgggtagcctgtgaaataagatcttgccacccatgtaataatagtagtaatactatagttaaaatggctgtaagaatagttttataaaagtgaatacacagatctattgtatttgaaacataactttgacaattattagtgtgaccaaagtattaggcggttttcatacatttttcaccttgtacaaaattatgaattcatttttcctccaggccgacaaggagttgtagaatgaaaatgccctctaagtgttattttggttgttctaacttacaaaagtgattttgaataagaaatatttggtgttctttttataaccagtttttgattggtaattgttttctgtattgtttaaaacggatcaaaaatgtaagtctattggtagagattaagtaaagtatttattgctacatcatagttgataaattgatgttatcgtaaagccatatgttctgttcaagtcttgtttgcttgaaatgattattcctacaagtgaaacactagactatttggagtgtatatggcttgtgttttgggannnnnnnnnnnnnnnnnnnnnnnnnnnnnnnnnnnnnnnnnnnnnnnnncatttggtagttcatctgccttttaacccattcaccaaaaa

SEQ ID NO: 1719 - DNA, 1461 bp, Homo sapiens
cgcagccaccagccgcccgcgccctccagccccgtccgggagtccccggcccgctgcggtgcctggctgagaactgtgtcttcctggagactaggctggcattttgactttggggttgctgaaaagccaggagtcaaaatgactgagcgctttgactgccaccattgcaacgaatctctctttggcaagaagtacatcctgcgggaggagagcccctactgcgtggtgtgctttgagaccctgttcgccaacacctgcgaggagtgtgggaagcccatcggctgtgactgcaaggacttgtcttacaaggaccggcactggcatgaagcctgtttccactgctcgcagtgcagaaactcactggtggacaagccctttgctgccaaggaggaccagctgctctgtacagactgctattccaacgagtactcatccaagtgccaggaatgcaagaagaccatcatgccaggtacccgcaagatggagtacaagggcagcagctggcatgagacctgcttcatctgccaccgctgccagcagccaattggaaccaagagtttcatccccaaagacaatcagaatttctgtgtgccctgctatgagaaacaacatgccatgcagtgcgttcagtgcaaaaagcccatcaccacgggaggggtcacttaccgggagcagccctggcacaaggagtgcttcgtgttgcaccgcctgcaggaagcagctgtctgggcagcgcttcacagctcgcgatgactttgcctactgcctgaactgcttctgtgacttgtatgccaagaagtgtgctgggtgcaccaaccccatcagcggacttggtggcacaaaatacatctcctttgaggaacggcagtgccataacgactgctttaactgtaagaagtgctccctctcactggtggggcgtggcttcctcacagagagggacgacatcctgtgccccgactgtgggaaagacatctgaattcaacacagagaagttgctgcttgtgatctcacacacagatttttatgttttctttctcacccaggcaatcttgccttctggtttcttccagccacattgagactttcttctagtgcttttcagtgatactcacgtttgcttaaaccctttagtgctttgtgatagttcagtcccagggaaagagaaaactcgccctaggccctaggtgggaagatggtttgaaatttttgtaatcgagtaaggcacacccaaatgtaaaaatccttttgaatgatgcctttataaatctttctctcactgtctatttaagtgcaattaacatatgtcacgaacttgaaagttttctaaactcaataaggtaatgaccagttgttatttacagctctgtaacctcccgttgcgtcaagtctaaaccaagattatgtgacttgcaataaagttattcagaacagaatcttttgccaggcaaaaaaaaaaaa

SEQ ID NO: 1720 - DNA, 415 bp, Homo sapiens
gggccagggagcagcaagccagctgggactgaggcggacgctgtctcagggagacgctgactcgcaaagacactcccttccttgtgcctgggtaaaaagtctcctcctggggtccctggccatcctgaatatccagaatggtgtttctgaagttcttctgcatgagtttcttctgccacctgtgtcaaggctacttcgatggccccctctacccagagatgtccaatgggactctgcaccactacttcgtgcccgatggggactatgaggagaacgatgaccccgagaagtgccagctgctcttcagggtgagtgaccacaggcgctgctcccagggggaggggagccaggttggcagcctgctgagcctcaccctgcgggagggagttcaccgtgctgggccgccaagtggaag

SEQ ID NO: 1721 - DNA, 1170 bp, Homo sapiens
gaaggggaaggctcagggtctcacctcacattgtccctacaaggacaggccccaactgataaccgttgctttttttttttgtgaacatagtttgatttgatcacaggtcaaaaacgccttatattttcgaaagactcctggcccctcttccctcttcctggtttcctagccgttccccttctgccccagtctgagccagtgaggggtagctttttaaaaccattattctagatggaggaggcactgatgcttgtaactctggaaagaggcctacacccaagggctaggaattttatttttccttttctcaccaggtgtctgcatgtgtgtgtgggtgtgaatgtgtatacatgcccatcagcatttagtcacatgtctgaatttctgtgtccagacgagccccatcaaactagttggggaaggggccccagtgaccaagtgtattaaggcatccctttcttcaccccgccccccaacccccagactttcctggagcatctgccctttgctcctagcagcctccccaggaagggactgcagaggcgggcaagccctctctatgtgtttttatctccaccttccccggaatctggggagggcttttgtttttacgttttcaagttcagcattgtattcggacagaagctgtgactgaagactcagtgccaaggaaaggggcttcttgtgtgtccctcgggtttggggctcttctcagagagcagcactccatatcccttactgtcaccttcactccccacacagctcatgagatgtgtgacccctgtttgagttttggtatttggtagtggagggtggggggatgggggccagcagctgtcatcctcctgggaagccgagcagtgtccctggtgggtaacaccctcaagtctctttgccagtgaggccccaccacatcggtgtgagttaggtttctcatctggagctgtttctcaggcattcttcccaaccctcttccttttcccttcggtgtgcctcagtggtctccttcatagagtgagagggcttgagaccctccctcaaccggactaattaaagaaagacacttgtgttcccaagtggtggttttatttttttagtttttatgtttgtatgggaaattgtggataaagtgaaaagaattgtaaataaatggtgtatttcctcctccaa

SEQ ID NO: 1722 - DNA, 453 bp, Homo sapiens
  misc_feature (1)...(453): n = a,t,c or g
ggaccaacagtgtgcaagtaataacccacgtgaaggaaaagctgcacttcatggacatggagaacgcgtgcaaaaagacacagctggcagaaatcgaggcccaggccgccctaggaagagacatcctgaccaagacgaagcaagcccgagaggggctgcggacggacaacatcagactgaatcagaagtgcggccttctaggcaaggactcacttcttcgggacttggaagaaaaggtggacaagaccgaactgcttcaccggcgcctggaatccctgaagcgccaccacgctagcctcactttgtcctgcagaggccatnaggcagaagatcagggaggccaaagcctttctcccttcttgaccagatcgatgagaagagtctgccaaaccactttcatcctcaggacgtgctgtcctgctttattttaccttcgtgctattaaaaaggccg

SEQ ID NO: 1723 - DNA, 502 bp, Homo sapiens
  misc_feature (1)...(502): n = a,t,c or g
gaccactgaacgagtggcttacaaccatagaaaagaggctggtgaattgtgaacccataggaacccaagcatctaaacttgaggaacaaattgcacagcacaaagccttagaagatgacatcatcaatcacaataaacatttacaccaggctgttagcattggccagtccttaaaggttttgagctccagggaggataaagatatggtgcagagtaaattagacttctctcaagtatggtacattgagattcaagagaaaagtcacagcaggtctgagctcctccagcaggccttatgtaatgctaagatttttggggaagatgaagttgaactgatgaactggctgaatgaagtgcatgacaaactgagcaagctctcagtccaggattacagcactgaggggctatggaagcagcagtctgacttcgggttctgcaagaggacatcttactcaggaaacaaaatgnagatcangctttctaaatgggttaaaactactta

SEQ ID NO: 1724 - DNA, 748 bp, Homo sapiens
  misc_feature (1)...(748): n = a,t,c or g
tcaccccacaaagacattttggagtgtttggtaaaggcttgtttcttttcagtgattgctggaagcagatgggatcaaataaaaatagaacattgtgggctcccaaggctgaggtggagctggaggatgccggccagactgcggagcagcagtcttccttgtgcacatgcctgaagtccgcgtgggtgtttgaggaagtggggatacagcatttaatgaaaaatttatgcttaagaagtagaaaatggcagtcttcctagataattttcaatggccagaatgtgaatgtattgacgagtgagagaagaaatgttgtggcgtctgttgtgacaggtatattgttttttacaggctggtggataatgattgatgcagctgtggtgtatcctaagccagaacagttgaaccatgcctttcacacatgtggtgtattttccacattggctttcttcatgataaatgctgtatccaatgctcaggtgagaggtgatagctatgaaagcggctgtttaggaagaacaggtgctcgagtttggcttttcattggtttcatgttgatgtttgggtcacttattgcttccatgtggattctttttggtgcatatgttacccaaaatactgatgtttatccgggactagctgtgttttttccaaatgcacttatattttttagcactctgatctacnaatttggaagaaccgaagagctatggacctgagatcacttccttaagtcacantttccctt

SEQ ID NO: 1725 - DNA, 1213 bp, Homo sapiens
ctgctagttcaagtcctgactcaccataacattaagaaaaatcaggattcccttataaagaaagtgcaatgtctgaggaaatttcaactgtgaaaactacaacatatttactaaaatgcatgaattttcttgtttttggaattattcctggactattcagtagccactcagatgccactgtgtgaaagggccataaatgttgcctgctgcttgaacatctatttttttctcttccagtgcttgataactctgggagataatacactgcagtcgtactagtggttaagatatttgggaataaaattaatacttttgactagaagcgtctaaggataaaccaacagaaattgaatctggatacatctttaagatgtaatcagaaatgaccagatgactctagttagaatttttgaaggagggattacattaatatttcaaaacccttactctgtagataagtgtattttaattttttcccctcgtatacttttatttacctggggaaggagcttttagggttggggggtggtttgctatctctttagctagcagaatagtgtgcctttgatcctcacacatcctacttttatggacacagtagccatgcttcacggggaggtcagagctggctaccagcagtcttgccctttactgagcttagtgtcatctttggatgctgtcatatgctgctttgagtgaaccagagaaacagccatttgcagcatgagaaagccccaaaagctctgggatttacctccactttagtaataatgaatattttttagcattagaatgtgttatgtcatttgaattaattttgactacactttggcttgggagaggaattattttaaatagacattggtactttttgaacttgatagctaaagattctaaaatgcatgttttatactaagttttaaccagtcaggaaaattttatgtaactagtgatagtttatttttttgtatgaattttgtttaggctgcaatgtttagcttttgttaactcttcactcttgctgtcttaagttcattactatgtttaatggcctacttgccaagatatttagcatgtaaaaagcagggttttgattaaaaaaaaaaaacggcttcatattgaagctgagacttacaataacaagttgagtgcaagcctggtatgctgtgtcttattgccagaatcttagtaaatgtaatgttttaaaaaaaaa

SEQ ID NO: 1726 - DNA, 341 bp, Homo sapiens
ctggactcttgcgtaaccttcaaacaatcctccctgcctccagtctgcacacggcaggcttccgggatgacctctgaacagaacgcgtccccattcccacacctaccaagcatggcgtttcaaagtgtctccagctctgccctccccagggcccattttctggttcaacactcatgccaagccaaccgccccatcctcgttccttgccccaaactctgcaggctggggctcatcatgcttgctcctaggtttcaccagccctgtttgccctcactgccaggcaaggcctgctctccgctccccagtgacctctgtcctctgagagccccgaggcttccctg

SEQ ID NO: 1727 - DNA, 426 bp, Homo sapiens
  misc_feature (1)...(426): n = a,t,c or g
ggatcttttctctctagtgggaacaaatgctacataatttagtcaagatcctattaagtcatctcacctgaggcatctggagagggagttgccttccattggtgggaaattgttggtgccagaatacattttgcccaaaactcttctcattggctggccacctagcagggctcctctaaacacgcaactcagcgaggggacccccttcacctctggcaagagagctgggtagatcagaaacttggtgacacctggctagcacagagcaggctcacttgtcttggtcccactacccagattcctgcagacattgcaaaccaaatgaaggttgttgaatgacccctgtccccanccacttgntttgntatcatctgctntgcantggaatgccngtggggtttanntcactctgcatctggnntattt

SEQ ID NO: 1728 - DNA, 942 bp, Homo sapiens
acaaacatatacatttttcttgagtctcaaggtattttatatttttagtcagaaaaaataatttttcatttcagttttccataaactgttacacaaaatataaacctaacgtgtatttttcaggactgcgtgatcgtgcactttgtgtggtaagaggtttgagtagtcctgtatgtcacctagggaacagacattatagcttcctagcaaatgaatattcatgccttgtttttgatacctcctggcagcttccatgtcaccacttgttcatacctgcccagagctagttttagacatggcaaaatagaaatcatctgtaatttattagctaacaatgtaaaaccatcttttaaagccttcagactgtcaagacgacatgagcagctcaccatatgataaaaatacataaatttgacattcccttttccataaacctttgtttgtagatttaatgttgaacagtacttttccataaagttctagtcacttctgttggcctgagccaccagattatgatgttgccagaattcactcaatttgaataaagatgaacagtatttgttttcttgtttccatgaattatatcagtattctaaaacatcgcttcagaaagagaactgtttatttctgcaggcttcctgtccttttgtggtatgggttttttggccttattttcactgggcttttccctctcccaaactttgaggcgtgatttcattcattgaagaatcaatacatattttgtttcaaaatgtttgaaacaaaagacatagatggtagacttttattaaaacatatatggatgtggaaagcacatatattaatgcagtcatcccttttcaggtgggaagagagcaaaccagttgattttttaattcatccttagtacacagagaatttacttttcctcaagtaatatacctgtttgagctttagagagat

SEQ ID NO: 1729 - DNA, 319 bp, Homo sapiens
gccaagatgcgatgagtgaaatttccacctacagatttgttgatggaagggccctaagtttttccctcgttcacctatcatgttttgccctagtgatggtcctgcttttgtatggcaaagtcacatatagcaagtattcttttctacactgttcgttgtgtaaggaattccctttgcaaagaccatgtatcccaattcttgcctagattatgagcaattttgaattagtgaaagttttattttcaaatagtaaatatagccagttgccctgcctcaccttattgctgatcatgcaaattatggtgaaaatcttagagct

SEQ ID NO: 1730 - DNA, 322 bp, Homo sapiens
  misc_feature (1)...(322): n = a,t,c or g
gtgagactcaacaaaaacaacaaaaaaatacagtagtaagtattgaacctggagaagttggaaccctcatacattgcnnnnnnnnnnnnnnnnnnnnnnnnnnnnnnnnnnnnnnnnnnnnnnnnacagagttacgatatgacccagcaatagcacatcttgggatttaccgaagaaaaataagacatagnnnnnnnnnnnnnnnnnnnnnnnnnnnnnnnnnnnnnnnnnnnnnnnnnnnnnnnnnnnnnnngatctattaacaatgaatgggtaaccaattgtggtatatgcatacaatggaatattgtncaaccataaa

SEQ ID NO: 1731 - DNA, 589 bp, Homo sapiens
gcttgacctgattacgccaagcttggtacgaggattgggtagactcagtgtaggaaaaatggtggcagctccactgtttatttttggtgacttcgtacgtcattatgaaccgcaattaaggaggaggcttaatggctgttcccaaactcaaatctcagagtgggtatcctagcatctagcaagactgagtggggagatttctcatccgtgtgaaaatgtagagtgaggcctctgactagctaattgtgtattttgttgggtttagtattttctaaatgtttacaaaatattgggctgcatgttcaggttgcagctagagggagcttgggcagattttcaattacgctttcaagatataaccaaaagctgtttctaaatcctaaaattagaatttcaacagagccccctttagaacagtcatataacgcttgtgtgggccaacagaggggctgtgtactctctctggaaccataaatgtcaaataatttataacctgcagtaattgagcaaacttaaaataagacctgtgttgggaatttagtttcttgaagaggtagagggataggttagtaagatgtattgttaaaca

SEQ ID NO: 1732 - DNA, 2099 bp, Homo sapiens
  misc_feature (1)...(2099): n = a,t,c or g
gagaggcactgggctgtcccaaagcaggcttggatgtgccaacgtacagttgctccttctgtaattcttgcactaaaactccattaaagaccatcaatgagccaaatagtgtgctagccattgaggatggagttcttagctacttaatgattcttttcttctgggaaaatcttctagtgaataatttttaaaagcttcttttaaactgctcagtaaaacattgccatacattaactctccatttctgcattaacttcatttgctggaaagaaattattttgttaatgaaccaaacccagccattaagttatgtgaattcaccttctctagacacattgaggtatggcagagaagacacatattccctggcctagagtgggctgacaatattgctgcctcccctaaattgactcaatcttgagaaccacatactgcagtgacagttgatcatggatcagaaatattcctttttctcctagaggaaatccctcatggcattatcattccctaaggacaatgagatgtccctccgctcaaatcctaaagccccctgatgaaagatttggctctgatttgctgccaacttattggtaagtgctgaatgagttactgtgctttggcatagcttctacatcacagcaagtgacttctcagaggggaaaagccaagctccagacaaggagtgctgttagcccaaggggaagagctaatagatacataggccgtaagcacagggctgtacacagatcctttattggcatctgcatgagaggcctagaaatcggatgttagaagctaggaatcatggctctgagcgccttgcatacaggagatactcactgatactaaatcaaggcatgtaaacaatactgggtaaatcatacctaccagaataaagagtaacattcagagcttttcttttagctgttattttaaatgttactccatatttcaaaagtctgcacgtatgaaattgtgtcttatttctggtttttagagcctaagaaagatactcattcttaattcctatttatcatctgaaaaccaaatgaatttttgaaataaatgttttaccagcatttctgacctggtctggcctgatctctgtgttgggcaagagagggtacaatttgagcagttctcctgagttagactcggctcaaagtctctcttttaaagtgaaaagccacctttctcattgcttttttcataggtggaagaatcagatttcaagagactgaagttcattctgtttcattagggattagactaaaatggacaaacagtggaagaaatccattttccagaagcagctctgccctgtatgtcccagtcaaccacatggatggtctttgtgaaagttttaacttcctgcagagttaccgagtgctcagcgattgagctttgaccacacccgtgtttgttcctagtctgttccccagccataagcatctccacaagccctctgtggcttgtgtggcctgatgtccatggccaccaagggcctctcaccatacgcttctccactcaacctttggagagacacggaccaccaaaggcttgatttttcttcatcctacattatattcaaaacaaacagnnnnnnnnnnnnnnnnnnnnnnnnnnnnnnnnnnnnnnnnnnnnnnnnnnnnnnnnnnnnnnnnnnnnnnnnnnnnnnnnnnnnnnnnnnnnnnnaaaacgagacctcgtgtctaaaataatttttaaaaaagagcaaaaaaaaaagcaatttcaaggagactgaagagacatgacaattggacacaacatctgattctgaattggatgtttttgttataaaagacattgttgagacaatttgcacaacttgaatgaggtctgaagattagctgggagtaagatgccactgttaattttctgatttcagtggttgtactgggaagaagtaagagagtgtccttgtttgtactggagacactgaggtatctgggggtgaggggcatcatgtctgtttactgtcagatggttgaggggaaaataatgttctttgtacttgcagattttttggaagtttgagatgttttagaatttgtaaaaataattatttttaaaacccc

SEQ ID NO: 1733 - DNA, 6818 bp, Homo sapiens
tggccggttgttttcaaatcccgccctcaagaatccgccctccccagcctcccaagtgctgggtataacagcatgagccaccacacctgttgggacagggattttaagttttaaaaaactcttctgtggagcttatgttaggtaattgccctaagagagttgtaaagcagtgcaagactaactaggcaagggggtatgtgtagctattgaggattaagggatagtgaaatgaactttaggaacattctcagccataagcaagagctggattcacacaaccaatttttgaaaaaaatcaagatacccataatttgggcacctttataattcatgatgagaaagagcatgttaactacatgtttaaatatattttatttcaagttaatataacagccatgatttgttcatttaagtgaaatgcttcgataaaaacctcggtgtcacttggttaaaatattggagacagattaaatgttaagccactatagtagtgactctggttctttagactattgcatgtaccttgttaatgaactacaggaatgcacattgatataatgcacaatgtcttcacatgtctcaatcctcattcctcttcctttcatgcctccctaatgcctcagtatccaatataaaactacaaaaactactgttcttttcgtttgagtggtatttaattaaaacttcaattctatgttatttccacagtccagtaatttattttaaatttgagtaatttcaaattccacaaacaaaactgaagaacagcaatattttgtttgaatttctctcttctgtacactcagtgatctaaaacaccacaatatccaacatacacaaacctcagggaagggttagtaaacacacacaagattggaatcatggtgctctttgctcctgaatggaatggtcccacagaaaaagcacaggatacagcacaacataaggggcacctgttacatatgaagtgagcaaaacatactagcattttctatatgcataatggggaaacctgcataggttagagggccttttacgctcatttaaaaatcaggcaagttgtctgtaacatttttcaataatctgggaagcactgcaatccagtgtacgatgtgctgattagtgttgtctttgttggcactgacagtcttgcatggtcatatgccagtgtttttgctttagcttttctttgaataaaacagatttaaatgcatttagacaatacgtatttgtaagctgtttacatacactaaatttaagagattcaatattagagtttctttgtttctttaaacactacagagtgcaaatcaggttcttcacaacagattgaatattgagcagttctttaaagaaagagggggaagaaaaaaagcccaagtgaataaaacattgaaactattcccttcgaaaataaatcctaaatgatgtggaatgtgaaataaggtttaacaagggtgatcaagtttatagttagaaacaaaagaagtccttcatgaaataaaggttacaagaacacgttgcctgttttcccccattataaactgagaagtgggtaaagacgatcgtttcagtacgaaaataggtgactacaggatcagcgcttcatctcacatgctggtacccaaagcccagggctgtggctgtccatacggtggtgcggtataaccataaccaaacaggtgccctggggagggacggcaacactgggtcctgctgtcagcatcaactggggctgaccataaacaatgggttgtgtctctgtagcttgttcttcttcttttctcagtgattctgaagcatctaatttatccacctttgtcaagtactccttcatgacctggatgaaatagggcatggcaaaatccatgatattgtgcctccatgcagtttctaggacgacatctggccttaaaagatcgtaacaggtaaacagacaagctccaaagcactctcttttttcttcctgcaaaaaccactgcaggagttcttcagccaattcagtatctttagattcagaagcatactgcattgcatccttgtaaaggctgtctttcttgcacagctctacactctgtttccagcgattgttgcctttgaagagataagcagcaattctcctgaactcaatgagttcatgtttttccaaacgctgagcaagcgagatattgtcaaagttgtcataagcatctattgatgttcgcagagcctgataatcttcttctgtaataaaaagattgttcaatgattcattcacagatttgttgttatggttctgaactgaacgcaaatacggtttcaccagtggtagctgtttaaccttgctgaaataattgactgcacgagtgtgatccaaccgtggagacagcaccatcagcaaatcaatttaacaacagaggcttgaattctaagtagaactgtattgctctgtagtatagttccacaattggcaaccttggtaatgatatctttgaattgcccttctttccaggcatcagttggatgattcatcatggtaattatggcattatcatattcttcatacttgtcatacaaaaacaccagttctgcccaaagatgagcttgttctgcagctcttagcaccttgggaatattcactctagaccagaacagctccaggtgctccctcattttctgaggcttaaatttagagtatagaatagctaattcagtaaacattcccatgtgagctcgctcaagtcccagtgctgcttccaacatggtgatcagctcttcaaaatagccacgatcctgatagtagttgataagttcttctaattcatctgcatgtacaacaatatgaagtccacacatctgagcaagacggaattctttcccatctacacaggcgaagcagacctctttccatgttcgagtactgttagctttcctagccccatcaacagctgcctgatattcacccaggtgaaccagggtagatgccaaacgtccaaaattggaaacattattgtacaacaacttagcagcatcatacattttttcatcataacaacggtcaccaacttgttggatatgagcattatttggtccattgataaattcttctaactctgcaaggcggtttgttttagccagtgcgaatatcagttctgtctccacataggactctcgagccttcttacgggccatctgcaagtacttcaccagttcttcccagtttccactagtattggcagcctgaacaacttccatgtaggaggaaggatcatctgctttgatataagaatcaatggcttctttcaccattcctttctgcaactgggcttttgcaagttgactccagaccgcaggttcattgcaacgttcagcaaactcatatgcccgatccaagtttccaatatgctcaattaagacctgaactgctgaagtattgacatcaaatttccggaaaatggcaaatgcttcttcaaacagctcattgctgatggcgatattggcaatatctggggcatcataattatccaggcggttaatatactccataacacgtgtacggtcagccttaattgcagtgaggataaggaggttttgcagattcctgtgttcactgaatacagagttatcaaggacaattttctccagcagttcaatgagttcattaggaaggtctgcagtcatgaaagcctttacagttactgacacttcttcagggtcctgagtctcagacaaagctgtttgtacaacctggtcaattaggggtctcctgtaaggattgctttccagcaggcacgctgccccacaattctggatcctttcgacgtaccaggtagcgagaaagacttttgaagagggaattctcattgcaaacattaataagttccagatcacattggccacgttcataagcaacacaggccagatgtggatctctcttctcacaatactttccaacaacgcgactgtcatagtagggattttcacgaagaaatctctccgggttgttattactgtctatgtagattttggctaaggcattgtgagtagcaggctcctcacagccctcatgaattctggcctctagccaaggcagaagcagtttcaatctgtttcttttttcaacctcagcaacaagctcatcagtagagaattgacctcttacaacaagaatcaagttttttatgacatcttcagaacagtcaacatcaagtaatcctccaataactacaggaagtcgacttggattcaccttctgtacatatatctctatatacttttgaagattatttctatataaatagagcaccaaatcatggacaaagtcaaatcgatcacacacaatgataagtggtagctgatctgttagttttgcttccttaagaaaattcttgactcgctcaggatcgtagcagttgctttctctacagattctttctacttctttgatttgcccagtcttgcaagctgcctgaatatatttaaagtgcacatctgggtcctggctaaagttaacaatggatcccagaaaataaaagagaccttcaaaactcttgaaagattcaaaaagttcaatcagagactgagttgacagttgttcatgatatttagaagccacctgaacacaaatctgcagattctgacggatgttggcagacagcatggctctgagacattctagggagtcttctactgataaggaaccaaagtagttgactaaccactcagggttaagaagatgggtgtgaaccactgcacgttttatatcatataaatcagtgaaatgttctaatgcacgctgcagtaggccagccttttcacacagttgagcaatatgagcccggtcataatgtgtgaacatctgattgcctagaatagcatctgcaacttgaggcgcatgcataaggttcatctcaagtaaccgcgtctgtaaaggaccttcagatgggcgattattcttcagagcatcaagcaagaatgcagtacactgctgaattagattgtattccataaagacatctacaatctgtgtgatgtcagcaagaggctcttcatcttgaactaacatttgggcaaactgctgtccctgatctggactgattcgcattacatttctcagcagaaatatccaatctggagtgtatccaacttttttagcatataaaacaatcttttggacttgacctgtttctgcaaagcactgaatgactttatttgggacgttagcccttaggtacacactaagtgccaatgtagggtccacagatttcacaagatcacccagttcttcagaacattccagcttatcttcttttaaccatttctccaaaagctgttttcgcccttgctgaagtacaggcctacaaagctctaaggattcgtatttgttgagctgtccctggtccaaaaggataccaaagtactgaagtagaggagaagtttgacctggctgggctgggacactctggaaccgacggatagtgtctggagtacgaagaattccctttggtgcattagcagccacctttgctgcctccgagtaatttccctgggcaaaaagagcattaaatttccgggcaaagagttcttcagcaccggctaagttattacgtacagccattctcagagccaaatcaggattttgtagaacattggtgatgtaaggaattatgttttcttcttccacacacactgacagaacttgtccctttctgtttactccaattattccagctgtggcttcatgaggtgcagtaacaaaaattgtttctccactgattctattcatgtagatgcaggtaccagtctcaagatcatagaggtggatataaccatacttggttatcaagaacaccacatcatgcttttcactgatctgcattgcaacaggaaaatcattttgtgcttctggaggaaagaagacatccactgccttctttggaaagggctggttccctgtaggtggtgtgccaacttcaataatatgtaacttccctccagcttggccccgaactgcaaaacaaaataacgttgattcttctgcatttccttccatcttaaactgtgcaaagctagctgcatgtccttcaatgggctgagacactttcctatctacagaatatagctgcatagctcccaccacacgattttgctgtgcagatataccagtcagaagtaaccacttttgttttgcatctgtacggtaattgataatctggcaccctgcaaggctagaatggcgatcaaacattttcactggctgagactctccttccatactccagtgataaactgcattatccgtaacaagagcaaccgtattcaaagagatccatttccaaaaggtgacatcatcagtcatggtatgagccttcattttacttttcatttcaatgttaaaaatctgaagagttttcccagctttcagtgcaattactttgctagctggattcatgatggcgctgtctgctgaaattggtcttcgaattggattacttgggtcattcatatcaatgattaccacctgggcctgctctcctactttttctctaatgcagatgaatttgtcagactccatagtcagggtactgaagccaatgtttgctgggttgatacccaggttctggagctggagatgctcctgaaaacgaattggcagaatctgggccatggcgctgtcgggggttatggtctcctcctgtcactggggctgcggggcagtggctgcccgggctctccaagggagaggaggagaaggggaggggggaggctgggctcagcaggatcctctccggggacgcaggaaactggcaggcagacgaaagagctcgggtcgggggcgg

SEQ ID NO: 1734 - DNA, 1327 bp, Homo sapiens
agaaggtaaaaagggagtggtgagaatgaatgtgagaaggaagccaggacagcgcagtccccagtcccgaacggccagggagaggaggtggcctagcgctggcggggcctcaccccaatccgtctgccttttgatgccgtactctgctggttgcgcagccacctcgggatactgcacacggagaggagggaaaataagcgaggcaccgccgcaccacgcgggagacctacggagacccacagcgcccgagccctggaagagcactactggatgtcagcggagaaatggctttgagctcagcctggcgctcggttctgcctctgtggctcctctggagcgctgctctgctcccgcgccgcgtccggggacgacaacgcttttccttttgacattgaagggagctcagcggttggcaggcaagacccgcctgagacgagcgaaccccgcgtggctctgggacgcctgccgcctgcggccgagaaatgcaatgctggattctttcacaccctgtcgggagaatgtgtgccctgcgactgtaatggcaattccaacgagtgtttggacggctcaggatactgtgtgcactgccagcggaacacaacaggagagcactgtgaaaagtgtctggatggttatatcggagattccatcaggggagcaccccaattctgccagccgtgcccctgtcccctgccccacttggccaattttgcagaatcctgctataggaaaaatggagctgttcggtgcatttgtaacgaaaattatgctggacctaactgtgaaagatgtgctcccggttactatggaaaccccttactcattggaagcacctgtaagaaatgtgactgcagtggaaattcagatcccaacctgatctttgaagattgtgatgaagtcactggccagtgtaggaattgcttacgcaacaccactggattcaagtgtgaacgttgcgctcctggctactatggggacgccaggatagccaagaactgtgcagtgtgcaactgcgggggaggcccatgtgacagtgtaaccggagaatgcttggaagaaggttttgaaccccctacaggcatggactgcccaaccataagtaaaaataacagtacatgattgactaacccccactttctctaatgtgctgcaggtgtgggattaagaaaagctatgcaatatcactctctaagaaactctggagtccccaccccctggacttaaccctttctgcacctcagcaaatgggagccttgcaccaagtactttggtgggtccactttgattccctagggcaaatgggtggtttacatttgcataagcccta

SEQ ID NO: 1735 - DNA, 3150 bp, Homo sapiens
  misc_feature (1)...(3150): n = a,t,c or g
ccggggccacgcgattggcgcgaagttttcttttctccttccaccttcttttcatttctagtgagacacacgctttggtcctggctttcggcccgtagttgtagaaggagccctgctggtgcaggttagaggtgccgcatcccccggagctctcgaagtggaggcggtaggaaacggagggcttgcggctagccggaggaagctttggagccggaagccatggcacactaccccacaaggctgaagaccagaaaaacttattcatgggttggcaggcccttgttggatcgaaaactgcactaccaaacctatagagaaatgtgtgtgaaaacagaaggttgttccaccgagattcacatccagattggacagtttgtgttgattgaaggggatgatgatgaaaacccgtatgttgctaaattgcttgagttgttcgaagatgactctgatcctcctcctaagaaacgtgctcgagtacagtggtttgtccgattctgtgaagtccctgcctgtaaacggcatttgttgggccggaagcctggtgcacaggaaatattctggtatgattacccggcctgtgacagcaacattaatgcggagaccatcattggccttgttcgggtgatacctttagccccaaaggatgtggtaccgacgaatctgaaaaatgagaagacactctttgtgaaactatcctggaatgagaagaaattcaggccactttcctcagaactatttgcggagttgaataaaccacaagagagtgcagccaagtgccagaaacccgtgagagccaagagtaagagtgcagagagcccttcttggaccccagcagaacatgtggccaaaaggattgaatcaaggcactccgcctccaaatctcgccaaactcctacccatcctcttaccccaagagccagaaagaggctggagcttggcaacttaggtaaccctcagatgtcccagcagacttcatgtgcctccttggattctccaggaagaataaaacggaaagtggccttctcggagatcacctcaccttctaagagatctcagcctgataaacttcaaaccttgtctccagctctgaaagccccagagaaaaccagagagactggactctcttatactgaggatgacaagaaggcttcacctgaacatcgcataatcctgagaacccgaattgcagcttcgaaaaccatagacattagagaggagagaacacttacccctatcagtgggggacagagatcttcagtggtgccatccgtgattctgaaaccagaaaacatcaaaaagagggatgcaaaagaagcaaaagcccagaatgaagcgacctctactccccatcgtatccgcagaaagagttctgtcttgactatgaatcggattaggcagcagcttcggtttctaggtaatagtaaaagtgaccaagaagagaaagagattctgccagcagcagagatttcagactctagcagtgacgaagaagaggcttccacaccgccccttccaaggagagcacccagaactgtgtccaggaacctgcgatcttccttgaagtcatccttacataccctcacgaaggtgccaaagaagagtctcaagcctagaacgccacgttgtgccgctcctcagatccgtagtcgaagcctggctgcccaggagccagccagtgtgctggaggaagcccgactgaggctgcatgtttctgctgtacctgagtctcttccctgtcgggaacaggaattccaagacatctacaattttgtggaaagcaaactccttgaccataccggagggtgcatgtacatctccggtgtccctgggacagggaagactgccactgttcatgaagtgatacgctgcctgcagcaggcagcccaagccaatgatgttcctccctttcaatacattgaggtcaatggcatgaagctgacggagccccaccaagtctatgtgcacatcttgcagaagctaacaggccaaaaagcaacagccaaccatgcggcagaactgctggcaaagcaattctgcacccgagggtcacctcaggaaaccaccgtcctgcttgtggatgagctcgaccttctgtggactcacaaacaagacataatgtacaatctctttgactggcccactcataaggaggcccggcttgtggtcctggcaattgccaacacaatggacctgccagagcgaatcatgatgaaccgggtgtccagccgactgggtcttaccaggatgtgcttccagccctatacatatagccagctgcagcagatcctaaggtcccggctcaagcatctaaaggcctttgaagatgatgccatccagctggtagccagggaaggtagcagcactgtctggagatgcacgacggtgcctggacatctgcaggcgtgccacagagatctgtgagttctcccagcagaagcctgactcccctggcctggtcaccatagcccactcaatggaagctgtggatgagatgttttcatcatcatacatcacggccatcaaaaattcctctgttctggaacagagcttcctgagagccatcctcgcagagttccgtcgatcaggactggaggaagccacgtttcaacagatatatagtcaacatgtggcactgtgcagaatggagggactgccgtaccccaccatgtcagagaccatggccgtgtgttctcacctggggctcctgtcgcctcctgcttgtgggagcccagcaggaacgatctgctccttcgggtgcggctcaacgtcagccagggatgatgtgctgtatgcgcttgaaagacgagtaaaggggcttcacaagttaaaagactggggtcttgctgggttttgnnnnnnnnnnnnnnnnnnnnnnnnnnnnnnnnnnnnnnnnnnnnnnnnnnnnnnnnnnnnnnnnnnnnnnnnnnnnnnnnnnnnnnnnnnnnnnnnnnnnnnnnnnnnnnnnnnnnnnnnnnnnnnnnnnnnnnnnnnnnnnnnnnnnnnnnnnnnnnntgtagagacagggcttcaccatgttgccaagctagtctacaaagcatctgattttggaagtacatggaattgttgtaacaaagtatattgaatggaaatggctctcatgtattttggaattttccattaaataatttg

SEQ ID NO: 1736 - DNA, 3780 bp, Homo sapiens
cacaagacctggaattgacaggactcccaactagtacaatgacagaagataaggtcactgggaccctggttttcactgtcatcactgctgtgctgggttccttccagtttggatatgacattggtgtgatcaatgcacctcaacaggtaataatatctcactatagacatgttttgggtgttccactggatgaccgaaaagctatcaacaactatgttatcaacagtacagatgaactgcccacaatctcatactcaatgaacccaaaaccaaccccttgggctgaggaagagactgtggcagctgctcaactaatcaccatgctctggtccctgtctgtatccagctttgcagttggtggaatgactgcatcattctttggtgggtggcttggggacacacttggaagaatcaaagccatgttagtagcaaacattctgtcattagttggagctctcttgatggggttttcaaaattgggaccatctcatatacttataattgctggaagaagcatatcaggactatattgtgggctaatttcaggcctggttcctatgtatatcggtgaaattgctccaaccgctctcaggggagcacttggcacttttcatcagctggccatcgtcacgggcattcttattagtcagattattggtcttgaatttatcttgggcaattatgatctgtggcacatcctgcttggcctgtctggtgtgcgagccatccttcagtctctgctactctttttctgtccagaaagccccagatacctttacatcaagttagatgaggaagtcaaagcaaaacaaagcttgaaaagactcagaggatatgatgatgtcaccaaagatattaatgaaatgagaaaagaaagagaagaagcatcgagtgagcagaaagtctctataattcagctcttcaccaattccagctaccgacagcctattctagtggcactgatgctgcatgtggctcagcaattttccggaatcaatggcattttttactactcaaccagcatttttcagacggctggtatcagcaaacctgtttatgcaaccattggagttggcgctgtaaacatggttttcactgctgtctctgtattccttgtggagaagggcaggggcgacgttctctctttctaattggaatgagtgggatgtttgtttgtgccatcttcatgtcagtgggacttgtgctgctgaataagttctcttggatgagttatgtgagcatgatagccatcttcctctttgtcagcttctttgaaattggggcccaggcccgatcccctgggttcatggtggctgagtttttcagtcaaggaccacgtcctgctgctttagcaatagctgcattcagcaattggacctgcaatttcattgtagctctgtgtttccagtacattgcggacttctgtggaccttatgtgtttttcctctttgctggagtgctcctggcctttaccctgttcacattttttaaagttccagaaaccaaaggaaagtcttttgaggaaattgctgcagaattccaaaagaagagtggctcagcccacaggccaaaagctgctgtagaaatgaaattcctaggagctacagagactgtgtaaaaaaaaaaccctgctttttgacatgaacagaaacaataagggaaccgtctgtttttaaatgatgattccttgagcattttatatccacatctttaagtattgttttatttttatgtgctctcatcagaaatgtcatcaaatattaccaaaaaagtatttttttaagttagagaatatatttttgatggtaagactgtaattaagtaaaccaaaaaggctagtttattttgttacactaaagggcaggtggttctaatatttttagctctgttctttataacaaggttcttctaaaattgaagagatttcaacatatcatttttttaacacataactagaaacctgaggatgcaacaaatatttatatatttgaatatcattaaattggaattttcttacccatatatcttatgttaaaggagatatggctagtggcaataagttccatgttaaaatagacaactcttccatttattgcactcagcttttttcttgagtactagaatttgtattttgcttaaaattttacttttgttctgtattttcatgtggaatggattatagagtatactaaaaaatgtctatagagaaaaactttcatttttggtaggcttatcaaaatctttcagcactcagaaaagaaaaccattttagttcctttatttaatggccaaatggtttttgcaagatttaacactaaaaaggtttcacctgatcatatagcgtgggttatcagttaacattaacatctattataaaaccatgttgattcccttctggtacaatcctttgagttatagtttgctttgctttttaattgaggacagcctgggttttcacatacactcaaacaatcatgagtcagacatttggtatattacctcaaattcctaataagtttgatcaaatctaatgtaagaaaatttgaagtaaaggattgatcactttgttaaaaatattttctgaattattatgtctcaaaataagttgaaaaggtagggtttgaggattcctgagtgtgggcttctgaaacttcataaatgttcagcttcagacttttatcaaaatccctatttaattttcctggaaagactgattgttttatggtgtgttcctaacataaaataatcgtctcctttgacatttccttctttgtcttagctgtatacagattctagccaaactattctatggccattactaacacgcattgtacactatctatctgcctttacctacataggcaaattggaaatacacagatgattaaacagactttagcttacagtcaattttacaattatggaaatatagttctgatgggtcccaaaagcttagcagggtgctaacgtatctctaggctgttttctccaccaactggagcactgatcaatccttcttatgtttgctttaatgtgtattgaagaaaagcactttttaaaaagtactctttaagagtgaaataattaaaaaccactgaacatttgctttgttttctaaagttgttcacatatatgtaatttagcagtccaaagaacaagaaattgtttcttttcagtgtgatttgtttttcatttgggccaatttgggataaactattttcacttgggatttcaggatacagtcaaaataagcttaaataactcaggacatctttgtgctaaactgtgaactctggacaaaaatagagagtctctgaatagggcaggagcaggaaaatggctcctgggtggctcttgtatgcttcttcaggatgctgatggcctttgggaagcccagtgtaaacaatgataaaggagcttaacacttttataggtgatacatgtgatttaatcaaatcactattcctgatctcatttactaacagaataaagtggtaaatatttaaattaaaaattccaaagaccacttttaagtgcttcttcactattttgactggcccacaaacaccagaaattcagaccctgaagttttctgcctcagagaaatttaagtaccttataatgttccccttctacaacttttttcttgcagagatacatgtgagttgacaagaaacattaaagggaaataagaagaagctgataaagctttataggaggaccaaagaactagcttactataataaaaaaattttaagtcttcaagggtatacatcataa

SEQ ID NO: 1737 - DNA, 2711 bp, Homo sapiens
ttttttttttttttttcatcattaaatatttattgagtgcttactgtatgcaaggcactggggatacaaagaggtataattcatggctctgcccttaaggagctcacaatctagttggaaaaacaagacatatatatatatatacatacaaaaatcagtaacaacacagaggcctgaacaattgccaagtggacaacagtacagataataaagaagcaagaaacgagggttcactaaaggctatagtggggaagggagtgcttcactgagagagtgggacttgaactggtattaaaaacaagagcatcccgggcaaagggaacaacactcacagctcagaggcaggaagacactctgcgggtctaagaaatgaagagttaaatgtggctagattggaggtttggtgcagggctaagagagtaatactcgcttagccaggaaaggatgcatttgttttacgcatttggtgcgtctgaggggctggcaggccttgcacgtggcagtgtctatcctgtcagatttgggaggtcagctattaattagatcagctattaatcagactgttctcctaacactttaacttcatggatgtaccttccttcctttcctaatgccaactctgtttcccgggtaggtgtttcactgcctgaatgaaatcctagatctctgtcacagtttttgttcgctggtcagtcagaacctaggcccactggatgagcgtggagccgcccagctgagcattctcgtgaaggtgcgtctgcctggaagtatgcagccttgccgaaaggacagaggtggttttgccaatggagaattcatgatctttcctctgagtcagtaaagcatttcctcaatacacacacgtacagagataagatacaaagataaaaatgttggtatcagttgattttgaagcaggtaattactgtgccacctcacagtgctcaaaaatagttcagtcctgaatagtttattcagcccatcaaataagcattgggttgttctaacttcctcacatcctcccccctccttacttccttgaactaacccccatctcactgagataattatctgcttgtaatcaaaacgggttctccccaaccccagtacttgacaaaatacattaactggaaaccagctactaaattccctactgatgaaagagtactttcataggaagtcatgcatgtatggatttggtacaagtcattttaggaactaatagaaataggaatgtgggaaggccaggtggttctgtagaattttgaacaaggcttttccaagaaactcctccctccgcccccatcctccatatggagagttggtgagctgaagtggaatgacagctgagtccttctctctgcagggctttagccgccagtcttcactcctgttcaagattctctccagtgttcggaatcatcagatcaactcagatttggctcaactactgttacgactagattataacaaatactatacccaggctggtggaactctgggcaggtaggagcaacccttgggtaactcagtagactttttaaggtggctttttaatgagttgtagaattctagaactggaagaagactttagtccaaataccctcattttataagtaaggcttagagatagaggtgtgaccatctttaataattttaatggaggttattttctagtagaagtcatcatccatccataaaatactaaaaaacctgacagtgagataggtgttaagtcctttgctaggttatgtattgctatgctgggaggcagtgggccttccactcccaattctgatatgaactagctgtgcagccgtgggcaccccgccttgctggtcccttacttccgcatctgtgaaaggaggcgaccaccccttctaactctaaactttaaaaaaaactgataccgagattcagtggtagctggcttcccagaggtctgtcattcccattcagaaaatcacttcattgtcctttctctctaaaatggtctgcaagcagatttttttctaagctattgtagcagaagagtcaaaagaaactcttcagttttaagatgacattatttagatcacaggttatcctgattcatatttctttgaaggtagtcttgggaaagcatgacacttaataaggctctttttctcttttgtagtttcgggatgtgaaaatttctggctcataaattgaaataacagccacgttcccaaggttgtaacagaagattcaaaacatcccattctagccacacacaaataaatatctgcggcttagtgataggactctaccttttctcctagaagcagttactgaacatccaggagtacaactccttcccatcattcccatgtggaagggtctctcccatcaaggagaacatgtggcatctctgatcctttacattgagaacatttgttggatatgttcatttattcaatagtcatttattaagcacctactacgtaccttggtactgttcaagctgtgggagatacagcggtaaacaaacaatatagagcagaaagttaaatattttatggttcatatgtgaaaaagtaattatgtttataaatagactaactgctggatgttaccaccaagtaagaaagcaacaggtaagataggctttctctctccctataccaagtaatttatacctacacagattgggcaattctagctaatgaaaatatacttaaaagtatttc

SEQ ID NO: 1738 - DNA, 386 bp, Homo sapiens
  misc_feature (1)...(386): n = a,t,c or g
gtagagaaaaggggcctctggtgaccgcccctacctggcatccctctaacccaggaggagcgtggggaaaggggctgtgggcctctcggggagcgagctgcgggtagcggcgcactgggtacaggcgcgcgcttggctgtcgcctctgccgctgtgtttgggaggactcgaactggcgccaggaaatattaggaagctgtgattttcaaagctaattatgaaaacatttatcattggaatcagtggttcacagatgccctgacttatgttcacagacatgagccccaggttaaaacacgctttcaataaatgactgaattcgagaagtgcctccctccccgtgtgatccttccttcgatgcttgcaaaacttagatcttaaanggg

SEQ ID NO: 1739 - DNA, 990 bp, Homo sapiens
tgaatccccaagtcctgaagatataccagactacctcctgtgagttccttgctttttccaatttcatcaagacttgttcatatattaagatacacttcctggaagctgggggcttttcaggggcaatgaaattgaaggtgacaactctctgctcctggcaggcaatacagggccatccacagtgcagaacagcaacatgcctatgagcaggactttgagacagattatgctgaataccgcatcctgcatgcccgtgttgggactgcaagccaaaggttcatagagctgggagcagagattaaaagagttcggcgaggaactccagaatacaaggtcctggaagacaagataatccaggaatataaaaagttcaggaagcagtacccaagttacagagaagaaaagcgtcgctgtgagtaccttcaccagaaattgtcccacattaaaggtctcatcctggagtttgaggaaaagaacaggggcagctgaagttatcaagggaatttttgagcctctgcttagtgaaacacaaaggaacaaagcagctataaactaaatagaatgcaactatctgcttttcttatgctgaccactggagtccatggtggcaagtagagagctgctctaggttcttgaggtttggttttcattattaatttttagggtatgggcactgtgcaaagactccatagctgtgcctaggagtctaggaaaagtgacagaggcttggcttttttacctttagttcagccaagtcattttcaagtcctgagaaatgacatcatcttcaggataaaataatgaggacattagacaaaccaaactaagtgaattttagcctggtagcctctctaaggaaacagtaataataacttctgataagagttaaaagaacttgtagcatacctggatataatgggaaagggcctgggtgttacccatgtactgaaaatgaacttttaccaacatggctaaaaaattaaaaaaaaa

SEQ ID NO: 1740 - DNA, 1858 bp, Homo sapiens
tagaggatccaagcttacgtacgcgtccggagaccgcttgtgctggagtcggagttgtaacgctccactgactgatagagcgaccggccgaccatggcgcccggagtggcccgcgggccgacgccgtactggaggttgcgcctcggtggcgccgcgctgctcctgctgctcatcccggtggccgccgcgcaggagcctcccggagctgcttgttctcagaacacaaacaaaacctgtgaagagtgcctgaagaacgtctcctgtctttggtgcaacactaacaaggcttgtctggactacccagttacaagcgtcttgccaccggcttccctttgtaaattgagctctgcacgctggggagtttgttgggtgaactttgaggcgctgatcatcaccatgtcggtagtcgggggaaccctcctcctgggcattgccatctgctgctgctgctgctgcaggaggaagaggagccggaagccggacaggagtgaggagaaggccatgcgtgagcgggaggagaggcggatacggcaggaggaacggagagcagagatgaagacaagacatgatgaaatcagaaaaaaatatggcctgtttaaagaagaaaacccgtatgctagatttgaaaacaactaaagcgctccagcacatcagtcccgacgcttcctgtgaggtgcactccgcagcccagcccagccgggagaccacgtggccattgcggtctcctgaccttggccagtgaacctgccagccttccaggacaggcggccggagagctgcccctgaaggacagtcctctcgtcttgcagactggtgaccttctattccctgttcatctctgtttctagatttagtcacttgaaataagaaatctttggggtttgggcttttttatactcttctcagtttgtgaaacgctaactgcacacgaagccgcctgacggcacccagcgctgtggctgtcattctcccagggcagaaccctgcgtttctctctgtccactaacaagcttcacacgcaacacagggaagtcggtttgacttttgtcatgaggagaactgaccagccctcatcattccccataaaaccacggacagcgtctgtgtgcgcatcttgagtcttcacacctgttgactcacacggcttttgctgatgacacggggctccagtacacagtctgataaggacttaacgtcctaacctcaattgtattaaatagcattggggaatagctaaacctttttaaaaaaatttattggattttcctccctgcttaaaagatttcaccagaaaaccttcatataaaaattcaggccctttttggacaatttttaaaatttgtatctttactagaacatgagaatctttttcccttggaagcttgaattataaatgtggtgtttggcctgcctcagcagcaccagttgactgctcgtgtgccagcggtgtggggaggacggggcaggacgctgcagctctctccagccctgttggcatcctcagtgcctgcaggcctctcgctgcctgttgggctgtctggggggtggccatttagggatcgtggggacggggtccaccccaagaagaaagaaaggcccgtccacaggcccggctctgggccacgtgccccggaagcaggtgtgtccagagtcagctgagggctctccccacaccacccagcaggcgctggtgctccttctgcctcatgggaccagtccagcttccagccgctctggctcgagggtggtctgagcactttccttctgagtggggcttctcctgcggaactctccaagtggcactgctggacctgcccacgtttctgtaaaaatcaaggatacgtggctttaagtaaag

SEQ ID NO: 1741 - DNA, 373 bp, Homo sapiens
ggataacaagacttaattactgaaaaacagtaacatagcattttgaaatataatcttttaaaatattgatgctttccttttaaatggaaatttaaattttatgattaaaagtttaaacatttatgataattttcctcatcagttctcccataggaaataaagcatgtgaaagggtatttaaagttttggaggactctttttaaaatgactgtgttgataactagtttgggctggttttgttttagaaaaaacattttcatgtaggagtattctgtgaaggaaaggaatcatgcaaaatatactttttgctttggcgtcttacagttgtaaaggaatggtgatcattctgaatacttctgtagtgagtattcat

SEQ ID NO: 1742 - DNA, 877 bp, Homo sapiens
ttttggagttgcattgggatttttcccaggaaaaaatatggcttttagtaatgctttgcaattggctacgcagatataaattaagatatgtttattctgagttcttattggaataagtttcaaaatcaacgagcttaagaatgaaaacaaaacttttgagagtctcacaaagtagctttctggtcaatacaccttacttgatttttaagctcgcagaataaagtatagaaacaaatggagctgaagttccatttgctaattcagagacttttgtgcttccgcaaattggagggcagcaagccatcctattctcatagtaatcgttttggctttgaaatttacatacaatttaatagcacatttttagccattatggattggcgcaataaagagatatcaatgtaatgcaatgtgatgctttatgggcctcattctaattcagaaagcttgtttaaaagaactaagactcttctgtttaataaaatagcaacaatctaatatctagattggtagtcctgcggtgccactagtgggagatgagagtattaagacaagagtaaggacaaggaaagacttaaaggttgcatattgaaaagtttggaattcctaatttgggagcactgatttcttggtgaagaagtaagtatgactacgttgccagtaattttttaaaaacatagacccagaaatagcaaatcgatttcaccctcataccttagtctacaaggccttgctcttgagaaggttttccatgatattgcttaatttcatctgcacaagatgagacacaaacataaaaattccctgctcattttaataccataaaaggctgaggttatttctctgtcataaaattgtaaatagcattttttaagtc

SEQ ID NO: 1743 - DNA, 705 bp, Homo sapiens
tttttttttttttttttttggctctttccaggatttttatttctttaaaataattcatacaaatggttacagtcacaaacatgattttaaccaaaatattgctagcctaccacatcagcaggacggcactggtgcaggcggggacgctgccaccctccacgtccccaggacagacgtcgatgggcagcgggcacgctgggcaccgcccaagcttttccttttggagctgcttcgtgatgccgtcttcatttggaacaagggggggttcatgccaaaattaggaaaaacagcctttgttttgtttttctaaattattctaaaaataagacaagcaggtagaaaaaacaatgcactgtgtggcataaaaagaaaaacgggaaggattcattgtcctgagaagtttgccaactgcctcattctggggcacgttccaacatacaaaaaaaaaaaaaaccaaaaaaaaaaacctcaaattgacttccaaatgctccttcaggttttctttttgttgacagctaagcaaacagatcctttgtaatgttctaaaaactgtacacagacaagaacgttcatgggagaataactactgacttcttctgcttaacgaggaacgcgaaggacatcagggcagagcgcccacaggacggacgacgacaagcgacacgaggcccagcgctgccccctcccgcgcctgcctgtgccgaa

SEQ ID NO: 1744 - DNA, 460 bp, Homo sapiens
  misc_feature (1)...(460): n = a,t,c or g
ggggagcctggaactgcatttccatgtggaccctgggtggatctggaaccaggctggctttcctagctcccccgccctttggctcccttatgttcttagccttcttttcacaacaaactcagaagcagccaagtagttggttgtgttgtctacagttgcactgaagcacgttttatttcggctaagtgacagtcctttgttgtccctgtcttgtaattagttagggtagtatgttggttatattacgtggaatttattgcaggatggtaagggagcatgtgacaaaatggggcaatagttctgtaaggctgagagaagctgggggtgtacccagtggctaggctactcagaggggactgtcatgctgtcagtagtgtagtgggagccaagcaggctttactcaccggcctgttaacagctgtgcangtcatgcctttcgcttgtgttagctcaccttgtg

SEQ ID NO: 1745 - DNA, 370 bp, Homo sapiens
aaaattgggtattgattggtttcagtattttaataatggtaactatggttttattaatatgtatatatttttatttgacataaacaaatagtaattcgcccagactttagctgtttgataaggtagtagtgcatgttatgtaaaaatttgcataaactttcttgtgtttatttcagtcattaagtttctcttaaaatttgtggttatattatttgccagtgcttcatcaatatatgtaacagtttggatttataatttaacacaatactcttcttcttttccgattttgtttctaggtgctaactgccaaagaaaggaaaactcaaattgatgatagaaacaaattgactgaacattttattattacacg

SEQ ID NO: 1746 - DNA, 553 bp, Homo sapiens
aagtttgtcggcccttgccttggagagctgagtttctggaggctgctcacattccttggcttatggcctccttcttccaacgtcaaagccagcaacattgcagcaatctgacttattttgttgtcatgtctcctgaccacatctggaagggttatctacttttgaagacacatccagataattcaggacaatctgtccattttgaggttcttcattgaatcatgtctgcaaagtcccttctgcaatctaagtaagaaaaatcaccaagaatattatttttggtatttggaattgaatttgccaggaatgcaaggcactgctacctaactaaagaccttggctttggaaacatcttaccccttgggcagctctccagagtttagacttggcagcatcaaagacacaacgcaaggcattttggagatcaaagatgggtagaaaagatgctgctactataaaacttcctgttgatcagtacagaaaacaaattggtaaacaggattataaaaaaactaaacctattttacgagcaaccaaatttaaagcggaagca

SEQ ID NO: 1747 - DNA, 1350 bp, Homo sapiens
tgatccacttctgtgcacagtttttgcttcctcactgtgagtcctccttccccgaaagtgcaaagagagcaagctgatacctgcaggccccagagccccaggactattccagctccacttataaagcagggtgaaggatttgctgcatttgtgcttcaaagatccagctcactttggttgtccttctcagttggcaaactgctcataaaaagcaaacttgatcctctctatgtgatggcaaagtttgatggcagggcccaattttaagtccatgcattcttgaacagtgggaagggtaaggagcaacagggcctgcccatcaatttcctggtctaggaatattcttgctaatggagcacagtcagtggatctgatgaaccgcacaacgtctgccacactccacttcaaggggttactgtccaggtgaagcctttcagcaacttcgatccttatttcctttggtgaaggaggtttattttcatcgtcagaaaatgaaaaggtgcgaagctccctttttctcctttgtctatctggaggcagcgatgtggatatctcactttgggtgggagaagaggagcatgactttttttctgacatttctgattcttcctgtagctcatcctgctgctcggatgtactgccttcacttagggaatcatcatccccttcatctgggtcatcctcatcttcacccccacttccctggggaagaagcccgctggggtattatcaacagatgcagaggagcgtttcttcttatgaacaaaaacatttttccgcctctttctcctcttactggcttttttcagggcacaagctaagttactatgcccaccaggtggcctcccaattcttttatttttcttctttccgtaatagtgtgtgtatttggtctttgtaagtacagaacagttctcagaacacttatccagaaccatccgtggaccgaagaggttaggacagcattccagtttgatacaggtttgccggcagaattcagtcacccgatctgctgttttcactatctcaacagtagcccgataactctttcctttatatttggcttttaggacttccccacatccgtgccacacagagtctttgtccagctggagctcccgaaggacacggctgggtttgtaggctctctaaggaccagaacacagttcccaggtcctacacattgaggcagctcagcaattcttcctttgttaagatatggccctgagaagcaacggtggttgaagtatatctttggacagcaatattttccattaatcataactgactctgtggagttcagctcctgattcctcaggccctcgtggacagtcctcgaggatggtactt

SEQ ID NO: 1748 - DNA, 1793 bp, Homo sapiens
gcttataaacatcctttattgtacatagacagtggatactgagaatgatcaagtaaatggaattttgaacaggtaaagaggaaacaaagaattaaggtatccctgtggaatagtgcaagaaaggagtgccccacccatagtgttatctacaataggtactccggggaaaggaccccaagggagcaagcccacaaatgtatgaccagcacaattctatgatcaaactctacctctagcaaggcgtctcaacaatcaagttctatttaaatcattcgctcgtgtcttctttcagtcatgatgaaataatgagaatatcataaggaacagaaggtaatgcattgggtcaccacccttgggagaggctggtgggatgtatctggattagtccctcacggggggtgctattttcctgcatagtcttcattatccagtcaacatagttctttacccgtgtgtagagcccataggtcccacactgggggcccccaggacaccaggccagctgcgtagaatttggtcttgtcattgggatcctgtacagcaaaggccccaccactgtcccctttacagctatccatgcccttctctcctccagcacagatcatgttaggagtgaaaacataggcctctgcatctgctgtgggtttctccactttcacttctttgcattttcttaaaggagctacaggtaaccttgccgccttgaggcgaacagcacgatctctcttctctgttcggccccagcctgagatcagtcccaggtccccatccatgaggttgtagtcggaagaggtgcctggtaggcagatgggagagacggtgggtcccattttcactgggtctttcagccgcaccagtgcaatgtcattatcaaaattggttcgtccttctgggacttccagcagcttccatcccggatgaataaacacatgctcaggagtgagcatcttggattttgccagccgtgaggtctgcactgaggtggacccaacatacattgttgggctccctgtttccctccacaacatgagcagccgtcagcacccagtactcattaatgagcgctccaccagcccatgggttgtcaaagaagacttgccaggggaagtttttaatatctgcatcggatcctccaattatcctctgtttttcttcaaagggttctctggggactccacagactggaacacatttcggcagctccgggcccagcacctcattcacccagctcccgttaccagcacagtgatactccccacctcctccattttccatgtagtaatatggctcctcacaagtgtagcggatgacagaaccaaacaaagtgctctctgggtcttcaactttaccattctcaatggattcaggaatgccacagtccacaggttgacatttcagtttggaattactccactttccattgctttgacaagtcgaatagaaagatgttgcaccaacacgtccctccacaacttcaaacccatccagacaggttatctgcaccacatctctaaagacatattttgccttcgcaggctcccaaacagaattgggagtgtcttccttagggcagggcattggatctccatgatagcgaagtttccagccctttttttgccctgttagatcagtttggaagatgatatcaagagcattactcttggtttcaatatttagagggccagggaattcatgaccacagtaagggaccaattgccgatctcctgcaaccaaaactaaactggtcaggcaattttccgctgagtcagctgctttcacatcagattctctct

SEQ ID NO: 1749 - DNA, 1959 bp, Homo sapiens
gcttgaaaaatattttactactactaagtattcagaaatctttgttatcagtaggtggtggtagtgatagggaagggagctttgatcactaatctctcagactgtggccagaatggtgatgcttaagccaagtatgaatggctattaacatactgaggttagggaaggagtactgagaagtgctttgcagcaacactcgcagcttgtgtgatgatgcagaagaaaatctgatcatgttcaccctgctttgacaatgagccttgcccattggagaatgttcaatcaatagtagacctaaaaaaaatcaacttgttgctttcatctttttattgatagcacagccagagctaccaaaatgatttactggattctagcaaattaataaatacagtaatttgattgtaaaaggaaacattctacttggacattttagtagaaattgctagagggaaggagctcctggcatacattctacttggatagaagagaagatagcacaggaggagaactggacagtccagggtatagattgttgagattagggattcagcagaaagcaaagcaaatgttctcattgttcttttgaggtacgaactctgaagagtcaagacattaaaaataaaaagcaattgaaccgggtagccaaacttaggcaaaaggaataaatatttggcaacattttgactttaactgccaatctgagattagtttcttcagaaatttggaagctgcaaaacgttgcctttcttattccatgaaaggcagggcaggcaaaggtaagaaaactgctgagtgggctccttgtaccagcaccaaccagcagcccttgacagcatagatgggatgagtgtaagggctatccttagcataagggaaagacggttataagctgagaagattgaaagaagaatggagccacaaagagaatagcataaataacaagaaggaaacatgaagaacaagcacttaagatattaactttcagtctttctccatttcttgatgtctaatgaggcaaaataactgggcaaggaccaccaagatgaagaagttaaataaaatgtcacaatgaaattgagtgcaataatacaactgttgactgactttccaaaaccacggtgatcggtagagtatcatcaatgttaccgaggattttgtttctgcctcattataactcacttccatgtattttgtcagtatagtacgtatatttaagcactccagtgacaattatgacaatagtttctggaagaaatctatgactatagctttgggaagcacacaatatgaaaagggaatttcccctaaagacaaggaatgcagacaaattcaaacccttaagaacaacaacaaaaaagatttaaaaagactgatgactgtgaggcaggcacattttcctccttttgctgaactggggcatgaggcatttaggttaaccatggcttaactggtgttgggtaagctttatattataaaacatgaagatggcaaaggtttcacttaagtttttcttttactactttaatttgcttaaaagcacaaatgcttgtgcttgcagtaacttcctaaaagcagaagtaatgttcccttttactaccttaataaagcatttgcccctttgatacaaatgatttttttactgtgctaacagctgaaccagtggcacaaaattgagatggtatttactgcagcaaggtccctgtaaatcaaattctaagctttacataaaaatcttatttataaaaaatacaataccaagtacagtgagaatggagcatggagcagcagtgctccctgccagggccatgtggaagtggcttttgcccacagtgcttgcttaatggcacaagtgaaaagctgaataaggcaaacacttgaagaggcagttttctgtaaacttcagggggtggggggaaattcctctcttgggacagatactggtttgggatggctaagatc

SEQ ID NO: 1750 - DNA, 1293 bp, Homo sapiens
cttaaaaagaaatggtttaatttcatttttatctgggaaaaaaaccacaaatacgagtttaaaatgaaatgacaaatacattgacatgtcaagtgtcattttttatggtattatgcttattcaaggtgtgaagatacagaacctctttataaatttctggcatcaaagattcccaccgtagataaaaacaggttggttataaaatgtcaattcattaaatattcaatttttgttctttgtttttataaggaatattttgtagaaacagtataaaatagagtagacttttggaaattgaattataaaattttagaaaaaagtgttaagtcctaacttttctttgcgaaccaacaagagagtctagttttaccttggggagttacctgtgaagtgcattaggcgggctagagccggtttcagagccctggggttctatacagtagaagcagccttctttagccttagaatacgaccccagctttttccagttagcctcaatcagaaaagttaccatacatgaatatttctatgtgcagtaaaagtgtcattttattaatttgcattatgaaaataagtctgtataccaagtaatgcataatgaatatgaatcatgtaaatttggtcacggtatttgaagttggctttggctctgaagtatttttgaattcatagaaaatattgagcttttaataaaataaataaaacattttaattgatattaataatcaagttcaaattttaatttttcatctgctactcaattttaaaagagaagtcactctcagtagtgttcccaagtgagcgattgcaccttctatgatgtgaaaaagttgctaaagatcctattgccattagccgttcttaagtgctgaacgtaactgagagaattgtttgcaatagacatgctctgtcactggcaggaagtccatcaataccctttgcaggggcactccagaccttgtgttttaccagaaactgaggcaaaccgtggtcctcatgtgcctttctgaagagctcctgcagcaggcccaggctacagtggccaagtctcacttgacagtaatggcattggatggtggctgcagaaggttactgatgtccccgtgggctttcacaggctatgcagatcgggggctgttctgcctagtactgaaaggaccaaggagctctggctgccctcaggaattccaaatgaccgaaggaacaaagcttcagggctctgggtggtgtctcccactattcaggaggtggtcggaggttccgcagcttcatttcgtccagttctcgtgccgc

SEQ ID NO: 1751 - DNA, 798 bp, Homo sapiens
tttttttttcatcttgggaaccagctttatttctgattttttttttttgtcagagtataaaaaagtgagtgcagcaaaacaaggaagacgagacaggcgtgcgtgggccagggcaagacagaggagaagggagggaagcagaggcagaagggccccttgggcgaaggctgatggtgggaggcgggcagaatacttgcgcaccacacaggggcagggatgagggtctccccgtggtgggggcttacaggatgggagcggccaggccagttgtccaaattccacctgggacctgcagtgaccagcctcgagtctggaggctcaaagcacacagaggggactaggggctcagcctcatctgtccctgagattttcagaagccacagggggactgggagagggcagaggcgcaagagggtggaggcggctaggccgccctcactgtccttccgccaggcagcaccagccccaaaccacccagagaggggttgctcaggcctctgggagggtgtaaggggagtggccctgggaaggcctctcccctgaatccaggccttcttgggaaagcagcaatgggaaggcccacgcacaaggcccttgttcttgagggcgagaggggggaagaccataaaagcaagattttcccaaagatagggcagggagcactgctaagcctgggccctgggcgcggagccacctggacagggctggggttctcgttgtgccacattttgtcttctgggcgctttggtcaatctggtcctttcttcagcttttacttcttcatggaataagaggggg

SEQ ID NO: 1752 - DNA, 424 bp, Homo sapiens
taactcgactattgacttgggcattgagagagatgatatatacatctttggaaagtgaagtcaatgttcaagaggtgatagaagctttactttttagtgatcagaaatatttagtgcatcttttcagacaggaagaattttatcatcaagtattcccttataaaaccaagtaacacttctttatcagtaacttttagaacttaaaagaaagcaaaaagtaaatggaattgtaggcaatttatgaatcctagtagattttacaatatgtaatttatgttgtttacagtatataaacactaagttttgtgttaaatgtgatcaggaataaaagtatccccacaggcatctgacacaaattccagaattagccaaagaattgtttatttgaggccaggcaatcccagcattttgggaagccaagttg

SEQ ID NO: 1753 - DNA, 926 bp, Homo sapiens
ttttttccagcaaaaaaatacggctttattggatctatttcctaactacaaagacagctgacacagacatcaaacgtttccttttcaatgacagtcccctgagaaaggctgcacgtgactcctacagtgccgggtgcagggtacccagccgcaggtgggacgcggccacacgtcttcacggttacgtgcagaccgacgggatggccttcaggttgtttctttccgtgagtgagacacaagagacgcgattgtgccggagcgcacggtacaggccgttccttctgcgggagcccctttctccatcagcgacgttctgttcagtgacttcacagccggagcctccacccgcaggtgcaattcaggcaggttccataagggggcattaattcctaaggcacgagttcaggtcaaccgtgtttcaatgaataaaccatgctttttggttatatggaacaatagatcgctgcgagtaatcatacgtaataagcaactaattgtacagagtgcccagcaaggcctacacgaacctacctgttaacagtaactcatctgaaaacacacaaacgcagggctgagcattaaagtggcgtttttggtattggttttcttagatgaagcagagagtggtaaggcttctgtgaaacaatcatcttataactgaacaaatatattacacttaggttgcatgttatttacaatcactttctaatgttgccgtctggtaacctacagctactgtcaatcacagctcctggctttctagggtcctcctcgaactgcgtgagacgagaaaatgcacggccgtccgaggcgcgatggacgccagcaagagcagcgactggagccccagacgcaggttccaaaacgggatgcccggttacttgctcgagcacgggacatgcctcgctagggcgagcgacacagtc

SEQ ID NO: 1754 - DNA, 720 bp, Homo sapiens
  misc_feature (1)...(720): n = a,t,c or g
gggctgaaaaccccgtgcccattgttcatactccaagtggcaacatcctgacgctggagtcctgcctgcagcagctggccacacatcccggacactggggcatccatttgcaaatagcggcccgcaggccctccggccatccctggcttgctggcacgcctctccagccttggcctcttgcattggcctgtgtgggttggggccaaaatctcccacgggagtttttcggtccccggccatgtggctggcagagagctgcttacagctgtggctgaggtcttcccccacgtgactgtggcaccaggctggcctgaggaggtgctgggcagtggctacagggaacagctgctcacagatatgctagagttgtgccaggggttcttngcaacctgtgtccttccagatgcaggccatgctgctgggccacagcacagctggagccataggcaggctgctggcatcctccccccgggccaccgtcacagtggagcacaacccagctgggggcgactatgcctctgtgaggacagcattgctggcagctagggctgtggacaggacccgagtctactacaggctaccccagggctaccacaaggacttgctggctcatgttggtagaaactgagcacccaggggtggtgggtcagcggacctcagggcggaggctctccacggggaggcaggaagaaataaaggtctttggctttctccaggaaa

SEQ ID NO: 1755 - DNA, 723 bp, Homo sapiens
taaagcagacgccgcgccgcgctgcgacgctgtagtggcttcgtcttcggtttttctcttccttcgctaacgcctcccggctctcgtcagcctcccgccggccgtctccttaacaccgaacaccatgccttcaattaagttgcagagttctgatggagagatatttgaagttgatgtggaaattgccaaacaatctgtgactattaagaccatgttggaagatttgggaatggatgatgaaggagatgatgacccagttcctctaccaaatgtgaatgcagcaatattaaaaaaggtcattcagtggtgcacccaccacaaggatgaccctcctcctcctgaagatgatgagaacaaagaaaagcgaacagatgatatccctgtttgggaccaagaattcctgaaagttgaccaaggaacactttttgaactcattctggctgcaaactacttagacatcaaaggtttgcttgatgttacatgcaagactgttgccaatatgatcaaggggaaaactcctgaggagattcgcaagaccttcaatatcaaaaatgactttactgaagaggaggaagcccaggtacgcaaagagaaccagtggtgtgaagagaagtgaaatgttgtgcctgacactgtaacactgtaaggattgttccaaatactagttgcactgctctgtttataattgttaatattagacagacagtagacaaatgcagcagc

SEQ ID NO: 1756 - DNA, 350 bp, Homo sapiens
cctttgcccaggctggagtgcagtggcgacagagcgagactccgtcccaacaacaacaacaacaaaaatgaatgatgtttaggatattaagggattgcaaaatgatttctaaattactgaggttgcttctatttcttctgaatgccttgctttgaggccagtccactcagagaggaagtaaaaaatgatgaaacttcttcttttgctattttaaataaatcctataaaagatttagtgagaaagaaagtttcttttagcggtttaaataattttcagttatctgtggggactgaaaaccttgtttcttctgtctatgttctgttcattatcatgaaaaatgagtatgtgt

SEQ ID NO: 1757 - DNA, 779 bp, Homo sapiens
ttttttttttagtaataacatgtttattcaaaatactaacactgttacattcttttcattctcagggcatattctactagagatgtactgtcctatgttttgaagtcacctggaagagttcttagtgtggttatatgactacatcaagagttttttacttttgatgattagggactgctttttaaaacttactttactccataatcttaaaatactcatacagttccacagtcacatttacactaacaaggcatatttgaagtccagctttcatccttgatcctgctactctaggctctcctttctcctaaagataagcattttcattatgtatcatgtttatcgtataggcatgaacacacgcgcggccccttccaggcagtcttcagtgatgtcacgtgttcccatggcacctgtattgtactcttatcagtcattatatggactttaacttccccagatattatttgggctcctccataagactgtgagcatctgaccactggagtgttgcttcccattatatccctgttatcaagcacaaggtcaggcacagagtaagactcaaaacatgttttggaatgtatgactggtatgaactacaaaccagtaagctgatgttttcattttgagtctataaatctaattttgtggtggttttgtgtattgctcaaggctcaaattgtaaaatttaatattatgtgaccaaagaaagttatacccagaacctcaatttcctcaccgtcgaaatggggcagtttctcactcattggtctgct

SEQ ID NO: 1758 - DNA, 231 bp, Homo sapiens
cgcagatggtttaattgtagctagtcgtttccaccccactcccctgctgctgtctttgctggactttgtggccccttcaaggccgtttgtggtctactgtcagtacaaagagcctctgttggaatgctacacaaaactgcgggagaggggaggggtcatcaaccctcaggctgtctgaacccctggctcagaaattatcaggtttttgccagatcgaagtcatcctaactg

SEQ ID NO: 1759 - DNA, 958 bp, Homo sapiens
ttttaagggctgtgtggtttctgagctctatgtgtctttcctatccttgtaccttcaaagggtgagaaatgagatttatacatccaaagttagtctgataaatatggctttttgtttctccatgtaacctacactgtcaaaaataagtgatggtgataagtaggcctgggagcctcagcttctgtaaatctcattcctaaaattttgctagactcgtgttggcaaaaacaaatacctgtggattgtccttaaggcttttaatcagatacctgtgttgctgttagctgaactgtagtgaagcatcgatccaaatcggtcttctgaagtatcagttatgcttttgagtttagaaaatacttaggtgttagtctagtcttcccattcatgaatcagtgtatgtccatatcagagagcctcaacttcttttttcttcctttttaaaaatggattttaggtgttttggatttagtgtatactacatagttcagtattattggctttaccagtgttgacagaaaaattttaaatctccagttgcaaacagcaatggattaggatatggaaataaaatcatggtgacatcactgctgagttatcttaaacctctgctacttaattctccatattgaaatgcatactcctccacatacatggcttccaagtaaaggcaattgtagaggggccctgtctatcccagtatggttggattttaaacatatctgtgtttccgttattttgggaactgattaatatttacaattttttttgtttatgagttattttgatactaagaaaagagagaatctagaacatcttgcagttgaaatacaaattttattcttttggtcttgggagaatttaagcagtctatgcaactcatcaaatggtgagaaatagccctccgaggttccagtaagctttcagtgactttgatacctccccaagtttcttgagttgc

SEQ ID NO: 1760 - DNA, 308 bp, Homo sapiens
gttggatgtgtccagagcctgcatcagaaagggaggacttggtatattttgaacataaatcatttactaaattgtgcaaggagcatgatggagaatttactggcgaagacgaaagcagtgcacatgcactagaacggaagagtgacaaccccctagatatagctgtaaccaggctggctgatttggagcggaacattgaaagaaggtatctgaagagccccttaagtaccaccattcagatcaaactggataatgtgggcacagttactgtccctgctcctgcaccatccgttagtggtgatggtgac

SEQ ID NO: 1761 - DNA, 769 bp, Homo sapiens
  misc_feature (1)...(769): n = a,t,c or g
atgccccaaatatgaacatggcttccactaagataaatggccccaatctaggggattcccatttgcatcagaaaaactgttaatctagagatcagagtttttacctgctacatctttcatattttctttccttaggttaaaaagatcaagtggcatgagcagccttttggggaaaattggtgccaagaagcagaaaatgagcacccttgagaagtccaaactggactgggagagcttcaaggaggaagaggggattggtgaagaactggccatccataatcgagggaaagagggatggattaaaggagcccagcccctaggccagtgaagggactggagctctgttcttcaccttggccggagcatgagaatcctctggtgaccattttccaaagttccaggtgacccacctctgtacagagctgctgaatcaagagtctagaacaggtacattgaacggaaagccttcctcgaccgagtggatcacaggcagtttgaaattgagcgagatctcaggctgngcaaaatgaaaccttgatgttacgggctaaatcaagngcagcttaatcctgtttacaatgtgagctttttgtgcgtctgtgaaatgttttacagtgtttctcatcatctgtttcccagcaaggtcttttttttttctacattgaagttctgtctatgtatcttaatcacaaatggtttcattcactttacttttaaaaatttgtccttaaatgaataaataaaataaaagttggtcctgtgagaggat

SEQ ID NO: 1762 - DNA, 706 bp, Homo sapiens
ttttttttttcttggtgctggttaggttttattttaacaggatgttttctcttatttttcaaaatatcagttatatcaatattagaagtgtaaacaggtacaaaatatacagtacatagaaacaattttcttaactagtctatcgcctaataaaagtatgcatgagggggctgaatgaatgggcactgccaggtccctccgtctgcaggggaaacaagaggaccagtggctgcttcaacaaaacaggaatggatatttgtgtggtaggaacagcactgtggtcgaatcaagaaatctgggcccacctttatgatgttagatgctggaatgaacaagccacttggcccccaaacccagcctcgcgagctgtgccctctgagagtgcacacattaaggaggctggggcacaggggaggcggctgctacaagcagaagttcctttgaggcctggtgactggactcttgtcggtgtgggacaaatattttaagagggaaaacctggaaatctctgttcacccacagtgatgttccagtagaatgaggcatctcgcctgttgctcttccccactcatggcacgccacgtgtacccacagtgagaggctgaggtgtgtcccctctgagcagtttgcacctctaaaaagaaatccctgtcctgctgcttcccaaggtcacagtaatgatcaaatgagatgcattttgaaaata

SEQ ID NO: 1763 - DNA, 1116 bp, Homo sapiens
  misc_feature (1)...(1116): n = a,t,c or g
acggaagtgcaggaacatttcacaaatctacaatctncgagtatcacatcctgtancgctgtaaacactggaataaggaagggctgatgactttcagaagatgaaggtaagtagaaaccgttgatgggactgagaaaccagagttaaaacctctttggagcttctgaggactcagctggaaccaacgggcacagttggcaacaccatcatgacatcacaacctgttcccaatgagaccatcatagtgctcccatcaaatgtcatcaacttctcccaagcagagaaacccgaacccaccaaccaggggcaggatagcctgaagaaacatctacacgcagaaatcaaagttattggggactatccagatcttgtgtggcatgatgggtattgagcttggggatcattttgggcatctgcttccttctctccaaattttacccaagtgacttctacactgttgaactctgcttacccattcataggaccctttttttttatcatctctggctctctatcaatcgccacagagaaaaggttaaccaagcttttggtgcatagcagcctggttggaagcattctgagtgctctgtctgccctggtgggtttcattatcctgtctgtcaaacaggccaccttaaatcctgcctcactgcagtgtgagttggacaaaaataatataccaacaagaagttatgtttcttacttttatcatgattcactttataccacggactgctatacagccaaagccagtctggctggaactctctctctgatgctgatttgcactctgctggaattctgcctagctgtgctcactgctgtgctgcggtggaaacaggcttactctgacttccctgggagtgtacttttcctgcctcacagttacattggtaattctggcatgtcctcaaaaatgactcatgactgtggatatgaagaactattgacttcttaagaaaaaagggagaaatattaatcagaaagttgattcttatgataatatggaaaagttaaccattatagaaaagcaaagcttgagtttcctaaatgtaagcttttaaagtaatgaacattaaaaaaaaccattatttcactgtcaaaaaaaaaaaaaaa

SEQ ID NO: 1764 - DNA, 1082 bp, Homo sapiens
gatatctgccacttactctcagatgtttcagagaaaaagaaaacaaagagagaaggaaagcaaatatgcaaaatgttaacaactggcgattctaagcagggtacagagtggttctttgtactatttttcaactttaccctaggtttgaaacttttgaaaataaaatgttgggaaaaataaaaccaaacaaaatcattctttaaattctttatttcatgtctgtttcagcagtattgaaatataggtttctcatacgtgcaattcttttatagattcaaaagtgaggtgttgtgtgaatgttacaaatcataacatgatccaaatttataagaaagtactttaaaaatcagacaaaagacttaagaattactatgttaaatttctaatccaaatgtaaaacaagaatacaggatattgggcaatgctaatattcaaaatggggtttaccccagttcataattcctctgctcccctcctacctaaaatctaagaaagtattcattataaattggaagtacagaattcttaaaaagccaactggattcctgagttgtatgattttcctttacaggtacaatttacttttcagcaacctgtaagccatggaaagagtaactccatatccaacaaaaaaactcaaagctctatttggctggggaaaggggtgtcaaatatgcaatgttgtggtagatccgtgctccgacaaatagtctgaagtgcaggatggctgtagaggggtcgggaccactcaaggaatacaggatgccaattccaagaaatggaataatattttcaaggtcattcaggtgggctctttcttgtcaatctatagaatgcagttgcagtactcataagcatcatttttgaaagaataattgttgcataggatgcaaaagccatgaatacttcatcatccattacctgggtgaggtcaaccattttttcaattttggtctggaatccgcacggggacagaaatacaattccctttcaaaagcgatcgattgaaaagctaagtttagctgctaagtggagccaagcacttccagctggcagagacccccccaagtcttccatctgcc

SEQ ID NO: 1765 - DNA, 409 bp, Homo sapiens
  misc_feature (1)...(409): n = a,t,c or g
ttggananccnnnnnnnnnnnnnnnnnnnnnnnnnnnnnnnnnnnnnnnnnnnnnnnnnnnnnnnnnnnnnnnnnnggcacgagcttggaggtttatatcaggaaaccaacttctgtccttcttgcacccttgcaattcttgggaaataacctggcattggaactgcaagcctgaggttaaaatgtggcctaaggagaaatattgagaaatactgnnnnnnnnnnnnnnnnnnnnnnnnnnnnnnnnnnnnnnnnnnnnncacacttgtacatttatgggtactgttagtgtcagtatccatccccgcactcctcctccccattccttttcctattttcttctataaggctcattcgcaggtccctttgggtggaaaaaggaaattggagaggttggactagaggcttg

SEQ ID NO: 1766 - DNA, 287 bp, Homo sapiens
ccaaggtcacgttattagtaattagtggagtcagaattccaatgcaggttccttcactccagctcttcttacctcagaaaacacacttgcctggaccctcccctggagttggatttagttggcttgggcataggcgatttttgaaaacttccccaggcgatttttattgcacagccagacttgagaaccacttgttttaccccatttttgggagtaaaatgaattacccccctaaggaaatctggtcgctctatgtggccattcctttagttcctgccctccctaca

SEQ ID NO: 1767 - DNA, 1596 bp, Homo sapiens
  misc_feature (1)...(1596): n = a,t,c or g
tcccttcctccaccaggctgagtggagaaccctaaagctacgggacaggctcccgttccccgtgcctacacagggtgctggctctggcagaaagacagtgtgcccgccccgcatcacctgtccgagtgcgaacaccttgggaagggggttcctggtggtcctgtgacaaccagagacccccagggccaaggaggccactgcagcccggcccttctgtgccctgggcccctcctcattgcagcaccacccaccgcaccaccctgggacagaggaaacacatggaggccatagcatagagcctgtctgtttatagatctctgcctgtcttgtccgtccatccactgtgtgtatatatctgtgtatctctgtggagcggggaacgggacagttgtgtaaaaatccaaaatacaattctgactatgaacaacctgcagggtcagtccaggtgtggctgtgaaccccaaccaaaccacaggacacggggttgggggaaggcagactggcaggccaggggtgaccctcctgaccagaggtgctgcccagacccgagcccgtttgtcctactggggctatggcggccgacccaccagtgcccaagaccgcgaggctgccctgcctccccaagaccagccctgcactgggggtgggggtgggcggctggcccagctcctccggggcctctaggagacagtggggtccttggctttgggaggctccgagcctgtcagcagggagatggtggggtcctcggcgaagccgtccccttcggagaagtaggagccctctcccagctcaaacagcaccggcaggtcgttgctcccggtgtccacggagccggggtccagcaggaacagcggctgcgctgtgtagtgcaaccagctgcttccctgaatccgggctgctgttctctgcctcgggaggcctggggggctcctggggagacaggagctcttggatactggccaggctgctgtcaaggtcaggcaggctcatgtcgggcacggtcaccgaggggctgaacaggtccagcagggcactggtgtccacgctgaagccgtggctgctcagcatggtctgcaggttatccaggttggagtccatagcatccaagtggtcactgagctcattcttgtccaggcaggntacgctgaggcacttttcaggggtngaggtgggcgggggggagggaggccggccctcggtgtccgtgtgnccctggcgtccgtgagggctgtgacggaggcggggggaggttcactctcccgcaggatggagtcaatgagggcggtcggggacaagagggtgtccacggaagatgggcgcccgggactcgcctcctctacccgggggctctgaggcgggctggggggctcctccttgacacgcaccagggggctgctggataggggcctctcgtctatgctcccgccgggggaggccatggggctggcaggagccagctcggtgatgtcggagatgatgggtccagagctggccacagcatcaggggcgtagaggctggagctgctgtaggctggggagggggccgaagtaggggcccgagccgtggacgtgctccagggagaactgccggct

SEQ ID NO: 1768 - DNA, 487 bp, Homo sapiens
  misc_feature (1)...(487): n = a,t,c or g
catacaaaaatgaattgtatatgcatttcataataataaacccttggaaattgcaaataagaaacaatttgtaatagcatctcaaaacatatgatagtactttgggataagactgacaaatatgttgcttatggactgaattgtgactnnnnnnnnnnnnnnnnnnnnnnnnnnnnnnnnnattgtgatggtgtttggaaatggggcttttgggaagtaattaggtgtagatgagattatgaagatggaaccctccatggatacgattagtgcccttttaaggagatncagaggctttctgattctctctgccgtgtgaggacacagtgagaagtcancgttggcaaactaggaagaaagccctcaccagggnnnnnnnnnnnnnnnnnnnnnnnnnnnnnnnnnnnnnnnnnnnnnnnnnnnnnnnnnnnnnngattcttatttaaggtcgacgcggccgcgaattccagatctatgaatcgtaga

SEQ ID NO: 1769 - DNA, 541 bp, Homo sapiens
ggcaggaagtggaccccaaacctactcttccaggccccagtgtgaacagctgacctctaggccacagccctggtttggtccgctcccagtttggttctctgctaatagtgttcacatttttactttcagtgttttcataggatcactacattgtcacaaaccactaggagcttcagcttaaggtggcattattatgtttttataaaaggaatcacagaatagtcatttgccattattaaatcagtgattcattttctgtgtttaacagggctgtttcctgccgtccttttcccttttaaccatgtcccagtaagaaggctaaataaagggcagggacattgccagcagataacccagactgaggtgaggaataaacacatccaaggaaaatgactatgggctattgctcacagtgatcgtttgggtctttcaggtggccatgtgtgaagtccgatttgagcacgtgcgtgtgcccaaagagaacatggtcctgggccctggcgacggctttgagatcgcccagggagatctgggccccggc

SEQ ID NO: 1770 - DNA, 271 bp, Homo sapiens
gtctgattctcgctgagacagggctcggcacgcgttgaaagccccggtgcccaggtcttccctttcgcgggcttcagttcatccctcaagggattgggaccccaggcgtccacgtacagggactggaggaagattagggacgcgggattataacatgggggttcattcctaccccccatcacctcccttcccctgactccccaccaagattttgcagagagaaatggcttttgtaccaggtcattctttataattaaactcacagtatcca

SEQ ID NO: 1771 - DNA, 521 bp, Homo sapiens
gctggacagtaccctggagaaggataaattggcaagaaaactggcatctttaactccagggttttcaggtgctgatgttgctaatgtctgtaatgaagctgcgttgattgctgcaaggcatctgtcagattccataaatcagaaacactttgaacaggcaattgagcgagtgattggtggcttagagaagaaaacgcaggttctgcagcctgaggagaagaagactgtggcataccacgaagcaggccatgcggttgccggctggtatctggagcacgcagacccgcttttaaaggtatccatcatcccacgtggcaaaggactaggttatgctcagtatttaccaaaagaacaatacctctataccaaagagcagctcttggataggatgtgtatgactttaggtggtcgagtctctgaagaaatcttctttggaagaattacaactggtgctcaagatgacttgtgaaaagttaacttcagagtgccattatgcccaaatttgtttcagtttgggcatg

SEQ ID NO: 1772 - DNA, 454 bp, Homo sapiens
tcgacttttttttttttcactgttaaaaacatttattctgatacattctatcataagttagtacaagttccactctgctacagatgcgtctgtgaagagccttgtgccatccaactagtgactgaatgatgtcccatctcttatccgagccagagcacacatcttccatgctgtccgctgattgcctccaaatccagaagaccaaataatcctttatccccaaagtaggctcaaaacagttggttcaggcattccgggatctgcacccctcttaaatcccaggtaaatcacaagagggataaagccccagcgaatggcaaactggctccccttgaagagctgctgtagtctctgcttggcctctttgctcagcttcaccatggcgacggccgtgtggcgcagggaggaccccttacagcaaccacagcgtcgggaatccgaaagggaaaggagg

SEQ ID NO: 1773 - DNA, 790 bp, Homo sapiens
aattcggcacgagaaatgggtatagcaatggtgcctttctcctaaggtttttgtgaaggttaaataaggaaggatatttgtaaagagcattggacagttagaacttaacatagttcttggaacatagaaggtactccatcaatgttaaatttcattattaacatagtgctttcttcaccacttgagagctatttccctctgcattgattgtcaaccatttcagagcttttttccctctatatagcattctttagctagattttacttactcttgattttatttaatgataggagtttgtggctttattgtattcagtagtttcattgtaagctatctctgtcttcttggagccaggggactaaataaacatgtgtatatatgtgtttgtacatacacatacacacacacagaggcttccccaagaagactcattaaaactcccattccccccggcctaagcccctggctgttgaagaccctgcctcctagggaggtgtccgtgttccctaaaaaagaagtaaaatgcccactgagaactctcttaagactacctttctccaaatggtgcccttcactcaagcctgtggttttggtcttaggaactttgctgccacaatacctcggcccttctcagttcgctacgacccatacacccaaaggattgaggtcttggacaatacccagcagcttaagattttggctgattccattaacagtaagtaatttacaccttacgaggccactcggtttctcagtaatcgaagactgtctttccctaccatcgccata

SEQ ID NO: 1774 - DNA, 378 bp, Homo sapiens
gttttattattgaataatgttagctttattattcagtagaatacagtatgacataaaattaagagcttttgctaaactctgtaaagcaacacatgcatctgccataaacaaccttgattcatgttaggttttattgccacttcactgcactaaagtgcaataaacattcagtgtcatcttttaaaaaaagtttcctgggagtgaacaggaactgtcccctataagagtgtatctttattttcaaggaagacttaactagtactacatggtttagcaaagcactgtagaaaagctacatataataatttgtttttgataaactttgcaatcatttatacagtagaatactatccacatatactaacaaactgagaatga

SEQ ID NO: 1775 - DNA, 345 bp, Homo sapiens
gtggataattggttagaaatagtagatgagtaggtatattaaatgttgaatggatggtcagtattgattctactcttggattctgactaggatatttactctctctctctcagaaacatctatatctttaatattacttgctattgtatttactaactgtcacaagaatagcctgttccacatataaaatacagagttggttctcatgttttttgttgaagggaattcggataactagtgagttgtttgtcattttcatttaagacagaagttaaattctaaaagtatgtcactcagtgaatttttaaaaattatatcttttaataactttaagattgattcttc

SEQ ID NO: 1776 - DNA, 418 bp, Homo sapiens
  misc_feature (1)...(418): n = a,t,c or g
gcagacttcctcagagtccatctccatccccggagcatctgtatgattcagaagtacaaccacgatgggtatggggaccccagaggctttgaggcaagaaacatgggtccccaccaatgcaggatgaggctcttgaggccatcttccctgcccttccccaggacaagaggctgaggagttgagggaagagatgtaagtcttggatcgtgtttacttgtggcagggaagcaggtcggctggaggcttttggccaaggggaaagtgtcctaaaggaacccaagtaccaggaagagctggaggacaggctgcatttctacgtggaggaatgtgactacttgcaggtagnggcgtggcaatgtgcactccagggtggaagctcttctcatcctgctaactatcttttgcactcacccccgtc

SEQ ID NO: 1777 - DNA, 441 bp, Homo sapiens
gggaagaacctacagctccagcttctctcaacccaaaaatctgagaacccctccccttttctcctcacctaaacccatctcctactttgggcgcagcacacatattttcttgtcaacttttccccaagcccaccaacttggattcagattgcgacatgcaggacaggccagtcattctctctctctgactttctgtttaatcatctgtgggctaattcccccttctctggtgccataaattatgtggctcatagtaggtgcaccatccaaggagaaggtccctttttccaacttgtaatgatcactaattattattgccggctgtcatgtcagcctccttaccagccactttcctttggaaataacttttttattgttccacaaatagtatgtgctcattgtagtacattttttaaaaaccacaaatgagcaaagattttt

SEQ ID NO: 1778 - DNA, 545 bp, Homo sapiens
gctcttggaaaatacgttgtatctcagtttgatgaaccaattcacaagaggctaggccctctctagcaaagttatgggctgctttactgaaaacagaatggaagccctgaagtcaacactccatggagaagcgtgtctttcctaatgtcctggtgttctgttgatttaggtgcttgggaacacaatgctcccagttctgttaggacaggcatactgttactttgcaatatccactttataaaatagctcctgcccagtggctcttggttcctgtcaaatgtggacctgtagtttaagaatgacaggtggttagagacccagatatttaaaaataggtgttcaataagggaatactgattgtgcattgtatctggatagcatgcctaattgtgcatttctgaaagttaccaattcaaaatgtaattggaacagttatctttgattagacaagccctgggaagagaatgttgaggtgcagagctcacccagccaagttcatgcccctctcgggcctttgtggctgagaagtgggacagaaagatgat

SEQ ID NO: 1779 - DNA, 326 bp, Homo sapiens
actccactagcagatttctgtttgtaaaaaagtcttcaaacaacagtaataataccaaacaattaccaagtatgctctgtgcctggcacagttgtatgcacattgcatgtgcccctctaaccctggtgtggggcagagtgtaggaacctagttcagagtcccagccattgagtcgcagagctcgtatctgagtccagcctgtctggctctgaaacccatactatactggtaactccttttcttcatcacttgcagaaaatagatctatcacacaggaggaaaagttagccaactgagacaaatcagcaaaagaagaaaatatgtct

SEQ ID NO: 1780 - DNA, 762 bp, Homo sapiens
  misc_feature (1)...(762): n = a,t,c or g
tatcagaagggtaagggtaaaccatcactatttgccaatggatagagaaggaaaaccaaagagaatcaatgaaaaactgtcataattaaaataaggtttcaataagggtgaccaaaataaacatacaaaaatcacacagctttttattacaaacagcttgaagaaatagtcttagatgggaagaccacttaccatgaagacaaagattctcctgatgtgaatctaaaagttaaacaaaacctccagacaaactccagagagcattctttaatatgggggtgggagaatgcccagacttgacaaataacaccaaagttcacatacataagacatttttggaaaagatgagaaacgaggctttatttgctccaacagatattaaaagtatgagaaccacaaccatgaaaacaacagaagctgatgtgagaaacaacactaaaattaaacagtgcagacacaggtccagcgacaatgattttagcactcatacaggtggcatttcggtcagtgcatgatgattcagtgggcgaagcatttcagatccttgtctcatatcacacctcgaaatacattcctggtcaattaaacactgaaacgtactcagagaaaaagagatgaaagtgtaaataatctttgtgtgagaaaggacttttccaagcatgacctcaaaggctagagcataagagtcttcgttttaaaatgtgcaggcatttctgatttaaaaatggtaaactattngcagggttaccatcanaaaggaat

SEQ ID NO: 1781 - DNA, 1358 bp, Homo sapiens
  misc_feature (1)...(1358): n = a,t,c or g
cgaagactgcgagagccccgcgccggaggccgaccgtccgcaccagcggcccttcctgataggggtgagcggcggcactgccagcgggaagtcgaccgtgtgtgagaagatcatggagttgctgggacagaacgaggtggaacagcggcagcggaaggtggtcatcctgagccaggacaggttctacaaggtcctgacggcagagcagaaggccaaggccttgaaaggacagtacaattttgaccatccagatgcctttgataatgatttgatgcacaggactctgaagaacatcgtggagggcaaaacggtggaggtgccgacctatgattttgtgacacactcaaggttaccagagaccacggtggtctaccctgcggacgtggttctgtttgagggcatcttggtgttctacagccaggagatccggnacatgttccacctgcgcctcttcgtggacaccgactccgacgtcaggctgtctcgaagagttctccgggacgtgcgccgagggagggacctggagcagattctgacgcagtacaccaccttcgtgaagccggccttcgaggagttctgcctgccgacaaagaagtatgccgatgtgatcatcccacgaggagtggacaatatggttgccatcaacctgatcgtgcagcacatccaggacattctgaatggtgacatctgcaaatggcaccgaggagggtccaatgggcggaggttacaagcggaccttttctgagccaggggaccaccctgggatgctgacctctggcaaacggtcacatttggagtccagcagcagaccccactgaggggctgccgagcctcagggcaggtctcccgcccggcatgtgtgttcagggactgagcctggggacgcccacccacacccactgcttcctctcggcgcaccccaggggagtgttagcagcgaggccttcctcactcaggagtggaaactcagatgtgtcactcagactcaacttgctgggacactgacaggcgttcctgaggttttcagccacttaggctcgttgcggtttaaagatccctctaggtcactgagaaatgccacagaatgtgcaggaagcctgggaggcttctgtgaggaatgtgaggcacattattggggaaattgaggagacagcctagacactggctggcctgatgttttgttgacagtgaacccacagtgggagagagttttttccagtctgatctggttcttacacacacacataactcaaaagttttgtgaacaagtactttccttttttacatgttacatgtcctcatgttttctgttttctgtttcataacacaaggctggttgtggcctacatacctaaaaa

SEQ ID NO: 1782 - DNA, 1864 bp, Homo sapiens
ccaggtccctctcatttagcctgtcctgtcatcatcatggccagctggaggcaggggcttcctggtgctggaggttggatcttgatgtaaggatgggcatggtgttctcctgctgctccctcagactggggcaatgttaatttagtggaaaaggcacccccgtcaagagtgaattccctcactcgtctcccccaacagctggaccctgaccagctccccctccctccccttgcctgtgccaggtgaggtcagcacatctcaacaggcctcagggctccttgtgggcctgggctcctggacccccctttcacaggcagccagtgccctgagccagggtctccagaaagccccacccaggccaggcatgtggcaggggttagagcaggactgatgtctcctaagcacctgtaatgtgcgagggacccagctaataactgatctcgttttttcttcactgcaacatgatgaggtagtaccttttatatcccatttatagatgggggaaagcaaagcacagagagtctggataacttccacagggtcccacagccacgtgtttagacctagatgtataactaggagctttgactcaggagcctgtgacataccccctcccccaccgttgtctcatgccagtaacaggctcaaacaatgacaaagcagattcagaaatgaggccatggactctgtcctggaaggcctgaggttactggaaattaggggattaacccactagctcttgttgagccgtgggcaattgtctgaaaagtgaagacagaaccacagggctattttgtttgcttcatgtgtcccagaagatgactgagggtgagttggcttacctgggcccatcagggtaggctggagttagggactgaccagcagctttaggaatcccagccccctgaccactcagagacatgcagagattgggtttttggacttctggggtaagtggtctaagtccagtccagtcctatctgggcttcctgggagcagaagcaggcaacttgtcctagcacagatgggccagccccttaggacagaggccctcaagtctttctctttccctggtcccttgtatcccctgcaggctgagtgcatttggagggagtgagtggccctttcggatccagggaggctggtcctatggcctcatgttaaatagggcggggcttgccttctggtgtcggacaagcttctgagacgtcatgaggagattctgcctttgccaggtgactgtctggggagcgggtctgctcccaaggggcctgagcagtccttggcctgctaaggtcttggaacttgcctgcctttccatccatggccagcagcacctgccctacctgccccacttgtccttagcctggacctctgacagcagcatctctaccttctccccagctcccaggaccacaggctcaggcaggggcctccatgggccccaggggaacactggggacttggcctctctctagggtacatggtgctggttcaggctgggagaggcagcccaggaagtctcatctggggagcaggcagccagcatctgggccttggcctggagcacaaagaccctggctttcattttctctcaggtgaaaggaaattaaggcaacaaaagaagcccggctcctggtcacctaggaagcctcagattccttcccatggagggagggagtggtttgcaggtggccaagttcctctaacttggctcacactcgacatgaaaattcagaattttatactttccctaccctctagagaaataagatcttttttgtcagtttgtttgtatgaaactaaagcctttatttgttaatagttcctgctaaaacaatgaataaaaactcaaggagcaact

SEQ ID NO: 1783 - DNA, 794 bp, Homo sapiens
gcgcaaataggactttccactcatgctcaagatcaatactttatagaacagtcaacattttagattcggtaaccttttttttcttccaattataatctctgctagccacttccgccagcagttggtggaagacttactaggtgcagggcactttccaagttcatcacaacaacctgcttgttttcatgagacaataatccgaaaagttcgctttgatatattcctggagggccaagcccatctatttacaaaaggtgaacagcaaaatcaagcactgctttatgggcaggaacacaagagaaagcaaactgcccaagaagtcatcatgtcagaaactcaatctcaacaaaataatttccatcagggaacttcagggtttcttgggggcttatgagtctcaccggtcaacccaggaggcctcactacaagagccttgacaaggcactgttttttgtgggactgggagttcacactgatgaagcaaacctttgaatttttgcacagctcttgtcagaaagccctgagttccccctgggataaagagttaattttaatccttccctataattatacttcaaaatatttgacatctgctattatgccttctttagatctttcttctggtggtgcagacatttctagtaagtctttgactacttgtatggcattagctttcacagaaaattgtttcacttaaaactgtggattggcctaggctaaggacaaaaataaactaagtacctgtagtgtatttctgtgatatgtgtcaagtactcaaagtattgctgtggacc

SEQ ID NO: 1784 - DNA, 1663 bp, Homo sapiens
tttttttttttttttttcagaaattgaatagttttttatttgtttgggtcaatctcagtactactagaactcaaaatactatattctaattgttctaatttgtaccatctgcaaaagaccctttaagactgcttcaatgattctgaaaagaattaacaaaaccctgttactaggtgcctgaccttagatattacaactgtttcatttacaaaacctccactacaaaacactaagcttgcaacaaaacaacaaaatggaaaggcccacataatttgagtaaacacaatagtacatattccttccagcctgatgagagtaatagggaaatgtatatacttccctacacaaatgcatctagggaaagcaggctatatttattcaagaactagaaaaaggttacaatataaatctatcaaacaaaattcatttttgttatattcaagtaactcatatatattcaaatttagaccaaatcaagacaacaatccaatacacagattattatatagctcaaggagcaaaaaacaacagtcttgtcaatacagactctacataaatacacaaatctcaagttttaatataacatgaacaaatcacaagtacatgtgttagtgttctttctccaaatttctagtagtaaatcttgtatatttagtaaaagcatatagaatgtataaaaccttcaaccacatgtaatgtagactaggaagtgtaaatcaagtagaatgtgaggtttttatatgtaaagatgtacatttcagaaagaacccaacatgaagtaaattaacaaacatattgcaaaggtggtcactcacaaaaatgcttatcatttgcaattgtatacagagaacaaactgcccagaaattaatactggaatcttactgaggggtattatagtaaccaaccttaaaggacaaataacttatttggggggttaaaatagcagagatcagtgtaaattaaataacacatgaatgaaaaaaatctacaatatacaatagcaagaggtgagaaaactgaatactgtgaaaaagatttattagtctgtacaagttggttttgatgaactactggttacttgttaagtaaattgtcaagattttcattgtgacagtattttccctcacacatcagaatctggaagcaatatgcctttttcaaattatcacttagtgttttttttccccacccctcaaaacacagaaataggtttttgaatatcaactagccattatggaagccgtaagatacagatattcatcaacattacacaagctacagttaaggtacctggacaaacactaccaacatttatgaaaaaagatgttggttttaaaagtgtatgaggagttacaataaacacactattcatgtcctcctgaaaccaaaatgggggaaaaccttattgtcattctgccaaacaccacataactaaaaatgctgcacagtcatgaatccaatgtacatatcacaggattaaaactccagttaagcaactgagctaatcattgaagtaaatgaaaaataccaagcttctttaacctatcaatgctgttttagaagcatcatccgaacaaatagagatttagttataaattggcctgggctacattctgtgatgagaattttgcttagtactaaaaaagaatctcaaacatccca

SEQ ID NO: 1785 - DNA, 552 bp, Homo sapiens
atcgaagccagacagctgggctccagagttcatgctgttagccactacccatgctctgctgggatggtcaggcccatcctgccgtgtgggaacagcctgacaggtgctggggctgctggtgtgggcgctgattgcggacaccccgtaccacctgtatccggcctatggtggggtgatgttcgtcgctgtcttcctctggctggtgacaatcgtcctcttcaacctctacctgtttcagctgcacatgaagttgtacatggttccctggccactggtgttaatgatctttaacatcagcgccaccgttctctacatcaccgccttcatcgcctgctctgcggcagttgacctgacatccctgagggggcacccggccttataaccagcgcgcggctgcctcgttctttgcgtgtttggtgatgatcgcctatggagtgagtgccttcttcagctaccaggcctggcgaggagtaggcagcaatgcggccaccagtcagatggctggcggctatgctaaaaccacctgtgccacggccccctctggggctgaag

SEQ ID NO: 1786 - DNA, 2618 bp, Homo sapiens
  misc_feature (1)...(2618): n = a,t,c or g
tatgaaaggtgcttacgaacaagtaattaagtactgtactacataccagagcaaagggcagaccttgacacttactcagcagcagagagatgtgtaccaacaagagaaggcacgcatgggctcagcgggactcagagttcttgctttggcttctggtcctgaactgggacagctgacatttcttggcttggtgggaatcattgatccacctagaactggtgtgaaagaagctgttacaacactcattgcctcaggagtatcaataaaaatgattactggagattcacaggagactgcagttgcaatcgccagtcgtctgggattgtattccaaaacttcccagtcagtctcaggagaagaaatagatgcaatggatgttcagcagctttcacaaatagtaccaaaggttgcagtattttacagagctagcccaaggcacaagatgaaaattattaagtcgctacagaagaacggttcagttgtagccatgacaggagatggagtaaatgatgcagttgctctgaaggctgcagacattggagttgcgatgggccagactggtacaggatgtttgcaaagaggcagcagacatgatcctagtggatgatgattttcaaaccataatgtctgcaatcgaagagggtaaagggatttataataacattaaaaatttcgttagattccagctgagcacgagtatagcagcattaactttaatctcattggctacattaatgaactttcctaatcctctcaatgccatgcagattttgtggatcaatattattatggatggacccccagctcagagccttggagtagaaccagtggataaagatgtcattcgtaaacctcctcgcaactggaaagacagcattttgactaaaaacttgatacttaaaatacttgtttcatcaataatcattgtttgtgggactttgtttgtcttctggcgtgagctacgagacaatgtgattacacctcgagacacaacaatgaccttcacatgctttgtgttttttgacatgttcaatgcactaagttccagatcccagaccaagtctgtgtttgagattggactctgcagtaatagaatgttttgctatgcagttcttggatccatcatgggacaattactagttatttactttcctccgcttcagaaggtttttcagactgagagcctaagcatactggatctgttgtttcttttgggtctcacctcatcagtgtgcatagtggcagaaattataaagaaggttgaaaggagcagggaaaagatccagaagcatgttagttcgacatcatcatcttttcttgaagtatgatgcatattgcattattttatttgcaaactaggaattgcagtctgaggatcatttagaagggcaagttcaagaggatatgaagatttgagaactttttaactattcattgactaaaaatgaacattaatgttaaagacttaagactttaacctgctggcagtcccaaatgaaattatgcaactttgatatcatattccttgatttaaattggcttttgtgattgagtgaaacctttataaagcatatggtcagttatttaattaaaaaggcaaaacctgaaccaccttctgcacttaaagaagtctaacagtacaaatacactatctatcttagatagatatatttttttttatttttaaatattgtactatttatggtggtggggctttcttactaatacacaaataaatttaatcatttcaaaggcattctatttggtttagaagttgattcccaggagtgccatatttcagctactgtatttcctgtttcttgtaatgtaagcagctcagataccatgtgctatcatttttgtatcaagttttttgcacaggatgtgaccactgtcagatcactgttcttttctttctttttgtgattgaaaagcctatactacaatttgaagtaaatttttgtttttcttagtaagtgtaaatggttgctttatttttattttaaaaaggtatgtctttggtttggcagaattcatgcagggctatcaagtggtgttctagggtaacagtgtccataattaacgcttagtcatagagtcaaaaacatttaagactgattgggttgaagtttataataaattatattaacatgtcttcctttttgaggtaaagatatatactttgtcaaatatcattttgtcatcctctaaatataaatccaaatacctcagctaagtaattctattttattatttttactgttatgtatgtttttaatcatatttcttaggaagtataggctactggacttagaataaaaagtccccaaacccaaacaaatggtttatgaaccagagtatatgtggaagattctttgctggtcttgctctgtgtgcatctgaagcttctttggcctagattttagcacaaacctgagtatatctcttctactttcatcatgtgttctgtaccttctttttgtttcattgggcatgctagggaaataggtggattttgtgtgtaatgccatcagtttttatgaaagcttgatgaggtataggtcatttgttttgagtatgtgggccagaaatttaaaattanaaatttgttnttctga

SEQ ID NO: 1787 - DNA, 596 bp, Homo sapiens
  misc_feature (1)...(596): n = a,t,c or g
caaatgccaccctcagtccaaatgacatttattccattttctctgtgggacatccagctaaagaggaaaaagaacgtattttcaaattattctgtctcttagccatagttacctagggaaggagtgaaagccattgagagtccacagacagaactcgcagccctggctcccctgcccctgtaggaggcggggaaggagtgagcttcaggccaggagggtccacggccccctgcagccatcctgcagcttccagtcctcctcctggaccatccctgcactcagaccttctccccggcccaccttccttcctcctctgggatcagacttcggtactgtgtcctcagggaccttcctctgtggccggcacccagtgatccctggctcccagcacacccagctcagaggtcggcagcccctgcccacgagctccagccggccctgcatggccttatgctggaacgtctctggaatcttttccctttctttctgtgttggctgtgtcggggtggtctttgggaagcactatcatccaagggtccctcactccgtggctctntctctgcccttccaggctgagcagcgtgttatgtcccggc

SEQ ID NO: 1788 - DNA, 527 bp, Homo sapiens
  misc_feature (1)...(527): n = a,t,c or g
ttttganacngttnnnnnnnnnnnnnnnnnnnnnnnnnnnnnnnnnnnnnnnnnnnnnnnnnnnnnnnnnnnnnnnggcacgaggaagaagaatgaggtttgaggctggannnnnnnnnnnnnnnnnnnnnnnnnnnnnnnnnnnnnnnnnnnnnnnnnnnnnnnnnnnnnnnnnnnnnnnnnnnnnnnnnnnnnnnnnnnnnnnnnnnnnnnnnnnnnnnnnnnnnnnnnnnnnnnnnnnnnnnnnnnnnnnnnnnnnnnnnnnnnnnnnnnnnnnnnnnnnnnnnnnnnnnnnnnnnnnnnnnnnnnnnnnnnnnnnnnnnnnnnnnnnnnnnnnnnnntnnnnnnnnnnnnnnnnnnnnnnnnnnnnnnnnnnnnnnnnnnnnnnnnnnnnnnnnnnnnngatttctctatgtggatgtgataaagatccatgaaatgctagtaaagcaggattgagaattttcccattaaaaaaggatacatgtgtaaagcactgctagttacctgtaaaatggggcccctta

SEQ ID NO: 1789 - DNA, 885 bp, Homo sapiens
  misc_feature (1)...(885): n = a,t,c or g
ttttttttttagacacacgcacaacttgggaatttaatcttcacttttcctcccataaatatagagtgagggtgtgataccagccccagcccagtctccttggggtctgcatctctgcttcctggcagcctcttgagtcgacttggggatttgacgtcagttgctcagctccattccttccttctggacttggggaggtccggatatgtcggggagtgagtcagtgcaggggactgagggggtggttcccattctccctctagccccctcaaccaatgatccaagttcaaggagctcatctctgtttttcagaccatcgagctagtgccttgaagtctccggaacagcgcacccaggaaggggatgttgcagacattgcccaggaagccgaaggcgacagggaaaaagcccttaaagaggctgaagaatccgtaggtttccaggaacatgccgaggaggggccagcgtaggagcacgataaccacaccccccaggaggaagctggttcccttgagtttgtgccgttggaagaagaaccaaaaggtcttcctcaggccaatgatgagggacaggcccgtcaggaacagcaggtttccaaaggccaggagcacggaatcaaagtacaggagtgttccaaagaggatgaagaagatgcctaaaccggtgatccccacaccaatcttctgccattcggtgatggagatcatgccgcactcagcctggggggctttccgggtggaagcgggcaagtggagcgtggcccagaggacgcagctggtacatggtcacgggaaagcgtccattggttaagttgcgaaatganctgtggcaaatcattaactctccctccagccccngctccaccncngcacaccacgcaggtgc

SEQ ID NO: 1790 - DNA, 399 bp, Homo sapiens
gttttttcagtcaatgtttgctatcttcaatcagaaaccacaacaaaaaattaaaaatgtattatgcaaaattcacaagactaaattagcgtaaaaatttgaataagcaaactatcaaataatgatttttgtaagtttgcaggatttgtgcttctgacctgtaccaagacctcgggacccccacgttggagaagtgagcgctggcacggtggagtcagaggatggggccgggtgggggcgcgttctcctctgggctcgcgcgctgcacaccttctctcttctgaccatcccaaatgggcatgaaatgcccagggcagcactgttcaaagcccccttcctttgtggaagacagcctaccacatttcaaaggaaaagaactgggcttggaacacattccgc

SEQ ID NO: 1791 - DNA, 540 bp, Homo sapiens
gcccttttctttttaatagatgcaacatttttataataatcctagagaccttttttctaccaaagatcacagaccagaaaaagttccatctaaaatatcatgcccaggaaagcacatgggatcaaaagtaaaatagcatcatgtgtgatctcgtcttccagcgtgccgctcagttccccgaatccgtgtgcacacgtgtgatctcgtcttcagtgtgccgctcagttccctgaatccgtgtgcacactggcgtatgtgtacgcggcagcatgctgtactgaactcaacaagatcttggctgtacataaatatttgtaaaagagaccctttgcacctttttactgtaatgttgagacttcattacttaaatgttctacggaaggttctggtgtggttgttggagccggacggacgcgtgtcaggcacgtgctgagggcatggggcctgccccctggggacgccattccacaagctggggccacggagctccagcttctcaggacaaagccccggggcttggcgcattcctgagggttctgg

SEQ ID NO: 1792 - DNA, 2132 bp, Homo sapiens
cgggaagtcgctgaagacagagcgatggtagttctggaggcctcgctccggggccgacccgaggccacagtgcctccgcggtagaccggacttgggtgacgggctccgggctcccgaggtgaagagcatcgggggctgagggatggaagggtctaagacgtccaacaacagcaccatgcaggtgagcttcgtgtgccagcgctgcagccagcccctgaaactggacacgagtttcaagatcctggaccgtgtcaccatccaggaactcacagctccattacttaccacagcccaggcgaaaccaggagagacccaggaggaagagactaactcaggagaggagccatttattgaaactcctcgccaggatggtgtctctcgcagattcatccccccagccaggatgatgtccacagaaagtgccaacagcttcactctgattggggaggcatctgatggcggcaccatggagaacctcagccgaagactgaaggtcactggggacctttttgacatcatgtcgggccagacagatgtggatcacccactctgtgaggaatgcacagatactcttttagaccagctggacactcagctcaacgtcactgaaaatgagtgtcagaactacaaacgctgtttggagatcttagagcaaatgaatgaggatgacagtgaacagttacagatggagctaaaggagctggcactagaggaggagaggctgatccaggagctggaagacgtggaaaagaaccgcaagatagtggcagaaaatctcgagaaggtccaggctgaggctgagagactggatcaggaggaagctcagtatcagagagaatacagtgaatttaaacgacagcagctggagctggatgatgagctgaagagtgttgaaaaccagatgcgttatgcccagacgcagctggataagctgaagaaaaccaacgtctttaatgcaaccttccacatctggcacagtggacagtttggcacaatcaataacttcaggctgggtcgcctgcccagtgttcccgtggaatggaatgagattaatgctgcttggggccagactgtgttgctgctccatgctctggccaataagatgggtctgaaatttcagagataccgacttgttccttacggaaaccattcatatctggagtctctgacagacaaatctaaggagctgccgttatactgttctggggggttgcggtttttctgggacaacaagtttgaccatgcaatggtggctttcctggactgtgtgcagcagttcaaagaagaggttgagaaaggcgagacacgtttttgtcttccctacaggatggatgtggagaaaggcaagattgaagacacaggaggcagtggcggctcctattccatcaaaacccagtttaactctgaggagcagtggacaaaagctctcaagttcatgctgacgaatcttaagtggggtcttgcttgggtgtcctcacaattttataacaaatgacttttttccttagggggaggtttgccttaaaggcttttaattttgttttgtttgcaaacatgttttaaattaaattcgggtaatattaaacagtacatgtttacaataccaaaaaagaaaaaatccacaaaagccactttattttaaaatatcatgtgacagatactttccagagctacaacatgccatctatagttgccagccctggtcagttttgattcttaaccccatggactcctttccctttcttctctgaaaaaaactaattaaaatttgcttttcttttttttaactgagttgaattgagattgatgtgttttcactggatttttatctctctcaacttcctgcacttaacaatatgaaatagaaacttttgtctttactgagatgaggatatgtttgagatgcacagttggataatgtgggaaaatgacatctaagctttacctggtcaccatgtgatgtgatcagatgcttgaaatttaacacttttcacttggttcttatactgaatgccgactctgctctgtgttagagatatgaaatggtgtttgatactgtttgagacattatggagagatttaattatttgtaataaaagatttgctgcagtctgaaaactgaaaaaaaaaaa

SEQ ID NO: 1793 - DNA, 955 bp, Homo sapiens
gatcagtgtccgtatgtaaggccttgagaggaccctgcaggcagtcagcaccagcctcagcaactgtgcagagacctacaggcccacagccagtggctgtccgcattgccctgtgcccacaagcaacagtccacagcccttggtggcttctgttccttgtcccctcggcttctcttccgcagccatcaggactaggtttgtgcaggaaggtgatgcccactggaactctcctcacacctggcagcttcatggatgttgtatctgaactaaggaccagaggctgccagatgtttctggctcctcacgtgtccttcaggacagaacagaagcacaaagactcagccaagagttctctttattccctttgatcctcccccaaggtgagggcttaggcagctgtagaaccccaggaaagaacggaatccaggcaatctgtttagagaccccccactccaaatttatccttttcctttccttcccctaagatgtttccagggccctctggtgcccacactgtcctcttccttccacttgggggtggggaaatccttcctgcgaggtcagggcatttctctacaaagtggcctgaatgaggccaggccctgagaaggagccaccagctggaggaaaggggctccaagccttgcttttaacacccctgcaaaacccccaccctcccaagatgttcacaaaaggtgagaaattcaggtacgaaaccatcaatggacaacttgaaaatgcatgttcctcaggcctatgcagttcccagagactcttgacaccggtctctgctgaggctcccagcctcagtttcccccacagcagcacgggccccactgtgctgctcttcaggtccccacagccctgcctttggttcctggacatttggtattctgccctccactctggtactatcagagtagggcaggctctggattaaagcttttagccggtc

SEQ ID NO: 1794 - DNA, 750 bp, Homo sapiens
  misc_feature (1)...(750): n = a,t,c or g
gttcctatccggttttactacccatgacttcttggcggtaattcctatctaccttcctaatcatttctcttcattcacttaatacttcaactactgactcactgccttcctgtacatcttcattcctgtcattgttcttagtgattccaagaaccatgtagaagaaacactctgaactttagcttctctattccttgacctctcctctttcaatgttttcctctatcccacctttgccacctatcacaagaccactggaacttatcaccactaatgaaaccacctggtaattctttatttgaagcatcctactttatgaccatcacctcctgttcttctaattcatttacctgagtcttccattgctgcagttctttagccctattgtaatctgcaaactactgttttccttgtttgaacttcagtagcttaacattggtagaaaatactagggtgactgataacacttgaaattcatcacaaaaacttcaactagccattcaatactgcctaccattcttgtatgtttttctagcagatttgcttttgactttctcagatgacagttgaaaacctgcacttcaccctttcacacaccttccctgcttaactgagganaacaggaaggtatccgctggggcacagtgtactcaagcctgtgatcccaggcattttggggagggctaaagtgggggaagattgcntgagcctagggagtttccaggacctgcctgggtcaacatagcatga

SEQ ID NO: 1795 - DNA, 7418 bp, Homo sapiens
agcgagcagtataccagcagcagcaagcgaaaggaagagtttgctgatatgtcaaaagttcattcagtgggaagcaatgggcttctggactttgattcagaatatcaggagctctgggattggctgattgacatggagtcccttgtgatggacagccacgacctgatgatgtcagaggagcagcagcagcatctttacaagcgatacagtgtggaaatgtccatcagacacctgaaaaagacggagctgcttagtaaggttgaagctttgaagaaaggtggcgttttactaccaaatgatctccttgaaaaagtggattcaattaatgaaaaatgggaactgcttgggaaaaccctaggagagaagatccaggacacaatggcagggcacagtgggtcgagtccacgtgacctgctctctcctgaaagtggaagcctggtaaggcagctggaggtcaggatcaaagaactgaaaggatggctaagagatacagagcttttcatcttcaattcctgtctgagacaagaaaaggaaggaacaatgaatactgagaaacaactgcaatactttaagtccctctgtcgtgaaatcaagcaacgacgtcgaggagttgcctccattctgcgactatgccagcatcttttggatgaccgggagacttgcaatctgaatgcagaccaccagcccatgcagctgatcattgtaaatcttgaaagaaggtgggaagccattgtcatgcaagccgtccagtggcaaacacgtctacaaaagaagatgggaaaggaatctgagactttgaatgtgattgatcctggcttgatggacctaaatgggatgagtgaggatgccctggaatgggatgaaatggacataagtaacaagttaattagtttgaatgaggaatcaaatgaccttgatcaagaactccaacctgttatcccttccttgaagcttggagagacaagtaatgaggaccctggttatgacgaggaggctgataaccatgggggatctcagtatgcctcaaatattactgccccctctagtccacacatttaccaggtgtacagcctccacaatgttgaactctatgaggacaaccacatgccatttctgaaaaacaatccaaaggtcactggcatgacacagcctaatgttttaactaagagtctcagtaaagactcttcattttcatctaccaaatctttgccagatcttctaggtggttccaatttggtaaagccctgcgcatgtcatggaggagacatgagccagaattcaggcagtgagagtggaattgtcagtgaaggagacacagaaaccactaccaactctgaaatgtgcttgctcaatgcagtggatgggtccccaagtaaccttgaaactgaacatctggacccacaaatgggagatgcagttaacgtgttaaagcaaaaatttacagatgagggggaaagcattaagcttccaaatagctctcagtcgtccatttcaccagtgggttgtgtaaatggaaaagttggagatttaaacagtattaccaaacatacccctgactgtttgggagaagaattacaaggaaaacatgatgtgtttacattttatgattactcatacctccaaggctcaaaactcaaattaccaatgataatgaaacagtcacaaagcgaaaaagcgcatgtggaggatcccctgcttcgtggtttttattttgataaaaaatcatgcaaatctaaacatcagactacagagttacaaccagatgtacctccccatgaaaggattttggcaagtgcatctcatgaaatggatcgcatttcatataaaagtggcaatatagaaaagacattcactggcatgcagaatgccaaacagctctcccttttatctcatagttcatctattgagtccctttctccagggggtgatttatttggattgggcatctttaaaaatggcagtgacagcctccagcgaagcacttctttagaaagttggttgacttcctataaaagcaatgaagatctctttagctgtcacagctctggggatataagcgtgagcagtggctcagttggtgaactaagtaaaagaacattagatctcctgaatcgtttggagaatatccagagcccctcagagcaaaagataaaacgaagtgtttctgatatcactcttcaaagcagttcccaaaagatgtcctttactggccagatgtcattggacatagcatcttctatcaatgaagactcagcggcatctctaacagaacttagcagcagtgacgagctctctctttgctcagaggatattgtgttacacaagaacaagatcccggaatcgaatgcatcgttcaggaagcgtctgactcgttcagtggctgatgaaagcgatgtcaatgtcagcatgattgttaatgtctcttgcacctctgcttgcactgatgatgaagatgacagcgacctgctctccagctctacccttaccttgactgaagaagagctgtgcatcaaagatgaggatgacgactccagtattgcaacagatgatgaaatttatgaagactgcaccttgatgtcagggctagactacataaagaatgaattacagacctggattaggccaaaattgtctttgacaagagataagaaaaggtgcaatgtcagtgatgagatgaagggcagtaaagatataagtagcagtgagatgaccaatccctctgatactctgaatattgagacccttctaaatggctctgtaaaacgtgtctctgaaaataatggaaatggtaagaattcatctcatacccatgagttagggacaaagcgtgaaaataagaaaactattttcaaagttaataaagatccatatgtggctgacatggaaaatggcaatattgaaggtattccagaaaggcaaaagggaaaaccgaatgtgacttcaaaggtatcagaaaatcttggttcacatgggaaagagatttcagagagtgagcattgtaagtgtaaagcacttatggatagtttagatgattcaaatactgctggcaaggaatttgtttcccaagatgttagacatcttccaaagaaatgtccaaatcaccaccattttgaaaatcaaagcactgcctctactcccactgagaagtctttctcagaactggctttagaaaccaggtttaacaacagacaagactctgatgcactgaaatcatctgatgatgcaccgagtatggctggaaaatctgctggttgttgcctagcacttgaacaaaacggaacagaggaaaatgcttctatcagcaacatttcctgttgcaactgtgagccagatgttttccatcaaaaagatgccgaagattgttcagtacacaactttgttaaggaaatcattgacatggcttcgacagccctaaaaagtaaatctcaacctgaaaacgaggtggctgctcctacttcattaactcaaatcaaggagaaagtgttggagcattctcaccggcccatccagctgagaaaaggggacttttattcgtacttatctctctcatctcatgacagtgattgtggggaggtcaccaattacatagaagagaaaagcagcactccattgccactagacaccactgactcgggcttagatgacaaggaagatattgaatgcttttttgaggcctgtgttgagggtgactctgatggagaggagccttgtttctctagtgctcctccaaatgaatctgcagttcccagcgaagctgcaatgccactacaagcaacagcatgttcttctgagttcagtgatagttctctttcagctgatgatgcagatacagtggctctttcaagtccttcctctcaggaaagagctgaggttggaaaggaagtgaatggtttgccccaaacttccagtggctgtgcagaaaacttagagtttactccttcaaagcttgacagtgaaaaggaaagttccggaaaaccaggtgaatctggaatgccagaagaacataatgctgcttcagccaaatctaaagttcaagacctctccttgaaggcaaatcagccaacagacaaggccgcattgcatcccagccccaaaactttaacctgtgaagaaaatcttctaaaccttcatgaaaaacgacatagaaatatgcataggtagaatgtaccccctccccaagcatgaaaatcatctcactgaaagatacgcctggctgcaactcaggggtggcctcatcctcccgccctgggctggcctctggttccatcacgtttgtcactgccgtttattacattgacttctcccaagatgaatcttccttccaaatgtgttttctccacacaagccttgtgatctgaatgtgtgcgctggttctctttaggtgatcgtctttgaagttcagcaaagctgcttgttctcccatggattcctgtcccaagctacctctaccaaccctctctctccagctagacttttctctttgcctcctcccttcccttccactctttaaagttctgcagttcaccaactggtagtccattaaattctcctgtctagaatgacccccccaccagtacttgaccaatttcatgtatcaatctggatttttttttaacggtataatgactgtgcttattgaaagagttttacctaaaaagccaacatttgaattggttgcagcatagagaagaaacactggtccttctttcaaaattaagcaactattaaaagcgccattttatttatttcatttaaaaaataatctatgcagcatttcaagaaacaaccatatggtgttgtatattataaactggtgacattctactattgaattatgtacaacattttcattttttatgcttcttgaggtggtaatgagaaaaaagttttttaaaaaagtgtgccttgctgtatttcttataccatttattaaaaagctgctttcacggtaaaattatgttggtttgaaaggaggaaatagcaaggttaagatgtgtgaataatttctgtatatatgtataaccaagtacaaacattgatgtataatgacagtataaaatgctttcatgtttgtgatgtctagtgatgtggaaaatataagccttaaatccattagattgcatggtaattaaaattggcataataaacacagattattgggggaaaaggaaaattagtgatctcttctactatgttctttaccaaattgttgcatctggttctgaaaaagtatagcatgtagcagcttccaaacatattcatattgcttaagaggcttaacattacctaaactagagactagacgtaaagccttcagttttcaaaatctttctggtcactataaagatcttggaacagcaaatgattaaatgtcagttcccctaaaccaataaacatttatactagattttttatttccacttatcattaatgatttaatgttggatttcaggtaccttgtatgtcttaatttattttaaatatttattttgaatgagtttgatagaaagctagtagaaaagtacagaaaatttgactattatttatagatttcaggtatatttatatgtgtaaaagaaattgacaaagaaatatttcatctggcctttactgactcctgttaaatgcagttttaaatttatatcgtaacacctacttaagtgcctgacacagtaggtattcaataaaaatttactgaattaaaggattaaattaggtgacatggtgacatctatccctttattttgacactaaaacatggacacaactagaaagaggtacaatgcaatataaagtcacaatagataatatatatcaaatttctaaaaggtaaagaatgttgtgggttcatgcagtcacaggaatgacaatcattcaacagatagttcagaaacactttttatctgcaaggcactattctagatccagaagatgcaatgttgaacaaacagacaaagccctgccctcagaaggctgtcctgcattaggaacaagtgaacacgcaaatgacatgaagtatttgttgcagagctgaggaacagagcaaatgtagtgatagaagcgcaatgagagaagcagcagtgggtacaaggaggaagaaaaagggcttgcagagagtggaaagttagtggaatattcatgaaacttcattgcaggggtaatagaagaaaaagtaaattgggaggacttaatggaaggtcttttaaaaagttaacttggagcttctgtatgtaaaatgctaggtaataaggacactttgtacaggctgttttgcacctgattttatttatcattagtgccacgccaagatcatttagacgatgcttatctgtaattctaccactttaataactatttgtatttttatgccccttctgatcttttccatatgtatttctaaatggataaattattctaggcttcttaataggtagtaatttgttcaaaagcggttttagccagacatctagttgcagtgttcaagaggattatgggggaaagagattagagataattgtctagttagggggcagctggagaaaataagctaagtttgcaataacagagtacacaagtatagtggcccaggatgtagtgaaagaacaaatcctagagtctttgaaatttctaagggcattctagacctctgttgggatatggtattattttacatactgacacaacctaaattttctttgggtagtaactaatgtcaagtctacatcgactggtaaaacattcaaagaacaaactgacaatgatgttctacctacttgttacatgctcatggaagaccgtgcagtattgaaagtatttgttaattatctgcttagtattaacactaaatttgtagaatgactttcaggtttgttgaacaatgccttttcaggttggaagaagaaaaatagcctcaatctcccaccccatgtaggcactacctccccaattacccttagaaaatgatcacaccaactctgcctacacacttccagtgatagtggctcattgtctgttaaggcaaactgttcccactgttgggcatatctctttgttagaaagttctttcttaggttgctaaaatctgcctagtaccccgctaccctgttctgtcttatggagcagcccagattatctttactccctctttctcatggcaaccctgaagataatcaaggccagttactcatcatctcccaaccactgtttcctcaactgcccttcatatgtcatggttttcagatccattccaacctgactgaatgttaacagacagaattcttcacattaaggaactgtcttcatcatcatacatgtagaaaagaatctgaacatttaagtgcgaagttttctctagaaatatattcaagatatgtttattctattattgtaaatttcaaacaataaataaataagaatcc

SEQ ID NO: 1796 - DNA, 462 bp, Homo sapiens
  misc_feature (1)...(462): n = a,t,c or g
gaaatctctccctctctggtatgtttctgttttgtggattagactgctaaataagcgaagagttaattttgaagttcaggtcaacaaattcctgtttggagacgggctgttcctgaataccaggttgttatctgtctattacagccccttcacttctgggctcctggccctttgcgaagtacttcagaaagcctagagagaagagagggccctcaaatcccattccagcccctaaatgaaagtggcatcacaaggagaaaagtggaggtagaaatgtaccatgggggacgttgccccattgcctttcttcccctggactactgggcttcctctatcaggcttttaacgtctgggaagtagctggagtctccagtcactgggtgngcttcccaagtgagctcagcagcatgtgctaataagtgccaatactgggctgggttccagngggattcctttttgcaa

SEQ ID NO: 1797 - DNA, 665 bp, Homo sapiens
ttggacttggggctagctgcggcggggctggaggaggccagataaccatgtcagccacagttgtagatgcagttaatgctgcacccctatcggggtccaaagaaatgagtttggaagaaccaaagaagatgaccagagaggactggagaaagaagaaggagctagaagaacagcgaaaattgggcaatgctcctgcagaagttgatgaagaaggaaaagacatcaacccccatattcctcagtatatttcttcagtgccatggtatattgatccttcaaaaagacctactttaaaacaccagagaccacaaccagaaaaacaaaagcagttcagctcatctggagaatggtacaagaggggtgtaaaagagaattccataattacctaagtaccgcaaaggagcatgtgaaaattgtggggccatgacacacaaaaagaaagactgctttgagagacctaggcgagttggagccaaatttacaggtactaatatagctccagatgaacatgtccagcctcaactgatgtttgactatgatgggaagagggatcggtggaatggctacaatccagaagaacacatgaaaattgttgaagagtatgccaaagttgatttggcaaaaccgaacattgaaagcccagaaactccaagaggaattagcct

SEQ ID NO: 1798 - DNA, 1269 bp, Homo sapiens
gacaagaatacaccatggctgccaagacacatgtatttttctttcttccatggactcctaaactgctcccacaatcagcagtgttcttctctcagaaattatcttaagcttctctactcaatgggaggtacacacagagacctgagaatatgcagaggccagaatctctgtctgtgctagagatcaactgtactctgccccacctggggatacatcctctgggtaaagtactcggaagtaaattacattcacctggagacagatacgggctttcactgacagcctgtttagaaaacacaatgtctgtaagttacctcataggtcaaagagttttgtattatatttttcataatgggctatggcctttttaccctgttttaatacagagcaactgcagaaggacatgattaacaactgcaaaaagaataatcagttttggtatcgcctataacaaagattttcaatacaacctaatggttcctgaaaaaaaattctaccacacagaacaacatttggaattacagagttctgctgactaaaaaataaatacatttacttttggtaaggtcatttcagaactgggttttgaggtggttccaataagtaggttgggaaacgaatagcagacaagaagggttcaccataatgaataatttttataagactatactattaaagtggtgtattcccaaaataactttaatttttagacatcactattctacaacccgaaggttctgccatctaagtaagatgttttacatcactcatcactatcatcctgttatttcattttcattttttcttcattaaaaaaaatttcccatataaaaataaggtggcaaaacactcttgttcccatctttctaacagcacctaaactctgtgtgagccactatgttccctacttcaaatcaaagacctgagttctaaaattctcaatagctgaccagtagtttgacaatctggggactcaagttcagattctcgaggggttgaacattagacatccattagagtgtaccaaatcccccaagagtgtatcccaatgacacgtgcatatgagcatggggcctctgagaagatgaagacacataattattatggacaggtcatctgattttgactattgctttgaacaaaaatcttcccaaaaatacacacgaaaatatatttatatttaaccctctctttaacatagtttctgatgaaacaaattaaaaatggccctactttatttttaattgtaaaagtgttccaaaaattcaa

SEQ ID NO: 1799 - DNA, 457 bp, Homo sapiens
  misc_feature (1)...(457): n = a,t,c or g
ggagtcgcgtagctgagcccggcaggggctggggtggtgctgctgctatgagctgcaccatcgagaagatcctgacagacgccaagacgctgctggagaggctacgggagcacgatgcggccgccgagtcnctggtggatcagtcggcggcgctgcaccggcgggtagcagctatgcgggaggcggggacagcgcttccggaccaggtcaggcanagggtaggagtccagtgctctcggattctgggcactgaagggtggagagcgagagctatggatttccttggaggaacaccaggatgctttggaacttatcatgagcaaatatcggaaacagatgttacagttaatggttgctaaaaaagcggtggatgctgaaccagtcctgaaagctcaccagtctcactctgcagtaagaaactttgaataaattcgaaatgaaccaaaaaaaaaaaaaa

SEQ ID NO: 1800 - DNA, 881 bp, Homo sapiens
gagaaacccatccttcaagcacaataatcatcacagacttgagtttgcttcctaaagcaaaggctccgggtttgtttggaaaatttttttgatttctgaaatgaattgatttttatatttggggcatctctatagaaagtgaccaccaaggccagtaagtacgggaaaaaatgtttactaacttcctcagagattcgtgatacgcgtttctccactgacagacatttaaaaacaaccttcagctccgtttcaatcaatcacctcgacttgttttttagcatggacactgccagcaggacagacagggatggagtaaaccgaagccaatttcagggctcttggcgtgttggacacagaagaaatcctagtgcagcctttggtagctaacagtcactgattttataattggagaatgcgtaaagattcatttttcaaggagaagagcctgcaaatggccaatgaaggaggtaaataaactaagatattccgagggaagggacccaggccacctcccttccgcaggtcctgcagatgaagggttttttgaatgaaatgccactgtgcattttcagaaaaaaaaaatctctgataaacagactttgaatggatgtttgttcctcctgattctcttttctcttcgtggcgacttagagttggcggatattcggaactgtgaatgtacatagcgttgagttaaaccccttgtgtgtgagacaggacgcagcgggcccctggtggcctgggggccagacccgtgggcaggtggggcatggggccctggctgcggggacctgctggggtgtgagggcagagggagggttgccatgaaggaacttgggattttcaatggaataagtaaaacataaagtctatacttggga

SEQ ID NO: 1801 - DNA, 475 bp, Homo sapiens
  misc_feature (1)...(475): n = a,t,c or g
ggaaaaccactacaaggtggtgtcatattgtgcgggattcagatagtctggctgaatcagaatttgaatcagcagccttcagccagggctctagatcgggtgtgagtggtggctctcgaagcctcaacatgtcaagaagagactcagaaagcacccgccatgactcggagactgaggacatgttatgggacgacctgctacatggcccagagtgccggtcatctgtcaccagtgacagtgagggggcccatgtgaatacccttcactcagggaccaaacgtgaccccaaagaggatgtttttcagcagaatcatttattctggcttcagaattcaagtccttcctctgatcgagttagtgcaataatctgggaggggaatgagtgcaaaaagatggatatgctgtgttggaaataagtggcatcatcatgagcagggcaatgcctatcaccaggngtaggttttcaangcttggg

SEQ ID NO: 1802 - DNA, 780 bp, Homo sapiens
gcagcacctgcctggctacaagggtccctagatgggtacaggggtatcttcctcctttcctttctttctccaggagattgtgactgctttaagctgcggcaagaacattgtgcccatcattgagtgatgagtgtctttgtatgctaaagagatgattccccactgggggcccggggggtgctatgggggtagcctagatagtttcaggaagagggctggtcaccagggagaccagggcatgactagaggattggaactttcagccccacctcccagcctccagagaggtgctgggagatttgagttcaatcaccaatggccaatgatttaatcaatcatgtgtacttactgaactgccataaaaaatccctacacaatggggcttggagagcttctgagttggtgaacacatccaggagagtggctcatcccaactctccagggacagagcctcctgcattcagatgcttcctcagtacccctccatctggctgctcgtgtgtgtccatcataataaagtgtaatagtaggtatggcattttcctgagttctgtgaggattctagtgaattatcaaagctgggtagggaaagtcacagaacccttgaatttatagtccactgggcagaagtgtgggtcacctggggaccccatttgtggctggtgtctgaagtcttgtggagctgagccctttaatctgtgggatctgggcttggtaaagtgaatctgggcatgacacaacagcatttactacaaggtaatgttactgaaacaccattgc

SEQ ID NO: 1803 - DNA, 630 bp, Homo sapiens
tttctttctgtggtttcttcctttttaattactggaagggtttttccattttttctcctagtgttcctttgtttgccagggaatgtttcgggaaggctgtggagtgggacggtggggatgaagcggggagtcccacactctctgggtccaggcacaaagctatcctccgttgttctgatctgcagagccagcgccctcagcaggtacctagtggtggcagagccgtggcctacacgttcccaaggaggccgccagccgggctgtacccttaccttgggggtgtgtgcagatggaaggtgggaagagacagaccaacaggaagtgttctcttcaggggttgccagccccaccctgaatctcagagcatcctcctccccggcaaaggccagggcactgtcccgaccatgggctctgtacaagcagagggaggcacccggaggctggtgtgagcagctacgtggggtggtggtccagggaacagagggagggcactggagccattgcctgcctagttcagtcctcaaatgggtccaagccagctcaggtctgcagcgccaggcccagggtacctggcagcccagccgatggtaccattggctggtgctcccactgaggtcttgagaaggtaat

SEQ ID NO: 1804 - DNA, 227 bp, Homo sapiens
aagtaaactctcacattccattagaaaaaaatggaaacattcattcatggtctgaaaatgttatggatttccccaaattttgctactgtgtgcaatttcctcacacacaggttttgaggaaaccccttaatcatctatcatgaaatagctaatggacatgccataggaaaatctaccttaatagtagtaaataggtttaaaatctattccataaaataaaaagtcga

SEQ ID NO: 1805 - DNA, 714 bp, Homo sapiens
agaaaatctttgctattattattttttccaagtggtctggcattttaagaattagtgctaataacgtaacttctaaatttgtcataattggcatgtttaatagcatatcaaaaaacattttaagcctgtggattcatagacaaagcaatgagaaacattagtaaaatataaatggatattcctgatgcatttaggaagctctcaattgtctcttgcatagttcaaggaatgttttctgaatttttttaatgctttttttttttttgaaagaggaaaacatacatttttaaatgtgattatctaatttttacaacactgggctattaggaataactttttaaaaattactgttctgtataaatatttgaaattcaagtacagaaaatatctgaaacaaaaagcattgttgcttggccatgatacaagtgcactgtggcagtgccgcttgctcaggacccagccctgcagcccttctgtgtgtgctccctcgttaagttcatttgctgttattacacacacaggccttcctgtctggtcgttagaaaagccgggcttccaaagcactgttgaacacaggattctgttgttagtgtggatgttcaatgagttgtattttaaatatcaaagattattaaataaagataatgtttgcttttctatttccttttgaatttgtgtttattgttaattcatagctattcaaagtgtgattag

SEQ ID NO: 1806 - DNA, 547 bp, Homo sapiens
  misc_feature (1)...(547): n = a,t,c or g
gattgactttgttgtgcaacaggtccctaaaaccttttcattttgcaaaactgaaactatacccattaaacaactccccatcttcctctacctccagcccctggcaaccgtgtcaaagataattttgactatatacaatatgaggacctaacctctggatatgattcgactacttcatttctctgaggtagctctttctctctctttctagatgagaaatggagtaggatttgcctgtctattttaaaagtgaagccattagttggctccacatcctggctttttctctcccatggagcactagtaaggtgctggggcccagcctcaggccccagacccggcagctctagatctcatgtatttagaccgtcccatttcatgtgttgcaataatacatcaagagctctctgagaggctataactggaagggaacccgtcctgtgggcaagtatgtgccttaacccngtcctganactgcantaanttaaggtaataanccggnaactccctgtaatccactnaggccggnaaaatgactcccttccaa

SEQ ID NO: 1807 - DNA, 395 bp, Homo sapiens
ggcgtgagccacagtgcccggcctgtatttggtgatattttaaaaaattctactttgaccttaagtgcttcaagaattgtgttcagttagtagtccttttgtaagactaactttcatatgctatctttgctccatgagctatcatagtactgttttctttcattacccgtaagagtggctctatcacagcatttactgttaagggctacagttagacctcttgttaactctacttttatttgtgatggctgtgtttcacactaccttgatttataaatgtagtaatgtgttaaataactatatgtgggtggtcccttaatacctcttttgattggtgaggtaacagtgatgtggatgatgaaataaaaacgtttccccaagtcactaaacacagt

SEQ ID NO: 1808 - DNA, 2010 bp, Homo sapiens
  misc_feature (1)...(2010): n = a,t,c or g
ttttttttttttctttaaaaaaaggctttatttgaaggcaaaacaatgaaatccacaagaaattactaacagcacgtgtttacgttttatcctgaatcatacattttaacaattcacagctacaggaaatctagaacaaaatcaaatattcatcacattgggttgaaaagttggaagattttgcatcttattgaaaagaatttttcaaaaatgtttctgtacaaatgaatggaattgcaccaggctgcccatgggacaccacgtgtggccgattcccaacgggtcacccaccagcttctggcaggagcagctccccctcctggcctcccctcccttcgggggtgtgaaatgaaatgatggagtggaaggcgctggctggggtcgggctccatgctctggatgggactggggccgtcgcacacgcccagccggtgcagggttcttccaagtgcaaaactcaagcaggggacgcgacgggcacagactccgaggcagcgctcgacctgaagtgtcttaggctggtttcctgttagaatcttgtttcccagataacagcaaatggctacattccagaaaaaaaatatcaacttatacaactaaaataactgaactaagggccagtacgccttcgaagaattaggtttcagaatctcactgggcctcctctcaggtcagtattcttctttctagacctaaaccaaggagagtaaaaatgaaaaccctgcttcacttcgcaagtcaagtcaaagttttgtgtttctgtttttcaatccgcggggcagtcatggcactgggcttcggctttgtccctacacagccgaggggaagccaggtcagggccggtgggtgcggggagctggaggaaggagctggggtgccggctctggctcaggccaacccttcctgcacatgctcctcctggagcctaggaggaggcttcaatctgacttagggcagatgcacatccatcccttcgtggctgaagaatttactcgggcggagggtcttgtgttttttcttcgctataaaggaaaacgagcctggggccctggtggctgcagcgcctcctggtgtggtttgtgggtggcacccgtgccctccacgccatggagcacggcgttcccactgggcatgcgctggtcttccttctcttcctgtggctctccacaagtggagacggtgtaagaactgagctgtcactgcaatcttcctctgccagtcagccaggaaggtcccacagccggcaccgctggccaccggcgcggctcccggcatgggcgcctacttacactcgtccctggccttcatgcgggcgatgaaggagtagctcttgttctgcggtagttctcataggggtcatccagagccacgcccacgcctttatactggtcccacttatcccggacgtccccgcccttgatggggtcctggatcccttgctccttcgcaccgaggccgcctgagccgctccagcccatcttcaccagcatctgatggcctttgttctcttctccgagccttgagtcagggatgggaggcgccgaattagaacccagaccagcagaggaaggcggggtggggctcctggaccgtgaccggcgtcttcttcctggggagtacgacttggaccgggaccgcgactgggaccgggagcggcttctggaggagcgcgacctgctccgacttctgcagggaagggtgcccaagggtcagcagcagccaggcgtcgtggggaggccacaggaagaggcctcaggcactgccctgaggcagcctctgcctacctagatctggagcgggagtaggaacgggagcaggagcgcgaccttgaccttgagtacgagcctgaagacttggaggatcttgagttggagcgggaggaagaacgcccttcgatttttggatcttgttccgagacctcgagggtccgttgcggggagaggcntgattgatcaaggttgccccagtngattgggttgcaacccagcccaacccttggcctttaagttt

SEQ ID NO: 1809 - DNA, 425 bp, Homo sapiens
gagaatatattacttctaacatagtttaagggtagggtagatgagcattatgaattatgggttgtggtttttccagctcatgatgtatagcatacagtggaatgtatagatattttatgggaaatattacctttcaggtcactttggaacttcttgggtgaagcactactgtacatatcaacgggattccaaacaaatcaccatggtaccatttgaccaaaagtcaggaggaaaagggggagaagatgaatcagttatcctcaaatcctgcacacggcggaaaacagactccattgagaagaggttttgctttgatgtggaagcagtagacaggccaggggttatcaccatgcaagctttgtcggaagaggaccggaggctctggatggaagccatggatggccgggaacctgctacaactcgaa

SEQ ID NO: 1810 - DNA, 1688 bp, Homo sapiens
  misc_feature (1)...(1688): n = a,t,c or g
caagatttcatttagtcttattaggggtagtgaccatattatggttgctaattagtctttatgcctcccaacacatgtacagttcctactgaacataccagcttttgcatatcttaaatcaggaagagagacctctcactcctgccctaaatgggaaacatgatgctaacgtttccttctcccccccgtagtgaagcacatacaatgattagaatgaatgagaaggactgccacttggattcctgcaatgaccatgactttagcgagctccacacagtccagagcagtgacagtatgactgtgtctatttgctttatgttctaaaccaaatggaaagctaggagggtaaccaacataccaccaaaagtatttttcagatcatgcttttttttttcctaaaatgagtatttgctggtcatgatggatagtctaatgtgacagagatgattatccctttaaaccagtgttctaaacaaaggtgagcgctgttccaggaacccaaaaacaaacttggcacttccttcctaagaactgaaatacctgaccagtcacactgtattagagatacagtaggtttgtaattgtcattaattgataacaactagcaaatcaaagtgagagaagactgaagtagaagaagcaacttcactttgcagttattcacttctctgtaaatcatgagaaagtgcatataaccttgcctccccctcccaccaccccacttgatacatcccttcactacattccccctcccctagattcaagaagttcacaattctttatgaaataaacattgcccaggtaccgtattttaagagtcttaaaacaacattgttggactcagcaatactttgtcatattcatatatctttttcatttcttttttttattgaataaagcagctttgaagcttatcaggcactgcccaacaaaacagtccaaaaaaaatctgttatgaactttttaaccttgggctaacagccaagtactctgtacaagaaaaactgtaaaatatttcatagttttaattctgaagccattttttttttttactggcatcctgtacatttacttttaaaaaaggataacaaaaatgaatattaacaaaaatccgggacaacaatattttcaagcaacaaaaactggggtggggaagcttattctgaaggtacatttaaaactgaaataacaacttaatgaaaattaagaattgcataggcgctgtgaatttagccttcagcaaaacaaaacagaagctatttgggtattgatacaaatccatctatttgataggttaggtcatccaatattatgtacatattttatatactggaatggtcattttaagtcctgttttccaaactccatttttctgttgctgggggtttttggttttttgacaggttaaacactttctgggcactttctatggacggaatttcttctggaacatacatgaactgacattttcccaaagcgtcccttgtgagtggacgtgcctttctgctacatatcgttcatttgttaccaaatgaaataatccacagtgcgatgtgtctgggtccaccgtgcacagcaacatccaggctaaaccaggctggaccaancttctcangccagggttcttctgcctctctctcctccgtctccaggtnccacttcagctggtaagcttcagaagcataaca

SEQ ID NO: 1811 - DNA, 1674 bp, Homo sapiens
cgagaagcaaaaattcttccaggagctgagcaagagcctggacgcattccctgaggatttctgtcggcacaaggtgctgccccagctgctgaccgccttcgagttcggcaatgctggggccgttgtcctcacgcccctcttcaaggtgggcaagttcctgagcgctgaggagtatcagcagaagatcatccctgtggtggtcaagatgttctcatccactgaccgggccatgcgcatccgcctcctgcagcagatggagcagttcatccagtaccttgacgagccaacagtcaacacccagatcttcccccacgtcgtacatggcttcctggacaccaaccctgccatccgggagcagacggtcaagtccatgctgctcctggccccaaagctgaacgaggccaacctcaatgtggagctgatgaagcactttgcacggctacaggccaaggatgaacaggggccccatccgctgcaacaccacagtctggcctgggcaaaatcggctcctacctcagtgctagcaccagacacagggtccttacctctgccttcagccgagccactagggacccgtttgcaccgtcccgggttgcgggtgtcctgggctttgctgccacccacaacctctactcaatgaacgactgtgcccagaagatcctgcctgtgctctgcggtctcactgtagatcctgagaaatccgtgcgagaccaggccttcaaggccattcggagcttcctgtccaaattggagtctgtgtcggaggacccgacccagctggaggaagtggagaaggatgtccatgcagcctccagccctggcatgggaggagccgcagctagctgggcaggctgggccgtgaccggggtctcctcactcacctccaagctgatccgttcgcacccaaccactgccccaacagaaaccaacattccccaaagacccacgcctgaaggagttcctgccccagcccccacccctgttcctgccacccctacaacctcaggccactgggagacgcaggaggaggacaaggacacagcagaggacagcagcactgctgacagatgggacgacgaagactggggcagcctggagcaggaggccgagtctgtgctggcccagcaggacgactggagcaccgggggccaagtgagccgtgctagtcaggtcagcaactccgaccacaaatcctccaaatccccagagtccgactggagcagctgggaagctgagggctcctgggaacagggctggcaggagccaagctcccaggagccacctcctgacggtacacggctggccagcgagtataactggggtggcccagagtccagcgacaagggcgaccccttcgctaccctgtctgcacgtcccagcacccagccgaggccagactcttggggtgaggacaactgggagggcctcgagactgacagtcgacaggtcaaggctgagcttggcccggaagaagcgcgaggagcggcggcgggagatggaggccaaacgcgccgagaggaaaggtgcaagggccccatgaagctgggagcccggaagctggactgaaccgtggcggtggcccttcccggctcggagagcccgccccacagatgtatttattgtacaaaccatgtgagcccgccggcccagccaggccatctcacgtgtacataa

SEQ ID NO: 1812 - DNA, 5893 bp, Homo sapiens
  misc_feature (1)...(5893): n = a,t,c or g
ctcaagtatgtgttaattagcaaaccaactgaatggtcagatgagctgaggcagaagttcctagaagggtttgatgcctttttggaattactaaaatgtatgcagggaatggatccaattacacgtcaagtaggacaacatattgaaatggaaccagagtgggaagcagccttcacactacaaatgaaattaacacatgtcatttcaatgatgcaggactggtgtgcttcagatgaaaaagtgttaatcgaagcttacaagaaatgtctcgctgtactgatgcagtgtcatggtggttatactgatggtgaacagccaatcacactaagcatttgtggacattcagtggaaactatcagatactgtgtttcccaagaaaaagttagcattcacctcccagtttctcgcttacttgcaggtttacatgtattattaagcaaaagtgaagtggcatataaatttccagagctcctacctctaagtgaacttagcccacccatgttgatagaacaccctcttagatgtcttgttctgtgtgcccaagtacatgccggaatgtggagaagaaatgggttctctctagtaaaccagatttattactaccataatgtgaaatgcagacgtgagatgtttgacaaggatgtagtaatgcttcagacaggtgtctccatgatggatccaaatcatttcctgatgatcatgctcagccgctttgaactttatcagattttcagtactccagactatggaaaaagatttagttctgagattacccataaggatgttgttcagcagaacaatactctaatagaagaaatgctatacctcattataatgcttgttggagagagatttagtcctggagttggacaggtaaatgctacagatgaaatcaagcgagagattatccatcagttgagtatcaagcctatggctcatagtgaattggtaaagtctttacctgaagatgagaacaaggagactggcatggagagtgtaatcgaagcagttgcccatttcaagaaacctggattaacaggacgaggcatgtatgaactgaaaccagaatgtgccaaagagttcaacttgtatttctatcacttttcaagggcagaacagtccaaggcagaagaagcgcaacggaaattgaaaagacaaaatagagaagatacagcactcccacctccggtgttgcctccattctgccctctgtttgcaagcctggttaacattttgcagtcagatgtcatgttgtgcatcatgggaacaattctgcaatgggctgtggaacataatggatatgcctggtcagagtccatgctgcaaagggtgttacatttaattggcatggcactacaagaagaaaaacaacatttagagaatgtcacggaagagcatgtagtaacatttaccttcactcagaagatatcaaaacctggtgaagcgccaaaaaattctcctagcatactagctatgctggaaacactacaaaatgctccctacctagaagtccacaaagacatgattcggtggatattgaagacttttaatgctgttaaaaagatgagggagagttcacctaccagtcccgtggcagagacagaaggaaccataatggaagagagttcaagggacaaagacaaagctgagaggaagagaaaagcagagattgccagactgcgcagagaaaagatcatggctcagatgtctgaaatgcagcggcattttattgatgaaaacaaagaactctttcagcagacattagaactggatgcctcaacctctgctgttcttgatcatagccctgtggcttcagatatgacacttacagcactgggtcccacacaaactcaggttcctgaacaaagacaattcgttacatgtatattgtgtcaagaggagcaagaagttaaagtggaaagcagggcaatggtcttggcagcatttgttcagagatcaactgtattatcaaaaaacagaagtaaatttattcaagatccagaaaaatatgatccattattcatgcaccctgatctgtcttgtggaacacacactagtagctgtgggcacattatgcatgcccattgttgggcaaaggtattttgattccgttcaagctaaagaacagcgaaggcaacagagattacgcttacatacgagctatgatgtagaaaacggagaattcctttgccccctttgtgaatgcttgagtaatactgttattcctctgctgcttcctccaagaaatatttttaacaacaggttaaatttttcagaccaaccaaatctgactcagtggattagaacaatatctcagcaaataaaagcattacagtttcttaggaaagaagaaagtactcctaataatgcctctacaaagaattcagaaaatgtggatgaattacagctccctgaagggttcaggcctgattttcgtcctaagatcccttattctgagagcataaaagaaatgctaacgacatttggaactgctacctacaaggtgggactaaaggttcatcccaatgaagaggatcctcgtgttcccataatgtgttggggtagctgcgcgtacaccatccaaagcatagaaagaattttgagtgatgaagataaaccattgtttggtcctttaccttgcagactggatgactgtcttaggtcattgacgagatttgccgcagcacactggacagtggcatcagtttcagtggtgcaaggacatttttgtaaactttttgcatcactggtgcctaatgacagccatgaggaacttccatgcatattagatattgacatgtttcatttattggtgggcttggtgcttgcatttcctgcgttgcagtgtcaggatttttcagggatcagccttggcactggagaccttcacattttccatctggttactatggcacacatcatacagatcttacttacctcatgtacagaagagaatggcatggatcaagaaaatcccccttgtgaagaagaatcagcagttcttgctttgtataaaacacttcaccagtatacgggaagtgccttgaaagaaataccatccggctggcatctgtggaggagtgtcagagctggaatcatgcctttcctgaagtgttctgctttattttttcattacttaaatggagttccttccccacccgacattcaagttcctggaacaagccattttgaacatttatgtagctatctttccctaccaaacaacctcatttgcctttttcaagaaaatagtgagataatgaattcactgattgaaagttggtgccgtaacagtgaagttaaaagatatctagaaggtgaaagagatgctataagatatccaagagaatctaacaaattaataaaccttccagaggattacagcagcctcattaatcaagcatccaatttctcgtgcccgaaatcaggtggtgataagagcagagccccaactctgtgccttgtgtgcggatctctgctgtgctcccagagttactgctgccagactgaactggaaggggaggatgtaggagccctgcacagctcacacctactcctgtggctctggagtgggcatcttcctgagagtacgggaatgtcaggtgctatttttagctggcaaaaccaaaggctgtttttattctcctccttaccttgatgactatggggagaccgaccagggactcagacggggaaatcctttacatttatgcaaagagcgattcaagaagattcagaagctctggcaccaacacagtgtcacagaggaaatttggccatgcacaggaagccaatcagacactggttggcattgactggcaacatttataattattgcaccaccaaaaaacacaaacttggatttttttaacccagttggctttttaagaaagaaagaagttctgctgaatttggaaataaattctttatttacaactttccttcccagttttatagtttctggttctgaggactgatgaaaatcatcttccatcagcagattttcttgcactgtttgctgtgcccctcaaatataatgtcttgggttttaagatcgagcaaggagcttctcttcctagattggatcccagcccctttgtgggggtctgactgcatagtcccagccattatgtgatatttcacgttattgatgatagtgaaccgtgggtccgaagctgactcaacggaggcagggaacaaagtctctgtggtctgttgggtcatacttcctggttccactgagtggcccaacactgggactgggttggtgtcccctctgctgacaggaccctactcctaggagcaaagtggttgattttgaaggcagtgttcccttctctccattgactatgagagagttgggggacacacatgcagaagaagcccgtggggagaaggtggattcctggtgtgctgggttggtttttcagggctgttagaggttttttttttcttttttttttttatggcaagacttttggctttgagaaaactcacttagagggctttccaaaaacttaggatggtctaaaaaattaggatattcttttagaattaggaagaaaaattaggatattctaaaagaatatggattaaaaatttaggatattcttttagatatcctaatatctagatgagaggccttccttcataagatctggttgtttgggctgtggttggcataagtgatatttattttggcctctgtcacatccagtttcttgagcttttaaggtaagcttcttttggctttttttcagatgttcaccaagcttaagtttaaaataataggtattctaaaagagtatcctaattttcttatctgtattcttttagaataccctaatgtttcagacagtgatattctcttgttatttctaaggctaaattggcagagtatatcatctaaagccaaacactgaagaaggtgagaacccactcccacccagccagcatttcctggaacagacaagctgctgcttccttgctggctcacttagtgcattcctgggatggtctggcacccaggctttttattctttttgatcattgttcttactgaggtgccttcctagaacaagagccacttacaaaatagcttataattattatgtaccacacaactactattgtttgatgtatgactgctgagagcttgaatacatgcagagagtgactgaagacttagtaggagggaataaattctgagcctgtctaaggtggggctaaggaacagatgagtaataagaggctcttggatttttttaaccaatgcaactgaccctttcaatcagttttctttgaattacatctacaagttttgttccactcagctaccagtcaactaggcatgctccacagtatcacaggaagaaggtcagaaatctggaactgaagctaaaagaagtgaggatgtagaagccacattcctctccaaggtagtgtgtgaaagaaccgccccctcttgacaggaggatgaccgtcgccattcttgcgtgggactgactcacccagctgagaggaggaccaatagaaagaaaattcacatttgagtccacctctctccccctttttctggccttcattcataagatctggttgtttgggctgtaggtggcataattcatgtttattttggcctctgtcacatccagtttctttagcttttaaggtaagcttcttttggcttttatctcgtgccgaattcggcacganccccaagagagaaggccactgatgagggcaggagagagacgaccgtgtaccgagggctggtccagaagcgcgggaagaagcagttgggctcgttgaaaaagaagttcaagagtcatcaccgcaaacccaagagcttcagctcctgtaaacagccaggttaataaaagcacatgccgtg

SEQ ID NO: 1813 - DNA, 456 bp, Homo sapiens
  misc_feature (1)...(456): n = a,t,c or g
acttggaatgncnnnnnnnnnnnnnnnnnnnnnnnnnnnnnnnnnnnnnnnnnnnnnnnnnnnnnnnnnnggcacgagcggcacgaggagagctagcaccatgcctgacgatctaaggtagaaaccattcccactctttcccagtctgtgggaaaattgccttccatgaaaccagccctggtgccaaaagggtttggggaccactgttctaaatcctccaaattaacaaagttagttatccccttcaaagctttcagaactttctgtacaattattttttatagaacttgtaatactgtattatatttttgtttacttttcaaagatttttgaattcctggtagcaaagaccttataaccactaacatttcacataatacattgcccatagtgagctgattaatttcctgtggctgcctaacaattttccacaaacctgatgactaacaacagaaa

SEQ ID NO: 1814 - DNA, 538 bp, Homo sapiens
  misc_feature (1)...(538): n = a,t,c or g
cccccctttgacaccnnnnnnnnnnnnnnnnnnnnnnnnnnnnnnnnnnnnnnnnnnnnnnnnnnnnnnnnnnnnnnnnnnnggcacgagagttcctgtgtccacataatttcatccttcgatctcaccccctattctccccacctctccatcctaaggtcggagaatactgcgtcggggaaattgacctaaaaaaatttgttatggtctatatattctctgatgagggtatttttctaaaagcaatgaagtcttcaggcttttaaaaggaagggataggggggcgaggnnnnnnnnnnnnnnnnnnnnnnnnnnnnnnnnnnnnnnnnnnnnnaagctaggnnnnnnnnnnnnnnnnnnnnnnnnnnnnnnnnnnnnnnnnnnnnnnnnnnnnnnnnnnnnnnnnnnnnnnnnnnnnnnnnnnnnnnnnnnnnnnnnnncaaaacaaaacaaaactctttttaacaaaaggtatgttgattgattggagattattatattacggtcacattttccagataatatttgataacactga

SEQ ID NO: 1815 - DNA, 494 bp, Homo sapiens
  misc_feature (1)...(494): n = a,t,c or g
ccatggagatccnaaaatcacaagctccagcctccatcaatgatgacagggttaccagttacataagcagattcaatcagaagccaaatacacgcagagcatggctatttcttctgcagttgcgaatcttnccgtcttttgtctcttcaggaaatcattccgtgcctcttcaggatttcctctggcttgtattctttcttgtagagatggcgtatcaactgttcctgggcacacacagttgcacctgatgccctgctggatgaaatctgcagccacagattttgtgaggccaatcacggctgccttggttgtgctgtacacacatctgttcacaactcctgagggtggaggaaaggttcaacaattgaaggaataaaaaatgtattttccttcagaaaggtaacacaaataagttttcccagtagccattttcatgctttctcccacattcctccccttttaaaaagattgatatcagattttttccttcaata

SEQ ID NO: 1816 - DNA, 241 bp, Homo sapiens
gcggcacgagccttcaccacctacgtgctcctcggcagtgtgatcacagccagccgcgtgttcgtggcagtgacgctatggggctgtgcggctgacggttaccctcttcttcccctcagccattgagagggtgtcagaggcaatcgtcagcatccgaagaatccagacctttttgctacttgatgagatatcacagcgcaaccgtcagctgccgtcagatggttaaaaagatggtgcatgt

SEQ ID NO: 1817 - DNA, 349 bp, Homo sapiens
ggtcatctgtaaaatggagaaaataccagtgctttttagggttgccaacctaataagcattattcctgccccaaataagtccaggctatgtggaaaaacgcgaatttctcgttcagcaaagagtaaagctaataccagagttttcctggcctgcagatttggcctggcaggagacaatgccatagccaatgttcatgctccagatgcagacctggaggcacagagtgatgtagagaggacaatggatctgaagccatgtatctgggtgccagacacgctgggtgaagccgagcaaaccgctcctgcagatagattgagtatgcacacccagcactttgggaggccgagg

SEQ ID NO: 1818 - DNA, 590 bp, Homo sapiens
ttttttttttttttaacagttaaacttttatatttacaatattctcttcatcttttgccaggtttaaaaatgtgtacagagccgcaaagggttggggtagggataagggattgtcgggattgttttggggagaggagctgggcattggagtccgtggctgaatcatggggtcccccagcccccctcccatgccccaattctgagggcatctgtctacagggttcagggcccaggtctctagcatttggagggcatggctgtttggagaggagctagaccaggcaggggaaaggatcagaaaataactaattttccatggatggaggtaggaagagaagggacagtcaagaggcaaagttctggggactcaagaccagggattctggatttgggtgtcagtggaagacagcaccccagcccctattcaagtttggcactaacaccccacaaaatgccagcagatgaggactctcccctcgtccactgtgtcccttaagcccttccagacatcattcttttcccaaatggcccaagcccaagtcctccggggagtcacctcacacatttcaaattattcctgctggtgtctc

SEQ ID NO: 1819 - DNA, 428 bp, Homo sapiens
ctggacagcatgtcagattggtgtaaggagcatcacgggaaggtaacattaccaaataacaggattgctgctttggggatcagtagcaagctttttgctcccacacctgaatccgataccattgttggatggtattttaaaaaggcttagagaagattgcatggcaagcctgggaaactgcttgcttgtttacttttcatctttgggacctctcgagatcatcttctcctgaatgtcctcttttttttctctcctacattcagtctgtcgcgaacgcattgtggattgtcaagtattactcaagtcagtcttttggataaggttagacatcaactttcagagaagggggattgctgctctcctgttaatagttgtttcttcccagaggttaatatccttggactttgaacaccgtcttttttgactgt

SEQ ID NO: 1820 - DNA, 407 bp, Homo sapiens
gaattcattagggtggttcagccggctgtcactatcctgacagtaggcaggaatgcaaaatccactttttaaaatagcctcattggtagaggaatattggcctcacctaacacccatttgggcctatcctggctggaaatgcactggcccacatctttatttgcatcctccaggattacaggacagtctcatttttcaggtggcatcatcacggctcataaattgaacaacacttccattagattgcgctaggcatcatcttcaaaactctaacatctggatgtttccaaatagcctgctatgtagatgattgatggctttcattcttgggttggattctgatataggccataagctgttgggattggaattggtggtcctgatgtgccagtatgtgatcaactgat

SEQ ID NO: 1821 - DNA, 474 bp, Homo sapiens
gctgggtagggggtttgtccctggaattctgggacactggctggggtttgaggagagaagccagtacctacctggctgcaggatgaagctggccagtggcttcttggttttgtggctcagccttgggggtggcctggctcagagcgacacgagccctgacacggaggagtcctattcagactggggccttcggcacctccggggaagctttgaatccgtcaatagctacttcgattcttttctggagctgctgggagggaagaatggagtctgtcagtacaggtgccgatatggaaaggcaccaatgcccagacctggctacaagccccaagaagcccaatggctgcggctcctatttccctgggtctcaaaggtaccaagaaagtatggactttggggcattccaagcaatgacaaagttgctgcaaccaactggatgtctgttatgacactttgcggtgccaacaaatatgg

SEQ ID NO: 1822 - DNA, 357 bp, Homo sapiens
aaagtcacccttcaaaagacgacgatcaatgaatgaaataaaaaatctccagtacctacctcggaccagtgaaccccgcgaagttctctttgaagataggactagagctcatgctgatcatgtcggtcaggggtttgactggcagagtacggctgctgttggagttttgaaagctgtacaatttggtgaatggagtgaccaacctcgcataaccaaagatgtgatttgttttcatgctgaggattttactgatgttgtacaaagacttcagttagatcttcatgaacctccagtttcccagtgcgtacagtgggtagatgaagctaaactaaaaccaaatgaggcgggaaggcattc

SEQ ID NO: 1823 - DNA, 532 bp, Homo sapiens
aatttcttttaaataaaaagtttgggggtgcaatataagaagtttatataatatgcagtacattatccaaaagagaaggtagttaatgcagtagaaagtagtggtaataattcctttttaaaaaaatttcgggtagtcatatagtaacattttgctatatgaaaactttggtatattctgtggttacaactaagattgtgtctggcagctcttttttggggatgtgtgtgtgtgatttttaacagaggtattaaaggctagcctaactgttgtctaaaaagattgtacagtatttaagggattttccttttagcttttcatctccagtggcattaaacataaaaagaccctggcattttttcacatacttgaatccctaaatgcacctgtctttcactttttgagacagactgaatatatctaaaatttccagcaataaaaaaaaaagcatttaacttgcaccaagcaagaaaatataaatacagttaactgcattaagataatcacgttaaaattgttactatgcagcaca

SEQ ID NO: 1824 - DNA, 1668 bp, Homo sapiens
aggataactaaaaggggtgtttagccaacaagatgtggttcctttcagatttgaaaatattatttccaaattctaaattaatgaaacaatttttcatctttaatgaacaaaagccacaagccttattttatttcagcctctaaaattaaattgattgtggctgctgtcaaacacagacgacttcactttgggtatccttgggatgagtgtagttgtggaatgaaaaactattggttcatttctttaatattaatataagtttttgctattatgtcaaaagtactttccaatcttaatttcttagtgtctggggtcctgggcattgatttccaagttattttatcttagaatagctcatatgagctgaaaaacaatttattctcttattaagcttctttcttcagaaaagtacccaatttagggtctgcattttaagaattattaacaaatatcttcataaaaatttgggaaaaggagtgtggatagatttaaacataaaaatatggagaatagttctaacagggtttgaattatagcaacaatggattgtgtaagaagtgaatcttatttttatttttaaatgttctaaataggacaatcagagatgacttggttgtagtgtgggaaaccagtagggaccttggggaagctgccaaaccctttctagctctggggctcagctgttaaggaactgctgattcctacaggaacacttggacaatccaatacctaaatgttaaccatcaattaacccagtaaacctgcaagatggaaacgaagatttgttctcacgagtttcacgtgattatttaaagtaagggaaatttcagctgtttatagttctgtcttaactttttcctctcttcattcttttcctctcattttttgtagcacttctggggcccagtagccaactggggtcttcccattgctgccatcaatgatatgaaaaagtctccagagattatcagtgggcggatgacatttgccctctgttgctattctttgacattcatgagatttgcctacaaggtacagcctcggaactggcttctgtttgcatgccacgcaacaaatgaagtagcccagctcatccagggagggcggcttatcaaacacgagatgactaaaacggcatctgcataacaatggaaaaggaagaacaaggtcttgaagggacagcattgccagctgctgctgagtcacagatttcattataaatagcctccctaaggaaaatacactgaatgctatttttactaaccattctatttttatagaaatagctgagagtttctaaaccaactctctgctgccttacaagtattaaatattttacttctttccataaagagtagctcaaaatatgcaattaatttaatactttctgatgatggttttatctgcagtaatatgtatatcatctattagaatttacttaatgaaaaactgaagagaacaaaatttgtaaccactagcacttaagtactcctgattcttaacattgtctttaatgaccacaagacaaccaacagctggccacgtacttaaaattttgtccccactgtttaaaaatgttacctgtgtatttccatgcagtgtatatattgagatgctgtaacttaatggcaataaatgatttaaatatttgttaaaaaaaaaaaaaaa

SEQ ID NO: 1825 - DNA, 1701 bp, Homo sapiens
ttttttttttttttatttgaaaaacttttattttgcataaaacagacccattccctttgtgggtcagatgttaccacctttaaaaaaatgttttttaactctcctttctgtcccactgaaaaatttattttgaaagggttaagaagagtctatcattgctggtcaaaatcggcctgaggatggccgccagggacagaggcctgaaggcatcatctgggcaggcctgggaagcccacggggtgcagcatcctcaagcccaggggcgggagcgccttccggcctgccctccagggaagctgcatgtgggacctccacggtattcagcctccagtttagtcagccttgagtctggggctgctcccgcacctgggtgttttatgcgtgtgatatatgtgtatccatcctgcttccctgccttcaagggaaggacttaactctccgagagaaaacctgcctggagctgcgcacattctcacagcttgagaacgcttgacgcaggaagtcaccagagtactcaagtcaaccgcaaactagtggttacaaaatgggagctttaaaaaaagtgctctactagaactgggtgtcctcacagtcgggagcagaaggctggggcgcaggcctgcggctctgcggcgcctctctgcaaaggctcgggtccaccttccagactgcaggctgccatgtgtgctgtggaggatgccacagtgttaaggctgaccaggaccagaaggtgacactgggctctcctgctacgtctggccacttacagcagatccctaggccacactccttccaagccactttgcaaactgtttccctgttgtggggccagcaggagctacaagggccgaaggcggctctgccggggctggaccggttttgtggcattcgaggagaggtctgggaaaggccacgcaggcagtgaaggtcttttcccacgtccaattttatgggacgactggggtttgaagatggaatctagaaaccctcctctccccttttttaagtaaagagaaaagaaaaggagacctttgcctcacgtgagaacaggtggagaatcagcgctgtggcggccactagcggcgttatctcccggatgtgcatgggagagagatggcagcttctggacagacaaggatgacacaggttctttgctcctttgcagctgggatgaatgttcaagttgaagcacagtgtggttcccatggaaagcccaaggtcagcacagccactcaacctgctccaactgcgggaacgccttggaagggcccagcctctgctccccagctggcccccagccccacggaggcggccaggcggctggaagcgcccctggcaggcgggtctggtccggatggctcctcgctgggctatgtgctgactgctttgatggacaagcaccccaccccgattagctcagtggcttgatgagctgtacacagccaggctggtgcggaaccgtgagaaaggaacagtttggctataggagctagtgattcggggctcgccctttatgtccccatgaagatccggcacaaggcaggtgcccgtcgcttcggaaggaagggcgggagtcgctgatctgcttgagaggcaccagcctgcatcccagcatccactgcagcactcgcgtttccgtctgggtgaatcttaggctgggaggagggaattctcaccagccacatgattcccaggtcccac

SEQ ID NO: 1826 - DNA, 431 bp, Homo sapiens
  misc_feature (1)...(431): n = a,t,c or g
gagaatatgttagtgcctctgagctaacaataatgttgatgctgaaagaagaagaaaggccactacttttaataaaaattaaatgtttaaatgtgaagtgtacttaaatgattaggtattatagcaataccctttgtaagtggaattgcctccacagcttggccttattagccctaagtatactaagttccttctgaaactcctgtcacccaccaaattatctgagaattctttccaccaacaccttaatcaaaccatcttctaccaagtgtgttcagaactggagtaaagtctgatcagttcattaccgctgtttctctttggctgtgtgggaattaaaaaacccatggcttttacagtccaacagtagctgctggtctgntggtaatataaacttaagtaggcaagcacttgggggttccttgcacaaa

SEQ ID NO: 1827 - DNA, 851 bp, Homo sapiens
attcggcacagccgcgaaaggctggacggaaaggaagagaaacgggcgggtggcctgacacccagcagccaggtgtctataggttttctgtcctgggagggggctgtcagggtgatgcccgcctgcagagagggggtcattctgcgaggttgggctgcagacccctgtgccagcgggcctgggtgatttcggaaatgatggggcactgtggagagaccccagggaaaacacccagtgctgcttttgacattctctctccatctcccctttcagcggctgctctgccctgggataaacacatttcaagagtctcagtccccgctttgccaccatctcctcctctgatctcctttcctgcttcaaaagactccagaatcttctcggttctcagagaaggctgaatccacctatgacctagtgggagcaccctgtgccgaaactgtttaccttctggtccccggagccatgggtcacgacctgggcctcatgtaggcccgctcctcagcagaccccaatctgcggcttctcccacctcactggggaagaaggagagccctggggatgtggagaagccaccccccaccccgccacatcccccacatcttacagaatctcgattgaatccccgggggcacatccctcagcaggacagcaacagtctttgccgcggccctggggagggctgtgctggggatgagcgccgagtggccgtggactaagtgaaggaaatgaccatgctcttctcccagctggatggcgaggccgggcaggaaccgcggaattcctgctcttcgttttccaacactttgctgtcaagctatttgaataataaatacacattataaaaatgt

SEQ ID NO: 1828 - DNA, 749 bp, Homo sapiens
gaacaaatcgactctttagcagccgtagtccttcaaaatcgtcgaggactagacatgttaacggcagcacagggaggaatttgtttggccttagatgaaaaatgttgcttttgggtaaatcaatcaggaaaagtacaagacaacatcagacaactcctaaatcaagcctccagtttacgggaacgagccactcagggttggttaaattgggaaggaacttggaaatggttctcttgggttcttccccttacaggcccacttgttagtctcctacttttgctcctttttggtccatgtctcctaaatctaataacccaatttgtctcctctcgccttcaggccataaagctccagacgaatctcagtgcaggacgccatcctcgcaatattcaagagtcacccttctaaggaggacccctaggactgctcgctagtgggaacacgacagagggcgaaatcctgccccgttttcccgtgggaccggggtgggatatggttttttggccaatccacagagccatcctgccctgacagctagcaagaggccaagacccacacgaacaaccactacagcccctctgtcagcaggaagcagttaaagaagactgaccttcgtccattttcccaagataattggggtcttggactcttgagggggggaaatgttggagcaggtagctagtcagacatgagcagggcaggggagggcccccttcaccaggaatgtcagggcaccatcaggtgatggt

SEQ ID NO: 1829 - DNA, 1905 bp, Homo sapiens
tttttttttaactgtttatactggtttaatccatgtcaaatgtagtttacaaagggaaaggacaagtacctttgtatagaatatacagacacagcatcacaccacagggcccacgggagggtcggggagacgacactttttccctgggaaaggcagctctaatcccaggaatggttctcagcagaggctgggtggccaggagcactgtcctctagccccctaactcagcctctgcttcagctcggttcccatttcctgcctctaccccccaactccttataaagagccccatgagctaagactaaggagaggatcatgtcccttggggcgtgtgccccatgtctgggagaagaaatatacaccactgaacaccgagcacatgggagagggaagggacaccacaggagagagagaggcagataccccaagaggtggatgggccgagctcccagccaaccctgaaggaggcactgcttccaggggttcttaaaaaagaagaaaatcatacaaccaaagggggaggggacaggtagagggcgaggagttgtcccatttatacacaacattgtaaacatacacggtctatattacatgtgcttcagtctggtgtttgcatgtctgtctgtccgtctgtcagtatgggggctggatcttaggagccgtgccccactactcccccaacccccacctccctgccccaccctgggaacagagctggaacaggtatggcccccaaaccataggtgggagccagcaggtagtgcctgggccacagcctctactctggctccagagtcctgcgtgtgtaaatgtgtgtgtgtgtacgcatgtttgagtatgtgcatgtatgtacatggggaacctgtgtgcaagtatgtacaaagggagacggtcactgtcacagaggctgggggcaggtggggctgctggaggcgaggcctgcctggggcagatagctcacaagtagatcctccgcaggtctccgggcgctgtgatcgtgttgcactgagggcagagcttcttggcaccccagggtccgcagccagcactcctcgcagtgcacgtgccaacactggatggacgttaggggcatcgagtacgagtccatgcagatgaggcatttgtaacggtccccacgagatagctgccgttcaagttctctgacccgagccttcagagcctcaaacgtggtcacagctgaatcttcggtgattttctcgatgtcgctgttcttgcaggtcttctgcatggccctcctgcttgctgctttcaccattgctggtggatggcatctcatcactggcccatttagagaactcaggtgtgatgcgcgtgctgggagggccgccatttaggactgcgccccgaagtgcctctctctccttggcttcaccaggctcctcgcctgtgcaggggatgacatcagcctctgtgtattgtggcttcccatactccagagtgtcatccccatccacatccaagtcagcatcactgtccgggttctctttgccgctgcacatgatgaagccagagcctcggaagccaccttccaggagagtggtggcccgtatccgcttctgtccacaccactcatactcctcaaagcggttgttgttctcatgctcgatgtccacagcatcatcctcagccatgcaggagccttccctcttagaaaggcaatgctccacatgcctactcatctcctgctccgatcctgccagggggcggttgcacaggggacatacctgcccttcatcttgcttcctccgtttcattttcccaatccgagcattcagtcgggtctgccggttggctcgtactcgcagaaaggtctggtatctgtctgaatggtggaggtcatcggtggcagatgagtggggtgatgccgttggagactctccttcc

SEQ ID NO: 1830 - DNA, 900 bp, Homo sapiens
tttttttgttttgttttgaaagaataactaggtaatatatgaaactagtttcacactctctggttggtaaaagagatgctgggtgagctacagtaaaggcagccttttaccaagttaccacctattaccgtcaaaagccttcaatagaaagcaaagctccaggatcattctgtttctgctcagtatcagacagataaccttaccctcaaagattctgggttctgagagaacaaactggcccaggatgctaacttctgcttcaagtgaatctgggccgtgtggggcaacaagcacttgtttgcagtctatattttccaccacttggactcactagcatccctcggtaaagacaaggctagggtagtaggtaaagcacaatgttttacaatgaaagggcgcttcactggtcagcgcaggaaataagtacaggagcctgcggcatttcttttggctgtccatcatgggtgagcggagttgacctctgacctctgtgcacattttccatggctgccacttcagccagcgcagcgaggctaaagaacgcagacacggcaggcatttctggagtactgctccgcgtctccccgacctcggtgttgtgtgagcatttgtcattgcagtctgtctcagttgctttagggagactcctctgcagttgttcctttggtttgtcatccaaagtacctcctgctggtgatacccggccatctgctgtcctgacaaggtgtgtaatcttggttttccttgcttttctcttttggctgcccaccaaaggttcttgcgttgttgttggctctggagtgttgaaaatggatgggatatttttaaccttatgaacaggctccatggtgtttctgtcttctgaaaatatggcttctgtagggtgaatggcatccaaga

SEQ ID NO: 1831 - DNA, 434 bp, Homo sapiens
gagcgtgtccaaggcaagaactgaaaactctgagtgatgttcagaagtttgcagagataaatggttcagccctatgtagctacaacctaaagccttctgaatacactacatctccaaaatcttctgttctctgccccaaactaccagttccagcgagtgcacctattccattcttccatcgctgtgctcctgtgaacatttcctgctatggcaagtttgcagaggccctgatcacctttgtcagtgacaatagtgtcttacacaggctgattagtggagtaatgaccagcaaaggaattatattggggactttgcttgttatcactagttctatccatggattttgatgggtgataatcaggtatatatcaaggagtacttgtgtggggtcttaacggttctgggtcatactcgggttcacttgggagggccac

SEQ ID NO: 1832 - DNA, 476 bp, Homo sapiens
  misc_feature (1)...(476): n = a,t,c or g
gttntatttnannctttnnnnnnnnnnnnnnnnnnnnnnnnnnnnnnnnnnnnnnnnnnnnnnnnnnnnnnnnnnnnnnnnnnnnnnnnnggcacgagnnnnnnnnnnnnnnnnnnnnnnnnnnnnnnnnnnnnnnnnnnnnnnnnnnnnnnnnnnnnnnnnnnnnnnnnnnnnnnnnnnnnnnnnnnnnnnnnnnnnnnnnnnnnnnnnnnnnnnnnnnnnnnnnnnnnnnactgttnnnnnnnnnnnnnnnnnnnnnnnnnnnnnnnnnnnnnnnnnnnnnnnnnnnnnnnnnnnnnnnnnnnnnnnnnnnnnnnnnnnnnnngnnnnnnnngttgcctnnnnnnnnnnnnnnnnnnnnnnnnnnnnnnnnnnnnnnnnnnnnnnnnnnnnnnnnnnnnnnacacagaggtcctgtgatgtnaaccatctatgggtctctcatccatggataccagncagtacttggggtgact

SEQ ID NO: 1833 - DNA, 1431 bp, Homo sapiens
tggatgcagagagagacccctcccctgggatcctgcagctccaggcccctgtgggtggggtgggggctggaacctatgaacattctgcaggggccactgacttctccacggtgctcccttcttgcataacctggcagctgtagcttctgcgggacctccactggctcgggcgtcatgctcaggtagctgctggccacgtacttgttgttgctctgtttggagggcgtggtcttctccacgctctgggtgatgagggtaccatctgccttccaggtcaccatcaagattcccggataaagttattcatgagacacaccagtgtgggccttgttggctatggggctcctcacgagacggcaggaacagaatgaccgacggtgtagtcttgggctgacctgccccttgggagtccactgtgactgcagtccagtggggtcaatgtccacactgatgccggaaagaagtcctgggagatgcggagggcatcctgtagcggcaggcagtctgggtggtccacgggtgtgagcttcagcaggtcctgtgaaccctgagaattcagggtgaggagctcactcttgcctttcacctgttcctgggctctggcaggctggcctgcttcctgccccagcctcacccactctccgcactcctcgccactgatgtgggcagctgatctctccggtttgctgggctctcaccctctgcccaatggcaccaagttaacttcttcgcatgctttattttctgcctgcgttttccccaagtcgcctcgcagatcctgggccttgggacgcgcttcctcccaccctggagtcttccggcattttccccttggccagggctgggatggccgtagctgtttctccagactcacgttcatgttaaaggaacaaaaacaatcatatacctttaagtcaaagagttcttctagagcgtattgtcctgtgtgctgttgctgaaatgaggaggggatgaggcctccccaggccttgaggacttgcagggatgatgctcttcatgcaggttgctgacacagagggtgctgttgcccccaacagctgaacaaaacaccgggacgaatgccttgaaaggcaggaatcgttttatcattctccatcctcacatgcaaatgttactttgaaagcctagaacgcttttcaccatgggcacccaggttctccatatgcacaagtccctgaagggttggtgcttcttggtgtgagttccagatcccgatcctctggtggtccatggtgttaccactgactcccatgtccctccttgtccccctagtatgaaaatgagatctgcaggatgctaactttccagcccggcactggggagaagctgttgggagtccctggttccagcctttctaactaaacccatctcctcctatgccacctgcctgggcccctcctgggactttat

SEQ ID NO: 1834 - DNA, 836 bp, Homo sapiens
ttttttttttttgtatttgtagaaaacctttaatgttccccaggctgagggagccctgtgagccagctaaaaacccccactgtgaagtccctgccatgtcccagcagtgtggagtggcatggggcttcatcctgactgtcagaggctgaagccactaccatctcctcgaatgcgactcccccagccagaactggcctgctcctggtcatccagggagggcagagagctgcgggtaccaggatgtcggcagccagggtgcaggtcccagcacgggggcccctgagacagcccattggaactgggaggctggcggttctcaatgaccaggtcactgctgtcatcgtcactatcaggctcagcaggcccaggccctgcagagggaggacctgtcaaacgcccagatgcccctcgcaccacgttattgcgctggttggcgggcttgacagtgacaatgaggttatggctgttggcaaccatcatgtccgtcacttggtccaaggtcttcccggctacttcaatgccattgacctcgaggatctcatcactgaccgccagcagccctgtactctcagccagacccccacgtaccaggcgggagatgaagattcctggaacccgctccaggccctggggagccacacgcacgctcatgccatctcggatgtagaagcccagggggcggtctgaaccatgcttgtgcagccgcacccgtcggtgggtctcaggcagtaggtccacgtctatgactgaggaaacctggcggaaatcttggggcaggctgattagcaagggtggccgggtgcgcaggggtgccactggccgcagcaagagccctt

SEQ ID NO: 1835 - DNA, 3425 bp, Homo sapiens
  misc_feature (1)...(3425): n = a,t,c or g
tattaacaaaaagttttttttttttaatcaaagtacataaaataaaggtggacacaactgtaagtgatcaccaaccaggggatgtttgggatttttagatgcattaaaagagagtatagagaatatccacctgcaagtaagattgtattcttttgcaaccctgcgattttcaaatggcaccccaacacagtctttggtcaggataagggatcctgcaggcctagccttaccgtccacatcaaatataggtggagggatgccatattctccacatttggagctctgtcaggctgctccctttccaccagtcctatccagtgatactgcagacaaagggtgaggcaacaggagacatcataccgatgttgatcaggagaggaagaaggtgcaatcttacttccaggatttcacatttggaagaatgccttgggagtggtgggtagcccaaggctgttcccaggaaaagaagcaggcacagggcccaggactcaggctccattttgacccaacgtttattgtccttttacaacatgtcattttttggtttagaaactgcttgtgattagttttccaacattaactcaaaagcatgtaaaataaatcaacctactctctatataaacatccagcaactgtggcccctacccacctacccaggttggatagggggaagggagggctcgggcagcattgagtcaagtgcagatgctttactgtggcaggtggcagtagtgccttggttcacaccccacacaggtcccctgcactgccccaaactacaacagaaatgggcataggcccaaggcccaattccctgttggtaattcactctccgcctaccaaatgaaaatcgcttttattttatcgcttttgttttgtatttttgcaacagaaaccccctgtccagagtcagactgtagctgaactgttcagactggagaatggagcaggctgtgggcgcacccctggtccctctcctgggcaagcgcccccacccccagggaacaaggtccaggcaggccagctcactgcacgctggccaccaccacttagccatacaggtcatcatcattgtcttctgtgtatacactgccacctgtgccgcctccactgccctgactggggccagctccaccctggttccctgaagggaatctgaagctgccaaagccccgactctgctgaagggtctgggcaaacatctcatacttccgaatgtcattgtcactgacagaacggcgcgcaaagcgcatggcttcttcaaagtgatctcgacggatctcaggcactggatcatcctcttctacctccatggctgatgggtttgtctgcctctctcgttctcgcctaatctcactctcgatggattcacggatggccagcttgcaagcacgctggcaaatctctgtcaggtcagctccagagaagccattagtcattttagccaggaactccaagtccacatccttggcaactggggacttgcgcaggttagccttgaggatggcaacacgggacttctcatcaggaagtgggatgtagatgagctgatcaagacggccaggtctgaggatggcaggatcaatgatgtcaggccggttggtagcgccaatgatgaacacatttttttttgtggacatgccatccatttctgtcaggatctggttgatgactcggtcagcagccccaccaccatctccaatgttacctccacgagccttggcaatcgaatccagctcatcaaagaatagcacacagggggcagcttggcgggccttgtcaaagatttctctgacattggcctcagactccccaaaccacatggtgagcagctcaggacccttgatggagatgaagttggcctggcattcattagcaatggctttggccaacaaagttttcccacagccaggaggtccatagaacagaactcccttggaaggtgtcatgccaaacttcaggaatttgtctgggtgctccacaggatactggaccagctcctgtagctcacgtttgacatcctctaggcccccgatgtcttcccaggttacctgtggcacctctaccacggtttcccgcagtgctgatgggttactctggctcaaggcccaccggaagtcatccatagtaactgctagagagttcatgacctcggcatcaatggtctcatcctctaggtcaatgagatccatcttcttgcggatggcttgcagagcagcctctgagcacagggctgctaagtcagcacccacatgcccgtgagtctcattggctacctgttccaggtccacatcatctgccagcttcatgttcttggtatggatctgaagaatctctaagcgtcctgtagcatcaggaattccaatatctacctccctgtcaaagcgaccaaatcgccgtagagctgggtcaatgctgttgggtctgttggttgctgccataacaatcacatgtgccctctgctttaggccatccatgagggtcaacaactgtgatacaatgcgccgctccacctcgccatgagttttctctcttttgggagcgatggcatctagctcatcaatgaagatgatggcaggagcattcttctcagcctcctcaaaggctttacgaaggttgctctcagactcaccagccaatttgctcatgatctcaggaccattgatcaagaagaagaaggctccagtctcatttgctacagctcgagcaatcagggtctttcctgttccaggaggtccgtaaagcaggattcctctaggaggcttcacaccaattgccttaaagagggcaggatgtctcaggggcagttccaccatctcctttatctgagctagctgcttcctgcagccaccaatgtcatcataccctacttcattcaaggactcttcctcatcctctcgtttgataggctccccttcgcagtggatcactgtgtctggagcaacaatgcaataagggctaggatctgtttccaccactttgaactccacagcacngcatcccaccacggacaagaaaaatgtctcctttccggatgggtcgatacgcttccaggaagtacggcttaaggtatacctcgaagagattacccagtaatgccttccactgtgtcatcaatggggcagcacatggatacgtttgccgtacttcacatcagggcatggctgggatgctgatgacatcccctaggcgtacacgaaggttattccgaacaactctattcatccgaatcttctcatcagaacaagtatcatcagaaaggacgatgcaaacagcttctcgtctcttctttcctttcagcaacactgtgtcacctcggaacaactgcaattcatccatcttgggctgggacaaggacaccacactgttgtcctcattgatggcttcatcaacaattaaccgattgggacggttcttctgtttga

SEQ ID NO: 1836 - DNA, 56 bp, Homo sapiens
tacataaattaaaaagttctggagctagatagtgattgcatagtagcgtgaatgca

SEQ ID NO: 1837 - DNA, 1209 bp, Homo sapiens
ttttgacttgcttattttttttattaaatgatacattgaaagtataaaaagttgccgcagtacaaacaaattacagaataatgcatataaaagcgctatggactacacgtgacaattctgcttaacttccatcttgatgattttatatcagtatccaaaattatatactccagcattttttccgaatatagtcttacatgattgcaattcctgaggtaaactaagtgtccactgccaacatccttggacgaaaaccaagtcccccgggaggaattcagatatttatattcacacatacaatacaacggaattcatcaatgtaatcagatattgcagatttaaaaatggaaaatggactcttgcaatacttctgcatccatatataattttaccagcagggcctcccaaaatgttgtgtaagtatagtttaaatggatttcattaataagtttctgcatttagataaaaattcttggctaatctgtaagaagtgaacactgactagcattgccaaacagaaaatcaaaagtttcaacaatttgcaaagcagcacagaattgacaccctaaagaggatgccaattttgctaactacagctcttaccactcttctccatggaaaacctttaagctaaatgttgtcagtgtttaggtgtgcaggcaaaatttaattctgaatataccatcgaacttttgccaatcaggagctgtctatcatcatagtcagttgttttcaatgaaatgagcctgtggacactacattaaaaatacttctttaataaatatcgaagtagcgtattagagatagcacatactatttttctatccccaagaataaaaattgatgtttggtaagagtttcggagcccaaacaagtagggggctggccctcttctggctcatctgtgattgcacaaccgagggccacacggagattaaacaatgccatctttgaaaaatccctttctggtatttctcccaaagcctgtctcttcatgcttacttcacattctttatctaataaaataaactctttgttttatttacagcaaaattattacagcaaatttacttctcctctaccttttaattaaatcttccagtaagccaaagtctaaggaaagaaaaagtacattgttgcctattgaaaaggtaatacaaagccctttcatttccttacaaactttaagggcctttataatacttccta

SEQ ID NO: 1838 - DNA, 1839 bp, Homo sapiens
ttttttttttttttttaaatgtgcagtgttgaatcatttcttcatagtgctcccccgagttgggactagggcttcaatttcacttcttaaaaaaaatcatcatatatttgatatgcccagactgcatacgattttaagcggagtacaactactattgtaaagctaatgtgaagatattattaaaaaggtttttttttccagaaatttggtgtcttcaaattataccttcaccttgacatttgaatatccagccattttgtttcttaatggtataaaattccattttcaataacttattggtgctgaaattgttcactagctgtggtctgacctagttaatttacaaatacagattgaataggacctactagagcagcatttatagagtttgatggcaaatagattaggcagaacttcatctaaaatattcttagtaaataatgttgacacgttttccataccttgtcagtttcattcaacaatttttaaatttttaacaaagctcttaggatttacacatttatatttaaacattgatatatagagtattgattgattgctcataagttaaattggtaaagttagagacaactattctaacacctcaccattgaaatttatatgccaccttgtctttcataaaagctgaaaattgttacctaaaatgaaaatcaacttcatgttttgaagatagttataaatattgttctttgttacaatttcgggcaccgcatattaaaacgtaactttattgttccaatatgtaacatggagggccaggtcataaataatgacattataatgggcttttgcactgttattatttttcctttggaatgtgaaggtctgaatgagggttttgattttgaatgtttcaatgtttttgagaagccttgcttacattttatggtgtagtcattggaaatggaaaaatggcattatatatattatatatataaatatatattatacatactctccttactttatttcagttaccatccccatagaatttgacaagaattgctatgactgaaaggttttcgagtcctaattaaaactttatttatggcagtattcataattagcctgaaatgcattctgtaggtaatctctgagtttctggaatattttcttagactttttggatgtgcagcagcttacatgtctgaagttacttgaaggcatcacttttaagaaagcttacagttgggccctgtaccatcccaagtcctttgtagctcctcttgaacatgtttgccatacttttaaaagggtagttgaataaatagcatcaccattctttgctgtggcacaggttataaacttaagtggagtttaccggcagcatcaaatgtttcagctttaaaaaataaaagtagggtacaagtttaatgtttagttctagaaattttgtgcaatatgttcataacgatggctgtggttgccacaaagtgcctcgtttacctttaaatactgttaatgtgtcatgcatgcagatggaaggggtggaactgtgcactaaagtgggggctttaactgtagtatttggcagagttgccttctacctgccagttcaaaagttcaacctgttttcatatagaatatatatactaaaaaatttcagtctgttaaacagccttactctgattcagcctcttcagatactcttgtgctgtgcagcagtggctctgtgtgtaaatgctatgcactgaggatacacaaaaataccaatatgatgtgtacaggataatgcctcatcccaatcagatgtccatttgttattgtgtttgttaacaaccctttatctcttagtgttataaactccacttaaaactg

SEQ ID NO: 1839 - DNA, 2057 bp, Homo sapiens
gtcatctgtcgcattgcctcgagttgcagtaattgaaaaaatgctcaaattcttagccatggctggcctttgctgagctgggactcaggtgtttaaagagtttgtgctatagctaggtgtggatagcttctgatccctgggttctgggagactgcaggtgccgcacattgtcaagttagaaatactccaggtgggtgttagcactgtggtggtctctggtccacagccttaggtaaacaacttagattctgaggtcaaagaaaaaaggagagggaatgcagccttgtgggggagaagcggggcagagggttctctaatctaatcaggacaggacaggtttcacatacaattgtcccagttcgcatcccagccctgggggcacttttctgcttccttccagaggcctgggcctctgataacactttggctttttctccattcacgctgatttggcaaaaggccagagatgggcctccttccctggggaggtgtgatgtagttatcacattcaggacccttgttgatttatcatctattatttgaattcaactggacactctgtaaaatgctgcactgcagcaaaaacaaaaccaccaccaccccagagaaaaccatgtactaattggagtggggtacccccattcacaggttcccaggtcccctgggctttggctgatttcaaaatatagagccctttcttgccagtacatccaagtttaaaattatcagcgaaatggtccatgtttttccaattacctgctgacacggttctaagctaagtgaaggggaagatctgagagcgtgctgtttgtggctgttgatgcatattcgtgatgtaacaggtcctggggcctcactttaccccatttgtaaaatggggctaatgtcacctgcctcttacctacctcagagggatttggtgaagcaaactgttaatcttcgaaaacgaccatttcacttcttggatatcaagtgctaacccagtatgttcttcttttttatgtaagggacagctttggagaaaggactgctctgtggagcagagtcctttctgctggtgaggacagcatttctgagcagggctttgttctctatgtgcattaggacttttatcatgcccttgttctgtgtgtagttacttgacagcatcaaatgccgcctcttcctaatgtccttcaagttttcatgaactagcaaccccaccttccaccatggttctgggcgcctgattttgctgtgactcccagacccagcaactgtttctgccaccctgtaacaggccattaaagctccccagtgttcagcctccttcactcccttgttttccctgttgctatgtgtcacctgggccctacagacaggggcacacgcttatggatgtgtgtaccattgagatgagaatgggtagatgggaacggagaccatcaagccacacccccttcttaaaactggggacatgagcctgagcagaaagggtgaagaagagccatgggacacagagttgacccagccagggggaaagcccagctctctttaaaccagctaagccattccagtctcctgtgaagccaaaagggaccaggaaccgtgcaaaggaaactggaaacttttccccgctgggtagagcatgttgctgatactcttctgttttcaagggaaacaatcacattgtttgattccaaatggtaaatgaacactcactattcttcaggcttcagtaaatctttttttcttccttcatatatatatacacaacacacacacacatatgtatatctatacacacatgtgtgttgtgtgtgttgtgtatatgcatgtgtgtgtgtgcgtgtgtgtatagttttagctccaagccaagcaagtttgtgtttggatagaggggaacttaactattaactacaagttgtatgtctgtggtatcttgattttcccatttctaaagatgaatttcacaaagccataaagcgtgaaattagagctggacttaagactcattggccgaccatcctgtgtcctggccgtggcccctggcagtaagaagcgtgtctgggtcagga

SEQ ID NO: 1840 - DNA, 1571 bp, Homo sapiens
ttgctccagtttttcagaagaagtgaagtcaagatgaagaaccatttgcttttctggggagtcctggcggtttttattaaggctgttcatgtgaaagcccaagaagatgaaaggattgttcttgttgacaacaaatgtaagtgtgcccggattacttccaggatcatccgttcttccgaagatcctaatgaggacattgtggagagaaacatccgaattattgttcctctgaacaacagggagaatatctctgatcccacctcaccattgaggaaccagatttgtgtaccatttgtctgacctctgtaaaaaatgtgatcctacagaagtggagctgggataatcagatagttactgctacccagagcaatatctgtgatgaagacagtgctacagagacctgctacacttatgacagaaacaagtgctacacagctgtggtcccactcgtatatggtggtgagaccaaaatggtggaaacagccttaaccccagatgcctgctatcctgactaatttaagtcattgctgactgcatagctctttttcttgagaggctctccattttgattcagaaagttagcatatttattaccaatgaatttgaaaccagggctttttttttttttttgggtgatgtaaaaccaactccctgccaccaaaataattaaaatagtcacattgttatctttattaggtaatcacttcttaattatatgttcatactctaagtatcaaaatcttccaattatcatgctcacctgaaagaggtatgctctcttaggaatacagtttctagcattaaacaaataaacaaggggagaaaataaaactcaaggggtgaaaatcaggaggtgtaataaaatgttcctcgcattcccccccgcttttttttttttttttgactttgccttggagagccagagcttccgcattttctttactattctttttaaaaaaagtttcactgtgtagagaacatatatgcataaacataggtcaattatatgtctccattagaaaaataataattggaaaacatgttctagaactagttacaaaaataatttaaggtgaaatctctaatatttataaaagtagcaaaataaatgcataattaaaatatatttggacataacagacttggaagcagatgatacagacttctttttttcataatcaggttagtgtaagaaattgccatttgaaacaatccattttgtaactgaaccttatgaaatatatgtatttcatggtacgtattctctagcacagtctgagcaattaaatagattcataagcatatacctgtgtgaaataaattgttggaaaaaagtttccttatgttaactttctttacgtaagttaacttgttattgatgaatggtttgtaagtatgatgtaatgaagcattaatcacagaactaatacatgtacatatttgaggtggctttgccattttatacccataattaaataaaagggcaaaatcccccctgataaataccatgtttatcatggcacataaaactttatggcagtttccaaggccaattgacatatatatttaaa

SEQ ID NO: 1841 - DNA, 826 bp, Homo sapiens
tggctgctttgtccactagcatgccttaaatcattatttgatgactaaatgaatgacagcgagagagcaagtaagcagaggagcaggaatcaacacagtcatcaaatactgatttaaggcatgctagtggacaaagcagccactgccctgccctcatagagcttatagcctaacacaaagcaacagcaaacattaggcatttgttcataaaacctttcccacaaagacttacaggcaggaaaattaggtattaatcaaatcacagaacctcccaaatgctaagtgaggattttaccctttgagcatatcccattaaaagcctcagttttctcatctgtgaaaggggacggtacctgccttttcaggtgaaacctagtgagataatgtgtatgcagctcttagcacagtgtcccccacataattggtgcataagtttccagctgatgtaagaaaaatacagaaaccccaatctaaatctatctctgaaactctaattataacttaagtttttgttatcattaggcagtgtccccttaatgttgagttcctttgttgtgtaatagtttgatatttgcaattggttttgtacagatagtaaagaaacataccagccagtagaggtttcagtttgagagcattcatcttttttcccttactggaggtaggatggaatcaaaacacacaggccttctgaccaggcctggggagcccagcatggacagaattactattcagtaaagctcctgccccagtgagctgtttttaccccagaccacagcttataggagctgcttttacccacgccgagccctatgctttctcaaaa

SEQ ID NO: 1842 - DNA, 758 bp, Homo sapiens
acacctacggctctttcatctgccgctgtgacccaggatatgaacttgaggaagatggcgttcattgcagtgatatggacgagtgcagcttctctgagttcctctgccaacatgagtgtgtgaaccagcccggcacatacttctgctcctgccctccaggctacatcctgctggatgacaaccgaagctgccaagacatcaacgaatgtgagcacaggaaccacacgtgcaacctgcagcagacgtgctacaatttacaagggggcttcaaatgcatcgaccccatccgctgtgaggagccttatctgaggatcagtgataaccgctgtatgtgtcctgctgagaaccctggctgcagagaccagccctttaccatcttgtaccgggacatggacgtggtgtcaggacgctccgttcccgctgacatcttccaaatgcaagccacgacccgctaccctgggggcctattacattttccagatcaaatctgggaatgagggcagagaattttacatgcggcaaacgggccccatcagtgccaccctggtgatgacacgccccatcaaaggggccccggggaaatccagctggacttggaaatgatcactgtcaacactgtcatcaacttcagaggcagctccgtgatccgactgcggatatatgtgtcgcagtacccattctgagcctcgggctggagcctccgacgctgcctctcattggcaccaagggacaggagaagagaggaaataacagagccg

SEQ ID NO: 1843 - DNA, 808 bp, Homo sapiens
ttttttacattctggaatcatttattaatccaactgggttacttttgaagagttttatggttagactaatatataacaaattgccaatcgttacaggtattacagagaacccagcaggcccctacgggcagagaacagataaagagcttatagactggttgcggctgcaaggagctgatgcaaagacaattgaaaaggtaaatttacaacaaagaaattcttatgctgttgttacacagctgctcagctcttaaggatctgatctttgtttcagattgttgaagagggttatacactttcggatattcttaatgagatcactaaggaagatctaagataccttcgactacggtaagagcctcaaaacagtttgtataagagaatacaactttttatgtgtgaatatgcttcaagagcagaaaacaaagggctgggcctccccccaaactctggagttctattaggttcaagctgggaaaaagccaaggtggggcagaaactgaaagccaggcagaagtcagaaataggaatgtgacagagaagagctggccaatctcctgccattaatgccctggctgggagtgggtggaggcacatggcaaagtgcctgcacgctggacccacccccttctttaaactgcagcctgccttcttgttcccgagtcatttgaaatagccagctctctgcaggtacgtacctctaaggccatgtcctactactgctgggacacgagcgtcacctccatatgtgaggagaatgtttttattttcattaggtttttaaattagggactgcagttttaagctc

SEQ ID NO: 1844 - DNA, 476 bp, Homo sapiens
gacaggtgtgagccactgtgcccagccccattgcaaataatttttgtcctgtagagttgtaatttatttttgtctggttggaaacaacaaacccaagtatccctgaaagatattaatcattaaaaatactaacattaagatagtattccagctttctttctgtcactgtgtataatgctagtctcttgcattttttatttcaagaaggtttattgtgttgcttgtttcctaattacataactaaacagaattttcacaactgctcattacatattagttttacggggcctatgcttcatctttttgaaaattatgctttgacataacatgttgaaaagcttttttttaaaagcgttaaaacaattagttcttgtaataggtcggatttgtgtgtggggggcagtgatagaaactcacattcacttaaatccctttaaaaagtgagtggggaaaattaattgggatcacatgatcac

SEQ ID NO: 1845 - DNA, 840 bp, Homo sapiens
tttttcccacagcagacgtcaaccatcgctttattaaggctgcgagtcggggggctgagtcatgcactccacagacacccccactgctcccaaggtccacttttggatgaccctgaaggcagagactcctgagatctgggccacaatctagggtgagccacccacagtgccctgctggacaggggggtatgcggactgcacggggggggccctcagcaggggtcttcctgcctagggtggggctggctccagtgggtcctggggctcaggcagggggggtggcagggaggcagggacatccccccgcccttctggcctatggcttttgttgccctattgccaccagcgcagaagcaatgtgctattaccgttgaggtgatgaagaagagccccgggagggagcaggcagctctgtgcctggggcctggccagacctcaggggtgctgtggccctgctccttgttccccctcagctcctcccagcaatgggtcttcctccagtggaggtcagtcactcagaagtggacccgcagcacatcttggctagcaaccggccgctggcaggctgtgcacgtcatgggcagggagcgttgcttctcacccaggcagggtcggcacaggaggtggccgcagggcagctggtacaccggctcctttttgaagtagggagaaaatactcttttgcaggaggcacattcggggcccaggatgctcccaggctgctctgtcgagcagtccatatgtgtcaggctgggctcattggtggctttcattttcttagcagtgtgctctgaggtagtgggtaagaccaaagggcttgtggcagaaaaacaggaagcc

SEQ ID NO: 1846 - DNA, 2241 bp, Homo sapiens
  misc_feature (1)...(2241): n = a,t,c or g
aaccgtcggtgggtcggggatcggtcgcctgagaggtatcacctcttctgggctcaagatggacaacaagaagcgcctggcctacgccatcatccagttcctgcatgaccagctccggcacgggggcctctcgtccgatggctcaggagagcttggaagtcgccatccagtgcctggagactgcgtttggggtgacggtagaagacagtgaccttgcgctccctcagactctgccggagatatttgaagcggctgccacgggcaaggagatgccgcaggacctgaggagccccgcgcgaaccccgccttccgaggaggactcagcagaggcagagcgcctcaaaaccgaaggaaaaccgaagcagatgaaagtggaaaactttgaagctgccgtgcatttctacggaaaagccatcgagctcaacccaggccaacgccgtctatttctgcaacagagccgcagcctacagcaaactcggcaactacgcaggcgcggtgcaggactgtnagcgggccatctgcattgacccggcctacagcaaggcctacggcaggatgggcctggcgctctccagcctcaacaagcacgtggaggccgtggcttactacaagaaggctctggagctggaccccgacaacgagacatacaagtccaacctcaagatagcggagctgaagctgcgggaggcccccagccccacgggaggcgtgggcagcttcgacatcgccggcctgctgaacaaccctggcttcatgagcatggcttcgaacctaatgaacaatccccagattcagcagctcatgtccggcatgatttcgggtggcaacaaccccttgggaactcccggcaccaagcccctcggcagaacgacctggccagcctcatccaggcgggccagcagtttgcccagcagatgcagcagcagaacccagagttgatagagcagctcaggagccagatccggagtcggacgcccagcgccagcaacgacgaccagcaggagtgacgctgcctgctcccggtgtgaccgcgtccttccctggccgacccgaagaagccttctggttgtctgccacttcctcctgttggactgcctgagagaggggaagagagagacctcggacctgcatgtcaagatggattttccccttttatctctgccctcctccactccctttttgtaactcccttacagcccccagacccttcttgaaacgagagccagcaagctgagcacagaccagcagcgacctcccttccagcccccagaaagctcggtcacttgagtgttttctagaatcctggggtgctcccgggccgctctcagagaagtggcaggtttcacgttcagccgtgtggcggatcgtgtggcttccaaagccttttacagcccccgccccccatcccgtggtctgtctgcaggaactctcccgtctgtgagaagcctctttccgagtcgacctcccggccaccccggccctgtgcctgctcggaagagctcactgccagctgcggcctggggcaccgcggggccatgtgtgtttgcatgaggaactctttagtggcagacacctaagagacggctgcggtcaccccacgcctccgcggctcaggagccgtcctgggtgcataggaccagtttctgtgacttttctccagttgggcatgttgacagacatgtttcccctcctcccaccctcattttctggtcctcgcgactgagagccaggggcgacatcatgaccttctgtcccggccgccttagccccgggcacagggaaggcagctgggccgtttctgtctgtgtcccatcctgctgtccttctgtcctggatgtttcatgggcccggggccccccagggaagcttacccctcctgtgctgggtggaggccacgggacacctcaggtgccacccaccttggccctaaaacagccaccaggaaagcagccggagagccggacagcaggcagcctgtctgggttcctgaggcctgggggtggcagacgagcccacggcgccgtggtcccagcagcagggttgtcagtcggagcatcctggggctccctggctcctggccgtctgtgaggtaggcgcagtaccgtgtatcgtaggtagcagtaggaacggtggccgccgcggccctgcagcgctcatggcggtgaggtgtgtgccaagcccacccggggtgcagggcgtgacgtgtggggaataaataggcgttgtgacctcaaaaaaaaa

SEQ ID NO: 1847 - DNA, 1573 bp, Homo sapiens
gcccagtttgcttcatcgggagaatagcaacaggtagacacatctcaaggctaaatctgctcatgtcgccactgctctcataatgacacacatgcagtaagaagacttttgtaaggggatttgagtacacccaaatgaaattgtgacaggatgtttgtatggttaacatctgatatcagaatgttaaaagtgccttctgtcttaaatctcaaaccaaatattttgtgtgttgaccttgggcagaagaagtgtccttccctcctttcttcaccgtcaggtagaaaacctgcactctgcagaagggtcctgtgtgatcacttaatcctctggttgagaagcagcagtaatgtttttgcttccaacctgattaatcattttatgttgaaaatagtcaatgagaccagtatctcttgagtgctttatttgccttctctttgaaggggaggggacgggctctgctctgtaaactcaaatgtgtagagtcagcaacaattccgtagcttccaactgactcagaattgatgcaacgtaggtcttctggcccgaggccaggtatcaagtccaaatcataatgaacttttcaccagtttcaaccagtttcttaaaagagagcttaagtcaagatttcatcaagacttgtgttttcccatgaatgtgaatctttcaatggctgttggagtatgtatgtactgttcttgcattctgaagtagttaaagaactctagaaagtactgattggccatctggtgtctatggagaaagaagtcctcacgtttgagggctgtacagtgaggccatcttgtagcagcgcatccagctctaccaaggcagtcctctggttcttttttctaagctacagtggaaatggcctaatggttaaaactgtggtatacatgacatcggttgtgctaaacaagttcctcgtgtcccaatatccaatggtttttcatcctattttgtatcaatcaacagagtatagttaaagcttgtcttgatgttgcattcttgcaaatgtcttcaactcttacctgagaaaacatggcaaaatggtcagccagacccttccagtttttcctttgcttttctaagcctcggggaaaccactgtttcagttgtataaaaacttttgccacattcctatggcccagtcgaattaatacccttttctcactgagagaggaacagtactgcctgtcataacagcattgtaatgccagtgtctcagtaacagaatcctggtgggtgttaattgggtgttttttgccctggagaattcagattcctttctatacctccgattctgcccagaagagggggggaatcaccagtgttacaaaattagaagattgttttgcctgttttagactgaatatttgaacactgcagcattactagccaccagtgttaaaggacagatgaggggaaacatttgtttttagcagtaattccatgcttcatcttttttaagtgatttgttccaaatgaagccatttattgacttgatgttcacaaatatcatttgaaagaaataacaggaattggggttagatgataaattctagggaatctaggg

SEQ ID NO: 1848 - DNA, 991 bp, Homo sapiens
  misc_feature (1)...(991): n = a,t,c or g
ggcggtggcggtggctgagcagaggacccggcgggcggcctcgcgggtcaggacacaatgtttgcacgaggactgaagaggaaatgtgttggccacgaggaagacgtggagggagccctggccggcttgaagacagtgtcctcatacagcctgcagcggcagtcgctcctggacatgtctctggtgaagttgcagctttgccacatgcttgtggagcccaatctgtgccgctcagtcctcattgccaacacggtccggcagatccaagaggagatgacgcaggatgggacgtggcgcacagtggcaccccaggctgcaaagcgggcgccgctcgaccgcttggtctccacggagatcctgtgccgtgcagcgtgggggcaagaggggggcacatcctgctcctggcttgggggacggccacacatagggtccagtttctgacctttgcccagtcacctcagcacaggcaccaaggcacctgcagagcagcgcctgggagatggatggccctcgagaanaacagagttagctttcacaagtcacttgatcagatatttgaaacgctggagactaaaaaccccagctgcatgggaagagctgttctcagacgtggacagcccctactacgacctggacacagtactgacaggcatgatggggggtgccaggccgggcccctgcgaagggctcgagggcttggctccggccaccccaggccctagctccagctgcaagtccgacctgggcgagctggaccacgtggtggagatcctggtggagacctgagcaggagccctgagtgctcacagccgcctctgacgcattgacacgtgagcactggctcccacggagggtgcgcctgccgccagcggccaagccttgctgccctgtctgctgattctgagaaatcccagaacagcccatttaccagttggggctgcagcctaagggnccgtnccaattganctttcccnttgtnggaggttcaagg

SEQ ID NO: 1849 - DNA, 622 bp, Homo sapiens
cagcagccaccgccgcgtccctctctccacgaggctgccggcttaggacccccagctccgacatgtcgccctctggtcgcctgtgtcttctcaccatcgttggcctgattctccccaccagaggacagacgttgaaagataccacgtccagttcttcagcagacgcaactatcatggacattcaggtcccgacacgagccccagatgcagtctacacagaactccagcccacctctccaaccccaacctgggccctgctgatgaaacaccacaaccccagacccagacccagcaactggaaggaacggatgggcctctagtgacagatccagagacacacaagagcaccaaagcagctcatcccactgatgacaccacgacgctctctgagagaccatccccaagcacagacgtccagacagacccccagaccctcaagccatctggttttcatgaggatgaccccttcttctatgatgaacacaccctccggaaacgggggctgttggtcgcagctgtgctgttcatcacaggcatcatcatcctcaccagtggcaagtgcaggcagctgtcccggttatgccggaatcattgcaggtgagtccatcagaaacagggagct

SEQ ID NO: 1850 - DNA, 1439 bp, Homo sapiens
  misc_feature (1)...(1439): n = a,t,c or g
ccctgacatgcagatttccacccagaagacagagaaggagccagtggtcatggaatgggctggggtcaaagactgggtgcctgggagctgaggcagccaccgtttcagcctggccagccctctggaccccgaggttggaccctactgtgacacacctaccatgcggacactcttcaacctcctctggcttgccctggcctgcagccctgttcacactaccctgtcaaagtcagatgccaaaaaagccgcctcaaagacgctgctggagaagagtcagttttcagataagccggtgcaagaccggggtttggtggtgacggacctcaaagctgagagtgtggttcttgagcatcgcagctactgctcggcaaaggcccggggacagacactttgctggggatgtactggggctatgtcactccatggaacagccatggctacgatgtcaccaaggtctttgggagcaagttcacacagatctcacccgtctggctgcagctgaagagacgtggccgtgagatgtttgaggtcacgggcctccacgacgtggaccaagggtggatgcgagctgtcaggaagcatgccaagggcctgcacatagtncatcggctcctgtttgaggactggacttacgatgatttccggaacgtcttagacagtgaggatgagatagaggagctgagcaagaccgtggtccaggtggcaaagaaccagcatttcgatggcttcgtggtggaggtctggaaccagctgctaagccagaagcgcgtgggcctcatccacatgctcacccacttggccgaggctctgcaccaggcccggctgctggccctcctggtcatcccgcctgccatcacccccgggaccgaccagctgggcatgttcacgcacaaggagtttgagcagctggcccccgtgctggatggtttcagcctcatgacctacgactactctacagcgcatcagcctggccctaatgcacccctgtcctgggttcgagcctgcgtccaggtcctggacccgaagtccaagtggcgaagcaaaatcctcctggggctcaacttctatggtatggactacgcgacctccaaggatgcccgtgagcctgttgtcggggccaggtacatccagacactgaaggaccacaggccccggatggtgtgggacagcccaggcctcagagcacttcttcgagtacaagaagagccgcagtgggaggcacgtcgtcttctacccaaccctgaagtccctgcaggtgcggctggagctggcccgggagctgggcgttggggtctctatctgggagctgggccagggcctggactacttctacgacctgctctaggtgggcattgcggcctccgcggtggacgtgttcttttctaagccatggagtgagtgagcaggtgtgaaatacaggcctccactccgttgctgtg

SEQ ID NO: 1851 - DNA, 1132 bp, Homo sapiens
ccgcctactactactaaattcgcggccgcgtcgactttttttttttttacatttcaaatatattttattactttccatcttagaaagaatatgaaacctgcatgcaatgctaatggtttctgacatgtacatagcatataacacagcagtacaatgcggcatatactggggggcagtgtgtggagggggcgttcttaagggtatatgtacagaggaaagggcgcatgggtcatcttagctttcgaaagaggactgcactgtttaacattgaaggaattacatggggaatcacaaatatattgctttagtactgcatgttatgttgtggtgagggaaagaaacatgctttgaaggttttcccttgtcaacagaatgtgtgtctgtagctgtgtattgcgcatgtattcatatatttttaagttttctcctaaggtttttgctgacagtgttgggaacctcacatgcttctgaagcattaaaatattgaacctgtgaacctttcagaaatcctcaggttgggaaagaccccacaccttctttaaggatcatttgtctcgccatcacaggatcttggaaatgtttcctagggtgtgtaaaaattaaccaggggggaatgaagcacatttttctggcaaccaaacttgagttcctcagagaacagatgcagagagacctgctcctgcttgccccggctacaggggcccactgtggaagtcacactgaggctgtgaccggccataagccccaggagagcccgtggcagctgtgccgaggcgcccaggacctctaagcggaagcttcccaagctaggaatggagcaacactgcaatgaaatgtgtccaccaagctcattgttcctcccgggcgcttataaagctcagatgtatagtgacgtatggacaaatacaaaaaagcattttttaaaaaggaaaggcatgagttttcccctttttgataaaaagcagcctgtgatgaagtctggagcacaagagagatgggtctcccatctggaagcctttcgcacgcagctataaaatgtaaaaactgaccgttggtaaaaagtgcttcataacaatatataatttgtgtcttatgcctgtgagaaagaaaggcttttttttttttttttttt

SEQ ID NO: 1852 - DNA, 406 bp, Homo sapiens
  misc_feature (1)...(406): n = a,t,c or g
gaaaggtactacaaattcaaaagatttcacttttaacactggcattcctgccctacttgctgtggtggtcttgtgaaaggtgatgggttttattcgttgggctttaaaagaaaaggtttggcagaactaaaaacaaaactcacgtatcnnnnnnnnnnnnnnnnnnnnnnnnnnnnnnnnnnnnnnnnnnnnnnnnnnnnnnnnnnnnnnnnnnnnnnnnnnnnnnnnnnnnnnnnnnnnnnnnnnnnnnnnnnnnnnnnnnnnnnnnnnnnnnnnnnnnnnnnnnnnnnnnnnnnnnnnnnnnnngcattactcttgagaagtagaacaaggcacttcagtcctattcaacatagtactggaagtcctcgccacagcaatcaggcaagagaaagaaataaaaggc

SEQ ID NO: 1853 - DNA, 657 bp, Homo sapiens
ggctttctgtatgagcccaatagccaagggtacaagtactaccgacagaagctggaggagttccggaaagccaaggccagctccacaggcagcttcacagcacctgatcccggcctgaagcgcaagtcccctcctgaggccctgtcagggtccttacccccagccaccacctgccccgcctcgtccacgcctgcgcccactatcatccctgctccagctgcccccgggaagccagcctccgcagccaccgtgaagaggaagcggaagagccggtgggggcctgaagaggataaggtagagctcccacctgctgaactggtgcagagggacgtggatgcctctccctcgcctctgtcagttcaggacctcaaggggctcggctatgagaaggggaagcctgtgggtctagtgggcgtcacagagctttcagacgcccagaagaagcagctgaaggagcagcaggagatgcagcagatgtacgacatgatcatgcagcacaagcgggccatgcaggacatgcagctgctgtgggagaaggcagtccaacagcaccagcacggctatgacagtgatgaggaggtggacagcgagctgggcacctgggagcaccagctgcggcgcatggagatggataagaccagggaatgggccgagcag

SEQ ID NO: 1854 - DNA, 1761 bp, Homo sapiens
gttgaaagaaggctctggttttgaaggcctagatagcagcactgccagtagcatggagctggaagaacttcggcatgagaaagagatgcagagggaggaaatacagaagctgatgggccagatacatcagctcagatccgaattacaggatatggaggcacagcaagttaatgaagcagaatcagcaagagaacagttacaggatctgcatgaccaaatagctgggcagaaagcatccaaacaagaactagagacagaactggagcgactgaagcaggagttccactatatagaagaagatctttatcgaacaaagaacacattgcaaagcagaattaaagatcgagacgaagaaattcaaaaactcaggaatcagcttaccaataaaactttaagcaatagcagtcagtctgagttagaaaatcgactccatcagctaacagagactctcatccagaaacagaccatgctggagagtctcagcacagaaaagaactccctggtctttcaactggagcgcctcgaacagcagatgaactccgcctctggaagtagtagtaatgggtcttcgattaatatgtctggaattgacaatggtgaaggcactcgtctgcgaaatgttcctgttctttttaatgacacagaaactaatctggcaggaatgtacggaaaagttcgcaaagctgctagttcaattgatcagtttagtattcgccgggggaatttttctcccgaagataccccatagcgcgagtttttgtaaattataatatatgggctttgcttcacctctgggtcatgattggttctggttgacttaccacaccggaaatgcaccacgaccaaccatatgggcaaatgaaccagcccagttgttgcagtgattggttgtctttttctagacttgggatctgcaagaaggccaattgcctaaaatttctgagaacagtgccacaagattattttatcactacaagcttttaactttttaagttattgtacaagtattctacctaaatcttccaatttcctttaaatggtaagagtttctaaaacagacaataatttaacaagctcagctctgctttatctgagtttagtggtcctaatatatatgtagagaaagatggtggggttgttcacctctgtacagaccatctgtatgttaggtgacattgattatgggttataatcagggaaactaattgtatttagtgacaaaaataaaaagttttttttttataattcagtctgcttttggattttcatatatttaactttgcaaaaagatttactttgtacatgttacaggcttgattggtgtaaatctttttataaatacataaataaaagaaaaatatgcatttttcttttctaaaataatggtttttcatccccattaaacaagacctttccagacggactttagtgagtagagccagacagaaagcagctgaagtcacttgtaagtaattcttagtgtttgccacttcttcccaatggatgctcctgtcttcccctttccagctccctgtgctgtcttccttggattcttactcactcattgccttccttttctccagcctatatgttgagttagctcgtgatatgcataacccctgcttgtagtgtttaggaatcaaacctgccttagcaacctatgcttttttaaggtactctagtgcagagatattattcgaaatgagacattttctttgaaaatgtccattgtattgtctcctttatattgggccaatgtat

SEQ ID NO: 1855 - DNA, 1472 bp, Homo sapiens
tttttttttttttttaattacttctttttattagacagttcaaattaagcttgaagaacaggaagcaatacaactcaactattgaaatacaaatagttgagcttaatttattcaacaaaatttacccaatatatcagtgtacaaagcatgctgctgggctgggcatcaggcgtggcacagcaaacaagacagactgactcaaccctcagggggcttacattctaatgcagaaagcagataatttcagtttggatacataatacaaattatcaaagcaaggcgcaaagtattttaaaaataaggggtttgggaggccaagatctgacctattctgtagaaggactccttaggaaagtaacagttgagccaatctaaggatgctagatattcagtaggtcagtggaaaaaatcagtggttctcactgtggtcagtgggttattggtggtttcataataactggggactactcccagcactgagtggatgcagccagggagaacgatgtcctgcagtgtgtgggttagtgccacacaacgaagaattattctgtaccctgtacgactgtctaatgtcctgctggacatttaggtaggacctacagcttgtccgagagagtaactcatttgttttctctgagacaatctgtaatttgtcttgtcctattatccttaagtaaggtaatttcgctctttcttttcccatatacagattatgtacatagtctgttttgtctttaccctaacactggttttcattctagtgtcccccacccgtctagtttcattttcctgtacttgtttacaggaagtagcctctaatcggctcttaaatccaaacctactcattacaaggaagagtaaacatctgtctgtttcaaacagcgtagtcatgcctgagcgtttacataatgaaattcatcttcttttcattataaatttcttcttttctatttctccttaataagagagttagggcattaaattgatttttttaagaaattcatgtgtgtaagtagattgtattatctatgagtcatttcaggtcagcaaagagaatgttacaaaatatctgctctgaaaaaggtgaatagatctgatagggtttgtggttgtcaccgtgactgggcgtgggggtgggggcgctactagcatttagtatgtgagagccaagtatgcagaacatcttgcaatacattggacagttcctcacaataagaaattactctgcaccctatacgaattttgaatgtctcactagacattcatgtatgacctatagctcgtctgcaagaatatatcctcattttctccacttcgacaactgtacattttcttgcatagtatctttatttcaataaaggttatttcgttctttctcttatatacaaataagtattgtcatatgcaaagaagttattgtatccctagtttttattctaatgcccactgatatccctgcttttacattttcc

SEQ ID NO: 1856 - DNA, 197 bp, Homo sapiens
gcctgtaagtaaatcagtagttcagagctgtgtaacctttctccctattatttccgtgggtgttcttttgtaatctcctttgtacttccaaatttgaaaacgttgtttagtgttgtaagatgcattcagataacctcaaagaatggtaactattttgactttcaaagtagttctagcgtgagccaccacgcctggcc

SEQ ID NO: 1857 - DNA, 431 bp, Homo sapiens
gccccactgagcccgggttctggaaaccgcgcctttggaggtctccacctggcgactagcttggccacaagatgcacgatgcaaggagagcctgctcagagcgcaccctcctggagggaggggcccggctgccagcgaagagagtggggtcaatagctaaggccaaaccccccagcgacaagccccctggcgacaggcacccagggccctccagcccaagtccgcctctaggtgttcttgttggtgtgctggcacagagcctccaatggggcagaacggccacccccgggaccagtcatacacagatcctggcaactaacaaccactgccgtttccaccgaccaagtcttggggtggtctgtcatgcagcaagagaccatggacgtaactggattcctgcctcactcagacacggtggtgggagaatggtg

SEQ ID NO: 1858 - DNA, 1143 bp, Homo sapiens
gatttcttgtgacaatctcgtcctggaaatcaactctctcaagtaagagcagcccctccctgttctcctcggggtgatcccgggaaggtagaggctttctcgtaagtgttttgtctccaaataggaacctattccttcgacatcccaaatggaaagaccagtagtatttggagcaaggagagcattattaagttctagcctcagcatagactttctccttcctaaaccctccccttccatattgttccatccagattcctctccaatgtctatcaaagtcatagttctaagcctgctgaaaggccagtgaaggccctggtgtcaccccagtctccccacaggtatgcctataacataagtctaaaggaggtgatgcaggtactgagccacgtggtcctggagttccccctgcaacagatggattccccgcttgactcaagccgctactgtgccctgctgcttcctctgctaaaggcctggagccctgtttttaggaactacataaagcgcgcagccgaccatttggaagcgttagcagccattgaggacttcttcctagagcatgaagctcttggtatttccatggccaaggtactgatggctttctaccagctggagatcctggctgaggaaacaattctgagctggttcagccaaagagatacaactgacaagggccagcagttgcgcaagaatcaacagctgcagaggttcatccagtggctaaaagaggcagaagaggagtcatctgaagatgactgaagtcacactgcctgctcctttgggtgtgattgagtgccctcctggctcctgggctgggacaagtgaggaactagctgcagagggatgagtgaccaccatccaggctgagactgaaaggagcagaggctggaactacagtattctttcccctgctagcaaccatgtgcctcccatcctgactgtggagttgggatgtggaagtggggctggaacaaagcttctgcctagggaggagctaagcaggcccggcagttggaggaaggccagaggaacagctttgtgctccggctttccctcagggaacagcagagagcagttggctctttctgctgcttgtatatgttaatattaaaagagagagtggtgtaaaaaaaaaaaaaa

SEQ ID NO: 1859 - DNA, 526 bp, Homo sapiens
gtccaatcctcaatgcacagggcttagttcaaaatctaagctgtttctgtagtaagcagccaaatgggaaagatcccttcgttttgaatttgatgagaatgggcttggaaatccacacccaccggcttgcacggaagaggactcagcctcttcctaatggttcaacattcaattcctgaggaaagtgctgatagtattagttccctacatttccctaagactcccatccaacccctagtgctactgaagagggtttgggaaagcaattggagttccttagcttggatatatatagtacctgtttttttcctctggaaaaaccaaagtactttagtgagtcttacaatcttaaggcattttgtcccctcactgggtcccgagaggcagggaggggctaggccttgagctaggagcaaggacatgggccgccaggcctggttgttactagctgtgcaaccttgggcgagcctcttcgctttgctgggcctcaggttcccgagtggaagactgggggtcagaacagctg

SEQ ID NO: 1860 - DNA, 617 bp, Homo sapiens
ttttttttttttttttttcaagcaaaaaatgtttttccttgtgttttgtacaaaaagggggtgggaggtagttccgtgtgctggtggtgacggcatccacggggctagaagtgggcggtgacgcggtccgtctccagcaagtcgtccaggattatgtctggtgtggtgccgatcttcttggctagctcgctgcgctccatggtgctcaggtacaggtagcggttgagcagctccccatccagcacgttgcgcacggcattctggagggtgcggcggtccacgtgcagcatccggaaggcgcgggggttgaggccggcgtggtgtggcagcatggtggtcagcgcgttctgcagcatcagcagccgccggtaggtcttctcctgcatgggcagcagcagcccgatgccgccgtccagggtggcaaaccacgtgatgtgcttattctcccacacgaccgactttttgctgagcccttcagtggccccccggcacggggtcctccagaacgtgttcacgtgggcacccacgtggaagtctgcccgacgcagcaggcgcatgcccccgaaactctccttggcttcgggcaggtacatgtacaccatgaggttgcggtcgcg

SEQ ID NO: 1861 - DNA, 1686 bp, Homo sapiens
gttaggaaatagaggttccaagaacctttcccaaagcccaggagctgtgccccaagctctggttgcctggcgggccctgggaccgaaactcctcagctcctcaaatgagctggttactcgtcatctccctccagcacccctctttcctcatgaaactcccccaactcagagtcaacagacccagcctccggtggcaccacaggctccctcctccatcctgctgccagcagcccccatccccatccttagcccctgcagtccccctagcccccaggcctcttccctctctggccccagcccagcttccagtcgcctgtccagctcctcactgtcatccctgggggaggatcaagacagcgtgctgacccctgaggaggtagccctgtgcttggaactcagtgagggtgaggagactcccaggaacagcgtctctcccatgccaagggtccttcaccccccaccacctatgggtacatcagcgtcccaacagcctcagagttcacggacatgggcaggactggaggaggggtggggcccaaggggggagtcttgctgtgcccacctcggccctgcctcacccccacccccagcgagggctccttagccaatggttggggctcagcctctgaggacaatgccgccagcgccagagccagccttgtcagctcctccgatggctccttcctcgctgatgctcactttgcccgggccctggcagtggctgtggatagctttggtttcggtctagagcccagggaggcagactgcgtcttcatagatgcctcatcacctccctccccacgggatgagatcttcctgacccccaacctctccctgcccctgtgggagtggaggccagactggttggaagacatggaggtcagccacacccaactggctgggaagggggatgcctccctgggcccccttgactctcagatctcttcccagagaagtcagctccactgtcgtatgcccaaggctgggtgcttctcctgtagattactcctgaaccgtgtccctgagacttcccagacgggaatcagaaccacttctcctgtccacccacaagacctgggctgtggtgtgtgggtcttggcctgtgtttctctgcagctggggtccaccttcccaagcctccagagagttctccctccacgattgtgaaaacaaatgaaaacaaaatttgagcaaagctgacctgggagccctcagggagcaaaacatcatctccacctgactcctagccactgctttctcctctgtgccatccactcccaccaccaggttgttttggcctgaggagcagccctgcctgctgctcttcccccaccatttggatcacaggaagtggaggagccagaggtgcctttgtggaggacagcagtggctgctgggagagggctgtggaggaaggagcttctcggagccccctctcagccttacctgggcccctcctctagagaagagctcaactctctcccaacctcaccatggaaagaaaataattatgaatgccactgaggcactgaggccctacctcatgccaaacaaagggttcaaggctgggtctagcgaggatgctgaaggaagggaggtatgagaccgtaggtcaaaagcaccatcctcgtactgttgtcactatgagcttaagaaatttgataccataaaatggtaaagacttga

SEQ ID NO: 1862 - DNA, 1721 bp, Homo sapiens
tttttttttttttttttttccacaaatcattggtttattagaaagttcctttccctcattttacagcatatatatctctatcatatgtgataaagttaaatacaatctgttatgcttgtaagtaaggtttatttttatttttacttttaaaatcactattctggaagttaaagaaaatgcccctaggaaggcaaagaggcagccagagtatggctcaatctacaagctaatgggaagcagcacgaaaatgttaatactgtattatttatttacatgggctgaaagcaaagaaaaatgagtcccttcacttacacagatgatttcatttttccagtgctagttatccaagaagtgatgcttctgaatcagatgagtactgaacaggtaggagggtgggagggcagtcaagagttgtgtttgcctgccactttcttttcataaactttactcttttgagaatttgcgaaggcaggaacagagccttggcccaggtaagtatggtttttcttgtcaagtgaccaaccaaccaattctagccacacgaatagttaggaaaatgccaaagtgggaattgttaacctcatcaaaggagatgggacctgcaacacaagcacctttgggtcagtgtgttaattagggctgagagcctgggtgaaaggcaagaagaggggcaaaagaggctgaggtggtaattcctcttgtcagtgtcatgggagaaaagaaacaaggaacgtttactgtctaaactgagctgggcagagggcatggaaactatgaagcaaaatatctgtaaatgtgctcacctcccaacaaaaggaagactgtcccaactcatcctccagcctacttctacttccgtttctaccaacccaaaaggcacattaaaaaaaaaattgtcagagggggctaagtactaggaaggcaaatggactgactgcctggaacaaggtacccagggaaacccaggaatccccccagacaatcaccaaatctcactgcttccagacaataaagctgttgaatcccctccttctcctctgtggggtctacctgtttctctgtgtaaaacagcaaaagtacatgagggagactgttaaagatgagcatccctcagaagcaccccagctgactgctgcccattagctcaaaaatcccaatactgggggcacctacatactgcaaattacttaacattttgtcccagcaaaaaatgttttaacattttatagttcataacttcaaaaaatacataagtttggtaaaatatacatgcttagtcagttttgcatctagcagaaaacaaatattttattttttgttttcattttataacctttagagtttcttaattcaactagggcaaacatatttacacaaagccaccagaacgaggatcacttaaagagctggatgtaaaaaatattattgcagtatactacaaatatggaaccttttttatatgagctacaaaaagcagcatttacgtttatagagttcagtgcaattttttacattaaaaaaatcctataaattaagaaggaaacatcaacacaacagaagaaaatatacccttcactttagacacatgagctcctctctgggccatacagcttttattcatgataggatcttcttttctgggatatggagatgcctcttctgggatgagggataccaagataacagtgccaaatgtgtggctccgttgctcgtgccgaatt

SEQ ID NO: 1863 - DNA, 368 bp, Homo sapiens
gcattcacctctgcccagcaggacaagatgatgaaagtacagagaacttgtgggtctaggtttgtgtcagaaaggaggttagtggcttgcttagggccaggcagagggcacattggaaggaattctctgttcccggtgacagcccttggaattgctgtgcacccagagttgcggagtaatttattggcttctgataactatagtattggataacttcccaacattttattaaaaattttaaacatatagggcatgttggaaagaatttaatactcaccacctaggatttttgccactatccacatatctgtggcatcctattaatacatttttaattattatttttttgaggacgagtttcttttact

SEQ ID NO: 1864 - DNA, 903 bp, Homo sapiens
ggtgaaggccatgcgctcttcctgggaaagttccccgaaaggagaatctgtggctacagtgtgagtgggggtcctgctcctttgtgtgctcaaccatggaaaagttctttgagcatgtcactcagcacctgcagcagcacctgcatggctctggggaggaggaggaagaggaagaggaggatgacccacttgaggaagaattctcctgcttgtggcaggaatgtggcttttgttctctggacagttctgctgacctcatccgccatgtctacttccactgctaccacaccaagctgaaacagtgggggctgcaggctttgcaaagccaggctgaccttggcccctgcatcctggacttccagagccggaacgtcatccctgatatccctgaccacttcctgttgtctgtgggagcactgtgagaattccttcgacaatcctgagtggttttatcggcatgtggaagcacacagtctgtgctgtgaatacgaagcagtcggcaaggacaacccggtggtgctgtgtggctggaaaggctgtacctgcaccttcaaggaccgcagtaaacttcgagagcacctccgcagccatacccagggagaaagtggtagcctgccccacctgtgggggcattgtttgccaacaataccaagttcttagatcacatccgtcgccagaccttcattgggatcagcagcacttccagtgttctcactgttccaagagatttgccacagagcggctattgcgggaccacatgcgcaaccatgtgaatcactataagtgccctctgtgtgacatgacctgcccgctgccttcctccctccgcaaccacatgcgctttcgtcacagtgaggaccggccctttaaatgtgactgttgtgactacagctgcaagaatct

SEQ ID NO: 1865 - DNA, 529 bp, Homo sapiens
  misc_feature (1)...(529): n = a,t,c or g
ggcctcatcagccctgctttaatacctgagcagcaagaggttacaggtggcttctcctccctcccaggggacctcagtaggtagaggagagaggaggcacacagtcaggggaccctgaggccagagccacaccaggggattctgctgccccagtcccttcccacaggcttgtttgtccattgacaggaacagttgcacgtacaaaatcaactttgctttcccatcctctgtaaaatgtagtgcccagcctctttattatgcattttattactcccatttagaattatattgctatcaggaatgggtttctttggaggaactgggagcggaagaaaggctgtgtcccacgatatgtgatcctgtctaataaagtggatgatcagacacaaagccaagttcatcttcccaccttggggccaccacagagccactggtaacccctttttctgaaggaacgcattgaggccaggcatgtgcattcccctgggctgctctctgacccaggatcaactcttcccagaantgctca

SEQ ID NO: 1866 - DNA, 1622 bp, Homo sapiens
  misc_feature (1)...(1622): n = a,t,c or g
ctatttatgacatcttttgaggcagctccagtgccttgacttcaatcccagtttccggttgcagcatccttgttgtcttagcaacacagtgaactattctgaagcatagagtaacacgaaactgggagtccgagaaataatcatctctgcatcacattatgggagacgaagtctgctttatccattttatctttattcagttgtctatgattaattgattacagagtagtagattagaatagtgcatggatatacatttgtgttgaaaaaaggggaagttgatatatatcaatcttagttttcatttatcagtttgatattcatgcatttacactaaacgcttccatttatcccgaaaaagtatatgcaactgtattctgtaggttgatttttggaaaaggggagaagcacactgaattcataaggtcacatgtagtcttaaggtcttacttgcttacagccaattaaatttgaagcaccttatttatacttgttaaaggtaaaacccaaaagaacaagcagaggacattttaaggtcataaaaggtaaataagcttaccttcttaatgttttcattctctttttgtataaatcagaaaatgatctaaactgctgtaacaaagagaccccaaaatatgatggctcatgtaagataatttatttttttctcacatagcaatccagaagtggcttcatttcacaaggtattcaagggatataggagtcatctaccttgttagttctcttaatacccaaggggtattgttctttccatggtcaaagctgggctcaagacttcctagcctgtgaaaaaagaagaaggtggagcaagccatttcctttttaggaaattacagccatcacttctgcccaccgtccattcatgaatacttactatatagctatacctagcttcaagaaagcctgggacgtgtctctaactagatggacatgtgccctactaaaactccagggaaagggttctattactaaagctaaaaagaggggaatgaatactagagttaaagacaaaaatgatagcagccaatggcccatgccgtgataatctgctgagcaggcatgatggagatcccttgcccagcagaaagtgttccttggtgaaatcatgaatctgctatctaggagaaactcccttgtccattgtcttcttgtggccactagtttgacctctaggaaagtcttgctcgtcagcttcttgtggcccccgtcttgaaacttttgagggacatcgcaggtttttggagnccctgattggttgggtgcaggacttttagaccctagattgccttagagactttgaaaaatattccgctttttatttgggccgggggttttaagttccaatttggctttggnaaataaaaggactnnccaaatgcccgnnttttnaannnggntttggggctttggtttgaaaaanccttttncnaaagganttcaaacccctttcccccctcccctncccccnnnaattggnttggnaanaaatcctttnggggaaaaaagnttttgnnttgggaaagggaaaatnggggnggnccccccccccccccnnnggggggccccccccaggggaaggggnanggggnccccaaaacaca

SEQ ID NO: 1867 - DNA, 495 bp, Homo sapiens
gcggggcccaagatggcggccagccggtaccggcgttttcttaagctctgtgaggaatggccagtggacgagaccaaacggggccgggacttgggcgcttacctgcgacagcgggtagcacaggcctttcgggagggagagaatacccaggttgcagagcctgaggcctgtgatcagatgtacgagagcttagcgcgactccattcaaactactacaaacacaagtaccctcgccccagagacaccagcttcagtggcctgtcgttggaagagtacaagctgatcctgtccacagacaccttggaagagcttaaggaaatagataaaggcatgtggaagaaactgcaggagaagtttgcccccaagggtcctgaggaggatcataaggcctgagctcaggccttacctcgtgcacatacctaggtgtggagtcttgtacattgccatcgtcaataaaactgccccagtttccccttgaccttacggtttgggaat

SEQ ID NO: 1868 - DNA, 1507 bp, Homo sapiens
ttttttttttgggtttgggctttatttattttgtcattccataaatacggtggctgtgtcgcggtctgagtctcgtttggaagctcgaggcataggacagtctctgcctgggtagggaatgcagttagctgaggaaccacggtaggttttaaaaaaaaagactcggggagagaaatagcacattatttacatgactggacaaggacagaaggtgggaggaagcccctgtcactccttgggacctgggatctgagcacaaagctgagtgggaaacagtggggggctgagctagaaatcacacccccacccttgctggcaggggcagggaccccagggggattgactctgcagtttgggagccacaaaaagcgtagcggtcgtgatttctagctcagcctcccaccgtcttcctcctacacaccaatgatgagcctcatgccagtgaggcccggagcgcttgggaggggtcccagtggggcaggcccctctgtctggccacccctctgtcctggccccggaaggccctgtggtcatgtgctcctagctgcacggtggctgctggcacaccacggcaagtggcagcaggggccggcctgtgcacaaggatgcactcctctcggccctgtagaatttctctaaagccgcccgccagcccaggccgctgctctgcaccgagctggtgggcttgggttttgtggagcgcatgcttggaccctttcagtaaggaagggtctttgggattttctgtgcccatgacttgggggctgcacccccacagcacccccacaatgtaggaaaagacctcagggaacctctccctggaaagacgggcagggctggttagcccctcccactgcctgacacctgggacaggctgggcagaggggagagagggcaggacaggccagagtgacgcccccgtgcagcttgggccggagggcaagggatgccagtaagtctgcaggtgcggggtgccacctacaggcccaggcctgtgtcccaagcagtacccaggctttgcagaccacgcggggcagggctccactgaagccacccccacccctcgccagctagctccatagggaagcctgtgtctcctgcccccagggcgcaccctcagtgcaggcacctctgttcccgctttgcccctggaggagccactattccagaaggctccaccctgccgtcctgcgggagactgctgtccagtcctggccgggccaaggcctgggaaactgtgaaagtcagaaaggccagcggggagagcctggggcgaggggaggagggggatcagcttctgctattaccgaccccacttcatgctgcacctggcgcctagaactcttgcccctcctcatagaccaagtcccgggggtctccactcagtcctgctgcctgcttcaccagaagcagccctgtgagtgtggggtggggaagtcccttcccaacggaggtcccagcctatggccctgggcccaagtgggggtcgcctgcttccttcccggac

SEQ ID NO: 1869 - DNA, 1103 bp, Homo sapiens
ctgagcaaccctagtgacaggagccgaagcagcagcgcaggtatgtccccgtttcccctcccccttcccttctccggttgccttcccgggccccttacactccacagtcccggtcccgccatgtcccagaaacaagaagaagagaaccctgcggaggagaccggcgaggagaagcaggacacgcaggagaaagaaggtattctgcctgagagagctgaagaggcaaagctaaaggccaaatacccaagcctaggacaaaagcctggaggctccgacttcctcatgaagagactccagaaagggcaaaagtactttgactcaggagactacaacatggccaaagccaagatgaagaataagcagctgccaagtgcaggaccagacaagaacctggtgactggtgatcacatccccaccccacaggatctgccccagagaaagtcctcgctcgtcaccagcaagcttgcggggtaacctgagcccccctctcctccccttcctcaaccactggacgtttatatattataggcagggatgaaatgggcacctagtcagatcttctcagcttgctagccagaaatgactgtgattctgctgggggctgctgagaaggtaatgtaggttgaaaaggggctctaagtttatttatttcgttagattgacacttccacacactccctgtagtccaggtagggcccagaaataggaaaggctaggattggataatgctgcaaatgctttttttgtgtgagaaactggagagatgtgatttctccttttgggagagaatgtcccaaaattgattaggctgagccttgggaatagtttggcaggtttaacatcccaagggttaacctaacgtagttgggaaaggtagattgaatgagacatgttttctgtgcttctaagtgttctgtcccttaggctgctattgcttcatgtttccattatggcaggtttagagaatccttaaaaagaaaaattgacttgcttgcctaaaactacagtgcccccttagcctccattacttagtatctcttacagtttgctctggctctcaaataatataaagattgatgaacattaaaaaaaaaaaaaaaaaa

SEQ ID NO: 1870 - DNA, 843 bp, Homo sapiens
ctgccagcacttaacttttccccctaccctgctcctcctcctccacagccgtctttctctttgcctcagccacttccttccttcgcctcaccctccccagtgcactgaagaaggtaaccgggtccagacccacgcggcgccagttcttccggcgggaaggaaaaccgcgcagagaggcagcaatgaatgtggatcacgaggttaacctcttagtggaggaaattcatcgtttgggttcaaaaaatgctgatggaaagttaagcgtgaaatttggggtcctcttccgtgatgataaatgtgccaacctctttgaagcattggtaggaactcttaaagctgcaaaacgaaggaagattgtaacatatccaggagagctgcttctgcaaggtgttcatgatgatgttgacattatattactgcaagattaatgtggtttacatatctttatgtactgccattttttgtttctggtaaactggaatataaagtgaaagaacaaacatttgaacatacttaatgtatttttatagaactttgtaaacgaaaggagattcatgttttagaagtctgtccttttttatatcttgaaagaaaatctatgtatgatgctataaaataaatcctattatttttctcaggaatctggttaggaattgcaggcaatgagattttttgcggggcagggatgggaatgtttgttcataaataattagacattttctatagatatttgacattctgcgaaagcaacaagcaaactgaagaccaactcctatgagaaatattatgatgtttatgtaataaagacatgtaactgtcttaaatttaaaaaaaaaaaaaaaa

SEQ ID NO: 1871 - DNA, 566 bp, Homo sapiens
  misc_feature (1)...(566): n = a,t,c or g
cccagatcccctggtgtcatggacttagtctttgccagcattctgtccatgtgttctctggtcttctctcacaatgctgcatccctgtcccatttttagggtccctgtctatcactggatgctgcagcttctgttcattactgttagtgtatcattcttcatgcctctgtttctgtgatggtctcatcatatgtgaaccatttgacctggcgtattgtgtactagtcaccgtcaccatctctccatatgtatctccctgtatttcgggcccattccctctatgtcaagagtaaatagaggcacagagactgatgagaaacgttcataacatgaaggtaagactcagggagacagagactttgtggaagtatctctgagggagtcccagacacaggcagagagggccacatatcgtgtgccagatgctgagagactgagagggatgacaggcttaggggaaaactcagagaggagagatgcacattcctagtgaaattgccaggctttcagcatgctggagggaacagaaaaggcatgggcctgaattcaggctgcaaanctgctct

SEQ ID NO: 1872 - DNA, 2342 bp, Homo sapiens
cagtgtacccttagtgaccagttgctacccaagcattgtgccaaaactatcagtcaagcagtgaataagaaatcaaaaaagcagactggtaagaaaggggaacctgaaagggagaaaccaggtgttgagagcatgaggaaaaacaggctggttgtgaccaaccttgataaattgcacactgcactttctgagttatgcttctctataaattatgtaccaaacatggtggtatgggaacatacctttaccccacgagaatatttgacttctcatctggaaatacgctttaccaagtcaattgttgggatgactatgtataatcaagccacacaggaaattgcaaaaccttcagaacttctaacaagtgtaagagcatacatgaccgtactccagtcaatagaaaactatgtgcagattgatattacaagagtatttaataatgtgcttcttcaacaaacacaacatttagacagtcatggagagccaaccattacaagtctatacacaaattggtatttggaaactttgttacgacaagtcagcaatggccatatagcatattttcctgcaatgaaagcgtttgtgaacttacctacagaaaatgaattaacattcaatgcagaggaatattctgacatatcagaaatgaggtcattatcagaactactaggcccatatggtatgaagtttctaagtgaaagccttatgtggcatatttcatcacaagttgctgaacttaagaaacttgtggtggagaatgttgatgtgttaacacaaatgaggaccagctttgacaaaccagaccagatggctgcactgtttaaaagattatcatctgttgacagtgtcttgaagaggatgacaataattggtgtaattttatccttccgatcattggcacaagaagcacttagagatgtcttatcctaccacattccttttcttgtaagttcaattgaagattttaaggatcacattccaagggaaactgatatgaaggttgcaatgaatgtgtatgagttatcatcagctgccggattaccttgtgagattgatcctgcattggtcgtagctctttcttcacaaaaatcggaaaacattagtccagaagaagagtataaaattgcctgccttctcatggtgtttgtggcagtttctttgccaacactggccagtaatgtgatgtctcagtacagccctgctatagaagggcattgcaacaacatacattgcttggccaaagccattcaaccagattgctgcagctttgtttacaattcacaaaggaagcattgaagaccgtcttaaagaatttctgggcgcttgcatcctccagtctactgaaaattggccaggagacagataaaactacaacaagaaatagagaatctgtttatttactgctagatatgattgtacaagaatctccattccttacaatggatcttttggaatcttgttttccttatgtcttgctgagaaatgcataccatgctgtctacaaacaaagtgttacatcttctgcataaaattacctacttaatcaagataagcacgcatttttgttgccttggttttacctgtagactgtggaactattttaccttaagacctgaaaaagttttgtggattataaatttctttcatacggttgtattttctgatcattggtttcttaatatggttgtactacagtatacttggttgatttaggttgcacattcactgaattcactgagattattcctataattttaaagtatcatttatttgaaaaacatacattatcaacatgtttttgatatttgataatgaaaaaaatctttgcttgtttatttctgaaaaagaactgtatttagtgattattttagatagtgatattatagcattcatctgtgtgtaaattatttcatatagggaagagttctgatctgtacctatggttcttattgaaaacaacattggatgtgcatttctgtgatgttatgaatacatttctactttattttgaaacatttgccaaactaaatactgtaacactgtataacatttaaaaatgttaaagaactgcttagtattagaagcagatcatttcccaaaattctaagagcagcagcatatgttgttgcttgtataaagcctagcgataatttttagactaacttccatggtgccctgttggcattagcactaccattgtaccctgctgtataataaacaatcttagacatttatcaactgttgatacaaatgttagtccctaaccactttttatatatgttttaaatttttgaaattcaagtgtaccttccataacataaaataaacactagactgtaaaa

SEQ ID NO: 1873 - DNA, 857 bp, Homo sapiens
caaaactttttttattactctctttttttttctgggttgggttttttcatgggtttttgtcttgtttatttcgaatactgaaaaagtcctttgggctctgtggggttccccacgctcacggctcctttctcccacactcactgcccttcttcccacagcaaatctatttcaaggacagtactttttaaaatgattaatgttgagttctcaactagctctgccagaactagaggagctgtttgcatctgtctgtgcggatggagtttcttttatctgacaccaggtctccaaccacactgaaacaaggcatttatctacagagctcaactagaaccccttttcattaggctactccacttccttcccctcatacctaccccacatcagccacgtggttaagaaggatagtcaggaatgtttttaccaactccaagccctaattcatactcctccatatctcccaccccaccctttcaaccccacccccacccccagaatttcattgatatttctcccaactgttatttggaaaaaaggtaaaacaaaaaaggttcaaggtcttggtgctcagcccaaggggctccatgtgctgggacaccaacaggaaagggcttctgcctctccagcccacacccgagccacctcctgacccctggctgcaaaagcaggaaggggcaggagccagcacaggacccgggtggggcagggaggggaagcgtctcaggatctggcagagccccgggcagcatcattcaacttggccacccgcaagcttgctggtgacgagcgaggactttctctggggcagatcctgtggggtggggatgtgatcaccagtcaccaggttcttgtctggt

SEQ ID NO: 1874 - DNA, 338 bp, Homo sapiens
gcggcacgagcgtgggcatctctatgtttagtccagggagtccgtgaaacatgaatttctttagcacagctaaaagtgctccaagttcatcagtctgtgttagtttcattctcccaccatttagaagtgactgtataccttttaagtgcattttgcaataacatgcaaaatgtgatatcatccatatcagatgattttggagactgtaaaatagtcagaaaagcttggaaacagacattttggtagggctcctccaaatacggctgtcctggcacactgagacataagtttgccatacaatgtactgcagctctcctgacttcaggatcagactgagc

SEQ ID NO: 1875 - DNA, 4423 bp, Homo sapiens
gggccgcctctgcacgtccgccccggagcccgcacccgcgccccacgcgccgccgaggactcggcccggctcgtggagcccttcgcccgcggcgtgagtacccccgacccgcccgtccccgctctgctcgcgccctgccgctgcgccgccctcggtggcttttccgacgggcgagccccgtgctgtgcgggaaagaatccgacaacttcgcagcccatcccggctggacgcgaccgggagtgcagcagcccgttcccctcctcggtgccgcctctgcccagcgtttgcttggctgggctaccacctgcgctcggacggcgctcggagggtcctcgcccccggcctgcctacctgaaaaccagaactgatggctctatttgcagtctttcagacaacattcttcttaacattgctgtccttgaggacttaccagagtgaagtcttggctgaacgtttaccattgactcctgtatcacttaaagtttccaccaattctacgcgtcagagtttgcacttacaatggactgtccacaaccttccttatcatcaggaattgaaaatggtatttcagatccagatcagtaggattgaaacatccaatgtcatctgggtggggaattacagcaccactgtgaagtggaaccaggttctgcattggagctgggaatctgagctccctttggaatgtgccacacactttgtaagaataaagagtttggtggacgatgccaagttccctgagccaaatttctggagcaactggagttcctgggaggaagtcagtgtacaagattctactggacaggatatattgttcgttttccctaaagataagctggtggaagaaggcaccaatgttaccatttgttacgtttctaggaacattcaaaataatgtatcctgttatttggaagggaaacagattcatggagaacaacttgatccacatgtaactgcattcaacttgaatagtgtgcctttcattaggaataaagggacaaatatctattgtgaggcaagtcaaggaaatgtcagtgaaggcatgaaaggcatcgttctttttgtctcaaaagtacttgaggagcccaaggacttttcttgtgaaaccgaggacttcaagactttgcactgtacttgggatcctgggacggacactgccttggggtggtctaaacaaccttcccaaagctacactttatttgaatcattttctggggaaaagaaactttgtacacacaaaaactggtgtaattggcaaataactcaagactcacaagaaacctataacttcacactcatagctgaaaattacttaaggaagagaagtgtcaatatcctttttaacctgactcatcgagtttatttaatgaatccttttagtgtcaactttgaaaatgtaaatgccacaaatgccatcatgacctggaaggtgcactccataaggaataatttcacatatttgtgtcagattgaactccatggtgaaggaaaaatgatgcaatacaatgtttccatcaaggtgaacggtgagtacttcttaagtgaactggaacctgccacagagtacatggcgcgagtacggtgtgctgatgccagccacttctggaaatggagtgaatggagtggtcagaacttcaccacacttgaagctgctccctcagaggcccctgatgtctggagaattgtgagcttggagccaggaaatcatactgtgaccttattctggaagccattatcaaaactgcatgccaatggaaagatcctgttctataatgtagttgtagaaaacctagacaaaccatccagttcagagctccattccattccagcaccagccaacagcacaaaactaatccttgacaggtgttcctaccaaatctgcgtcatagccaacaacagtgtgggtgcttctcctgcttctgtaatagtcatctctgcagaccccgaaaacaaagaggttgaggaagaaagaattgcaggcacagagggtggattctctctgtcttggaaaccccaacctggagatgttataggctatgttgtggactggtgtgaccatacccaggatgtgctcggtgatttccagtggaagaatgtaggtcccaataccacaagcacagtcattagcacagatgcttttaggccaggagttcgatatgacttcagaatttatgggttatctacaaaaaggattgcttgtttattagagaaaaaaacaggatactctcaggaacttgctccttcagacaaccctcacgtgctggtggatacattgacatcccactccttcactctgagttggaaagattactctactgaatctcaacctggttttatacaagggtaccatgtctatctgaaatccaaggcgaggcagtgccacccacgatttgaaaaggcagttctttcagatggttcagaatgttgcaaatacaaaattgacaacccggaagaaaaggcattgattgtggacaacctaaagccagaatccttctatgagtttttcatcactccattcactagtgctggtgaaggccccagtgctacgttcacgaaggtcacgactccggatgaacactcctcgatgctgattcatatcctactgcccatggttttctgcgtcttgctcatcatggtcatgtgctacttgaaaagtcagtggatcaaggagacctgttatcctgacatccctgacccttacaagagcagcatcctgtcattaataaaattcaaggagaaccctcacctaataataatgaatgtcagtgactgtatcccagatgctattgaagttgtaagcaagccagaagggacaaagatacagttcctaggcactaggaagtcactcacagaaaccgagttgactaagcctaactacctttatctccttccaacagaaaagaatcactctggccctggcccctgcatctgttttgagaacttgacctataaccaggcagcttctgactctggctcttgtggccatgttccagtatccccaaaagccccaagtatgctgggactaatgacctcacctgaaaatgtactaaaggcactagaaaaaaactacatgaactccctggggagaaatcccagctggagaaacaagtttgaattatgtgtcccagttggcttcacccatgtttggagacaaggacagtctcccaacaaacccagtagaggcaccacactgttcagagtataaaatgcaaatggcagtctccctgcgtcttgccttgcctcccccgaccgagaatagcagcctctcctcaattacccttttagatccaggtgaacactactgctaaccagcatgccgatttcataccttatgctacacagacattaagaagagcagagctggcaccctgtcatcaccagtggccttggtccttaatcccagtacaatttgcaggtctggtttatataagaccactacagtctggctaggttaaaggccagaggctatggaacttaacactccccattggagcaagcttgccctagagacggcaggatcatgggagcatgcttaccttctgctgtttgttccaggctcacctttagaacaggagacttgagcttgacctaaggatatgcattaaccactctacagactcccactcagtactgtacagggtggctgtggtcctagaagttcagtttttactgaggaaatatttccattaacagcaattattatattgaaggctttaataaaggccacaggagacattactatagcatagattgtcaaatgtaaatttactgagcgtgttttataaaaaactcacaggtgtttgaggccaaaacagattttagacttaccttgaacggataagaatctatagttcactgacacagtaaaattaactctgtgggtgggggcggggggcatagctctaatctaatatataaaatgtgtgatgaatcaacaagatttccacaattcttctgtcaagcttactacagtgaaagaatgggattggcaagtaacttctgacttactgtcagttgtacttctgctccatagacatcagtattctgccatcatttttgatgactacctcagaacataaaaaggaacgtatatcacataattccagtcacagtttttggttcctcttttctttcaagaactatatataaatgacctgttttcacttagcatcctttggactctgcagtaggttgtctgggtcaagataactctcagtcacatttatattcatattatgctaaaatagtaaaatgaaacctcattgttggacataatttagatataactaaaaagttctatgaagtgggaaattccgtgttggctctggagcagctttgtctcctctgaaccaatatatcccaaaccaatatatgcaaagcacctggtacacaactggtattttagtacatgttggttcttttg

SEQ ID NO: 1876 - DNA, 1510 bp, Homo sapiens
  misc_feature (1)...(1510): n = a,t,c or g
cgcgtcgacctcctgtggtaccctacatgcgctatggacactcaaccgtcctcatcgacgacacagtcctcatttggggcgggcggaatgacaccgaaggggcctgcaatgtgctctatgcctctgacgtcaatacgcacaagtggttcacaccccgagtgtcagggacagttcctggggcccgggatggacattcagcctgtgtcctaggcaagatcatgtacatttttgggggctacgagcagcaggcggactgtttttccaatgacattcacaagctagataccagcaccatgacatggactcttatctgtacaaagggcagccctgcacgctggagggacttccactcagccacaatgctgggaagtcacatgtatgtctttgggggccgtgccgaccgctttgggccattccattccaacaatgagatttactgcaaccgcattcgagtctttgacaccagaactgaggcttggctggactgtccccccgactccagtgctgcctgaggggcgccggagccactcggcctttggctacaatggggagctgtacatctttggtggttataatgcaaggctgaaccggcacttccatgacctctggaagtttaatcctgtgtcctttacctggaaaaagattgaaccgaaggggaaggggccatgtccccgccggcgccagtgctgctgtattgttggtgacaagattgtcctctttgggggtaccagtccatctcctgaggaaggcctgggagatgaatttgaccttatagatcattctgacttacacattttggactttagccctagtctgaagactctgtgcaaactggccgtgattcagtataacctagaccagtcctgtttgcctcatgatatcaggtgggagctgaatgccatgaccaccaacagcaatatcagtcgccccatcgtctcctcccatggggtaggaggaagtttctgccacctcccctcctgagcctgctgtcatcttcactgcccctgcccatctgtcacccacctgctcctttgacccctggacttggtatacctccatgtggagttgttgggcgagaggtgttctctgtgctgtgaattcagtggggagctgtagcggggtgggggctaggttcctccccccttgggccgagggccccttccccttggtgctctgtccccatccacctcctttcagctgctcctgggcctcagctctgccccagggccagccaggttctgctgggaagggaagggaatggggataagggagaagcaagcagtgtctgagcctcaggagcttcccccttccccttngcctatcccctcccctctgcttgagccttgagccttgactgggagctgaaaggagttgcagctgttggcatgagacctccttctccccgtcttggggaggtggggaccagcagataaatcccacccttccttgantgtcgctgtactctgaagttcagccagctccagattttataaaaattaattaaaatctc

SEQ ID NO: 1877 - DNA, 452 bp, Homo sapiens
taaatcagattttattctttaaattgttcttttagaagctgaaattcagtatcaaaaatgtattgtcagtgcagaagcataggtgtatgagggtcttttattccaataaaagaccaatatttgcccacgtagtttccttagaaagagacagtttatcgtcgctgctgatgtcaactgttatgaacagaagacctttacattcaatttctgcttttaggattgacttccaaagttcctgacataacttatttatttgctgaggcataaatatttattaggagccatttatttaagcagtgagtgaaactatctggtcacctgcccttgcatctcaacaagctttgctcttttctaagactacaccaaatacctcctcccctcctcccccaaaattatatggtcctaaacagaaagtctatgtaatgttgaagggtagaggtctaaaaaagtga

SEQ ID NO: 1878 - DNA, 1934 bp, Homo sapiens
gttaaatgaagaaattggtaaattgttagccaaggtggaacaactaggagctgaagggaatgtggaggaatcccagaaagtaatggatgaagtagagaaagcacgggcaaagaaaagagaagcagaggaagtttatcggaattctatgccagcttccagttttcagcagcagaaacttcgagtctgtgaagtctgctctgcctatttaggacttcatgataatgacagacgactggctgatcattttgggggtaaactgcacctgggatttattgaaataagagagaagcttgaagaattaaagagagtcgtagctgagaagcaggagaaaagaaaccaggaacggctgaaacgaagagaagagagagagagagaagaaagggagaagctgaggaggtcccgatcacacagcaagaatccaaaaagatccaggtccagagagcatcgcagacatcgatctcgctccatgtcacgtgaacgcaagaggagaactcgatccaaatctcgggagaaacgccatcgccacaggtcccgctccagcagccgtagccgcagccgtagccaccagagaagtcggcacagttctagagataggagcagagaacgatccaaggaggagatcctcaaaagaaagattcagagaccaagacttagcatcatgtgacagagacaggagttcaagagacagatcacctcgtgacagagatcggaaagataagaagcggtcctatgagagtgctaatggcagatcagaagacaggaggagctctgaagagcgcgaagcaggcggagatctaactagctgtgtacatttcttcagtccttaagcttcctacggagttacgtactattgtttagttcacagctgttcagggtgacagtgagcagatccagacaccagatccagctaggctagatgtacagtatctaacttgatctgaactgaacctgttttccttgatgatgcctaaaactacatccatagtttctggtgaacctgtaatacagttctgaaagtacagttttatataataagatgctgatctctttattctttcaagtaagagtgctagtgaacaaattgtgttacttgccttgggattttttgaacgtttgtaaaatgctgtcttcctagtccaaacagctgcagctttgggcatttttctttttaattattcttcctctgactttgtatcccttaatacctacactctccaattgtaagagaaagggggcagggaagcaatatagcttccattctaaggctgtattcccgttatgaattactagctgattacagttcagagcattgatcctggaatgtgtgctggagaaatttaaaatactggggttttttgtttaatggtgcctatttagagttggaagttgaacagctgttgcattacatacttttgcttttttattgaaattttgaaatcaaacgtcttgatttttctgttctgttgaattgctatgttcaggatgttctagggggtgggggcagggactcttttcgtaataagcacttgttttattttgtgtgtgtggagtataaaggctacacccttattgtaaaaaaataataataataaaatgaaagaaacaatcaccaccaccattattaaactgtaacttgtctagtaaattgtcactagaactatttgctgtgggcatttcctctattctgttacgtcattaacagtgccttactgtgcaaggcaccaaaggacataaatacgtacttgcaaagattccagatgagctgttcatgtgggccccttgctgactatattccagccacttcagggttgtttgtaatgaccgttatagagaagggctcgacctgcagaagaaactggggtgtttttattctcattcaacaaacccaaataaaaacagtatatgttaccaaaaaaaaaaaaaaaaaaaaaaaa

SEQ ID NO: 1879 - DNA, 798 bp, Homo sapiens
ttttgtttttttttttttagaagcaaataaacattttatttccacagcacgccttcccttttcccaaagaacatgagttcacctcagccatcaaagcagagggcgaaacgtgcaagtgacaaggcaagaggctcctagaaaaatagattatacccaaggctctcctcctggggacccaaacccgtccccaggctccccctcagagcttgccaaatggagtgaaaggcatggaaaggggctgggagaaaagccagctccactgaacaaaggggagaggagcctggcagtgagcagacctgggaggggtgtggggtgggatgagctttgctccttggttgagtgctggaaaagggaagggggaagaaataatttatgttgatgtaattaatgtaatgatgatgtaatggtgcgtggtttcaatcatggcgaccattccagatctctctcaagtgaagctaaattctggccggtctatggaggtagaaattgaggacggaaggaatgaaattacaatttcccctcatcccctactcaaattccagtcccagggctgggctaggcagactgggagagaagaccaggcagctgttctcattatcagggacccatgcagacctgttggacagacatagtaggtgagagaaggctgagctggaggccaggagggttctttaggctcctagagggagaagcaggggcctggggtcaagggggagtgggaagcaacacagtaacaagcagtgggaagagcctttgagccctcaaacttacgggccaccctccaccacccacccccca

SEQ ID NO: 1880 - DNA, 1536 bp, Homo sapiens
gcaagtccatcgcagatactggcgcagtttacgggtcatgaaggtagaagacagagaaggaccctccagttctaagttggtcaccaagaaggcaccccaaccagccaaacctaggttagctgagcggatgaccacacgagaaaagaaggttctggaagcaggcatggggaaagtcacctcggcatcatttggggaagagtccactccaggccagactaactcagagacagctgtggtggccctcactcaggaccagccctcagaggcagccacagggggagccactctggcccagaccatttctgaggcagccattgggggagccatgctgggccagaccacctcagaggaggctgtcgggggagccactccggaccagaccacctcagaggagactgtgggaggagccattctggaccagaccacctcagaggatgctgttgggggagccacgctgggccagactacctcagaggaggtgtaggaggagctacactggcccagaccacctcggaggcagccatggagggagccacactggaccagactacgtcagaggaggctccagggggcaccgagctgatccaaactcctctagcctcgagcacagaccaccagacccccccaacctcacctgtgcagggaactacaccccagatatctcccagtacactgattgggagtctcaggaccttggagctaggcagcgaatctcagggggcctcagaatctcaggccccagggagaggagaacctactaggagaggcagctggaggtcaggacatggctgattcgatgctgatgcagggatctaggggcctcactgatcaggccatattttatgctgtgacaccactgccctggtgtccccatttggtggcagtatgccccatacctgcagcaggcctagacgtgacccaaccttgtggggactgtggaacaatccaagagaattgggtgtgtctctcttgctatcaggtctactgtggtcgttacatcaatggccacatgctccaacaccatggaaattctggacacccgctggtcctcagctacatcgacctgtcagcctggtgttactactgtcaggcctatgtccaccaccaggctctcctagatgtgaagaacatcgcccaccagaacaagtttggggaggatatgccccacccacactaagccccagaatacggtccctcttcaccttctgaggcccacgatagacccagctgtagctcattccagcctgtaccttggatgaggggtagcctcccactgcatcccatcctgaatatcctttgcaactccccaagagtgcttatttaagtgttaatacttttaagagaactgcgacgattaattgtggatctccccctgcccattgcctgcttgaggggcaccactactccagcccagaaggaaaggggggcagctcagtggccccaagagggagctgatatcatgaggataacattggcgggaggggagttaactggcaggcatggcaaggttgcatatgtaataaagtacaagctgtt

SEQ ID NO: 1881 - DNA, 976 bp, Homo sapiens
ctcacctgggggctggtgacgtggtccacaaagctgaagacaggctaatggggtggcgggtgtgtgtttaaacctcacgtgcctggaagctgcacattgaccaaaggagggagggaagtgctaaccatgtatagagtgggcaggcggttccagggagacaagcagcatgttattaaattgggcctaggcagttggacgataatggagaaaaaagcagggatgctataatgagtcctccccaagggtgagttcagcaccccagccctgttctgcttgtatcccagtgatacttgggaggtaggaagaaaatgggagtaagagaacaatttggggctgaagggagtgtcagaggcacgttgatccttgttttgttgtcatggaaacttcggggctggtgggacttaggccaaaagctcagaggcacagccaaaatttagaagcttgctactcctacgactcggcctataaggaagagagcagctgtctgtactttggggactacattgctgaaggaaaaaaatcactccctggctaattaagattgcttccaaattgggggaatgtgtgtcatttcctttaccaaggccagtcatccctgcttccacccatggtcaggacagtcagccactacgtgatgctgtataaattggattacaaaccatattcttgttcagcttgcactaatctatataaataaaatatgtactttgaaaaaaattaggctacatgagtttcaaatggactgtgatgttatagacctgctttctctttggttctgggccagtgtcagacggggacaggggtgataggcctggtgtcctaggggccatttgtgtaccttgaggcccgtgttaacatggcctgggggaaagaaagctctcctgtcacttggagtctcattcctaaaaccctccttcccagggaagcaagtgtgggggcagggtttcagaagcacaggctttgggtgtccaagccg

SEQ ID NO: 1882 - DNA, 230 bp, Homo sapiens
caactaaagcggctagaagaacacagatatcaaagtgctggacggtccctgcttgagcccttaatgcaagggtattgggaatggctcgttagaagagttccctcctggattgccccaaatctcatcaccatcattggactgtcaataaacatctgtacaactattttattagtcttctactgccctacagctacagagcaggcacctctgtgggcatatattgcttgtgc

SEQ ID NO: 1883 - DNA, 365 bp, Homo sapiens
tggaaggatattaaaaagctaatataatcatacgaaaataatcatagttatgcggggtggagtggaagcaggaaacgtttcactctattccttcaaatatattcaggtatattacacctttatatattttattatatgtatttgaacaatgagtatattaccccttcaaagttacataaatatgaatgcaggaaatctatatggacagatgcataacaattttccatatatagttaaacagaaaaagcaagtttgcaggaacagtgtgtacagtatcacttgtctaccacaaaatgtgtgtggtatatgtgtgtatgtgagtgtttatatacatacatatatatacatttacacacacacacaca

SEQ ID NO: 1884 - DNA, 508 bp, Homo sapiens
  misc_feature (1)...(508): n = a,t,c or g
ggggggggggggtcttttnnnntnnnntcctttagnnaaagcgtcttaaaacaccgactcactaggcngaattggcaacgaggccaanaatncggcacgagcaaatatatggtttctcccattctgtaggttcttttcacctncttgagaatgtcctttgttgttntcangttcagtgatttaagtttctcatttatgcatttacttanncaagaanaanggcactggggtgggcactgagagtntagtgacnaatgaaacaagtccttgttctcacagagctttgttannacagtgatactaatgggaatgtgaactcatagctactactactgaccaacaatgactgtgtgcccaggcattgttctaagntcttttaccatnnnnnnnnnnnnnnnnnnnnnnnnnnnnnnnnnnnnnnnnnnnnnnnnnnnnnnnnnnnnnnnnnnnnnnnnnnnnnnngngcaattnaataaccggtccacagtcccnccatgaagnnntgaga

SEQ ID NO: 1885 - DNA, 538 bp, Homo sapiens
gtcctgcgtggagagtgggacgcaacgccgagaccgcgagcagaggctgcgcacagcgtatccggactcagcgaccggacccaaggatccgccggggaacaagccacaggagagcgactcaggaacaagtgtgggagaggaagcggcggcggcggcgccgggcccgggggtggtgacagcaggtctgaggttgcatcataaatacaaaggactgaagttataaaagagcaacaacagcagaaaacctctgctctttctcctaatgcccaaggaatttatttttcctaatatgcagggtcaaggtagtagtaccaatggaatgttcccaggtgacagcccccttaacctcagtcctctccagtacagtaatgcctttgatgtgtttgcagcctatggaggcctcaatgagaagtcttttgtagatggcttgaattttagcttaaataacatgcagtattctaaccagcaattccagcctgttatggctaactaaaaaaaagaaaatgtatcgtacaagttaaaatgcacgggcccaagg

SEQ ID NO: 1886 - DNA, 2911 bp, Homo sapiens
ctgctgcagtgaggtacagcggcggtttctgaggttcttcactcgcgactgacggagctgcggtggcgtctccacacgcaaccatgaagttgaaggacacaaaatcaaggccaaagcagtcaagctgtggcaaatttcagacaaagggaatcaaagttgtgggaaaatggaaggaagtgaagattgacccaaatatgtttgcagatggacagatggatgacttggtgtgctttgaggaattgacagattaccagttggtctcccctgccaagaatccctccagtctcttctcaaaggaagcacccaagagaaaggcacaagctgtttcagaagaagaggaggaggaggagggaaagtctagctcaccaaagaaaaagatcaagttgaagaaaagtaaaaatgtagcaactgaaggaaccagtacccagaaagaatttgaagtgaaagatcctgagctggaggcccagggagatgacatggtttgtgatgatccggaggctggggagatgacatcagaaaacctggtccaaactgctccaaaaaagaagaaaaataaagggaaaaaagggttggagccttctcagagcactgctgccaaggtgcccaaaaaagcgaagacatggattcctgaagttcatgatcagaaagcagatgtgtcagcttggaaggacctgtttgttcccaggccggttctccgagcactcagctttctaggcttctctgcacccacaccaatccaagccctgaccttggcacctgccatccgtgacaaactggacatccttggggctgctgagacaggaagtgggaaaactcttgcctttgccatcccaatgattcatgcggtgttgcagtggcagaagaggaatgctgcccctcctccaagtaacaccgaagcaccacctggagagaccagaactgaggccggagctgagactagatcaccaggcaaggctgaagctgagtctgatgcattgcctgacgatactgtaattgagagtgaagcactgcccagtgatattgcagccgaggccagagccaagactggaggcactgtctcagaccaggcgttgctctttggtgacgatgatgctggtgaagggccttcttccctgatcagggagaaacctgttcccaaacagaatgagaatgaggaggaaatcttgataaagagcagactggaaatctaaaacaggagttggatgacaaaagcgccaccatgtaaggcatatccaaagcgtcctctgcttggactggttctgactcccactcgagagctggccgtccaggtcaaacagcacattgatgctgtggccaggtttacaggaattaaaactgctattttggttggtggaatgtccacgcagaaacagcagaggatgctgaaccgtcgtcctgagattgtggttgctactccaggccggctgtgggaattaattaaagaaaagcattatcatttgaggaaccttcggcagctcaggtgcctggtagtggatgaggctgaccggatggttgagaaaggccattttgctgagctctcacagctgctagagatgctcaatgactcccaatacaacccaaagagacaaacgcttgttttttctgccacactcaccctggtgcatcaggctcctgctcgaatccttcataagaagcacaccaagaaaatggataaaacagccaaacttgacctccttatgcagaaaattggcatgaggggcaagcccaaggtcattgacctcacaaggaatgaggccacggtggagacgctaacagagaccaagatccattgtgagactgatgagaaagacttctacttgtactacttcctgatgcagtatccaggccgcagcttagtgtttgccaacagtatctcctgcatcaaacgcctctctgggctcctcaaagtccttgatatcatgcccttgaccctgcatgcctgtatgcaccagaagcagaggctcagaaacctggagcagtttgcccgtctggaagactgtgttctcttggcaacagatgtggcagctcggggtctggatattcctaaagtccagcatgtcatccattaccaggtcccacgtacctcggagatttatgtccaccgaagtggtcgaactgctcgagctaccaatgaaggcctcagtctgatgctcattgggcctgaggatgtgatcaactttaagaagatttacaaaacgctcaagaaagatgaggatatcccactgttccccgtgcagacaaaatacatggatgtggtcaaggagcgaatccgtttagctcgacagattgagaaatctgagtatcggaacttccaggcttgcctgcacaactcttggattgagcaggcagcagctgccctggagattgagctggaagaagacatgtataagggaggaaaagctgaccagcaagaagaacgtcggagacaaaagcagatgaaggttctgaagaaggagctgcgccacctgctgtcccagccactgtttacggagagccagaaaaccaagtatcccactcagtctgcaagccgcccctgctttgtgtctgccccaagtaaggagcgagtctgctttgagctgtctctccaagccagaagaagaagaagacaaagaagcccgaaggagccacagccggaacagccacagccaagtacaagtgcaaattaactgccctggtcaagtgtgtcagtgactgcacattggtttctgttctctggctatttgcaaaacctctcccacccttgtgtttcactccaccaccaaccccaggtaaaaaagtctccctctcttccactcacacccatagcgggagagacctcatgcagattagcattgttttggagtaagaattcaatgcagcagcttaatttttctgtattgcagtatttataggcttcatatgtgtgttaaac

SEQ ID NO: 1887 - DNA, 638 bp, Homo sapiens
ggtgtttttaaaagcagtaggcagcttccatcagcattggaagtgtcccccactccagtggtggaggttgcagtcgctggacctgaggaagtggggaagcattacaaaccctcctgcagtaagaatggcagagttgggaaggatcttctctcgcaggctgttggccaactcctcttttctgtgtatgagggcatcttagttttttatggcgttttcaaagcagcatatgaggattcttagcatgcagctaagtgacaacccccatggcctatgatgtaatgtttgctctggactagccatcttgataaataggagtgtatgtatcttaggttctttgtaagaaacagctatttttttttctcattaaaaaggcctctgaaagccctctcaaaaatggacctcacaaaggcaaccagtgtgaatggatgggagctggggtgctgcatgcccaggctggtcatggtgtgtgcagcacccagagagttgcacccaccccttcttcaggtggacatccgacctttacactgtggtcttgcaaaaatcagcgagttagtttggccgccctgtgaagcttcagcattcaaggtcctcttctgttaaaacccaactcgtagccgggcgtggtggctcactcctat

SEQ ID NO: 1888 - DNA, 630 bp, Homo sapiens
  misc_feature (1)...(630): n = a,t,c or g
gaccggttttattcaaaaattaaacatttgttcagcatttgtgtcctaagctgacagtctttaaatcttatttttcaaagttatattgaaagttatattagaagaagaagcggcttcctaagcccagtacaaatctgcaagtcttaatgagaaatttgagggccagctgataaaacgttctgactattgtttttgtgtccaaaacagaaattaaaagggtttgacttgggtgttttccccgcttttaggcagttgagcagtcttaggatttgtaggctgacctgaccgttgctttggcatcaggtggctgctttgggatccttacgcaggccctgggcagtgaggaccctgtctctcagcctcatggtgttctgtgttgtaggctgctgcagtacacgttcgtgggggacatatttatggttcccgatgatcctctgggaagaagtggacctcgattagaggagtttcttcagaaggaagtctgtcttagagatatgcagcccctacttcagtgccctgccaaatgtgggcatgtttgaccccagcttcagagttccctgggcacccaggtcagtccagcaccagccaccagcctccgacccggatttcagggtntcccctttcaagcca

SEQ ID NO: 1889 - DNA, 1310 bp, Homo sapiens
tggagcgcggcgtaggtggctgccgagtcttttcctgtttagggtcttatcctggcattgagggcgccggactggcgcttttggccgacttggcattgggtgggcggcttcttgggacccacatgagccagtggcatcatccccgcagtggctggggccggagacgcgacttttcaggacgctcctcagccaagaagaagggcggaaaccacatccccgaaaggtggaaagactatctcccagttggacagcggatgcctggggactcgtttcattgctttcaaagttcctttgcaaaagagttttgaaaagaaacttgctccagaagaatgcttttcccctttggatctttttaacaaaatccgagaacaaaatgaagaacttggactgattattgatttaacatatactcaacgctattataaaccagaggatttgccagaaactggttccttacttaaaaatttttacagttggacatcaagtgcctgatgatgagactatttttaaattcaaacacgctgttaatggggtttttgaaagaaaataaagataatgataaacttattgggtgtccactgtacccatggtttaaacaggactggctacctcatttgcagatatttgattgatgtagaaggcgtgaggccagatgatgcaattgaattattcaataggtgccggggacattgcttagaaagacaaaactacattgaagaccttcagaatggtcctatcagaaagaattggaattccagtgtacccaggtcaagtgattttgaagactcagcacatctcatgcaaccagtccacaataagcctgttaaaccaggacctaggtataatctacatcagatccagggtcactcagctcctcgacatttccacacccagacccaaagtttgcaacaatcagtcagaaaattttcagagaatccacatgtttaccagagacaccatctccctcctcctggtccccctggagaggactattcacacaggaggtattcttggaatgtgaagcccaatgccagtcgggcagcccaggatagaagaaggtggtatccttataattactccagactctcctatccagcctgttgggaatggacccagtgatacaaacctgtcctggaattctacctggagaccagagctggcctgaaaattactggtgtgacttttaattagttcaggtctaatcaggtttctttattgttcccttatgtattcaagcttaaggaaaaattgcattgctgtttacctctttgctgataaatttgcagtaattacagcattgcaggaaaaac

SEQ ID NO: 1890 - DNA, 877 bp, Homo sapiens
tttttttttcggataaattttcttttatttccatactcttttgtgacatgtgtggcacaagtattcaatctcacagggatgttaaaacccacactcgaagggtgtccagtgtgcttaggaaatgtgggtttgcgcaatcacaggccaagcctgggggtcctcggggaagctactcctccaggtcacctgccaggtggatgcacttccttgggcaatgggtgaccctcccaggacaaggggaaccagcagggactcgatggcaccacacagcagccacctgttctgacaatgtgacacagaccaactaatgccagagcccaggagaagccacagcagagctgcctgggttggtgtcagagcaacaggcagaagtgactgtgccgcccgtgggctgtcatccaccggtggctactgtgtcattctggaaaaactatgatgccatgagactctgagaaaccgaatcactgcagagacaaactcataaaaattaaaaccaatccataaaattgtatctagaaactctgtccctggtgccaataagcagcaaagtcaacaaagagtaaaaactaaaacttcaacacattattaaaaagcaaaactggactcaactacaatcacttctggttagtccactagtgaacccaaaagtgacttaaaagtaaaaatcattattagcaagagattaagaacataacttcattgagaggtcaatgttaagagaacagttcattaaaagtttctgtttaaaaagaaaaggaaaggcccaaatagccatttcaaggcagagcaggtgaaaggcctggaacactcctgtgcgctcactgtcggctgctgaacagggacccaaggccagcaggatggaggcctagtgccgaac

SEQ ID NO: 1891 - DNA, 736 bp, Homo sapiens
tggatgttgaaatctttgcctcctcagtcgggaagagtcctgctaaaaatcaggctaaaaatcaggccaaaaatcaggccaaatgacttggcaaataattgacaaagtggttttcacgtgtgtctatctttgctagcagcttgtatacctcaggccaggtgagctccccaaatttcttttttcatttactccagtgagtttctgctgtctttttcaagtatgtaccataggacttaaaggtgatttggatgcgttgtaacactgctaaatatgctaagtacagaattttatctacagtactgtgagacagtcaattattgcctagggtagttcaaaaatatgatgtgagctagttaagcctttgcttgactgatttcagtgatattcagaagtgtgtaccaatcaaggctctttaaaatacggaacgactcacttaataaccagggaaccagccaaatactgtgcagccgcagaatatgcatatcaatgagttggaggtgattattctctgtaactccctaatgattgttttctaagcattgtggcttctcagtggcttgacagcatcttcctggttgtatgtggcctgtttacatgatgtattgaataatgttgtttgttgtgagcatcaatgcctgtaacaccaaactaaacacgtgtttttgggatatgtttccaatctttaaatgaccttgccctgtccaataaataaatgattgtctcaccctgaaaaaaa

SEQ ID NO: 1892 - DNA, 305 bp, Homo sapiens
gttaagtgtaggtgaaatcgtgaaatactaatctttctgtgcctggcttatttcaactaatatcctctaggttaatccatgtggttgaaaataatagaatttttttttagaggtgaagagtattccactagatatatctaccacattgtctttatttacttattaggtgttgagtgttgcaaacaacatagaagtgcaaactttccttcattgtgattttattcattttggatgtatatttaatagtgcaattgctgtattatatggtagtttgattttaaattttttttgaaaaatctctcttt

SEQ ID NO: 1893 - DNA, 560 bp, Homo sapiens
tttttttctgcggggaatcaggtaggggcctttattggccagcacacatctacctcctggcatctgtcacaagcatttgcaggagtaggcggccccttcctctccatgtccccatccccaacctgagatgcgggagggcctgggggctcagagggaagaactgaggcaagaagcccccggtgatccagtcagaggattgggcagcctgacctcggggtggggagcccagcactggacaacaaggagggaggggcacaggagggctccccgaggtttggtcggggagggggaggaagactgccccctgccctgtcatctctgcatgtgccgagccccagctcctgactccctcagtgcctttgggcctggatgctcagacagcagatgagacgaagccttgtacctctatccctccttgaaggcctgcctccccccacttcacagagggaaactgaggcccaagcctctcctctcagcccttgctcagcctcagacatgtgcatggtgccaggactgagacctgcttacccctaaggcctagatggcagaagggctcgtgc

SEQ ID NO: 1894 - DNA, 757 bp, Homo sapiens
ggtcgactttttttttttttttttaagggaatcaatgtctgtttattaaggcagatgctcataaaagtgactttcagtaacattttcagtataaaaatggatttacatttcatttctggaaaaccgttttgtacagtctgaccatggctaggagtcccagggacagcagcctctgctcagggcagactctgtgattcactgtctgtcctgactgctaccccacgtgggggagaacacgtgggctgagaaaaaaaaaacagcatgtgcaaacctgacagatgtcaagggtcccaacacagttccttcagcgaaaataaagcccagttttaagatgtgcagggaagtgttgacactgaacaggcagctgaccaagccctgcagggctctgagcaggcaggcgagtcccaaggagagtcagtgacagcacatggggcaagggagctggacagaagaccccagagggtgcggcacctgggtgagagccctggaccgcacaccaaggcagaggggtgcccctgaaggactctgggcaggcaatgacaggatctgagggtgtccagacgcagatctccactgcctgagggagagtgatcagccagggggagaggccagggactgctacctgcccagaaggcggcagggaggggaagagcagataaggaggtatagggtgtgccctgggcaaggcagcaggggtaacgaagctctcagtgactcctcccagtagccaggggagagcagtgacagtctcaggtgg

SEQ ID NO: 1895 - DNA, 592 bp, Homo sapiens
  misc_feature (1)...(592): n = a,t,c or g
ggcacgaggcacgctaccataagtacaatctttttgcacctgaaattcagtttgatttccccaaggattcagaacttgtgacttttgacactccctttgggaagtttggcatttttacttgctttgacattttttctcatgacccagctgcggtggtggtggatgagtttcaattgacagcattctctaccccacagcatggtacaacacgctgcccctcctctcggctgttcccttccattcagcatgggccaaggccatgggagtcaatctacttgctgcaaatacccacaacaccagcatgcacatgacagggagtggaatctacgccccagaagcagtcaaggtgtaccactatgacatggaaacagagagtggtcagctgttgctatcagaactgaagtctcggccccgccgtgagcccacctaccctgcagctgttgactggatgcgtatgccagcagtgtcaagccattttctctgaacagcagattttcggggatgattatttgatgagttacctcacaagctaagagaatacagnaatncacacttgcagaaagactgngttgcactacttacagatgtctga

SEQ ID NO: 1896 - DNA, 433 bp, Homo sapiens
gagaaggtgaggagaaagggatagagtaagggggcaggaccttggcctcccaaaggctggaattacaagtgtgagccactatgcccggccaactttaattctttacatcttcggcacatttattttctgattgctctgtatgaaatcaaatccagccataactttattgctagcatgcttcagttatctatttctgtaaacaagccagcttagccgcagtagtataaaacaaaaactgttttattatgcttctggattctgcagtttaggaatttaggcagggtatggcagggatgcctgggtctctgcatcatgatgtctggggcctcagctaagaatggccaaggcttcaatagccagggagactcaaaagattgaaatctaaaatcctctgaaggcttctttactcttatgtctgtatctggggctgaga

SEQ ID NO: 1897 - DNA, 416 bp, Homo sapiens
  misc_feature (1)...(416): n = a,t,c or g
aaaacaatctacgaagcaggcactataataagccccgttttacagaaggagaaaatgagacacaacataaataacttgcctagttatgggcaaataacttgcctagtttatgggcataaataacctgcctagttattgcctagtacatgggcagaggggagttttggaccagacttgagagatcgtgctcttacccactgctgctctgaacacataataaataaagtataactcactgttattaaagcacagggtgtgagggggaggactgaggagtgccgctgttgagagggcagaagtcagacagagcctgaggtcagtttggggatgggtgttgaaaggaccctgtgggacatccagactcctgagggcaattcgaccacacacctggcgttaatgacacgatttganctgga

SEQ ID NO: 1898 - DNA, 231 bp, Homo sapiens
ggcacgagcatcaaggtagtttggggatagagattatggtatctctggtgttgataagtgtttctcatgatgtcctgaaacccaggatgaaataatacaggtgctgaaaagctgtcacatgtcattcagaaaccatcatatgaacagtccactagtattttagccctagaagtgaaggggaatctcttaacatgaaacttcaggaggcataatgggaatctacaattgtag

SEQ ID NO: 1899 - DNA, 637 bp, Homo sapiens
ccatcatccacagtggaagattcaaagcagttggtccttggtacgtatgagaagcggatttcattcccttgaattctacagagcagtttattagagtgaatgcattttaaggccttgcatttgatatgtcatccagttcataatcaagttgcctttttctggctaaaacataatgattatgtatttttctcatttggtcctacaagctgctggccctttgtccctccactgtgggaatcagatctagagcaggctgagcctgcagacacagcagtggccaaaaggtcactctaagtgttttgtcttgactccttacttgaagtccacccagctagcacacatctggtttatactgaagccccctgcctagaaatactcatttcaggaaccaccagtaagcatctgtgaccacacaggctttttgactgatggcttcccggatctggtttcaagggataaccccgtctgtgtgcatctatggtcttctctctacagcgaggactttgcagtgctgcttgtggtccacacaaggggctcagagctgagtctgaactgcttcatggtcaccagctcctgtcccttccagtcttgagaggcttttttctccagatgggaacctttccttcccgccgttttc

SEQ ID NO: 1900 - DNA, 496 bp, Homo sapiens
  misc_feature (1)...(496): n = a,t,c or g
aaaaggatagttttgtctccttttgtattcaagtaatgcaaagtgcatttttgtctctaagtagcttttgactaaaagactttgtagtgtaaagggtgttatacaaactgtaatggtgtgcttcaaacaaatgctagaccctttcacctttgtcgtatatacaaagctgttaattatgtggtatgaattaactttgaacatgttgaaatatgtagcatgtctttaactcagaccgaagattcctgattgcacaggttgtgttctagccagttgtgatttatttgttcagaaacaccaatgtgaattgcactcctatcatccagaatattgtatgaagtccagtgatctttaaacagcccagaagtaatacctggacctccattgggtagcccaaagtttacatagccccctttaaaaggtaatcngtccnattaagtttccnatttccggtgcaccggggattttcccctnggaaangtccggccttgccttgggt

SEQ ID NO: 1901 - DNA, 1188 bp, Homo sapiens
ataattccagtgcctttatggtggagcagaattcgacaacacatgtccattcagccctctgaatggatctgagacgaagacctttttaaagatatgtctgtattgaagagaaagccagttttgagttttttacacttgcacatcattatctgtgccgtcctgactagaaggttgtctggggcccccaaattccaagtcccagtatagccagggctcccattttgtttttccagagttcgtggaggtggactgcagagcccagagcccttcatctctctgagggtcaaggataccaggggtcccaagtcacagatagacattccagtttgtattcttaggaatcattcttaggcagtgcggcagaagcaggcctctgtgaagtgtctgccgggtagaaataggccttgaagtcctggggctctccaggcagtggggttatgtgtcgactgaagggtgatgtgcagaagagcttggagagtggatcagagagacttaggacagttactgcagagctcctaagtcaccactcaaccagtggctgtttcacaaggatttgagggcacttgcctgtcttgtgaggtctgtgccacaaggtgagtctgaactgactgctccagctaagtgatcaggcacgttgagagtatacggtgtcctcagcacatacacctgtgggaaaacggaccgctcttggctcctgactcccagggtacagcgcccagtaactcatccttcattcagaggtttgcctggccttcccggtttcccaaggagcaagacctctgtccgccctttggccccggcctctgctctgactcctttttttacataagaaccaatctgtgttttcacattgggctaagtggattccttatccctttgttatatatattttttgcaacttggatttccagtttgtttacagagtagtcttaggtagtagcaaaagagccaaagaagagatttgtattgctgagctcaaagccaagcagaggccggcagtgggaggctgaggcagggactctccaggcttctctgcccataaacacccgggtcccagggccctccttcctttccctttggtggctccctcctccccatgtaaccattgcggcgtgccagctgggagcaggattaccctcatttttagggattttagtggatggcctcttggcctcagggaaaccgttt

SEQ ID NO: 1902 - DNA, 410 bp, Homo sapiens
  misc_feature (1)...(410): n = a,t,c or g
gatacaatctccaaagtgatgtttatcctggaattacccaatttagattagagaggttgttcaaatttaactagataactctagtttgtactgtataggtgcagttatgacagtaaaaaaatagcctctnnnnnnnnnnnnnnnnnnnnnnnnnnnnnnnnnnnnnnnnnnnnnnnnnnnnnnnnnnnnnnnnnnnnnnnnnnnnnnnnnnnnnnnnnnnacnnnnnnnnnnnnnnnnnnnnnnnnnnnnnnnnnnnnnnnnnnnnnnnnnnnnnnnnnnnnnnnnnnnnnnnnnnnnnnnnnnnnnnnnnnnnnnnnnnnnnnnnnnnntagtgcactataattatgcctgtgaatannnnnnnnnnnnnnnnnnnnnnnnnnnnnnnnngacctgtctcaaaaaaaaa

SEQ ID NO: 1903 - DNA, 619 bp, Homo sapiens
ttcaaaatggcgacggcggcggcagcggcggcggtgatggctcctccgggctgcccgggttcgtgccccaacttcgccgtagtctgctccttcttggagcgctacgggccgctgctagacctgcctgagttgccgttccctgagctggagcggggtgctgcaggcgccgccgccggacgtcggcaacggagaagtaccaaaagaattggtggagctccatttgaagctgatgaggaaaattggcaaatctgttactgcagacagatgggaaaaatatttgatcaagtacctctgtgagtgtcagtttgatgacaatctcaaattcaagaatattattaatgaggaggatgccgatactatgcgtctccagccaattggtcgagacaaagatggcctcatgtactggtaccaattggatcaagatcacaatgtcagaatgtacatagaagaacaagatgatcaagatggctcttcatggaaatgcattgtcagaaatcgaaacgagttggctgagactcttgcactcctgaaagcacaaattgatcctgtactattgaaaaactctagccaacaagacaactcttctcgggaaagtcccagcttagaggatgaggagact

SEQ ID NO: 1904 - DNA, 1394 bp, Homo sapiens
  misc_feature (1)...(1394): n = a,t,c or g
caagaccctggtgaaggaggtcgtacagaatttcgctaaggagtttgtgatcagtgatcggaaggagctggaggaagatttcatcaagagcgagctgaaganggcggggggagccaattacgacgcccagacggagtaaccccagcccccgccacaccaccccttgccaaagtcatctgcctgctccccgggggagaggaccgccggcctcagctactagcccaccagcccaccagggagaagagaagccatgagaggcagcgcccgccaccctgtgtccacagcccccaccttcccgcttcccttagaaccctgccgtgtcctatctcatgacgctcatggaacctctttctttgatcttctttttcttttctccccctcttttttgttctaaagaaaagtcattttgatgcaaggtcctgcctgccatcagatccgaggtgcctcctgcagtgaccccttttcctggcatttctcttccacgcgacgaggtctgcctagtgagatctgcatgacctcacgttgctttccagagcccgggcctattttgccatctcagttttcctggaccctgcttcctgtgtaaccactgaggggcagctgggccaggagctgtgcccggtgcctgcagccttcataagcacacacgtccattccctactaagggcccagacctcctgggtatctgccccgggctccctcatcccacctccatccggagttgcccaagatgcatgtccagcataggcaggattgctcggtggtgagaaggttaggtccggctcagactgaataagaagagataaaatttgccttaaaacttacctggcagtggctttgctgcacggtctgaaaccacctgttcccaccctcttgaccgaaatttccttgtgacacagagaagggcaaaggtctgagcccagagttgacggagggagtatttcagggttcacttcaggggctcccaaagcgacaagatcgttagggagagaggcccagggtggggactgggaatttaaggagagctgggaacggatcccttaggttcaggaagcttctgtgcaagctgcgaggatggcttgggccgaagggttgctctgcccgccgcgctagctgtgagctgagcaaagccctgggctcacagcaccccaaaagcctgtggcttcagtcctgcgtctgcaccacacaatcaaaaggatcgttttgttttgtttttaaagaaaggtgagattggcttggttcttcatgagcacatttgatatagctctttttctgtttttccttgctcatttcgttttggggaagaaatctgtactgtattgggattgtaaagaacatctctgcactcagacagtttacagaaataaatgttttttttgtttttcagaaaaaaa

SEQ ID NO: 1905 - DNA, 1224 bp, Homo sapiens
  misc_feature (1)...(1224): n = a,t,c or g
ttttttttttttttcactttaaattacaatggtactttattttaataatcacaagatttaacacgtaaaaaaaaagatagcactaataaataacaaaagtggaatgcttatcaaagtaacgacataatgttcagttgagaatcagtcacttcaacagagtaaagctctaaagacaccagacgaaccaatacttgttggaatatgccatacaactttcttactgtggggattacaggggcagccctggttctgtgtggtcagagttatagtcagacagattcagcacaattgtgtttcagactaaattgtttttgagacacggtcttgctctgtcccccgggctgggaggtcagtgggcacgattcacagctcactgcagcctcaatctcatggggctcaagcaatcctcctgcgtanttaggaaannnnnnnnnnnnnnnnnnnnnnnnnnnnnnnnnnnnnnnnnnnnnnngaggcagannnnnnnnnnnnnnnnnnnnnnnnnnnnnnnnnnnnnnnnnnnnnnnnnnnnnnnnnnnnnnnnnnnnnntaggcccagactaaattttgaagttgtggatcatctacataagatgtcgaggatgcccctcctggaataaattaaaacctgactgactgctagaatttccagtagccaatatgggtgttcttacattcctgaaaacagcaaaatgaaacctaataggtgctggtattcacctctgatgtatcaggtttactgtgtgacaagtcttaatgctcctaggtttacattgtataggcagcagagtatttttaatgtgttcaagtagaatacggggaaaattaggatcaaatgagaattcatttctctagtgtcaataaccctcaactcctcagggaacagttaagccatcaaaactaaaatagctttatattcaaatgcttcagtaacatgttaaagtcactaaaaactaaatgtgtaatttactttgtagaggtaagaacacacaggaatgaactgacaaacagaacaaattatgaaaaacgctaatcccctaagcatctgcatgtccagcccttgtgtctactgtagtctacccacccccactccaaaaaaaggttcaggttatatcccaaagtgacctgttgctgaattactttcaaataagcaaagtgctctgtagtgtataagctactcaggtctacacattctagaatgatgcacttctgtagtcctggctg

SEQ ID NO: 1906 - DNA, 1180 bp, Homo sapiens
cccacgcgtccggtcggggcgcctgcgcagtcgctcttcctcaggcggcggccatggcgggacaggaggatccggtgcagcgggagattcaccaggactgggctaaccgggagtacattgagataatcaccagcagcatcaagaaaatcgcagactttctcaactcgttcgatatgtcttgtcgttcaagacttgcaacactaaacgagaaattgacagcccttgaacggagaatagagtacattgaagctcgggtgacaaaaggtgagacactcacctagaacagtgccgtgctgctgctgggaagttgctttacacaacacaggccacatgggaaaggccccagcagccttcagctccttcctttctccttaaagagcaacagggcttattcttgtttttcttttttcaaaagtgtggcctttgggctctgccatctggggtgtggtgtggtatgtggggaagaagttcagaggaaccgttggaaacgacgttaggcattttaccttttcagtaacattttatacatctaacttgtcaaatgtatttgagacattcacagccaaaaagcctgggactctttgtgaaggtcctcctcacctctatctttctttctctctctctcaaactttccttaaagttcctcattgcctttgcactgcttctgtgaacagtctttgtctcctccccacctttggtgggaagtgcggggcagtcctggtcaagacactcatgccctggcaatgtggctgccagagaatgttgttgctaacccaccagtttcttgttgatttggagaggtcaaggccaggcccccacttggcttgaagggacattttcagacttttctttctgtcacttggagtgtctatgcctctcatatttccctaataaactcctcaactttttatctgactgctgtgattatggtggggagaggagctagagatgggttcacttattgcacagaaatgtaatacatggcgttattattctaacataaaactttcagatgtagctgtttgattcaaagcctaggtggcttaccagcccaagtccccatgtttggactttcagctgactagctcatcttgggaatcatttggtcattcagcacatttaccaagtatttactatgtaggcatgttaaactccaataaaacatacagcattgaatcag

SEQ ID NO: 1907 - DNA, 751 bp, Homo sapiens
cattagcaagtcataaaaatccaaaaagtaaaaatctcagttgagaacttcaaacaatacttctgttttacaagaatttaataacaaagattaaacaatcaaaatgaaccatgggactcaaaaacatcctaagttgcaaaatcaatacataatggaaaatctgacgacatttaaaactgtaagattaattcttttcattgagttcttctacttgcatttgcaaacagagagaatgacgcgcctgtttcagggattctttagccttagcaaggtcttcttttaacttgttgtattgctgcacatcaaagtgctgttgctttgatttcttgtggaagaactgaagaaattgcctactcttaacagctgagtaagtataatcctgtcgagtgactataaagtatgcaaaaaagaccatagaatttgcaaatgtgatgaagtatgtaactggctccatgatatcccaggagtacacccaccacgtgagccaggccagtgccccaccctgaatggacagcagtgccaatccagcccacaggagtccactggttttggcttccgaatgagcttctattccagctttcacctgttcaaggggctgcagctgttccttcaggtggtcaattttctccagtaaatggtgctctctctttttctgagactcttctaaatgcaagattgtaaatagtctgtgaaccaaggatttcatgtgttccatctcagcagtgtgctcattacttggtttttctctctt

SEQ ID NO: 1908 - DNA, 428 bp, Homo sapiens
gcggcacgagcaagccttgcccccagcccaagaggagcccccactgcctgcggggcagtgatgtctggccaccggctcacaccaatgacttggtcctggggtggcagaagcagcaggtgacaggagcagggcccctgtccctctcttctggccctgtggtacccaggccacacgttgtgcccgctcttggggctgaccggctgtagggaccaccagccgctgctactgtgggccgccccggggcagggtgggcagggcttttgtgggttatgaggacacagaagtccctgaggcccccagacctggctcagccaacctccttcctcccccggttgcccccgactctaaagcctcctccctcccagcgtccactggctccaggctcctcacaacagcagctcatagacacgggggcgtcttccaggtgg

SEQ ID NO: 1909 - DNA, 361 bp, Homo sapiens
gctttgacaaagtacatgagagatcccacttttgtaagactgaattccagtgatccaagtctcataggtttgaagcagtattacaaagttgtcaattcataccctttggcacataaggtttttgaggaaaagactcagcatttacaggaactgttcagcagaattccatttaatcaagctttagtcttttctaatttgcacagcagagcacaacatttggctgatatcctttcttctaaaggctttcctgctgagtgcatttcaggcaatatgaatcagaatcagcgtcttgatgctatggctaaactgaagcactttcattgcagagttctcatttccacagatttgacttctcgtggga

SEQ ID NO: 1910 - DNA, 375 bp, Homo sapiens
  misc_feature (1)...(375): n = a,t,c or g
atgcatttgtttttgatgtttagctacttaattcatcctgaatttgtatgataatatatatgaggagcttttcccccaagctaaccatttgttcagacatcattgcctccttaatgtgtactatgtatctctgtatgccattttaaaattttgcctgtagatttttgtgccaagacaaagtgtctttttattattattacacattcataaaatattttaattgctgttaggattaattttcctttgttccgttcctttcccctttcccctttttccgttttcctttcctttccnnnnnnnnnnnnnnnnnnnnnnnnnnnnnnnnnnnnnnnnnnnnnnnnnnngtctcagctcaccacaacctccccatcccca

SEQ ID NO: 1911 - DNA, 351 bp, Homo sapiens
ggggacctgggcactttttttccgcaagcggagagctgacaggccacggctgggtgtgtttcgatgcccttttgttggtcctcatctttctctttgtggtttcctattggcttttttacggggtccgcattttggactctcgggaccggaattaccagggcattgtgcaatatgcagtctcccttgtggatgccctcctcttcatccattacctggccatcgtcctgctggagctcaggcagctgcagcccatgttcacgctgcaggtggtccgctccaccgatggcgagtcccgcttctacagcctgggacacctgagtatccagcgagcagcattggtggtcctagaat

SEQ ID NO: 1912 - DNA, 482 bp, Homo sapiens
acacaggtagattaattaggtagccaggagtggcccctgaaagtatgtctggcaaaacctagaactgcatcctagccatcactgtaccttctgccctccctgctgtctcctctgccagttacagttaaaaggttgtgggtgaggacgctgggcagagtcccaggcgtctgctgtcagctccccagcccggcctgcctgccgagccatctgggcgttcccacggtggagagtgtggtgcttgtgacgcggtggtgctgggagccatccctggtggcagatgtgggctctcactgcaagtcagtgtaagtccccagggactgtcagcagcacgtcctgctgcccctctctctgcagaagccctggtaacctgcgtttggaaaaatctctaaggatttctgaggagctgtcaggccatgtccttgtccaccctgtgtggggcacggcttcgacatggctctgctcccgtcgtgggctgaaaaaga

SEQ ID NO: 1913 - DNA, 829 bp, Homo sapiens
ttttttttttaagtatatcaacaaagtgaaagatgggtttaatttttcccacaaaaagttaaaagaaataacagcagttttagaggaagaggaaaaaataataagaaaattacatgcagttgcaaaatgtgtgactatttacaaactctaacatataactacaaaacggaccagaagaatcattatcataggaagcaaagggtcatttcaaaaatcagaggagggatgattcatatttaatttaattctgtggaaaaaatttaagtaacctttgaggacaaaaataggtgatatgttgaaatgcgggaaaccacagtggaaggaaaaagaattcaagaaagctcagtttcagtaaccagtatctagtaaaatcttcaggacctagaggctacaatctggcattaatagtgtctgaagacctagaaatgtcattaaataccattttggataattcttgtagacttgagatgatgtctatttaaagttacaagacaagtgcctgtatttctgtattcataacagaaaacaattggatatggaaaagaaactaacatgctatgccacaatctctaaagaaagattagggaagtttcagcttaaagcaagaataatcacaataaagttttacaaccctttgcaagcatatatgaaaaacttacaaaaagtttgtaatgatcttttcttaagctaagagaatggaaaaaatgagaaaaattaaattataaaatgaaactttggtttagaggtaagaaacatttgatgacagtcaagagatcagggttgtacagtgtattatgtgaatgttgtgactcattggtttcatcttgga

SEQ ID NO: 1914 - DNA, 1127 bp, Homo sapiens
aatatggaattatgcagcaaggcaaggatattctaaatagagacaacatctttaaaaggcatggaggtaagaaagagcaggcagatgtacaaacacaagttggtggactttgtgaatccacttcatggaggagattgacaaggagatcagtgagatgaagctgtcagtcaatgcccgtgcccgcattgtggctgaagagttccttaagaatttttaaaccatctggctggatctcgtggccttccccctcagactacccatgtctccacgaaggcgtcctggagtcactccccgagcagcgcggcggcggccagggagttgggttggggtgggcatttgatgcgggaggtgggtggtgtgcttgctagctgggcaagaaagcagcagtggacctgccccaaggccacacgtgcctggtcaggctggcttctgatgttcagtcccctgggccgggacagattttttttaacgtcttgaaacttaaactctgtgcttgtaggatactgtaacctttttgtctttttttttttttttttttttaaacctccacctccagtggctgtgactggtcccagtgattatacgttattggttgctgtgggtctgggcgggcctggagccagaaggcgacttattttttctctcctatgccaccccaggtggggagggagggaggtttcagactccagtttctcccttgcccttttattcccaagcctccttggccccagtataagtgttgggaactctctgccagcttcctgagttctgcctaaagatggccccccagcactggttggggacaagggccaaattggtgaccaccagtcatgcctaggacctggggcccaaaagccgggcaacctctggctacaggggccattgggtgccctcccagttgagaggggccgctgtttcgccttgtccgtcagtgccagtgcctgtgccagaggtggcgaggtgagtcctccagagcttcctggccgggccctcctcctgcctgttctggctcctctgctcccacgctagctgtcccttttctgattctggtggatcctccctcccctaattaaagtctctttttgcccctttggggctgcatgaggtcaaaaaaaaaaaaaaaaaaa

SEQ ID NO: 1915 - DNA, 963 bp, Homo sapiens
attttcttccggtggctggtctccggcggccccggccccgactgggccccgtgccccccgcccccgcggccccccgccgccgggccagccgccaccatgaagaaattctttcaggagttcaaggccgacatcaagttcaagagcgcgggacccggtcagaagctcaaagagtccgtgggggaaaaggcccacaaagagaagcccaaccagccagcccccaggccgccccgccaggaacccaccaatgaggcacagatggcagccgctgctgccctagcccggctggagcagaagcagtcccgggcctggggccccacatcgcaggacaccatccgaaaccaggtgagaaaggaacttcaagccgaagccaccgtcagcgggagccccgaggccccagggaccaacgtggtatctgagcccagagaggaaggctctgcccacctggctgtgcctggcgtgtacttcacctgtccgctcactggggccaccctgaggaaggaccagcgggacgcctgcatcaaggaggccattctcttgcacttctccaccgacccagtggccgcctccatcatgaagatctacacgttcaacaaagaccaggaccgggtgaagctgggtgtggacaccattgccaagtacctggacaacatccacctgcaccccgaggaggagaagtaccggaagatcaagctgcagaacaaggtgtttcaggagcgcattaactgcctggaagggacccacgagttttttgaggccattgggttccagaaggtgttgcttcccgcccaggatcaggaggaccccgagggagttctacgtgctgagcgagaccaccttggcccagccccagagcctgggagaggcacaaggaacagctgctggctgcggagcccgtgcgcgccaagctggacaggcagcgccgccgtcttccagccctcgcccctggcctcgcagttcgaactg

SEQ ID NO: 1916 - DNA, 1701 bp, Homo sapiens
cccggggttgcaccatcccagaagctgctgttagctcgccggtcctcggcacgccgcccgttcgcccctgcgctgtccgcccttcccctagcgttacttccggtccctcgctgagggggttcgtgcggctcccaggaggcgtgaaccgcggaccatgagcgtgggcttcatgcggggccggccagctggcctatgctctggcgcggggcttgcacagcagcaggcgtcttggctgcccacaagataatggctagctccccagacatggacctggccacagtttctgctctcaggaagatgggggtgaagttgacaccccacaacaaggagacggtgcagcacagtgatgtgctcttcctgggctgtgaagccacacatcatccccttcatcctgggatgagattggggccgacgtgcaagccagacacattgtggtgtcctggcgcggccggcgtcaccatcagctccattgagaagaagctgtcagcgtttcggccagcccccagggtcatccgctgcatgaccaacactccagtcgtggtgcgggagggggccaccgtgtatgccacaggcacgcacgcccaggtggaggacgggaggctcatggagcagctgctgagcacggtgggcttctgcacggaggtggaagaggacctgattgatgccgtcacggggctcagtggcagcggccccgcctacgcattcacagccctggatgccctggctgatgggggtgtgaagatgggacttccaaggcgcctggcagtccgcctcggggcccaggccctcctgggggctgccaagatgctgctgcactcagaacagcacccaggccagctcaaggacaacgtcagctctcctggtggggccaccatccatgccttgcatgtgctggagagtgggggcttccgctctctgctcatcaatgcagttgaggcctcctgtatccgaacacgagagctacagtccatggccgaccaagaaaagatctccccagctgcccttaagaagaccctcttagacagagtgaagctggaatcccccacagtctccacactgaccccctccagcccagggaagctcctcacaagaagcctggccctgggaggcaagaaggactaaggcagcatctgtcccctctgtgattcagagcccttagttgagagcccctgccgcccctgccacccccctgccccgctcccaccattgcccctcctcagctgtgcaaggagaaagcatgcttaggaagttttcaggtccttgtgataaaacctccttaaatctgttcagaccaagcaatgcgagcttcctctcctgtcccatgttggaagttgctctgaaggggtggtagatgctggaagccagacacaaccctgcgtacgctgctcagttggtggagactggggctgggactggagtcagcccagctgggaggaggggctggggaggatctgcagctgaagcccgaggcagggttggtgtgatgccaaggcaaagtggtgaggagaaaacaggaaacgggctttctctgaattggtaaatgggaaagaagtgagcaacttaagattgtcacaattaatcacaagtgtacaggattagactgggtttatatttaactcttgcttcataggtgtaccatttaaagagtgttatttaatgctaagtttaactgctttaataaagtttatttttaaatatcaa

SEQ ID NO: 1917 - DNA, 1973 bp, Homo sapiens
  misc_feature (1)...(1973): n = a,t,c or g
aaaatgttagaactataatgatacttgtaatcactgacaagtgcttttatgtttctagtagaagaaaatctttaatttgctacacttgagaatagcatctgacagtgtaactatttaaaaatcttttctgatagaagaaaggagaattggcatatgtttatatttagattctgctaagggctttaaaaatagataacactacgtataattatggcagtgatgaaagcaaatgctacttgagaactgtcctggcctacccttttgagtcagctgttcaaaggaaaagttggactcagtgttagaaaatttgagtttttcaagttcagttggaggtgagaaaaagagaaaatttgggtattgactcagttatttccctttttcaccttgggcaagttttgctctctgttaatggaataaatgatacttactttttctggaattgggaatcaaatgagatgacccaaggaaaggaattttgaatgtgttgagcactgtgccatgttcataccattgattggcagaaggaacccttttttgatttcttaaaattcaggagtttgaagtgagtaatatctgaattggtgttagaactgttggtggtttattgtattacaagatatttcaaattcctttttttgtttacacttttaaactattgatgcacttgaatatgtttatgcagttgtgaaaaaatagtgtaaagaaagcagtacaaattatcttgagtttatataagatgattcaagatttgtgccggacaaggagaaaaagaaaatttgttgatatctttgggtgaggatggagaggtccaagaaaccattttgcaaatgttttatattactaacaagacaatctaaacctaaataaacatctttttcagagaaaagacactagagaaagatttaatttgtgatatttcaagctagattataaactgtgatctttgtgaatgaattaattcattccagaattaaattttggtctttgtattttgattccttttactttagtgaggattttgtagagaagatgaaatttcacctctataataatagaagttaggagtgaggtctcacaaacatgggctgtcttctagatttgggatataccatcagggacaataaataactgaaatttggaaactggataaaagagtctgctagttaggaccacttgactaagagtgggtatagaagaaacctaaggaagaaaagttagatttgagacaacatattggagtatgttgaaattaaaggtgaataaagtagtggaaattcgatagaatttaaaggagacattgtagtgggagatggtagaggtgattagatataatatgtatatttatttgaaaaatagatatataagaatgaaagttgtatgtagtaccaacaagtaccattcgtattatgattcacaatttacagagtattttcatatataaaaatcttgtgcaatgggttgttttttcattttatagaaggagcagaggctaaaggaagttgaggttaagtgatttggaagttacaaaaactagtaagagctcaaactagcaataaaattatagtatgtttttcccttgccttcactgtaatgcttaatggttgtgtagtcttatacgtgactcctgacttcaaggatcctggtctgtacctctttaggtcaacacgttttgagtgaactggtgttggttatttggaattagatataaagtcatatattctttggtgaggaatggcttcatataggagttcacattcaaaacaagctttgacaaaataatagagtgaaaattggtagatcagagttgagctgattggaggaccaaattaaaagactgggctgnnnnnnnnnnnnnnnnnnnnnnnnnnnnnnnnnnnnnnnnnnnnnnaggccggccagattgtttgagcccggggatttcaagaccagcctaggtaaccggggtatcccagctacttgggaggctgagctgc

SEQ ID NO: 1918 - DNA, 635 bp, Homo sapiens
  misc_feature (1)...(635): n = a,t,c or g
gtccttttgacagccagtgttgctgcaaactgccggggacccacttagtttcaaacatgatttttcccctgaaataacggcctcccatctaatggcacgctgaggtcacggggcacggtggaaccagtctgtgatctgggagcctgcccccagagacacaccagtggaactcgtgaaccgtctagattaaaagattaaaacgtccttactgcaggtctttatcatgaagcccatctaatcagtggcacgtttactcagaataaagaatggcccctctaagggaggggggaaggcagcaaagggtcagcaaggagccctgtgtgggggtcctgccgtctgggttccagtcattaagaaagcatatattctttgagcctccactcctgaatctgtaaaacgagagctctggactccagggtggctcttgagattgtgtttctccctataatttctataattctttgcaaatcacaactagcttctcactttattatgcataatgatttaaatgccctgtttccatgaatgtgtattannnnnnnnnnnnnnnnnnnnnnnnnnnnnnnnnnnnnnnnnnnnnnnnnnnnntaagtgtactcttcagtggtattaagtacactcactgtggtgtagct

SEQ ID NO: 1919 - DNA, 835 bp, Homo sapiens
ggcctggcaggctgggacatcacagatgcctccctgcggctcatcatccgccacatgcccctgctctccaagctccacctcagttactgtaaccacgtcaccgaccagtctatcaacctgctcactgctgttggcaccaccacccgagactccttaaccgagatcaacctgtctgactgcaataaggtcactgatcagtgcctgtccttcttcaaacgctgtggaaacatctgtcatattgacctgaggtactgcaagcaagtcaccaaggaaggctgtgagcagttcatagccgagatgtctgtgagtgtccagtttgggcaagtagaagaaaaactcctgcaaaaactgagttagtccaaggataagtatgtaaatacggggcgggctctgggaggggagagactttacaaaaatgagggcttttattttccatttggaacgtgggacaacagaccacaacgcaattccattttgcaagtctttccaagggagaagctgttcaaccacccgtttgggggatgagtgagccgacactttcctttggtctttctgaatcgtaactgcactgctttctggaccatttctaaggcggcctttacaagaagacattcctgtcggagaggagggtggacttcggagaaattctcatactgaagcatgagcttaggagtttctgttagtggtagtggtgttttggacacttcattccttgcaacaccgaggttttgggtgttgacataaagtggaccacacaccacatctgctgccgtcttgacacttttttttgtttggttggttttgttacatcttacattatgcagaactatttttg

SEQ ID NO: 1920 - DNA, 440 bp, Homo sapiens
  misc_feature (1)...(440): n = a,t,c or g
accntttgaaacctttngaattccacgacttnnnnnnnnnnnnnnnnnnnnnnnnnnnnnnnnnnggcacgagcggcacgaggcgacaagattgaaactgtctttaaaaaaataaataaatactcacaaatgcctgttaccagggctttaggaggaaaaaaaagcaagcccaacactggcaggatccagaaaaagaatgatatgttgctgttttgagtaaaagtgatataactcttttggaaatttgtaactgtcctaagaagaaatacacaaagtgtctttcataaagtttcagctttactgcagtgtgcctttattcccagccactgggaagctgaggcaggatgcttgagccaaggctgtagtgtgttgcgattgtgcctgtgaacagctattacactccagccagggcaaaatagcaagaccttgtctcttaaaaa

SEQ ID NO: 1921 - DNA, 1586 bp, Homo sapiens
tttttttttttttaagaacaaagcagaggggtttattataggaacattctcaaaccacaacggaaaagatgtccgtacaggtggatggggatggagatccacctcggagtacacagacttcagggggcctcctgcctggcacgttctttctctcccgtatcacctaagaccctgagacctccaccctctgcaggagagacccacaaagaagcctcctccctgtggcctggctcccatcagggacagtcctgtttttagagcaagaacagtctgtacttcagacaggatcccaacccccacccaaattcaatgtcgaccgtctgagcagccagcttcattggctgcaaacgcctctctcaggtgagtcaaaggagacacgacggggaaccagggggccctaggtgaggatgtcatgggcctggtgctccaccagcatctccatgctcttcacatccgtgcaccagaactccaggcggtccttcattcccttgatctgttgcaaatccaacactcggggctgcacccaggtcatgtggactcgtttgtccacctcgtctatactgcctttcaccagccccaccgaaagggccttcatcaccagaagctccacctcattcactgtgattttagcacttttggcaatttcttcaaaagtgagttgtctgtgattggcaggtcgtgtgaaagtcatctccatgaggcacaacaactgaattttcctccagaagctggggcttcattagctgctaaatccaggctgctggccccaggcagtcttcagagtctggaaccgctctacgttgccactgttgaaggcatagagggtgtcaatcagccactgccggtcagtattcctcagggactcccagcacagggtgcatgaggagttctccaaagttaaaaactccctcgccgagaagtcctgctagccccagcgtgaaggctctctcctgctgctcagacactggtagatccttgatgtcaacacagcccaaaaaccgcagagcatctttgtagtaggacgcgtggtttccgattgtttgatagtatttactggagagatcatagaaacgactgtgaaccgatgtcacaccaggaaggttgttgagcatttcttcaacatcttcaattgtttcctttgtaacctgtaggtccccgatgtttaattttagagctccaattgctgttttacacaggatcactgcctcatcactacttttcaccttctcacgagtcttttccagaaaagtaagagccacattaggatcagtcatctgtctaactacgtgaagaatgatttccacgagggacagaggattcaccctgtgttcaaattcactgataaagttttcataaagcttaatgagaccatctccttgggcaaagcacggatcctgcacaaaatcaagcacctgaagtgtcagctgatgccacaacttcttcgtgtagagctcctccagacggtgccacacagcgggctgcccgggcccggagctctggctctgctgtaggaagcccggtacgtccttcatgacagcaggaagacccccggcacagaagaacaaccgggatgtcagcaccgacgg

SEQ ID NO: 1922 - DNA, 484 bp, Homo sapiens
  misc_feature (1)...(484): n = a,t,c or g
gctggacttcatcaaaattaaaaacttttgtgctttaaagaacactacaaagagagtgaaaagacaactcatatgacccaccattccactcctaggtatacgtccaagagaaattaaaacatatgtgcacccaaaaatgtttaaagcaacactatttgcaatactcaaaaggtgtaaactcaaatgtttactaactgctgaatggatacacaaatgtggcatatccatatgacagactatnnnnnnnnnnnnnnnnnnnnnnnnnnnnnnnnnnnnnnnnnnnnnnnnnnnnnnnnnnnnnnnnnnnnnnnnnnnnnnnnnnnnnnnnnnnnnnnnnnnnnnnnnnnnnnnnnnnnnnnnnnnnnnnnnnnnnnnnnnnnnnnnnnnnnnnnnnnnnnnnnnnnnnncctcccaagnttaagcaatnncctggcncaagctcccggagtacttggattaaagggccancaccaaacaaaggggc

SEQ ID NO: 1923 - DNA, 1272 bp, Homo sapiens
gtagttttgggcaaaacattcactgttctgtttcagcatatttccttggaacatcttcatctctttccattttgcggacactccccttcttctattctcctttactcaaaacatatggtttagacccacatcatggctttcttgtgggaagcctggatgggactaggaaaacacatgtttccaacatggtgcatatctgtttgtgcagatatcagacaagatttaatcttgtctaacttatgcgtattgttttgatgtttgcctgtggttattctgggcacagcaatggtggacattattgaaaatgaactttattggcagatgaaagataatagaacatgaagatttatgaactaccataaggctctgcatctctgggtcttcatttccaaagcagcacttggaaaaccaagcccagttcaggcaaagagttcctttcttctcaccagcacttgaaatggtccagaatatacctgatgctcacaccacttcctcatccacttctgaaatgaaaaggtcattcccaatggttgctatacttttccaagaggacttcccttcttaaaatctgaaaatccttccattcaacactgacctgcttcattcttaaaaaattttatcatctctatcatccagaatttcttctttctccatccatatttatcttttacttcaagacacttactttcctattccctttcaaaactccttcttgtttcaaaatggattcccaatggctctagctactcctgtttctaccttgctcgacttgaccttcccctgtgtctttcctgtgcactctccattgcccctttttatgtagcctcctttctagccctgaccttcctccctattcagtcatatgcacattcgcgtatccttttttttcaccccacttgcacacagtcctcttctttatacagtcttatatacttgcaagtgatctttccacaacattaaaaccacattttgctcctcagacacctctttgcactctagatcttttctgatcatatgtgtctggatagcacatcaagtttcagacctggctatcagcacattagccagcaagaatataagtttagatctgacaatcccaaaacacaatctgcacataaaataattcacatatatcatgaagaagataacttactgcaaaggtaataaggccccacagtttctgatcatttttttttctatctccttttccaaataagtcctagcttcattcttctaattcaaatttgaactactttcaaattctacatacgt

SEQ ID NO: 1924 - DNA, 581 bp, Homo sapiens
tttattatgcatgcttattgctgcaaaagaaataagcaaagttttctgtttattgtgcaagaattttaattagatttgcacacatctcaaaaaattctattgtgtgacttccaggtcttggagttaggtcaacaggagaagagtcaagtgaggtcacagatgaggtaagagaaacttctgaggattttccttgagcctcagcatctgaatcactcctttggcaagatcgatagttgctaactgatcccgatctctgtggagtagcagtccctgatttggcttctgtaatttcatcatcaatactacggaaatccagtagataagttctactatccacttggtataactgtagactcattttggagtaagtgcttgtcacaggattcttccttcgtacacgcaaataatatgggtttacaacccttccattcataatccaattgtttgattgctctacatacttctgccataatatcatttggtcgactttgacttctaattcctaaatgccattttgctttccttacacctgggtgtttggatttctgtggatttaattcatcaggggtaaggcgtccttt

SEQ ID NO: 1925 - DNA, 1551 bp, Homo sapiens
  misc_feature (1)...(1551): n = a,t,c or g
ttttttttttttttttttttagttaaaagacaaatattttaatctagtttccccactttaaatcattaatacaggtcacaaattgcatttattggtagacatctagaaaacaatcaaaagtgtatatatctctctctatagatcttattaataaattttatttggacaagagaacttgtgccacaacagtttaaacagcatgattaaagactgcagcactcccaagagtgggtcacaggtatgtacagtatgtgaagaagttgcacctcagagctgatcatgatcaagttaaaaacaccagacatacattatacgtctaataaatttccttcaggtcatgcccngctttgaaaaaatcagacacagacactcagcaaccattctgtaaatgtgtaccagcaatatggctggcgccttaagagtttaagtcaatcctacttgtgttggcatcaggtcctttaggagatgtaaaaacccctcctttcccatttggcacacgtcacaaacggattcacacacagggctgggctggacagctggccacagagcccagcaagtccttcctgggagagaagagttagggctgatactgaaggtctctttcacatctgggcacacgtcctgccttcaggctgtaagaatttcatttgtcgattgttaaataaaaccaggagaaagcaatgcaggtctctgggaatctcatcccttccataaggaaaatgctctgcccaattcaagtttcattcagtcaggaagacagaaggatttaaggcttcggtgacaattataatcctctgagaaattatttccccttaaagtcaagataagataatagtgtttactgtactttctcttgactcttgaaatccctggtattgggtgtaggcaacttgcacctgcaatgaagtccgcaggagaggaaggtctctcctcccccgaaagctatcccaggtcacatgcgtggcgaatgcccactgaacctcggctctcatggaagcaggaaagacaccgagattcaagccttctagtaggttgaggacgctgtgctcatggcatcttcggagattttggtactggcagggtggatgccttgcaaaatacttgacatcgctgtcacggtccatctgaagagccatgatggtctgctccacagcctcctggtggcagcttggcagaggcccaagaaatagtctttttctagtagagtttgtcttaatgtctttgcaagcagcactcgcacgttaggaaccctgtcatttgctaaggttagcagatgcggcatgagatgcacagccaaactggtccatgggaaggcagtcatcctcaatgacagtctggcagacaaagacaaaggcttggccgaccagaccacttgggacatctgccaaagttctccacaagctcattgatgaggtccactccgaacgttggtggtgttgccgcatgcagcttcttcaccatctcgctgaccaacttgtaggaaatccaacgaacagaagaaactttgtctgcacacagattcagagcaatgggacgtaaatagtcataaac

SEQ ID NO: 1926 - DNA, 438 bp, Homo sapiens
gagagtgctccccatgcaactccaccttagaaaccacgtcagatactgagtagcttgctgactcctggaaacttctggtttttgttagtatcataatgaaggcaaagagaactaggctgtcatctttcagcctctttgacttactctagatgttgggagcagtggttgccaggtgaaacctgggccctttgtctttttcaccatgctttgggcagtttctgtatccagagagtccgcaggttcagataagctgaagaagagtaatagaacagcaaaggaagtggcttgaaggatgtgctagtaagccctgtggtttgtgcttaggtctctgctctgctacccaaggaactggtggttcagctggagataaaaagaagaatttgccaagttcagagaagaaaccccaaccccggaaaaatcctctgtctccagtctctg

SEQ ID NO: 1927 - DNA, 1134 bp, Homo sapiens
  misc_feature (1)...(1134): n = a,t,c or g
tttcatgaaaatatagtcatcaaatttattttcattgggatgccattttttgaagaattcctaagactaatgtttcttgacatgcaagagttagcattaatagcttacgttactataaatactgctgcttggaagcagtacaactgttttagagttttaagactacagactttcattactcaaatcttattcagtaaatgtaaaaatcagaaggttctgaacagctggttaggaaggtagccaagatgcaggaaagatgtctgcgcctccttttcaagggcagccaactcttgaacagtaggtgccaaaatatccacatggcctttataggcttccaccaccagcagcccttttctgaccgtaggganactttcccatcaaattcatccactggtacctttatatccggctcaacctgagaaatggtacagttcaggtgttcttctatctcagatagtaactgcatctcgttggtacccataagggtaacagcctcccatcttcccttggagtcttgtgttataacacccttttccacggctgctacatacatggtaccaaaccttttctttttctgttgccaccagggaaattgccagacccatcctttcagctcttcctactctgccaattcgatgtacgtagttttgcttttcatcgggcagagtgacatttataacataaggaacaccgtggatatcaattcctctagcagctacatctgtgcaaatcaagaatcttacatctcctttcttaaatctttccaagttttgctttctctcatgaggctttctgtcaccatgaagacaaacacatgagaactggtgtccttttttatcaggtcctcctccttgttgtataaagtactgctccaagttatcacagtcaattttggttctacagaagataattgcttgatccatcttatgttccttgattgcccggacagcatactcccctttcaggattttaatagcttcagaccacatctctggactattagcaccaggtcttgtgttatcttttgcatgtacatcatcagttctaatgtggctctttccaagcctttcccagagtctgtcagttttgggatttactgggacaacaacatggtgtacagtatctggaacagag

SEQ ID NO: 1928 - DNA, 659 bp, Homo sapiens
ttgattataaagcaagtttattctgaagagggattgtcttatgtttacgcacagggaagaaataagaggaaaccctcttttcaacctcttttccccctcacagaaccgagtccccaagttctcagcaacatcatgcagtgcttcagcgcctttactggggaccaaagatgttaggatcgtgaagggtcagactggtcaccagctgttcaaagtcacccaggctccagggtgcaggtgacagattttcggggccaagagatgacctgttgtcagggcttggggtgggggaacagatggagacagaacatcatccaggcctgaggtttggaaattgccaattcctgttccccagaggacctgggtatcagttaccccaaacctctggcccactcctgcttccttggaggatcccaccagtgagtctccctgttctgtccctcccagcccgattctcctgggaacccagtcatgagatacccgcccgttccttcctccttacgggggctgattgaaggtaagcaagagatcagtctggtactggggcagcctcagcaaggcctgatgaagtgtcacgtcctttgctacctgctggttttccttagctatctgctgcttgccagagaggacccaggcttcttgacagcggcccctcagggccc

SEQ ID NO: 1929 - DNA, 1758 bp, Homo sapiens
ctcagggttctgggctgcgggtacactgaggatggctgcgcgttcatgctccgacaggctggccagcaggttctccgtcatcctctggttcagtggcgagtccccgctgggaagtagctctgcgctggagttgtccatgctggggctggtgagggtcatgtcatcgctgctggttggggagccaaagctgagggcgttgggcgtgctgaggctgcgaccgccgacccgggcagtgaaggggacgtcgtcctctcgcggacggggctcctcctcgctgggtgaaggccatcagacagacataggtgtgcagctcctgcacagcgggggccccaggggattcctaaattctgacaaggagaccggcaaggagaacttggcaagaacggacggcaggtcatgagatgggaactggtgggagaactgctcggccagcggggagtacagacatacgctggcattgggagacagcatgtagacgttgttctcacacagcgggtagatgatgatggccttgccccagtacaccagatgagctgcaagctggaaaacctgcagcaaggccaggtccgcatcttgggctagctgctgcaggttcttcacagcagatgtggtcttgatcacccgcactagggcaggggagcagtcaataggaagctcacccagcaaggacttctcatcactgagcagcagcagggcatggtaggggcggatggctttcaggctccgttcgatggcctctggggggatcagactggaggccgcatagtggatcttgtggggcaggcagaagctcacctccagccagctgttgatgtgaagccgaactacgcccgacgtgcacaggctgtcataagcttccttgaggtccctggccagcttgcacttgggcaggatgtgatggaatggggactgaggaccttcatttccatcagccatggcggacacctcatcctggagcgccaggatcagcttggcctcccgggtgaggtactggcagcggcgctcctcgtgctgcagcacggtggcgatacgacgggacaggttatgcagacagtttatcactgacgggtctgcgttggccctcagtgcaaacaccacattaaaaagaatcatagtaggtgcttccctcttcggggaaggatctgttttggagatctgccccagagcatgctgtagcagtgttgggtgcccaacaaatcgcacattatcaatcttcagttcaaatttttggccacacatttcagacttggttgccaaaattgttgccagaataacatctgaaaacctggaatcgccgtcctgctcatcagcatggtcgcccgtgttgctggcagcgtatctgctacgcggcttacttgtctgggacgccgggtgctcctggcttctctggaaggggtacctgaacagcagcttattgcccctgctccccgagctcaccagaatcacgctgatggggctggtgttgtcccgcatcccgccgtggggccggggccgggggcggagggggccagaggaggacggagccggaggcggagggggcccacgtgccacgctccgggctcgcgagacttcggcgacaccgtccggaggaggtgctaaggcggcggccgggagaacggcgcaggcgcaggcgcaggcgcaggcagcggaatgcgcaggcgcggggccttctggaagccaccgagttccgcggtgctgtctggagccgtacggttcgcgtttggggcacaggggccctcttgctggtgcggatgggaa

SEQ ID NO: 1930 - DNA, 337 bp, Homo sapiens
tggggccaggagttcgagcaacctgggcaacatagcaagatccctatctctacaaacaaaccaaaaacctcagtagcatctttgttgttttttctcttctgtcaggtattttggtagtagtgatcttctgattttacattccctttttttttttttccatgtagaaatctctatggccatttcctcttgtgaattaattgagtttctaaagtgaactagctgcatgttagaaccaggacttttttggagccctttagagcatgctgggcaggcgtcatccccaagccccagggtgggtcatatttctggatgatggaggcagggggtgcaggggtcc

SEQ ID NO: 1931 - DNA, 477 bp, Homo sapiens
tgaaacagagtgtggattggagatcgcagcagtcttaatcctgtggggtcgagggtattccctggttgtctgggacggaagttaggggtttggaggaaagggaagggggtggggcggcctccgtcctttagtcctgatcaaggtgaggagatgcaagtccattaaaaaaacatttgcttccaaccagactcctttctcagtggtgccggtcccgttctctatcccggtgtctctcatgctcccggttcctttcttggaaataatcatcatgccgatcttcattatgaagcagatcccggtgcctcctgctgctctcccgggaccggctaggtgacctttcccgggagcgatgtcttttcctggaagagctcccactggcacccacactgtaggacttggcttcaatgccatgaagacagtccttaagagaggagatgaggacacggcaacgctcatcatttggcaacccgggtattt

SEQ ID NO: 1932 - DNA, 1142 bp, Homo sapiens
aatgtccaccctgtccgtgacacacacctgaccccaagacacaaggccggaggcacgggaaggttggaattgcttttattgggggcggataccgcaagggccccgcccacggtcaggttagtgttctgcccttgcagagggggccagcagcctgacacctccacctgccacccgcccggggttagtggaacatgcaaagctcagagggtggaggcaggggtggtcgctgctgagaccagggctgggcgcaacaggagggtcagcacagagcctgggctgggtgtccctggggccccaaagggggcatggggctccatgggagagagacgggcaggcggcaccccagtgtggggctccacaagctggaggggcccctgggacccaccaggaggacaggtctgcagttcccagccatgcccggctggaacgtccgcctccccactgggtctgggtcctcggggcctggggttagaggccgacatggaaggcacttactaggggaacagaggctggaggctgacgccggaggcccaggggtctcaggagtgagtgtggggggtgagctggaaagcacagatcagacagcactgtgggggctgggcccgagggcctcgtcttcccatggggaaggggcttctctgggtagactgggagagaggctgactggggccccccgtccccagcaaggcccaccgtgcaggccagtgctagaaacaccagggccctctacagacagggttgggcccagctgccctgtgcagctaggactggcaggcgggctaccctgggaagacaggagggtgggctggggcccagcttgggaccctccaaggcacctggctgtgtgagtggcaggtagaagggagtgaggagacccgagggggtgaggcggccagcagggctgggccagccctgtcccccaagatacaggctgtctggacagcagatatatattaatatattagtctggtctttttggttaaactttaggcaccacttgggaggaagacacctttaagcgttgaaaacggcccccgcgcctcggtgggagccgggctgggccgcatgcagagcggggtgggcgcaggcagcctcaggccacggcagactcagggccccccagggaggccgaggaccccgat

SEQ ID NO: 1933 - DNA, 347 bp, Homo sapiens
gcacgattccagcggcagcaggaacagatgaaacagcagcagtggcagcagcagcaacagcaaggtgtacttccacagactgttccttcacaaccgtccagtagtactgtccctcctccaccacacagacctctttatcagcctatgcagcctcatcctcagcatttggcttctatgggttttgatccaaggtggctcatgatgcagtcctacatggatcctcgaatgatgtcaggaagacctgctatggatattccacccattcatcctgggaatgattcctcctaaaccattaatgagaagagaccagatggaagggtcaccgaacagttctggagtcatttgag

SEQ ID NO: 1934 - DNA, 673 bp, Homo sapiens
cgtctttttactttatttagaaacctgtttggaggttatggatgataaacccaatcctgaagccctaagtgacagttcagagcgtcttttctcctttggcgtcatcgcagatgttcaatttgcagacttagaagatggctttaatttccaaggaaccaggcggcgatactacagacatagtcttcttcacttacagggtgccattgaagactggaataatgaaagcagcatgccctgttgtgtccttcagcttggagatatcatcgatggatataatgcacagtataatgcatccaaaaagtccctagaacttgttatggacatgttcaagaggcttaaagttccagttcatcatacatggggaaaccatgaattctataacttcagtagagagtatttaacacactctaaacttaacactaagtttctagaagatcagattgtacatcatcctgagaccatgccttcagaagattattatgcttatcattttgtaccattccctaaattccggttcattttacttgatgcatatgacttgagtgtcttgggcgtggatcagtcttctccaaaatacgagcagtgtatgaagatattgagggagcacaatccaaatacggaactgaatagtcctcaaggtgaattattcctttgagctgagaatctaatagat

SEQ ID NO: 1935 - DNA, 1490 bp, Homo sapiens
ctggaagaattcgcgtggcaggagaggcggggccaattttgctgagctttctcgcgggcttgcagctgcggcaagtgctggcggcggctgctcgcgcaagtcagctggcgtgggaactaccctttgtagctgagaacggcttgtttattgctacaaagactctattgacattggtagcttcagcggcagcagccttcttacggtataaagctgttgcttcctgaagaggctacaagcatccttccctaggactgctgtaagctttgagcctctagcaggagacatgcctcggggacgaaagagtcggcgccgccgtaatgcgagacccgcagaagagaaccgcaacaatcgcaaaatccaggcctcagaggcctccgagacccctatggccgcctctgtggtagccagcacccccaagacgacctgagccgcccccaggaagacccgagcactccagaggagggcctctaccacccttgaagaagcctcgagcactgcccaagcacaaaagccttcagtgccgccggagcaattttcagggcaccaagaaaagtctcctgatgtctatattagcgctcatcttcatcatgggcaacagcgccaaggaagctctggtctggaaagtgctggggaagttaggaatgcagcctggacgtcagcacagcatctttggagatccgaagaagatcgtcacagaagagtttgtgcgcagagggtacctgatttataaaccggtgccccgtagcagtccggtggagtatgagttcttctggggggccccgagcacacgtggaatcgagcaaactgaaagtcatgcattttgtggcaagggttcgtaaccgatgctctaaagactggccttgtaattatgactgggattcggacgatgatgcagaggttgaggctatcctcaattcaggtgctaggggttattccgccccttaagtagatctgaggcagacccttgggggtgtaaaagagagtcacaggtaccccaaggagtagatgccagggtcctaagttgaaaatgatgtcgattgggggcgggggacactgtatttgatatttgtgatcagtgatcattgttcaactgcgaaatagagtgtttgcttttgataatggaaaattgtattcgttttaaaattccgtttgttgagaataacaatatgtttaaaaatataattgaacaaatttttttctttgtttcctgtcattgacatttagtataacagttttgctaacgttctaaaatgaagtcgttccatcataatctatgatcttgtacagcacttatagaaataagctgttcttttgaagttgaaatacccagtaaaatgttgaagaaggatggaggatttcttcatatctgacgtttctgaaaccctttgtgtctgctgttgtgtgaagattgacatttaccatgattttccttagttactgcagaacatagagaaaaataaaagcctaacgaatagtaaaaaaaaaaaaaa

SEQ ID NO: 1936 - DNA, 496 bp, Homo sapiens
  misc_feature (1)...(496): n = a,t,c or g
aaatttatagtacaaccatacatgaaactggatgtagctgtaaaagaaatgggatcgattttttttttgtaatgatatggaaggatactttaaggtatatcaagtgagaaaagatctaggaacaggannnnnnnnnnnnnnnnnnnnnnnnnnnnnnnnnnnnnnnnnnnnnnnnnnnnnnnnnnnnnntaggagcaggatattagctaactcgtgttacttctgaaaatctttgaagctccccctgctcttttttccagaagtgtaaaaacaagcatgtatttagtattacacatttttaaaaaatgaaaaaatgctgctgtgtgaatgaaagagtatacatcgtgttgctccagatggtaaaactagagtagaatttactaaaataaagtttcagcacgtaaagtaaagcacttctctgctcttggccattttagacactaaccatctggagcaaccatgtaactcttgccactcatagctaacttaatgtaaa

SEQ ID NO: 1937 - DNA, 2240 bp, Homo sapiens
cgggttgctggtttcttttctgtggggcccagacttctgtaaagcacacagatgtgggtaagatgaaaaactgtggcccaacagggcttaaccctatggatggtgggatttttatccaatagtttggcctggtgtgcccacaggatgggaacagggaggcaccatcaacacttgtcatgttaatgagcttttctttgctcgaggtgttcagagacaagtcctgtgtctacctgcgtcagcctgaaaatggaaatattggctgttgactcttgtcatttagtgacttcatccccctcccctcagtctgatcttgtctaagtagaatccaggcgttagttggaatcatatcataagtatccatgaagaaaacgtcatgatctgcctcggagtggggagaaacaggccctccttgtccttgtgcagcccccacttttgtcctggctgtgggtggccatccattttgagcacctctgccagggctgcagacctggaggcgaagggagtgtggaagaggagggtgtaagggtcgacgcgtgctgaatgggaggtgcaggtcctcggtgcgttggcagaagaggcttctggagtttcgaggccatacctcctttcaagagctttggatttggggcgacttccctgggtctaggggagtgttcctgtcccctgttcaggttcaagccctgcggaccaattccacccctcttccccttcccctgggatttcctgacatagatggtgtgttcatgtgcaggtgtgagtgtgctgtccttctgatctctgttgatcccgctttcctactgagagggtggtggagagggtggtggtctcttctcacctcagtttttctgacacagcgaattgagggctttggccaaggccagggtctctcaaacttgtccgccaagtaaaccatgatatatgtcttcccttccaccttaactttgccccaactcctcttttatcctaacatgggacgctcagatttcagagggaatacccagcaggggacagggtcagctctcaccagggagagtgaggcccctggctgctgctcggggttggcactggtgttgctggctcagctcttggtgcatgtttcagatatgtgtgtacacttctgactggtgatcagggcccggccgacggccttgagcggctgcagcctgctgttgggacgatggtcaggtcccatgttgtccctgctgcctccctctggagtggccacttggcaatagcgcccatccacatctggaaagtcggagccgcagcctgctgcaccgtttccgctctgggatcttgtgagttacttttttaggctgtggtttggtgaaaggaaccaacacattaacgatttttcccccagaagccactgaataattctttttggtgtatttttgccttcctgttggctgtctggccttggagcaggtcgggagagtagagtacataatcagtgccacacagaggcagggcgtgtctgagagactaatgcctgtcctgcctctggcctgtgtcctgggtgtgtaccatacctgctgggccagtcccacacatttccaccctgcccctgggagcagcagctttgataccatgggtgtcccttgagtctgagctagagtgtgtccccgataaactgtgagacctccctgttcttggtgaccccagttggggctttggcccctccagcaaccttgtgtcccagccctgccccttcttcccaccccctcaatctgctagtccctgaagcctttaaccaaacgggagtgggcacagaaagccttctcctggcaacaggacaagggctgcccgcgtgtccagccctgttgctctcctggcgctgagaggtgggtccaagcagagttgatcagtccctgcctgccctgcctaggtctagccaggggaggttgtgtgtgtgggagaagaccccgggatctgctggggtgggatggaggttattaaagatctaagtgaggaggggctggggtttggatgcggggtgaggcccgagcgctcacacttcgtgtagggcgggcaggggcctgagcctccttgcagggcagtggccttggtgccctacccctgccctgcgcagtatttattgctaaattattgtccaggaggggcagcaactggccctggccccccgggtatttattgctgtacatagtgtatgtttgtgatatataaggttttctttattttgtatatgatcaataaaccttttaaagagaaaaaaaaaa

SEQ ID NO: 1938 - DNA, 433 bp, Homo sapiens
ggaaagttatactagtattttcttaagtgtggaatcaaatgagcacataagctgtgtccctgtgaaaagaggtttgtagcctttcaggtgcctgctcctattcttcatttctctgtgaccattgatcactgtcctttgtgcattgtgtgtctaagatgtcttcaggggaaagatgggtaagagacagtgttgctaatgctgttccttctttgtgcctccttccaaaccacagttatttgcccaaactacctctcgtggctggtttttcattggcctggcctctgcttctcaggctaattagtgactcctttctttgagggtcagggttggaggccccttactggtggttttacagggggatcctactttgttacacatgttgggtttcctgataaaaagagagtattttattaaacccttgaaccagtaaaaa

SEQ ID NO: 1939 - DNA, 605 bp, Homo sapiens
  misc_feature (1)...(605): n = a,t,c or g
aagcgtgcgctttagcaggaaggagaattaccccagaagagcacactgggccctccttacacttggcttcagatccatggattcaaccaagcagactgaaaatattgttttaaagccaaagcaatacgaaataatacatattttannnnnnnnnnnnnnnnnnnnnnnnnnnnnnnnnnnnnnnnnnnnnnnnnnnnnnnnnnnnnnnnnnnnnnnnnnnnnnnnnnnnnnnnnnnnnnnnnnnnnnnnnnnnnnnnnnnnnnnnnnnnnnnnnnnnnnnnnnnnnnnnnnnnnnnnnnnnnnngganggtcctggaacaataccccgangataccatgggacaactgtagtacatgtgtagtccatgtatgcatgtgtgaatccaagccaacattgtnttaaaataatantggaaaaaacaggttgggtgcggtggtcacacctgcaanccnacactttggaaattccggccacccgggaagaancctgaaggcnggnattttaaaccggccngggaaaatttcnnaaaccctcttttcaaaaaaaattttcccnaaacaaaggtttttccttntaggcccccncccaaattaaggngggaatt

SEQ ID NO: 1940 - DNA, 542 bp, Homo sapiens
taaataaaagtaaactgtttattaaaagatacagcaaaggtacagatacagagatacatacaaagatacagatatatatatatatttacatatatatacagtcttgctgttttcatgtgcactatatttagcagcacattatttaatcaggcggcattttaatggggttgttttgacacttggcattattaagatacaactatagccccgtggaaatttcaacgtttgaattccacttctccgacttttaatagtagcaaagaggggaaggagaagggaatggagtaccaaggctgagcattaggttaaacacaagaatttaaaagggccaaggtagcaaagggaaggaaaaataattaaaattaaaggctatctgacaaacaacccagagaaacagtaagaaaccatcattaagggcaatgggctatgtacccaagatgctcacatcaacctacaatgaccttttccaatccagttcttgtgttgaacctgaggatctgccctctccgatcaatccctccacccgataaatttgctaccac

SEQ ID NO: 1941 - DNA, 7752 bp, Homo sapiens
tccagggccagtacagtgacatcaacaaccgctgggaccttcctgactcggactgggacaatgacagcagctcggcccgcctctttgagaggtctcgcattaaggctctggcagatgaacgagaagctgtgcagaagaaaaccttcaccaagtgggtaaactcgcacctggcccgggtcacgtgccgggtgggggacctgtacagcgacctccgggacggacgcaacctgctgaggctcctcgaggtgctctcgggagagatactgccaaagcctacaaagggccgcatgcggatccactgcctggagaacgtggacaaggcactgcagttcctcaaggagcagaaagtgcacttggaaaacatgggctcccatgacattgtggacggaaaccaccgactgacccttgggctggtctggaccatcatccttcgattccagatccaagacatcagtgtggagacagaagacaacaaggagaagaagtcagccaaggatgccctgcttctgtggtgccagatgaagactgcaggttatcccaacgtcaatgtacacaacttcaccaccagctggagagatggactagctttcaacgccatcgtgcataaacaccggccagacctgctggattttgagtctctgaagaagtgtaatgcacactataatctgcagaatgcattcaatctggctgaaaaggaactgggacttaccaagctgctggatcccgaagacgtgaatgtggaccagccagatgagaagtcaatcattacctatgtggctacttactaccattacttctccaagatgaaggccctggccgtggaaggcaagagaattggcaaggtgctggaccatgccatggaggcagagcgcctggtggagaaatacgagtccctggcctcggagctgctgcagtggatcgagcaaacgatcgtgaccctcaatgaccggcagttggccaactcccttagcggggtccagaaccagctgcagtccttcaactcctaccgcaccgtggagaagccgcccaagtttaccgagaaagggaacttggaagtgctgctcttcaccatccagagcaagcttcgggccaacaaccagaaggtctacacgccccgcgagggccggctcatctcggacatcaacaaggcttgggagcggctggagaaggcggagcacgagcgtgagctggccctgcgcaccgagctcatccgccaggagaagctggagcagctggccgcccgcttcgaccgcaaggctgccatgcgggagacctggctcagcgagaaccagcgcctcgtgtcccaggacaactttgggctggagctggcagctgtcgaggcagcagtacggaagcacgaagccattgagacggacatcgtggcctacagcggccgggtgcaggcagtggacgccgtggctgcagagctggccgccgagcgctaccacgacatcaagcgcatcgccgctcggcagcacaacgtggcacggctctgggacttcttgcggcagatggtggccgcccggcgggagcggctcctcctcaacctggagctgcagaaggtgttccaggacctgctctacctcatggactggatggaagagatgaagggccggctgcagtctcaggacctgggcaggcacctagcaggagtggaggacctgctgcagctgcacgagctggtggaggcagacatcgccgtgcaggccgagagggtgcgggccgtcagcgcctctgccctgcgcttctgcaacccagggaaagagtatagaccttgcgacccgcagctggtgtcggagcgggtggccaagctagagcagagctatgaggcactgtgcgagttggcagcggcgcggcgggcccggctggaggaatcacggcggctctggcgtttcctctgggaggtgggtgaagctgaggcctgggtgcgggagcagcagcacctcctggcctcagccgacacgggccgagacctgaccggtgccctccgcctgctcaacaagcacacagccctgcggggcgagatgagcggccggctggggcccctgaagctcaccctggagcagggccagcagttggtggccgagggtcaccctggggcaagccaggcctctgcccgtgcagctgaactccaagcccagtgggagcggctagaggccctggccgaggagcgtgcccagcggctggcccaagccgccagcctctaccagttccaggccgatgcaaacgacatggaggcctggttggttgacgcactgcgcctggtgtccagccccgagctggggcacgacgagttctccacgcaggctctagccaggcagcatcgggccctggaggaggagattcgaagccaccggccaaccctggacgccttgagggaacaggcagcagccctgccccccacactgagccgcacgcccgaggtgcagggccgggtgcccaccctggagcggcactacgaggagctgcaggcccgggcaggcgagcgagcgcgggccttggaggcagccctggcgctctacaccatgctcagcgaggccggggcctgtggactctgggtggaggagaaggagcagtggctcaacgggctggccctgcctgaacgcctggaggacctggaggtcgtgcagcagaggttcgagaccctggagcctgaaatgaacacccttgcagcacaaatcaccgcggtgaatgacattgccgagcagttactgaaggccaaccccccaggcaaagaccgcattgtcaacacccaggagcagctcaaccacaggtggcagcagtttcggcgtctggcagacggcaagaaggcagctctcacctcagccctgagcatccagaactaccacttagagtgcacggagacccaggcctggatgagagagaagaccaaagtcatcgagtccacccagggcctaggcaacgatctggctggggtgctggccctgcagcgcaagctggccggcacggagcgggacctggaggccatcgccgcccgggtgggcgaactgactcgagaggcaaatgccctggctgccggccatcccgctcaggcagtggccatcaacgcccggctgagagaggtgcagaccggctgggaggacctcagggccaccatgcggcgtcgagaagagtcgctgggggaggcgcggcggctgcaggacttcttgcgcagcttggatgacttccaggcctggctaggccgcactcagactgctgtggcctctgaagaagggccggccaccctgcctgaggcagaggccctcctggcccaacatgcagccctgcggggagaggtggagcgggcccagagcgagtatagccggctgcgagccctgggcgaggaggtgacccgggaccaggctgacccccagtgcctcttcctacgacagcgactggaggccctgggaactggctgggaggagctgggccgaatgtgggagagccggcaaggtcgcctggcccaggcccacggcttccagggattcctgcgggatgctcgtcaggctgagggcgtgctcagcagccaggaatatgttctgtctcacacggagatgccagggacactccaggctgctgatgctgccattaaaaaactggaggacttcatgagcaccatggacgccaatggggaacggatccacgggctcctggaggctggccgccagctggtatctgaaggcaacatccacgccgacaagattcgggaaaaggcagactccattgagaggaggcacaagaagaatcaagacgcagcgcagcaatttctgggccgtcttcgggacaaccgggagcagcagcatttcctgcaagattgtcacgagctgaagctctggatcgacgagaagatgctgacagcccaggacgtgtcctatgacgaggcccgcaacctgcatactaagtggcagaagcaccaggcattcatggccgagctggctgccaacaaagactggctggacaaggtggacaaggaagggcaagagctcacccttgagaagccagagctgaaagccctggtgtcggagaagctgagagacctgcacaggcgctgggacgagctggagaccaccacccaagccaaggcccgcagcctctttgatgccaaccgagctgagctgtttgcccagagctgctgtgccctggagagctggctggagagcctgcaggcccagctgcactcggatgactacggcaaggacctcaccagcgtcaacatcctgctcaagaagcagcagatgctggaatgggagatggctgtgagagagaaggaggtggaggcaatccaggcccaggccaaagcactggcccaggaggaccagggtgcaggggaggtggagagaacctcgagggccgtggaggagaagttcagggccttgtgccagcccatgcgggaacgctgccggcgcctgcaggcttctcgcgagcagcaccagttccaccgcgatgtggaagatgagattttgtgggtgacagagcggctgcccatggccagctccatggagcatggcaaggacctgcccagcgtccagcttctcatgaagaaaaaccagaccctgcagaaagagattcagggccatgagccccggatcgcggacctgagggagcggcagcgtgctctaggtgcagcagcagcaggtccagagctggctgagctgcaggaaatgtggaaacgcctgggccacgagctggaacttcgagggaagcgactggaggatgccctgcgagcccagcagttctaccgcgatgccgccgaggcggaggcctggatgggcgagcaggaattacacatgatgggccaggagaaggccaaggatgagctgagtgcccaggcagaggtgaagaagcaccaggtgctggagcaagccctggccgactacgcgcagaccatccaccagctggcggccagcagccaggacatgattgaccacgagcacccagagagcactcggatatccatccgccaagcccaggtggacaagctgtatgccggcctgaaggagctggctggagagcggcgggagcgcctgcaggagcacctccggctgtgccagctccgccgcgagctggatgacctggaacagtggatccaggagcgcgaggtggtggcggcctcccacgagctgggccaggactacgagcatgtgactatgctccgagacaaattccgagagttctcccgggacacaagcaccatcggtcaggagcgcgtagatagcgccaatgcgctggccaatgggctcattgctgggggccatgctgcacgggccaccgtggccgagtggaaggacagtctcaacgaggcctgggctgacctgcttgagctgctggacacacggggtcaggtgctggccgcggcgtacgagctgcagcgcttcctgcacggggcacgccaagccctggcgcgggtgcagcacaagcagcagcagcttccggacgggactggccgcgacctcaacgctgccgaggccctgcagcgccgacactgtgcctacgagcatgacattcaggccctcagcccccaggtccagcaggtgcaggacgacggccaccggctccagaaggcctacgctggagacaaggctgaggagatcggccgccacatgcaggccgtggccgaggcctgggcccagcttcagggaagctctgccgcccgccggcagctgctgctggacaccacagacaagttccgcttcttcaaggctgtccgggaactgatgctctggatggatgaggtcaacctgcagatggatgcccaggagcgtccccgggatgtgtcctccgcggatctagtcatcaagaaccagcaaggcatcaaggcagagatagaggcccgggcagaccgcttctcctcctgcatcgacatggggaaggagctgctggccaggagccactatgcggccgaggagatctcagagaagctgtctcagctgcaggcacggcgccaggagacagctgagaagtggcaggagaagatggactggcttcagctggttttggaggtgcttgtgtttggaagagatgcagggatggcagaggcctggctctgcagccaggagccactggtgcgcagcgctgagctgggttgcacggtcgacgaagttgagagcctcatcaagcggcacgaggccttccagaagtcagcagtggcctgggaggagcgattctgtgcgctggagaagcttactgcgctagaggagcgggagaaggagcgaaagagaaagagggaggaggaggagcggcggaaacagccgcctgctcccgaacccacagccagtgtgcctccaggggacctggtgggcggccagacagcttctgacaccacctgggacggaacccagccacggccaccaccatccacacaagcacccagtgttaatggagtctgcacagatggagagccctcacagcccctgctgggacaacagagacttgagcacagcagcttccccgaagggccgggacctggctcaggggacgaagccaatgggccccggggagagaggcagacccggactcggggcccggccccatctgcaatgccccagagcaggtctaccgagtcagcccatgctgccaccctgccgcctcgaggcccagagccatctgcccaggagcagatggaggggatgctgtgccgcaagcaggagatggaggccttcgggaagaaggctgccaacaggtcctggcagaacgtgtactgtgtcctgcggcgtgggagcctcggcttttacaaggatgccaaggcagccagcgcgggagtgccataccacggagaagtgcctgtcagcctggccagggcccagggcagcgtcgcctttgattaccgaaagcgcaaacatgtcttcaagctgggcttacaggatggaaaagaatatttattccaggccaaggatgaggcagagatgagctcgtggctacgggtggtgaatgcagccattgccacagcgtcttctgcctctggagagcctgaagagccggtggtgcccagcaccacccggggcatgacccgggccatgaccatgcccccagtgtcacccgtcggggctgaggggcctgttgtgctccgcagcaaagacggcagagaacgagagcgagaaaaacgcttcagcttctttaagaagaacaagtagttgggggcaaggtcccaggccaactccctccctccgttcaggaaactgccagggacagtcgacagggaccgccctcttgtcaggacaactgcctgctgctagggtctgttgccaaggtcaacccatcaccaggaactgtcactggggacgagtccatgttcccaagggcagcccttctcttctgctgtttaattccagactggtggtgggacccaggtaaccccctctcccacccccgccgacttctcccctttccccagcctcgtgcctctgtccctcaccacggtgtggacagtgccgcaccctcaacataggccatgtggggagtggctgcccctgcctcagggtcattctcctgccatgcgagggcactcgccttctgccttctggttcctcacccctcagaccagccaggaacctctcagagctgaagcaggccctgggggcagaagtgccagatgacagtcagaggcgcaggagccctccctccccacccccaccctgtaactccagctgccactccatctccagctgctctcaatggcttccaggtgtgttgttcggggacagccaccgccttgagtctggccaaggaggtgattaaacagctcagcttctcaaa

SEQ ID NO: 1942 - DNA, 819 bp, Homo sapiens
  misc_feature (1)...(819): n = a,t,c or g
ctgccgccgcgccgccgccgcctcacaaaatggcggccccanagaggagaccgcggccgcctccccggccccattttgtgggaggcgagagatctgtcaacatggaaaacctctgctgaggatgcatccgagtttggaaaccccacttaagggatggagcctgggggatcacattaaacggaaaatgccaacgacttctaccacctctacgcgtttttagtttttcattttctcgaaggaagcgccagaagcctgtggagtaattgtaactagagggagaacggaaagctgaggtgactgctccggggacttggccgccggcgccttggtggctttggttgctcttccacgctcccggcagctgaccagaatctcttggagggtctcctgggccacctcggccgcgccagtcgtgcagtgagacttctgtagttttaaaatgccacagtccacggcccggtcggcaccgctcgcctgaatcgtgggctttgggaaccttggaggctgctgctccaggaactcgcggtcggccgggagccggggagcttcgttgctgggagcgggcggtattcgcggactccggcggccctggcgggtcgcggccgggatccgagccggggatgacgatgctgatggagctgatggggcaagagtgggaacggagaagtgcagctttctgcacgtgcgcctcaatcgctaagttccactctccatcctctgccgcgctactcctggcatgtggatcaccaagatacaatttctggtcctgtctgttcttattgatgtcctttacagttaataaatttgattgccactaaa

SEQ ID NO: 1943 - DNA, 373 bp, Homo sapiens
gaactggtaataaaggggccatgaaccctattcactactaggagagatgcctgaagctcttaaggagtctggctaaattcacccagtcaggaattgcactcacagagtggggacgaacccaggccacagcccctcattactgacttgctccaaagatgtcccgtttcctctgtgccaggagtcagagatcactcatccatgctcccagccaacagcatccttgcaaacgggcttttcaaagtgggaagttgaaccttggttgcagatgatgtctccagggccctgacccgtgcagatgtgcactgaggatactgtagagctgggccttggcccctggcagtgactcccttgcagccaggtcttcctggggagc

SEQ ID NO: 1944 - DNA, 542 bp, Homo sapiens
gcagacagataggtgcagggcagtaaagggagccagggaaaggggccccagtcctccttgaagctggggatccacttttgcttatggcatctttttctgttgagctagcggaggtgcagggtgcttgtgtcctgtgcctaggcctgggggcatcaggggcctgggcacctattggctttctcatttagcactaagtgtgctctcactcccagggtaggagtgttcctgtctctcttcctggagcaggggttcggggggatgccttcaggggtagatgaaagagaaaagaaatggatcttcctgtttttccccctgcctcaccccctagattccacaggttttggtgaagttgaagaagtactctcatggagacaaggacttcactgaggatgtcaactgtgcttataagttcctgctgaagctcacccccttgttggacaaagctgaccagcgctgcaactgtgactgtacaaacttcctgctccagaatgttgcaagcagggcttctttctgaggccagcgtcaacaaccttatggctaag

SEQ ID NO: 1945 - DNA, 383 bp, Homo sapiens
tggcagtatcatcaagggatattttatttgtggttaaatgattgctgtgaacacaatctataaatatatgactaataggattttgtaactggctctataaactttaaattttgtatcattttacaatttacaaagtgcttgtatatattttgcatcatttgattttcatgactacctgtcagagaagcacagcagatattagcccaatgttattagtggctcacagcagctaagtgtatgtccaaagctttacagcaaattagtagtggagtcagctgggcttcagatcagagtgtttccaccctacatacagcccaggctctttttgctaaccctgtaattttcaaactgtgtttggtgatgcttgaaggagatttctcagg

SEQ ID NO: 1946 - DNA, 173 bp, Homo sapiens
aatatttgatgccatttcctttgcttgtaaattgttcatttcatttgaatataaatataaaaggacttctaccaagaacatgaaactaacattttgccaagctaaattttaatgaatttatttggacttttttataatcacttaatattttcagttcatgtgccctcgtgccg

SEQ ID NO: 1947 - DNA, 598 bp, Homo sapiens
gcgtcgactttttttttttttttttacgggaacagctttgtgttctttattgcctctcccttgggctaagggagggaccagcaccatgtccttctggagacccggaaccccccagcaggccagggaggcaaggcctgggccgccaggaagccatgcttgaacactaggttgggaggggaacaccccagcaccttggtcctattgaggcttgaagtgcctgcttgatcctgaccaaggggccaagtggaagcctgtgctggttgtggggaagtgccaggctcacatggtccagtaggcatagacgagcgtcaggaggataaagatggccacagagagcagcatgttcttccggttctcttgccgaagaaacttcagttccttctcgtagttggaggctttgttcattaggctgtttttctccttctccagggacctcctggcctctgggctcagctcccggctgtggagtctggagttcacggcctccaggtctctccgacactgggacagcttctcctctagcccatcgatctctagagcgacgcccagattctcccgcttctttttagtcatgttacttgccggctcgtgccgaatt

SEQ ID NO: 1948 - DNA, 1212 bp, Homo sapiens
attcggcacagagggttttatttaacaaaattctagtcaagggataagggcataatgaagacaagcttcagttatgaaagtacaaactatttgtgtgattaatttttaaaaatgacattaagaagcccattgtaaaataatatttgcagtcaaatggtttttcttgctgtaagtcctgttgtagctatgtttagggtagtggttctcatctaccttggagtgcataagacttacctagcaggcttgtttaaaaagttcagattcctagctttgtacccagggattgcctcaggtggtatgggctgtggtcctggagtcatcacttttataaatagtggttcagagaccacagagagagactgcttcatcgaatgggaagtaccaaggagaaagtacaattcagtattgtctggaggcaagtggacactttgtacctgaggtttagaataggtggtctcttgccagtacaatccccaggcgttttctgtgttcagaagtagtaagaatgcctttaattcagaggattatctaagctctttaaagctgtttttctccattgtcatagtgccttctctgaaaaatgaatgtacaggtatcctattttctaatgtaattaggattttttaaaagcaatttttgatagtttttcttttaaaaagtaaaattcagcactgtgacttgaacccccaaatctttcacatacaggtgaaacattaagccacaaataaaaataatgaacaagaaagaagacaagatcctaattcctgtcattagtgacctaagtaccccatatcagaaactttgcaaaacagatctagggacagaagggctttgaaagacatttttctttggggcaaatttcgtgtgccagaactacagtttaaatgtttttatgagcaagggaaggtagcattgattcccatagctttctaattagatacatgctgtcatggatgtaagccttaaaggagttaatactaatcttgtacatacacaaattttcctcaggtttttttattttaaaaaatgatttgttaaaagtactgtctgctagacccttgcctttgagtggctttgaaacttaatatagtttttaaaaagtgcaatgggatgagattatgctattagtatattaaaagcatgtttctgttttactccaatttgtaagatcatttaatggaataaagatcacaacaccatgttaaaaaaaaa

SEQ ID NO: 1949 - DNA, 1108 bp, Homo sapiens
cagcagctgccttcgtttggaactgaagtccagccagcagactctctagctccatctcccctgtgccacccgtaggtcatatgaccttggccaccttggagtagacccagacccctcgggacccgggacattagtctcaggctgctgatggattgatttgacatgaaccaaacacagccaaactcgatacccacaagctgttcagctgaacctgactgagtgttcttcctgagtttcacgaggataggctagagtgcatttttactggtggatcagtgtgtgcaaaagagatgaccctttataaagagattttcaagtggatatatataaaagaaacagttgcttgtaaaatatacttttgtaaataatatttaattttttaaataatatatttggtgctgttttctcagatcccctgagagcactttttattttccttttaaattctatggtttcctttgcatttcttggaggtatattttaagggaaacagtgatcaccaatacatgttttcagtttttttttttttaaggtctctatcactttaatctggatcaaggctttgaagcaatgcctctctgcattttttaccccagtggaacagactctgcagtacattaatcaggttgagaattgaaatattttcttgcatcagtattggctagaaaagaaaataaataaaaccaagttaatttagtagtaacaacttacagtgattcttcctgttggaagaatttccagcaaatcagaatcacgtttttagttgtgcgtgtgcgcgcacacgtgtgtaaaaagcactttcgattgtgcctcctgttttctcgagtggggacactttaactacagtttacacctcgggcgcataaagtttttcttctctttctctctggttgtttctgtttctgagtggaccaacagcagcacccacgaggatttgttttgagtatggagctgttgcgggtttgctcctttttcttgctttgcgtgctcagtttttacagactgtaaaggagatgtgttgtttgtgaagatggagcagagtcaaatctgtgcttctaactgagatgagagtgtattaatcacgtatcgcagggctccagctgtttta

SEQ ID NO: 1950 - DNA, 828 bp, Homo sapiens
  misc_feature (1)...(828): n = a,t,c or g
ttttttttttttttcatgttcatatacatatttatatatatctcatgtacaaagttacattctgaaccccagggattccataatagaaataaatactgaaataactacattgctaaatgagctctttgctcatagaaatgaagctcagcctctaagagacagcaagtgggacattctagaacccatttttcagattatagaggcaagtaaaattctgatagaatgtcttggacaaaaaaacgaatttggaacataaaatggttaagatatattcaaatagagaaatgtatgacaaaattaataaaacttaatcttttaagagaaaagacagacatttagtgttacagaatagcataaccctgttagaaaagcatttatgatttccacatttaattttctcttctactcttcccatgttacaaagtgggaccaaatgagtccctttctgaacatgatcaattaagaagagcccctaaatcctggttgagtcctttggtaacggtcataatactcacaaggaaataaatattcagttccatggcatttgcaagacacatgttcctttaggacagttaatattatgacacatcctgttttattttgttacctaaggcagncctatgttaaagggtnctcgtactcaaatgtaggaagatcctttacaagaaatgaacaatacagtaactgaaagaattgattttaaccttttnctatgcaaacacaatctgaaaagttatgtgnctgncatattgtgnctncaaaatgttttnatnactnctnccacaagtctgtcaattgaagcagcattncatttcctatttttaaaat

SEQ ID NO: 1951 - DNA, 692 bp, Homo sapiens
ttttttttttttttatggccaaaaatactgtatttttaaccagcaagatcattggggcattattatacaacattaggtgttttttgcaaaactagttcccatccccaaacaatagacagtacatgcatttgaatgacattttaggaacagtaaatattcttttaaatactgcaagttaaaaatgttttctgacaaaactccctaaatacataggtctagtaagggtttccaacaggatgatgggtgaggaatccagcaaggagttgcatttagagagttctttgaggaaaagaaatccaccaaaaacgtgtttcagtcaaagtaacctggacaaagttacgtagtattattccagctttctttcctgaacttaaaaatgttctaccaacgaatacctttctgttttttctgtctaccaaaagcttatataaaagtcagaatttctttatccaagatctgattttacccaatagatgttttcataacatgtaaatgtcatttgctatattgggttggaatcatacggggaaatggaggacacagggtagataaggaaggcaaggaggaaattaatatttgagcacctactatgtgctaggtgtgtattcatactttgaacatatgattctagaggcaagagtgttattgaaagggcagtgatcattgggaagacagcaggaaatggctattct

SEQ ID NO: 1952 - DNA, 3091 bp, Homo sapiens
  misc_feature (1)...(3091): n = a,t,c or g
aataattaaaggagtgaatgttttattctttagtgtttaattgaatacataacaagtcacataatcaatgattcattacttcacacacaggaaggaaaacagtagctagtatttctgttatacaactggttgtgnaaacnggaagaacaaaaatctttatagcattagatggttgaaggaattctcaaagtttgggcatgtctgaaaagactttgactgcatcttttttcaatataaagggatttttttcttacatttctgtgtcattagaaaaatctgataatcttataagattttttctgctcttcttacatttagagaaaatggtttaatgatatgtactatttaaaaaatcagaatcccagataactctgtgtgaatcttacattgtctagcagataaggttttcagatgcctggaaaaatttaaacaacatataatttacatcttcaaaattaacatccagatggatgttttaatcctttgtcactaaatggttactaacgctgtttgagtggtcataaatgaattgtcatttgtattcaatagtaatagcaaaatttacctgcctataaagtcgcaaaaacagttgtataatagtttacattacaattaatgtacccatacctcaaaacacatttagaatttaaaaaaactggcttggaaaaaaatcacaaaaaatttaagtgacaacaaatcttgattaactagtccatcttcctaccacacatgattatactctaatgtagatattctggttgaatttcttccaaccaagtttgaagggccccagtagaaaatcaagtgttaatactttcagatttttattgtccaaaactgttgacaaagaaaagctaacttcaacataacttgtttctggctatacaaagacctatttcaggtgctacagatactgaaaataggagtattttacttatttctcaagagacagacttatgccatctaagaaaatgaattcagtttttaaatgatttatagtaaggaaaaacaggaaaacaattccaaacgaaggattgactctgataggcttacaacaaaaatattcagtttactattttaaaaactaaattgagtaaagtatttgtgatttagactataaaataaattctcaaggaattcaacccctccagtcaatactttttcttaatgtctgcattgtaatttagcattttgcatgtgggagtacacaaatgaattgaatattggatcagaatttaccctaacttgaagagtaaaaagttatccaaagtttcacccttacatggctttattgaaataaacattccatcgaaaattcccaataaaaattggaatatattatgagcactgcccaattgctcattttgtctgatattaacagattatgcatttcctcagagaagcagtaggtcccatatatacagacatatatatggctctggtttgaaagagaagacaattttgtctagtattatgatttatcactgtgctatcaatcaaaaaaacagtaagaaatacaattaaaacaacattgaaagggaaaaatttttaaatctcacatcttcaaggaatattttctacagcatatcatttgaaaaagtagaatgaatactgttcatggtccacatgtattaaacaaaaaacatgtcaattacttggtgcaaacacacagaacctggtacctgtttttttttttttttaaccaccattgtctacacctttttaaaaattaagtttgttactaaaagtccaatgtcattcacttgtatttatgatcatcaaatggtaattagggcaacatatgtaaatgcatgcctctgaatcagattcatgcagtgttaattatctgaataatttatgacattctcccaggttatttgaatggtatctttggagggcttactcaaatgaacccacaatacctccactattacagcttataggaaattacaatccactttacaggcctcaaaggttcattctgtggcccaaagcccatggaggggaagggatctaaaggtgctcatgtcaagttattttacttgttttttactgtctacccaatgtaaaatgaattttcttcacagcctttactttaggctaaaaaatagacagttttcttgtattgactttaactttagaaggggacagtcgtccctggaaaaagaagtagatttactgtccctaaccattaaattcccagtctttcaaataatgtgcggggcggggggtgctgggtgtgacagggtgcagtgaataagatgcctatgtacaagacagtggaatagttcacctcaaaggtttacaagataacatttgtaagacttgagtgacagaggcaaaattttagcagtttctcaagactcttggagttgagcagatttgagaagggaaatcagaatcgccgagccttgccatctgtcagtggttttggtctgtcccaagatgttctcaatcatgtgcttcctgttgaacaatctaacaaaatacccatacggggtagagaaatctctgcaacactgacttttggtcagtgaatcagagtcctaaattatttccaggcttcaaacagatgaattctgatgcattacttagtctgagaccaaactcaacatacaagcaagcacaacttcctagatttctgcttccatttcgcctaaaattacaggctttgtatatgaagtcaattttacttctcaaaaaatgttagtctaataaaagacctgaaatctatttcccaactaaaaaaaaattagtggattaaaaatacaggtaccttgactttaagtagacagttaatcaacatatgattagtaatacaactaatactcaagaaaaaaagtataatacagcaaactcagttttacaattatgtattttttcctaacccaattcctcgataaggatgtaagaaactcatcaaaacatgttgctttagtatataaaccagctgatgcaaattactggggtaatataggaaattttatagcattagtaaatgaattaaaaaactaaatgattcatgtaaaatgtttatatatggtatatacagcttggatgcacatgagtctaagaataaaactgtcgattt

SEQ ID NO: 1953 - DNA, 1150 bp, Homo sapiens
tttaaaacaaattatgcctctttaagtccttgaaagtctccatctaaagaggaaaagtttgttggaacagtatatattccctatttttatgtttatttaatccataacagaaatgagtaagggtagcacaaagttctcattcagtaactcaacagtgtgatcatcagcccagtgataaaaatatacatactgaatggaagtacctacttaacatcaggaaaatattcctggagaacttaataaatcaggaggtgaggggtgagatttttttctgcacacagagggaacaaaagcacaaagaagcaaaggcactctgtagcatcagagaaccacagtcacttcagtagatcagaaatatgaagcacaagacaaggcccgtattgtggaggatctcacaaatcatgtgaaggaattaagactgacataccaggtattacagagttttaagcgcaggaatgacatcatcagtttgtaatacaggtaagtgacagctgtgtggcagatggccatgagaggaaaaagctacaggcaagacaaccagttaggaggatgtcttagttgttgaggaagatgaaggcctgaactaacattgtggtattagtagaggagagaggacagatttttaaagttttaggaaagaaaattgggcaagacttacaagactgattatatctaagaggtaaagatggttctctgggttcctgataaaagtgtctagatagatggtagagggcaattccaagagggcaactccaagatagaaaatttggaaaaagaacaaatttaggggaaacagaagataagcgagttcaggttccagtcatgcggtgttggagatgcctgtgtcatctgatgaagactagtacgcagctggatagcagagtccgaaactcaggtggaggtgaagttatgagggaattatcacaatctagtttggattcatatttcttaaatatgtatgacaacttaccaactggaatgttctagctaatatctcaacttagaatccatctcactacccattgggccaacacttgtgttctaaagttacttgcaagtagtttatactgccaacttgatatatatacatgctatagtttgaacattttgtgtacttccaaaattcacattaaaatctaatccacaaaaa

SEQ ID NO: 1954 - DNA, 290 bp, Homo sapiens
ggtaaaaccaaattaacttttgcttaaatgggaagtatacatatatctgtatagatacattacccctttacatgtttaacatacacacacttaaacacataaatactagtgtgattatatctttggagtttgcaatatagcataaaggacaagtagaactgcacattaagattacctaccgaagcaactagatgtggctgggacacaatcaaaggaggaattttgtccacaggaaggtgaggaaattccaaatgaagcctagatcttcagtatcataaaaaggcagagct

SEQ ID NO: 1955 - DNA, 799 bp, Homo sapiens
actctggagcagatcctggagcacttggacaatctgcggctcaacctgaccaacaccaagcagaacttttttagccagaccccaattctccaggcgctgcagcatgtccaagcgagctgtgacgaagcccacaagatgaaattcagtgatctcttctccctggcggaggaatatgaggactcttccaccaagccacccaagagccggcgaaaagcagctctgtccagccctcgaagtcgaaagaatgccacacagccccccaatgccgaaggaagagtcggggttccagcagtgcttcagaagaggaagacacgaaaccgaagcctaccaagcggaaacgaaaagggtcctctgcagtgggctctgacagtgactgaggccctgcattccccatcccacccccggctggactgccctctccttcttggtgattcaaaggttaatagaggctgaggagattgcaggggaaacacccttgctgcatccccaagctcccccggtggaaggaggagctttctcctctggctgagtttgagaagctgccatgcagcccgctagccccttccctcctcctggggcctccagcccttcacactgctgttcccagtgatatttgggatctgactgaagccagagctctgtaaaatcagaccatagtggaagtcctcagccccctggccccttccgcaatctcctcccccagtctcccaaagagccatttcaacagagaagggaaatgacaaaggggcagctggccagataagctaggatgagagcagagactcagtgtgtgggtgtc

SEQ ID NO: 1956 - DNA, 356 bp, Homo sapiens
ccagtggtgtagaaggtaccagctaaagtgaaccactatgtaatattaggccattctaaaggaaagatgttccatgtcatcagagatggtaaaataggcagggaaaaaaaaatctttggtaccaaagattacacttgtgtttctacacagcaaaccatttttctttcatgaaaataatatattattaacatgaatatattattttgctattaatgtgaaagttgtctctaaatattttttaattttcaaactcatactttattttcatttgaaatgtttttcacaccttttgcattacataataattttgtggaagcattttgccctttagaataaatattagattgatatagctg

SEQ ID NO: 1957 - DNA, 1700 bp, Homo sapiens
tttttagtttaatccagtgattcccagatttatttggttatgaccatctatccccccagtagtcctcaccaatattctgtggaacaaatctgtttatttgcagaacacaattttgaaaagggttattctgaatgtctatgaagtgttttaaatatggtacattttaatgaggttatataccaaaatagcctaatcaccaacaatgacagaaacatccaggatacaacttgtgaaagtaaaaatttttattttgattgatttctcaatgtatagttcagtataatgccagtttttaatggcaaaaatttggttccactgaaactccataatgctacagagagctactactttttccaggaagtaggttaacagctagaaagaaaaaggacaatttcctagccagcatggcaacttaaactgcagatctaataggtctgcaacttttacactaaaaatggcacaaacagctggtgacacaagtgagaaatggggaacaagatgtgaacactgaaaagaacaatatatatactgtaaatatgatgaataaaccaaatgtagctataagaatcttaaaggatgattatagaaaagggaaccaaatattttcctcaaatgctttttagagcctttctgtagcgatacaaatatatatatatatatttatccaaaaatatgttttatacagataaatgtttctcaattaaagatgggaccaaagctataggtataacataaagcacattgtcttttgtaagactatttatccacctgaattttcaatttctttaaagttagtgcattaaatgttttccaaatataattacctgtcagtctttttatagatataaatcaagtaggcattatgttttaaaagtgtttgcaggttaaacttttctaagatgctgtgcatattaaacttattatgagccccattaagaatcattattaataaacatatcaaaaagggctatatgtcagattttcctgttcatagtaaatattttctgatttccagtttacaagtattgaaaatgcacaagaaagattttacttcacaagtacttttaagaatatactttgatttaatatgtatgttagtaaaactccacgtgttgtaaccattattatgtttttgtttttaaaatggggatgtaatactaataaccactacctataaaataaagcacacaattgttccggtgattttacaaatctttttttccaggtgtaaagtctacaaaaattccaaaaaattagagaacactgaaaacatattaaagtttgacatccaactttatagtatttccatgttaccctgaaagataacttaaaaaatatggccttcttagaacaggccactctgctattataaaaaattggtgacagcaagaaattgtatcactgatatgtggaatttttgtaaatagttttctctccaaatcattagaaaaatgttcaaaaataaaaacaaaataaaatatggtggtggtccctaaactattttgaaggcaggtagcttagtctaagctaaaatatttttttcattcatagcaataatcctcccctcaaatgccctttaaaaaaatgcatgaaaccgtacaatagcaaaaatcaaagagcacagactgtattttcaagaacagaaaaatctctaatgctgaaagatatagtagaaagcagatttctttggggacattaat

SEQ ID NO: 1958 - DNA, 261 bp, Homo sapiens
taaaccggcgctcaggcgcttggacccggcccaagatttgactccggttctcaccccgccctctcctggggtggtggtgggggctggggggccgcttgcctgccccagggtcaggctgggcaaggtccctagctctctacccaagctgttactccctcatggggcgcctaaggagactcaagtggacccatcatatatgggggctgggcctcgggactctcgctctaataaaggactgtaggccatggggcctaaaccacg

SEQ ID NO: 1959 - DNA, 969 bp, Homo sapiens
ggctgatattttcatcaatgggtcgcagttaggagaagattatattcaattgcataaacttctaagaaagtccaccttcaaaaatgcaaaactctatggtcctgatgttggtcagcctcgaagaaagacggctaagatgctgaagagcttcctgaaggctggtggagaagtgattgattcagttacatggcatcactactatttgaatggacggactgctaccagggaagattttctaaaccctgatgtattggacatttttatttcatctgtgcaaaaagttttccaggtggttgagagcaccaggcctggcaagaaggtctggttaggagaaacaagctctgcatatggaggcggagcgcccttgctatccgacacctttgcagctggctttatgtggctggataaattgggcctgtcagcccgaatgggaatagaagtggtgatgaggcaagtattctttggagcaggaaactaccatttagtggatgaaaacttcgatcctttacctgattattggctatctcttctgttcaagaaattggtgggccccaaggtgttaatggcaagcgtgcaaggttcaaagagaaggaagcttcgagtataccttcattgcacaaacactgacaatcccaaggtataaagaaggagatttaactctgtatgcccataaacctccataacgtcaccaagtacttgcggttaccctatcctttttctaacaagcaagtggataaataccttctaagacctttgggacctcatggattactttccaaatctgtccaactcaatggtctaactctaaagatggtggatgatcaaaccttgccacctttaatggaaaaacctctccggccaggaagttcactgggttgccagctttctcatatagtttttttgtgataagaaatgccaaagttgctgcttgcatctgaaaataaaatatactagtcctgaaaaaaaaaa

SEQ ID NO: 1960 - DNA, 376 bp, Homo sapiens
gcagcgcagggagccaggcgggctgccggcgggtgtgaagaaaaaaatgacactccaatgggctgcagtggcaacctttctttatgccgaaataggactcattttaatcttctgcctaccttttattcctcctcagagatggcagaagattttttcatttaatgtctggggtaaaattgcaactttttggaacaaggctttccttaccattatcatcctattgattgttctatttctagatgctgtgagagaagtaaggaaatattcctcagttcataccattgagaagagctccaccagcagacctgatgcctatgaacacacacagatgaaactttttaggtctcaaagaaatctttacatttctggattttcc

SEQ ID NO: 1961 - DNA, 122 bp, Homo sapiens
gaaagaatgttggtgatctcagagggaacagtttgtggggagaggtagatacttgtactctttacgtatgtggctctaaattaaccagccttatagaatatttattctgtgtttttattaga

SEQ ID NO: 1962 - DNA, 466 bp, Homo sapiens
tagcctgctgtggggtatacagcattggactcagatatagatcctgaagctcacagagtttatagttaaaaaaacaaacagaaacacaaacaatttggatcaaaaggagaaatgataagtgacaaaagcagcacaaggaatttccctgtgtggatgctgagctgtgatggcgggcactgggtacccaagtgaaggttcccgaggacatgagtctgtaggagcaagggcacaaactgcagctgtgagtgcgtgtgtgtgatttggtgtaggtaggtctgtttgccacttgatggggcctgggtttgttcctggggctggaatgctgggtatgctctgtgacaagcgtacgctgacaatcagttaaacacaccggagaagaaccatttacatgcaccttatatttctgtgtacacatctattctcaaagctaaagggtatgaaagtgcctgccttgtttatagccaaa

SEQ ID NO: 1963 - DNA, 441 bp, Homo sapiens
gaactggacagtgaatttttagaggacagggatcttgattcatttgtcttcccatcagcaaggatcagggtgtacttcacatcaggtaagtgtgcaacagtcctttccggctgctggtgatcgccgtgatgcagttacctgggctctcctcggccctgcctcccacctggaccctcagctggctgtggatcactgcagcagcagctcctactccagggaaagaatgtctttcacaccttcttggtttctggaccccatcccccactaacaaggcctatcagggatgtgtcttagcctaagcaagacagccaacagatgacagtcttgacttacttgttggtgttactggaaaagcattgcttctggtttcctgggcaaaatgtcactcttttcagacccttagtagtgatcacagggggctctagctagagttctggtgtc

SEQ ID NO: 1964 - DNA, 888 bp, Homo sapiens
agctgtcaatgcaaaacttttttttcaagttcattacgtttaattttttccaaaaaagttttgcattgacagctgtacaatactttggtgttaacctgtggtcttccttcacctcagtgaactctgccctgcccatctgtccagaggaagtcttagctcctaccccccaccctccctggcgcttggatgggaggcgacacagtatgggattgtgaaatccctgctgcgatgctgggtatctggaaggggagaagggggtggaagcagcgcagggaatgctgtgagatgagaagagctcacatcgatgggaaatggccctggcccaggctccagaatgtgacagcaacagtggcctggctgttttcccggggggcggggggcgggactggcaaactgggaggagaggcaattaagacgcaacaatcaaaccaacctttaaatagtaacttttaaaaatataaaaacagttcagtacaatgacttttcattctttttttcttcgggaataactttcttctaccctcaccctcccttctggctagagccttaacaagaggtggcagatggacatctgagacccagagagactctggacgccccacgcgcccagccttggagaggcacagggtgtgtcgccagcctccacatcccatgcccggtgcgctcagctggggagcaacctcactgaaggtgggtggctttccctggagcccctcccacctcctcagcagacggaatcacacattacaaaataatccataaaaatgcagtataaaaattatcttcgatatgctacatccatggagagcctgccaccaggactcacagcggcctttagcttttctttaaaaggagaaaaaaaaaaagaccaaaaggaaaaaaaaaaac

SEQ ID NO: 1965 - DNA, 531 bp, Homo sapiens
  misc_feature (1)...(531): n = a,t,c or g
gaaaacacataatattctatagagtattaaatgagatactagccctaggcaggtcccattttcttatcaacttctagaaactgtcataaagaggactgcatctcccacagcaacactgtaattgggagttgtattcctcatcaaggacaagatggcaacggtgatatgggagggggacagggaagtgctgggtagagaagggcagggtcactgggcaagggctccaccctcagggcctgtgcccatgggacctaatgagaacaaggactcctgtcttcttgcccaaannnnnnnnnnnnnnnnnnnnnnnnnnnnnnnnnnnnnacccattctgtgcctataaaaaccctgagaccccagcgggcacacacacaagcggctggacgtcaagaggaacacactggcagaagaacacatcgaaagacgctggcangccattgatggtggaacgattcggacgccaagggaaattcggccaagacagtaggaatcccggntgctgagcagcagactccagaggaagactacttc

SEQ ID NO: 1966 - DNA, 350 bp, Homo sapiens
  misc_feature (1)...(350): n = a,t,c or g
tttccatcctcccctacagtgtggacaaggacatacattctaacccctaccagatgctcctggtcgacacctttgactctgaatccagggacaaaaagaaagccgatggagatatctttctgacagctctaggaacagaggcttcaagatcaagtttttggtgctaaagtagcagaggtaccacagcatctagngcttggtggtagctagcagtacctttctcattgaaccagttctgtaacgccgattgnnaaagtgccaaanagntggatacccaatattcttttaatcaactccttttcttannntgnanctnanaatctgatgaacncngnngatctaatctcatt

SEQ ID NO: 1967 - DNA, 725 bp, Homo sapiens
aaataacggaataaaaaaatttgtaaaatgaaacaacaaacatgcaaaattcctatttacttttattacataaaagtaattttagtgcttacctaataaatcttgaatggttatttaataaattattagatgggtgatgtgtttcaaaagatacttgctattttttgaagaaataaggatttccagtcattaaacaaaactaaacaatcttattagatgggtgatgtgtttcaaaggatacttgctattttttgaagaaataaggatttccagtcattaaacaaaactaaacaatcaaatgttctatattaggaatctcaagtatggctttttttaaaaaacctttttaacatcttgatgtcaaggattataagtatggcttttcagaattgttttgtttgtcattattcttgcctttaaaattttaactcatcaaagtgaagattagaaataaattttagaaaatgtagaatagtattgattctgtccctgtaatagaatctcagtggagtttttttgcaaaactaatatggatttcatctgattttattatttcttaaattttagattttattgagtaccatttatatgattgtacaagcattcactctttagtagcattttttgtttttcagacaagctgaagtggttttattaagatttggtaatatttaaatagcaaccttctctgccttttttttttttaatatagaattttgaccatt

SEQ ID NO: 1968 - DNA, 378 bp, Homo sapiens
tgacaattgtgggacatacggatttgtaaaagatgtggcctgggtgaaaaaagatagtttgtcctgcttattattgagtgcttctatggatcagactattctcttatgggagtggaatgtagagagaaacaaagtgaaagccctacactgctgtagaggtcatgctggaagtgtagattctatagctgttgatggctcaggaactaaattttgcagtggcctccctgggataagatgctaaagatcctggtctacagtccctacagatgaagaagatgaaatggaggagtccacaaaatccgaccaagaaagaaaccagaagaccagaacagttgggacttaaccaaggactccccatagtgaccctctcttggccac

SEQ ID NO: 1969 - DNA, 1105 bp, Homo sapiens
ttttttttttttttttttaccaaaaataagttatttattgctttaaaaaataaacatttataatagaataccaaattctatttaatctaatgtgttaaccaaaagcataatatattccagtaaacaaggacttccaacttatcctataactaaaaagtcaactaaacagttggttttagctagagacaaacatcagtcactgccaccaaattccattatataaatttattttgcttcacatttaaggagaaacccagcagaggggtcgccctgctcttccccactagaaatgtactgaaaagtgacaagcccacagaaggaaaggctgtataaggaagtaggagcttcagtcaaatttctactttcattaccctgagggaggtgaaggagggtgttattttcatcaggtcaacatggatgacagtttgatcataaaaaacagcccacattaagatttcatttgtgaaatatggtgagcatgatcatgccctaatgatttcttagggtttggcagtgtctctggtcacatgcccatacttagggttgaaagaaatgctaatactgtaccctgggtcttcctcagatgccacagtggctcctgccctaggatgactaaaaatacggctctcctttccttagagatactggctcactatcaagaatagaggtagggaggcattgtgaactccagaagagttgagtctatggagtttattccacagtggatacattaggctttttagagctacaatgagactgtcagtaataggcgatcacctttttatacctatgaaacatttcttaaaattctcttgggtttggcccaaaagagtgaccagattgaaaactactctgttattcttaaggacaaatgcaattcctttaaagttacaaatcagtacttatatcctatagttgagcatgtcttcacaccatcccctgtttttggcctccatataaacagatgcattgcactgctgcatggtatattccatctcaaccagctggcggcatccaatggttaacttttccctatactcagtctgagaaacacacgtcataaatttcctgggcagtaaatttgacatttttatttactattcat

SEQ ID NO: 1970 - DNA, 931 bp, Homo sapiens
tcccttctggacagtttgctttatgtgttcagacaatcaaggctcgccttccaggcacagcacagtgccctggatggcatcagcacaggctcccctgccccggccttgaagcatggctgtgtgcacgattcatacccatgcttggcagacgggtggggggggggggggggcgcacagagaccacaagagtatggcagcacctgctgtggtggtgcctgggaacagcaagacacagcgaggctccccaacctttaggggaacacatgtgcacgaagctttggttcacaggcgcatctggctggctaagggcaacagtcacagtcaaatgactattcacagctgcagacaggaggcaagacagaagcaagtgtctaattatagcaatttgagttgagggtttcttttttaaaggtcaacagaagccaaccttggtcacacaggtagtgagggaaggatatgttgtgggcggcccacaggcccaacattgttttcctgacagaaaaaaaaaaaaaagcgccatcagtaccgcctgtagggggcatggtgggggacagacacggcagaacgctggactcttgcttcagatggcgcaccacaagcacacggcactctgcacaggtgccagtccaccaccagggccagcctttgagcacaccctggtgcctcagactccggcaggaacacatttccatcgcacacccacccataggggccaccagtcgagaagcaagctgggcaccaggcagctgcctttgacatccagagaaaccgctgtcacaggcaacagctctggatcaagaatgggctacactgaaggcccttgcttcctgtttcaacaagtccacttgctaaaatgcatgattccaaatctaccttctactctcactgtgaaagtctttcaaaatgctaaaatatcacaaaagctttaaac

SEQ ID NO: 1971 - DNA, 1641 bp, Homo sapiens
ggtttggactggatatcggtggaactctggtcaagctggtatattttgaacccaaagacatcactgctgaagaagaagaggaagaagtggaaagtcttaaaagcattcggaagtacctgacctccaatgtggcttatgggtctacaggcattcgggacgtgcacctcgagctgaaggacctgactctgtgtggacgcaaaggcaatctgcactttatacgctttcccactcatgacatgcctgcttttattcaaatgggcagagataaaaacttctcgagtctccacactgtcttttgtgccactggaggtggagcgtacaaatttgagcaggattttctcacaataggtgatcttcagctttgcaaactggatgaactagattgcttgatcaaaggaattttatacattgactcagtcggattcaatggacggtcacagtgctattactttgaaaaccctgctgattctgaaaagtgtcagaagttaccatttgatttgaaaaatccgtatcctctgcttctggtgaacattggctcaggggttagcatcttagcagtatattccaaagataattacaaacgggtcacaggtactagtcttggaggaggaactttttttggtctctgctgtcttcttactggctgtaccacttttgaagaagctcttgaaatggcatctcgtggagatagcaccaaagtggataaactagtacgagatatttatggaggggactatgagaggtttggactgccaggctgggctgtggcttcaagctttggaaacatgatgagcaaggagaagcgagaggctgtcagtaaagaggacctggccagagcgactttgatcaccatcaccaacaacattggctcaatagcaagaatgtgtgcccttaatgaaaaccattaacccaggtggtatttgttggaaatttcttgagaattaatacgatcgccatgcggcttttggcatatgctttggattattggtccaaggggcagttgaaagcacttttttcggaacacgagggttattttggagctgttggagcactccttgagctgttgaagatcccgtgatcattacctggggaggggttcctgaaaccttccacaatgggatctgtggactttcatttttttaagagacttactcaatttcatgactgtactacctgaaacaaagtgagaaaggacaggtgtatttttctaagtcatcaagataaatccttaagaattcagtctaaattagcaaccaggaaggaaaaatatattaaaaacaacaaaaaagtggcacatgtccaggcagtgtgaggatttgctgtatataagttgcctgctttgtatttttgaaatctctgcatcactcattggaagtgcttctgaagagagctgctctgtgttcagttgactggttttgtgtcctgtttgaacttgctgaatgtaaggcaggctactatgcgttataatctaatcacaatttgtcaatatggtcttggcaatcatctgtgcattactctggtttgcattaagcctgtgtgtgaacttactgtaaaacatgttttatttcaaggttctgcaaaattaattgggcaggttaattgtgtacctgaaacttaacaagcagtttttggaagggcaaa

SEQ ID NO: 1972 - DNA, 1414 bp, Homo sapiens
tttttttttttttttagtttatcaaaagaatttattagaaaatattacacactacatacatatttatttaagagtataatttcagtagacagcactccaacttcataatacaaacaatatctcatggaccctggggcaatcactgtgcttctgaagctacatcttttggatggaacattccagcagtacacactgtggccatttaaaggaaggtaagagaaaaaaatgtgataattaccaaaacaaattttaaaaagcacaaaacttttggaatgttaatggataactactattagtctcaaaattctaggcatttctataaaacattggtcaatgtgactagtaagttaacgggaccaaggtttcaaagatcaatactgaaccttgataaataataagaggaaatgtaactccacaaaatgtttctgattaagtttgtgcccatgcaaaattaacataaatttcttaactcaagaatgaggaatattaaagcaatgtattttttcaacataaagcatgcattttctaatacattcttaaacatttcaaaattttaaaagttcgaattctaatcaagtagctattaatgcaagtcctacccagtgcccccaaatcagacagggaacacacacttgttactgtcacggaaataattcatgggagtgctactaaagatatatgagacttcaactcttgaccacatcactttttctccaaaactttagaacttgtttgcaaaagcctaaatggtataaaacacattttaaaatgtcacccaattctcaaatgtcactgaaagaaaatgcaggaaaagtatgtattgtgtgattaatcagcttaggcttaactcaaaatactttcaatgttcacaaaattgtttctagagttctaatctaaaacaactaaggaggtgtgccttgatattctgaaacactgtcttaatactttattagaagaaatatgcttgaaatttctttaccataatctaaacgcaaactttaaaaatatataccagtagaataccatattacaaatgcccagaaatgtagaataaaggtcaaaaactgcttggaaatatttttatgattacactcataacaacaaagcttatgaactagcacaatcattatgggaccaacatttcaaaatattttgcctatcaaagctagcaccaggaaaagtattatgcacataaaattgagaaacagataatctttactttagaaaagcacagttctacagagtattgctctggctaaatagtttagctagtaaaaaggtcagtttatctcactgaggcatgtatctccttggatctattaacttatctgaagaactttccaggtacttggtatgtactgaaaattcttactggaatcagtttatcatggagaaaacctaccctgtgccgaat

SEQ ID NO: 1973 - DNA, 896 bp, Homo sapiens
  misc_feature (1)...(896): n = a,t,c or g
gcttcagtccagcacctttctcgggtcacggcctcctcctggctcccaggaccccaccataggcagaggcaggccttcctacaccctactccctgtgcctccagcctcgactagtccctagcactcgacgactgagtctctgaggtcacttcaccgtggtctccgcctcacccttggcgctggaccagtgagaggagagggctggggcgctccgctgagccactcctgcgcccccctggccttgtctacctcttgccccccgaggggttagtgtcgagctcaccccagcatcctatcacctcctgggtgggccttgccgcccccacaaccccgaggtataaagccaggtacacgaggcaggggacacaccaaggatggagatgtttccaggggctgctgctgttgctgctgctgagcatgggcgggacatgggcatccaaggaagccgcttcggccacggtgccgccccatcaatgccaccctggctgtggagaaggagggctgccccgtgtgcatcaccgtcaacaccaccatctgtgccggctactgccccaccatgacccgcgtgctgcagggggtcctgccggccctgcctcaggtggtgtgcaactacccgcgatttgcgcttcgagtccatccgggctccctggctggcccgcgcggcgtgaaancccgtggtctcctacgccgtggctctcagctgtcaatgtgcagctcctgccgccgcagcaccactgacctgcgggggtcccaaggaccaccccttgacctgtgatgacccccgcttccaggactcctcttcctcaaaggcccctcccccgagccttccaagtccatcccgactcccggggccctcggacaccccgatcctcccacaataaaggcttctcaatccg

SEQ ID NO: 1974 - DNA, 1410 bp, Homo sapiens
ttttcagacaaggtaccattttattccttataaaatatatttcatattgttgctgtaaaaacattacatttcacatttttaaaaaattttttaacagtaaaaataatacttggaagacagctgaggaaaaaggcgccaataagacaaactcacagatgggatttatctccctcttgctttttttttttttttttgcccctgggtaaaagtcagaacctgggatgaccagaaagtaacaggacagatttctcccagcaaatcagtctccacaaccaaatgaatattgttctccaaggagtcaagctatagactcacaatgacaacgtggccatggctcaaaacactctctgaaattacaaaattgctttctgagccaatttaaagtcacatgattgaatccaagctatttactttaaatggtccttttgctttgcccctgagacccgcttggccacagacgtcattcgctggactccctggggcactaaattgagtgtctagcatccttaaggctgctcaacacacagccccagactctgaatatgattccaagaaatattctgaaaaaagtcacatcgctggaataaacagtttcccaagataactgctttgaaaaccagtcccgttagtttctaaaagcctcacctacggcaccttccttccatcagagtctgcttgccgggtgggctgggaaggagggagatacaaagaagaaagtaggcatgatcactgggtcggttcccaagccaccctcaccctccaagaaggcatgaatggaacaaccccgagaacagagcacgtgtgaagaaccaacacgacaggcacgggatggcagcactggtggaagggaggcaaggaggccgccagtgcccaaggaggagagggggcacaagcgcaggcagggaaggtggcaccaaaacctagtaagaacaaagcaaaaccaccgtggtttccacactgctctctccctttattcctctctttcctgccctgtataccaacggcataagaagcctgcacaaagagaaaaatccgtatatccagttatatctacacggtccaaactgggggcggggggaattcaaacagctttctaaagacgagacggcagtgaaaactctgagggagaggggaaggggaggccctcctgagcgaagttcccatgtgtcaagaacgtgccctcccctccccatgaggacctgaagctgggggttgtcttgggaagtgaggggggttgggaaacaccatcagcagctgccagctcttaattctcaaggagatcgaagggacaggaaggagagccctgcgccacctcaggctagcctggctttgagctttaccaagagacagaattccaagagacagaattccacatacattttttttttttactaagttataaaaaaaaaa

SEQ ID NO: 1975 - DNA, 571 bp, Homo sapiens
ggaggggactcgccgccatctcaggtctcttggctttgcaggggcccaccggagaaaactgacgacccgtttctgtaatccttatgggagaccaaccttgtgcctccgggagatccactctcccacctggaaacgcacgggaagccaagcctccaaaaaagcgctgccctcctcgctccgcgttgggattatccggaaggaactcccaacggaggtagtaccactctaccctccgcacctcctcctgcatcagccggcctgaagtcgcaccctcctcctccggagaagtagagaaataaatttctcccaccctaaaccagtctttgagtgattgcagtatgactccatttccctggtgcattcatataatagttcacctggtgaaaacaatgaagattatttacaatgctaccctgctttttctggtgtcctgaacctggaagttgtgctttttaagtcttatgatgtaatcagcacgatttcacttcctgaatttcgatgaattctaagacatgggcaagatcgggttgtaagacctctgagatttaaggccatgccctggatcatggtg

SEQ ID NO: 1976 - DNA, 156 bp, Homo sapiens
gagaattggttggtttgcgtatgaaaggtgtgctccgggggaggttggtggggatagtgcgctctctagccagccctggaaggagtggtctctccaggattagcaaggccccaagatgtcaaagcatcataaaactcagaaaataaaaaacatgac

SEQ ID NO: 1977 - DNA, 579 bp, Homo sapiens
ttttttttttttttcctggtccaactcagcagctctatttacataacagcgtcgcccacaccccgtgggcactcctcacggcttcttggctttcttcacggaagatgagctggaggccgactcccgtcgctttctcgaattgggcgtgaggggtgcgccaccacatcaatgatggtgtccttggggtcaggaccaagtccgggttcagtcactgccggctcagcagaggccgggcctgggcctgatgctggtgtggcagggccccctagcacaccagcccgggccagtgcctcatgaacggtgccgcagcatctgcagctcatactcgcagttggcacaggcctgcttgagctcgtagagcagcaccaggtcgcttcgcagctcattgaacatgtgcaccagctcctccgtaggtgtcgggctcagctccacaccaagctccagcagcatctgttccagggccttgatcttcttctgtcccacagagcttggcagcttcatccgttggctccgcagcgtgacacctgcagacttgaagtctggaaacttgatgcctgcagtctcaggaacagatgtggt

SEQ ID NO: 1978 - DNA, 955 bp, Homo sapiens
  misc_feature (1)...(955): n = a,t,c or g
ttttttttttttttaaggctattatctcctttattcaaaaaataaatatttcactttgattcaacatatttcaaatcacattaagcacagagaagaaatacagtccctttggagattgtgaacacgtgttggaaagaagcatgatccaaacaatgggaatgaggtgagtgtggattccagctgtttcctgacccagaggttccatccctcttcaggtggagctacttatcgatttttaggagagaaaaagaannnnnnnnnnnnnnnnnnnnnnnnnnnnnnnnnnnngcgcgcggctttgaagtctgaaaggcacatgaagtggaccataagatgtatggcacattcactgataaaacatcccctattccctcccaagaaagcggagatactttaatcaagtcaaagaccagagaagacagggtgctcctgcttacagctcagcaacatgaacatctctgaatatgaaagccattttttgtttgcgtccccctcccgcgcctcctctccctgccgatggggtccgcggccggctgcggggctcactcggtgatggtggggcgcgtggccacgtacacaaacaccacgatcaagagcacgaccacggccagcgtgggcagtaccactgtagtgatctgctgccgggcctcctgcatggcttgcttccgctccttcttgtccttggaggtctccttcttgggcttccctttgagctgccgcatctttcctagaggatgctaggagggtgtgtccagagggattccaggaagggccacactcctcttgccaaggctggaacctcctgtagagagaacaacttttcttcaacttcaagaatcgttgattaatttcagcaaactgatttccagtacaggtgacttgagttattcccgcaaggtccgccgccggactcttgtccactcccagagaccctgagcgcacccctttctcggcc

SEQ ID NO: 1979 - DNA, 1442 bp, Homo sapiens
  misc_feature (1)...(1442): n = a,t,c or g
gaacagcagtgaccgagatcgtcaacaggagtgcagctcccgcgtcgcctcctggggctggcctctgacccccacacctttggacccccatgagcccgagcgacctttcttcgagggccacttcctccgagtgctgtttgaccgcatgtcccggattctggatcagccatacagcctgaacctgcaggtgacctcggtcctgtcccggcttgccctcttcccccacccccatattcatgagtacctgctggattccgtacatcagctgggcccccggctggcagggagcctattctccgtgttgttgagggtgatcggggacttgatgcagagaatccagagggtaccccagttcccaggcaagctgctcctggtgcgcaagcagttttgacgggccaggctcctggggagcagctggaccaccagaccctcctccagggcgtggtggtgctggaggagttctgcaaggagctggctgccattgccttcgtcaagtttcccccacatgatcctcgccagaacgtctccccagccccggaagggcaggtctgagccagcaccagggcggtgggagactcctgtccacacctctgccccagagctgcctcctgcctgggcactgccgccacactcccctcctggggatggggcttctgctcccgggctcactcaaggagactgcggcatgttgaccacaccagactgggtttcagggaatgggcatgccatgtgccaaggagccaaacagatggctttccagggcagcaaggtccttggggccttcttggaggagcttgggtgacagccagggttagcacccagaccccagaccctcatgtgctgtgtgcctggccccttctgtactggccatttgtggcagggccaagcctgtgactcaactccaggggcaagatggggagtgagctgatggctccgagactggtcaggagcccaggccagtgagatggggcctggagccttgtctgtgtcacattaggtaccatgggagctgctgagacctgacattttgtcccctgcctacatggcttggcccatggagaaggagcagtgaatgggatcgtcggggaagcccctcttcctgctctgctcccctggaaactgttgcaaaactcccagccgcctcatggcaaatgcccaaagcatgttccgcacccaggccggggccccgtgctaatgagaaccttggtgcagctgcagccaggaggggagcgggcccaggagccaggctcaggtccagctggttcctctctggcgccttctgaacccgtctcagcaggtccacagcacctgggcagaggtcagagacaggggaggccgggcttgnctcccttctgcncagggcccagtgttcttgatagaagacncttctggggagcnaggganctcaggggacagataagggaangaagcccctganttca

SEQ ID NO: 1980 - DNA, 1297 bp, Homo sapiens
gcttatcgagacaaattgaagttttggacccatttgtgtactagcaacattgattatgtttactatattcgtcattttttgctgagagttaattgcaccttaagcggaagatatttcccagaaggaggatacacaaagaagctagtcccaatcgaatcagagtatagaagatcttcatttgaaaaccatctacctcagcatttactgagcattttaaaactcagcttcacagagatgtctttgtgatgtgatgcttagcagtttggcccgaagaaggaaaatatccagtaccatgctgttttgtggcatgaatatagcccactgaccaggaattatttaaccaacccactgaaaacttgtgtgttgagcagctctgaactgattttacttttaaagaatttgctcatggacctgtcatcctttttataaaaaggctcactgacaagagacagctgttaatttcccacagcaatcattgcagactaactttattaggagaagcctatgccagctgggagtgattgctaagaggctccagtctttgcattccaaagccttttgctaaagttttgcactttttttttttcatttcccatttttaagtagttactaagttaactagttattcttgcttctgagtataacgaattgggatgtctaaacctatttttatagatgttatttaaataatgcagcaatatcacctcttattgacaatacctaaattatgagttttattaatatttaagactgtaaatggtcttaaaccactaactactgaagagctcaatgattgacatctgaaatgctttgtaattattgacttcagcccctaaggaatgctatgatttcacgtgcagggtctaatttcaaagggctagagttagtactacttaccagatgtaattatgttttggaaatgtacatattcaaacagaagtgcctcattttagaaatgagtagtgctgatgggcactggcacattacagtggtgtcttgtttaatactcattggtatattccagtagctatctctctcagttggtttttgatagaacagaggccagcaaactttctttgtaaaaggctggttagtaaattattgcaggccacctgtgtctttgtcatacattcttcttgctgttgtttagtttgttttttttcaaacaaccctctaaaaatgtaaaaaccatgtttagcttgcagctgtacaaaaactgcccaccagccagatgtgaccctcaggccatcatttgccaatcactgagaattagtttttgttgttgttgttgttgttg

SEQ ID NO: 1981 - DNA, 669 bp, Homo sapiens
gaggatatagtgggagcagtgatacgctaacattcattacattctgcagtaatgaatctgtttaatgggtcagacacttttcagtagcatgacagtggggtcataggtgagctgtgaggggctaaatcttgctctgattgtctctttctgttttgagttttgtttgcgtgtatcatttttgttctacattttgggaggggaaacattttccgttaaggaaggttgttgccagtggatttgactccaagggactagagtgtcgtggtgggggtggggaggggctgcagggtgatcattggctactgagcctccacaaagagcatgtggtgccctgcctttgggagggtattttgctctcgttagttttgtgggcagcctcagattccctgttgagttgctgttaagaaatggagatttctggctctcattgggtaaggttttctgagttttatatcttattagatcacatccctttacccagaacaaatgcttcactgtcttctgattggcagtactcctgtggctttgtgccttgactcattttgttgtcttcagccttgaaggccccttcccacatggactgacatccactcatgtgcctgatccctgaagcctcccagcacccattcagttgcatccccaggggcacaggactttgatctcttctgt

SEQ ID NO: 1982 - DNA, 501 bp, Homo sapiens
ggtacttgaaaactggaacagcttgggaatgccatggggtttgataatctgccagggacatgaagaggctcagcttcctggaccatgactttggctcagctgatcctgacatgggagaacaaccacatttttctttgtgtgtgcttctagcagctgttcgggaggaccttgacccaatagtgttcccatgctgtttcttgtgaaatgctctcggctatgtagcagcttttgattccctgcataccctaggctgctgcccctatcctgtcccttgtttataacattgagaggttttctagggcacatactgagtgagagcagtgttgagaagtcggggaaaatggtgactacttttagagcaaggctgggcatcagcacctgtccagctctacttgtgtgatgtttcaggaactcagcccctttttctgcctaggataagtagctgaaagattaacttggatcttctaatggtccaaatcttttggtcacaattaagagtct

SEQ ID NO: 1983 - DNA, 442 bp, Homo sapiens
ggacaattagtgaacccagtcattaagcttggagatgaataaattcaagctgaacttcattttgttaaactcagcctgtgccatttggatgtgttggcagagcttggggcagacagccatcagataggaaatgagagctgttagattagaaacaggcccgcccaagtccacttgctaatgtgggtaggaaattatacttgggcataggaaacaatcctgaaaatcatacacttagcagtttttattgggttcttttatgtttccatgactgtttgaggagataccaagttatgaatatataacccctatcaatagcaacatcttatgtttttatatagttttcagagcaagtttatacagtttcttttgactctcaaaacattttggtgagtttggaggtattattgccattttttctagactcagaagtcaatgacttggc

SEQ ID NO: 1984 - DNA, 165 bp, Homo sapiens
ctagtctcggtgctaaaagcaaggtgtctgcagggctttgttccttctgaggcggtaggggagaatgtttcctccttagcttgtggcctctgcttccatcttcaaagcacatcattccagcctctgcttccgttgtcacattgccttctctgactctgacccttt

SEQ ID NO: 1985 - DNA, 1368 bp, Homo sapiens
caaacacatacaggaagcgatcaaacctaccaaggcagtctcacttctcaatgactggactgtgtgggtactctgctccagacatgcgtggcctcagactcatcatgataccagttgagctgctactttgctacctcctgctgcaccctgtggatgccacttcatatggaaagcagacaaatgtcttgatgcactttcccttgtccttggaatcccagacaccctcctcagaccccttgtcctgccaatttctgcacccaaagtcactgcctggtttcagccacatggcccctctacccaagttcttggtaagcctggctctaaggaatgccctggaggaagctggttgtcaggctgatgtttgggctctacagctacagctctaccgccagggtggtgtgaatgctacacaggtcctcatccagcatcttcgagggctccagaaaggcagaagcacagagaggaacgtgtcagtggaagccctggcctctgctctgcagctgttagccagggagcagcaaagcacaggaagggtcgggcgctccctcccgacagaggactgtgagaatgagaaggagcaagctgtgcacaatgtagtccagctgctgccaggagtgggaaccttctacaacctgggcacagctttgtattatgctactcaaaactgcctgggcaaggccagggaacgaggccgagatggggccatagatctgggatatgaccttctgatgaccatggctgggatgtcaggggggcctatgggtctagcgatcagtgctgcacttaaacctgcattaaggtctggggttcagcagttgatccagtattaccaagatcagaaagacgcaaacatctctcagccggagaccaccaaggagggtttgagggccatctcagatgtgagtgacttggaagaaacaactactctggcttctttcatatcagaagtagtaagttcagctccctactgggggtgggccataatcaagagctatgacttagatcctggggctgggagtcttgagatataaaagaatgtggtaacccacagaattaataactgtactaccctgacaagctatatacatgtcttcaaaattttaatctgatttatccaggaggaaggctgtacagtaaaacgtaagaacgtaaatgtttgggtgttgaagtcacagggtttggtttcgaatctaggctccacttgttagagcctcggtgatcactgaatagtaacttctttcttgaactaagatcagttttgaagtttctaaaggagatagaatgattttaacctcaatgagttgccctgtaaatttaaaatgatacaatgaatctaaaatgcttatcacagtactttcaataaatagc

SEQ ID NO: 1986 - DNA, 1908 bp, Homo sapiens
gcggctccacgtcggcaccagctgcggggcaagatggaggcgctgattttggaaccttccctgtatactgtcaaagccatcctgattctggacaatgatggagatcgactttttgccaagtactatgacgacacctaccccagtgtcaaggagcaaaaggcctttgagaagaacattttcaacaagacccatcggactgacagtgaaattgccctcttggaaggcctgacagtggtatacaaaagcagtatagatctctatttctatgtgattggcagctcctatgaaaatgagctgatgcttatggctgttctgaactgtctcttcgactcattgagccagatgctgaggaaaaatgtagaaaagcgagcactgctggagaacatggaggggctgttcttggctgtggatgaaattgtagatggaggggtgatcctagagagtgatccccagcaggtggtacaccgggtggcattaaggggtgaagatgtcccccttacggagcagaccgtgtctcaggtgctgcagtcagccaaagaacagatcaagtggtcactccttcggtgaagacctcactgttcctggctcttcatcctcttcaaaaaatttgcatgtctgctgtgaattttcatctagttccccaatcgatgctctcagggtcatctcggggatcacagggatccttaaatctccattctgtttgtggttgccccctcaacctcccctacacccttcctattctttttcattcttcttgcagttctgggagtaaagctcccagcatatttagataatagggcaggggaagcaccctctttctttctagactggattatgctcacatgctcccttgccctgacatttttgtaaattctgtgccctttgctgtagctacacttcagattaaagtaggagaaagaatgtgctgagtgttttcctccctttgcctctacctggccctcatcccaacaggcccagcaaggggagagagaaagagaattcttttctatagaacgagtgggggcggggatgggtagggatttatccaatctaagccctaaccccacttagtgacctcagtgttttcttccattccttcttactgccctgtcctctgccttggaagaggctttgggaatagttcatagggaagggacaacatggaagaaacagcgatttaaattgtattgaacagggcatataaaatgcattctggtaccctgatctggcatatagcttcaaaactggcagtggcgagtgtccatctctttagttagctaccttaactgtccacccttactacctgtgggatcgttgcctggtttgtcttctctgtgtcctggagcaaagccagttcctaaaactaaaactccattctagtcttgggaagaaaagtttctactcagaactggggaaggagtggaacttatgacttgggcctctaggctgtctctgtcccctcagctccccgacatgcatttactctctgccgtgggtctgcagtcgctgcaacctaccctctctctgcctcagccttacacccaagcagtaggtctgtgctctccctgtctctaggtcgctgagagaggtgcttttcttcataaaacctttggggtttggatttccccagggaagatggagaatggaatactcactcttgggtctaatctttccccttgacccagaacttcctccccacaaaaatgcctttaaaaaccttcctgagacttaagcattctgccccacttactaactgccagttctccagcactgaggtggggcagataacggggcatatttaagggggcatctttgtgtaaaagatgcatggagtcaggagaaaaccaccttcataaactgctctgtgcaaagaggaataaaacattttttccaaactgaaaaaaaaaa

SEQ ID NO: 1987 - DNA, 495 bp, Homo sapiens
ttttttttttttatttttctattatatttattatgttgaaacacagtagttgtttcctgttagctaatataaataacataaataacactgtcaaacaagaagttggaagtgctgacaattctaggcttcaagatttaactcatgctgcaattacaccctttcatgcggtttggagttatcccaatatttgttcagtagattaaaatgaatgcatatttaaacaccatttataagccattattgtgtactttgctaaagcagtctatataactgttttgttatgtttggcataaaggaaacataaaaacattgcagcatctaggcaataaagtgtcaaaaggagaacttaacttaggggtatttccatccattgaaagtagtgggaggggtagggaataggaaaacactaaaatggttctgaatcaaatttggaaagtggtagttgtttgttttccactgaagcatgcacatgccactgtcaccaaaacaaacaac

SEQ ID NO: 1988 - DNA, 603 bp, Homo sapiens
aatgaaaatgattgtaatttacagagttgttctttaagatcatcagagaatagcattaatctttctattgccatggatttgtattctccaccctttgtctatttgtctgttctaatggccagcaaaccaaaggaagttacaacagtgaaagtgaaagcatttattgtaaccttaactggaaatctctcaagttctggtggtatttggagtataactgcaaaggtgtctgatggtactgcatatctagatgtagactttgtggatgaaatacttactagcttgatagggttctcagtaccagaaatgaaacagtcaaaaaaggatcctcttcaataccaaaagttcctggaagggttgcagaaatgtcaaagagatctaatagatttgtgctgtctaatgactatttcatttaatccttccttgtctaaagcaatggtactggcattacaagatgttaatatggaacaccttgagaatctaaagaagcggttaaataaataattaaactaaaatagtattaggaacaattaaaaacaacaaggaaatatttagaatttgttcacaattttacttatgatactttgtgtaaaaaggaaaaaaaaa

SEQ ID NO: 1989 - DNA, 642 bp, Homo sapiens
gggcatcttgattatggacctcggacttgttcatccccttgcccttaaacagattataaatttctgagggcaggtggatcatgaccttgctgtcgcccccaccttgcatcccccagcagcatcagagaacactcgggacctccccaaccttgaccgtgaccttcagcgttccgatcaccgtgtgattccttgatctgtaagtgagactaatgtccaaaggctctgtggagctctgctgtcactccctgacaaagcacttcctgcactcagctttatggcgtaggccacatagtaaggccgttcagagcgagggccctgggggtcacgccacttggagtccagcttttctacttgctaactgtgtgaccttgaatggctcccttaaatctccctgaaccccagctccattgtctttaagatgagaaaataatcgttccttcctgggaatgttgtgagtattgagtgaggcagtgcaggtcaagtgtctattaaacactagccacagttgtatcgctgtgtggcagagccagtctgacaaaatacattctcagctgtgtggctaacgctcaaattctgaactcacatgagccttgcaattgcaccatggggaccacgtcttccaccttaactcagtagcatttg

SEQ ID NO: 1990 - DNA, 1025 bp, Homo sapiens
  misc_feature (1)...(1025): n = a,t,c or g
ttttttactttttccatcctattacataatcagctcggaatagatacaaataattcggcagaagagcaatctggaagagacctccaactgcttttccttgttgaagcccctttgtgtgccaggtagtaatttccaaggcataaggtttttctctgaaggttgtattcaactaggaaagacacaaacattctcctaacttccacccaaaagcacacatacctttctttgttaaaatcataaatggaaaaacagaaacacaaggaagcatgagaaaggtgactttgaaattaatgttaaagtctgaatgacaacctagaaccttcttattttgggccccaaagcctctcagtgtgggaactccaatactataaagggctttccctttaaaacagttgaatttagtgtgcatcagaatcaccaggagggcttattaaaacgtggattgccgggtcctctcattagagtttctgattcagcagatctgggatgggattgagaattttcgtttctaacaagttcccaaaggctgctgatgctgctgntaaaagtgccatactttgcgaaccactgctttaaggaatgagaaaccaggggatcactcacttacttccatgaccacccttgtcacagaaaattttccatggtataatcatgaagaagaatgaccaaaccatcaaactggaaggatctagtatacataggttgaattttccacccgtccttccgtgtcccctgcagctttggcattttgataggtatcctcccttccaaggctacatcttcctgggttactaccacctttcccaggatctgtggccggcagtgctcacttcccagggctaggctgagcagacatgcacccatgcaccctggtggccccatatatccgtagtcgggttgattcaggacttattaaaatataaggctgattggattataaggggcaatatcttcaggctttggcctttggggaacagtgttcataagatcattttattactatggccttctcagtggagccatgc

SEQ ID NO: 1991 - DNA, 156 bp, Homo sapiens
aatcaacagtgaggtaaacacttcttgggaccatctgggcaagcattttaatccaaaatattctgtaaacactgactccatttgagtacccaggaactaccgtccagccgccatcaactgcatttttatttcagttttaagcagtaattgaaatag

SEQ ID NO: 1992 - DNA, 1426 bp, Homo sapiens
ccgtcaatgtccagcgcatcacaaaatggaatgtcagttgagtgcaggtgacagcaggacttgctaaagcactttgcacttaatggctgttgagggccactttttttttatactgcacagtggcacaaaaaaatatcagacaagcactattttatatttaaaaattgtttcttgacaagctgacttggcacttaagtgcacttttttatgaagaaaaagtacaatgaactgcttttcctcaagcaataattgtttccaacttgtctgggaattgtgtgtctggtaactggaaggccttccactgtggcaaatggaggcttttcactgcctgtagagacaatacagtaagcatagttaaggggtgggtcagaacatgttaagataacttactgtatatgtattcccttgtattttgttaaagctggaacatttgatatttttccatttatttatgaaaaaatatgaacctattttcatttgtacaaggtaattgttttttaaagcaagtcaccttagggtggctttaattgtataagtcaagcacatgtaataaattcaaaacctgcagttaacaggatattagacatcaatcctggtaaccaaatattaaagattctctttaaaaaagactgaacatgtttacaggtttgaattaggctaaaaggtcttgcagtggcttttcatggcccttcaaattggaatggaactactgtactttgccatttttctataaatcagtatttttttttaattttgatatacattgtgtgaaaaaagaaaatggcctaataaactgtattaaatcttaaacaatgtataaagattgtacttagccagttcaaagtgtatatttattcataatgaattataacagttatatttttgtgttttcttgtaaatgtttcttttcccttaaatacagataattcatttgtattgcttattttattatgagctacaacaaaaggacttcaggaacaagtaatgtattagtatggttcaagattgttgataggaactgtctcaaaaggatggtggttattttaaatataaatagctaatgggggtggtaggcctataaaattaaatgccttgtataaaatccaaaatgaatgcaaaattgttttcacttgtattgactttatgttgtatgattccaatctctgttctgtttggcacttgtatttaattcttcacctttgtaagacatttgtatattgtggatgtgttcattcaagctatttaatatctggcactgttaatacacagtactttattgtacagactgttttactgttttaattgtagttctgtgtactttttttggatggggctggcatgttttctttgtttcctggcaatacgacgtgggaatttcaatgcgttttgttgtagatgctaacgtgtaagcacacactacaagact

SEQ ID NO: 1993 - DNA, 374 bp, Homo sapiens
  misc_feature (1)...(374): n = a,t,c or g
agagagagctgaatggttggtctgaaagatctgtatgacaggggtgagcatagatgacaggaagttgttttccttccacagcacattatgcttcgaatctctttctgtggagcattaaggcaatgattgaaatctgatgctctgaggaagggnaggggnaaaattccncctacctggattgggggtgatgggtttcatggggggtataccatatggtcaagacttatcagattgtacactgtaaatatgtgcacttgattaaatgttaaacctcaattaaaaaagaaaagaggctgagtgtgttagctcatgcctgtaatccccagcactttgaggggccatggcaggtggatcgccgaggccaagtttgagac

SEQ ID NO: 1994 - DNA, 804 bp, Homo sapiens
gctgaaatatgagagcagatttgcagagaccatcatgtcagagaagaaatttccttgtcagagatgttaaagggctacagtcccttagcaaagaaacttcgaaatctaatgttggtttgtgtttttctaaatttgataccgtaattcatttggcagcagaatctgacttgaactgatgtgagagtattgtactttatatttatgctacttcattgtgacttaattttccctgaagaaatatccatggatttgattataggttttcccttagatgctgtggaggtgttttgtaatattcaaaatatgcccatattgcctttttaaaaccccaaagattatgaattctgaaacacatccagcccagcgggttttggataaggggttgtaggcatttaagcagcctcacataatgggctgacttcatccaaaacatgaaaatattacaaggcaaattctgttttttatattttttggttcaatgcttgaacaacttgtttttctgctgggggaagaaaaaaagaaccaaccctgagtgtgattgttacggaaactaatgactttgtttttaaaggatcacattgattcaacaccttctattggacccagaagtgcgtaaatattacctatggtagtaaacgtttaattatcattcagtttaaatgttggccttctgtatgtagccaagaacagctcattttgtgaatttcagtttttaagtggctgctttttgatttggttgtattattttattataatgtatttgcaagtatattaaaaaattaacattgagccataaaaaaaaaa

SEQ ID NO: 1995 - DNA, 487 bp, Homo sapiens
ggggatggagtgagctgcccaggcagggaaaccagcactatacagacctgaacaatgaagatggcacattttgttcagggaatggtgaattaagtgtggcagaaatgctttgtagagacagtaatttgcttgtatggaattttgcccaagagacctcattacagtttctaattttttgatgttatcatgcatcactgcccttgtcagatagtatcatgatcacaataacatcaagcataatatttcattgattctcacaaaaacaggtgggtgccacagttatccccattatatgcacaaaatgatgaagacttggggttaatgagcgatttgcccaagctcacctgaatattaagactgagtcaaatgttagtctggtctgacttcaatgcttgccttgttcatgagcaccatgcattgcctctcctatgcagttaagcaggtagacaggtgagagaagagcccgtgtgatatcgggggaaattca

SEQ ID NO: 1996 - DNA, 1066 bp, Homo sapiens
atcgtatctgtagagaggagagagaagattaagaaatctctcacgtcaaatcaccagaaaatatcctcaggaaaaagctcccccttcaaggtttctcccctcactttcgggcggaagaaagtccgagagggagaaagccatgcagaaaatgagaccaagtcagaagacctgcctagcagtgaggcagatgccaaatgaccaggaagaggagtcctttgcagagggtcattccgaaggcgtccctcgccagcgctctggtggaaggggaaattgcagaggaggctgctgagaaggcgacctccagggggagtaactcggggatggacagcaacatcgacttgactattgtggaagatgaagaggaggagtcagtggcccctggaacaggcacagaaggtacgctatgagggtagctacgcgctaacatccgaggaggcggagcgcctccgatgggggaccccgtgcagcccgccgtgcctccaggtgcaccagacctcctgagcttagagccaccgtgccatcctgtgctgtgctcaagcgggcagccagggctgaagaacaaactcttgcacatctccagcacgactcacccactcctgcgttcctgtccaggcagtaatcattgaccatatagtcatagtaagacacacgagaccaggctttaccatgaaagcgacctgtcacggactccacttttaatttgctcttaggttctatctctgtagaatgtctccaagattgaagaagaaactgagcagttgaaaaatgctaatctctttgacttagtcagaaaaaaacagaggataattcagatactagtcatgaaaagtgattcattcttttttgtcattccataagcttgctgaatagtgtaccggtaatatattgtatttccaccgtactctgtgaatctaattattattctttaagtgttgatatataatatacataaatatgtaagctaaacatataactatatgttttaagaagaaaacatctacgaaaggtaaaaagagatgatcagttggttgtttacttgctagaaaccattgttttattgcaaacg

SEQ ID NO: 1997 - DNA, 1337 bp, Homo sapiens
  misc_feature (1)...(1337): n = a,t,c or g
aagcgccggcctcggggctggtctacagcggcccgggagaggctgtggtggccccgagcgcgagtgtgtaggtgacaggacagcggccaggcccgcccctcccctcgtgatggtcattgtcctccagagcagtgatggaggaaataccagcccaggaagcagcagggtcaccaagggtccagtttcagtctttggagacccagtctgagtgtctgtccccagagcctcagtttgtgcaggacaccgacatggaacagggactcactggggctccacctgttcctcaggtgcctgctcttccccgtgaggcaagcccaggagaccaggcagctgcgctcttgacagccaggtaccaggagtttgtgacattcgaggatgtggctgtgcaccttactcgagaggaatggggatacctggaccctgttcagagggacctctacagagaagtgatgttagagaattatgggaacgtggtctcactgggcatacttctccgccttcccaccacccggattcatagtgtgaattcctgcccggccctgagtcatacccaggcaagtgctttctctggagaaacacttgccgtccttacagcaggaatctccaagagatggcccaagtatcggcttcccatcgatattgctcgtccctgctcggaaactccttttccacgattgtgagatattaaaattgactgatggaatagaagctccccaggatgccaccactgtgtaaaatcgcagctcctcaaattacctctgtttaatttcaaatgttagggtccaaggaagccctctgttgcaaccagatatgttttgaacccagttcattcagaaaccatggttggtggtcatcatctacttgtattgtgaaaaaccagaaattccaaattcagctcttcagttatggtcttttcatattatcttagaatgtgaaacttatgctgtgtgcccctccttttatgtggcgaacacaacctgccccgtatggtgcctaactctcctgtgaaccctgggcttccctcatgtttaacattctggtttcctccttccttgaagtccctggtggnccctcttcaaggtcctaccttcctaccctttattctttgtggttctgtacagattgatgcaattatattgcctttcctgattaagtgttccttactctgtccttgatggaggggagaagggagggcaaagaagttaaatttatttcagggcatcaaattgaatatctacttaataactttgtaaactgtaaagtgacatacatataattgtaaagtactgttaattttatctaataattacagagtttccaacagttaaaaaaaaaaa

SEQ ID NO: 1998 - DNA, 1933 bp, Homo sapiens
  misc_feature (1)...(1933): n = a,t,c or g
taaaaactaacttacaattttgtgatccgtgattcattgccctgcgattcttgaaagctctgtctgtttttttgtgagaacctttaaaatctcccttaatttttattttcccagaaataatgtaaaaacacttaaatgaaagtggaaatgtattaattttaaatcctataaaattaatacagaaaatataaatgattgggtcatttaactatatttttttaaataaactgaaagataaagaacacaacacttcacacattttatatttctcttacatactctggaatcatacacagttctttttaaagcacaacattaaaacctttaaaaggtatttaagggtttggtcaagtgaatatgataaaacatacttgtctgtataaagagaaaatgaaattgtagtcactgttatgtactgacattagttacaacctagttttaattcttaaaacaattttgattagcaaagctaaaaaaaaatggatgtttcagttaaatgttttaaagaggtacagatttttacaaggacataatataagttattgttctgtagaaatatcctattaaatattgtatgtccctccctctgtacactttgtaaagaaagtaaaatacataaaaagaaaatcatatagggatgtgtgacattattgtaattgtgtacttgagaataacgtgcaaaaataaaaatcagaatattttcctgttattgaatgtttagtctatttgataccagtactaagttaatgctttttctcaaggaaaaaaaatgtacagtttttgtaaacctaataaacatcaaaagcagtggattattttcatccccccatttcttaatttctttttcacagcagtgggaatgcaaagtgcttgattgctttgaattttgtgactcggatggcaaatactggtaatatttcagttctgtggaatttggcaagtaatatttcagaggagttaaggggtgattggtgagtcctttgatgagcatgtccttggaattcattttttcttttatcttcataaaggatttgttttattagcatctccaattcccctgagataaattactcatgcataaagtggtttttgagagcacttaaagttcatttcagtattaatttacagcatatttaatcagtggggactgttaccacctccacaacagaaatcatgccctcgagttaccccactgcgcccagtttagaggactagtagatgctaacatactagggaatggtcattgccacagttaaaaatcggcagttaagtaaatgtcaggagtcaaaagagagagagttgtgccatctttgattttatagacaagattctgcagttcttccaactgtatgaacaaacgtttgcctaatagttgaaacaataaattaaaattttaggtaaatgacgaagggaatgtggtgaatgtcactgtccagagccataaatcagacaaaaccatacatagcatgctgaaaaacttttgtaatggaacacccaacaaatgacacctaacctgtctgtgatccaacaagtccgataacatgctgctgtatttgtattctctgggaatctcagtattaataatttcatttcccacaaattctagcattcatgtaaggaaaaacatggctaatcaatatcttaaaggggcaatctttcagagcagtggttttcaaagtatggccggacagcattggcagcatcttaatctcctgggactttgttaaaaatgcaaattctcagccccaccctagtcctactgaattgggaaactggcnnnnnnnnnnnnnnnnnnnnnnnnnnnnnnnnnnnnnnnnnnnnnnnnnnnnnnnnnnnnnnnnnnnnnnnnntttagagcacttgaggaacctaaaagatgactggttcagcattttgtgtggtagataagaaagaaattatcacaaaaaatcag

SEQ ID NO: 1999 - DNA, 4590 bp, Homo sapiens
gcccggcgttaacaaagggagccgataccgaccggcgtgggcgcggagcgggcggccgccaccgagcgtgctgagcaaccgcagcctccgcggccgagagtgcagcgagcaaggggagagccagttgcgcagagccctgcaaccagcagtccagggagaagtggtgaatgtcatggagcccagctgaaatggactggcccccttgagcctgtcccaagccctggtgccaggtgtccatccccgtgctgagatgagttttgatcatcctgagaaaaatgggccttggcctgcagacccaataaaccttccctcccatggataatagtgctaattcctgaggacctgaaggcctgccgcccctgggggattagccagaagcaggcttgttttcctgctcagaacaaagtgacttccctgaacacatcttcattatgattcacaccaacctgaagaaaaagttcagctgctgcgtcctggtctttcttctgtttgcagtcatctgtgtgtggaaggaaaagaagaaagggagttactatgattcctttaaattgcaaaccaaggaattccaggtgttaaagagtctggggaaattggccatggggtctgattcccagtctgtatcctcaagcagcacccaggacccccacaggggccgccagaccctcggcagtctcagaggccctaaccaaggcccaaaccagaggcctccttccaggtgtggaaacaaggacagctcttccaaaaaccttatccctaggctgcaaaagatctggaagaattacctaagcatgaacaagtacaaagtgtcctacaaggggccaggaccaggcatcaagttcagtgcagaggccctgcgctgccacctccgggaccatgtgaatgtatccatggtagaggtcacagattttcccttcaatacctctgaatgggagggttatctgcccaaggagagcattaggaccaaggctgggcccttggggcaggtgtgctgttgtgtcgtcagcgggatctctgaagtcctcccaactaggcagagaaatcgatgatcatgacgcagtcctgaggtttaatggggcacccacagccaacttccaacaagatgtgggcacaaaaactaccattcgcctgatgaactctcagttggttaccacagagaagcgcttcctcaaagacagtttgtacaatgaaggaatcctaattgtatgggacccatctgtataccactcagatatcccaaagtggtaccagaatccggattataatttctttaacaactacaagacttatcgtaagctgcaccccaatcagcccttttacatcctcaagccccagatgccttgggagctatgggacattcttcaagaaatctccccagaagagattcagccaaaccccccatcctctgggatgcttggtatcatcatcatgatgacgctgtgtgaccaggtggatatttatgagttcctcccatccaagcgcaagactgacgtgtgctactactaccagaagttcttcgatagtgcctgcacgatgggtgcctaccacccgctgctctatgagaagaatttggtgaagcatctcaaccagggcacagatgaggacatctacctgcttggaaaagccacactgcctggcttccggaccattcactgctaagcacaggctcctcactcttctccatcaggcattaaatgaatggtctcttggccaccccagcctgggaagaacattttcctgaacaattccagcctgctccttttactctaggggcctctgtcagcaagaccatgggacttcaagagcctgtggtcaggaaatcaggtccagccttccctgtagccagacagtttatgagcccagagcctcctgccacacacatgcacacatatctagcattctttccaagacagcatcctccccgccttccaccttgtagatgcaaggtctatctctcccatcagggctgccaaagctgggctttgtttttcccagcagaatgatgccattctcacaaaccaatgctctatattgcttgaagtctgcatctaaatattgatttcacgttttaaagaaattctcttaaattacaattgtgcccaatgcagggtggctctggggggcaagtaggtggtacaggggattggaaacaatcgtccgcgcctccagagaaaagttgctcccgaggtccatgcccctggaacgtgttcctatcactctggctggttgggctggtccttagactgggtgcttatgattaaaagggtcttggttaagcccactttccctctccatgtggagatggaaggtagagaaggatacagtgtctatcctcaagttgctacggttcagtgagagaggcagacatctgaacagggcaggtaggattcagtgtgctcagtgcactggggatttggagagagatgggcttgctctctctgtgcacccaggagggccacgcacttaaaactgagtttgtggatcagagaaggctttatagcacaggggcattcagatgagtcttagaggaagagaagaaacatggcaagcagattacatctgagccgtttgaattgtgtttttctttcttcccatgtttattttctaagatctacctgaacttagagactcaagatatttttttaggaaacctcctacccatgtctgaggtagcaagtgcagcctcacgacagataccaggcaatccagagccacaaaacgtgattcctccaggctctgcctggcctgaccctgtcctgtcagctgggtttacataccagtcccattcttccttttcaatacctacccccaaatcttctcctaaccaccatctgtttttttttttttaaagcattttttgctttaaaagcatcctgaccccaatttctttgagctcacgggccttttgctgaaggtctctcagggtgtagtggtgtggctctctggacttaacgtcactctcagaggtcagaaccttggagatcagaactgattctcaccaggtgtgagaggtgtggtagcagattgcaatgctctgcacctcttccttgcaagtgagcaacttcaggctctctgggcagaggctggcccactgtagtttgcagacatgctctccagatggttttactaagtcccctctccctgatagggaatcctgctggaccagcgcagccctggtgtggagaggttaaaagacttgcacaggatcaccaagtcatgctgtagagccaggattcctagacccagggctctgcactctcaaggctggccccatgtgctcaagggggtctaatgtttgggctccaaactaaccatctcggagctgggctcctcatttactgccaaaccctcagcttatgtagctagaaagggccctggagtgagaaagcctggattttcaaattgatgctcccctactgactagctgtgccactctgggcaaatgctcttccttgagcctgtttccacacctgtaaagtggggatgatgatcctatctcactgcttttgtgaggattacaggaaagcacctgtcctggctctgtacctggcacgtagtaggtgctcagttcatgctggtttccttcctgcctttagtagggacctgctctgtgctcacacctcggctgcatgcaccctgctgtgacggaggctagtgtggaagaggtcctgtcctcagggaattaactgtcttattgggagacaacaactatcctccttggaacacccaagaaaccatggcaaagcagtggacaacacagaacacgccctcctcctcgctgcctgcagctccaatctgattctgcttgggaatgggcggagcacgtgggctgcttaactgctgtataggacaagccccttacccctctctgggcccatgaattcctggcttggtttatgttctgatttgacacactgattttaatcttcgaatcatgacactgagtgcagaggaggtggcattccgacagcaggacatacatgttggtgtgaagactgggacgacactgggtagaatctagtttttaattattattaatataaaggatcgaattaagttaaatatgattctgaagtctacagaacttttagttctgtgctgtctatgtggacactttggtaaaatgcaaattatgatatggacgttatcattggtctggtgagatgtttcatatttgtgacagttaatttaaaaattatgagttaatgctgcctgtgtctatggggttctgtcttctttgatagccatctattcatctggatcatgggaccctctctaatccttccaccaatcaaataagctattgctattggtttggagttgagatatcagtctcggaaacttctgaaaaatgctaataatcccccgtaatgcattccccactctccttccatcaaaacaggcacttacctctgacaagctgggatatatttcaaagatgcatgctgaatccactgccctcaaatggcagagagaggatgcaaacacagccgggcaatgcagccatttcgcagccttcctactgtgtttgaactcagaaacagctttatctccatttcttgaccacatacctcacagcctgcagctgtgcag

SEQ ID NO: 2000 - DNA, 1968 bp, Homo sapiens
atgaaacattatttacgagttggccttatccttaagggaaaagttctaaatttttaaatttatttttaattccctagtctgagggaaatgtctttattgtccattacataaaaatgttgactccagtaatttatttttctctattttttcctccatgtatttactccatttttctctattttttccttccctgatggatttgcagaaatgttaaccaattagctcaacttttctctacctttgttgagtcttaatcttttagaagataggcttaccgtatatttatgaagcataatatattaaaagaaaacaaatctaggatgcttgcatgacataaagtatttgcctgcagttttcattaaaaactgcaagaatatcatgcttgtctgcttcttagtaaatgttaagtctgaaatggaagtgaggatgtaactctactgaataatcaaagatcatcttagatttggcttgatctgtgtttattgcttctattaatgtaaatcaactctgtgccaaatcctcctccacaaaccatttattgtcttagttctagtggtatcaatgaagatagttacagtatatgaattctaagtcctgaggaagaaattttatggggtttgttaagtttcacattcgtgaaagaggaaattagtagagtattcagactttgatatttggctgttaatgggatgcatatcaaatttttaaaagaaggcttggcctaagggagtttattggtacaggtgcagatgattttaaggcattaaaggattatagagttatgtcatttagactgtttctaataactgagaccatctaacatttttcttttggagtctcatttttatttgtgcaatattttcaggcatataggctactgttcattgtatttatatatatattagaatttactaagtactttaacaagtaaaaatctgaatatgaaagaaaatatcagatttgcactttaaatgagcttaattgcttgaagttgtgcctgaaatatcgaattgcctcctattgggtgtggctttgttgaaataaatttgtaattgttgctgtttgaagatatcagtacagctgttcacagaaatatattcccagcatgtcacttttccattaaagcactaagttttctttgaatgttccattgttccgataagtattttacttttttctcagtacatcagagagagcgtgatccccctacagctgtcacttccaaatgttcctgtagcataaatggtgttacagacactgaggtgcactcttggtttctgagcagagttgtcatactggtttcctgggtctctagggcactggggatgtactttgaaatcaccgaacaggcttgcaattaagatcaataagggctgcagcaccatttcaatttactttccatcttacccagtagtttttgtgtttttaaattcgtttggggtggttatgtttgcatgcttaagcacacatttgaaaattaattatagctgtactacccgatgtttttccttggggatgatggccttgttcctttttaaattctgatgcttgaattctattttctagtgatttttcacatctccctttaagtttttgctgcagcaatttgagagagtacttttgattaaatgattctgatggtgggcaccaatctacaactatgtcattaactgaagatacatgttttaatcttgttgggaataagcttacccactttctccttggtaaagcgtttacttaacaaaataatacccgagaatgtaaggtctctaagtcattactaacaaagagcaaaaataatatctgcagtattgtttttcccattgattttaagtcagtttagagtacaaactgtatattagaatttgcctgtaaaatgaattctaaaaagcagatgtaaagtctctcctgaaaatgttggcatagtaaataaaaataaagttcataattataaaagttaaaaaaaaa

SEQ ID NO: 2001 - DNA, 1837 bp, Homo sapiens
gggagcagtgggcattctttatcccaagggctagccaggttgcgtcatgacggaccttccccagccctgaccaccaccagaagtggaagagtggagtttgcggtcaactcagcagtgcccatggagacctgcgtggtgtcagagcagcagtatctcttggagctggtgcagacaccaaggctgcccagtggtacaacgtggtccacctcccctagggaagctgctgcactcagaggctgtcctgcccagtggcccctgagccgtgtgagcctgcaggaggcgtctgagcagagcctcaagcccggtatggcgccatctccatgttgccatcactgcgttctcacctgaagccttaatctttgcgacacctgccagtgagcgctcggtttcaataccaaagtgtgtcttcttcttttttttttttttttaaatgcctgtttcataggaccttctgaaatgatttccagaatattttatctggctccaaaataaagcacatagcaactcacctcaacccctcatcatctccaggaaagtttctgccaaagctgtggcatagccaacttttgatttggttcttgccaattgttttatgtccctaaacctcatttggatccttggggtatagttttatctttctgcttcagtgatttactgtaacttttcaaatattggttctttctgtaccatttaagtatagttgatatatgtgaggcaaaaaaaggtttcagcatgggtgggtgagggaaaaaggagcttagaaatcccagttggggcacagcctggggcaagcgccagctccgcctcagggctaacggcactgttcacacagggatcctcagaatcagcggccacctgcctccaccttctgcctgggagggcatggggctgttgtagaacctatggtagcaaatgtatatgtatgagtttgtattctgtagtgttggtgtagcacagaagaaagacctgtgtcctagagagtaggccaaggtgatctgcctcttctattgggagaaattctaatttctttcccactttctcaacaagcccaatattccctccaagttcttcttggtgctgagggctgtaggaattattgaaagcttctgcctcacttagtatcgtctggggcccagcacccagcaataactctaataatgtttcttaatggtatagcctcctgagattaaatgtaaaatcaaaaattaggaaatcttggagggagtcctcaagttgtattgctttgctgtgcttttggaagaagggacgacctggaggacacaggctcatgtgtgggtcttcatcctgcctgaccggcagatcttcctctacaccttgggcaaagtctatgcgaagatggtttcttagctctccatttgccatgattttcctcccattcatcatgagggagtttctcaaaccaggagtttatatttattttttagaaaatacacacttttcaggagaaacctgagcatgattttggattctccacctccccccagtctctgcacctgggattcagctcaaggattcagtgtcttcatttttacaaaagttcccccaagaaatcagcaaccagcctctgtttcatctgggagcccctcccttggccccctgggtttgggggtgctgccctactgggaacagcgggggtctgtcacccgtctgagccgcacccccctgtgtggatttcaggaagagcctccctttctttgcgtctccctttctttaattaacattttcaaaagtaataaattcttactgacgacttgtaacttagtcatattttatacttgtagcctttaataaagccatttaaaaaatgctaaaaaaa

SEQ ID NO: 2002 - DNA, 2268 bp, Homo sapiens
gaattccgctttttttttttttttaaaaagcaagcttccactttattaaaaggcacaaattaccaactcgtataaaataatttaactcataaaaaggagaagctcacattactttttaaaatatcagataccataaaatgtgcatttagtcttttaaatagttaaactttcagttaaactattatacacctagcttttctcagaaagctgttgcacacccaagtactgttctgactgtacagaaatcaatgatcctcttctttagcagaataaagatgtaactcccttaaatgacattcaccttaatattaccaacttaaattctgcttcattaccagaaacagtgttttcaagaactggatctttctaaatccacttttatttttacggccctttactatttgattatattcactgtagaaaaatgtgaagacacagaaagattcaaagaaaataaaaattatcccagtatccctcccccaaatacaataacaaggttatatatatttctttctagtttttttgtatatttacatagcattttaaagcaaaactagtactataaaatgctaccatatccttttttcacttcatatatagagcaaccgtgtctttttaggacattgaaatatgcaaaaaggattttcagttggctgattcacaatctagattataactaagacataatttacctccaattgcaagggattcagattgtttcaattatttattattataactatcattattaaacacccttctttatatataattctttgtatgcatctctgatatggttttaaagagaaattgctagatgtagagttcccagcacaaagtacgtccgtatttttaagtcttttgatgcattttaccaaattgccctccagaaatactgtaccaatttacagtcgcatcaataaataaccaaagagtcccatttcttcctcacattctttggcagtataggaaagtagagattaccctccaccctttattgttgcaaatttaatagggggagaagagaatggtggggttttttttttcccccttaaaatgtaatattttttcccacatgtttactagtcatttgcttttcttctgtattttgaagttgtctaaatcattcaggagtctctaatacacacaatgtcttgtctttcttacaacatactctttgataggcaagggcatgaaagctgcatgtctttcccatatttttttcaagttaagcaggaattcccaaaatgactggaattagaatgtcttcttttctcctgggcagccatgctactttaatgtcttggtaataaaacagaaaactgggccatattcttcaggttatggagggtttctgaccattctgtggaccctatctgaggtatggtagtgagcagtaagcttttggctttattagcgttttctttcagggtctttaagacccggtccaccgaaactgcttcctcgtgctccttccagcagtcataatctgtcgccatggcgatacttgcgtaacaaattccagcctccttagcaagaaccacctctggaactgtggtcatgttgataacatccgccccccaggtgcggaacatgaagctttctgcccgggagctaaaacgaggtccctcgattgtgaccattgtcccctttgagtggcaccggagtcctagcttcttagcagtctctataagaacctctctcgttttggggcaaaacggctcagccattggaatatggcacactcctctggcacaagaatgacttccatcatagaaggactgaggtctcatagtggtcctgtcaatgaactgatcaataatgacaatatcgccgggctgaatctcctccctcaaggagccacaagctgtggtcactatgacatgtgtacagccctcttccttcaaagcccagatgttcgcctggtagttgacctttgaaggcatgatggtgtgctgccttccatgccttgcaaggaggatgcaatcaacattttttatcttccccaaaattaaggcatcagatggcttgccaaatggagtatccacatatttttcagttcttccttctaaaatttctggatcatccaggcctgttccaccaattattccaatcttcacggcggtggtggtggtgccagaggccatgtctgcacgggaaaggaatctgcagtgggcgagcgctcgggactaagggaaccaagcgagccacagagcggtggctgtgccaacctcactgcgcgggagtgagcagtgcggagcggaattc

SEQ ID NO: 2003 - DNA, 797 bp, Homo sapiens
  misc_feature (1)...(797): n = a,t,c or g
tatctggtctctgggcatcatggtgattgagatggtagatggggagccaccgtacttcagtgactccccagtgcaagccatgaagaggctccgggacagccccccacccaagctgaaaaactctcacaaggtctccccagtgctgcgagacttcctggagcggatgctggtgcgggacccccaagagagagccacagcccaggagctcctagaccaccccttcctgctgcagacagggctacctgagtgcctggtgcccctgatccagctctaccgaaagcagacctccacctgctgagcccaccccaagtatgcctgccacctacgcccacaggcagggcacactgggcagccagcctgccggcaggacttgcctgcctcctcctctcagtattctctccaaagattgaaatgtgaagccccagccccaccctctgcccttcagcctactgggccaggccggacctgccccctcagtgtctctccctcccgagtccccagatggagacccctttctacaggatgaccccttgatatttgcacagggatatttctaagaaacgcagaggccagcgttcctgggctctgcagnccaacacagtagaaaaggctgctgtggttttttaaaggcagttgtccactagtgtcctagggccactgcagagggcagactgctggtcttccacagataacctgctgtttttcaggttccagctttcaaacttcggagttttcggagaggggccaggggtggttttttattgaccggaattcccgtttcctncctcaagtctgat

SEQ ID NO: 2004 - DNA, 1818 bp, Homo sapiens
ttcactcaaaaatcacaccttagaagtcatcggggaattcattctggagagaaaccttacaagtgtaatgaatgtggtaaagtcttcgctcaaacatcacaacttgcaaggcattggagagttcatactggagaaaaaccttacaagtgtaatgactgtggcagagcctttagtgatcgttcaagcctaacttttcatcaggcaatacatactggagagaaaccttacaaatgtcatgaatgcggcaaggtttttaggcacaattcataccttgcaactcatcggcgaattcatactggagagaaaccttacaagtgtaatgagtgtgggaaagcctttagtatgcattcaaacctaactacccataaggtcatccatactggagagaagccttacaaatgtaatcaatgtggcaaggtcttcactcagaactcacaccttgcaaatcatcaaaggactcacaccggagagaaaccttaccgatgcaatgagtgtgggaaagccttcagtgttcgttcaagcctaaccacccatcaggcaatccatactgggaaaaaaccttacaaatgtaatgaatgtggcaaggtctttactcaaaatgctcacctggcaaatcaccgaagaattcatactggggagaaaccttacaggtgtacagagtgtgggaaagcctttagggtaagatcaagtctaactacccatatggcaatccacactggagaaaagcgttacaaatgtaatgagtgtggcaaggtcttcaggcagagttcaaatcttgcaagtcatcacagaatgcataccggagagaaaccttacaaatgagtgtggtgaggtcattaggtacaattcactcctttcacatcagttaatttcattcttgacagaatccttacaaatgtagtgacagtggccaatccctcatgagttgaagcattaatagatatgagaggccataagcaagagacatcatgtaaacatatgtggcagagggtctatccaggcctcgcaggttactaggcatcaagatttatatctttgatgaaacgaaacaaatgtaatatgcatcctgaggccattacccagtgaccgatggtaagtgaggattcctaggaggaataacagtctctggtttccctgtttgcctttgatattatacactgtagaatactcacaagtccaaatatgctaaaaattatatatttttaactcacatacgaaaaggttgcaggatatttgtaggcagtcagttaccttcaccttatgaaatgtttcactgagttatttgaggttttttggaaagcctactattgcgtttcaatgtgaactttgaaatcttattgtgcatccttacacaccttccatggtgctttcttggaaagatcattgggatggaaggatcattgattgggtgaagatcattgattaggtgaaggattatttctatccaatttgtgaagaaggaggactttgcttttaaaattaagtatcatctgaattagcatttgggagtggcgaaaaacaatgtaaaactatgatgtcactcaccattctgataatgttcaggggtgcctttctcctaccaggagagtactgtggcttagaggaaagaaatggtctatcaactgaacatgaaatggagcaggccaagaccttaggacattgggatttttgtgggaggagagtaataggtaattagacactgattgtgtggtagaaatactgcaggggaaaaggtcgccctcttatgcatcaaagagcaatacctgttgtttagcaaagagtgatgaaaaattgatcttgttttgaaattgaagagag

SEQ ID NO: 2005 - DNA, 889 bp, Homo sapiens
cctcctcccctctactctacccagcttgcgctccccagccgcaagtcggccgcgctttgcccgtcagcgcttggagctttctgcgtcgcttcccgctgcgcctgcgcggtcccgcctcgccccacgcgcgggctcgcgcttcggtttccccagacctgctcgcagcaccctgctgtcttcccggtccggcccgctgcccgcggcgccagcaccatgctcttctattcttttttcaagtcccttgtgggcaaggatgtggtcgtggaactaaagaatgacctgagcatctgtggaaccctccattctgtggatcagtatctcaacatcaaactaactgacatcagtgtcacagaccctgagaaataccctcacatgttatcagtgaagaactgcttcattcggggctcagtggtccgatacgtgcagctgcccagcagatgaggtcgacacacagttgctacaggatgcggcaaggaaggaagccctgcagcagaaacagtgatggctcctcctcctcttcccctccctctttcattggtgacccataaccccaagtcccagcccagaacccctaacccccaatacttgaaggggttttgtttttttactaatgatggttttgtgggttttttttaagggatgagtggatgagaggagtaatagggaacagctatcctctcttgagaaggggaggataagtaggctgggaaacttcaaagccttcccagtccccagcacctgcctttctcactacttctctggagatggtaggagagtttcctaggtctttccagggcagcatgtgattcatttggggatggaaggaatctgtcccgcatcgggaataaaatttatgatgcaaaaaaaaaaaaaaaaaaagtcgacgcgg

SEQ ID NO: 2006 - DNA, 1810 bp, Homo sapiens
gcctagtcccgcccctgcgtgcggcgcttctcccaggccccaccttccatccagtgccctggaccctcggctgggtagcgccaccagagcgaccaaacgtcccgcgccttccaggccgcactccagagccaaaagagctccatggcggcggcggccaagcccaacaacctttccctggtggtgcacggaccgggggacttgcgcctggagaactatcctatccctgaaccaggcccaaatgaggtcttgctgaggatgcattctgttggaatctgtggctcagatgtccactactgggagtatggtcgaattgggaattttattgtgaaaaagcccatggtgctgggacatgaagcttcgggaacagtcgaaaaagtgggatcatcggtaaagcacctaaaaccaggtgatcgtgttgccatcgagcctggtgctccccgagaaaatgatgaattctgcaagatgggccgatacaatctgtcaccttccatcttcttctgtgccacgccccccgatgacgggaacctctgccggttctataagcacaatgcagccttttgttacaagcttcctgacaatgtcacctttgaggaaggcgccctgatcgagccactttctgtggggatccatgcctgcaggagaggcggagttaccctggggacacaaggtccttgtgtgtggagctgggccaatcgggatggtcactttgctcgtgggccaaagcaatgggagcagctcaagtagtggtgactgatctgtctgctacccgattgtccaaagccaaggagattggggctgatttagtcctccagatctccaaggagagccctcaggaaatcgccaggaaagtagaaggtcagctggggtgcaagccggaagtcaccatcgagtgcacgggggcagaggcctccatccaggcgggcatctacgccactcgctctggtgggaccctcgtgcttgtggggctgggctctgagatgaccaccgtacccctactgcatgcagccatccgggaggtggatatcaagggcgtgtttcgatactgcaacacgtggccagtggcgatttcgatgcttgcgtccaagtctgtgaatgtaaaacccctcgtcacccataggtttcctctggagaaagctctggaggcctttgaaacatttaaaaagggattggggttgaaaatcatgctcaagtgtgaccccagtgaccagaatccctgatgttaatgggctctgctcatccccacagtcttgggatctcagggcacaatggctggacatgggtgggctctgatgcagaactttctcttttgaatgttaagaataactaatacaattcattgtgaacagaagtccttaagcagaggaattggtgtgccttaaagatacaatctgggatagtttgggggaacttgtagccagaatgccctgttcatgctgagcaaagttcagcaagtagagcagagtttggcaggcaggtgccaggaactccccttcttcctggagtgccttcattgaggaaggaaatctggcccttgggtttcctggttccactgctactgacccagaggggaatgagggctgagttatgaaaagataacttcatgaagacttaactggcccagaagctgattttcatgaaaatctgccactcagggtctgggatgaaggcttgtcagcacttccagtttagaacgcaatgtttctagagacatattggctgtttgttttgatgataaaaggagaataagaaaaggcatcactttcctggatccaggataatttttaaaccaatcaaatgaaaaaaacaaaca

SEQ ID NO: 2007 - DNA, 822 bp, Homo sapiens
  misc_feature (1)...(822): n = a,t,c or g
gatgctttaaagcctccgatccatgttccatggaaggtacatcagcaattaattctagagcaactttgccccagcgattcctcttgggtgcgaacagaactactaacgttttcaagtttaccaagtgcaaatccaagaagacccagaacggcgtcacttctcagacactgaagaactctgctgtgaacaaaacactcaaacctttaagggactgtccttggggaggcaggcggggctgacagctcaggagtgtctgcacactgtctcggaagccaggattccatttgtgttgctgctgtattttccccccacttctctatgtaacgatataagctatcggagggtggtaccgatcaggaacgctttttggcggggctttccactgttcaaccgattccttccgctttctttttttgtgccttgtgcccttgaggtgacctctggcatgtatcctggtggttcttacatccccctctgcaaagtgccctcttggtttggttcgggcggcggctgccaccctactcaccgctctcctccctgccccaggacttcatcggagcaggcagggtggagcgaaggagctccttagcccacctggtttgcaggtgcagggggaccttaggcacgccccaagcaccaggcaccagggcccaaggacgcccaaggtgttggggcacagtccccaagggcttcggcccttgggattcaggctgggcactcgctgtgcttcttcccttccttggggcgtttaaggactgggcgtntccaagcccaccatgggcccagatggaacgtgcaaagccttggaatttttttggcaat

SEQ ID NO: 2008 - DNA, 503 bp, Homo sapiens
gctggaagaattaattctggaatatttcttaaacttgcttgatttgtgtaaggtctggctgctgggctccctgaaaccttgcacatatcttactgtatgactgtatttcgttttgagtctctggattctggggtttggacagatgaccatagtgaggccctgcagaaatatgcatgtcctcagtgtttggactgccagctgcaaggcagagccaaacccaatatggccccatcatcccctggctcagctgtgctacctggccatgctggaaggggtttgatcttccaggaatttgcttcacagctctttcctgtcccaagatctatgcctgatgtgtaaattcaggacccaaaagggcacaaaaaagcaataactactaaatataaggaaaacaactctgtatacagcatgtataaagaaaagcaagatatatttggggagataaaagttgtaaaggcattaagatgtgtgtttgttgagaaaaaataaatttgtgcatttaa

SEQ ID NO: 2009 - DNA, 981 bp, Homo sapiens
gacgaaggaagttgtggaagaggcagaaaattggaagagacgcccctgctaacggggaatgctaatgaggaaaatggggagcaggaggctgacaatgaggtagacgaagaagaggaagaaggtggggaggaagaggaggaggaagaagaaggtgatggtgaggaagaggatggagatgaagatgaggaagctgagtcagctacgggcaagcgggcagctgaagatgatgaggatgacgatgtcgataccaagaagcagaagaccgacgaggatgactagacagcaaaaaaggaaaagttaaactaaaaaaaaaaaggccgccgtgacctattcaccctccacttcccgtctcagaatctaaacgtggtcaccttcgagtagagaggcccgcccgcccaccgtgggcagtgccacccgcagatgacacgcgctctccaccacccaacccaaaccatgagaatttgcaacaggggaggaaaaaagaaccaaaacttccaaggccctgcttttttttcttaaaagtactttaaaaagggaaatttgtttgtattttttatttacattttatatttttgtacatattgttagggtcagccattttttaatgatctcgggatgaccaaacccagccttcggagcgttctctgtcctacttctgactttacttgtggtgtgaccatgttcattataatctcaaaggagaaaaaaaaccttgtaaaaaaagcaaaaatgacaacagaaaaacaatcttattccgagcattccagtaacttttttgtgtatgtacttagctgtactataagtagttggtttgtatgagatggttaaaaggccaaagataaaaggtttcttttttttccttttttgtctatgaagttgctgtttattttttttggcctgtttgatgtatgtgtgaaacaatgttgtccaacaataaacaggaattttattttgctgagttgttctaacaaaaaaaaaaaa

SEQ ID NO: 2010 - DNA, 971 bp, Homo sapiens
aattcggcacgagcttctaaaaaggaaagtaaaaacaaacaaaaatatttaagagaaagaagaaaaaactgaattgcctatgaagagggcaagaaaatttaggcaaacctctatgcaagtgagagtcaacagacataaaataaattcttcaagtaactacattaagttgaaatcccctgaggtattttgcggagtgttcaggatcatatgtcttttgcaaaatagatttttacattgcagctgatgagtcctccaattcactagcaaaatgagtgctggacacactctgtggtacattggctctcacttcagtggggcattgggaattctggcccacttccaaggaagggcaaccaaaaacattgactcctgtgaactgttctctgctcctttggttcacagtgaaaagcaagtaagggcatatgtaatgccttttaaccatgagtgatgtaggcctcaaaatatgcagcctcctctagtaaacaaacacttttccaatcataggcaacaccagaggagatttttaaagacagacaaccgttagggaagcttcgtgagatattgcaatgtgaacatgtatctagattaagttaaatgatactgttttgataaaaagaggaacatgttgatgtcaagggtggctttgatgagagaatatattatatagtggcttagagagttgacctgcaacctcaggctgcctgtggctgagtcctggttcttgcactgggtaatattaggcaagtcagcattccttgccaatacaaagaggataacagcacctacgtcatgaaatggttttaaggattaaatgagctactctgcaaagtgcttagagagtcattgacatatactaagcattccatcagtttcagttcttgataccctacttcctgagggccttcaccttgttagcatgacacctctataattggctttgggcttttgggcaaaagtggttcaaccagtcc

SEQ ID NO: 2011 - DNA, 1902 bp, Homo sapiens
cgccacccctgattgcggtgccacggactgctcctgctgggcggagaggacagattttgcaaagcggaggctgcgacgggtcctgcagggggacagtgaggaaagggccgcctcgtctccgctcctgggggaccgcagaaataagaatcaaactccacaatgacaacctatttggaattcattcaacaaaatgaagaacgagatggagtccgatttagttggaatgtttggccatcaagtcgactggaagctacaagaatggttgttcctgtggcagccctgtttacaccactgaaagagagacctgacttaccacctattcaatatgaacctgttctgtgtagtaggaccacttgccgtgcagttttgaatcctttatgtcaagtggattatcgagcaaaactttgggcttgcaacttttgttaccaaaggaatcagtttccacctagttatgctggtatatctgaactgaatcagcctgctgaacttttacctcagttttctagcattgaatatgtagttctgcgtggtcctcagatgcctttgatattcctctatgtggttgatacttgcatggaagatgaagatttacaagccctgaaagaatccatgcagatgtcattaagtcttttaccacctacagctttggttggacttattacttttgggagaatggttcaggttcatgaacttggatgtgaaggcatttcaaaaagctatgtcttcagaggaacaaaagatttgtctgccaaacaactgcaggaaatgctggggctctctaaagtaccagttactcaagcaacacgtggtcctcaggtacagcagccacctccttccaacagattcttacaaccagtacagaaaatagacatgaatctcacagatcttctgggagaactccagcgagacccttggcctgtaccacagggaaagagacctttgcgttcctctggggtggcactttccatagctgtaggactgctggagtgtacttttcccaacactggtgctcgtatcatgatgttcattggtggtcctgctactcaggggcctggaatggtggttggagatgagttgaagacacctataagatcgtggcatgacattgacaaagacaatgccaaatatgttaaaaagggaactaagcattttgaagcattggctaatcgagctgctacaactggccatgttattgatatctatgcgtgtgcattagatcagacaggtctcctggagatgaaatgctgtcccaaccttactggaggatacatggtaatgggtgattctttcaatacttccttattcaaacaaacttttcaaagagtctttaccaaagacatgcatggacagtttaaaatgggctttggtggtacgctagaaataaagacctcaagggaaataaagatttcaggagctattggaccctgtgtgtcactcaattctaaaggaccctgtgtgtctgaaaatgagataggaacaggtggcacatgtcagtggaagatatgtggacttagtcccactacaaccttagccatatattttgaggttgtcaatcagcataatgctccaattcctcaaggagggcgtggtgcaatccagtttgtgactcagtatcagcattcaagtgggcagagacgcatccgagtgaccaccattgctaggaactgggcagatgctcaaactcaaatccaaaacattgctgcatcttttgaccaggaggcagctgccattcttatggcccggtgctatttccttattaaaatagaaaattataggcaagatacaattatatgcgttcctcttcctgaaattataacatttctaaacttacccacgtaggtactactgaatccaactgccaacaataaaaagacttttatttagtagaggctacctttcccc

SEQ ID NO: 2012 - DNA, 597 bp, Homo sapiens
gccctcagatgataagcattttggccaggctcccagcaagggcactccaagtgatggtgtcagtctctcaaacctcacccaacccagcttgaccgccactgatcagcagcaacaagaagagcactaccgcatagaaacccgcgtctcctcctcctgcttagacttgcctgatagcacagaagaaaagggggcccctatagaaaccttgggttatcacagtgcatccaataggaggatgtcaggggagccgatccagaccgtagagtccatccgagttcctgggaagggaaatagaggacatgggcgtgaggcttcaagggtgggttggtttgatctgagcacatcaggtagctcttttgacaatggcccttcaagtgcctctgagttggcatcccttgggggtgggggcagcggaggcctcactggctttaaaacagcaccatacaaggaacgggcacctcaatttcaggagagtgtcggcagctttcgttccaacagtttcaactcaacatttgagcatcatcttcccccatcccccttggaacatgggacacccttccagagagagcccagtggggcccatcatctgccccacct

SEQ ID NO: 2013 - DNA, 573 bp, Homo sapiens
gcggaggcgcgggtgccgtgctgagagcgcctgcctgtgcgccccgagcggggctgggactcttccaagatgcccacgttcgcacagagaccccggatcgcggaagctcgcgtctcgaaaggcctgcggtctcacgccctgcccgtcctgggttcacggtttttcatcacctgcggctgtcctgcgatcgaccacagctgtgcaggaggggcaggaggtatctgttgctgcagttaccggaacctttgccaggactagtacaggaccacgggctggtagctcagggatgtctcgtctgtgagttacagctgcacgctctccaggaaagaaggaatttcctcttctctggaaaccccaccacacagctggtttctcattggtgctggtataaaagacttggtataaaagaaccgctggaacaacacctgcccggtagccatggccacctagagtagaagaaagtttccgtattttcaaacgcaccattcaaagcttcgcggccgaaagtcatcgagtaacgtgggactccccacgcagaaccaaacactgaaacgcttcccacgtcaaaaaaaa

SEQ ID NO: 2014 - DNA, 804 bp, Homo sapiens
  misc_feature (1)...(804): n = a,t,c or g
agccttgacacgtgacccaagccccagcttcgcgcagggatggagccggaagaggggacgcccttgtggggcntgcagaagctgccggccgagctgggcccgcagcttcttcacaaaataattgatggcatttgtggtcgagcttatcctgtgtaccaagattatcacactgtttgggaatcagaagaatggatgcacgttttagaagatattgccaaatttttcaaagccatagttggtaaaaacttacctgatgaagagatatttcagcagttgaatcagttgaattcacttcatcaagaaactatcatgaaatgcgtgaaaacgtaggaaagatgaaatcaaacaggctctgtcaagagaaatagttgctatttcctctggcacagctacaggattttgattggcaggtaaagcttgcactttccagtgacaagattgctgcattacgaatgccacttttaagcctgcatctagatgtaaaagaaaatggtgaagtaaaaccttattctattgaaatgagtagagaggagctgcagaatctaatacagtccttggaagcagcgaataaggtggtcctgcagttgaaataactggaaatgatgaataccagtcctatcagattttattgctccaacttatatggcagagtgaatactgcgtgttcagaaaccttgtgatgtcttgactgtttgcaccaggctgagaaagcagcaatattgataattataaagataaaaaatttttccaacattccctttncagggnaatttacangggttgagagggaaatgcctcaaaatg

SEQ ID NO: 2015 - DNA, 474 bp, Homo sapiens
  misc_feature (1)...(474): n = a,t,c or g
gatagaaaaagactgatgatatatatccgtagtatgcgctaccaaagcaaatggcagggacaactaagacccaaccttcatcaccaaagacaagtgtgaatgacacgctggttcacctaggcaaggcggattcagattcctcagcatgcggagttcctggaaattgataaaaatgggcacagcacagaaaatgggcagttcacaaaagtggtgcaggtgacccatgagaagttcacatcaccaatggttacagaaatgaaaatcattcaccagccacttgcccccaccagggctgggctgcgtgaccttggggctgtgtctatgatcatctgttatggcaggcaattacaaaacaaataccctctctcttttagtctgtattttttttctggaatatttttggcagtgggttttttcgttgttggncgtttttaacattttaagctgtgaagttggcnggacacaacacaaacc

SEQ ID NO: 2016 - DNA, 756 bp, Homo sapiens
  misc_feature (1)...(756): n = a,t,c or g
gcggcacgagtgataaacaagatgactcggcagctgcccctaaccaccctataatccagtaggggtggaggagggtccaagttgtatctttgcttctctctcttttctaattattttctaaagtgaatgtgagttggccatgagagaaaacataggaaggtattggaaaatgaacccgggggcagggcaggggagcagcaggcctggtgaggaggccctgaccccgcccttgctgtgctgcgctgccctccctgcaggtgagaagccgcacaagtgccagggtgtgcggaaaggccttcagccagagctccaacctcatcacccacagccgcaagcacacaggctttcaagccctttcagcttgttgagctgttgcaccaaaggcttccagcgcaaggtggacctgcggcggcaccgcgaggagccagcacaatctcaagtgaggctgcgccggctcccactcctggcaacctgccctgcggtcctgtcacctggaggccagcctcacatgcccaaatctccagtctcctggaggtgggactggacaggagtctaccagcttgttttgagactcatgaaattgctgtgtgaccttgggcaagtcacttaccctgtctggatcaacatttctcctgctgccaagtgtgggaagctggctgggtcttcccagcaaaagttgtttccaggtgtgctcaggtgccttcctctagcagagcacagaaagctagatacccaaggagaaagggattcnanagt

SEQ ID NO: 2017 - DNA, 431 bp, Homo sapiens
ggactcttttcttgacttagctaccaggagctagagatgctgttattctatcgtatgtgagaagtcggcccagagatggaaaactttattctgtatgaggagatcggaagaggaagcaagactgttgtctataaagggcgacggaagggaacaatcaattttgtagccattctttgtactgataagtgcaaaaggcctgaaataaccaactgggtccgtctcacccgtgaaataaaacacaagaatattgtaacttttcatgaatggtatgaaacaagcaaccacctctggctagtggtggaactctgcacaggtggttccttaaaaacagttattgctcaagatgaaaacctcccagaagatgttgtgagagaatttggaattgacctgattagtggattacatcatcttcataaacttggcattctctt

SEQ ID NO: 2018 - DNA, 540 bp, Homo sapiens
  misc_feature (1)...(540): n = a,t,c or g
ggcgctgcccaggcaagggcagggctggggtgatgaccatggtaacacccgggtgggagttcgtgacatctccggcgcggagggactcgatgtctatggcaatggtcgcctggtggaagggacggaactagatcccttcgctcgggacgctcacattccaggcccttgtcctgcaggctgccgcgggcggacacgccagaggaggaggccggggaatggccgcggtgtggcagcaagtcttagcagtggacgcgaggtacaacgcgtaccgcacaccaacgtttccacagttttcggacgcagtatatccggccggcgcacagcttgctgcggggagaatgccaagggttgggcaccccccagcgctgcgtcggcagtacctgaggcttcggggggcagctgctgggccagcgcttacgggcccctttttcgagccagggcagtgttcgttgcctattagcaacagcattcgtttccgcagtaagcccgcantaattttttnaacccgcatnggaaggatttttnaaggattgattcctt

SEQ ID NO: 2019 - DNA, 425 bp, Homo sapiens
  misc_feature (1)...(425): n = a,t,c or g
gcccttttctaaggtgagcaagatgggtttcttgttgaggaggaagtttggaaagctcttcatatttattttaaggagcacttgggtagctatctcctacatttgattaaaaccggatgcaagcaagaaacttagtaaaggaaatcagatcagaaagaaaagattggcatgatgtaagtggaaaaactcagggaatacaagttttcttctaaggtcctatgtatggatttgaaagtcacaaaattttaatttgatgcttttcatctacaccacctaaatcttccatgaacctcttggttaaaaggctatattaagcacaatacttttaaaaaactagatcagagacatttttagctataaaaggctaactgaaaccattatttgagatccactgggaggcttaaganagttttgaaaatanagtg

SEQ ID NO: 2020 - DNA, 356 bp, Homo sapiens
gctttaaatgcctattgtttattgggagaaggaaagaaacttttgtatgtctgacagagccccaaactcccctcccaaatcaactgaaaaagctttaaaaaaagacaggaaaaaaaggagtaagaaagcaaaaagaacagatgaaggaaaacttaacaacttttgggtggtttgattcctcctttgatttctttttcggttctcttttgtctgacctctctcctcccctccttcctctctcctcccctccttcctctctcctctcctccttcctgtctcctctctctccctttgctctcctctcttctctctcaatcttgttctttctgtgtctctcctcaaaccaaagtgttgca

SEQ ID NO: 2021 - DNA, 432 bp, Homo sapiens
  misc_feature (1)...(432): n = a,t,c or g
ggcacgannnnnnnnnnnnnnnnnnnnnnnnnnnnnnnnnnnnnnnnnnnnnnnnnnnnnnnnnnnnnnnnnnnnnnnnnnnnnnnnnnnnnnnnnnnnnnnnnnnnnnnnnnnnnnnnnnnnnnnnnnnnnnnnnnnnnnnnnnggcaacagagttagaccgtgtctctaaaaaataaaagaaataaaaacaatctgtcttttattatccacattttaatcatttctagagctctttctttctgtagatctgaatttccttctagtaccagactcctgcctgaggtctttatttaacatcatcatagtatggtatgttggcaatgaattttttcagtttctgtgtgtctgaaaaattctttatcttaccttcattttttagcagatactttcacttgtatagaattccatgtggacagttttttctgtcag

SEQ ID NO: 2022 - DNA, 1427 bp, Homo sapiens
  misc_feature (1)...(1427): n = a,t,c or g
gtctgaacgcttacaccgtaaaaaacttaatgggagagaagcttttgttcatgtagttaccctagaagatatgagagagattgagaaaaatccccctgcccaaggaaaaaagggattaaagatgcctgtgccaggtaatcctgcagttccaggaatgcccaatgcgggactgcccggtgtgggactgcccagtgcaggacttcccggtgcaggcctgcccagcacaggactgcctggttcagcaataaccagtgcaggactgcctggtgcgggaatgcccagtgcaggaatacctagtgcaggaggtgaagagcatgccttcctgactgtaggatcaaagggaagccaattaatgggccttccattttaactttcctgggtaattttgggtgggatccaaatgcctttgggccaccaatccctcctccaggattaggaggcggggcctttggtgatggttaggcctggtatgccttcagttggaaacantggtttgcctggtctaagactggatgttccgggttttggaggtggaccaaacaatttaagtgggccatcgggatttggagggggccctcagaattttggaaatggccctggtagcttaggcggtcccccggggtttggaagtggccctcctggtcttggaagtgcccctgggcatttgggtgggccaccagcttttgggcctggccccggccccggccccggccctggcccaatccatattggtggtccccctgggctttgcatctagttctggaaaaccaggaccgacagtaattaaagtgcaaaacatgccctttactgtgtctattgatgagattttagatttcttttatggctatcaagtaatcccaggctcagtgtgtttaaaatacaatgaaaaaggtatgcccacaggtgaagccatggtggcctttgagtctcgggatgaagccacagctgctgtcattgacttaaatgacaggcctataggttcaagaaaagtaaaacttgtattagggtagccattcacatcattttttatagggtagatcttcatattgctgtgattaatgcatccagattgttttcctagtatttccaggttagaacctgtggattgtttcaattgcatatagcttggtttccataacatagagcattggttgactgtttacagaagactcactcaccaggataaacattgctgtatgttacagtaaatgctatctgggagagaacacataaatgattttgggcataccattagaagaaaccatttgtaaaactcaaatgaccacataaagcttatcaagtgagtctaggattggttttgttttataccatatggggatggaaggaaaataggaaatgtccagtagganctccatttgaggggtgctctttgcccaggctgcttgaaaataggangttgggctact

SEQ ID NO: 2023 - DNA, 322 bp, Homo sapiens
gagtttgtacaagaatttgcttttcttgccttttcgaacttctcatggttgtacgtagatctagttctttgcttctattgttgtgtgctgttttcaaatatacacacacacgtgtacacagcaaattgtatttgtccttttcctcaatcatctgcatttggttgccattattttgctactaaaaatagtaccttgctggacttttagaacatatattccccacgcacatgtgccagaatttttctgggatgtcttggaaatagaattgttaggtcttatgacttttcaggtttactagttattgataatttctgctgcagtt

SEQ ID NO: 2024 - DNA, 621 bp, Homo sapiens
cggacaccaaggagcttgtgtcgtctaaggtgtcgggggcccaagagatggtgtctagcgccaaggacacggtggccacccaattgtcggaggcggaggacgcgacccgcggtgctgtgccagagcggttgtggacaagacaaagtccgtagtgaccggcggcgtccaatcagtcatgggctcccgcttgggccagatggtgctgagtggggtcgacacggtgctggggaagtcggaggagtgggcggacaaccacctgccccttacggatgccgaactggcccgcatcgccacatccctggatggcttcgacgtcgcgtccgtgcagcagcagcggcaggaacagagctacttcgtacgtctgggctccctgtcggagaggctgcggcagcacgcctatgagcactcgctgggcaagcttcgagccaccaagcagagggcacaggaggctctgctgcagctgtcgcaggtcctaagcctgatggaaactgtcaagcaaggcgtctgatcagaagctggtggaaggccaggagaagctgcaccagatgtggctcagctggaaccagaagcagctccagggccccgagaaggagccgcccaagccagagcaggtcgagtccc

SEQ ID NO: 2025 - DNA, 636 bp, Homo sapiens
  misc_feature (1)...(636): n = a,t,c or g
tcccttagaagtgggaaacccagagctctgttgatttcctaccacaacccagtaggggcctctctctgccatggntggacagctttttgaggaagccattcagctcccacagttgagctcccacagggctttaggtgtccattccctctcaactgcttagaggcagctttgagcacagccttcctgggaaggaagctaggcaagacctgccacacagcgaaggttgggtttacaagggtgacattggtacccccttgggccaagagtaaagaagaacaagtctaagccttgcttttatcttagttgtctgggtggtagcagaactcatcagctccttatcctcagtctgttcctctataaaagatgagagatgttcactgactttgtgcagtgagaaggcagcaagtactcacggctggtgctgtgggacctcacagcttctaaggagaggggctgggagggcctttgccatcagatctgccaagcacctaatgcttgcctgtggtgaaggcaagatggaccaagggccttggagaaaagggctcccaggcttctgaactttgaggcctcagcactttctgcattatcgtcaaactctttggaaagaaaccaaatcattaaaaagtagaaagaaaa

SEQ ID NO: 2026 - DNA, 937 bp, Homo sapiens
ttttttttttttttgctcataaacaattttattttttttttcagtatgtgcccttgaagattccaaaatgttggagtttctgattctcctgggatcaaaggtaaaagcattgtatggaaacactcaaccttggctcattaccctcctgaggagctaagtctggaggcctcagagagagggagctgacattcacaacttattccaagatgggtaacacagtgaacaaagaattagtaaaacatagactcagtctgtagagggcttcaaatatacatattctatatatataaacctgttatataggatttcaacttattggtttccttgtgatttgtaattaaagtacaaattataaagatgtttgcacactgctgatttccccttctcagcccccctccctccccaacataaataacattacaaaggtcaggtgatcctaagaatttttgttgttgtaaatattttgtttttaaaatcatattccccttcctcccctgcaaactacctctgagagtttgtaacacagcagcatggaatggacaagactggggacagcatggaggtctaacggagagagcgcagaacgttgcttctcactgacgggcaccagatgggcttccgcatttccattgacaacagaggctacgacaggaagcagagaatgtgcaatgcggcttcatcctcctccaaagagaaggctagctggaccactgagaaaagccctaaaggcattgaggtttttggagacagagcacagctccagaaatgtcttggctcagtatttacacaatatcttgaagctgcactttccttttaagaaatgtgtgtttctgaaggtgccctcttctgaggttggttgggggaaaggagaaacgtaaaaacaaaaacaaaccaattcccacatatgtaaaagtcctgttataagtcttagttattt

SEQ ID NO: 2027 - DNA, 530 bp, Homo sapiens
tgctgaaactagatgtttttacatgagaaatactgtatgtgttgtctaagatgtcagttttataaatctgtattcagatttcattctttgttagctcactttataatttgtatttttttactgtatagactaaatatattctatttacatgtatgtccaactccattacttttttcctgtgaacagtattgaaaaaccccaacggctgataattaagtgaattaactgtgtctcccttgtcttaggatattctgtagattgattgcagatttcttaaatctgaaatgatctttacactgtaaattctcaggcatactgattatggagaaacacttgttttgattttgttatacttgacttaactttattgcaatgtgaattaattgcactgctaagtaggaagatgtgtaacttttatttgttgctattcacatttgaattttttcctgtataggcaatattatattgacaccttttacagatcttactgtagctttttccatataaataaaatgctttttctactaaaa

SEQ ID NO: 2028 - DNA, 488 bp, Homo sapiens
  misc_feature (1)...(488): n = a,t,c or g
atttaacatctgcctgtccaaatgtatgtcgtatatcacggtttcatcacacaaccccagacagtaaaacacacagtggtgaaaaatacaccgatcctttcaaactcggttggagagacttgaaaggtctgtatgaggacattagaaaggaactgcttatatcaacatcagaacttaaggaaatgtctgagtactactttgatgggaaagggaaagcctttcgaccaattattgtggcgctaatggcccgagcatgcaatattcatcataacaactcccgacatgtgcaagccagccagcgcgccatagccttaattgcagaaatgatccacactgctagtctggttcacgatgaccgttattgacgatgcaagttctcgaagaggaaaacacacagttaataagatctggggtgaaaagaaggctgttcttgctggaganttaattctttntgnagcatctatagctctggcacgaattggaaatac

SEQ ID NO: 2029 - DNA, 390 bp, Homo sapiens
gctgctacagccaatgattctaatacgttctgttctattgcatgttataaaatgctggtcacgatccactaaattgatgtctctacctgctaatggtttaatacctgcagattgaaatatactggagaaataaagagagtgggagtagggacactttctcccagtgcccacaccgcccctcgttacccgcataggtcaactgaaagatacagagagggaagctttgatggggggttcagagttcaaaggaagaaatgatggcacctgcactccctgcccccagaggcaggacacagccagccctcctgtgacagcactcctgggcagctccttgttggcctgcagccctcagggggctttagttgccattgactcacccactcctaaggc

SEQ ID NO: 2030 - DNA, 319 bp, Homo sapiens
  misc_feature (1)...(319): n = a,t,c or g
ggaagagaggcttcggaagcaggaggagaggcttcaggagcagcacgagaagcttcggcagctggccaagccacagagcgtcttcgaggagctggtgcgttgccccacctggggaggctgccctcttccctagccctcaaggcctttgtttccccacctgtaaaatggggcattgtagccttcacatgaaatggtacttctaaaggcacctgtgagccagagtcctgctctgatggctgtgggagaaaggggatatttttctaacctgcctccacccttccnggctgccatgggaggcagacaccaagttctggggtct

SEQ ID NO: 2031 - DNA, 1530 bp, Homo sapiens
  misc_feature (1)...(1530): n = a,t,c or g
caaaggaaaaaactatactgaagaagaagatcgttttctgatttgtatgcttcacaaacttggatttgacaaagaaaatgtttatgatgaattgcgacagtgtattcgcaactctcctcagttcagatttgactggtttcttaagtccagaactgcaatggagctccagaggagatgtaataccttaattactttgattgaaagagaaaacatggaactagaagaaaaggagaaggcagagaaaaagaaacgaggaccaaagccttcaacacagaaacgtaaaatggatggcgcacctgatggtcgaggaagaaaaaagaagctgaaactatgaatatgtttttgtttcataatcactaactttaaaccagtagttctttaatttacgggtcttcataagatgtactgtacaatgctcaattgttatgtcatttaaagacatcaggttcatctgtttactgagctagaaacatagtatgtagtttcacttttttaaatgcaacagctgtgctgaaatttttttatcattaacacttgaagtaataaaataggcttcatttattactaagtgtttcatttgatttatttttctattgtagttccatttgtgaagattgtgactttttgtttattagctataatttctacacttgtaaggcttaaaaacaagttaaaaagaaaattgcaaataacatttgtccctttcagtcttcacctagttgtgtaattattttaattcactttgcctttgcagaaatttgggtattttctttgtagtgctattgagtctcatctggaaagattatataaattgcattctccttgcttatgtgggtagaatgggaaaagaaggcaagacaaagtatacttaaattctatgcatatttctgttatgctttctgttttttttagttgattctgaaatgaatatgccctattcttttgaaagaatggccttttagttgtatagccaaagacatttagtattttccggttccttaaggtattactgtaccattttgtaaaaggaatattattattattatttttaattatttggtaaatattttgtcatatgaccttctgaagcagccacaacttagataatgtcagaactaaggtgatttttttttttttaattttgaaagcccagccaaaatgaggtgtgaatttgtcatactgttacattgaaattggtaacaaaatatatcccctcccatttggacttttagggtaaatgaaaattttattgtattttaaagtagtttctaagtgttagcaagacctgacctataattccagtttctgttttcctatgggacagacctggataaactgggagacccctaaagccaggaataccccaaattatagtgtcaggattttagcctgnaccagaggcctttatgtgctacacataatttgtataaaattttatatgtgcagattgggtacataaacagttctccatttttctaagggaatgcaataaatgtagcatcgtgaataaatataacttttataatccgt

SEQ ID NO: 2032 - DNA, 425 bp, Homo sapiens
atttttctactgtaaagaaatatacttttctattaaagatctgtacatatttttacagtaaaatgctttatggaactagttttagagccctctatggctttaaggccttgcttactgcctgcaaattttgagaaatttaaaaataagcattctaacacttttattcccacagaaaaattccaagtcaaattatcaaatcaaacacaaaaataagtcttacctcttgtataagcatgttgtactaaaaaaaaattttgaaacattttgtatattggagatctctctcatcttactgttctttgctttaaattcctggcacttctttttactgtctataagagaaaacctatcataagcccaattttttttttccacttagggtaaatgtttggctcttctcatttcattatctttttttttttttt

SEQ ID NO: 2033 - DNA, 349 bp, Homo sapiens
atcataaatgaaattaatagattccagaattacataaaagaattagctctaatcaagaatttatatttgactgaatggtaaagaaatcaattatttaaatgccatggatctccaggctttcctaacccccaaggctagactttaatgaaaacttcattgggtaggtaaatcatagttaataggtgggactgcaaatggtatatgcagccatgttagcagaatgtttcctaagcattaaagcacctgtttaagtcacctatagccaaataatagaaatacaattttagaatcaagactaatatcttaaccgtaattccttctttgatttttctataaatgaatagtatga

SEQ ID NO: 2034 - DNA, 461 bp, Homo sapiens
  misc_feature (1)...(461): n = a,t,c or g
gtggtaagtgctctgtagtaaagggtgattcataacactggactctgcttggttgtaccaacttctcattttccctggctccttatccacctcttgggattcagagttggctgaaagtggcaggcagtgctgctttgggtggcagcttgattttagacagccagttcacatagtgcttttgttcaggacctctcgggatttctagacagacagcaagagagttgggctaacacctgtcatgaagtgtctaaggaatgagtgcacaagcattcaggcatgtggagggcagaagacccttgaccatacctgccttcctacagtaaacagcctgtttgttttctgccaggtagcatttgcaggtagttcttttatcagaaaaattctttgtaaggttgcaaggtganctttgagtggtaattaggaatccttctttaatttcaaggttgaaccctttgaaggtt

SEQ ID NO: 2035 - DNA, 731 bp, Homo sapiens
  misc_feature (1)...(731): n = a,t,c or g
agcctgaagagttagagcctgatctgatgccccctttcactctgaagtcatgggaaattttccagccatgaaagccctctttccactgcatactgatggggcngactcagcttccttcagccgactgagatcttttcatactattggctatttcataccaattaacctcttaaataagattgtgcaattgcccaaaattggatagacaccttattaccacctgtggactcccatattcccttacccacaaatgttattttcatcagtcctgagtcattttaacttacagaaattaggattgttgctgctaatatgaataccaattataacttttagaaacaagaataaagccctaaaagagaatgaaatataagaaatgttcgttcccacccctaataacatttggaagtgaatattcccattttcttccacccacagggattgggattgatttttaatttcctaggaaacaatactagactacccaaaaagatgttgccagaatccaaaaggaactatgctcgtaaaagaaatgcagttttctcctacctaaaaaaaagaaagtaaagtgtgttctgttcttatctttttaatgactaagctttaaacagtttattttgggtaagactagaactttcagccatttgttctaatatctgtgttattagatgcaatagaatttatgaaaagaagaatgacaaaggtatctgattagaaaatttgatcttacg

SEQ ID NO: 2036 - DNA, 603 bp, Homo sapiens
cttgaatctccaggaaatactgttacacctgtaaatgttaatgaagttaaacccataaacaaaggtgaagaacaaattggttttgagctagtggagaaattatttcaaggtcagctggtattaaggacgcgttgcttggaatgtgaaagtttaacagaaagaagagaagattttcaagacatcagtgtgccagtacaagaagatgagctttccaaagtagaggagagttctgaaatttctccagagccaaaaacagaaatgaagaccctgagatgggcaatttcacaatttgcttcagtagaaaggattgtaggagaagataaatatttctgtgaaaactgccatcattatactgaagctgaacgaagtcttttgtttgacaaaatgcctgaagttataactattcatttgaagtgctttgctgctagtggtttggagtttgattgttatggtggtggactttccaagatcaacactcctttattgacacctcttaaattgtcactagaagaatggagcacaaagccaactaacgacagctatggattatttgcggttgtgatgcatagtggcattacaattagtagtgggcattacactgct

SEQ ID NO: 2037 - DNA, 308 bp, Homo sapiens
acctgatctaaatgttaaaggggtggttctctaccttttttttccacatcatgacatccatagaaatagtatttgtacagcacactgggataaattaaaggggatttggaggcagctaattacatggggcttggtgaaaaaaattgtttctttatattacttacttttaatgagaaaaataaacatattaaggatgacactaaatattgaatttgtatacatttccaaacaaagatgtctaaaaatttaatgaaaaacctgagattgcttctgtaaacataacattttttatacagggttttatgatt

SEQ ID NO: 2038 - DNA, 756 bp, Homo sapiens
ctcttcgttcttcctcaactctgtcacggagggggcctttgtttatttatttttgggaaatctgcttcgccactgaaggtactctgcaccccagaaggaatacgacttcagtgtttcatgaagtattttacagacgaaatgaaagtgaactggtgtcacaaagatgctaagatctcatccagtgagcatatgagaatcggggggagtgaagagatggcttggctgcagatatgtgagccgactgagaaggataaaggaaaatacacttttgagattttcgatggcaaagacaaccatcaacgctcccttgacctgtccggacaagcttttgatgaagcatttgcagaattccagcaattcaaagctgctgcttttgcagagaagaatcgtggcaggttgatcggcggcttgcctgacgtggtgaccatcatggaagggaagaccttgaatctgacctgcacggtgtttggaaaccctgaccccgaagtgatttggttcaagaacgaccaggacatccagctcagcgagcacttctcggtgaaggtggagcaggccaagtatgtcagcatgaccatcaaaggcgtgacctccgaggactcgggcaagtacagcatcaacatcaagaataagtatggcggggagaagatcgacgtgacagtgagcgtgtacaaacacgggggagaagatcccggacatggccccgccccagcaagccaagcccaagctcatccccgcgtctgcctcagcggcaggcca

SEQ ID NO: 2039 - DNA, 909 bp, Homo sapiens
ttttttttttttttaccgtcctcacactttattgttagctgttctttaagtttctcacacattattggcaattatgtaaaaatcaagaacctctataaaacaacctggctttccaggtggaattccgcatacagccaaaactggattccagtgtggccagacaacgcccatgtcccaatttaagagtcgctgtcctcaccaccatccggagtggcctctctgtcagtgtgtgatgtggccagggcagtgtccacctgaacttcctcctcatcggactgaacaacgggggactccccaccctcactgatgtcccgggtggccgagtcggtgcaggtggaggaagaagaaggtggcttggctcttaattctgagggatttggaacctggagggtaatctcattctgacaggtactggattcaggccctaaggcgggggacagcacagtgttctcttctcctccagagttcaggaagacgtccagggcctcctggtccgatatgtccatcaggtccatctgctccagcatgtccacgttcacttccatggatgacatgctgcctatgggctctcgccgctctgcaatctgcaggtagccagtggacaggtactgctccatgtcctgctggaaggcttcctcaaaaaacttctgccgctccttcagcttcatttgctgggtgtgctccatttccaggaccttctgggcgtctctgcatctagttcagagggatccctctgactattttcggtgagtcctggagatgacatggatgtgagacctgaatgagtgaacagaagctcagtgctggtcaagtgaagcctccagttaccaggcagctgccctcacgtgcatcttctgggatgtagaacacaaggaagtgagctgaagccagaagcaggtttttccaaag

SEQ ID NO: 2040 - DNA, 312 bp, Homo sapiens
ttttttttcaaaaggtacaatagaaaatgtagtccactgtcattaaaatgcatattcaccttcctactactaataattaggaagggttcattatgacttctttatattataaagaaaagatgggggattagatttataatttctgtaaatattttagaaaaaatgcttaaaatctagtagtcaatgccctagaaactttatagatttgtagataatatgcacagatacaaatacattattcattaaatacaactcacatctgtgttttattatactctaaaatatacaggaatcttgatgtactgaaagagt

SEQ ID NO: 2041 - DNA, 1850 bp, Homo sapiens
tttcataaataagagaaagttctatccttactggtcctaaatctgaataactatgtctaattttttttaaaccttaattatgttatacctatcaatatgtactagaagaaagaggagaaaaaaagtcgctacactagtaccaggacagcacgcttacaagatagccattttatacattattaacatacaatgatcaacaaagagtcttctatgaggtgatgggggatgcagagaaaaggaagggaagtacagtacatcaccaacatggacaaaataggaattaaattccctcgtctaaacactgaatttctgggaatttactattttttctttctttttttttttttaaataaaacttatgttttgttgttttatgacttgaacaagttttgatattttaaaagcgctcagcatttaatctggttgtttgggggaaaagaaaagaaacaaagaaaggaaaaaaacaacaaaaaaacctcaccaaacaacctaacattttattagaaaaacaaagaacatgattttttttttaattaaaaaaaatgttgttgctgtttcattagaattgaaaacgggttttttctttctttctgagttagcattttggagtctttagtttgaagatgcttttgccctaccatgtctgtgaatgtctacattagtctactttgttagtaaaatttataaaaataggagtgcagcagctctttataataaatgtcgcattcagtgtctcatactggctgtgccttaagtaccaaatttataaacgtaacaatttaaaaaatattaataaaacgtcaatatcacattttaaaaaagaaaaaatatatatccacactacaatatgttttaatgccatctattgagttgtacttctacagttgctgttgccgacctattaccaatatttaaaaaaaagttaaattaaaaaatatccttcatcataagtatctttccccaaccgaggaccatatattataacagccaaatgttaaacatgtgcaaagaggaaactgtcagtttttcccaccagtcacagtgcagtgatgtttatactttttatttttaaaattctgtttacatctacaataaattaaaaaaaaattcttccatagcctctctggtgatacttgcagcactgaggtattaaaaaaaatatatataaaccaaaaggttgctttcctaatttgtaaatagaaagtgaatggagaaaggttgtattaatgcaggcttatccactcctggcccatgggcccccagatgtgggagcagggtggggggcagggggagaagagaggcaaagtgtcctagggacctttggaggtgctgaaatgattggacaatagaaaatgatcaaatatttaaaaattaggactgaaaaagaatgtcccccccacgggacccccacccaagcccaaacaggtgtgctttgaaactttaaatatgttaaatattaaaattgtagctttgtttttaaaaaacatcttgggaaaagcagtttttcatattttaaataaaaatctaactagacggtaacatttgaagctgtgcacagacaagaggttaataggctggtacaacacgtaatacagttcttaggtctatcacacagacaaaggagctaaacagtgctctaacttgtcctggggtggtcctggcagctgggcgatcttcatctcagtaactgacttggccaacgttcccttcccgcctccttccacagagcatcaaactgcctgggaccgactccctcacaaaaatatttttgattctctctttcttaatagtttctatgtagttaatggaattgtatttacaacatttcttttttagaattcacaatttca

SEQ ID NO: 2042 - DNA, 627 bp, Homo sapiens
  misc_feature (1)...(627): n = a,t,c or g
gctgcactcgaggctggagcttcctcagccttctcacaggcttcttccccccgtcgaccaggctgatgccctacctgaccaagtttctgcaggattcaggccccagccaagagctggcccggagcagccaggagcacctccagcgcacagtcaaatatggggggcgccggcggatgcccccaccgggtgaaatgaaggctttcctgaaaggacaagcgattcgcctgcttcttattcacctgccggggggtgtggattataggacgaatatccagactttcacagtagcagcagaagtgcaggaggagctgtgccggcaaatgggtatcacggagcctcaggaagtgcaggaattcgccctcttcctcatcaaagagaagagccagctggtgcggcccctgcagcccgccgaatacctcaacacgcgtggtagtggaccaaggacgtgagccttgcacagccggcggtccactgggagaccccactgcacttcgataactccacctacatcagcaccactacagccangtgctgtgggactacctcaagggaactgccagtancgccaaggaaacgccantcccagntggccgcctgaanactaacaaggcaanagataccctcagg

SEQ ID NO: 2043 - DNA, 479 bp, Homo sapiens
ggatccttgaggagctgacaacaagttatcccagggcctgaggttctcctgcccagtcccctcttgcaggggttgctatatctacttaacctgaataggtgtttcacacaggtctggtcaacagccccatgcactccctgtatcttgcactaaatttttctaacagggtcttagtggttaatgatcagaagatgtctcctgagccaactgtgaacctcacccaggcaaaatggctaccacctacttgggtccttcttcatgaaagctatagatccttttttgttctctgaggtcataatttcctcggagacctgtttaacaagcaaaaatcaaaaccctccaagattgtctcatattctacctggactaggtttcctatgagagacatctacttgtaatgcctgacctttgagatgctcagttctctggtgctgccaaaagatgtttccatggtccgtgctctgccagtggggttcacc

SEQ ID NO: 2044 - DNA, 752 bp, Homo sapiens
ttttttttttgccatggactcctttggcagtgataaagcctataggtccttctcagaatgatgttttaagatgcataaaataaaaggcataggataacacagaaaattatcttgaaatacagttactaaaatgtttaaaaagtaattttcgatatagtaaaaagttttttaataatgtattaagtaactagatccagaaggctgaaatattgaggtggggatgagcatatatatttcaagctatctaagtataatgtgacataaaaatattgattctttgtattagtaactgtcacagttcagtttccccagaaagcagaatctaagctggagattggcatttggggagtttgctagggaacgctcttgacatcaacatgagggaaggcaaggtggaactggtcagagaaggatgacattgagctgtgatgaagtctgagaggaagcttcagccaaccttacagaaggtctgaagattatatgacccttcagaagtgccctgaatcaaagagggccaggtgtttattacccagctgaggtggctctctgcaactgaggccatttccctggggctgccagctgagggcactctgccaacagctttcatagtagctggggtaagtcctcatttctgaaagaagatctaggtgtaacattataacatcaatcacagtgacaaatttataggttctgcaagttccactgtgcttgctgcctacattcacagttgaagaaaagactgaatttcggtt

SEQ ID NO: 2045 - DNA, 1762 bp, Homo sapiens
  misc_feature (1)...(1762): n = a,t,c or g
ttttttttacctgttttatgagtttttacatttgcttaaaattagcataccttgatcttttacagttcccatctccaccaattagtattggcagatttccactatatgtagaagtcaaaagatcagactgtaaaaatatcagatattgtaattaagagctccaaacaagtcttgcagtttcaaaggtagaaacccacccagccagttcagctgcttggacttcaaagccctccgcctagccatctcagccaggctcaggttccttctcccacccatcaggccaagcaggacttgtcaaacatacacattcaagttcctagcacacagtaggtgctaagtgggaattgattataaacttgaattcttccatcaacaaatatccacctctcctgtccagcttgcctcagatcttcaggttctctcttctctgaggcagctaagcttctacatccttcatgaagtttcctttacttctcgacagaagacagttccctttaggcctatcatctctaaatgcaactggctttccattttccacttactcaacactccacaaagtacacttgctacatggtatttattcaatgactgtatatttagtcaccacctcaatcactgctaagctctcttcatgtctatctgtaccacagtttcccatcttagactgtgacgtcagctggcaagggctggctgttggccgattcatcatgactgacatggtgtgtcacaaagagctccaagtaaatgctgtgaaggaagaggatgaggatggagatgaggatcctgagaagggcccagactggctgcccaacccatggacctgaggcctgagtaaggcctgggagctgctttcccctctgcccaggaactctgtccaggggcgattctaaggcacagtggtgaaggacatgattggtcccccaagtgtggtcctcaggtctcatggcagccactcgcctgggaacagtgcaacaagcattccatttagaagatcttccagaacacacacaagaagcattgtctaatgaaaatggagacaaggtctttcttggaagagagtgcccaagtagatactctctgccccaagactaaccaggtcccttttaaggtccctgagaacagcagcctgggagcaaccaagcctttcaaaggctgacaaggcacagagtggatgaatggaacgaacgatacatgaaaaaaacactttggctgataaaacctccaacctgaggcagggacagtgtcgctcgctgacatgcagaaacatgactgtagcagagatgatgatgatgagaaatgcttcgcatttcccacactgccgatatcccaagccctgtgctaccaccctctcccccgnnnnnnnnnnnnnnnnnnnnnnnnnnnnnnnnnnnnnnnnnnnnnnnnnnnnnnnnnagcatctgcagaataagtcagaggttgacacccagagcctgacgtcaggataggactcttggcactccgcactgaaacaccgtgattagtcctgactagacagcaaaagtaacgccagcctaagcttgaaatgaagggtccatcttgtgaaaagtgtaggctgcgcccaagacagccaggtctgggaagtctttcacttctcctacttcgctgaaaggctgtccaccttggttgaatgtcagcttgtaccgtaagcggataggttctttgtgtggattgtcaagcagcagcatctgagatatcacagctggaggcatcaaaggactgaatgcaggaagcttggagctgg

SEQ ID NO: 2046 - DNA, 1127 bp, Homo sapiens
  misc_feature (1)...(1127): n = a,t,c or g
atagaataatagatagttctgtattttttttaaagtgagcttaatgggtaagtattttttatatgctttagctatagctaaagaaaactgatacttaacaaagttgaatagtattattcactggtgctcctaaaatattgtttttcagtgtaaaatatgcatatcttctatatttaatatgaaagtcttgaaatgtatcagacagaaggggatttcagtttgcaaataatgagcaatgtagcaattttaacacatttcataaatatatattttgtcattggtggagagcaccatttgttgtttttaatatactttaaaggnaagaggtacaagggacataaatgntgagattacctacaggatggaaatagcagtacagttccattggtagatattttgaaatgtttttgattgttttatataacctagagtgacttcccttacccttatttagatctgcatatatagttctagtatgaagtttaatagttaaggagttagctatttgttatctttaagagtagggtattgacgtgaacaattgcagtattttgcatgatactgttttatagatgaccttttaggaaagtggtgcatttattaattgaactgaagaagtagttcagttgaattcagtatcataattcacaaattggaggctgttgattttgattcatttaaggtttaaaatctttattaattgcaaacagtgcaattatttatacttcacagtgccttcccagaccttccaccttaggttctgctgcaaaaagcaccagtgctgaagatgctgcaagcaccaaatcatagctcataaaatcaggtcctgagatagttacccataaagaggaatcctttgagtgtatgccattggtgagccgatgagcatggaccatagaagggctcaatgtagaagaaactacccgtgtgtaaaaagaagattggcttaaaatggctactgtgatgggaacagtgtcttagggagatgcagcttggacttgaggtaaattgaatactttacaactgtggtttagagtttgctttaatgacattgtatgtaaaaggtcacatgattgctgtaattttgtattcattatggtttcctcaataaatgtacattgatgact

SEQ ID NO: 2047 - DNA, 913 bp, Homo sapiens
ttttttttttcccttgttcagacattttatttgaatttatgacagtgatggggatttgactgagatgccttatggagaagtaccccaccctctatgaagacagaatcactctctgccattcattctgcctgatgctaacaacacgcagctgatttagggagtgtcccagcctagctggatcaagggaaattccaggagccctggggcaggccctggcccccagtgccaagcctcagagtaagcagacattgggaaagttgccaaccacttggtagaccactaggttctctgttttcccttccctttccttttcaaatcccacagtttcctgttggggagaagctgtaattagcctagtccaggtaccagatcccagctaggggcgcagctgcttggataactccaagaaaacctgggcaccagtatttttccaattataaggactgtggcataaatttttaaatgagttatattgaaaccagatttctccagctgccaagggaagaaggtagggctggactccctgctgtggcccagcccttgttaggggttggtctctcactgcagccagacaggatgatcctgggttctggggagggtaagctgccccttgccgagttctgcaccgaataaagagtccaaacccgctgcttccgtgtcctgagagatgggtaaatgggtgatggatggagcagactgaagagacagcagatgactcagtggtggaagaaggggggaagatgctgggctggctagctaatgttcccccctttcagcgatttacaggaaatggagcccagcttggtcatgaagttggtttgcttccactgtgcgatgcactcctcagaaattttgaagtcagcctgcaacttctcgaagactttccttcttgggcttgaactcccccatctgg

SEQ ID NO: 2048 - DNA, 429 bp, Homo sapiens
gaggtaccatattttaaatgttatttaatgcaggtgatttattcaaacatttgttctagcttaagctggaataagcagtggtcatttcagaagttttcatttgtaattccttcctctcccttgttcccaagtaggtagtagtaagtatgtgccacaggctgattatctgggtaatcttttacgggtgggaggtgagattgatagtgcaataatcagtgatctatagaccctcatgcacgattcaagtttcactcttgtggctgatgccattattgcacattggccattccaaacctgtggagaactttgttgtcaggccctgagcgctcacagcttcatttggcccaggttgaagacaaggaaagctctgctgtggctgcctctggactgacaccctccctaatgagtcctgatgaaacagcctttccc

SEQ ID NO: 2049 - DNA, 1010 bp, Homo sapiens
ggcttcggtcgctaccgctcccgctctgccacccccgccaaccgccgctcgggcctccgtcgctgccgcgtcgctttctcgctccttggatcgcacatcctcccagatgcagcgccgggacgaccccgccgcgcgcatgagccggtcttcgggccgtagcggctccatggacccctccggtgcccacccctcggtgcgtcagacgccgtctcggcagccgccgctgcctcaccggtcccggggaggcggagggggatcccgcgggggcgcccgggcctcgcccgccacgcagccgccaccgctgctgccgccctcggccacgggtcccgacgcgacagtgggcgggccagcgccgaccccgctgctgcccccctcggccacagcctcggtcaagatggagccagagaacaagtacctgcccgaactcatggccgagaaggactcgctcgacccgtccttcactcacgccatgcagctgctgacggcagaaattgagaagattcagaaaggagactcaaaaaaggatgatgaggagaattacttggatttattttctcataagaacatgaaactgaaagagcgagtgctgatacctgtcaagcagtatcccaagttcaattttgtggggaagattcttggaccacaaggggaatacaaatcaaaagactgcaggaagagactggtgcaaagatctctgtattgggaaagggctcaatgagagacaaagccaaggaggaagagctgcgcaaaggtggagaccccaaatatgcccacttgaatatggatctgcatgtcttcattgaagtctttggacccccatgtgaggcttatgctcttatggcccatgccatgggaggaagtcaagaaatttctagtacccggatatgatggatgatatctgtcaggagcaatttctagagctgtcctacctgaatggagtacctgaaccctctcgtgggacgttggggttgccagtgaagaggccgggggagctgcaacctcctccacca

SEQ ID NO: 2050 - DNA, 1174 bp, Homo sapiens
tttttttttatccagcgtgaattgatttttaatagcaaaatggcattttacacagaagcagctacattcatggatgaaaacaaaaatccaagtgacgctcctttgttgaatccatgtaaaaatctgatttttaatctacagagaaatttctacccacacattcggtatcccctgggggtaatgacatggaaaacaaacatcttttctggtctgttaaagtaaaacaatgggtccctggatagactctcaagagggcctttgatggaatggaaccagtccccccaccccgaaagcatccccccagctcaatatgtcaccatttacaccagcacagccctcacattgggtccacagcacaacctattaagaaaggattataacacctgttcggattgggaggccaattcctcagctctaagatcctgctcatagcaagcttgatgttcagtagactccaaagcagactgaatgagggaggggtcgaagagaatgtgcctgcttgggctcagcctcctctaatattgtcaagatgcacacacactcttagaatctcacaaccatcgccaatctctatgttggcctagtcccaatccttctgcctctgggaacaaaaggttcattacccaccaaggcatatttttccctctctgggaccaggatcagctcttgcaagcttactccacacttgtatctgccccttgcagccatgcatgacaaatgggctccctccccaatggaattatcttatagacttgcagcctatgactgtgtttcccctgatcttctccagggacttcccaccaccatgggatgacatgttttcaagattgctccccttccgagcctttattttcaccttggccctctttactttccagtcattgcagagatacttccaactggggtagacatgtatggattctgtttatcaaaagatggaccaaagggtcttcctagtttcaaaaagttctgctcagttgtctaaaatgtggccagaggccattgcaaactcctctgagttccacctgggctggaaaagccaaatggccagcctaaaactcaaatccactaactccctttctcagatcatatccgtcgctccccaaggcctaaggataaaatctaaacttcttggcaaccagacccggcaccatgtccatgtctcctatctctt

SEQ ID NO: 2051 - DNA, 1113 bp, Homo sapiens
tcctgatttagcagatacgtttattcaacacagtgcatgattcaaagcatcggatattccacagccaacaaggtttcctattccctattacaaaataccggataccctgaatatagctcattcaaggtcctcgttcctttttccctatatctagaattaaacaggtttccccgtttagcgcacatttcacgttcgctgaaggctttggggagagggggaaacagagcttatgactgcccctctgaaccaaaggcacttaatgttaaaagataaagcacagtagagtcaccccacagacattcctatgtgttcaacggctcgaactgcagcataccatcaccggccccatgtggggattcatcataacaacgtaaaagacactggattttccttgggaaaaacaaagtgcagtacgaatataaaggagtcaccacacccctttttccgaaaataatacataagagaactcttactttacatgattagtatcactcaaggttcacacatggaaaaaatagctaaaaaataatctatcataaattctcacttatgaagtcacaatagaatctgataccctttttagaactggtgagttggagagacacccagaggtcatgctgtccatcccttcatttgataggggagggcacttgaggcccaggaaggtcaagcgtcggacctggggtctaacccctgtggcagagcctgcgtaggacgcgggcctcctgaagcctagctcagggttccctccactccccttcctctttaaagactctcaaaagtaaaatatggcgatgatctccaaagatgcaccacaccataaagcacatgcactgacccaggtcagcaatttggtctcacaaggcggttcctttggccattgggcaggtatgtaacccacctcagggtgggaattctttgcatgggatcgttcaaagttctgagaaaagcccaatgtaggtcagacacgactgctccttggactggggaagactttccttggttgtcagtccatagtgggcaggcggtcggctgcacagcggaatcccagattcgaagcagagctatcaggtgtgttctggctccgagcagcacagcgatacctgtaacaat

SEQ ID NO: 2052 - DNA, 493 bp, Homo sapiens
agaatttgagaactgtaaataccaagccttgaaagggaccatggtgcggcctgtgagacataagaaaccagtcaattactcacagtttgaccactctgacagtgatgatgattttgtttctgcaactgtacctttaaacaagaaatccagaacagcaccaaaggagttaaaacaagataaaccaaaacctaacttgaacaatctccggaaagaagaaatcccagtacaagagaaaacccctaaaaaaaggatggctttagatgacaagctctaccagagagacttagaagttgcactagctttatcagtgaaggaacttccaacagtcaccactaatgtgcagaactctcaagataaaagcattgaaaaacatggcagtagtaaaatagaaacaatgaataagtctcctcatatctctaattgcagtgtagccagtgattatttagatttggataagattactgtggaagatgatgttggtggtgttcaaggg

SEQ ID NO: 2053 - DNA, 1488 bp, Homo sapiens
  misc_feature (1)...(1488): n = a,t,c or g
gagaaaaagaagtccctcatctatctgcatacacgcaatgtgggagaagtggggtggctaggaaactctgggcctgctgcccccttcgattctttttttttttctttgtgaattgaatgtacgatacaaatggtaggccttcatgtgagccagttactacatgaatcttcatttcccacagtggtttgttcattcatcagcgttaggcttggtcctggctccacctttctcctctccgggcactgaccccacctttccgtgtatttactgtaggctattaaatatgatcatgacccgccttgcattttcattcatcacctgtttatgcccaaatttaaaggaagtttgtctcattttgccagaaaaaaattgtaatagtcggcacgctgggatttgtagggccagcaaaattgcggcagtgaaactagtttcacttctaaagcccttcatttcccacaaggttaagctctcgaaaccccatttgatccttggttcctatttcgatcctcctttggaatctgaaaatcggtctccatgttgtatgcagattagaagttgccttgtttgttactcttccaacacagggtatcagggagaaagaggccttatctgttcctccatcccccctgttttgacagactgctaagaattcctcaggacttcctttggttggggattttactttcccaaaagtctgatctgatttctttcaggggtaggacaagcttgtcctagtgctctgcttcaggtcttatcagaagaaacccaggaatagaaaaggtagatgccttgacttttgtccctgttgtggggactaaagtgttttttgccagaattgtcaaaagctccggttcaaactctgtagagtttcatggaaaaacaaaacaaaacaaaaaagatgcttatcgtcccggagaatgtgtaagtaagttctccagcacggcttaggttttccaaaatggaaagcaaagcttgcagacaacctgttttctctagagacacacaatgattctggccctcagtctgtttccctccccttgtttactctttggtcaccgatcgagtcaggctagaggggtaatacggtgattaaaagaagtaaattcttcactgtaaacttgggttgattaacaggaaacattaaaccaaacaaaatccttggccccaaatttctatctccaagaattgctttgtgccattttgaattcagggtagttattctgtatatacttagctaactattcagagcttcttcaatctctagtaagcttgaaggtggtgtctgggaagacacagggcagggtgacatttagactctgttcattcttaaaaataggggataagccagaatgatgtgacatctagtatgtgggtaggatgaaggaatcagtgggaaattcttaattgcacagactttataatcccttatattaaagtgtaattcccatactttttactgtgggcccaggggtgtgatgtggantgttt

SEQ ID NO: 2054 - DNA, 2794 bp, Homo sapiens
gtaatcttgttgataaaaatactgactccaaccattcaaaaatttcaccccatccctccttaagagattggatcaagtattactaaattgacctttaggtattacacaagaccagtgcttagcaaaaaataatgacaggcatccaaggaagggatgtatttgtagtgttattgccaggaaaggagagtactttggtttctgagcaccgaatattgagcaatatgtcagtcactaaaaggaagacagttctacagaaaaacaaatggtaacatttttcaatagcgtgtgtagatagtatgcactatatacatcacgttaaagtaggactatcacacccagcccatgtggctaaaaaagctgaatcagacagtggatgagacacacaacggcagtgaagaaccgatacacttggcattgacgtctagctatgctgtatctgtgctttgcccacatgcccttggtgacagctgagcacccagctctgtcttggtaggtttgggctaaggaacaaatctctcctttgctcgtggttagcaagatacactcaagcatgaagataaacacagctgctttcttcttacaccccggtctcatgctccttaatggcgccatgggtgcttgttgggcctttttccagtaaggaatgatattgctgaagaatctacttaaccctgacaaattttaattataatctcttcttatacagataaaacatgactcctacaaggccccaaggtttacatagtctgaagtgaagtacagagctggcatctatctggtgatttctagctctcgagatacccaagcagcctgatggggcagttccccttcttacggttcacgctctaaggcaggatgtggcttatgagatactttgcattgtctgtctgcacaccttgaatctgcctgctggctcccttactttacctctctgtcatgtgcagatgaaggctcagggtgctagaggattagtaagatctctttctaaagacaggagagattatttacaagaagaactcaccagggtttagtttgcatttaagaattgccagtcttttgtcctgcatcatcttgaacattaatccacatgtttcagagctcaccaggcagtaccaatgctcttttcacagctatgaagagctagagaaattcttgttatggtagaaaaatttcacggattcatttttgaaactgcatttgtgcgtatgcagtgtagattttatagtgtgttgtgctttcaagatctaaatcatatataataaattaagggacaatggggctgacagcactaaacttggtgcttattgatattctaagaaatatctgtgaaatatcatcacgtatgttatacaaccttcatttaaaaaggtttaaaactagttagattcactttgacacttttcatatcatttcttaacccaagtgacgaaaacattgtccccaatgaatatactcattagaattaccatttgttaatatcactcattaattaaccccataattagatccattaatttaaatgatttaaatttaagtaagttttataaggtctgacatcagaggtatcttactttcctctgaggatgatgtacttgccctgaccatgcattttaccatcacacatgttcagaaagggccaaattcccaacctgctcatttttttttttatcagagtcatgatgaatcagtcctagaatgtttcatttggcacaagtaggggctgcctccagggggaacctctggatttattttgtatggaaatatatgtggaagggattggatctggggagatgctgtagacatctgtcctacacttgagatgatttccaagcctctctggcactttgagttaagtctatctggtattaaatgccaaggaccttttgctgcctaaatccactctgcaggaaataggcccaaccaccagatgagaattaggccctggatgagtagcgctatagttactgtcctgttgattaatttctgccatttcatgtccataaaagagaccacccatatcatgcacacaattagatttctcacactctaactgtatatttgtatgatattttaaaatctcctaaatgctggggcaatggctattaacaattaattgtcttggcactggccttctgatgaaatgttaacaatgcctattgtaatatagaaaaaaacattctatctactgatttgggctgaatgtatgtaaataggtttctaaaaagtcagatgtttgagcagtggcctacaaatcagtaattttcggatgggagagtttctttacattgccgtggcatcttaaaagctatcttcatgtaaattgactgtactaggcctactggggatcagagttcccaagaaaggaaaccttttcttgtatctggattcaaatttatttccaatgtttcaagcgggaaacatgactctttattgtctgtaaatctaacattattacttttcctcttagaagaatattgtattgttagatgtttgttgagctggtaacatcgttgcaaccactgcaatatcttcgttagtaatctgtataatactttgtatacaagtactggtaagattgttattaaatgtagcttcagtcattaaattactatagcaaagtagtacttcttctgtaatatttacaatgtattaagcccacagtatattttatttcaatgtaattaaactgttaacttattcaaagagaaaacatctcatcatgtctattgtccaaagttacctggaatcaaataaaaattctagattaccatgaagaacataaaaaaaaaaaaaa

SEQ ID NO: 2055 - DNA, 2189 bp, Homo sapiens
caatagatgacttaaaaaaagtgatgaaaaattttgaatccagagttgaattcacagaagatttgcagaaaatgagcgatgctgcaggtgatattgttgacatacgagaagaaattaaatgtgacttcgaatttaaagcaaaacaccgaattgctcataaaccgcattccaaaccaaaaacttcagatatttttgaagcagatattgcaaatgatgtgaaatccaaggatttgctagctgataaagaactgtgggctcgacttgaagaactagagagacaggaagaattgctgggtgaacttgatagtaagcctgatactgtgattgcaaatggagaagatacgacatcttctgaagaggaaaaggaagatcgtaacacaaatgtgaatgcgatgcatcaagtaacagactctcatactccttgtcataaggatgttgcaagttcagaaccattcagtggtcaagtgaatagtcagttgaactgttcagtgaatggttccagttcttaccacagtgatgatgatgatgatgatgatgacgacgacgacgacaacattgacgacgatgatggtgataacgaccatgaggctttaggggttggagataattctataccaacaatatatttttcacatactgttgagcctaagagggtccgaataaatactggaaagaataccactttaaaattcagtgaaaagaaagaagaagccaaacgtaaacgaaagaacagcactggcagtggccactctgcccaggagctgccgaccatcaggacgcctgcagacatttacagagcctttgttgatgttgtgaatggagaatatgtccctcgcaaatccatcctgaagtctcgaagtagagagaatagtgtgtgtagcgacactagtgaaagcagtgctgctgaatttgatgataggcggggagttttgaggagtatcagctgcgaagaagccacttgcagtgacaccagtgagagcattttggaagaggaaccacaagaaaatcaaaagaaacttttgcccttatcagtaacacctgaggttttttctggaactgttatagaaaaagaatttgtatcaccttccttaacaccacccccagccattgctgcatcccgcactacccactatttccagaacgaaaggaagttctgttgggaagcatctgaagaaactggaaagagggtttcaaagttttaaagctgccagattgcaacagaaagactaggccctgtctagggaaatgggaatttacatcctaaaacctagttgttcatttgtttagagtatctatagcaaaataggttacatgtagtttgaaataaggtatcctgagttactttggcaacaagttcttttacccttacccgtggtagtttgaaaaaaatcaaggtaactgtctgaatactttaatatcagcttgttttgtgaattctctgaatactgtcaacactcttatctaagtttgcctttatgatgcagtggcagcattttgaattacttttcaaagaatactgttcatatgcattgtttttgtgtttcaaactaaatacaggcagttttgtgcccagctgtgatattgtgcataccatatggaccattttaaagaaaattttaaaatttcaaatagattcaacaattacattacttgctttcacattttaaaggcactttaaaaaaatctacttctcttgtaggttttgcggctagttggctattcaagaaacctcgcccctctgaatgtcatactgtaatctttaaggaagaaagctacatgaattaattgtactctatgggaaaatttctttggaaagatattttgtaaaacttttttttccaagtaaaaactttatgaaacttggtctcaaaaatgttgtgaactttatgattcaaaattgagtacagatatgtccttgattcatatgtatgctacatgtatcacacaacagatctggaattctttcagttcctcagatacttctcccttagtttttgcagtttcactgggattatgttttgggaaacaaggaaaggtctagatgcttaaacattttaaataaaaattccttacagtttcatcttcccaacattttcattctttaaggctactttcctactaactgaaataacacatttacttttaccacaattcctcaaaataaatttattctaacattgaaaataaca

SEQ ID NO: 2056 - DNA, 1325 bp, Homo sapiens
taacacattaaaaaaataggtttaatgcaggtgggtcatggcatgacgaatttcacaggcaccggggacagcaggcggccaggtgctcagagggcaccaaggtgcaccaactccctgcagcgttgacaccgcacgagcggcaccaccagccccctcccgcctcccgtcccaccttcaccctcagccaagaggcttgggtgactctgagtaatacgttaacaaaaaacaaagcttctttgaggaaacagcatgacttagtgcaaaagattctctgcagcaagaaatgaggcccacgcagggaagctcccgcctacctgcccagggcgtggacgcagcccgggctcatcagaggtcatccacagaagctgccgataaattagagagcacggtttacggccagagattttttgctttctctacctgatttagggtttttcaaaaaaagtttctcttcccagtggcacacaactgtcctccatggcttcctgggccactggtccgcctgacagggtagggtcacaagtcccacccatgcccagagtgtggggaccatggatttgaggtgacactagggttgtcagtaccacaccctgtgtcctgctctagggtagcctctgcctgttgtccttgcaatcattattcagggcgccctcccacttgcccccaaagtcacacggccatgggcagtccaccatagtgctgccgtgactgcaaggctgaggagcagagcaaggggtcctgggtgagacctcggcccatggtggccaccctcccctgaacacaggcatctgcgcccctccaagcccacctgcccctgtgccatcatttgggccccccagacactggaggacagcgtgagataagatctcagcatatacctggggctctaagatgctgctggtgccacacaggctctggggctgtgtttgccgcactgaggcctctgccgcctgctccggacacttgggacacgcgtttccatcctggctcactgaagcctcgatctcccaggctttctttgacggtgttccctcaaagaaagaggcccaaagccctcccccgcaaaaaaagccagaaaggaatggaggtgcctccgcagaaatccagagcatctgcaagacatcctcacagccctcccagaacaggcagacaggccagtgttgctggagtcagcccctggctcccagggttccccccaggccagcccctgagctgggagcctgctgaggcccctcccacctgagcccttctccggccccccgctagactgcatctacacaatccaaggggaccctgaaggctggctggggactcaggacccacac

SEQ ID NO: 2057 - DNA, 928 bp, Homo sapiens
ttgaattaaagaatcaccatgtactaaatcccaggccagcagctgttcacttcagtcctccgactctgtgcctgttggtctttgcaaaggttctctgactcgaacacactgggaaaagtttgtctctgtgacttgtgacttctttgaatcacaggctccagccactggaagtgaaaactctgctgttaaccagaaacctacaaaccttcccaaggtgggaagaatcccagcagaaaaacacccccccaacagactccccctccaaaggctggggccaagaggatctgtccaatatcttcctgacttggatgataaaaattcccaggaaaagggccctcaggaggcctttcctgtgcatctggacctaaccacgaatccccagggagaaaccctggatatttccttcctcttcctggagcctatggaggagaagctggttgtcctgcctttccccagagaaaaagcacgcactgctgagtgccccagggccagcccagaatgccagccctcttgtccttccgccatgagaatcacacagagtcttctgtaggggtatggtgcgccgcatgacatgggaggcgatggggacgatggacagagacagagcgtgcacacgtagagtggctagtgaaggacgcctttttgactcttcttggtctcagcatgttgactgggattggaaataatgagactgagccctcggcttgggctgcactctaccctgtacactgccttgtaccctgagctgcatcacctcctaaactgagcagtctcataccatggagagatgcctctcttatgtcttcagccactcacttataaagatacttatcttttcagcagtatatatgtgctgaaatctcagcatgaaagcattgcatgagtaaagatactttccctaacaccgggaggcgtgagcaactaatgc

SEQ ID NO: 2058 - DNA, 584 bp, Homo sapiens
gcggcacgagaacagccaacagtatactcctggtctgctgggaggtaacgagattcagagggatccaggttatcccagagatttaatgccaccacctgatctggcaacttctcccaccaaaagccctttcaagataccaccggtaactttcatcaatgaaggaccattcaaagactgtcagcaagcaaaagaagctgggcattcggtcagtgggatttatatgattaaacctgaaaacagcaatggaccaatgcagttatggtgtgaaaacagtttggaccctgggggttggactgttattcagaaaagaacagacggctctgtcaacttcttcagaaattgggaaaattataagaaagggtttggaaacattgacggagaatactgtcttggactggaaaatatctatatgcttagcaatcaagataattacaagttattgattgaattagaagactggagtgataaaaaagtctatgcagaatacagcagctttcgtctggaacctgaaagtgaattctatagactgcgcctgggaacttaccagggaaatgcaggggattctatgatgtggcataatggta

SEQ ID NO: 2059 - DNA, 1547 bp, Homo sapiens
ggcattgaaagaatacacagaaagcctggaaaaggtttccaggggtgtcaatacgccctgtcaactgagaattaagaggatccggctggtcacttgcctggagaggatcctgcatgctgatagtgctgaggcacctgccagctaagaaccaccgggaggaactgggccattctaacacccgttgctaccatgctggccacccgcctctccagacccctgtcacggctcccaggaaaaaccctaagtgcctgtgatagagaaaatggagcaagacgcccactattgcttggttctacttcctttatcccgattggccgtcggacttatgccagtgcggcggagccggttggcaggcaaagctgttcctgggtcacaggctgtgactctggatttgggttctcattgggccaagcatctgcattcaaaaggcttccttgtgtttgctggctgcttgatgaaggacaaaggccatgatggggtcaaggagctggacagcctaaacagtgaccgattgagaaccgtccagctcaatgtctgcagcagcgaagaggtggagaaagtggtggagattgtccgctcgagcctgaaggaccctgagaaaggcatgtggggcctcgttaacaatgccggcatctcaacgttcggggaggtggagttcaccagcctggagacctacaagcaggtggcagaagtgaacctttggggcacagtgcggatgacgaaatcctttctccccctcatccgaagggccaaaggccgcgtcgtcaatatcagcagcatgctgggccgcatggccaacccggcccgctccccgtactgcatcaccaagttcggggtagaggctttctcggactgcctgcgctatgagatgtaccccctgggcgtgaaggtcagcgtggtggagcccggcaacttcatcgctgccaccagcctttacagccctgagagcattcaggccatcgccaagaagatgtgggaggagctgcctgaggtcgtgcgcaaggactacggcaagaagtactttgatgaaaagatcgccaagatggagacctactgcagcagtggctccacagacacgtcccctgtcatcgatgctgtcacacacgccctgaccgccaccaccccctacacccgctaccaccccatggactactactggtggctgcgaatgcagatcatgacccacttgcctggagccatctccgacatgatctacatccgctgaagagtctcgctgtggcctctgtcagggatccctggtggaaggggaggggagggaggaacccatatagtcaactcttgattatccacgtgtggattatccaccatgccaggaagacccataactggttttaacactaactagagggaatgacttctttgcatagtgagtgacttgggccttcacaaacagggtgtggagtggcaggcagaggcctctaaatctcagagcaaacatggtgaatctatctctccggagataatttcatacagagattttaagaaaacatctttatattaaaaacagatctcatttgatccttaag

SEQ ID NO: 2060 - DNA, 357 bp, Homo sapiens
gctgggctggagctgctgcctgagccctgtccagacagccgagatacactggatgttgggcagtgctttggctggacattgaaatgctgcatctgattggctaatttagtttccatttatatccctaacaaggcaagggaagagagaagccagcttctctcttgttctccttctataatgagagacaaaccatgcctctctcagacactcacaatggagaattcctcaatcctaagaaaggtggatcggttactgactgtgacagatgactgtcataactttcatgttcacggaaacttctttataaagtttctaaaatgaaacgaaaaccttggctaccaacctactctagtaacg

SEQ ID NO: 2061 - DNA, 659 bp, Homo sapiens
gctgctgccgccctctgcatcttgatcctcctgtacgccatgtacaagtacaggaacagggacgaggggtcctatcaagtggacgagacgcggaactacatcagcaactccgcccagagcaacggcacgctcatgaaggagaagcagcagagctcgaagagcggccacaagaaacagaaaaacaaggacagggagtattacgtgtaaacatgcgaacactgctcacacgcgagttttcacagttatttctatccacgcctatgaatctttggacggtgagatctcacagatgtcagaactgctggaactatgaaatggggtatataaccacgactctggtggggaaaaccgttttttaaaggacacacacacacacagcgatgcatctctctcctaaagctcagccacggctgcggcaaggttccagcggtcgctgggagacagaaggttttgtgccctgctgtatcataaagcacacacttagcgctctggagccggacggtggctccaccacttccgcaggcctggaaacttccttctccggaggaccttttactaaaaggtagaagacttcatggcttacttgttccataactccaagtgagtctgtaatgtttgtgaagcttgactgtaaccatgttttttctgtttaattatgt

SEQ ID NO: 2062 - DNA, 1134 bp, Homo sapiens
cgtcgacttttttttttttgagcttttgtcactttattgttaaccaatgaatattatccaaaattagagatgtaattgtaacttaattgtacaacacaaaattatgctaatggtaaaagcctactgggatttaccaaatactcattagtgtatttttacattgactatatgaacatgtgctcgcgactgctaataagttataattggtttaatctctaagaaatccatattgcaaatggttcttgtttagaaaaattcacacagccttaaaaatggattaaatccattttaatcctaatctacaaatagatcataaacagcaaaatataactgataatttttcaatactgtatcaaactgatgtagctatggtagtgcacataattcaaaatgaggaaaattaacaaaaatccaatgaaagttcaggtttttatctattatgcaattgctttaaagtgaacatttatgtctcaaaacatgaatagtagggtccaccatccattcctttgatgtactgcaagtaggaatattctcttccataggattctgaagcatgtgcacaaccatggtacaacagtcacttcaaggttaaccagctatgttttgtcctacaaagttcaaaaaatatattaaacgcaacctttcttttacataatgtctgcccagattaatccttttaaagtcagcaaaatcaaaaaagcacaagagatattttcagacacaacttgaatctactgtgcatgaaaatgtttaataaaatggcaattttaatagataaatgtaaatttgactgtgtaataccaaatggaaagtagctgaaccacacagagaaaacaaggctttacgtatctccaaatttagctgttttacaataaacaaagtattagaacatgtgaatattagaacctccttctaactggaaagatttcttcagtaagctataaccgaaattaatataaactaaaattataatttctaaaataagaattaacaaaccaaatttaagtatttttagtcagagattgaaacaaaataagcacagtgatctagaaaccaaatatactgattatgtaactatcgtatcaaggtacagacattcttcacatgctacaaggttagcatttctcctcgtgg

SEQ ID NO: 2063 - DNA, 679 bp, Homo sapiens
gagacagtagggttttttctgcttatcaagattgtattcagctacagcttcaactaaatttggctcataatgcagtgcagaggctcaaagtggcgctaggtgcaagccggaagatgttgagtgaaacatcaaatccagaagatttaattcagacatcttccacagagcagttacgtactatcatcagatatttactggacactttgctcagcctgcttcatgcttctaatggacactctgttcctgcagttttgcagagcacatttcatgcccaggcctgtgaagagctctttaaacacttgtgcatcagatcgaaccccaaagatacggttacatactggtcttcttcttgttcaactgtgtggtggtgaaaggtggtggggtcaatttctttctaatgtccttcaggaattgtacaattcggaacagcttctcatctttccacaggatagggtcttcatgttactttcctgcattggtcaaagatcacttagtaatagtggagtattagaaagcttacttaatctcttggataatttattgtcacctcttcagccacagttacccatgcataggaggacagaaggagtactagatattcccatgatcagttgggttgttatgctggtgtccaggttgctggattatgtggcaactgttgaagatgaagcagcagctg

SEQ ID NO: 2064 - DNA, 137 bp, Homo sapiens
gcttctacatgacttgtccatagaatccaagcctaaaaatacatacttttcattgggtctttggtcctcatttctgagggctcccttgtcatggaaaactttgttaaataattttttaatggttttctctgtcgacc

SEQ ID NO: 2065 - DNA, 469 bp, Homo sapiens
gttacccagtcagcttttatttaaataaacatgaaaaattaggtaaaaacatttcattgtacagtacagcatgggaaaagatatgaggctctttaggaaagcttagcatgccaaaaatgcagcagtaaccagacagcaacattcaccagtggcagtaatactgcctcgccagtggtagcactactaccgcagagttgccaacaccaatacacaggcatccatttattcaacagcaggtccccagtatggcctaaagtagagctacctggtagaaatgaaacggggataaaaacaaactcgctcctgggagcataatgaggaaaaatctagttacagaaagcttctaaaattagcacaggagtatgcatcatgctgtagaaaagacggtctaccatacaagttctgaagaagcaaagatcattaattaaagagctgttaacagaatattcaggaggctgtggcaggagaa

SEQ ID NO: 2066 - DNA, 556 bp, Homo sapiens
  misc_feature (1)...(556): n = a,t,c or g
aggttntttgannncccatttgaanncccatnnnnnnnnnnnnnnnnnnnnnnnnnnnnnnnnnnnnnnnnnnnnnnnnnnnnnnnnnnnnnnnnnnggcacgagcatgcattgaaggagagagggtggcaggctttctgtaagccctctttttcaccctttgtccatccctattccaacatattgcagtcatgttagagctagggctaaaaggccctaaaagcattcagtctatattctgggtgtttctccaaggaacagagcctcctttcttgtaactcctgtcagatctgcctcccactcctaaggcnnnnnnnnnnnnnnnnnnnnnnnnnnnnnnnnnnnnnnnnnnnnnnnnnnnnnnagtgcagtggcnnnnnnnnnnnnnnnnnnnnnnnnnnnnnnnnnnaagtactgggattacaggagtgtggctcagcctctcatttctaaggtttagccaagggtgccagatctttgcggggaagagggatgacttgaaatgagtggaaagttaaaaatggtagtacccanaatttcctgcctttggaaaaaa

SEQ ID NO: 2067 - DNA, 375 bp, Homo sapiens
ggtgggtttttggttacgggtccctgatctggaaggtggatttcccctatcaggacaagctggtcggatacatcaccaactacagcaggcgcttctggcagggcagcacggaccaccgcggggtccccggcaagcctggaagagttgtgactcttgttgaagatcctgcggtatgggatgtgtatggggtgttgcttacagattgccagtaggaaaggaagaagaagtaaaagcataccttgacttcagagaaaaaggaggctacagaaccacaacagtcattttttatccaaaagatcccacaacaaaaccattcagtgtattgctatatattggaacatgtgataatcctgattatcttggtcctgcacctct

SEQ ID NO: 2068 - DNA, 1062 bp, Homo sapiens
gataagaaagtcacatacattgttccagctccaagtttgttcggccctcgccacaagtggatgtagcgtttggccctttgtgtgccttgctggtgactctggttttgggagctcggatatgtcccagaagcaggcttatggcacttctgtagctcccttgctacccttcctttgtgtctagataagtgactgacatgcttttctttggtctcaggaaagtgggggctcagcaagaactgattaccgagccattcaactagccaaggaaaaaaagcagagaggagcggggagcaatgcaggtgaggccgtgtgtgctgcagccggacgagcaagggcctgagggttctctgtcactgttactggcagaagaaacacagcaggtgtttctgtgctcttggttttacttttctgttcagaatacccttttatcaactccttagttttatttgaacttaagggaaaaaattagtaacaaaattcccagcatcagtatgaacatattttatttgcctaaacaagctttgtgaaagttaagcgttcaaacaccagtgtccagttacctggaaggctactaaggtaaataagccaaagcaggccagttgtcaggaaagccagagattgtgcctggtgctgaatggccttggggcctgatcttggcatggcagagacctggggactgccactgtccccaggtacgtgtacatggagccaaactgtgtgtcctgtggcattgtcagagttatgttgaaatcttttgaaatcttatttgaaaatgttagcaacttacttgcatttttaaagaccaaacaagagctggtaacctatggcctcaagcatctgtccttcctaaaaatggaatagtgggatgtagtgcttaatggaaactgctaaatctttttctaaaaactaacagtggatttttaaaatatattgttttttgtgtatttcatttgtcctttgtatttatctaaaagggttgatatgattttatatcttgctctctattcctaatagtattatgacttcttatttaaaataaataacaattgccggttttctgtt

SEQ ID NO: 2069 - DNA, 463 bp, Homo sapiens
  misc_feature (1)...(463): n = a,t,c or g
gacaagatgcaatgagtcaacaggcagaaagcactcagaacagtgcctgagacatgagttctttgtaagtgtttgatatgatggctgcttagttatctccctggtcgtgaaatcatagcttagattctgggtctagaatgggaggacccacggagaccactgggttcaagtctcttgttttagaagtgaagaaactggggcccatagagaagtgactggcctaggggcacagggtgaatttttggcacttagtgacacctcttaacccatggcttgtaaaaaggcacaaacaatgcctttggttttctgagtatctcgcaaatggcatggccttgatgcacctaccttgttctgttttacatgcttgtttttggggtcatccttaacaaactctactttcattcctcggtgccaagtttcttccctgaccatggtcttgctttaaacactgancttggacaga

SEQ ID NO: 2070 - DNA, 658 bp, Homo sapiens
tcgcatttggaaaaaatggtcccactttattactgccactacactgttcaggcctataccatcttgtgtggactgttaccagcctgtcagctaatgcctttgatgaaatttacacttcaataaattgacatttaaatttacacacaggtcaatggtaggtttaagactgtctctgctatgttgattgactagacagatccaggtgtattttagacttggaatacgacaatcttcacttacagagaaaatagttgtctaaaatttgccctagccaggaccagaaggggctctctagtgtctgacacttctcccattcctgaccagctttcaaagagaaagagaaagattataatggacacagtaatgatcccagggcagcagaggcagttccaatgtgtatttttactttcagacccctgggttaagttggcttccaacctgtccctggagagtccaggtcatgtccaaggcaggaagttgcaatgtaggagtagtcccaggagccagtaagtcaggaagtagcctagaatgtatcgtgtgactggagaacaggttttccagtgatacaaaagtcccatgataggatttctggggaccttttgtcctggtggggagtcctctgcaagaggcttccaaggcacagtctttaaggatctca

SEQ ID NO: 2071 - DNA, 464 bp, Homo sapiens
gattctaaccaatacatcccactctgcacaaaccaaagccctattatgtcaaacacactgctactgatcatgaccaaaggcagagttataatcactatgtgctgaccttgtagaaatatttaacaaatatacgtccagtgcttcacttatgttgactcacctcttgaaggtggtacttttcttctctaagaaacatggatacggtcaacctattaggcctgagccttggaccacaaggcctaacacctacaggtctaaggagatccctggaacaaagacactacacacactctttcaggtacctttgttatgggcacttgaatggtgctgcttcacagaggctgcaccaccagtcatgaggatctcagaccagagctccaggaagttctgctgttggtctgataccaagagtaccttcagattctggaaaggattttcacggggttgccagtccagaattcttc

SEQ ID NO: 2072 - DNA, 353 bp, Homo sapiens
ggatgagcttcaataccctgattattctctcctagaaaactaaattaacctaacccaattttttccaaagtgtggtgtattcactgctatagttactttaatgtgattaggaaaaaacactaacacatcaaaactttgatttcaaaatagaattgtgtcaagtaagaacaaaataaatctggaaatgagtagatctgaagaaaacaatgtaggcagcaatgaatatggaaaaagccatcaaaaatggtaacataaatggctgaaatgtgagaaacaccatgttagtgaatcactttgctaatctgcaaattagttaccaaattaattcttcttatatgttattcagatcacag

SEQ ID NO: 2073 - DNA, 348 bp, Homo sapiens
ggccatggctgcccttctccgagctgtgcgtaggtttcggggaaaagctgtgtgggaaaggcctctccatgggctgtggtgctgcagtgggcaggaggatcctaagaggtgggtgggcagcagttcacccatctcgaaggagaaactaccaaacgcagagactgagaaattctggatgttttaccgttttgatgccatcagaaccttcgggttcctgtcacgactgaagttggcacagactgccctgacagtggtagctttgccaccaggctattacttgtactcccagggcctcctcactctcaacaccgtgtgcctcatgagtgggatatcgggctttgccctgac

SEQ ID NO: 2074 - DNA, 733 bp, Homo sapiens
gcaggggacctgactgctaattaattagcggtcaccttgggcaaagtggcgtaatctccatctgaggcatcttgattctcagggaagtggaatttggacttccagacaccctcagtgcctctggccttgctccctcctatccatttagtcctgcctgcatcactttgatgctgaaatttcttttagtttctcttactgcctttagaagggaacctaaacatcttaatctggctttcagtgtctttcaggatctgaaaatcatcctgataggtttaaaaagtggatctgttttgcatttgtgtgcaggttaaattgccctagcccctggagaggctgtgggggggtacgagaaagaggacccagacacctctacccacccggccccacccagggtgtggagcaaaccagtaaatggttagactccaagcaatcaggcagcctgtcctctttgctctagagatgaaaaacaaaggcccagagagtggatggggcttgcccaaagtggcacagcaagtaggcagcagagctggagctagaaaccatttccagcttcgagtccagggctgttcctaaaccccactggactctctggagcgttgggtatcctgggattatcatcctgacacccatagggtaaatgtgtgtatccagtgggatgaggaatgccagcctctttacaagcaagtattgtactaaagtttggactgacttttacttggataccaaaaagtta

SEQ ID NO: 2075 - DNA, 2327 bp, Homo sapiens
atctgagcaaattatttcttacgtgactttagagaaaacggctacctatctgaccccaaaacgacttgaggaaactgtttccacggtcctgctgcagaggggaagcacagtcgtcaagaagagagtggggtcaggatcaaaacacatttagtgtgacttagggaaagaaaacattttccctctttgaacctctctggatacagtcattttgcctctacttgaggatcaactgttcaacctcaatggcctttcaggacctcctggggtcacgctggtgacctgtggagattccagatccttcagactgtttttctctcaatctttgctgttgctacataccttcattttatgctgggagaacttcactgcattcatacctgggccattcgctggctggggtccacatcctggacaatgacactgtctctgacaatgacactgggggccctcagccaagatgcactcttgagaatctccatcccactggactcaaacatgaggccagagaagtgtccgtccgctttgttcatcctcagtggcagctccttcacctgaatgggaccttccccaacacaagtgacgcagacatggagccctgtgtggatggctgggtgtatgacagaatctccttctcatccaccatcggtgacctgaagtgggatctggtatgtgactctcaatcactgacttcagtggctaaatttgtattcatggctggaatgatggtgggaggcatcctaggcggtcatttatcagacaggtttgggagaaggttcgtgctcagatggtgttacctccaggttgccattgttggcacctgtgcagccttggctcccaccttcctcatttactgctcactacgcttcttgtctgggattgctgcaatgagcctcataacaaatactattatgttaatagccgagtgggcaacacacagattccaggccatgggaattacattgggaatgtgcccttctggtattgcatttatgaccctggcaggcctggcttttgccattcgagactggcatatcctccagctggtggtgtctgtaccatactttgtgatctttctgacctcaagttggctgctagagtctgctcggtggctcattatcaacaataaaccagaggaaggcttaaaggaacttagaaaagctgcacacaggagtggaatgaagaatgccagagacaccctaaccctggagattttgaaatccaccatgaaaaaagaactggaggcagcacaaaaaaaaaaaccttctctgtgtgaaatgctccacatgcccaacatatgtaaaaggatctccctcctgtcctttacgagatttgcaagtaccatccctttttggggccttactttgcacctccagcatctgggaaacaatgttttcctgttgcagactctctttgggtgcagtcaccctcctggccaattgtgttgcaccttggggcacttgaatcacatgagccgtcgactaagccagatgcttctcatgttcctactgggcaacctgccttctggccatcatatttgtgcctcaagaaatgcagaccctgcgtgtggttttggcaaccctgggtgtgggagctgcttctcttggcattacctgttctactgcccaagaaaatgaactaattccttccataatcaggggaagagctatggggatcaatgcaacctttgctaatatagcaggagccctgggtttccctcatgatgatcctaagtgtgtattctccacccctgccctggatcatctatggagtcttccccttcatctctggctttgctttcctcctccttcctgaaaccaggaacaagcctctgtttgacaccatccaggatgagaaaaatgagtgagtaaatagcccggttgcccctcagaggatctgtgtgctataggtctgtgctgaggaaggcaaaataccatttagggccactgtcctctcaaaaggcttagacttaggattttcccatgtaatcagtgccttaggtctaggtacagccacatggctttccccacagtgaccttcaagacaccttctgggggctctcccagatcacacagaccagctctgccccagcttgtcaaaggaggcttcatagtgaagaagcccaaaattaggtctcctcttccctccctgccctagtgtgatatgcacactgttgaaggtattttacaaatatgcagagatccaaacaccagattttcatccctgggaaaccctcaaacaagtgggtacctgtaagctgtctgagattgccagtgcttacaggcctgactactaggccactgaagaatttgtggaagagtatgcagatg

SEQ ID NO: 2076 - DNA, 861 bp, Homo sapiens
ttttttttttaaaaagaatattatttattatcttctttattaatactcacatgtaacctttgctttttacacaaaagtctgctttagaagaatgcctcctcggcttatcatgcccaatggggctttttgtttctggaccacttcccctttctccacccccacccccacatccaaattactcttaacatgttcacagataccacgaatattttgtaaacaagatttgggttactggaacttgatttcattaacatcccacttcaaaatggaaggcaggtggaggacagggtaagaaataggagaaagaggacaagagaaggcaaagaagaagaggggcacctggtcagaacgttcaagtcttgccttttcttaggggtgtgtattttgtggctgttccttgaaatgcactgactcaaaacattgacagcaagtgtgtgtgtgattatttatatatctataatagaatatgtgggcttcctccgtttgagtctggactgtgtttatttaaacacactacgatcctctttataggtatcaccacagggaatcaggtctcctgggaacccctttttagagacggggcttccgaagcagggtcttgctgaggtctttgacctcctcagggctgttgacccgctcatagcccaggacggccatgggctggtagcaaaactcctccacctgtttgatctgctggaaggtgagggcggtcgccaggcattggcggcctgcgtggcattgcgtgcagataccacgaaaggcttggaggaggagcccgagccactggtcatgttcagggcaaactgctccatttcggggctcaccaacagtcccacaaaatcgtacactctccgtagtgtc

SEQ ID NO: 2077 - DNA, 344 bp, Homo sapiens
gggcctaacttgtaaggtgggtgggctgggataaggaggcctggaagaggcacgataaagccagccccaaggtctggaagcctcccaagcatagccccctcccctcccacccacctgcctgtctgcgtgcttacctttaacctccacccagttgttacttaactcgcggtaaggttctgaccagtcccatgctccactccagaaacccgccagggaggctaagtccctggggcttgaccctagggatgagggcaggaacctattcaggtaaaacctttctccctggcacactgggaaaggccagaactttttgcccccagttcctgttcagggggagggggagg

SEQ ID NO: 2078 - DNA, 427 bp, Homo sapiens
ggcacgagaaaatttatttggcaggcagtgtggaggacagattaggagcatataaacccagaggtgtgccccaggagggcttttgcaaaggtcaaaatgagatagaatgagggcctgaaataattcagtaatttggagatggagaagaggaaagacttctcgtgctcttgcactgccatcagcctggtctgggccatggtcatctctgacccggaagactgaccccacctcttggctcaccctctgcctcccaacctcctcttcacaaagaagccagagggatacttttaacacacaacccagatcacatgacttcgtaacttaaacctcttcactggcttcccaaagacttaaaatggaatctgatgcctttattttattgctttacatgaacagggccctgcggaacctttccagtgttcatttc

SEQ ID NO: 2079 - DNA, 1472 bp, Homo sapiens
taaacagtaattcttcagactttattaaaaaatgacataaagtgcatcttattaaaaaatgtataaaaaccacataaattcagggcccctgtgctgggcagtgttgatatcccttagagtggaggaaggtgagggatggagggtgaactggggactggggagaggaccagggtgcagttagttcctcgtgtttgagttcaaagatggagcgagggtggatatggtgggaaggggcacacgggttctcacgcaacaacggaggaaggcaggcgacagtctcttccctgaattctgagggaaaggcgtacattgtcacgaaatctctcctgagctcgcgctgtcctctcgtgtggccacagcctgatacaggctggaaaggtccaggagttgggtccgagcccaggacctggtgagggccgcagtgccaacctagccctctggtccctgaggtggtgggacgacggcagcaacaactacatcctcggctgactggcaaggcagaacgcacgcagcccaagctggtcctgaatctgcagtgagacagggcagccggtggcagcgggataatgtggaaggtgaagaggccagttggtgagggtttccaactctgtctcagacaaccactttggatgcatccccagcacccctgggaggccatgaactggagcagccgtgtgtgctgcatgccatgttatctcttccctctcattctagtttcacatttggaattgttttttaaacaaagggctcagtttacataaggagcactgttccaccaacctaggcaggccccccatatttggccaggacctctggggccacggctgtttgggtgtctgggtggtaggacttcgctacttgactggagagcagccagccagctggccccaaggctcccaagggccgggcaccacggctcgtgttccacgaagagcagagcggaggggaggtccagttgaccctctccgagcattcacagccccctgaagccagggcagcgtcctctggaagtcagctctcacaccacagagtcacggatctccgagccaaggcggacccgggccgggggcacactggggatacctcccacgaagctgtcttggatgctgagtggcctcttctctgactcagtgaagactcgggaaccccggggggctgtctgaacagggactggtaccctcggtgatcgagcggggtgctagggggccctaggccgttgagtgggcgggtctcagggggcagcaccacagggcaggtcttggggtgcacgctggcacattccccctgcttcaggaagactttcatgctgttccggtgccggtagagcaagaataaaactgggagcagcacggccagcacaaagagcgtgcacatcaccaggaactccttccagtaggacctgtctgcaccccagctggccttgccaccagctggtgcactcacacgcgatgtgctgataatgacgggtacac

SEQ ID NO: 2080 - DNA, 494 bp, Homo sapiens
catggcggcgtctctggggcaggtgttggctctggtgctggtggccgctctgtggggtggcacgcagccgctgctgaagcgggcctccgccggcctgcagcgggttcatgagccgacctgggcccagcagttgctacaggagatgaagaccctcttcttgaatactgagtacctgatgccctttctcctcaaccagtgtggatcccttctctattacctcaccttggcatcgacaggctggtcccagacctcagagttcaggtcttcatgctggaatcctgggaagcactgaacgtggagtcaggagatgtgggtttgagtcctgagatttgctgtgacttcatctggaagatggggttttgataccttttttaaagatctgaccctggctgtgcccatctgtaactctctggctatcatcttcacactgattgttgggaaggcccttggagaagatattggtggaaaacgagcagttgctggcatggtgctca

SEQ ID NO: 2081 - DNA, 272 bp, Homo sapiens
agttaagttgaacaattctttaaatctaaagagatttttttttattttttcaggaatacaaagaggggcaactcacacccatgccccgagaggtttgtagatcatttgtgaaaattatagcagaagtccttggatctcctccagatttggaattattgacaattatcttcaatttccttttagcagttcaccctcctactaatacttacgtttgtcacaatcccacgaacttctacttttctttgcacataggtagggtaataaatcaattt

SEQ ID NO: 2082 - DNA, 950 bp, Homo sapiens
ttttttttgtttatcgaaggctttactggcaagcaggaaatgtggggaagtgtggatgttagctctgagattggggtgtggtcagacatctggccaggtccatctctgaccggctcctggtcaacccccagggagctggaagagtgccagcgaaaccacgagggtgatgaggacgacagccacgtccggggcccagcaggctggcattgaggccaagcacgtgagggtgccccccacccacatgtggttctgtgtgtgtgcacgtggcgtgggaaccatccccgcccttgtgttgggtctgtgccccatggaaggaaggggaggttgggggtgtctccccccaaagcacagcactcaactcttcacaggacaagtacatggcggacatggacgagcttttttctcaggtggatgagaagaggaaggtgagtgtgtgtcgcttgcttccgatggctggcaggtgctcgtgcagtgccccttttcagcctctgaccgtgtgcccctgtgccacagaagcgagacatccccgactacctgtgtggcaagatcagctttgagctgatgcgggagccgtgcatcacgcccagtggcatcacctacgaccgcaaggacatcgaggagcacctgcaggctgaggcctgcggctgggggagcagggccagtggcatggtcctgggccccatgactgccctctgcccttcttgtcactgcagcgtgtgggtcattttgaccccgtgacccggagccccctgacccaggaacagctcatccccaacttggctatgaaggaggttattgacgcattcatctctgagaatggctgggtggaggactactgaggttccctgccctacctggcgtcctggtccaggggagccctgggcagaagcccccggcccctatacatagtttatgttcctggccaccccgaccgcttcccccaagttctg

SEQ ID NO: 2083 - DNA, 484 bp, Homo sapiens
ggggttggtcttgctgatccttcagttagctctaaattctggcaactccttgtaattccaatgtatttgatacatgaacaatcatgttgaatgcatttgtgatctgggagacttcctcgtcttccagggaaggaaggatgtgcagcccctgaaggcatgaaactcccagtgtgtacggagccagtggaatatgggatacccataccttaccaggcgctggttccttctgctcacaataacatctgcccaaagagggagtgggaagaacgcttagctctttcactagtatggatttgagttcatggtcactatttttacccacctgcctttgttaaaaatcactttgagtagaatagcactggaggaacatatttagcacctaatattaatatttagtagtccattgataaatttgccagcatatgttctagcctctggggggaaaccaggaccacttttgtctgtggcttaaacagttcagttg

SEQ ID NO: 2084 - DNA, 1897 bp, Homo sapiens
gcccgcggcaggcctgtgggctgcgaggaggagctttgcctagcttgcaggcagcgcagggcagacggcggcaggagaagcaagatgaatgcaggctcagatcctgtggtcatcgtctcggcggcgcggaccatcataggttccttcaatggtgccttagctgctgttcctgtccaggacctgggctccactgtcatcaaagaagtcttgaagagggccactgtggctccggaagatgtgtctgaggtcatctttggacatgtcttggcagcaggctgtgggcagaatcctgttagacaagccagtgtgggtgcaggaattccctactctgttccagcatggagctgccagatgatctgtgggtcaggcctaaaagctgtgtgccttgcagtccagtcaatagggataggagactccagcattgtggttgcaggaggcatggaaaatatgagcaaggctcctcacttggcttacttgagaacaggagtaaagataggtgagatgccactgactgacagtatactctgtgatggtcttacagatgcatttcacaactgtcatatgggtattacagctgaaaatgtagccaaaaaatggcaagtgagtagagaagatcaggacaaggttgcagttctgtcccagaacaggacagagaatgcacagaaagctggccattttgacaaagagattgtaccagttttggtgtcaactagaagaggtcttattgaagttaaaacagatgagtttcctcgccatgggagcaacatagaagccatgtccaagctaaagccttactttcttactgatggaacgggaacagtcaccccagccaatgcttcaggaataaatgatggtgctgcagctgttgttcttatgaagaagtcagaagctgataaacgtgggcttacacctttagcacggatagtttcctggtcccaagtgggtgtggagccttccattatgggaataggaccaattccagccataaagcaagctgttacaaaagcaggttggtcactggaagatgttgacatatttgaaatcaatgaagcctttgcagctgtctctgctgcaatagttaaagaacttggattaaacccagagaaggtcaatattgaaggaggggctatagccttgggccaccctcttggagcatctggctgtcgaattcttgtgaccctgttacacacactggagagaatgggcagaagtcgtggtgttgcagccctgtgcattgggggtgggatgggaatagcaatgtgtgttcagagagaatgacaatgtgtgttcagagagaatgaattgcttaaactttgaacaacctcaatttctttttaaactaataaagtactaggttgcaatatgtgaaatcagaggaccaaagtacagatggaaaccatttcctacatcacaaaaacccaagtttacagcttgtactttactttaatgtgtaatactcaactcacggtacaagacaattgcatttaacattgttataaataaaaggaacatcagatcaatcattaagggctccagagtgaacagcatcttcataacttccatgtttatcatctttactttctggatgtaatttaataagatcatcaattcgaagaatggtgattgcagcttctgttgcaaatttcaaactcttaactttaactatggttggttcaaacacccctgcttgtttgttgtctcgaggtttaccattgctcaaatcaagaccaatccattttagatttttacgttctgggttaacctgggcctcattatgaaaagctcttaattttgcaaccagatctgtggagtcctgggcagcattaactgctagtgtattgggaataacaagaagtgatcttgcaaactctgcaatcgcaagctgttcccgagaccc

SEQ ID NO: 2085 - DNA, 471 bp, Homo sapiens
tttttcataatactcttgttaatggttccaacatggctgttccccactcattcctgagtggctctttgtgccagcatctttctcacccccacccccctcagctttcttaatcagtcatagcagatgtgtgcttttattccggcaaaccactatcactgccagtgtccaacttagaaaaatgacagtctataaaaaccagtgatgtgaatagtttcaatgggtttgtctttttgaagaactgactttggctttgattctttctacagcgattttcttttgctaatttagctatggatgctttttgcctctgtgtgtgtatgtgtgagcataaattagtgtcctgctgtaatttaagctaatttccctattccactatttagtgaaaaattctctccactgggaggaaaaaacaaaagctgctttccaggaagccctcggggcagtcccacaggagcagagctgcacgaggcc

SEQ ID NO: 2086 - DNA, 998 bp, Homo sapiens
  misc_feature (1)...(998): n = a,t,c or g
cttcagtaaaatattttctttatctaaatattaacattctaagtctaccaaaaaaagttttaaactcaagcaggccaaaaccaatatgcttataagaaataatgaaaagttcatccatttctgataaagttctctatggcaaagtctttcaaatacgagataactgcaaaatattttccttttatactacagaaatgagaatctcatcaataaattagttcaagcataagatgaaaacagaatattctgtggtgccagtgcacactaccttcccacccatacacatccatgttcactgtaacaaactgaatattcacaataaagcttctgagtaacactttctgattactcatgataaactgacatggctaactgcagnnttaaatcttctatctgagagtaataatttatgatgactcagtggtgccagagtaaagtttctaaaataacattcctctcacttgtaccccactaaaagtattagtctacacattacattgaagttaaacacaaaattatcagtgttttagaaacatgagtccggactgtgtaagtaaaagtacaaacattatttccaccataaagtatgtattgaaatcaagttgtctctgtgtacagaatacatacttattcccatttttaagcatttgcttctgttttccctacctagaatgtcagatgtttttcagttatctccccatttgtcaaagttgacctcaagataacatttttcattaaagcatctgagatctaagaacacaattattattctaacaatgattattagctcattcacttattttgataactaatgatcacagctattatactactttctcgttattttgtgtgcatgcctcatttccctgacttaaacctcactgagagcgcaaaatgcagctttatactttttactttcaattgcctagcacaatagtgagtacatttgaattgaatatataataaatattgcaaaataaaatccatctaaatagaaa

SEQ ID NO: 2087 - DNA, 1232 bp, Homo sapiens
atctacatcctcagcagtagtgggagatgggggcccaacaccgagactcagggtcttcaggaaagtctcgaaggaagcggcagatttatggctatgacagcaggttcagcatttttgggaaggacttcctgctcaactaccctttctcaacatcagtgaagttatccacgggctgcaccggcaccctggtggcagagaagcatgtcctcacagctgcccactgcatacacgatggaaaaacctatgtgaaaggaacccagaagcttcgagtgggcttcctaaagcccaagtttaaagatggtggtcgaggggccaacgactccacttcagccatgcccgagcagatgaaatttcagtggatccgggtgaaacgcacccatgtgcccaagggttggatcaagggcaatgccaatgacatcggcatggattatgattatgccctcctggaactcaaaaagccccacaagagaaaatttatgaagattggggtgagccctcctgctaagcagctgccagggggcagaattcacttctctggttatgacaatgaccgaccaggcaatttggtgtatcgcttctgtgaccgtcaaagacgagacctatgacttgctctaccagcaatgcgatgccccagccaggggccagccgggtctggggtctatgtgaggatgtggaagagacagcagcagaagtgggagcgaaaaattattggcattttttcagggcaccagtgggtggacatgaatggttccccacaggatttcaacgtggctgtcagaatcactcctctcaaatatgcccagattttgctattggattaaaggaaactacctgggattgtagggaggggtgaccacagtgttccctcctggcagcaattaagggtcttcatgttcttattttaggagaggcccaaattgttttttgtcattggccgtgcacacgtgtgtgtgtgtgtgtgtgtgtaaggtgtcttataatcttttacctatttcttacaattgcaagatgactggctttactatttgaaaactggtttgtgtatcatatcatatatcatttaagcagtttgaaggcatacttttgcatagaaataaaaaaaatactgatttggggcaatgaggaatatttgacaattaagttaatcttcacgtttttgcaaactttgatttttatttcatctgaacttgtttcaaagatttatattaaatatttggcatacaagagatatg

SEQ ID NO: 2088 - DNA, 334 bp, Homo sapiens
gcaaatttcagcagcagctgcttcactccagagattttattaatgaaaacctaggctataacataaacctatgctataacaaacctatgctaatgaaaacctaggctataacattagagatgatgttaaaaatatggaattataactaggtactcttaactctattactgcactaatataatccaaatattcgtaaaccaagcaggaaattaaaagattagcaccacccattttgctgtgctaattagtgccaacattaaacaactcaagccagtcatgactgagttttacttatgtcttccctactactgtgagaggcggtctcactgtgttg

SEQ ID NO: 2089 - DNA, 408 bp, Homo sapiens
ggtcgacaaataaaagcacataaaggggggacatttaggcttgcaactgtgggtgacaggatatgcactgctggggtccaggaggggcagtcctccaactcccagggcaggccctggctaaggcagtcacaagggccaagttcctcttgaaacccagaattaagtacagcccctttgttcctcaaccctgcagctcccatcatccctcccccacacagtgctctctggagtacagggtacgagctgcaggtgctagatggggaaaatgaggtggaggctccatggtgggggctagaacctgggactcctgattactagttggggtccctcccctagacaaagcccagattctcattcccaacagatccagggaagaaacaaagcagataataccttcaggctttaacc

SEQ ID NO: 2090 - DNA, 341 bp, Homo sapiens
gtggttcagtggggacggaatgattaacaaaggcgtccgaagaaatcgttgttggaaggtgaccaaggtggaaagagacgttgctttggccctgcaagtaagaagagagagggaatagcctgaaggagtaacactaaatttaaaatgacacttttttaccaaccagcgaaagcagatgttcaaaggggatattggccagagtctgtcacactaagatgagaaatgtcctttcttcctgaaggtgtctgatgtgtaaaaatatgatatactttgtgctgtttcctcccttcccttttgcatattattctgaaacaacaaaaaaaaaaaaaaaaaaaaaaaaa

SEQ ID NO: 2091 - DNA, 352 bp, Homo sapiens
gggcctctgctcgtgggtggttctcgtggaggtcagctcccgcgtgtctccgctcgacagggtgcttgggcagagcccatcgggtaggcgcgggccatggcgcagtacaagggcaccatgcgcgaggcaggccgtgccatgcaccctcctcaagaagcgcgaaaggcagcgggagcagatggaggtgctgaagcagcgcatcgccgaggagaccatcctcaagtcgcaggtggacaagaggttctcggcgcattacgacgccgtggaggccgagctgaagtccagcacggtgggcctggtgaccctgaacgacatgaaggcccggcaggaggccctggtcagggagcgcgag

SEQ ID NO: 2092 - DNA, 927 bp, Homo sapiens
cacacacacatatatatatatatatagtactctaatactgcaagaaggtttttaaacttcccacttatcttttatacacattaatcagatatcattacttgctgcagttggccaactatgccacttggtataaaagcccataaatgttgggagtttatatcactcattcctgtgtacctgatggaagttgcatgttcatgtttaagcagttactgtaacaagaagtttaaagttaattatatcagtttcctaatgcttcatgataggcaactttacccattttgaatgccttaatttaatttttttcaaagtctcagccctgtctgtattaaaaaacaaaaaaagcgtttaccagctcttaggatgtaaactagctttgtggaagataaatcgtgcactatttttacacataaatagttatatcaatgtcagcctattttgattaacaaatgtttttaaagtattattggttatagaaacaataatggatggtgttggaactaatatatccttgatgtctgtctattattcattcaactctttttacagacctcagtattagtctgtgactacaaaatattttatttgctttaaatttgctggctaccctagatgtgtttttattcctggtaaagacatttgtgattacattttcacacttaagattcaaaatttttcccaaatataaagaaaactaagacagactgtagatgcattttaaatatttaaatatgatcctcagacatgcagctgtgtgtggcagtattttagtaccgggttaagaaaactggcaactgggaagaagtggcctcaaaggcacttaatttgatttttattttttaaatgctgttcaaagttacagtttacgcagggacattcttgccgtattctcatggatcccaggataagtgtgtgttttatactgca

SEQ ID NO: 2093 - DNA, 461 bp, Homo sapiens
  misc_feature (1)...(461): n = a,t,c or g
gaagggacttttgcctgttgggcactaatctttggtttctgtggtttgaaattggtgtgtaaatagcataaggggacatgcgctcttctgagcttgagcagctggtcacattcttatctgccacttgtgttcccacttcatctggcccagtagctcacaaagggccactggagtgatcagtgaaggggggtgcctgggcggctggcctgatggggaggctcctcctgcagatgccacgttaataagtgctgcgtcctgctacggcactggggatccaggaggtgagtccgaaaccacattgggccatgccctgctggatatagtgcacacagggcatccagggcaagacagccagggaggagaagggcctgggctcggcctctccagcccctccatgagctcacctgcttactcatccaaccccatggaaagcgatgcanttgcactgccaggattgataa

SEQ ID NO: 2094 - DNA, 110 bp, Homo sapiens
aactttttttattatggccaggaattaacaattattgaagacttatgactcaccagacttggactataatgtacatatatgtgttaggcctctaaactagttatcactat

SEQ ID NO: 2095 - DNA, 482 bp, Homo sapiens
ggctggggttggcagtctgcttaacaagatgctggggaccacctctgaattagtgaatcagggagctgctgtgtgatcccctcctccaggctttcttggagtttgtctctgccacttcctcaagccctttaaaaaggctcctgtgctttagagagttaggatgttaatgaccgttcttttttcttgtactttattaagtactagtcttactagactagtgcttaagtggcagtgtctgcctttgccttctcccatctctttatgctcctttcttccaacttctcacgtttctgtttctcgcacggccaggtgtccagcatcccatgctgacttgcggttggccaatcccctcctcgtagatttcctccacattttcctcttcctccttttcctgtgggaagttctttttctgggctgtggctggtcttacgtagttcggtggaaaaagtattgaggtagtgttagatactgtgctgcacctc

SEQ ID NO: 2096 - DNA, 474 bp, Homo sapiens
gccccaacctgatctgcatgaagctactttggaacatttgtatctgcgtaaaactaagagacctcagtacacccaatcccctcttccaacacatgtgaggtttccatgtgaaagtactttttcataggttacaataaattgcttgcagttacaaatttggaggtgtttcagcttgtattgtttcacgaggaatttcttaggggcacttggcctacaccctgtttttgttctagaattacctgccgttaaggtcagataaattttcagtaaacagattatggcacaaatcaatgtgtcctttcccggacagaagagatggctctctggccatgtcctaacaccagactgtccttatttaagaggcaggcgtgtcttttgtctaggttgtcttcaaatttaacccattaaaccagttaaccttatttcatatgtgaagggctttggatgtggacaagatggagggcacaaaacttt

SEQ ID NO: 2097 - DNA, 1257 bp, Homo sapiens
tttttttaacctcattattgggatacttaaataacagatttatactgttgttgtttctactggtcggtgctcgctcactaatatccaatcctagtatgattttcttttacttgtgtctattaacagggttatgtcacaccttgtcaacctcaaaacagatgatactcatcacttgtcttccatcttgctgttctattatcttcctacaaaaatagctaatttgtcagatttcaaagccttgttatttactgatgagcttaccaactggaccttttgtatcttcagtgtgtaattctgaagatgcattctgatacactagtgaactgggggtgaccggtgaaggggtggtggaactaagggggtggggcggcgaacataggcaatatgccatttcctcaccatcccatgcttgtcatgtgagacaacagaaaggataaagaatactctatctcctattctgaaaagataattatagcaatgataccttccattctgtttatttctggatattttggcttcaacaattctttatatcatattttattcttgaaattggtatgacttctctgttttacagcctgagataaattctcagatatttttttaacagtaaactgcaaagccagatttttgaagccaagtattcaagctccaaacactttccattatattcattacagttcttgttttagctggtatgttctttcctctacaagtactgcccattatttatgcttcttagctaaacctagacttttcagtagcatgtatgaaagtcaaataatgtcaaatggtaagtttctacttcattttatctcatcagggtatttgttgctctatataccagcatagtatattttctactcccaactgaagcttttcatttttaggactgaacgttaacaataagtctactaattaggttaactgcttagctatgttccagccatgtttttaatgctagagaatttttcctttgggggcttaagcaaagatatcctaatcatacagatctcactactgatgataatatacttaatggtgcttgtttctgcctgtaccattccctataggctgaagatgtaaaggacattagcaaccacagtatgtttagtttttagtagcaacagtattttactacggccttgtgtactttgggtaggatgtgagaaggggaggagtacataataatgcccaatctctattagcaagtaacttacaacgtagtacagaattctgaactatttctctcgtgcc

SEQ ID NO: 2098 - DNA, 624 bp, Homo sapiens
ggtggagaaaagaagaaagcacacgccagccaccctgcagaacaatgcagttctttcagagtcacatagtcctaaatctggaaaccatcacagctgagaggataagctttggaacccgatagtggtctaaaactaggctctgcctgccatggacaaactacaagagactgggaagtgagttatcccagtttccttctctgcaaaacagggagtggggacagtggaataacacctccctcatagaactgttgggaggcataaatgaccctcagcacagggtggtgtgtatggaatgtgcatcataagtggcagctattttgataattactaaacatgatgaatgatgataagcgaaataataacacagcttttcaacattttcactcaataagttaaatttataataggcaagcaaaggagtttccagaattaagcatctgatgggagcttagacaggttgacttttacagctcattctaaccctgagtgagggtctgtgattttataagcccttttagggttcgagtgctacttctaatcaagatcctggtatcatgtttttctccattacgtggaacaataatgaatagataaataaaatataactgggaaaggagaacacag

SEQ ID NO: 2099 - DNA, 352 bp, Homo sapiens
gcggcacgaggggaggcggggcggaaaggcgagaggtgtctcctccaccggagccaggggagacccgagcaagctccgtgacagcacgtcggccgccatgtcgccgagtggggctggaaacagacccggcgcccagcggtagccctccttgcgcctccgattcccagacatggaaggtctttaatgtaactttaaatggttcaccaaaggatgctctaatggatgacagcgatactcctacatattatctgcaaatagaaccacaagatggatgtcatcctggtgacagcgtggaaaggagtgtgacctgtctgccttctgcatcagatgaaaatgaaaatcagcttgacgg

SEQ ID NO: 2100 - DNA, 1097 bp, Homo sapiens
caatccttctgccttggccccccaaagtgctgggattgtgggcatgagctgctgtgcccagcctccatgttttaatatcaactctcactcctgaattcagttgctttgcccaagataggagttctctgatgcagaaattattgggctcttttagggtaagaagtttgtgtctttgtctggccacatcttgactaggtattgtctactctgaagacctttaatggcttccctctttcatctcctgagtatgtaacttgcaatgggcagctatccagtgacttgttctgagtaagtgtgttcattaatgtttatttagctctgaagcaagagtgatatactccaggacttagaatagtgcctaaagtgctgcagccaaagacagagcggaactatgaaaagtgggcttggagatggcaggagagcttgtcattgagcctggcaatttagcaaactgatgctgaggatgattgaggtgggtctacctcatctctgaaaattctggaaggaatggaggagtctcaacatgtgtttctgacacaagatccgtggtttgtactcaaagcccagaatccccaagtgcctgcttttgatgatgtctacagaaaatgctggctgagctgaacacatttgcccaattccaggtgtgcacagaaaaccgagaatattcaaaattccaaatttttttcttaggagcaagaagaaaatgtggccctaaagggggttagttgaggggtagggggtagtgaggatcttgatttggatctctttttatttaaatgtgaatttcaacttttgacaatcaaagaaaagacttttgttgaaatagctttactgtttctcaagtgttttggagaaaaaaatcaaccctgcaatcactttttggaattgtcttgatttttcggcagttcaagctatatcgaatatagttctgtgtagagaatgtcactgtagttttgagtgtatacatgtgtgggtgctgataattgtgtattttctttgggggtggaaaaggaaaacaattcaagctgagaaaagtattctcaaagatgcatttttataaattttattaaacaattttgttaaaccataaaaaaaaa

SEQ ID NO: 2101 - DNA, 399 bp, Homo sapiens
gcagcttcaagtgaccaaaagactaaaatctttcaacgtcaatgccaaaagccaaggggaattttgcagtgataggattttagtctcttactatgaatactaatttcgaaccatagctttcattttaagcatcatcttgaatttctaaacttttttctatgtcttggtgttaaaagatttcaagattggcatttttacttaaacagacattttatggttgagttttctctttattatagagaattagtaatttttttttggctgacagatcagataaaattactttctattcattaatttttctctacaactttatgagtttatttaggtgaatagtctagactagaaacaagtttactttatctgctttgcctctggtggtacaaggtttttaacatg

SEQ ID NO: 2102 - DNA, 1018 bp, Homo sapiens
ggtttgagtatgatgtttaatgtaagatccagtgggcttggcagagttggtgcaaaactgtaaagtaccagattaagttctagtcagtgagttagcagcctaggcacttgggcaaaaaaattggccctgctgtcccaagtcctccaaagccctctccgtatcaccagctaggagctccaagactgatatgccactacttggaggcttgagtagaatccacgcgtcctcagtttccaaagtgacaagagacctggccccagccatcaaagcagtagaattttcaggacagggttgaggacagtggggacagaactcggacatggggggcctgagctgctgaacatttgctacatgcagttagtctaaagaggctcacagctggagaggttagcctgtccaccttcccacccatgtgtggtagggaagaaggtgaccatctagttaaagaaaaaaaaagatccttccaaagctgtatttggcataagctaataccactgctagtgctgccactggccaggcacagatacagaaggccctgaggagttgggaggaagggagaacaatgtgcaggcaaagcaggaaacagccagctcaggtccccgccccaggggcccagaaggataaaggccgtgcagtaaagggaacatacggttcttctctttggtcaggcaaaggcccgaatatgggcctgttaggtgaaagggctgaagggcacaggctctgcccttggaccctagctttaggctcatcacattgaggcggtgatggagcgagacgaaggcaggaagacagagcagtcaggctgggactcgccagctcctaggagctgcccttgtccttgttgtccatcaggtcataccaccgggctacaccctgggaaaggtctgtctcagctaggtccagctgcaccttccccagcagcacgctctcttgacatgaaggaggaattagacttgacagagacatccagctttcgtctctgggcctcatccagggggagttcccactcaaaccgttc

SEQ ID NO: 2103 - DNA, 643 bp, Homo sapiens
  misc_feature (1)...(643): n = a,t,c or g
ttttttttcctgccctagaacactgattccccatcctatccagagattagttttagttgcagcatggaacaattacaggtacagtattaggatctataaatattcctgtctttttataaatgtttacttgagagttatactcttgggaagttcaaaagaaaattaatctacccatttgtcagcagataatgaagattggttaaggatttaatgggaaaggggcatcaaaagtagtattttaagataggcttcacttgaaattaagatgttattaatagagaattggtctgtatttgctgttcttgctgattgaaataaacttctgtagtgtttagtgtaaatttcttctattcatgatgagtttggtccaataagataaacaaaattaagagcatggctttgaaaatgtctttgctttcagaaattgaattaaactgtcaaaattggattttgaaactttttaaatgactttataaagggggaagtatacataacattctaaaactgtttatattgcccatttaagactgggaaaattcaaaactacatttattagtgggatatgacaacgaatttatttcatagtttttaaaaaatggaaggctcattactgggatatttaagtggaaattggntttttgca

SEQ ID NO: 2104 - DNA, 808 bp, Homo sapiens
tttttttttacttgcaggattaggctttaatgaatttgaatacaaggcacaggtttccaggtgtatgtaaatacatctccattttacgttctttaatcgcttaatccttttggaccgggataagagaatatttgaaatttcttattaaagcaataacttccttaatagggctttagtctttttgctttttttttttttttaagagctgatcatctgaattcctagtacttgcaagtaaatttttttttttttccttttctgtccacctaccattaggtggttcctagatcctggcaaattgtctatggttaaatgatgcttttaatttctgtgtcaacacagaccctcttcgttggtgtctccaaattagtattgtcttcctctagtgtgtcattacagtcccttttggcttttgtttcttcctcatggaataaatgtgggtgctcaattcgtcccctacgtacaaaatgctggatccgggattccagtccttggcatttaggacggtccatgaggggcttatatgtgcgcatcttcactccttctacaaaggcactggtctgctttatgacagagggcttaacatttccccattctgtcattccatccatctttggtcctattccacagggtactggaacagtgtccagtccttgtagcatactatacaacatgtgagttttgacagcatgattagcccacagttgttgtaggtgggtaatattgaactcctgagcctcctggtcatagatccacttgacattttcaaacttacagtcatataagactagaggaaattctacagccc

SEQ ID NO: 2105 - DNA, 262 bp, Homo sapiens
  misc_feature (1)...(262): n = a,t,c or g
gtactattcagccacgaaaaagaagnnnnnnnnnnnnnnnnnnnnnnnnnnnnnnnnnnnnnnnnnnnnnnnnnnnnnnnnnnnnnnnnnnnnnnnnnnnnnnnnnnnnnnnnnnnnnnnnnnnnnnnnnnnnnnnnnnnnnnnnnnnnnnnnnnnnnnnnnnnnnnnnnnnnnnnnnnnnnnnnnnnnnnnnnnnnnnnnnnnngtgtgggggatgtggggacagctgatgggtacaaaaaatagttataaagaatgaatt

SEQ ID NO: 2106 - DNA, 3755 bp, Homo sapiens
ggtcttgcttacctgcatgtagcaaagcccagacatcaagcatggtgggtgcagactgtccgtgtgacccaacaccgtgaggctgtgagccctggcagcactccaaaacaatagccttgcaaaacgtactccccagaaagggttccacaattgatgagattggtcactactctgcatattagcacattaaagatttctttatgaaggatcctttataaagaaaggataaataaacctttattagacctcacatttcccagactgacttaactatggaattttttttcacctaatgtctatgagtgatcatggagctagtgttttcaggtacacgttttgaagagactggctggacacgtgactgctacttattggttttcacctctctgtacatctcagtctgggtaatgatcaataatggctttacaccagataaaaatgattatgaattttgtgccaaagtggaaaatatgattatccctgcacaagggcattttggaatatctgctgcaactggaggtcttgcagatgaccatgatgtcctttcttttctgactttccagttgactgaacctggaaaagagccgcccacaccagataaagaaatttcggaaaaggaaaaagaaaagtatcaggaggaatttgagcactttcaacaagaattggataaaaaaaaagaggaattccagaagggccacccccgacctccaagggcagcctgcggaggaaatatttgagagtgtaggagatcgagagctaagacaagtctttgaaggacagaatcgtattcatcttgaaatcaagcagctgaaccggcagttagatatgattcttgatgaacagagaagatatgtctcttccttaacagaggaaatctctaaaagaggagcaggaatgcctgggcagcatgggcagattactcaacaagaactggatactgttgtgaaaactcagcatgagattctgagacaagtaaatgaaatgaaaaattccatgagtgaaaccgtcagactggtcagtggaatgcagcaccctggctctggctggaggcgtctatgagacaacacagcacttcattgacatcaaagagcacctgcacatagtaaagagggacatagataacttagtgcagcgaaatatgccatcaaatgaaaagccgaaatgcccagaactaccaccatttccatcatgtttgtctacggtccacttcattatatttgttgtggtgcaaactgtattattcattggttatatcatgtataggtctcagcaagaagcagctgccaaaaaattcttttgactaccattttcctgtgtacttcatctatttgtgtacaaaatgatgtcgttttgagggaatttaagtatttaaattgcttcatagtctaaattattaattttcttaataaaataactgtttaaacattgatttgcagttaagaataaaccttaaagcaaagacaaccacattttaatttgttcacagtatgtaaatctgtctaaatttcagtgaatttctggtcagtatgatgcagcctctgagcagatattgaccagtaagagggtaaataaagtgggggcaacccctgggatatgaatgttaccccctaagtctccaatattgcaggtttccctgtataacgtaaacacacttgccctcatgcctcccagaatatgaggtctaattaagaagtcccatcaggtttattttgtaaccaaagtcttttttagaggtcagacttcctaatcaaaggcctgggcctgcagtcctttcatcttaatgcaacttcctttgaaatcaaagaatattttgtctgagagctttaaggatctggtaatagacttcaaaatgttaagtgaaattttttttcctctatttatcaatgatatatttcacttttaaaggaaattttggaggaaaatatagctgctttttgcctaaaaaaccttgtgggtggaaacattcctctgagaatggcttttataggtattttgcctggtaatgtattcattcatgattgcccatattcttgaatgtcttcattccaatggggtcaggtcaatattatgaaaataatttttatatttatatttgtaactaagaatttatttctccctttactacacgatgtaaattcacgtcaaattcgatgatctgaggatttaaattcacaaaacctgccactacattctggtttacattagttacttcatgctggctggggttagtgaccatttgcatactcttttaaatcaaggaggctgtagtagaggcagttttaagattcttgaaggcaaaatttgaaaaacagtgaatacttctaattgtttccttttagtgccagaactaagacattgtgaagcacttgttagtaaacttaaccttgaaatgtcagactggaaggagtttttatgtctttgtgcatacttctgggtattacagattgggctaacgacctaaaatctatatataaagactttctgaagaactctgtattatagcaataccaaacgagtgctgtgtgtgcaaacagtctggcgttgctttttatgttgatatttatcctagaacactgaaagagaactatgccagtgataactcactttacttcagtcatttcaacacagaaaatgcttctctagcatttttcttttgtagtgttaacattttgaaattcatgtttcagaggcttcatcatcacagaatttactcttgctccatgaaaaaaaattaaataccttcagaggaatatttaagttgtaaactatgaaacttgagaaatcctcttgagataaaaggctgccaaatccagtattataaagtccatggtcatatgtgcctgtgcattaaaggaataccagatctatgcagtatacatttttcaggctgaaattcaaggggaatcattctgattattcttactacaaatggagatggctattatgaaacagcatgagcatgagccttttatcttttatacttagtgatatactttgcttgaaaatcactcagcaaagtagttcacatgatgtgtatcatatttgaagtgtggtttttctcaaaatcattgactttaaggagctcatttctgaacaaaaaggtttgctctgtgggaaaaatcaatcactgccaggattctttcatttctgtactattttgtataattgaatttgttcacttctctcacaccagcaagtgttttacaggtgccttggattaaaacaaaattgattttaaaatttttatgtaagtcattgtgtctatgatgccacttttaaaaggaaaatgcaattgcgtaatggcttatatccttatttaatgtacctatttgtgttctaataattgtttgaatgttttattcagcttaaaactttaccatgaagtcataaacagtaaacaatgttttgttatgtattaaggggatatcagtgtttctcaaagtatgatccatggaccatctgggtcatggcgcctggtttcagacaacctgaatcaaatcttaggggtggggctttgggatgtcattgttcaataggcacctcaggagattctgagcacaccaatgtttgagaaccactaaaatgaggagtgggaaaaaaaaaataggtgttttgttaatttagagctgagctgagaagataatatatttttattgtcaatgacattaacagatatgcactgattcttttatacctacaatttacttaatgttccttttattaaaacgcgtggttcatgagcaactacaaaaaaa

SEQ ID NO: 2107 - DNA, 850 bp, Homo sapiens
cgacgacgccatcgccgagcttgacaccctcaacgaggactcctacaaggactccacgctcatcatgcagctcctccgcgacaacctcacgctctggacgagcgaccagcaggacgacgatggcggcgaaggcaacaattaaggccccaggggaactggcagcgcacgcggatgctactactgcagtctttatttttttcccatgagttgggggtcgggtgggggagggaaagggagggatgaccttcccagggagaaacccacgacctgtcctgtctttgatcgcctctttgacatttttgccaaaataccactagtggaaagtcaggctagctgtgctggtattggaatagcagcctcacactggcgtctggactgttctgtagattcatgcaagtggagctgtctgtctctaatttaacttattgctagataatagggttttcagatgaaaagaaaacttaaagaggaatggccctcattcagtaagttctgtggttccagtaaggatttttatgtacatacgctctcgtctctcgttttgggtactttctatctcatctgtctcggctctgcatgttttccagggtgtagcctacagacatggaacagtgtaaatcccagactgacagacttagaacctgaggtctcattcatccttatggtttaggccttgccagttttccgaagtctctgattagttgacagtattaacactaaattgcagtttacagtatttctacattacagccatatgtaacatcaagccatcgattgtgtacttttcctttgctagttgtttgggctttaacatccttattcagccttatccaggttggttttgctgttg

SEQ ID NO: 2108 - DNA, 886 bp, Homo sapiens
  misc_feature (1)...(886): n = a,t,c or g
tctgtgtcctagttgagggaggcttgctgaggcttctctaaaggtggttgggcaagcacctatatagtatcacggggacagttgaggcaactcgtagatggagatttgggaaaagacgatgtggcctcctacctttccagtttctgttggcagcccttcacgtagcctcctgcctcgcctctacacctactaccctgtcggcccttttgccatgctgtcctcgtataactcggattctctcctcaggtgtaggtgcagggagtcagggaacccttagactcccctgtgtgcaagagcccaggtgttggtgtgtccctttaatgctactgtgctctctggtgtttctgattttcctgcctttattctgtcttctcttgtcctatctcattccagcccacatcttctcctttcctgattacttttgttgtcctgcctcttcaggtaatggtcacagatttggctgtaggcacgttaccagccctgtggcttcttgactcttggttccctgttaactctgtttctgagaaatgtgggtatggaggtgggtgggaaagctcacttccatgaaggatgtctccatgctaggagctgcctgcaccctgggcagaggtggccagtcacgtgaaggtggggcagggccttaagcatggccacacatgttccccagggcagatcaaggggcctctcagaaccatgttccccagccaggtgaggaccattttcactggggacccagggccaaaaccatgtgggttncacaaagcccaggcactgccaagtggaacatgaggttatttccaaatcatgggagccaccagcagggagagggcaggatggaaaatcccctggagccggtcaactttttgctcatggctagtgaaataaa

SEQ ID NO: 2109 - DNA, 422 bp, Homo sapiens
  misc_feature (1)...(422): n = a,t,c or g
gccatttatatgaactattcaaaataaacaaatctataaagacagaaagattagtcattgacaggaaatgaacagaagaggaaattggaaggtacaaggcttccccttgggggtgaagaaaatattctggaattagataaggataatggttgtacaatattgtaaatataataaatatcacaaattgtatgttgcaaaatatttaaaatggtgaattttgttgctattttcaaaacatgtgtttccctggaaatcgtatcctannnnnnnnnnnnnnnnnnnnnnnnnnnnnnnnnnnnnnnnnnnnnnnnnnnnnnnnnnnnnnnnnnnnnnnnnnnnnnnnnnnngattagtacccttacaaagaagcttgagggagcctgcaagctcctgctgccatgtgagtacacatagaagtcacc

SEQ ID NO: 2110 - DNA, 591 bp, Homo sapiens
tcacaattcagtatcaggatataaatcaagctctaagtctttggaccctctgtggaaacatttctaacccgaattttaatttggccttttcaaccaaaggcttagagtggtagcaagggatttcttccaataggaaacctgatgtttctgatttaaagagaaggtgatattttaattgtttgaattaagctccttgcaaagttcgggtgtgtttacccacttagggctttctttcccagtcaacgctaacacattttgttaaatgatccctttccctgctcacattgtgtgtcatttctcatcatcagtagtcctccagcctgggcagctgtccccaccctttttcatgtaggtgcaggaagttaaatctcatttccaggatgcatgtgaacatttacaaagttgaactttgagtgcattctgctcatatgaattattgggattgttgatatatattgtattatgctaccaaagaaatattggttttattagaaggaaatggtcatcctctggaccatggagactagctcagaatacgctgatttccctctcctgactttgccaagcctttggctgcttttgcctgataaa

SEQ ID NO: 2111 - DNA, 6125 bp, Homo sapiens
gaaggaactgagacacagaggttgagacttgtctaaagtaacatgaccaatgaggaaactgaggtccagagaagttgaagttttcccaaggtcacacagcagagctggaactagagcttgcatttcctgacttccagattagtgttatttttacttcaaactattacttcttgataacttcaagagttttcagaaaaaaagaaattgggacttttttggttaaatcatgccatctgaacagaaacagttattttgtgatgaaaaacaaactactttaaaaaaagattatgatgtgaaaaatgagatagttgataggtcggcacctaaaccaaaaatttcaggaagtattcattatgcactaaaaaatgtgaaaattgatttgccaaaaataaatattccaaatgaagtcctattgaaacatgaagttgacaaatacagaaaattatttcagagtaaacagcagactgcaagaaaatctatcagtataaagactgtaagctgtgtagaggagtgtacattgcttcataagtctgagagagctgaagaagagggtgtaaaaatgtctgcaaaaatactcaatttcagctgtttaaaatgccgagacaacactcgatatagcccaaatgatttgcagaaacactttcaaatgtggcaccatggcgaattaccttcatatccttgtgaaatgtgcaacttttcagcaaatgactttcaggtatttaaacaacacagacgaacccatagaagcactttagtaaaatgtgacatttgtaacaatgagagtgtatatactttactgaacttgacaaagcatttcacatccacacattgtgttaatggtaattttcaatgtgaaaagtgtaagttctccacccaggatgttggcacatttgttcagcacattcatagacataatgaaattcattataagtgtggtaaatgtcatcatgtatgttttaccaaaggagagcttcagaagcaccttcatattcattctggtacttttcccttcacttgtcaatattgtagctatggtgccaccaggagagaacaccttgtaagacatgttataactttgcacaaagaacatttatatgcaaaagaaaaactggaaaaagacaaatatgaaaaaagaatggcaaagacttctgcaggacttaagctaatactgaaaagatataaaataggtgcatcaaggaagacgttctggaaacgtaagaaaattaacagtggaagtgacagaagtatagaaaagaacactcaagtgcttaagaaaatgaacaaaacacagactaaatctgaagaccagagccatgttgttcaagagcatttaagtgaagaaaaggatgaaagactacactgtgagaataatgataaagcccctgaatcagagtcagagaagccaactcctctgtccactgggcaaggtaatagagctgaagagggaccaaacgctagttcaggtttcatgaagactgctgtactaggacctacactgaaaaatgtaatgatgaaaaataataaactagcagtttcccctaactataatgctacgtttatgggcttcaagatgatggatggaaaacagcatattgtattaaaattggtgcctatcaaacaaaatgtatgttcaccaggctcacagtcaggtgctgcaaaggacggtactgctaatttgcagccccagactttggacactaatggatttttaacaggagtaacaactgagttaaatgacacagtttatatgaaagcagctactccattttcatgttcatcttctatactttcagggaaagcaagttcagaaaaagaaatgactttgatatctcaaaggaataatatgcttcaaacaatggattatgagaaaagtgtatcttctttgtcagcaacatcagaattggttacagcatcagtgaatttgaccacaaaatttgaaacaagagataatgttgacttctggggaaatcatctcactcagagtcaccccgaggtattaggtaccaccattaaaagtccagataaagtcaactgtgttgccaaaccaaatgcatacaacagtggagatatgcataattattgcattaattatggcaactgtgagttacctgttgaatcctccaaccaaggatcattaccttttcataattactcaaaagtgaataattctaataaacgtcgtaggttttcaggaacagcagtgtatgaaaaccctcaaagagaatcttcatccagcaaaacagttgtccaacaaccaattagtgaatcatttttatcactagtgaggcaggagagctcaaaaccagatagcctattagcatctattagccttttaaatgataaagatggaactttaaaagcaaaatctgaaattgaagaacagtatgttttagaaaaaggacaaaacattgatggacaaaacctgtacagtaatgaaaatcaaaatttagagtgtgcgactgaaaaatctaaatgggaagacttttctaatgtcgattcacctatgatgcctagaatcacatctgttttctctctccagagccaacaggcatcagaatttctgccacctgaagtaaaccaattgcttcaggatgtattgaaaataaaacctgatgtaaaacaagactctagtaacactccaaataaaggcttgccacttcattgtgaccagtcatttcaaaaacacgagagagaaggcaaaattgttgaatcttcgaaagatttcaaagtgcaaggcatcttcccagttccacctggcagtgtgggtattaatgtgcctacaaatgatttgaatttgaaatttggaaaagaaaaacaagtgtcatcaataccacaagatgtgagagattcagagaagatgcctagaatttcaggttttggcacattacttaagactcagtcagatgcgataataacacagcagcttgtaaaagacaaactacgagccaccacacaaaatttaggttctttttatatgcagagtccacttttaaattcagaacaaaaaaaaactataattgttcagacttcaaaaggattcttaataccattgaacattactaacaagcctgggctaccagttattcctggaaatgcacttccattggttaattcacaaggtatccctgcttctctttttgtaaacaagaaacctgggatggttttaacacttaataatgggaaacttgaaggtgtttccgctgtcaaaaccgagggtgccccagctcgtggaactgtgactaaggagccttgcaaaacacctattttgaaggtagaaccaaacaataattgtcttacacctggactttgttccagcattggcagttgtttgagcatgaaaagtagctcagaaaatactttgccattaaaaggcccttacattttgaaaccaacgagttctgtgaaagctgttcttattcctaacatgctatctgagcaacagagcactaagttgaatatctccgattcagtaaaacagcagaatgagatttttccaaaaccacctctttataccttcttgcctgatggcaaacaagctgtttttttaaagtgtgtgatgccaaataaaactgagctgcttaagcccaaattagtccaaaatagtacttatcaaaatatacagccaaagaaacctgaaggaacaccacaaagaatattgctgaaaatttttaaccctgttttaaatgtgactgctgctaataatctgtcagtaagcaactctgcatcctcattgcaaaaagacaacgtaccatctaatcagattataggaggagagcagaaagagccagaatctagagatgccttacccttcttactagatgacttaatgccagcaaatgaaattgtgataacttctactgcaacatgcccagaatcttctgaggaaccaatatgtgtcagtgactgttcagagtccagggtattaaggtgtaaaacaaattgtagaattgagaggaacttcaatagaaaaaagacttccaaaaaaaattttttcaaaaacaaaaactcatggaagtaaagactctgaaactgcctttgtatctagaaacagaaactgtaaacgaaagtgtagggatagttaccaagaacctccaagaagaaaagcaacattgcatagaaagtgtaaagaaaaggcaaaacctgaagatgtccgtgaaacatttggatttagcagacctaggctttcaaaagattccatcagaactttgcggcttttcccttttagttctaaacagcttgtgaaatgtcctaggagaaaccaaccagttgtagttttgaatcatcctgacgcagatgcaccagaagtagtaagtgtaatgaaaactattgctaaatttaatggacatgtacttaaggtttcattgtcaaaaagaactataaatgctttactgaaaccagtttgttataaccctcctaaaacaacttacgatgatttttccaagaggcacaaaacatttaaacctgttagttctgtgaaagaaagatttgtgctaaaattaacactcaaaaagacaagcaaaaacaattaccagattgtgaagactacctctgaaaatattttgaaggctaaatttaactgttggttttgtggtagagtatttgacaatcaggatacttgggctggtcatgggcagagacatttaatggaagctactcgggattggaacatgttagaatagtttaccataattaccaaggaaaagaaaagtaaaattaccttagaagaaaacaacgggttcagttaccataatgcagacattttctacttcagtatagtacctgaaatcgaacattttaaaagttgattgtatttctgtggaagagtaaaagttgtatgtatgatatttgaaaatgctatccctgcactcaaaagttttgaaagaaactaatcacagcacagaagtaccttgatttaattttttaaacgtgttctcgggaagttagggttaaagaaaattttgataaaacaattttcccactttagttctttagtgactcttagtagagggtaatggctgacacccccattccctctcttcttccaccagccttatgcatctaagtgtagctcctctggagatggagagctctttcatcgtagaactgaaggagtttctcacatttgtgaagatactttgagagaacctgggtaaagaagtcactcatatatctgctaaatatagttattttgaaggatattaggctccttgaaagtacatttaactcactacagttacacctcatacaatgcttgaagagtttttggcaagtaaattttttttccagttgaactctgtcacttgttagagattgggaacactctcccaaggtgattttctttttctaagtgactgtgtcaaatgttgcagtagatgggcagcttcaagagaagaatttaaactctttgtctcattgaaagtttggttaaagaacttgaacatatttctaaatttgattatattctctgatgatccctttgcacagaactatgcttatctcatgtttgtcctccataaacaaatggccatttttttcttcttggttcccatccctttaaaaagagtggaacataggagcacttccaagggagtggcttttcttgaaaattaaaattgtttaccaaaacagtattttgaagcaagatcatatttttgtctgtattcactttattatttgaacatgtccaaattaggacaaagcatttctgttagctgcttctcagtgtgactgacaacccaaaacatatatacagattgttggcatttgcaaaaggaagcatcaatagtggacccagaggcagtgcataaaaccttaggatagattcctaagggacatgcccaacagagttttaaaatggatgttttcatgatgacaacagaatcatagatttagatttttcaccttgtaagtttggatcaaattttgctggttctttggataatggagttcttgtgttaacaaattacgtgctatatgattttttgttacattgttacaagtgttaatgacattttcattaatggatgaaaacttcagggcttcttttctgtatataacaaattaagtctgtacatatttttgtaccttttatgtaaattttgcacagaaatttttggcataagttt

SEQ ID NO: 2112 - DNA, 661 bp, Homo sapiens
tttttcatggccaaacgtaactatttattcatttttttcttataaacattgagtttcttctttaaaaaaaaaaaaacacctagaatttaaatatttcccatcccatcacatacaagtctgtatacattatttacatcttttgaataaaacatattacagattttctgacatcagtatccctttttaaacaaaaatgaagcaattaaactttgatcagtaacaactacaatttgcataatccggcacagtttgtaatatagcgcctatgttggatttcataacttagatgatttttccccttctagttacttgattataagagagaaactgtctccatgagagtagttccctgtctttatgcactcttctcaatacttgcacagtgtaaatgccgcccttattcttccattacttggcactgacaatattcctctgcttttgtcttcagaaatgatttctatttgaactttaagtgttctcatatatactgtattctccttcaacccagatttcatgacactgttcctagtgttaattctatgcagtaaaagttaaacctataggaaaagttcaaataaaacatcaagtaagtgtttcctacaagattagtgccctcaccaccctggttatgcatgtacaataataaatacaagttagtagc

SEQ ID NO: 2113 - DNA, 827 bp, Homo sapiens
tttggaaacaaatcaatgtgaagagactttaatggcaaagtgcactggagagttaaaatggttacatgggtaatttaagaaaaaatttagtgggaaaaagggaaagggctgaactgccaaaataattttcttatccagttttacatttgctttctccatgtgctacaattatagacacctgatagttcctagccttagacataacttgcagcatcagccactctgctgcactttagatcacattagtcaggggctagagcccagccccatttacacggcatctgatgaatggttagctgtggcagttctaccataatgccattttgctccaaagaaatccagttaagtggctgtccatggcccagtagtttcacctctgttgcccccagaatagctttgggatggccaaggaacagctgtcctgatgtgggccatttaagaaaaatggcatagactaatttttctttaggcttggatgtgtaccacacatctggggtgacagtgtcattctgggatcgccaggtatgggtttcataaatagcttctccattgacttttagccaggaccccatttgcctcagtcgctcctcaaaaactacagaaatggtgccatctagtgtgggcccaatattcatcaaaagatttcctccacatgaaactgtctctacaagttgcttcaccaattcttcaattgtaagatagtcagagattccagcttccctcctatagccccaggacagtttgtctattgtcatgcagttttcccatttatgtggcaaaagatgtcctgggttataacgatcactgcaggtatagaaggtcgacgc

SEQ ID NO: 2114 - DNA, 664 bp, Homo sapiens
ttttttttttttttttttgtggatattttaaaagtttatttctattttaactagcccacagaccccattctttgagggctgatctgatttctgacaaatggtctatagaccctcctctcggaaacttactatccccttccaaaaaagtctgcaccttccatcatgatgcacattttaagttaaaattgccaatacaacccttaaaatgcaagtttattgaataaagctgagaagagcagtaaacagacaaaaaatgcatccacctaaataaaaaaattcacatatttacatagttcagtaactgttaaaagttttcacatgcagaggttaatgcacaggaaaatgttggtaatagcgtctggatgtcttgaaatgcggaaagcaatgtatagacacacaaacacattaaggtttagctataggtcaattaacaaacctatgcagtccccacagagtcacacattctagttccaattcctccttttaggcacaagcaagttgccacattctttgtaatggttcacactgaccattaatggtgttgaacaacagtagcaagtttaaatatcccttcatttacagaaccatccatcccaccagggtagtatgcaacatgcttcaaagaataagaagagaaatttaaaagcccagattctactcataa

SEQ ID NO: 2115 - DNA, 622 bp, Homo sapiens
  misc_feature (1)...(622): n = a,t,c or g
tttagttaagcaaagaaaactttatttctgctacacgtaacaacatattgctctaaggaacaactactatattcgttttagcattaatgtatggattcaaaaatacatgtcagcaatccctgcttcccagacaaaacaatgctgtacacagactatcaggtatatggaaaaaaaaaaagctgtcaactgtccacagggaatgcgtccagtcacattttcagtcagtcagctgaggattatgtcattatttagtctttgttctcaagaatcagtaagttctttgccgtttgttagattcttctcttggcgaatctgccagcataactttaagtctcaccccattcagaatctttccatgtagagtggcaatggcatcattagcacttattctatcggcatacttggcataccccacattttttcctgacacaaggtaaacttcgatcaggttaccaaaacgacagaatatatcttctaatacgtctaaaggtaaaggatgaggattaaacacaataaaaagtctttctttcacaggagtttcagcaggagctttttttttgcatgatggaagtacaacatctgtctggatttgaggcaactgtganccagagcttcctccaaa

SEQ ID NO: 2116 - DNA, 1896 bp, Homo sapiens
ttttttttttttttcattttttaaaattttattactgtttaccaatggggagatgcagtttatttacaccagcagccataggggaaaggggaatacagttaatcagctatctgtataggatggactacttatgcaaaaataaaaatctccaaaacaaaggacagtggtgagcttcactaccctcccccgatgatcccagcatgcgataatgccaggcagtggtccctgggcatgcgatggtgggaactaatgtatggaagaaaaagccacaaaccacagaaattttaaagaaccccccccttcccccataacacacacatacacacacacacacactcagatacataataggattgcagggtgatcaatacacataatcaagggaaaaataggaattctgctattaaaaggaaggtaggtagggaaagggagagttcctaaccactgtcaactatatggtagggagcattctctccccagaaaggagtatgtaccctctgggcacctgttggaccaagcccaccttatacccatccagggcaggaggctactgccctattggtagaggggccagaaacaaaaaacaaaaggggggtaatatgaacaaagtattactcaaaactactttccgcttcctcctctaaccaggagaaaaggccagaaagaaaacagtaatttcaggatttgagttccctatctgaaggcagagggattggactgtggcctttctcctttaccatcatcccacttccaagacattgttaggaagtaggccagagtctcacttagactctcctttcttcatcctcttagatgtcgtctacaagtcaagggcaaagatatctccaaattattttagctcttgccaaggtttgattttttttaagttaatgcaattctttaagactaatctgtaactaggccccaagcctgatcaggacaactctaggacaaggcagtaacagttccaaggcccaaactctatggtttccttaatcctctaaagtatgtaatctaaatcagtctatacagtctaaatagtaccttctgggataaggattgatacatgcacagcaagggtgagagaatggacaaggaccaactccatccccctgtgtgtcaatcagcctttactgctcttctacttaggtcctaaccggcagtattgaaatgcaggtgggaagatacaactccttatgaagtaagacacagcaagagggcacactagcaaagcagtcctatataggagaaatgcttataggcatgacactgcattttaaatacaaaaaattaagttctcttccaattccaatctcaacagagggagccataagaaagattctcctctgagtcttctacaaaaacaagggaaaaagaaagaaaaaaaaaaaacagaggccaagaaaaaagaaattgggcaggcttcggaagcaggagcattaagagctgaattgaaactgttcaatgtgacagctggagtggcaagcagcacctggggcaccagataggcagtggagcaggggacaggaggaacacagggccaagccagacagatgaggctggaccccctactggggcacagaatgaggtaagaaaacatttcaaataaagcagcaccgttcccgctcacctcggggctcccacccctttatacttcataaaccctcgctcagggaataaagtggagggtagttttgatatgtgactcttacttcccatcttcccctataccattccctaaagtcaggagattctggaggtctttctctgacttctaacaataaaaggactgctcctgttgtcaagaagatccaaaggggaccgagtggaaaggactatccctttcgagcggcagacagaaagtggtgacagtctggatgttcaccatagcagagc

SEQ ID NO: 2117 - DNA, 681 bp, Homo sapiens
agtgagtccttttgtccctcttcaggttgcacctgtctaactatgacagggatcatagcaggttgcttaatgatacagcaggatcctggcttccagaatccctggacctggggcatccccaactggtccaaccgtccgggtgagtttagtgattctggtttgcccttccctagttagagaaaaactgctctgacatgttcatatttatttatttgtatttccttggtctgggtgagtttcttcacccagtctttgagctaaagattaggtcgaaggtactggggctggccccagaagcctgcagtttttattattaccagcagagggagctacagggagcagtccggtgccttcctattgtttactttttaaacttttgagaagtagcaatggactcgtgagagtgggtatacagctgtgtgggctttgtcctagactgaggcttacagacaggaagggtaagagagacctaagcccagctcctagacccttgcctgaggaaatcagtccaccagtgtagagggcctcccttcactccagcatggaccattctattgccagattcttctggtcacagcatgggccttactggatactcaggattgggctttaagcagacctctgggtgtgacacagcctcttttcagcccccagcccaaacagcagaaataggcataattt

SEQ ID NO: 2118 - DNA, 612 bp, Homo sapiens
ctggctaatgcatgccttacccagagagggagcgagtgcactgaagagaccttggtcagtagcggctttggcctgcattagccactacacaagtcattagtgaaagtggtcttttatgtcctcccagcagacagacatcaaggatgagttaaccaggagactactcctgtgactgtggagctctggaaggcttggtgggagtgaatttgcccacaccttacaattgtggcaggatccagaagagcctgtctttttatatccattccttgatgtcattggcctctcccaccgatttcattacggtgccacgcagtcatggatctgggtagtccggaaaacaaaaggagggaagacagcctggtaatgaataagatccttaccacagttttctcatgggaaatacataataaaccctttcatcttttttttttcctttaagaattaaaactgggaaatagaaacatgaactgaaaagtcttgcaatgacaagaggtttcatggtcttaaaaagatactttatgtggttgaagatgaaatcattactaaattaaccttttttttaaaaaaaaaccatgtataataaggtcctgggtgtttgaatttaaaaaaaaa

SEQ ID NO: 2119 - DNA, 996 bp, Homo sapiens
  misc_feature (1)...(996): n = a,t,c or g
ataaatttatgatgataattttaaatgtacgatcattaagttgtatgcctcagtactataacaggtgaatctntgtaatattgactaaacagttaaaagatattttgtaaatttcaggtccatcgcatcaatgcatgaaatattagaaaaccaaattccaaagaatcaggaatttccatttccacccaaagtatactttattatcttctagcagttgtctgttaatataaaagcagcaaaatctcagctacttatataattttctccttttatttgaaagttacacttagagattaataatatgtacagagaagcttttcctgcctactctgtttataactctgtccaacttgcccacaaacactgccctccttcaacccatctgatgtggggcaaagcacctggttttcttaggcccataactcagtgcagctgttttatttttataatgccggtcaaccnnnnnnnnnnnnnnnnnnnnnnnnnnnnnnnnnnnnnnnnnnnnnnnnnnnnnnnnnnctacgatgtgcttatttaataattgccaaaatatttagactagagtaacttccggtgggtcaattngattgtgactttcttttgtggttttttngttcttcgattgctctctgttaaatattttcataattccccccacagaatacgtgtgtatatactgcaacttaaaaactaaaagcagtactcgaatgagttgttttaatgttgtacttttatctgtttgttttatgggttctcctgctgcctaatgacctttctgtttttataactgccggaaagccgcgaagcctctcgcatggggagctaggtcctcgctgcgctccgcacttgagtttattataaactctggggttctgagtaagttttgtttgaatacagcaacatgattgtctctttctattcttatcctaaaagactctgtctggcatcttttagttgtaccctcgtatctgcttctctaataaatgttatattttt

SEQ ID NO: 2120 - DNA, 575 bp, Homo sapiens
gggaacacctttacactggtacagagcttgtcaacagggaatagaaaagccatgatggaaagcaggtagtgaaaacttgtctaagtcactgtcactgaatgacacttcaccgatgaggataacgcagccctgtttctgtacctgatggactcaagactgctccagcatggcgtcctctccctggagtgtgtctaggaatacgtgtgcttgaacatcgatgatggccctgctttgaaataacagtgaagtaacctagaaccccctttctcttttctcttccttcagttctcttcacctcactgtcctacttttcctgttatctcagctattataaaatagggtaatcaaatcaagcagagagtttagtctttggtgggaggaagttttttggtttcccctttggctccagaataaggaaatgaaagaaaagtgagggaggaccccagcaggcacttccagctgctgttagccagttctcacgcatgctccccttttagttaccagttctgggggaagaaagtactctgtttgtattgaatgatcgccaccatctctccccctatctcttggtcgac

SEQ ID NO: 2121 - DNA, 580 bp, Homo sapiens
ggcggcagatgcctgcccggctgttggggtggcggtgacgacaggcagcaaaagaccagctggtcccagattcgctgctggagtgctggatggagcctttctctgccctctgtgacatttccaattttagataatgcctcacatctctgtccccccgggaccccctggagcccccatgatccctaagaagacagcttgaacctagaattcccctctccctccctagatctcacccccaggatgttgcggaggctgctggagcggccttgcacgctggccctgcttgtgggctcccagctggctgtcatgatgtacctgtcactggggggcttccgaagtctcagtgccctatttggccgagatcagggaccgacatttgactattctcaccctcgtgatgtctacagtaacctcagtcacctgcctggggggcccagggggtcctccagctcctcaaggtctgccctactgtccagaacgatctcctctcttagtgggtcctgtgtcggtgtcctttagcccagtgccatcactggcagagattgtggagcggaatccccgggtagaaccagggggccga

SEQ ID NO: 2122 - DNA, 1399 bp, Homo sapiens
gcggcggggctggcgcggctcctgttgctcctcgggctctcggccggcgggcccgcgccggcaggtgcagcgaagatgaaggtggtggaggagcccaacgcgtttggggtgaacaacccgttcttgcctcaggccagtcgcctccaggccaagagggatccttcacccgtgtctggacccgtgcatctcttccgactctcgggcaagtgcttcagcctggtggagtccacgtacaagtatgagttctgcccgttccacaacgtgacccagcacgagcagaccttccgctggaacgcctacagtgggatcctcggcatctggcacgagtgggagatcgccaacaacaccttcacgggcatgtggatgagggacggtgacgcctgccgttcccggagccggcagagcaaggtggagctggcgtgtggaaaaagcaaccggctggcccatgtgtccgagccgagcacctgcgtctacgcgctgacgttcgagacccccctcgtctgccacccccacgccttgctagtgtacccaaccctgccagaggccctgcagcggcagtgggaccaggtagagcaggacctggccgatgagctgatcaccccccagggccatgagaagttgctgaggaacactttttgaggatgctggctacttaaagaccccagaagaaaatgaacccacccagctggagggaggtcctgacagcttggggtttgagaccctggaaaactgcaggaaggctcataaagaactctcaaaggagatcaaaaggctgaaaggtttgctcacccagcacggcatcccctacacgaggcccacagaaacttccaacttggagcacttgggccacgagacgcccagagccaagtctccagagcagctgcggggtgacccaggactgcgtgggagtttgtgaccttgtggtgggagagcagaggtggacgcggccgagagccctacagagaagctggctggtaggacccgcagggaccagctgaccaggcttgtgctcagagaagcagacaaaacaaagattcaaggttttaattaattcccatactgataaaaataactccatgaattctgtaaaccattgcataaatgctatagtgtaaaaaaatttaaacaagtgttaactttaaacagttcgctacaagtaaatgattataaatactaccttctgggttaagaaaattccattcaaataacattctcatgtaaatactcaaacatacagattgaggcttccagaaattaatccacttgaggcgtccacgcggaacaaggtctgctgaccacagttacacacgtcgtgacaccactgtatcacggcgaatgtcgaacactaagagttacagacgacaggcaacaagaacatgcagagccggccgccagccca

SEQ ID NO: 2123 - DNA, 1240 bp, Homo sapiens
  misc_feature (1)...(1240): n = a,t,c or g
caagtctgcattgtcattttttaagagattggcaggcatatgcttttgtgatacttaggaaaagactatggatggcagcaaatgaaagtaaaggttctcaactgtgaatgaaatttagaaagataattcttcagcagttggttgattagagggttagtgcttttggaatatataacagtagacttgtattctttatgcactatacatatgatacgcactgacagaaaagcacagaagacatactgctaagagtttctttgtgcatttcactactgttctaggggactgctgtctctttggttccttttaggtttgtgttaggatgttgcacaagtaatcatttaatgttaaatgcaagtgtccaaagaaatgagtcttaaagttctttggtcatatttcactttagagttaggacaggagacagctaacctgacttccattttacaaatattagaaactttttcttcagtaacaaaaacagggaaggacaataaaaccatgaactattttgctttatgtctgtttttaaaaaataattgttttgaagtttgcttattagcttaataccttatagtacttttaaaaaatcatccttggtaattattgacttatcctagatccatgtacaattcagacttttatctgttagctttaataaaaatttaaaaccatctcatttcagaataaaataaacggaattacagttcatgcattagcatttttaagtgaagttctcttaataagattgccttttgtctaaccgaaatagggcatacagattagtttggatgggaaagtggtaagacttgagtttttaatactgtgcctatttccaaaagaagacttgatgtggctttttacattatgctttaaagatgttaatggaggatacatagtcttaaaacaatttgtttgggagtaagttttagtcggaaaaaggtgaagatatttatgctgagttatgttaagcaaattattttgagaccttttgctggtagacaaaaactgaggaaatgtttcacctaaatatattatggtcaatgaaaaaaccggactttagagtaaatgtgataaccaagtagatttgtggaacctttatttcctttaggtaatttatttttaaccctatggtggaaatggantccacccnttaatttttggcccaggaattataggcccatgggttttgggtttaccccctaaaggggcccttttnatgccctgggaggaaagacccagg

SEQ ID NO: 2124 - DNA, 1336 bp, Homo sapiens
ggcacgagagctcggctcctttgactaactggagataatggagatctcagacctaaagaagctctccctcctttgacccctttgctacatgttacatatttttagagaaactcctttgctacatgttacattttttcagaaaaacccatttgctacatgttacattttttcagaaaaacccatttgctacatgttacatgttttcagaataactatatatccggcacttgagtgtagtcttcagatgcttacagatgtgcacgctgttctataatcatttcttaatccttttgctcccctacttctaaaagtattatgctggatgtggtggaagctgtaaaacaggaatttcccagggcttgtaaggccaggcaggagatcacagtaccttttttaaggctcagaagcaatgtagagaatactggtggaatctcagtctgggtgcagaggttcatcctctttctcctctgctcctagaagcgagatgagcgcagtgtgaagagcacagctgtgcgggtggtagactttgggcagtgccacctttgaccatgagcaccatagcaccattgtctccactcgccattaccgagcaccagaagttcatcccttggtaagggaggggcaaggctgttcccaagtgtgtgagatgatgtgagggtgggggccacttaaggctcataacaccttttccctcccattctcacccagagttgggctggtcacagccttgtgatgtgtggagtataggctgcatcatctttgaatactatgtgggattcaccctcttccaggtaagtgatgggatgtcttacttgactgcctggcattcttctacctggttcctttgttttctgctgaggacctgcctactcagttctccacattgcctgccttcctggcagctgatccttagcatgcccttttcagtcccatgctcagtttctgtttttgtttcccagacccatgacaacagagagcatctagccatgatggaaaggatcttgggtcctatcccttcccggatgatccgaaagacaaggtgaaccttgagggggcactagttaactcttttccttttctctccacagaattggtctatttcacatcattttcttttttctttgatacctcctctccccccagttactttcagatggggaaataagggaattgtaacaagggtgaccttctgattcctcaacctccccttcccctctagaaagcagaaatatttttaccggggtcgcctggattgggatgagaacacatcagctgggcgctatgttcgtgagaactgcaaaccgctgcgggtgagctgggctcgggataaatagtg

SEQ ID NO: 2125 - DNA, 824 bp, Homo sapiens
tttttttttaaaatatagaagttctgagttagacctgtttagctcagaatagtgggctaaactaccataaaattctctgtatatcttaaatggtaatgggtcaaaaactccagaaaatcatcagttgataacacacctacagataagtgcatgggtaggaggggatagccaagtgcccatgataatttgacctcagtaaattaaactgggcaatacacatatttgctattctgatactgcattagacttataaaattccatctaataagcattcataaaactggacctctctgtatatatctagcttagacagggatagggaaaagaataactgaagaaactagcttacaatagctaggtttcgtcaggcttattctatccagccagaaaccaccaccagagagaagctgagccattcagctgtctgtctcctctccctctgtttgaatagtcatgcctaggccttgcctgcagaccaaagcctgtttgttaggagcaggaagagactttgaaaataaaaggggggtgggggaaaccaaagttaaaaaaaattgtggggggggcagggaatggggagaatcacgctttgtatttttttctttcaaatatttatctaaccacatgtatatacaactttctaaacttgaagtctgaatttgaaatgacgaatctttaaaccaaaagatacatataccattgacagagacacctatctatacaaacctagcccacgggaggctacatctgtagcaataaggatgggtgcctttccagaacggaactcattaagtacccaatctctttctggttgactcttgtctcca

SEQ ID NO: 2126 - DNA, 680 bp, Homo sapiens
ccgcgtcgactttttttttttttttgatcaataaatcaatttatttaaaagaatatgttacaattaattacactaagtgacattaccaaacaattttagagtggttagctctagaacaaggaatgaaagaaacaatgttagccattattgtgtctgtgtattttctcttcacatttcttaaatcacaaataaaaaatacaagatactgcagtgaaaatacaattagagtttctctgaaataaattaaatgtgcatggcctgggaaaaactgaagcccagctcactggcttaaaagggggtcatgatataaaattaatgtccaagtttagcaggcggccaagtgcccccaccccgtatcactcccctctttgattctattccttaccacagccctgaccttcccacataccctagattattgctgaggagtgagctgatgctgtcctggcagcaaagaggcctggcgtgatgtgctcaggtttaggggaacaggaagtcaagaggtggacctggaagatggggagctagagaagcatacccactatctctcttctccctccctaaccctgagtgttctatcacatcatcctcccaaaggaagctactgtgacacaatgaagctggtgaagaaacagcagtatgctggggtcaacagatccaacagcttctactgctgaatg

SEQ ID NO: 2127 - DNA, 1469 bp, Homo sapiens
gtgaagcatgtggacttctatgctttctcctactattacgaccttgcagctggtgtgggcctcatagatgcggagaagggaggcagcctggtggtgggggacttcgagatcgcagccaagtacgtgtgtcggaccctggagacacagccgcagagcagccccttctcatgcatggacctcacctacgtcagcctgctactccaggagttcggctttcccaggagcaaagtgctgaagctcactcggaaaattgacaatgttgagaccagctgggctctgggggccatttttcattacatcgactccctgaacagacagaagagtccagcctcatagtggccgagccattccctggtccccgtcagcagtgtctgtgtgtctgcataaaccctcctgtcctggacgtgacttcatcctgaggagccacagcacaggccgtgctgggcactttctgcacactggctctgggacttgcagaaggcctggtgctgccctggcatcagcctcttccagtcacatctggccagagggctgtctggacctggggccctgctcaatgccacctgtctgcctgggctccaagtgggcaggaccaggacagaaccacaggcacacactgagggggcagtgtggctccctgcctgtcccatccccatgccccgtccgcggggctgtggctgctgctgtgcatgtccctgcgatgggagtcttgtctcccagcctgtcagtttcctccccagggcagagctccccttcctgcgagagtctgggaggcggtgcaggctgtcctggctgctctggggaagccgagggacagccataacacccccgggacagtaggtctgggcggcaccactgggaactctggacttgagtgtgtttgcctcttccttgggtatgaatgtgtgagttcacccagaggcctgctctcctcacacattgtgtggtttggggttaatgatggagggagacacctcctcatagacggcaggtgccccacctttcagggagtctcccagcatgggcggatgccgggcatgagctgctgtaaactatttgtgggctgtgctgcttgagtgacgtctctgtcgtgtgggtgccaagtgcttgtgtagaaactgtgttctgagcccccttttctggacaccaactgtgtcctgtgaatgtatcgctactgtgagctgttcccgcctagccagggccatgtcttaggtgcagctgtgccacgggtcagctgagccacagtcccagaaccaagctctcggtgtctcgggccaccatccgcccacctcgggctgaccccacctcctccatggacagtgtgagccccgggccgtgcatcctgctcagtgtggcgtcagtgtcggggctgagccccttgagctgcttcagtgaatgtacagtgcccggcacgagctgaacctcatgtgttccactcccaataaaaggttgacagggaaaaaaaaaaa

SEQ ID NO: 2128 - DNA, 983 bp, Homo sapiens
  misc_feature (1)...(983): n = a,t,c or g
cacagccagacagctatgctaacagtctcaagttttcttccagtttgtttagatttaaatgatacatttgtaactttttaaaaactaaattttggttggatttttcatgaaaacctcttttttctttatcccctaaaaaatggtttgaaatgtcattgttatttaaaaacccgatgtgttggaacttctttaatctgctgtttcctctttttccccccctttgaaagtttcgcatagtgtaaacattcactatgtcttttaccttccctgctcctcccatctgggaggcgctgatgctattacccagtgctgaataatggcactctaaaggtatgggaaggaaggagcccaaggcaaccacctgctgtcctttcagccttcctttggagactgctccatcagtgccgaggtgtgtgggaacaggcttcactgcaccgccatcttactgagttgcttcacgtgaggaaaagggggctttggccctgtgactcagttccacattttggattgcatactggaaaagaagccaatcttcttgctagtaaaccagcaacccggctgtatacagtggtgacccaagcaatggatataaacctaaaaatctgagggaggggagaggtggaatacagtagttcttggaatctgaagtctcctatttgatcaggttatttcctgggacttggcaaaaatctgattggtggggatctcctaggacctagtggacatctggtattaatttaatctcaggaaaaacaagaaattaacccagagagagtctgggttctggaattcagcgtagtacctccagaccgtggtgtctggcctccatttttgtctgtcattcagctctgacttacagctgcagtcacctttgctataaggcacctgggtagaagggtggatgggcttcacatcaattttnnncttcctttagggtgggggattggtttggctttcttttgttgtggctttttgttttattt

SEQ ID NO: 2129 - DNA, 447 bp, Homo sapiens
  misc_feature (1)...(447): n = a,t,c or g
tttgatanccgntatgacnnnnnnnnnnnnnnnnnnnnnnnnnnnnnnnnnnnnnnnnnnnnnnnnnnnnnnnnnnggcacgagnnnnnnnnnnnnnnnnnnnnnnnnnnnnnnnnnnnnnnnnnnnnnnnnnnnnnnnnnnnnnnnnnacattttccttaatttagattggcctttgccacaattaacccaaaccagtgaggctttgcagtcaatcgtgatgagacctgcaagggcatagagatggtttcaccacgtgtttcagtcatggatcggccactttttgtgtagtcttgattatgtgtcactctttcacacctgtcaactggggtgaagcagttgtgacagtccaatggactttgtgaatgggcaagtctaacgtggacctgagacagaggcacacttggggcgtgcactgaatgggtgtcaggctcccagacctctggg

SEQ ID NO: 2130 - DNA, 361 bp, Homo sapiens
ggcaaaagctcaataagcacctggcagaggccttagagcagcttaactctggctactatgtatctgggagctcctcaggcttccaggggggccagatcacactcagcatgcagaagtttgagatgctgaatgcagagttagaggaaaaccaggaactggccaacagccgtatggcagagctggagaaactgcaggccgaacttcagggggctgtgcggaccaatgagcgcctcaaggtggccctgcggagccttcctgaggaggtagtgcgggagacgggggagtaccgcatgctgcaggcccaattctcactgctctacaacgagtctctgcaagtgaagacccagctagacgaggctcg

SEQ ID NO: 2131 - DNA, 434 bp, Homo sapiens
gggcgtgagagtatctggcttgctgtaagtgccgcttcttcttccgaggactcatctgtatcctcctgattggtgaggttcaggctgggggtgctactagagcactggtactcctggagggatggagtgtcccctttgtcaatactgtccagtgagcgcctgcgaactccccagttgaaattgtccatactttcaccctctgcatcttccaattcaacatctaaaaagtcaaaatccttaaaaacaccaaactgttgttcactgctattatcttccacagctacttcttcctcttgatttatgtcttctgttgtagaaattaggctagtctgttggtcaccgacttccaaatcctcattagaagaaaatacaactgatgggttctttggggaggccagattctgggaccacagagagaaagcacattcattagc

SEQ ID NO: 2132 - DNA, 1996 bp, Homo sapiens
ctgtggcatctcctgtcacattgggaaatgaagaattccaggacatgggcttggagggcgccggtggagctatttcttctctgtgctgccctgggctgtctcagtttgcctggctccagaggtgaaaggccacattcctttgggtcaaatgcagtcaacaagagctttgctaagagcagacagatgcggagtgtggatgttaccctgatgcccattgattgtgagctgtctagttggtcctcttggaccacatgtgacccctgtcagaagaaaaggtacaggtatgcctacttgctccagccctctcagttccatggggaaccgtgcaacttctctgacaaggaagtcgaagactgtgttaccaacagaccatgcggaagtcaagtgcgatgtgaaggctttgtgtgtgcacagacaggaaggtgtgtaaaccgcagacttctttgcaatggggacaatgactgtggagaccagtcagatgaagcaaactgtagaaggatttataaaaaatgtcagcatgaaatggaccaatactggggaattggcagtctggccagtgggataaatttgttcacaaacagttttgagggcccagttcttgatcacaggtattatgcaggtggatgctccccgcattacatcctgaacacgaggtttaggaagccctacaatgtggaaagctacacgccacagacccaaggcaaatacgaattcatattaaaagagtatgaatcatactcagattttgaacgcaatgtcacagagaaaatggcaagcaagtctggtttcagttttggttttaaaatacctggaatatttgaacttggcatcagtagtcaaagtgatcgaggcaaacactatattaggagaaccaaacgattctctcatactaaaagcgtatttctgcatgcacgctctgaccttgaagtagcacattacaagctgaaacccagaagcctcatgctccattacgagttccttcagagagttaagcggctgcccctggagtacagctacggggaatacagagatctcttccgtgattttgggacccactacatcacagaggctgtgcttgggggcatttatgaatacaccctcgttatgaacaaagaggccatggagagaggagattatactcttaacaacgtccatgcctgtgccaaaaatgattttaaaattggtggtgccattgaagaggtctacgtcagtctgggtgtgtctgtaggcaaatgcagaggtattctgaatgaaataaaagacagaaacaagagggacaccatggtggaggacttggtggtcctggtacgaggaggggcaagtgagcacatcaccaccctggcataccaggagctgccgacggcggacctgatgcaggagtggggagacgctgtgcagtacaacccagccatcatcaaagttaaggtggagcctctgtatgaactagtgacagccacagattttgcctattccagcacagtgaggcagaacatgaagcaggcactggaggagttccagaaggaagttagttcctgccactgtgctccctgccaaggaaatggagtccctgtcctgaaaggatcacgctgtgactgcatctgtcctgttggatcccaaggcctagcctgtgaggtctcctatcggaagaatacccccattgatgggaagtggaattgctggtcaaattggtcttcatgctctggaagacgtaagacaagacaaaggcagtgtaacaatccacctcctcaaaatgggggtagcccctgttcaggccctgcttcagaaacacttgactgctcctagcagatgatacagcagtgggctacatacaatgagagccctgagccctcaagaactcacgccagctcagccctacaccagtttccacctggagttcatgcaagggcaaaaggcagtgccatgcaagctgtttaaaataaagatgttaccttgtaaaatgcaagttgatttaaataaatactgagttaaaggctta

SEQ ID NO: 2133 - DNA, 640 bp, Homo sapiens
atttttatttttaaaacattttatgagtgataaaatatagtctttttctatcagtatgttcacacttcctggcctctcattgggaagctgtaagatgtccttcaataagatcctgaacacgcgacagaataatctcattagagctgctgcaattttctggaccatatggtgggtctatagtcaggaccccagccacacagagagtccttggagcgtctccctgttcagtgatggggatgtggttcttctcaagccatttctttaggctgttctttctctcttccagatcctctgggctgtatgctttgcagtctccagacgtgaacaaatgcatcagcttctccctcactctatggtccccttcattcatagtttcaacagtctgcacagcatgtcccataattccggtcacagacatgctgccatcttcaaggaagttcacaaggacaatattggcagagactgggtctgtagttaaaacccatcctttatactcattcttctcactggctgtcactcggacctctttgtaaatgtaatcttgccattctaaggggcctttcttcatccattcactcatgattgccacctggctaaatcagttaaaaaactcctcgcaactctgggtactcagcaaccc

SEQ ID NO: 2134 - DNA, 1132 bp, Homo sapiens
gaatctatgtgcctgacaactcaacacaccgcagggctaatgttcccaccagagctccaactgaacaaccagacagacaactctcatcatcctccagagagaaaataggccgtgtctcaaagaaaggttcttggtctatgcctctggtctgtgggctggcagggcaaccataccatacccccgccagtcctcggctcctgctgcaaagttggccatgtttcacagggaaacttttggaagagtggctgcttatgagattccaaaatgaagtgttggccaacaccgctcatggccatcctggattttcccggctggcttcccttcctgctcgcctccctgaacaggggagaaagcttaacctctcttctcctctccaaacctttcaccttgaatgggtaatgtttggtgggggctgttccttcttggagatgccttgagtcggaacattttgagaacatggaggaaggatgaagaagtgaaaatgacaataatgactctcaagaggctggcgatgtgacatggcaaatgtagaactgacttaaattgaacaaaccctcactgagcacctctgatgttgagcacctgctgaatactgagcactgaatgggggagggggaggggagcacggggtgagtcaacctgggactcggtctcagggatatgcctaccaatagcgggtatcgtaaggcatgtacccaaacataacggatgtaaggcagaaagtgatcggagaaggaatgagaaagtgtgcgtgatgttaatgaaaagtcatatgcagctagagcagacccaggaaagctttctggaagagattgcatctgaggaaattcaggaaggatctttgtagattggggggagattctaaattgaaggggtgatagggtgaggggccagagggaagtctgctgtgttctcatgtaggatgtcagccctccctgcaacttctctttttggccaatgtcttttcactttcctgaccctttagaatcatccccagccagacgcaatcatggaagttgccttattgtcactggttaagaacttggcgagattgaagggcttttgttattgttgttggatatttttgtttcccataaaagcacatcatttcaaccctaaaaaaaaaaaaaaa

SEQ ID NO: 2135 - DNA, 423 bp, Homo sapiens
gggttccatttgtggaggattaggcaagaaagaagttttgtagaaaataagggaaatgagtatgtttaagggaagtgaacgaacagggtgaaaacagaggcagagttacataacgggagaacaaaaggtagaggatgtggagaaagcagagataaaatcagccatattaagatattattttatttcgtctctctgacactctgtccctgctaagtttccacccagccttcctgtaaccaccttcctaaggatgactatggtcacattgttacagactctcacccacttatcttcctttcttttcaggggcaattccaaaagtcttcagatttccaaaaggaaggactgcagcagacatttctgcccccagaaaggcagggatagaaaccacagaggccacggaaatgatgggtgcccttgtgg

SEQ ID NO: 2136 - DNA, 783 bp, Homo sapiens
  misc_feature (1)...(783): n = a,t,c or g
gttcaccaagaggctacctggctacataatcgtaatgactctactgctcaaaccatctggggctccatcagtggatacctacaaagtatgacatggtttttacctttcttcggaccctaagtggtcatttaattgctattacttttggcgtattgtgtttttaaccttttggtaaagtttgtgtctttcaggtttcaatagctccaagtcaagctaatgatggcccaagaattccaacccataacatcccagggagcaccccagtccctacaggtctttaggacagccagtgagagatttccccaccccctaaagttagggcagggacgacatccctgttcagcaggaagtcgcttcagaagatgagatcttcagccctttctccttaagaatagagggtgaaatctctcagggggaaatagagatagaacagaaatggaatggggttgcttcttcataatacttaaccatgccttctacttaaagttctaggaactggccttaggaaatctaactatgaaaccaaggttatggagtatcccacctcaggaaggaacactgaacaactgattgacagtcttcttgccgccagccagaccaccaagtgggccctttaaccaagagaaccagcgcaaccaggttacggttgacccgcttttccttacctttcatgtggttttgccccagccccaggctggcntactttatttcntgatgttcaatttcccaagttttcgtntaattnaaaacnttttttgcaagnttttttnagggggggccaaa

SEQ ID NO: 2137 - DNA, 808 bp, Homo sapiens
taagatacgaacgagaaacctgatttattgctcatccttcccttgcctccctaatggcaagcaaaactctgaacatctgaaaaggatgtagttctggacaaatcctgactacccagaggaaactcactgtgagattgctgttgatttgaagggtgctttcactaaggttatattttaaagtagaataacacatgctgagtgtaaactggctttggattggtcagctgcagtagtacaaaaacagcatagaatttgagaaaactaaaactgctatgagatagctatgagaaaactaaaactgctatgagatagaaatgatgtaaaattatgtggaaagttttccctcatatactcacatacagccctttgaagggctctggctctgaccggttgatggccttgagcgagatgaaatcatgaaattgagtcaaatcaatttgacattgaaatgacaagaggaaactcttaaatacataaaaacaagctctcatttgcctaggatagatactgtcttaaaaataaagactgaacctagatgttctgagcactagcaacaaggtattttaacaagtttaaaggaattctctgaaaaagttataaaattattctaggaaacataaccataatagtgttttaagggactttcacctggggattttatattcatgaacagagtgtattctgtatttaaaatgtctcatttgtgggaattggatgacatgttttttgataaatttattcacaatataaattgactttttattctaggaccatgtgaataatgggttccattgcacaaatacaaatg

SEQ ID NO: 2138 - DNA, 530 bp, Homo sapiens
  misc_feature (1)...(530): n = a,t,c or g
gtctttttattcttggaagaacatactctattccggaggggaaaatatcaaattagttcagcctgctacctgctcccatagaagatgggggaagctggctctttcatcggtgttttcgtctgtagccgcccccttccccaaccttgtagttgatttaaaaggatggaagaaagtaccgtgctacttccaatgctgtcattcagtgttcaccccagggcagtgtgctaggacacattcctgggacttaaatcctttagttcctttaagacaacaaacctataagataggtattattatctcgattttacatattaaaaaataatgtaagcctttttgtatttgcattgttttgctttgttctttaaatgtctgctttaaaaaaagaagtggggtangtaaaggatcaaaaaaggctggnatcccaaaagtaatgataaatgttccaaaaactctttaaaactttttancctccatctaaacaggatgcatctgntacccatgccaantncacaaaaggnanttgnntcttc

SEQ ID NO: 2139 - DNA, 3024 bp, Homo sapiens
tttaaaaagattttctggttttgaacaaacatcctctgtggatgcaccaagcccaaagttgactacctttgaccaacccagtgagaaggcctttgctggtccccgcagtgaggaactggcaggaacgggcagcctcctccccgctggactgcactgccgggggccggtgggcaggctccacaggcagccccctgtctgtggccagacaggcccgtccctggtgactcgggcttatagactgtggtttagaactgcagaaggagagaggagagtgggcccagggaacacccaccaggcgctgctctgaccagtcagagaacgtgaggcagcttcccccatagggatctgcaccgagaaggtgtggaaggcacaagccaagagtgacggtaccagagatcccagagggcgtggctcgcggcggccacagcaggcgcagcgctgacctggtgtgggttccccccttgaatgagaaagagatcctgattctgctgtgataaaaaagcaaagaaagacgatttttggtttaaaaagaagccactcaagggttaaaatagttattttaagttaacaaagaaaattaatcttcaaataagctgacactatctggaaaactcatctgtccctaaagcccacaatgcgtccactgcttcgtcctcccatggaacctgagcctgacgtgaaggagtcagacgtgtgacagaggaagagtctgagaagagaagacacctttacagaatgtacagcgagagagccggcctggcccccgggttacagtaagatgcacgggtcctttcagtctcacggactccagacggccacgcaggctgctcagatggacgtctccttcctatccctgctgggcgatggctttgccggctccttgcctgcctttggctgctctttagctgcttttggctcaaggacgccgtctctgggcggctggacggcacccccgcgccactcaggctcctcgtcctcctgcgcctgctgctcggccttggctcgctgcatctggagcagccgcagctgcacgcgcagctcgatgatggcctcgcgctcctcatgaattgcttgattcaaatgattgttctttatttccagctcttcgttctgtctctgtaagtcttccagaatgatctgcagctcctcctcatcctcactctcgctctcgctctcggaggagtactcctcagtctcacttcggccgtgctgctggcgactctgaatttcagcaatctcagctctgaggcgttcaatctcttctttttctgaggcaatctgccggcgcagaaactgctccatggccaggagctcctcctgttcagtcaggatctcattctcctgagcaaggagaatatttataacttcttcattttcattcatctcttctttggaaacatcctcttttgaaagactggctatctcttgtgcaatcttggtttcacactcctgtcttttagcttctctcagttttcttttgagggctgtcaaaattctttgtacttcccataatctttcttctttagacaaatcctttatcccaccctgcagatctcgatgtaaacaattcaaaagaaactcctgtctcctgatctcctccttgatgcccgcctgggtctctggcagcgtgggcatcgtggccatgttagaccatcgcagaggtttcatcacttgctttagtaccacatttccaaagagttcttgcacatgtgtgaaaaacacatacaggactcgattgctgatctgcacagttgggctgagcactatagaaatgttctgtatattcatttttgtttccagttcctttgcaatgacatggtccatgtgcacaatgagccaagaaatcagaagatagttacattctggcagttctttgagtaaacgctggaattcctgcactttctcagtctccgtggtcctcccacaagcctcttcaaatctgggcataagctctttggtaagcaaattctctggaaggtctcgcaaatactgcttcagcaaactggctacagtgttaggctcatagtcttccaagtttgtagactcctcccggtcataggctgcttttagctcatccacctttgatttaattcctgatactctgtagatgccttcacacttcatgccatacttctctacgtaatctatacattcacggaaaacggctggcagccgaatgccatcatacatcatggtcctctctactgcatcagccaaaggaattccaaaaatgggtttgagatttggaacatcaatctgaggcacctctggctcctgaattggctttttctttttcttcttttccttccactgtttaacaacatcagctgctgtcaagtcttttgacttcttctctttatgtttttcttctttgtgcttttcttctttatgcttttcttctttgggtttctcttttattttaaaatccttttccttctttttagaaaagctgggcttcttgaaaacatggattcccttggacctcttcattttagaaggactttctgcctcatctccagagctatcttcctgaaaggctgcatagccttcagtcctcttttcctttttcttaaatttcccttttttcttcccatgatctttctcatcatcagacactacatcaggaggctcatggaggatgtcatggggaggtgagggctcgccagtgcggtacaatccaggaaacttagtagggctgatctcttcagagctgggggtcccgggtaagccccgctggcccatgcctccaccctgcggtgttcactggggctgctggtggggggcaggaagcactcagtcatgctgatgccctgactaggaagggacgaggtcttctctgttacctatccattacaccccggtgtggtgctggcgaaggtggctcgcgggcatctcctgcaacggccttgaggatggaaagggctttcctctccacgctctggccagcctgcgcctcagctcccgaagttgagagctttccttgcgccagcgtgctttagtcgttccaaccagttaaaccagact

SEQ ID NO: 2140 - DNA, 505 bp, Homo sapiens
  misc_feature (1)...(505): n = a,t,c or g
ggagagagctagcaccatgagcttcaataccctggcactaaaaaatccgtgttgtcccagtgtcccctgcgcctcacatgcaggaacagcagcaggaggacaccaagctccctgggaggggccaggccgtgggcctcactctaatactccactggcaggtgccctaaagccaatctctaaacatgagctgaggtgaactcactcctcattcagcagatgtctaccacggataactgagcagagcccactagctgttactcagagaaaaagagcaactctgccttgcaaatcctgaaccaccacaccaggacacgggtgctgcactcttacttctctanagaggctgcccaaatccccagcatgcagagctgccgatgcctcacagtgctcgtancttttcttccttgngaccctgggatcatnaaggcangggaagnctgcagcaaatgccctctcanctcaacttnggtttannttcgaanccttccnggnaaagaggatgggg

SEQ ID NO: 2141 - DNA, 2358 bp, Homo sapiens
aattcggaacgaggcagggctgagccatcctgcgtgtcttgcgctcggtggaaatgcccagccgagggacgcgaccagaggacagctctgtgctgatccccaccgacaattcgaccccacacaaggaggatctaagcagcaagattaaagaacaaaaaattgtggtggatgaactttctaaccttaagaagaataggaccgaacagaaatgctgtctgagagcaagaatatattggatgaactgaaaaaagaataccaagaaatagaaaacttagacaagaccaaaatcaagaaatagtcaacctgatttcacataacaatgtgtggcatttgttgttctgtaaacttttctgctgagcatttcagtcaagatttaaaagaggacttactatataatcttaaacagcggggacccaatagtagtaaacaattgttaaagtctgatgttaactaccagtgtttattttctgctcacgtcctacacttgaggggtgttttgactacccagcctgtggaagatgaaagaggcaatgtgttctatggaatggagaaatttttagtggaataaaggttgagctgaagagatgcactcaaattttgtttaattatctttcctcctgtaagaatgaatctgagattttgtcactcttctcagaagtacaaggtccctggtcatttatatattatcaagcatctagtcattatttatggtttggtagggatttttttggtcgccgtagcttgctttggcattttagtaatttgggcaagagtttctgcctctcttcagttgggcacccaaacatctggaattggcaaatcagtggcaagaagttccagcatctggactttttcagaattgatcttaagtctactgtcatttccagatgcattattttacaactgtatccttggaaatatatttctagggagaatattattgaagaaaatgttaatagcctgagtcaaatttcagcagacttaccagcatttgtatcagtggtagcaaatgaagccaaactgtatcttgaaaaacctgttgttcctttaaatatgatgttgccacaagctgcattggagactcattgcagtaatatttccaatgtgccacctacaagagagatacttcaagtctttcttactgatgtacacatgaaggaagtaattcagcagttcattgatgtcctgagtgtagcagtcaagaaacgtgtcttgtgtttacctagggatgaaaacctgacagcaaatgaagttttgaaaacgtgtgataggaaagcaaatgttgcaatcctgttttctgggggcattgattccatggttattgcaacccttgctgaccgtcatattcctttagatgaaccactcgtccttcttaatgtagctttcatagctgaagaaaagaccatgccaactacctttaacagagaagggaataaacagaaaaataaatgtgaaataccttaccctaaaaatttctctaaagatgttgctgctgctgctgctgacagtcctaataaacatgtcagtgtaccagatcgaatcacaggaagggcgggactaaaggaactacaagctgttagcccttcccgaatttggaattttgttgaaattaatgtttctatggaagaactgcagaaattaagaagaactcgaatatgtcacttaattcggccattggatacagttttggatgatagcattggctgtgcagtctggtttgcttctagaggaattggttggttagtggcccaggaaggagtgaaatcctatcagagcaatgcaaaggtagttctcactggaattggtgcagatgagcaacttgcaggttattctcgtcatcgtgtccgctttcagtcgcatgggctggaaggattgaataaggaaataatgatggaactgggtcgaatttcttctagaaatcttggtcgtgatgacagagttattggtgatcatggaaaagaagcaagatttcctttcctggatgaaaatgttgtctcctttctaaattctctgccgatttgggaaaaagcaaacttgactttaccccgaggaattggtgaaaaattacttttacgccttgcagctgtggaacttggtcttacagcctctgctcttctcgccaaacgggccatgcagtttggatcaagaattgcaaaaatggaaaaaattaatgaaaaggcatctgataaatgtggacggctccaaatcatgtccttagaaaatctttctattgaaaaggagactaaattgtaatgtgattcacaatgtaacaatataaaaataagtttttatataattatataaaagtaagatactctgctgctttactattgtataatatagtagttttaaagttca

SEQ ID NO: 2142 - DNA, 4015 bp, Homo sapiens
  misc_feature (1)...(4015): n = a,t,c or g
ccgaggcgctccctgggatcacatggtacctgctccagtgccgcgtgcggcccgggaaccctgggctgctggcgcctgcgcagagccctctgtcccagggaaaggctcgggcaaaaggcggctgagattggcagagtgaaatattactgccgagggaacgtagcagggcacacgtctcgcctctttgcgactcggtgccccgtttctccccatcacctacttacttcctggttgcaacctctcttcctctgggacttttgcaccgggagctccagattcgctaccccgcagcgctgcggagccggcaggcagaggcaccccgtacactgcagagacccgaccctccttgctaccttctagccagaactactgcaggctgattccccctacacactctctctgctcttcccatgcaaagcagaactccgttgcctcaacggtccaacccttctgcagggctgcagtccggncaaccccaagaccttgctgcagggtgcttcggatcctgatcgtgagtcgcggggtccactccccgcccttagccagtgcccagggggcaacagcggcgatcgcaacctctagtttgagtcaaggtccagtttgaatgaccgctctcagctggtgaagacatgacgaccctggactccaacaacaacacaggtggcgtcatcacctacattggctccagtggctcctccccaagccgcaccagccctgaatccctctatagtgacaactccaatggcagcttccagtccctgacccaaggctgtcccacctacttcccaccatcccccactggctccctcacccaagacccggctcgctcctttgggagcattccacccagcctgagtgatgacggctccccttcttcctcatcttcctcgtcgtcatcctcctcctccttctataatgggagcccccctgggagtctacaagtggccatggaggacagcagccgagtgtcccccagcaagagcaccagcaacatcaccaagctgaatggcatggtgttactgtgtaaagtgtgtggggacgttgcctcgggcttccactacggtgtgcacgcctgcgagggctgcaagggctttttccgtcggagcatccagcagaacatccagtacaaaaggtgtctgaagaatgagaattgctccatcgtccgcatcaatcgcaaccgctgccagcaatgtcgcttcaagaagtgtctctctgtgggcatgtctcgagacgctgtgcgttttgggcgcatccccaaacgagagaagcagcggatgcttgctgagatgcagagtgccatgaacctggccaacaaccagttgagcagccagtgcccgctggagacttcacccacccagcaccccaccccaggccccatgggcccctcgccaccccctgctccggtcccctcacccctggtgggcttctcccagtttccacaacagctgacgcctcccagatccccaagccctgagcccacagtggaggatgtgatatcccaggtggcccgggcccatcgagagatcttcacctacgcccatgacaagctgggcagctcacctggcaacttcaatgccaaccatgcatcaggtagccctccagccaccaccccacatcgctgggaaaatcagggctgcccacctgcccccaatgacaacaacaccttggctgcccagcgtcataacgaggccctaaatggtctgcgccaggctccctcctcctaccctcccacctggcctcctggccctgcacaccacagctgccaccagtccaacagcaacgggcaccgtctatgccccacccacgtgtatgcagccccagaaggcaaggcacctgccaacagtccccggcagggcaactcaaagaatgttctgctgggcatgtcctatgaacatgtacccgcatggacgcagtgggcgaacggtgcaggagatctgggaggatttctccatgagcttcacgcccgctgtgcgggaggtggtagagtttgccaaacacatcccgggcttccgtgacctttctcagcatgaccaagtcaccctgcttaaggctggcacctttgaggtgctgatggtgcgctttgcttcgttgttcaacgtgaaggaccagacagtgatgttcctaagccgcaccacctacagcctgcaggagcttggtgccatgggcatgggagacctgctcagtgccatgttcgacttcagcgagaagctcgaactccctggcgcttaccgaggaggagctgggcctcttcaccgcggtggtgcttgtctctgcagaccgctcgggcatggagaattccgcttcggtggagcagctccaggagacgctgctgcgggctctttcgggctctggtgctgaagaaccggcccttggaaaattccccgcttcaccaaagctgctgctcaaactgccgggactgcggaccctgaacaaacatgcattccgaagaagctgctgtccttccgggtggacgcccagtgaccccgcccgggccggccttctgccgctgcccccttgtacagaatcgaactctgcacttctctctccttcatcagcagcttgggccagaagtgcggaatgttgtgtttgcggtggttgacgtagtgctcgaacgccagcaggtacgcctcctgactcttctcgatcttgtccacacacagcaggcccgagcggtctgttgacattagcagcacagcctgcagcagagccacttccgtgtcatccaggttaaaggcagagagtgacttgcccagttcaaagatggcgtcggagactacgcccaggccgccattcttgagctgctcccgcttgacagccatctccccactcagcgtcagggtgtcgctctcagggtcgtagcggacagccgcccgcagggacatgatctccatgcagcaccccttcaggaggatgatctggtcttcgcaaggcagctcggagaacatgggcagttttttggcaaagtccaccacacgggtgatgaccggggtgatgatcttggtaaactcgctgaaggcttccaggtccaccttgtctccgtccggcatggagacaatgggtgactggccaatgtcatcgggcaggaatttccgcctctgtttccaatggctgccctgggcattggtgctgcgatgggcctctgtggcaatgtggatcagatcccactcttcaggagtgggctctggtcgctgctgcagtgatcggatcatctcctccttccgccgccgctcccggttctgctcaatcagcttacgcttggccacccgcttcgagtcatctagaaccaagtccatggccatgcccacggcgatgcacttcttgaagcggcacagctggcactgattgcgggtgatcttgtcaatgacacagcagctgtcatatttgcaggaataggtgggatggaggttcttctggattgtgcggcgaaagaagcccttgcagccctcacaagtgatacagcggtagtgataaccagttgccttgtccccacacacgacacactgctcgtctttgtccaggtaactagggatataccctgacatgctggttttcagggaacattggccgttctttctttttcgctttccatctggtgacctggcactgttctcctctgggtctgacccacactccaccttgcttggcttctgttccattcacttcaattccatccaggatgccctccagcacgccaagagactggggtgggcacactggcccccccggcacacccacaggccacccaccccctgccacccaggccctagggcacagcacccatgatacccgcctcagcacttggcctttcacaccatgccctgcgccccaaggggggcgggcggtgggaggggccagggagtggcaggtgggagggctgggggcaagctgggtttgtgggtcccgggctgtgtgctgggggagtagcttcggagtcttgtcctgtccagagatccctgtggagagaagagagaggcaggggtaagaaggtgtcacggtaggaaggtgggtaggatcc

SEQ ID NO: 2143 - DNA, 806 bp, Homo sapiens
tttttttttttcagcgtgggcggtcgttggtatacatcatacatttattagtgattatccctctgaaatcagcaacaatattaaaaaaaataatgattgcactacttggtcaagcagaactagcaactttcattttaaaaaaagtacaaatctgttaaaaatttcaatcagtatacacatatatataatacaacatactagttatgttaaatgctacaaaccaatgtgaatcccatggaatgggaaaaaaccacacatttaagctttaagaaccatttttttctctatatattagcattttctcaaatacatacatgggaaaaatgaggtaactgtaaaatgtgcaaggaacagggcccccaaaattacatatatttctacatatatatgtaattttatatatatataaaacctttctaacacagaacacaggcgctgggcccagccagggctgggggaaggtgcccactgtcatgcctaggccagaagttggtaaataagagagtaaacaatggcaagcccccaccacaggaaatcattggtaacatggcatctatagcaaggtcggcagatcacaaacatcctaagtaattgttgtataaatcttgttttttaatgatgatctttttaaatgctgtgtttcccccccaatagctgcttgttggaatcactgctgcagccgacacacaatctgtgagcctgtttccgcctgccccaggaactgtaaggggtttgaaaacgttttgttggggtcgggaagggaggggttggagagggtggttctgtgtaaaacacgtgggttttca

SEQ ID NO: 2144 - DNA, 869 bp, Homo sapiens
gaaattcaggacacatacatttatagagtgtgaggctgtgcatacgtacattcatcccttaatgttctcaaggaggcccaggatccccaaaatattataagcattgcagtcagatgatatagcactagcaaagcattcatccctttccatataacaggagggaggggaagaaggaagtttccatgtgcaggcaatacgtgagagcatgggcaagtgaggatttgtatgctccctgtagccagaggtgaaatattcaacgcttttattttttctccccgtcttcaatgacctcccatttggacccatagtttatttatagagagcacacactccctaattgtcagatggtttttttgggaaaactcttagatagtacagtgagttgtgaccctccaaaggatcacaagtacataaacagatacaaagtatttatgtggtattaaaatttcatggtgatggtgcaagggagagatgattaggaagaaaatgtcttaaacggctgtaattgagaaatactgatctagagtcatttcctgcttcttaaattgttcgttttctcttccctgggtattttctcatttccaaagacccagagtctcagagccaggttaagtggaagaaactttgagaggtttcttaatcaattccttctatctctcaaaccatgccagtaacttccttggtgaaaaaatctatactcctctcacagttcttcgggcatggaaattctatagcattctttggtataaccaacccactggaaccctccacaacatcttgaattccattcaacttcgaggctggaagtattctttttgagtttccagtattatcttttctagtgttcccacttttaggaaaggtcccaa

SEQ ID NO: 2145 - DNA, 1969 bp, Homo sapiens
gaagaaatacaggaatatcagggattcttcctggttccttattccggtttgcagtccccccagcacttgggagtaatttgaccgacaatgtcatgatcacagtagatattattccttcaggttggaattcagctgatggtaaaagtgataaaactaaaagtgcgccttcaagagatccagaaagattgcagaaaataaaagagagcctccttttagaggactcagaagaagaagaaggtgacttatgtagaatttgtcaaatggcagctgcatcatcatctaatttgctgatagagccatgcaagtgcacaggaagtttgcagtatgtccaccaagactgtatgaaaaagtggttacaggccaaaattaactctggttcttcattagaagctgtaaccacctgtgaactatgtaaagagaagttggagcttaacctggaggattttgatattcatgaactacatagagctcatgcaaatgaacaagctgagtatgagtttatcagctctggtctctacctagtggtgttattgcacttgtgcgaaccaaagcttttctgatatgatgggaaatacaaatgaaccaagcacacgtgtccgatttattaaccttgcaagaactcttcaggcacatatggaagatctcgaaacttcagaggatgattccgaagaagacggagaccattaacagggacatttggatattggcctaactttcatattagaccagatgggatgatctgtggaacataagtgtttattaaaaatggcaattaaatataaattacttttgtgggggaatgcctaataaatacattgactatatataaaatgaatatatacatacacatgtatgcctgtatatatatattcattctccagtgttgctgaattaaaattctgctggactttttaacatagcaaatccgatgtttataaactggtaatcaaaaaggttttttcttttaggtgagtgggaaagtattacccttgttttaaatatctaagcaatgcctatcaacccttttttgtgttatgattactgtagtcatatttatgaaaaaaggtttgtgttttactcttgctagtgagaaaagtgggacaaaatatacttttgaaataaaatgctatatggcacctaattattttttcttttaaaatgccttaagttgcagtctcattttgataatcatttgcttccagtgtttaaaaattaaaaaaagaatggggagaaggttatgagaagagcattattaagtttccaaatttaatttgaattccaaattcacctagcaataaaatctaatttttaaaaagtatataaatataaaatgtataaatgatggatagatttttgtattgatttgcaaaatgcagattatatttgataggctatagtatgtagatattccttttaggaatattacagctgtaaattatatgagacttgccagtcaaatgctatttggtttaaaaaaattattgcaatctcaagttaatggaatatttttaaatcccacattcagagtttaaaacactggttttcaatgtgttttttagtgttgtcacttgtttatagataaatatataaataacctgtttggatcctggtcctttttaactgttccttggtaattctgagcatttatttgatgacttaatatttttcactacctttggagaacagatgaacattattcaccatgaatggatctatactgtgtggtcatgagttgtgtatacttccataacactgtatttttcttctgtcagtacccttaggatacactttaaaacaccttaaggtctgatgttatggcaacaaactactttttcaaacctaaataggaaccatgtaatttctcaaaagtgattgaacagtttgcccacacttagtttgttggtcttatgtaaaacattggctcaaaataaagtacacactgatttaaaaaagaaaaaaaaaaaaaaaa

SEQ ID NO: 2146 - DNA, 710 bp, Homo sapiens
gattttacccagaagtgcctcaacatgctttaagcagtcgttttttggagtgcaatggtagctacaagcaaacggaatcttttcagccagaatgaagcctatttttcagcatattgaagaatatatagcactggaagacttccctgggatgacaccaagataaacaagttaccctctggaattcaagcttccttggatgagcatcataccgatgtgtgccttcctaagaaggagtcttgaaaggagttccattttaaagtctccttggtgatcagttctcctgtagttgtgtatattcagtgagcatgcagcttctgttgtatcttcccttggaggtttgtttatacccattgggttcccaacaagttgaaccttgcgttacgataaaagcagatgtggcatccaatcctaccacccagcaaagagaaaccccaggcattcaactgcagcacaaaatcgtgggtgtagccttcttgaagactcagggtagccattccttgctccatatttaattttaattctaaagtcatctaatttcatggaatctttgaatttgcagtacgttgaacttttaaaaaactgtaagttattaattgttcatcaagagcactgtggtggaatatcgtagttgatttctttttctttctttttttttaatgctttctttgtgtgtgggaggtgtgagattcaccatgataggcactttgcag

SEQ ID NO: 2147 - DNA, 947 bp, Homo sapiens
ttctaaagggttcacaattcagtctagtaacaacactaaaagttctgcagatgcagtaagagaactaggagagaactgcaggaaaaaaaactgaatttatttattttaataagttattacctctccctttcacatcacatgtctatcctaaatctatacatttgcaatccaatgaacatcaccaactcaggaacatacctccttcttgtctttatctttgtcttcataagggctgctaggctgtttcgtagcagtctccgggctactaggccgttgtgtgctggtagtacctggttcactgaaaggcgcatctccctccccgcgtcgccctgaagcaggggaaggacttcgcccagccaaggcagttgtatgagttttagctgcagcacttcgagacctgcaggagttaattgaggacgtgggagaggaaggaaatcagctcaaagggagaacagaaaaccccctccccaactcccatccacctttcctaactgggacaaccctcttccaaaaagcctttagtcgcacaactcaaatcattcactgaaatgcaagtacagtccactttggttcttcttttcccaacacaatcccaaagagcgttctccctctacccctttactcacctcccccaaacatccccaaaccatccacccagcccactccctacccgcttcattcacaactcacctctgagcccacctccttcaggaagccttccccgattaaggaagccagggtaaggattccttcctcccccagacaccacgaacaaaccaccaccccccctattctggcagtccatatacatcagaacgaaacaaaaataacaaataaacaaaaacaaaaaaaaaaagagaaggggaaatgtatatgtctgtccatcctgttgctttagcctgtcagctcctagagggcagggaccgtgtcttccgaatggtctgtgc

SEQ ID NO: 2148 - DNA, 377 bp, Homo sapiens
attgtgcttacatccttaaatcgatccttacatccctgtgataattggcggagtttcagttgatctacttacaaagcccttggttgggatttttcatttccactcccattgtcttaagaatacaaaagaaatagggagctatcctaaagaaaattagcaatcagatgtggagccaaattatacagaaaaaaaaaattgtttagactagttaggaagtacactgtcaaggataaacttaataaagggctaatcagttgtatacattttgaaggaagaaagagaaacactggtgtggaagagaacatcctgggtggataagattatacttgcaaagggaagaatgcgaaagtcattctcaacagtccataagtggctca

SEQ ID NO: 2149 - DNA, 787 bp, Homo sapiens
tttttttttttttttggataggaaatacttttattgcaaaaagtactgaaggtaccctaaaaccttaagcaggattctggacatggaagcctacagaatagacaaaaataaatatgtcaacctgcccgaccctctgggtcgaactggatgtggacactggagggagggcgtcctttattacatacgcgtctctgaagtcatataaatatagaataccttatagtagatcagcattaaataccagtcactgtgtttatataacttaatttgtgctgtagacaaagttctgtacatgtaacatgtggccatgcccaggcatcccagcatctatcctgaagtcagtgtaaagacatccttaagtggtggagacatgacagcccagaacccacagcagagggaaactggggagaggagggggcctgaccctggatcccccagctggtgtccacaggctagagggacccattgctgcagaggctggtgcctggttttccccatacttggtcttctaaacccaaagacagggtcctgatggtggagacctgggtaggtccggaggacagacacaggagagggcacaatcccaagcgcagctctcctgcactggctcgcaccacagccctcatctgagtggccgacacaagcctggagtacggcagctgccaaccacagcaaagccgcaaaaagactgagaaaacaggaacccagagttccacaggggcaaggcctcgcagaccagccaagcccgagatgccctgtgctggcagtcatcacagtctggacagcc

SEQ ID NO: 2150 - DNA, 2259 bp, Homo sapiens
caggtgtcccgacccaggctaagcttgagcatggctgagcaggagcccacagccgagcagctggcccagattgcagcggagaacgaggaggatgagcactcggtcaactacaagcccccggcccagaagagcatccaggagatccaggagctggacaaggacgacgagagcctgcgaaagtacaaggaggccctgctgggccgcgtggccgtttccgcaggtgagtctgggctgcgggagccgggtggccgcccgttcactccagctgtcttgccgctccccagcccctacttccactggtgggggtggggccctcacctgctgtcactccccagaccccaacgtccccaacgtcgtggtgactggcctgaccctggtgtgcagctcggccccgggccccctggagctggacctgacgggtgagtgccctgcggccgcgggggtccgggcggccccgggggtccgggcggcccctggtggggatctcgggaagtgcagccagggggccgcagcagggctggggcttcgcgcagggctgctgggcagtccattgagggggaggtccccccaacaggcgacctggagagcttcaagaagcagtcgtttgtgctgaaggagggtgtggagtaccggataaaaatctctttccgggtaagctacaggctgctgtggccagggaatggaggcggggctggggctggggtccggaccgaccttccctgatcctcgcttcgggtcctgcaggttaaccgagagatagtgtccggcatgaagtacatccagcatacgtacaggaaaggcgtcaagagtgagtggggccccgggcagggcagagggggccgcttgggtgcgtgctgccaggcggggaagcggggccgctgaccgccctcttccttgtgccgcagttgacaagactgactacatggtaggcagctatgggccccgggccgaggagtacgagttcctgacccccgtggaggaggcacccaagggtatgctggcccggggcagctacagcatcaagtcccgcttcacagacgacgacaagaccgaccacctgtcctgggagtggaatctcaccatcaagaaggactggaaggactgagcccagccagaggggcagggcagactgacggacggacgacggacaggcggatgtgtcccccccagcccctcccctccccataccaaggtgctgagcaggccctccgtgcccctccaccctggtccgcctccctggcctggctcaaccgagtgcctccgacccccctcctcagccctcccccacccacaggcccagcctcctcggtctcctgtctcgttgctgcttctgcctgtgctgtgggggagagaggccgcagccaggcctctgctgccctttctgtgccccccaggttctatctccccgtcacacccgaggcctggcttcaggagggagcggagcagccattctccaggccccgtggttgcccctggacgtgtgcgtctgctgctccggggtggagctggggtgtgggatgcacggcctcgctgggggccgggccgtcctccagccccgctgctccctggccagcccccttgtcgctgtcggtcccgtctaaccatgatgccttaacatgtggagtgtaccgtggggcctcactagcctctaactccctgtgtctgcatgagcatgtggcctccccgtcccttccccggtggcgaacccagtgacccagggacacgtggggtgtgctgctgctgctccccagcccaccagtgcctgggccagcctgcccccttccctggacagggctgtggagatggctccggcggcttggggaaagccaaattgccaaaactcaagtcacctcagtaccatccaggaggctgggtattgtcctgcctctgccttttctgtctcagcgggcagtgcccagagcccacacccccccaagagccctcgatggacagcctcacccaccccacctgggcccagccaggagccccgcctggccatcagtatttattgcctccgtccgtgccgtccctgggccactggcctggcgcctgttcccccaggctctcagtgccaccacccccggcaggccttccctgacccagccaggaacaaacaagggaccaagtgcacacattgctgagagccgtctcctgtgcctcccccgccccatccccggtcttcgtgttgtgtctgccaggctcaggcagaggcgcctgtccctgcttcttttctgaccgggaaataaatgcccctgaagg

SEQ ID NO: 2151 - DNA, 2091 bp, Homo sapiens
tccctccctttccaagcactgactgcacgctttgaggtagactctcccgtgtataatgccacttggagtgccagtttgaaaaacaaagcagattatgttgaaacagtcctggattccacatgcagctcaaccgtacagttcctagaatatgaactaaatgttttgggaacacacaaaatcgaagatggtacgttagcctctaagactaaaggaacatttgcacaccgtgacttcagtgcagaatatgaagaagatggcaaatatgaaggacttcaggaatgggaaggaaaagcgcacctcaatatcaaaagcccagcgttcaccgatctccatctgcgctaccagaaagacaagaaaggcatctccacctcagcagcctccccagccgtaggcaccgtgggcatggatatggatgaagatgacgacttttctaaatggaacttctactacagccctcagtcctctccagataaaaaactcaccatattcaaaactgagttgagggtccgggaatctgatgaggaaactcagatcaaagttaattgggaagaagaggcagcttctggcttgctaacctctctgaaagacaacgtgcccaaggccacaggggtcctttatgattatgtcaacaagtaccactgggaacacacagggctcaccctgagagaagtgtcttcaaagctgagaagaaatctgcagaacaatgctgagtgggtttatcaaggggccattaggcaaattgatgatatcgacgtgaggttccagaaagcagccagttggcaccactggggacctaccaagagtggaaggacaaggcccagaatctgtaccaggaactgttgactcaggaaggccaagccagtttccagggactcaaggataacgtgtttgatggcttggtacgagttactcaagaattccatatgaaagtcaagcatctgattgactcactcattgattttctgaacttccccagattccagtttccggggaaacctgggatatacactagggaggaactttgcactatgttcataagggaggtagggacggtactgtcccaggtatattcgaaagtccataatggttcagaaatactgttttcctatttccaagacctagtgattacacttcctttcgagttaaggaaacataaactaatagatgtaatctcgatgtatagggaactgttgaaagatttatcaaaagaagcccaagaggtatttaaagccattcagtctctcaagaccacagaggtgctacgtaatcttcaggaccttttacaattcattttccaactaatagaagataacattaaacagctgaaagagatgaaatttacttatcttattaattatatccaagatgagatcaacacaatcttcaatgattatatcccatatgtttttaaattgttgaaagaaaacctatgccttaatcttcataagttcaatgaatttattcaaaacgagcttcaggaagcttctcaagagttacagcagatccatcaatacattatggcccttcgtgaagaatattttgatccaagtatagttggctggacagtgaaatattatgaacttgaagaaaagatagtcagtctgatcaagaacctgttagttgctcttaaggacttccattctgaatatattgtcagtgcctctaactttacttcccaactctcaagtcaagttgagcaatttctgcacagaaatattcaggaatatcttagcatccttaccgatccagatggaaaagggaaagagaagattgcagagctttctgccactgctcaggaaataattaaaagccaggccattgcgacgaagaaaataatttctgattaccaccagcagtttagatataaactgcaagatttttcagaccaactctctgattactatgaaaaatttattgctgaatccaaaagattgattgacctgtccattcaaaactaccacacatttctgatatacatcacggagttactggaaaaagcttgcaatcaaccacagtcattgaacccctacatgaagcttgctccaggagaactttactatcatccctcctaattttttttaaaggaatctt

SEQ ID NO: 2152 - DNA, 2029 bp, Homo sapiens
ttttttaattaggataatgcctttattaacgagaatgaaacgttcattcctccttccactccttctcgttggttttctggacacagctcacctgatcctagaaacgttgtcagtctgcttgtggcttccctccttgattgactcacgctgtgtgatgtcttgagaagtatctatccacttcatgtgaatgagcactccaatatcagccaacatcaatcattcttacctaaagaataataagaaaaagttaatataaaagacaagggtataaaataaaggtttgaaaatgctagtcaacttcaaaatttaaagagtaaaaatccagagataaagattgggggtaagttacagcctaaaaaaaataggaagaaacttcatggtgggggggaaatctaaaattattcttacataaaataagtagacacctgaattagaatgaaaactgtattttctttaaaatgtaaaagcctgactctcagtttcaccagtctgagcacaagtttgactgcaacccaaaatatactatcccttatgtgaaggtatgtgacaacgttgacctcaccaaatgagttttaacatcagctcttttttccatatgaaagcacataccctgctccccattcaagtatgtcttccattgtcaggcagggctgaccacgcttcagcaggagtcctccaagagtgcccaactccccttcccacagtacacaacgctgtagttgttgtcctgcaatcctttgtatttacctcattctttcccatctaagtcctcactgagttttaaagttagggctggaaaagctatgcccttactgggacagcaaggaaccaatttttttctgagggagaagacattcaccttcactatatgcctggcagggccacagtgcacaaaacaaagatcagccttcattcaagttccaggtttttcttcctccctgaatgattactgcaaagggtatatgaagtaagcagttccctgttgcacatgtaccatccataagggatactatatcgttttgcattcttccccccattctccacattgtcctatcttaagtccaagcccttttcactctcaaaaaaaaaaaaaaaaatatttttttcagcactggtgttcaaaagcaacgtttttatggttaatggtttaccagcaactgttgagatttccagttgagtcttaaaaattgccaatcattatctagcagcaatgacagatgattaggagcagtcaaatcctctgaattctttccctaataggcagccatttgagaactgcactagctgacatcactaaaacattatcagctaaagcccaaaaccaaataaaggcccagaccaacatcctggctctctaaaacctgtccaaaatcattaagtgaaaggcagtaaatgcaggactgtggatcatgtcactgcagctgacaatgattaacaataggagacatgcaacccccattaaggttaaaagtccaaaactagtcacacgcatctctttattggggaaaagtgagactattatgcattcttggtaggtttgcaaccttgcatgaagagcacccattgcatttctttcatctttcagaaagcaccggtatctgttccaagggcctaacagtacgaaaatacattctggcatcacacctctgaacccaagactgttctcattaaaaataattttggtttgtaacaaaattatgaaatacaatgcaagcacctcggtatagcattattactgaaaccacttaattcccagctttttgagttttttaaaaaaaacccactgcactaagattcacaattcattgctacatacaaattaaagctagtaagaacacactaacgtcacaagtttctcattctaaagtgcaaaagcctaatcatctgaaagtgaacagggtaaggcaaaattaaccccccaccccaataaagttcctgacgtccatatattatataccaagtacattctctaaaaattgttactgactggtaagaaatagacctgagtttttatttctaacacccaatc

SEQ ID NO: 2153 - DNA, 1311 bp, Homo sapiens
  misc_feature (1)...(1311): n = a,t,c or g
ttttttcagagtattgcaacactttattaagagtattggctttgaatcagtagctgaagtaacaattgcatgaagccagattaggtgcactgcataatacccatactcgatttattgacattacttagcaatttactggacaaaagtcaaacttttttgttttttattaagcacattccacagtacaaagctgtcatgaataatatctgtacaatttaacagtttcaatagctgttcagacacaaatttatttcaaacagataattggcaaacataattaattacaagttagaattagactatcccagtgctttaaaacattaatatagcagtaatttacatttgctcagttatggttagcaaaataaagtccagagtatggctgggaattactattataatcccagaaagtcagaactccttgggtgccaaagtcccctgctataatttagtaggcacaattcaaaggttgtctgcatattcaaaggccatcatctcccaaggaacgaggggaacttctatattaaacatgcaaaaacaacaaaaaatccattcattcattcagaattgtctcctcctctgcccctaccttccccctggggctttcctgagcagtttgatattgaagttgtaggacgaaaagaggtcaaaactaaatcactttcacaaccaccatcaagcttacaacatccaccttatgaatggaggtttattgtttacactttgagactcaacctctcaaaaacataaattaatttagtaacatgggaaggaaggattttatttttaaaagaaaaactaaaaaagcaaagccaactcaataaacaaatcacatacacacacactgatccccacaccgttctcaatgcaaaggacaaatcaganccaggggccttccctttagtagtagagtgtgcttccacgggaagaggtttactttataggaggctgtttattggtcctttaaaatgttattgacattccttgatctttggaaacaatggcgaagggcaaatcaaacctaatattgaataagggagaaggagtgccaattggatgccaacgtcctttccatgcactgtcagggcaacagtgccatttacacatttgggctgtgtcgtagggaggacttgggagctttgagaacctgctggggccacagcagcagctgacaccagagatgactggggtggcattcatgggcttgaggcttcactccacttcagagcacccacccctcagcatgggcctctgaaccagcctgactgccctgcaggctccaacacaccagcaggccctgccagaaccttg

SEQ ID NO: 2154 - DNA, 1307 bp, Homo sapiens
  misc_feature (1)...(1307): n = a,t,c or g
aaaataatggcatttaactaaagatggagcatgatctgtgtacatagcacatgtgaataaaagaaaagctgacagtatattctggtttcaataaaatgacctatcagaaagtagaatttcatccccaagagtatttcagtttatccaatattgagtaagttctgaaacagttttagaaaaaattttctttttgttaaatgtgatgcactgatcaatttttgtcacagcattttcataccttcatggtggactactagtcactgcttccataaatattgtttacagggtgagatttggtttattcatcttaagtgctgtagcaaactgtggttcgagcaacctgtgggaaatctgtgagagggaatggggtgggagatgtgggggaatggtggtcagactgatgacagatcctagaccaatgtaaagaatgtgtatctgtatataaataatttatcaaatagttttctctttgtgtctgtgttagtgtttttaaagctgctcatttcattttgtccaaccaaaaagaaaagggagataactaatgagcttctagtgatgttcaaaattgctgttaatagggcattataccctgcaagttcactgcatgtctgatgcttgggtaaaactagtcttccctgtaaaatgcagattacaggtattaaagcaatctagtggtatacccgccccttgccttagtaagaggagcagtgaaatgtatatagttgatgttcagtatttccaagtaccatttttatatagtagcttatttgaccataagtcacacatcaaaaaaagattacccttagtgtatgtgttttaatattagaaaattggcatatgtactttatttttgaaaagggaagagatgggtgtggggtggcaatagcattgtgccattttgtcatagaatgtaaaaattggttaactttacaaatgtcagctagttttgactactaattgggggaaattttagataatttttaaattcaaagttatttataaaatgctagaatttgttttaattttttgtattttgagccacttcacatgaagactcagttgcatttttatcgaatacatttttatcaacagttaaagactatggtggttttttcagagtttggctaagaatgttgttaccatcttctttgtttgtggtacaatattttcagtgcaaaagagatgtcattcagttaaaaagacaaacctctagatgtgtaattacatggaaaatactancaatgtgaatgcttttgtagtaaccatcttgtagtacctgtgaaatctataactcagaaatggtcagg

SEQ ID NO: 2155 - DNA, 990 bp, Homo sapiens
ttttttttttctaatccaaacgcacttctctttattcaaaccagggtcaaactggtcaatgggaaacgccctgaagccacgtgcctggggagaaaggcttcctactcggttcggttcagcgctgcgtgggatccacgcggctggctgtgcgcaacccccacagttcacctcagacactaccaagcaggtcagtcgacaaaagcaaggaattaaacaaaaaacagaaatacactcagtagatttcttctagaagctcccagagtttctggaccaccaagtcccaacccccaaagccaggagcgaggggactaacagcgcaccccctccaccagtgccgacggaaaccccgttttaaattaaaaaataagccagtatacatcgtagaaaatttctcttaaaaatctcacaatttgtaaatgtatattttttctttaacataaaagtttacaatataccgtaaaacaaaaggctcaggaaaataatttccaaaaaaaaggaagaaaaagaaacctgaagttttgaattaaagctgaagacattttttttaaaccctgttgttgaaccagtgacttttttttattgtgctgatgggttagagaaagaaatatttaaaaacctcagtccagacgacacccacagccgctccaaaagcctcgcgccctccccccgctacgcccccccaaggttgagtcgccactttgccgccaagtttgtgattgtcacgagttcacaagtttggaatcctgggtctgggccgtgcagacgtcgcggcgccgcgggctagcgtcggtaggggtggaaccttgcacgttgtggttctgccctcgtccaaaggccgctggccgccgcggggtgggccccccgaccctggcacggagggacccccgtaggaaaggaggctgctggctggggtctgagaagccctgtccgaagccactcaagtcatgcccgtaacctgaatactgaccataggggaagtctggctgaact

SEQ ID NO: 2156 - DNA, 367 bp, Homo sapiens
gtcaagtctggctattcccctaggcgtaccaacccttttggtgaaactgaggatgaatcatttccagaagcacaaggtaagtgactagtttggtgtccttattctttcctctgcacaaaatgacaacggccattgaaataagatgtgaaatcatgttttagagagctatgattaggagtatgaattaagatttgttgttctgaaagtttagtaagatatctgcagtggaggcaagtcttggataaaaactgaggggtagctgaaagaccacctacagctatttcaccattagccataagcgtttttgtagcatagcatagaaatgttgtgaaatctgaatctgttatcacattcaaatgcagtcttg

SEQ ID NO: 2157 - DNA, 435 bp, Homo sapiens
tttttttttctaccaccaagttaatgaaggaaaaaaactgacccaaaaatatatatctttacagcagtcaacttgtacacaaaacttaaaaataagtttcagcttgcagataatgtgaaaactgaatgcggggtagttttgtaaggaaactatacactgcaaaatggctatttggaaactgtaaacattaagcttgattcagaaacccctaaatttccatgtggggtaattgtaaatgtcagatcatcactgggagttttcctcatggacgtctgtgctgctgccgctgcgcacacagtgctctctccacatggactcactggatttggtgcatgctctatagaaagcaaggctactaataaaaggtctgagagtacgagtatgggtaggtagcatgaccactgaaagccaacaaaattcaaagttacagctgtc

SEQ ID NO: 2158 - DNA, 563 bp, Homo sapiens
cggcagagcgaggtgccgggttgcaggcgctcaggagcgctagggtttgaggcctgctttctgctcgcgccagcagagcactacctgaggcagcgaggcgcagcgagcctagcctccccgcgccctgggcagtgtggccatggagaatcaggtgttgacgccgcatgtctactgggctcagcgacaccgcgagctatatctgcgcgtggagctgagtgacgtacagaaccctgccatcagcatcactgaaaacgtgctgcatttcaaagctcaaggacatggtgccaaaggagacaatgtctatgaatttcacctggagttcttagaccttgtgaaaccagagcctgtttacaaactgacccagaggcaggtaaacattacagtacagaagaaagtgagtcagtggtgggagagactcacaaagcaggaaaagcgaccactgtttttggctcctgactttgatcgttggctggatgaatctgatgcggaaatggagctcagagcttaaggaaagaaagagcgcctaaataaactccgactggaaaagcgaaaggcttcttcct

SEQ ID NO: 2159 - DNA, 1222 bp, Homo sapiens
gcgcgcgtgagtccgcccccccagtcacgtgaccgctgactcggggcgttctccactatcgcttacctacctccctctgcaggaacccggcgatatggctgccgctgtgccccgcgccgcatttctctccccgctgcttccccttctcctgggcttcctgctcctctccgctccgcatggcggcagcggcctgcacaccaaggggcgcccttcccctgggatacggtcactttctacaaggtcattcccaaaagcaagttcgtcttggtgaagttcgacacccagtacccctacggtgagaagcaggatgagttcaagcgtcttgctgaaaactcggcttccagcgatgatctcttggtggcagaggtggggatctcagattatggtgacaagctgaacatggagctgagtgagaaatacaagctggacaaagagagctacccagtcttctacctcttccgggatggggactttgagaacccagtcccattacactggggcagttaaaggttgggagccatccagcgctggctgaaggggcaaggggtctacctaggtatgcctggttgcctgcctgtatacgacgccctggccggggagttcatcagggcctctggtgtggaggcccgccaggccctcttgaagcaggggcaagataacctctcaagtgtgaaggagactcagaagaagtgggccgagcaatacctgaagatcatggggaagatcttagaccaaggggaggacttcccagcatcagagatgacacggatcgccaggctgattgagaagaacaagatgagtgacgggaagaaggaggagctccagaagagcttaaacatcctgactgccttccagaagaagggggccgagaaagaggagctgtaaaaaggctgtctgtgattttccagggtttggtgggggtagggaggggagagttaacctgctggctgtgagtcccttgtggaatataagggggtagtgggaaaagtggtactaacccacgattctgagccctgagtatgcctggacattgatgctaacatgaccatgcttgggatgtctctagctggtctggggatagctggagcacttactcaggtggctggtgaaatgacacctcagaaggaatgagtgctatagagaggagagaggagtgtactgcccaggtctttgacagatgtaattctcattcaattaaagtttcagtgttttggttaagtgg

SEQ ID NO: 2160 - DNA, 445 bp, Homo sapiens
  misc_feature (1)...(445): n = a,t,c or g
ccggcctcccctcgctctgaggctcggggtccccagctccgcgtaaactgcacgatttcgccctctgctcagctcccctctgccccctctttccaagagagacttccagatcccacattttcttgactgattttnaagctgtctgtttgcattctgattgggaacactgggatcattttcatcatgccgacagtggtggtaatggatgtatccctttccatgacccgacctgtgtctattgaggggtccgaggaataccagcgtaagcacctagcagcccatggtttaacgatgctgtttgagcacatggccacaaattacaagcttgaatttacagcacttgtggttttttcatcacttttgggaagttgatgggtccccttcacgagagattataataccctacaggaagcactaagtaatatggatgattatgacaaaacct

SEQ ID NO: 2161 - DNA, 830 bp, Homo sapiens
ttttttttttttttacatttaactttttattactttttaaaaatccaaattcagataaattaacacactaggttagaacctcaattgtatttgatacattatatacttgatttctattactaaaaagccagttggaatatggcctatacgaaccaaagagtgtatacaaaatggaagtggtcatcaggcaataattgtttccttggaactctgcaccgactgtccatgctctgtggggacttacacattcaagtttgacagttgaaaaaccaactggagctgcttttccaagaatgttctgttgtccttcaaatagaattccatgttatttctttcttgccttaagctcttatatctttcaaatgacctaagctgatgaactggagtaaacacaaactgctgcagttatcaattagcaagcctagttcaccaatacttcaaaataaacagacttcacaagtttatttccattcctaacagtggaataataacttaattttgtttacttttgtctttgtagatttctgtctgcagctccagtaagaatgccaaatcagatggcttttaggaaatgctcataggagagaactagagttattcctcacactgaatttaagtcttaccagatttctgcaggttcatatgttaacgttctgatctagcctacctgtaagtctagtttatttctgtacacacttccaaatactcttcataaattttcacttctgactgaaatataacaccttgattgataaaatagtttcataactatagaattttagtgaagatataaaacattaatgaatacttgtgttttaatacatcactac

SEQ ID NO: 2162 - DNA, 551 bp, Homo sapiens
ctttggggttatttgttactgtagcatgatctggcctattctaatttatacagtgggatttttttttcccccacaaacactaaggaagtagcatgtggaaggccagaccttctgttgccatcagtagggggtgttctgtagtctgaggacctatgagccttttgggttacctttgacttgcacttgggcttttatgttgatgccaagcagtatgtttatacttctctaaaatgtatttttctctatataaatagtgtttttgttaactctcaccggctccagtctcaacttttgcctctaatttttcccataatattcactaactctagtgatagctgtctatgcgcattgtactgagactaattcagagagtgggttggatgaactttggtttgatttgtacgtaattgttaaaaactgtgtttaagaaaacagttgtacccttggcaaaacctggaagtctctatgttaacaattttcccaatttttgttttaggaagccattctgcatattatgtttttaaataaaaggatttgactttgggctgaaa

SEQ ID NO: 2163 - DNA, 662 bp, Homo sapiens
agccttaaacagtcctcccccttcagcctccaaactgtttggattataggcaagagctacttactacacctggccatggatcttcttgtgtcaactttgagacccaaatttactgcagtgccttaaaatgttttaaagaaagttaatacacatgtgcctggatgtggttactcacgccctgtaaccctgtagcaggacaagccgcagacaaaactcctcagacaccgagttaaagaaggaaggggtttattcggctgggggcatcagcaagactcctgtctcaagagctgagctccccaagtgagcaattcctgtcccttttaaaggttcacaactctaagggggtgcgcatgagagggtcgtgatcgattgagcaagcagggggtacatgactggggggctgcatgcaccagtaattagaatggaacagaacaggacagggattttcacagtgcttttctatacaatgtctgtaatctatagataacataactgattaggtcaggggtcgatctttaactaccaggcccagggtgtggcgctgggctgtctgcctgtggatttcatttctgccttttagtttttacttcttctttctttggaggcagaaattgggcataagacaatatgaggggtggtctcctcccttaccagctactcgg

SEQ ID NO: 2164 - DNA, 1386 bp, Homo sapiens
ttttaatattgttttcaacaatggtagttttgaggttttggccattttctctttacacttcgtatgtattttaaagaagaaaaaaaacaaaaaaaattccctggctattcctctttcctctctgctgctgcttctcctgcatcttgttcctgcttatttaaatagtctgagagtaagagtatatttctgtgaaataattataagtcagtataattgcatttggcattttttaaccacttgctcagtttggagccactgctcacctcaaacagtacaaagaaagtggttccatattttacaaacagaagagtagcatcagagccctgacctcctgtctttgggtgtaaaatggtgagaggccggtgtccggctccttcccctgtggtttgggctggtgaactgagcccaagtgtattctctggcctgggccccttccagaatcagtgcgagcgtcctgcagaggcatggccttcctgccactgcagagtgggaagcttcctgggggacctcagccagctctggggctctcatcttccactcggatctcagattggttcgttgtggatgctctggctaggctcggcggccttttccaggcttcaggcctgaacaaaacaggctgtttgctgtgaggagctagatgacaccaagacacagacacgtactcttcaccggctccttttgcttctccttcctgcaggacgtgagttatgtctggtcccaaaacccttgagtaaactagctgagccattgcaaatgaaggtacagatggattgaaacataaaattgtagcttttggtgtccttctgaagggtcagaatatgtaattatttgataaccaaggaagtcaagtcagatggctaagtagtaactttccaatatgatttctccgtggtacttcacctggtggcacttttggggggcaatgttaacaactatcacattttactcatcaagtctctttcatttcggcagtttaaagacacaactgtgggctttctgaaggcggaaccccgttggggcaaacttaggtttatgtgtttggtttttcagctgacgtggaagccctgggtgggcgtcccctggctggcctggcttttgggttcaagtctgtatgtatggagtgggttggggccccaaagctttgctgctattgatttgtccccgacaggcaggcaaagcctcacattgccctcaattttccccctttcatttgaaggaccagtttttcatggtacttgtcttgatctttttcatagtgttcaaatctgtatttttgtatgtagagggaaataattttctcaacactaatcgttaataactattgtattaaattgtcatgaaggaacttgtttaataaatggacgtgtaaggataaaaaaaaaa

SEQ ID NO: 2165 - DNA, 433 bp, Homo sapiens
gcatcaattcttaagaaaactagaagagccagatcttgtaccagattgacatctgaatgggccaagctagagaaggctggagaaggatgcagatgacacaccttcagtgatgagagtgtcagatagggcgtcagcattacccaccactcccataggggtaacagaaagcccttgcagcaggtttgtcttgtttcatagatgagaaaattggttacttaggtcatgtagggagttgcaggtagagcagaactcagatgcagaaatatgcttctcatttttccaattctacttcagcacaaatgacttgtggatttgagagtgtaacgaagaattgtacaattgaaattgtacaattccaaaattgactaagggtttctactggtaagccagatagcaaacttcagaaagccaaagtcagtagcagatattaaaa

SEQ ID NO: 2166 - DNA, 632 bp, Homo sapiens
gattttgcaaggcgatttcgagcaacctatgtttcttgggcaattgcttatctcctaggattgatctgccttatccgagcttgttattggggagccataagagtcagttatccagaacacagttttgcataagcttgtttatgattcagtagtgcaggtgagagtgtctagcagttcttggtaagctactctggacatctttaaattatttatcctaatggattccattctggtttatgtataatcgtttcaagactttgggagtcttttatgaacaaatgctcattgcactatattatatgcaaattgttttgctgctaggttttcaaaatttgaataataaagccttttcatgttcttttacatctcttatagatatttttggatttgttaccaaacattacatttactctcacccttttattatttttaaataagttatttcattacttgctgatacatgagtattcctaagtgtttataaatatttctataatagtttcacatttatatttacattttaattaaacagtatcaaaattgcttgcttaaaacctaagcaatatgcattttgcttgaactgcttactgtaactttaacctaagattatagtgaccttattcaggaaaaaa

SEQ ID NO: 2167 - DNA, 240 bp, Homo sapiens
tattgttctgtgaaatttttgtcccagctacatatttgtatgtatgtatgtttttggtccggtataattgtataatatttcttactatggggttaaacaactttataaggacattgtgaggaacctggtatcctctgggactaggatcattccccgtaggacagttcccttgtggcacacatagtatttcgttaaaatcaggtgactgtttaaaaattaaaaagattttagataaaaatc

SEQ ID NO: 2168 - DNA, 699 bp, Homo sapiens
gtcgactggaccttcaagtctcagaaatatgtgtttgtcttttgatctgctgatttggtgtaacgtgattgcctcattcattccagtgtacgtacttgctgtaaatttatatacagaattaaatagcccatttattaatttataaaccataataaaaccagacagtcatttcccgtcaccagcagatcttgcattggaaaaggagaataatatacaaatttcagcaacttcagagatttcaggaagcctgaatggaggtcgaattcattttggagttcaataatatgttcaaagaatcaggtactatatataatcatatagacaactcccgtaatatctccgcagtgcaaaattatccctgtttcttgtcattcaccagtgagaaaaatccaactgcagacttgactgccttcggtgaaggcacacggcaagttcttctgacaaataacaccctttgggattgactcttcacgttttacacagcaattgtctcagcttgggaccaaagtatttacaaagcaagcgaacaagagacgaagcaagagggacacttctgaggccggtggtgcggaaactcaccgccaaacagggtggggggccagtcacctctcctggaatgttccatatgtaagctgacacaacttaacatcttaaatacagaattccaatcaaaagaaaagcaaacaaaagacaaaaaaa

SEQ ID NO: 2169 - DNA, 803 bp, Homo sapiens
tttttttttttaaagtaaaagtatctttactattaatatacaaatggtgaagtgtgacaagtttgatatactgtaagccatactttcaatgtctctcataaatacaaaacttcaacatttgcagtataatttttacagtttagacatatatatacagcatttcattcgggacataccatattgaaacaataagaaaacgttgtggtagctaacttaagaatatagaatttgaatggaatatataaattaaagaaaataaaagatagtatgtttcagtacatactgagcacagcatacagttcacataccaaaaaagctttttttaaaaaaaacctttatttctaacttcacatatttctaacagggtttagaggcaaatgctaaaccatgaatatttctttaagagttggaacaagtaggtttgttcttaatagtatcatttcttttatagtatgcatgttgttctctaaaaaaactatttgcaaaattaaatcatagattctatctctgttaactttctcctctgtgttacactgttttctccttcgcatcagtgtaatcggccataatttttatctaagcaacgttcctagtccctggtctagcacttctcaaagtcaggtccttcttagctattccaaatatagcaattcagtttgcctttctagatccactcatttctttgtttctctactctcctatgtcgggttgtgatttgaaattctccaacagtgatggttttgcttactgtcttccatgggaggctaaaaacagatgccaaaagattcatgttttcatttcag

SEQ ID NO: 2170 - DNA, 88 bp, Homo sapiens
gggtacctatgcctcattgatgtttacctatgagccccccttgcagactcaagcatcccattgtttgcccttttaaatatctctacta

SEQ ID NO: 2171 - DNA, 505 bp, Homo sapiens
tttttttttttttgtatacaaatataaaacatttatttaaacagacaccatgtaaaattaaagccaaatggctaagtaggagaaaacattggcaacagacataaaatacagaaaatacaagagaactcctaacaaatccatgagataaaaggacaaatcattcaatagaaaaatgagaggaaaaagaaaattaacaaatgtttatatgttctaaaataaacatacaaaaatatgtccatcttcactagtgagaaatttctgatttaaaaccaaaataattttttcagagtaattaaattacaaaaatccaatagcaagtgtcattaattacatggggaagcagatgctcatatcttgctcaggggaactgtaacttgatacagccattctggaacccaaatggaagtatctcttcaaattaaaaatggttatactctggcctgaaattcaaatcctaagcatataccacagagagagccttatatgtacaaaaagggctcatgta

SEQ ID NO: 2172 - DNA, 479 bp, Homo sapiens
gaacaaatctccagatccaccaacagcaacttttctaagacctctcctaaggcactcgtgattgggaaagaccacgaatccaaaaacagccagctgtttgctgccagccagaagttcaggaagaacacagctccatctctctccagccggaagaacatggacctagcgaagtcaggtatcaagatcctcgtgcctaaaagccccgttaagagcaggaccgcagtggacggctttcagagcgagagccctgagaaactggaccccgtcgagcagggtcaggaggacacagtggcacccgaagtggcagcggaaaagccggtcggagctttattgggccccggtgccgagagggccaggatggggagcaggcccaggatacacccactagtgcctcaggtgcccggccctgtgactgcagccatgccacaggcttagctgttaacgggaaaggttgaaaggattgttgacaaaaggaaaaa

SEQ ID NO: 2173 - DNA, 246 bp, Homo sapiens
catgtaattgccacaggacaaggaggtcagcgtgtgtgatggcagcatgctgtgccggcacatcgtggagtcctagaaactctctagtccctgcggctgttcccctcctctgctctctccctggagaggactgccagctcttaagaaacattcctggtgcggtgtctgcagtgccctttgtgggtgacttcaggcttcccgctttcgtggtgctcttcctgggattcgtttttttattaccctccc

SEQ ID NO: 2174 - DNA, 412 bp, Homo sapiens
gagcagacaggttgaggggaaatatttgaagtcaggaaatgtttcttaaatatgggctttgttagccctgggatgcagagtttcagaagcttaaaagatccaaaatgttttaacacttggaatatttctacttcaatacaaacatctatactaccataaagaactgtaaaaactaaaaagtgaaatctgcccctccaccacccctacccccaacaacaaattcccgcttcccataggtaaccatggttaaaagtttagtgtgactcctttcaggacttttttacagtgtgtaatgtatttttccatgttatttattatacagcttatatgatttttacttttcagtgatcatgttagctgataaaatctttaggttgaaggttttttcttgatactcgactaatttttgcat

SEQ ID NO: 2175 - DNA, 1741 bp, Homo sapiens
tttttttttttttttttggcagcaatgctggtttattccccatggccaccggggccgcactggtgcccactcctgccaccattccagccacacccaggccgtgggcagccaccctccgagacacctgggccgggggcagggtctcagcagaagcgccgtgggcagccaccatccgaggcacttggtggtttcctgaggcccaaggaggctgctcccagcacagtgaccccttccctggtccgctggagggaccacctccccactgagctcctttctcagagaactgggcatagccagagctggggtgagaaagcccttcagccctgctgcaccgaggctctgccagttctcataccccctccccatcccatcttggcaaagcgctggtgcagcttagggcagctgaagcactcggcggggacctctcctgacacctgggcggccgcaggactccctgcactgccccacagcaagctgcccatgggcccggggtcaagccaccacccacatgtcccaggagtccggccagcccaccacatccgctccctagctccggcgaggccaccccttctccaagcggcatgcggtccctgctgagggcagtcaggcagctggcttcggcaggcccgtcaggacccaggaggtgggcgcaggggtcatccaggatttgaggccctggccccacctgagtgacaatgatgtatttgaccccaccgggggtcggctccatgggccagcgcagcctgaagctcagctgagagaggggccggcctcacctgcagccccttcagaaacgtgtctccattcgagcctgggggaaagcccgttgccacacagcagccacaaactcagccacagtgtcgtccagggtgaagatcacggcattgggggcccgcgtcaaaggtgtacgccaccttggtgtccccgtggtgggcgttgaagcggttcaacaaggtggatgatgcgccaggagatggcattgaggtaagagatgggcgggaaggtgtcgaggcaggtggcgtggaaattggttgctgtccttcatggtcagctgggcgaagctggggaagtctcgctcccggatgcagcggggccatctccgccatgcgcgcgggcaccacggactcggcccggaaccgaagcagggggctggtctccacactggcccgcatgcccacggtactgcctgtcagcttcttctcagcgctcaccacaaggatgagcacgcggagttcaggccagtgtgactcgggggccacttgccgagcgatgctgtccttcccgtcggcctgctctcccatctgccactccacaaagcccccatacaggctccggcaggcgctgcctgagccccggcgagccacttctgagaggtcactctccacgccgtagacacgggccagggtgtaggctaggcaggcatagcccgccgctgaggaggccaggcccgcagccgtggggaagttgttcaccgatgccacgtgcaccttgcagctgaggctggagggcagcgggtccccatcccgtgagttcctccgcttccgggccaggcagcggatctcccgcaggcaggcctgcagcctcggctgccccacatcctcctcccggccattcagccaaatccggtcctcggtgaagtccttgctgatgacggctgttgtggtggtttttaactggtcctggtgcagagtgacgctcagggaggagttgatgggcagaaccagctcttcatcgcgcttgc

SEQ ID NO: 2176 - DNA, 417 bp, Homo sapiens
gcatatttactttttgctcatttgattaaatttattactgtgtatcccatcattaaggtaactaattttcagtaattaaactgttggtcttctgtttagccattattctcagttctgtgcaggagtgagctgaaacaaagttgtatagcccagagagtgagaagctgcatttcatgtctcccaacagtcagaaagggattatgtactgtttaaggaaggagtttggcgaatattttgaaacccttttgggaaagcatagaatattgaaaatccaaaattaaccaaatccgtgagtgtgcaagctcaaagctagagaccttaggaatatcttaggatgtgcaaaacaggaagaaaacaagaactggagcaggcagcactaagtaagtgtcatatagccttcccaccacctttcaacct

SEQ ID NO: 2177 - DNA, 396 bp, Homo sapiens
gtatgaatcgtcacagcactgagaaaacccacctatgtgacatgtgtggcaagaaattcaaatcaaaagggacactgaaaagtcacaaactccttcacactgcagatgggaagcagtttaagtgcacggtgtgtgactacacagcggcccagaagccacagctgctgcggcacatggaacagcatgtctccttcaagcctttccgctgtgcccattgccattactcctgcaacatatctggctctctgaagcggcactacaacaggaagcaccctaatgaggagtatgccaacgtgggcaccggggagctggcagcggaggtgctcatccagcaaggtggtttgaagtgtcctgtttgcagctttgtatatggcaccaaatgggagttcaataggc

SEQ ID NO: 2178 - DNA, 655 bp, Homo sapiens
cggacgcgtgggcggcggtggcgacggcgatgggaccccagcgagagatctgcagctaggctggctgcacttgctccacgggtcaggggatcggagggggattgaagaatgcgccattaaaaggaaagatcaaggagtaaaccagaagaagaagaaaaagaggacttcaaagctgggaaggatgagttcttgcagcaacgtctgtgggtccaggcaggcacaggctgcagctgagggtggttaccagcgctatggagtccggtcctacctgcaccagttttatgaggactgtacagcctcaatttgggagtatgaggatgatttccagatccaaagatcacctaacaggtggagctcagtattctggaagcacagcatctaattcacaggagaagctcaatgaatgtttgctgaattgaggtgtttgagttgaagaaactgcaataattgttcttagtaaacagacctccttgtgacctggcaccaatttcatatgatactggggattcaaaaagcttcaaccgaatattggtggctgatttagactcacctgcctcgggtgacattccaaaggctgctgatgtgtcacggtgaggctgcgccaggcttggcaccagagcctgcttcttccttcccagggagttgagctgggctg

SEQ ID NO: 2179 - DNA, 997 bp, Homo sapiens
gagacaagccaccacacacgcagttcccacaaggtgtccccaagaacttcggagctcagaacaggtgatactcactcctcctttggggagaggccgtgggcatggcttcacttttcagctggattataaaggatgtgaagttagcctgactgagcagaaggggagggaagacagcactccaggaaagtggaacgaacaacagagtccaaagggccctccagcctacccactcccaagtacctggaagaagctctccacgtgttcccttggggcctcctcccggagtgcagggtcatacaggttgaaggcccaattaagcctgtcatctacagttccccgaagaatcacggacaaaccagccacaaagtcctgggaaggaggcaggagggagctgtgtcctcgggtactcttcacccaactccttctctgggtttggcctggagatcctggccctgaactccaggaaacaggcttccctggcccacctcgcccagctcacctcaaaactgaccgagccatcatggttggtgtcaaaggcattgaagagaaaagtggcataggtgctggagtctgcagggtgagtgtggagaagttggcttccacacaggagaggacttcctccctctaaggagctccccataccccccatcaccttggcattcccagctcctccagaatccctccctccctcagcctagagaaggacaactgcttccccttgggccttgtcccctcacctccttgaggaaagaactgggagtaaatctgcttgaagttctcctcattgacaattccgctgggacattcctggaaggagagggcaccaggctgagggcagagacaaaatccccttccgttcaccgcccccaccctccatggcccaagactcccagggagggggataatcttcaagcctccagaggactcaccacgtggctcatgtgatgggagggaagacttctttcccagtgcacaaataaaaaacatggaacgaaaa

SEQ ID NO: 2180 - DNA, 706 bp, Homo sapiens
aactagtagaatatgatatgcttcgggagatgttcagtgattctagaagtaacaatgatgatgatgaggatgaggatgatgaagatgaggatgaggatgaggatgaggatgaagatgaatacaaagacgaggaggaggaagattgttctgaagagtatctggaaaggcagctgcaggccgagtttattgaatctggccagtatagggcaaatgaaggtaccagttcaatagtcatggaaattcagaagcagattgagaaaaaggagaaaaagctccataagattcagaataaagcacaaagacagaaggatctcatcatgaaagtggaaaacctgacactcaagaatcattttcagtctgtgctggagcagcttgagttacaggaaaaacaaaaaaatgagaagctcatttccctacaggaacagttgcagcgttttctgaagaagtgaggagagccattgcgtgtgcccacaaaccttggattcaccatccagactgcagattggatgaaactgtgcacgtttttgtcccttcagttgccttatgttgaatcagttatatttatctgtaccttctttgctacttaaaatatgctcacagtttgtagtcatgtagaaaaggccagtataaaaatgtagtagacttaaagaccccactcgaccatgagactttctctttgtcaatttgggaattattattattaatt

SEQ ID NO: 2181 - DNA, 1710 bp, Homo sapiens
gtggtactgttgattttattgagtgccctggctgatccggatcagtataacttttcaagttctgaactgggaggtgactttgagttcatggatgatgccaacatgtgcaattgccattgcgatttctcttctcatgatcctgatatgtgctatggctacttacggagcgtacaagcaacgcgcagcctgggatcatcccattcttctgttaccagatctttgactttgccctgaacatgttggttgcaatcactgtgcttatttatccaaactccattcaggaatacatacggcaactgcctcctaattttccctacagagatgatgtcatgtcagtgaatcctacctgtttggtccttattattcttctgtttattagcattatcttgacttttaagggttacttgattagctgtgtttggaactgctaccgatacatcaatggtaggaactcctctgatgtcctggtttatgttaccagcaatgacactacggtgctgctacccccgtatgatgatgccactgtgaatggtgctgccaaggagccaccgccaccttacgtgtctgcctaagccttcaagtgggcggagctgagggcagcagcttgactttgcagacatctgagcaatagttctgttatttcacttttgccatgagcctctctgagcttgtttgttgctgaaatgctactttttaaaatttagatgttagattgaaaactgtagttttcaacatatgctttgctagaacactgtgatagattaactgtagaattcttcctgtacgattggggatataacgggcttcactaaccttccctaggcattgaaacttcccccaaatctgatggacctagaagtctgcttttgtacctgctgggccccaaagttgggcatttttctctctgttccctctcttttgaaaatgtaaaataaaaccaaaaatagacaactttttcttcagccattccagcatagagaacaaaaccttatggaaacaggaatgtcaattgtgtaatcattgttctaattaggtaaatagaagtccttatgtatgtgttacaagaatttcccccacaacatcctttatgactgaagttcaatgacagtttgtgtttggtggtaaaggattttctccatggcctgaattaagaccattagaaagcaccaggccgtgggagcagtgaccatctgctgactgttcttgtggatcttgtgtccagggacatggggtgacatgcctcgtatgtgttagagggtggaatggatgtgtttgggcgctgcatgggatctggtgcccctcttctcctggattcacatccccacccagggcccgcttttactaagtgttctgccctagattggttcaaggaggtcatccaactgacttttatcaagtggaattgggatatatttgatatacttctgcctaacaacatggaaaagggttttcttttccctgcaagctacatcctactgctttgaacttccaagtatgtctagtcaccttttaaaatgtaaacattttcagaaaaatgaggattgccttccttgtatgcgctttttaccttgactacctgaattgcaagggatttttatatattcatatgttacaaagtcagcaactctcctgttggttcattattgaatgtgctgtaaattaagtcgtttgcaattaaaacaaggtttgcccacatccaaaaaaaaaaaa

SEQ ID NO: 2182 - DNA, 1345 bp, Homo sapiens
tcaaaggagacccggtctcgaaggctcatggcgatgctggtcctagtacccggacgagttatgcggcctctgggtggccaactttggcgcttcttgcctcgcggactcgagttttggggcccagccgaggggactgcgagagtcttgctgaggcagttctgcgcgcggcaagcggaggcgtggcgtgcctcggggcgccctggctattgcctgggaacccggcccctcagcactgcgaggccgccacccccgtggtcgcagaagggccccggagactccacgcgcccctcgaagcccgggcctgtttcctggaagtctttaagcaatcacatttgctattggaaggagctttactggctggaatgaagcacgtcaagaaagaaaaggcagagaagttagagaaggaacggcagcgacacatcggcaagcctttacttgggggaccgttttccctcacaactcatactggggagcgtaaaactgacaaggactacttgggtcagtggttattgatttattttggcttcactcattgccctgatgtctgtccagaagaactagaaaagatgattcaagtcgtggatgaaatagatagcattacaactctgccagatctaactccacttttcatcagcattgacccagagagggacacaaaagaagccatcgcaaattatgtgaaagaattttctcccaaactggttggcttgactggcacgagagaagaggtcgatcaagtggccagagcatacagagtgtattacagccctggccccaaggacgaagatgaagactacatagtggatcacacaataataatgtacttgattggaccagatggtgagtttctagattattttggccagaacaagaggaagggagaaatagctgcttcaattgccacacacatgaggccatacagaaaaaagagctagccaaagcagtgttgctggatgcagtattctcttgctaagaggaaggaaactgtctcgcataggagcctatataaatataaacatatatacgtgcaactctacagaatggccttcataccatgagaacatttctgttttggatggggatgttacccttgcgttcaaccaaaattgattcttggaactgtaaagattacaacccaaagtctcccaggaagctgtggggagacccagaggatcaagctgaagtgaagccagtgaagagcccacctgtgggaaggacatgggcggggccgagggcacagccagttgcattcctgccctgcgaacagggcccctcccaggcagctttgccgcctctccattcgtcttggggcccttgctcaaatagctgtgggactgaattttca

SEQ ID NO: 2183 - DNA, 349 bp, Homo sapiens
gcccggtcgcgaggaggaggaggatgtggcgcgcggaggggaaatggctgccgaaaacaagccggaagatgatcatgggaacagcaatagtagtcatgtaaaaatctttttaccgaaaaagctgcttgaatgtctgccgaaatgttcaagtttaccaaaagagaggcaccgctggaacactaatgagagatcatgatgcagccgtccttttggatttctttttaataatgtgtgacccttcacctttgatcccctgacctgcattaccttggtaaccatttcattttttaatttaatttcattttttaattttggtgtacaagctgtaacatttcatctttcaaagtgg

SEQ ID NO: 2184 - DNA, 545 bp, Homo sapiens
tttattttaaaactgaaatgaattttaatacagaaaatgaagacagcattttgcaaatttatcactcaaaggggtatctctatttgaggaaatcagcgtgttacactttgaaagatgaaatgttacagcttgtacaccaaaattaaaaaatgaaattaaattaaaaaatgaaatggttaccaaggtaatgcaggtcaggggatcaaaggtgaagggtcacacattattaaaaagaaatccaaaaggacggctgcatcatgatctctcattagtgttccagcggtgcctctcttttggtaaacttgaacatttcggcagacattcaagcagctttttcggtaaaaagatttttacatgactactattgctgttcccatgatcatcttctataggtggcacggtgttgagaacacagtaggtgctagttccgcagaatacactttgggaaacgctcttccggcttgttttcggcagccatttcccctccgcgcgccacatcctcctcctcctcgcgaccgggaccccgagcgcgcgcctcgtaccgg

SEQ ID NO: 2185 - DNA, 978 bp, Homo sapiens
cacgggcaaaaaaaaaaaaaaatctaatgattcacagacagatctggagcctctcttcattctcagtaattgctagtcccaagaactagaattgcaaatgggcacaacctatatccttcctgtggaagaggaggccactctcttgagctgaagttccagaagagcagttaatgttcaagagaaattgaactcaactcagcaacaaaggactctattttgaagagcaacatatcacaaagctaaatgtgattgtgccaaacacattaggtgcttatttggggtcatgctagggcctttatcaagtaactgggaaaacttttcttgcagccacaatctcaatgtccgttagtaggaagataagaggggagaaaaagctgtagaacaaatgtttggggttaccatttgaaaatctaatgtctgcaatatttttctcctcacaacttggaaacgttcccagttcattttcagtcctgttgtgagcacagttctgaagggtttattattgtcaaaataagttttgttttgttttgtttatgttgggtttttaatgttgtctcttgacccttaatgctcaggttcttgtgggagttaatcagccacatccaacgttaccttgagggggaagaagagggtgatgctcagaagctaaacaagacaggggccacatgaccctctattgattagccccaagtagaaagtcctgtggttttatgtttaatggtaatagttgatcatatatggcataattttctatcagcttccctactcagtcactataaacacagacttgaaatagtactttaaatgtccaaatacctaaatgtgctaaactggaggtaactatttctaggtagttgaatttttgaaagtcatgatcagccacacaactgttttgtacatacttattttctcatgcacttttctgtatgcaaataaagctataaatttactcatttcaataaactggagtggcagaat

SEQ ID NO: 2186 - DNA, 494 bp, Homo sapiens
cttcctcctactacctcttatactcatctccccaaattatttgcctcccttaaataagttttcctagaaggtaagctggtcaggcaatttgaaaaatattagatcccaagaaatctattccgtttgcattggacttctcggattccatgtgtttgcagcaggactacatcgaactctgatgtgccggattgtggcatgtctgcatgtctcatccatctattgtttttggtaactcagtttggaatttcagtgtctgtcttccctgggttgacattggaatcagcctctcctttgagcttattttaactcttgagcaacataacatagatttaatgtgaacagtttataccaaagggcagcctgtgcctgtttatggatcctctctgcctttgtacttgaagagcgcattttacatttccagtcctttcacagacaggagctccaaccttacgatggagaattaaacttgcttgtatttccactttgtggatgag

SEQ ID NO: 2187 - DNA, 1694 bp, Homo sapiens
gcaagcttctatctgcacctgctcatcaatcctgctctcaccatgagcctccgcctgcagagctcctctgccagctatggaggtggtttcgggggtggctcttgccagctgggaggaggccgtggtgtctctacctgttcaactcggtttgtgtctgggggatcagctgggggctatggaggcggcgtgagctgtggttttggtggaggggctgatagtggctttggaggtggctatggaggtggccttggaggtggctatggaggtggccttggaggtggctttggtgggggttttgctggtggctttgttgactttggtgcttgtgatggcggcctcctcactggcaatgagaagatcaccatgcagaacctcaacgaccgcctggcttcctacctggagaaggtgcgcgccctggaggaggccaacgctgacctggaggtgaagatccgtgactggcacctgaagcagagcccagctagccctgagcgggactacagcccctactacaagaccattgaagagctccgggacaagatcctgaccgccaccattgaaaacaaccgggtcatcctggagattgacaatgccaggctggctgtggacgacttcaggctcaagtatgagaatgagctggccctgcgccagagcgtggaggccgacatcaacggcctgcgccgggtgctggatgagctcactctgtctaagactgacctggagatgcagatcgagagcctgaatgaagagctagcctacatgaagaagaaccatgaagaggagatgaaggaatttagcaaccaggtggtcggccaggtcaacgtggagatggatgccaccccaggcattgacctgacccgcgtgctggcagagatgagggagcagtacgaggccatggcagagaggaaccgccgggatgctgaggaatggttccacgccaagagtgcagagctgaacaaggaggtgtctaccaacactgccatgattcagaccagcaagacagagatcacggagctcaggcgcacgcttcaaggcctggagattgagctgcagtcccagctgagcatgaaagctgggctggagaacacggtggcagagacggagtgccgctatgccctgcagctgcagcagatccagggactcatcagcagcatcgagggcccagctgagcgagctccgcagtgagatggagtgccagaaccaagagtacaagatgctgctggacatcaagacacgtctggagcaggagatcgccacctaccgcagcctgctcgagggccaggacgccaagatgattggtttcccttcctcagcaggaagcgtcagcccccgtagcacctctgttaccacgacttctagtgcctctgttaccaccacctctaatgcctctggtcgccgcacttctgatgtccgtaggccttaaatctgcctggcgtcccctccctctgtcttcagcacccagaggaggagagagccggcagttccctgcaggagagaggaggggctgctggacccaaggctcagtccctctgctctcaggaccccctgtcctgactctctcctgatggtgggccctctgtgctcttctcttccggtcggatctctctcctctctgacctggatacgctttggtttctcaacttctctaccccaaagaaaagattattcaataaagtttcctgcctttctgcaaacat

SEQ ID NO: 2188 - DNA, 535 bp, Homo sapiens
  misc_feature (1)...(535): n = a,t,c or g
gctcccttgcccgacagaaccatccccactgtgaggctgtgagagatttgtggcaggaactgtttatgaggctctagttgttgctgttgtggcgggaaagttaagaaacatagcccttaaggaaaccacctttatgtattttcttaaagcacgcctttaaataagcaaaaactttaaaaggcaggaaagagaattcttaggcaaattcagagaaataagtgctagttaatactaatcacctcctcctctgtctctcatcctcctttctcccatcaaagcaaaatatggcctcaccaccagccccaaatcagtgctcagaccctctctgtgtctgtgtgccctcctgggagtcagtcagcgctcaggccaggactgtgcagggccatccagcccatgcgctagtcaggancacaggcaaggggtgcttgtggcagtggccgggcacctgagccccagctcgttgttaaacgtgctgacggcaaggggcaatggagtgagtttcccaactaagaaaccactattatatattttttcc

SEQ ID NO: 2189 - DNA, 277 bp, Homo sapiens
attttacagacgggaaagactgagtaaatgtgagaaaattagctgaatagccactactttttttctggcataacctacccctgcttaagaacttccacgggcctttgattggggtttttaaccactttaacaaaccatgtaaccctgagagctatgcttgttggacaacatggtgtaatgtaccacaggctgtagagccagatactggggtttgaatccttattcaacatgggaacataggagctatatgacattaaacaactgtcttgtcttcact

SEQ ID NO: 2190 - DNA, 429 bp, Homo sapiens
gcagagcagaaggatgagatggtcccccgcctggtgaagctgtttgacttccctgggcgtggggcttcccagatctatgctggttacacctgctcctttgctgtcagtgaagtgggtggtctgtttttctggggggccaccaacacctcccgtgaatctaccatgtaccccaaaagcagtgcaggacctctgcggctggagaatccggaaccctggcttgtgggaagagcagcatcattgtggccgccgatgagagcaccatcagctggggtccgtcaccgacctttggggaactgggctacggggaccacaagcccaagtcttccactgcagcccaggaggtaaagactctggatggcattttctcagagcaggtcgccatgggctactcacactccttggtgatagcaagagatgaaagtgagactg

SEQ ID NO: 2191 - DNA, 1015 bp, Homo sapiens
gaccttacatatgtttttttctaattataaaatatcttttagcttcagaatacatcttgcttgttgttttcaggtaaatgaaattggactgcagggctcctaacctgggctgctaaatgaaattggattgcaaatctcctaaccggagatgaatgcatagtattaatgagatctgtgggcagattctatgcaattcacatatttacaggcaatatttctcaaatcatatgcaatcattgtgcagatttttccgaggaagggtccataattttcattagaattcaaaggaagtctatgacccaaaaaaggttaagaaccactgctctgatgttttctgcacaaagtaaatggcaagttcagaggttacgttgctaatactagtgtgtgtacgaaacagatgacttccgaatctcatctactggagttttcattcttctttactaatccatctagacaatgatgcagaacagcaaggagaatttgggaacccagacccccaccttcagcagcttagctttcatggtggatgtgatggttgtggggttaataaactggaaggaaggggcggcgttgtttgggtactgtgcagggaacttcaccagcatcttgacacgatggttgctgcagtgcacagacactgtgcagctcctgtctgccgcatccatctccacattgacattccggatttgcacattgatcagggagaattcctgctgcaaggtctgaggcagccccagttgatctgatttcctctcttccaggagatttctagggggatcttcttttagggcttcttcctccccatggcttgcagtgtgctggtgatctgtatcttcagtgtgcagggtcttctcaggttccggcagaagggaaatactctcaatgaactcatcaacaccatctaatatgtcatttgcacaaagcctctgcatctgggaatccacccgccacattctcaaggtctgatcccgggaccacgtcaccagttgatagtccttggacccttccttctgct

SEQ ID NO: 2192 - DNA, 856 bp, Homo sapiens
attcggcacagagggaggaagagcctggcccaactagagaatctgtgcaaacagctgtatgaaaccacagacacaaccactcgactccaggcagagaaagccttggttgaatttaccaacagccctgattgcctgagcaagtgccagctactcctcgaaagaggaagttcctcttactcccagttactggcagctacatgccttaccaagcttgtatcacgcacaaacaaccccctaccattggaacagcgaatagatattcggaactatgtgctcaactaccttgccactcggccgaagttggctactttcgtgacacaagcacttattcagttatatgccagaatcacaaaactgggctggtttgactgtcagaaggatgactatgtcttcagaaatgcaatcacagacgtcacaaggtttttacaggatagtgttgaatactgcatcattggtgtctcaattttatctcagctaaccaatgaaattaatcaagcagacaccacccatcctttaaccaagcacagaaaaatagcctcttcttttcgcgattcatcattatttgatatcttcacactttcctgcaatttactaaaacaggcttcaggaaagaatctaaacttgaatgatgaaagtcagcatggcttgctcatgcaactgctcaagctcactcataactgcctcaactttgacttcatcggcacttccactgatgagtctcagacgacctgtgtacagtgcagattcccaccagctggagatcagacagggtctactctgtcacccaggctgagtgcagtgcacgatcacagctcagtgcatcctcacctcctgactcagcagcgtccgatctagc

SEQ ID NO: 2193 - DNA, 959 bp, Homo sapiens
gttctgtttcactttccttcactctgaggccggcgcgctggcgggcgaggagcggcggcggtggcggccgctggacatgggaaagcggaaccaccaaaaggagtgatgatcaacgatctcatgataaatctggatgctagttctcatgcctcaggacatcctactgggaacgacacaccagctcctgggatcagactttcatctacttaggacccctctttgcccagactactaaagccagtcttcactagccacgaatggctacccaaaggaaacacttggtgaaagattttaatccttacattacctgctatatctgtaaagggtatctgatcaagccaacaacagtgacggaatgcctccatacatctgcagaatcctactggatgtccacttggatgtcctgaagccacctgaaactcagcatatctacggaatgattcaaatggggatgccagcactcagttatccaagcaagaaatatgctccatgcttgactctttaccctcactaacaaaactgggcaaagtcctgctggtctctctctttaatacttctcaaatctgtccctttagtttcatccctctggttactgttctcattcagattcttattacatctcaccaaagccactgcaggcacattcttaactgtgtccaagtggtaataattaaaaacagcttactgtctttatcattatcactcttaacccaccctaaaatttcctaaaggtatcccgttgacctcaggatacattaaagctacttagtggtgactggtttctgcctaccacttcctcccctaccacctaacactcacacatacaaatacttggttcaactgtttgctctccttgaaatgaatgcctcctctgtgcccagctagcagttacccatcctttaaaactcatcccctctaagatgtgccctaccacctgcagatttgggttaagtgtctca

SEQ ID NO: 2194 - DNA, 3343 bp, Homo sapiens
tgactgtggccggctgggagtaggcggcagtgagtttccctgggagggcagcgcgcttggcttcatcccctccccccgatctgcctccagtctcggacttggttgttgcgcgctccggctccggcatgagctgggagagttggaggaggtggcggcgggcagaggtgatgtctgggagcccttccttgacagcccgggccgagaagagtccctgcaggaagcatcacccaggctggcagatcatggtagcagcagcgggggtggctgggaagtgaaacgtagccagcggctgaggaggggccccagcagcccccgaaggccctatcaggacatggagtatgaaagacgtggtggtcgtggtgacaggactggccgctatggagccactgaccgctcgcaggatgatggtggggagaaccgcagccgagaccacgactaccgggacatggactaccgttcatatcctcgcgagtatggcagccaggagggcaagcatgactatgacgactcatctgaggagcagagtgcggaggattcctacgaggcctccccgggctccgagactcagcgtaggcggcggcggcggcacaggcacagccccaccggcccgccaggcttcccccgagacggcgactatcgggaccaggactatcggaccgagcaaggggaggaggaggaggaggaggaggatgaggaggaggaggagaaggccagtaacatcgtcatgctgaggatgctgccacaggcagccactgaggatgacatccgtggccagctgcagtcgcacggcgtgcaagcacgggaggttcggctgatgcggaacaaatcttcaggtcagagccggggcttcgccttcgtcgagtttagtcacttgcaggacgctacacgatggatggaagccaatcagcactccctcaacatcctgggccagaaggtgtcgatgcactacagtgaccccaagcccaagatcaatgaggactggctgtgcaataagtgtggcgtccagaacttcaaacgccgagagaagtgcttcaaatgtggcgtgcccaagtcagaggcagagcagaagctgcccctcggcacgaggctggatcagcagacactgccactgggtggccgggagctgagccagggcctgcttcccctgccgcagccctaccaggcccagggagtcctggcctcccaagccctgtcacagggctcggagccaagctcagagaacgccaatgacaccatcattttgcgcaacctgaacccacacagcaccatggattccatcctgggggccctggcaccctacgcggtgctgtcctcctccaacgtgcgcgtcataaaggacaagcagacccaactgaaccgcggctttgccttcatccagctctccaccatcgaggcagcccagctgctgcagatcctgcaggccctgcacccaccactcactatcgacggcaagaccatcaatgttgagtttgccaagggttctaagagggacatggcctccaatgaaggcagtcgcatcagtgctgcctctgtggccagcactgccattgctgcggcccagtgggccatctcacaggcctcccaaggtggggagggtacctgggccacctccgaggagccgccggtcgactacagctactaccaacaggatgagggctatggcaacagccagggcacagagtcttccctctatgcccatggctacctcaagggcaccaagggccctggcatcactggaaccaaaggggatcccactggagcaggtcccgaggcctccctagagcctggggccgactctgtgtcgatgcaggctttctctcgcccccagcctggtgctgctcctggcatctaccaacaatcagccgaggcgagcagtagccagggcactgctgccaacagccagtcgtataccatcatgtcacccgctgtgctcaaatctgagctccagagccctacccatcctagttctgctctcccaccggctaccagccccactgcccaggaatcctacagccagtaccctgttcccgacgtctctacctaccagtacgatgagacctccggctactactatgacccccagaccggcctctactatgaccccaactcccagtattactacaatgctcagagccagcagtacctgtactgggatggggagaggcggacctatgttcccgccctggagcagtcggccgacggacataaggagacagggggcaccctcgaagggaggggcaaagagaagaaggagaagcacaagaccaagacagctcaacagattgccaaggacatggaacgctgggcccgcagtctcaacaaacaaaaagaaaacttcaaaaatagcttccagcctatcagctccctgcgagatgacgagaggcgggagtcagccactgcagatgctggctatgccatcctcgagaagaagggagcactagccgagagacagcacaccagcatggatctcccgaaattggccagtgacgaccgcccaagccctccgcgaggactggtggcagcctacagcggggagagtgacagtgaggaggagcaggagcgtgggggccctgagcgggaggagaagctcaccgactggcagaagctggcctgtctgctctgccgacgccagttccccagcaaagaggcgctcatccggcaccagcagctctcagggctccacaagcaaaaccttgagattcaccggcgagcccacttgtcagaaaacgagctagaagcactagagaagaatgacatggagcaaatgaagtaccgggaccgtgcagctgaacgcagagaaaagtatggcatccccgagccgccagagcccaagaggaggaagtacggcggcatatccacagcctctgctagacttcgagcagcctactcgggacgggctgggcagtgacaacattggcagtcggatgctgccaggccatgggctggaaagagggcagcggcctgggcccgcaagaagcaggggcattgtaacgcctatcgaggccccaaacacgggtgcggggctccggccctgggtgcacggggcagctcctacggggtcaccctcaaccgagtcctacaaggagacactgcacaagacaatggtgacccgcttcaacgaggcccagtgagcagcttcaagagcaacttctccacatgttgggtgtccatccctggggcaggggaaggacagagtgttggatggctgggacggggccttgctcttgtcggccagcccactccccagccagagagggcttgaccaaatcaaattgaggtggtgacttttgttggaaaattgggctgggatcacgtcctgttttgtaataaaagctgaaaagtc

SEQ ID NO: 2195 - DNA, 2003 bp, Homo sapiens
aacctcaaggaactctttttcagtgaccagacagaccaaacgtcatcaaattgttcctgtgctacgtctgaactcagagagacaccctcttccttggcagtgggctccgatccagatgtaggcagtctccaggaacaggggtcgtgtgtcctggatgacagggagctgttactactgaccggcacctgtgttgaccttggccaaggccgacggttccgggagagctgtgtgggacatgatccaacagaaccgcttgaggtttgtttggtgtcctctgagcattatgcagcaagcgacagagaaagcccaggacacgttccttccacgttggatgctggccctgaggacacgtgcccatcagcagaggagccaaggctgaacgtccaggtcacctccacgcccgtgatcgtgatgcgcggggctgctggcctgcagcgggagatccaggagggtgcctactccgggagctgctaccatcgagacggcttacggctgagtatacagtttgaggtgaggcgggtggagctccagggccccacacctctgttctgctgctggctggtgaaagacctcctccacagccaacgcgactcagccgccaggacccgcctgttccttgccagcctgcccggctccacccactctaccgctgctgagctcaccggacccagcctggtggaagtgctcagagccagaccctggtttgaggagccccccaaggctgtggaactggaggggttggcggcctgtgagggcgagtactcccaaaagtacagtaccatgagcccgctgggcagtggggccttcggcttcgtgtggactgctgtggacaaggaaaaaaacaaggaggtggtggtgaagtttattaagaaggagaaggtcttggaggattgttggattgaggatcccaaacttgggaaagttactttagagatcgcaattctatccagggtggagcacgccaatatcatcaaggtattggatatatttgaaaaccaagggttcttccagcttgtgatggagaagcacggctccggcctagacctcttcgctttcatcgaccgccaccccaggctggatgagcccctggcgagctacatcttccgacaagtgagagcaggccagagccgtctagtgtcagcagtgggatacctgcgcttgaaggacatcatccaccgtgacatcaaggatgagaacatcgtgatcgccgaggacttcacaatcaagctgatagactttggctcggccgcctacttggaaaggggaaaattattttatactttttgtgggaccatcgagtactgtgcaccggaagttctcatggggaatccctacagagggccggagctggagatgtggtctctgggagtcactctgtacacgctggtctttgaggagaaccccttctgtgagctggaggagaccgtggaggctgccatacacccgccatacctggtgtccaaagaactcatgagccttgtgtctgggctgctgcagccagtccctgagagacgcaccaccttggagaagctggtgacagacccgtgggtaacacagcctgtgaatcttgctgactatacatgggaagaggtgtttcgagtaaacaagccagaaagtggagttctgtccgctgcgagcctggagatggggaacaggagcctgagtgatgtggcccaggctcaggagctttgtgggggccccgttccaggcgaggctcctaatggccaaggctgtttgcatcccggggatccccgtctgctgaccagctaaacaccaatttcttcctgcttttctccacttggtttggaaaatcacacagttttcaggctccatctgtttggagaaaatacattctgaagcatccccaattcaccttctaaaaactcatgtgcaggtttgataaacaccagaacagaagacagtgatgctgtattattttagatttattacatagatttggaattcacttttttcatgacctagaaaaaaacattccagtgttc

SEQ ID NO: 2196 - DNA, 939 bp, Homo sapiens
tttttttaggaaaaacatttgtattaaatctgaccaacaataactagttttgaatacaatgttttatacagataagttaaaataaacaaaaaaaaacagtatgactccaatccaaaaggacagtgacacaaacaggcaaagtatacaagcaatataacaggcagcgaaaaattcaaaccactagtcatcaaacaaaagtaaaattttagacctattaacctcgcaaaaaaaagcaactgaaattccaccaccaccatcagtagttgtagtaaaattaatccactcattcaccgctaaagatgatctaaattggtgcagcccttgtgcaaagcatcatgacgataaatgtcaaaattcatgagcatgatcatttctgtagaccagaaatctcactcctaagccccatatcaagaataaaattcaaccaaagaataacttcatgcttaaaaatgcttactgccgagttatgagcaagcaaccaaatgccaagctctgttatttgatataaaagaacttgatcaaataaatatacaaccatgaaatgtatatttaagtataaaatacaaattgtggtatgcacaccaactaaaatttctgaaaatacgtaagcacaggaaagggaacatacaataaagaaaaaagaagttatgatattccaacaaatgtttaattacttgatgctgatacagtatttttttaatttaaaatgagacaaatcctttgtgtcttttgaggtttccttttaagctacatgcctattattatctaaagaataacttcttaaaaataaaaataaaagaataatttaacaactatacacacagggacaagccataagctgcaccaactggatcctagatcctcttttcccaagggcagcccattcttggttctttcatagccctgtacaatgctgcttgacctgaatgctacaaggca

SEQ ID NO: 2197 - DNA, 502 bp, Homo sapiens
gcagagcagctgagcagggaacacgtcctaggcaggtctgacgtgaaacctccccttaccctgaaccgtgtgactctgcaagcagacacctcgaggcaggtgttctaggcaaagggatgggcatgagcgaaggctccagggtccacagagcagggagtgtggagaaggtggaagagctgagctcagaggcagagaagctccttgcagggagcactgggagatggcctggcccgtcccaggctcctggaggccccacctgccgatcccaggcacttgaccttgttcctgtgggtgacagagatgagaaccagggaagctgtgatccactggccaggacaagtcaacatgggtgagggttgggcaaagggcccttccttcctccccaaccctgtggtctggggccatggcctcaggctttgtgtctatcacaaaagcacaaacttgccctaacccacatgggcctggctgtggggaaagtggggacccaggtccctgaagctgt

SEQ ID NO: 2198 - DNA, 1985 bp, Homo sapiens
attcggcacgacgggcaaaagtctctaccacacctactcaactctgtcacgctagcacaaaacagccacacacaaatacattaaaaaatgggtataactgtgttccaataaaactctattagcaacaggcagtgggccagatgtggcatgacatgcacgtttactaactatcccctgattaaagaatgtccaacaatagctgaaagttacttgagaaagtcagcactgtaggaggaagaaactaacaccaaaacacaagccggtagttctggggaaatgctggcagaccaagggcgggacctcttgcccagaataatctctctctcctactaaggaacctataggttcactgaagtaatccattactttgaatcactctctcctttgccccaccttttaaacacaaatccccatcccctaatagttactggtgaacagatggactcatccctttcttatccgagaagccccatcacatgctatgtcctatcacatgctataccagaagctagggctgcagaggtggatgacgcccccagatccctgccccctaggggcttaagagtctagcaggggcacctgacccaagtaagtacaatgcagggtaaggctgggctaaagagcacgtgaaaaggagcttgggaaacacagctggtcagcagagcttcagggagggctgaaggacaggctgcacacgaggcactcagaaaacagcagtgaaacagaaggcaggcagcaacggcagtggtactggacctggggaacaccaagttcaagctctatatacaacgaggacaaaaatgaaccaggctccctgaaagcagggaatctaacctgtgctacggcgccttcccagtccacgagggcgtgagagtacatacacatgcaagtgcactccagcgctcacccaagcaacacccttggagaaacacggactccaggcccaaatccagcctgagaccctcaaagggcagatccgctaacctcaagttttcagaagatctgaacccactgggggctcctgctcctctgcctgccccatgccagactaggattccagtgacataagcgccctctacagactcagaaggacagagaaggttctgctggaagtgggctcctcagcaaaccagcagataggggttcctttgatatttataccccagggttttttcactctcacgtgacatctatgtggggccaatgaagccaattcttcttttgtacatatggcagtcctgtaaggaatgcatttcaaacgggatccgctaattaggaattttctcctggggatttttcaacagtctatggggggccagaagcttttccacaaaccagtgaaggtggcagcaaagaaagcctcttagacgaggagctggcagcagctgctatctagatagacagcaaaaaccaaccactaattcagcaaacacaacctcatacctaaccgcttccctttaaatgggccttcggtgtgtgcgcacatggggcacgtgcggggagaaccatacttattcccctgttcccggcctaccacctctgctcccccttctcttctctaccatttaactgtctcctctgctttgtttcttatcactgctgctggtgtctagagccagccagcagtacctggcagacatcgcgaccctgcgggcagcgcttaggactgcacatttacatttcccaaatgatctgggtagatggggacaggtgaagacttggggaaacggaaatatacgaatgacatgagacatgcatatctagtgtcaatccattcgactgggcacaggacagcagactgctgacagtgctatgtaagattatgagtgatcctccctctattttgcaaacagtctgtaagtaactgataaaactttaaaatatgcaaattttaaaattatatagtttgatttactcatcaaattatcatgtatgctgttatttaagtatgaataaaggcttttttaaattgggaaaaaaaaaaa

SEQ ID NO: 2199 - DNA, 852 bp, Homo sapiens
gtgactgcctcttccagggcgggcggtgtggtgcacgcattgctgtgctccaactccctcagggcctgtgttgccgcactctgctgctatgagcttcctcaaaagtttcccgccgcctgggccagcggaggggctcctgcggcagcagccagacactgaggctgtgctgaacgggaagggcctcggcactggtaccctttacatcgctgagagccgcctgtcttggttagatggctctggattaggattctcactggaataccccaccattagtttacatgcattatccagggaccgaagtgactgtctaggagagcatttgtatgttatggtgaatgccaaatttgaagaagaatcaaaagaacctgttgctgatgaagaagaggaagacagtgatgatgatgttgaacctattactgaatttagatttgtgcctagtgataaatcagcgttggaggcaatgttcactgcaatgtgcgaatgccaggccttgcatccagatcctgaggatgaggattcagatgactacgatggagaagaatatgatgtggaagcacatgaacaaggacagggggacatccctacattttacacctatgaagaaggattatcccatctaacagcagaaggccaagccacactggagagattagaaggaatgctttctcagtctgtgagcagccagtataatatggctggggtcaggacagaagattcaataagagattatgaagatgggatggaggtggataccacaccaacagttgctggacagtttgaggatgcagatgttgatcactgaaaatgatttatgcaagtttaagattctgctcctaagtgtaggagagaact

SEQ ID NO: 2200 - DNA, 233 bp, Homo sapiens
  misc_feature (1)...(233): n = a,t,c or g
acagactgagggctcagtcccacaagaccgctccctccttcccaccagcgcaggtccaggcnnnnnnnnnnnnnnnnnnnnnnnnnnnnnnnnnnnnnnnnnnnaacctnnnnnnnnnnnnnnnnnnnnnnnnnnnnnnnnnnnnnnnnnnnnnnnnnnnnnnnnnnnnnnnnnnnnnnnnnncgagggattttctttaaaggagacaggtaaacagccagatgaagagatac

SEQ ID NO: 2201 - DNA, 1668 bp, Homo sapiens
aaaaaactaaagtgactggcactaagtgaacttgagattatcctcagcttcaagttcctaagataagggctttcttaagctttcaggtgtatgtatcctctagatgtagacaataatgtcccatttctaagtcttttccttttgcttctccttaaattgattgtacttccaaatttgctgttatgtttttttcctaatactgtgatctatctgatctgcagacaagaaccttgtctctgttgaagagcatcaaggggagattatgtacacattgaaactgaagtgtggtgttactgacggaatgtgcagtaactcctcagatatctgttaaggcatttcccagatgtgatgccagccttcttacctgtactgaaagatgcttagcttagaaaaaaacaaaacagatgcaaaatcagataattttattttgtttcatgggttttcttatttactttttaaacaagggaagggaatattaggaaaatcacacaaggcctcacatacatgttatttaaagaatgaattgggacggatgtcttagacttcactttcctaggctttttagcaaaacctaaagggtggtatccatattttgcgtgaattatgggtgtaagaccttgcccacttaggttttctatctctgtccttgatcttctttgccaaaatgtgagtatacagaaattttctgtatatttcaacttaagacatttttaggcatctgtatagtttgtattcaatttgagaccttttctatggggaagctcagtaatttttattaaaagattgccattgctattcatgtaaaacatggaaaaaaaattgtgtagtgaagccaacagtggacttaggatgggattgaatgttcagtatagtgatctcacttaggagaatttgcaggagaaagtgatagtttattgttttttcctcgcccatattcagttttgttctacttcctccccttccttccagatgataacatcacatctctacagtaagtgcctctgccagcccaacccaggagcgcaagttgtctttgccatctggtctatagtacagtgcgcggcgttaggccacaactcaaaagcattatcttttttagggttagtagaaattgttttatgttgatgggaggtttgtttgattgtcaaaatgtacagccacagccttttaatttgggagcccctgttgtcattcaaatgtgtacctctacagttgtaaaaagtattagattctactatctgtgggttgtgcttgccagacaggtcttaaattgtatattttttggaaaagtttatatactctcttaggaatcattgtgaaaagatcaagaaatcaggatggccatttatttaatatccattcatttcatgttagtgggactattaacttgtcaccaagcaggactctatttcaaacaaaatttaaaactgtttgtggcctatatgtgtttaatcctggttaaagataaagcttcataatgctgtttttattcaacacattaaccagctgtaaaacacagacctttatcaagagtaggcaaagattttcaggattcatatacagatagactataaagtcatgtaatttgaaaagcagtgtttcattatgaaagagctctcaagttgcttgtaaagctaatctaattaaaaagatgtataaatgttgttg

SEQ ID NO: 2202 - DNA, 1175 bp, Homo sapiens
tgtattttataaaatcctttattttatgagtggcaatcgtcacctccctacccaacacataaacacacatacccatctagtctttgttttcatcacatttcccaaactgatcgcatgtcaatgtgactcacatagaaaataaacaagaggggcccatcacatacgccaagttatcaatactcctttcaccatttctgctcaatctagaagactcagcttggaattattttaagattttatgttatttgcaatattatggaaaagtaagttaccgacattcacaaggtgataagctgcaaagaacaagtttgttttgttttcctttttaaatttagaatcttgtttacaacacatttagcatcattaacagaaaaacgaccatttacatagtaactaaaaaaccagccacttaagaaaataatgtagtaatcaaccactaccagagaaaataggtcctctcatttgattttactggtaagtccagctgttttctgaactttgtgagagtctctgtcctgaatatggcaaagcattcaagtaaaaggtaggaagttataagtgtgagattctgagggattctgtctcaaagaaggttcaggaatagccacagtcctccagtttactcgaacgttgagatgttcctgtgatgaccagcataatttccttttgaggaattttcacaattcatcagcctcaggattcaggttttataagacattcttccacattaaaaaaaaaagactctgtcccatagaaataagtttctcatcgcttctccagcttcttgtacttggcttccagtttttttgaatatgcatccaacttgtaagctgcctgctcaagagctgctacctgctcttcaatgacattgatctgatccagataaggctgcagtccagcatatttctggtttaagtcctttaagttcctactaatgtttatagcaatatctttcatttcaagatacttcaagctggtgagtttattcatattttccaggagcttatagtcttcactggtggccgtcagttccccagtcaggtaagtggccattttggagaacatgtcccggcaggagctcagtgatgtcagcttcagcaggctcctttgcttcctcagctgtctccacggcagcatcgtctcgggcgggctcatcactccgggtcgccatgtac

SEQ ID NO: 2203 - DNA, 1910 bp, Homo sapiens
  misc_feature (1)...(1910): n = a,t,c or g
ttttttttttttttgcaacacaagtcaatctttattgaaaactgcagtattaatacataacaattcttgttacaataaacgtgcttttgagatttttaaatctgagctcatctcatcagattgcataaaaaattaaaatagtatcaattgacacctaactgaactggctcaggatggaaattccattccttggcatggatacgtaagttcaatgcagaggtgagggatgcctttaacactggaagacaatgctgacttagcttaaaaaaagtaccgagagaacggtgtaaaaaacggtatttaaaaatcatttttaaaaaaacaaaaaggaaccgtttcttctttagttacaatccatgaggctctctagggcctctccgtgtggccagcacagcaaccctgctaggagcacaaacggctggcctgagatctggcccagctgccttgcccactggtctgcacagggactcatggggcacagcctgtggtgaggaggagacacctgtcatgccagtcctgggagcacacccacccttctgcaggtccggggggggggtccctacacagacgccgctcatcctctgtctccccttcccaagtgacttcacttcagtcctgtggaccaagataaggctatccccacaggctctctcttcttcaaataatgagtaggaaaaagagacaaactttctgaaacatgcagtttccgacccaaataggccacataccccaacttctgtgttacttggtcagttgagcccctggagccctcaggacctactgataaagcatgtcctctgcagtatactcaagagtctgctgcccttcagaaagccagagggaacactcacaaatgcagaggtactagaggggagaaatacgtgctctgccttcccccaggccaaccacactctgctttagagaccctctcagaaagcaccagagaggaggaccagacgctgccacccacctcaagccacacccctgccacctgctgctgcgcccaatggaggtcctgtcctgtccgggcaacagccaaactggcgacaatggacacatccaacagtcagctgtcggataaggtgaaggtggcccaactgctcagagtaacactgttctcaaatgtttaaaaaggacaggtgaagtctgggtctccttttttaaagcagacaccaatacttacataactagtacatgttggcctttcaccagcactcactggcactcacaggtgccttacataccttacgggggccaacactgacaggtattagtacgtcgcaaagtgctgtaataatngtatttcctctcgttactgttgtgtcccccaaagacacatgcaaattatttccctagacctcattcatcacagccagatgatgccaccagaaagagcaaggtactgtatgcccagctggggaagggcaagacactcactgaccaggtgcccaccccaaggctcaggaccacccccattgcctgtgaacacatttgcatagcactcaagaaggtttcccagaatagcgacaggtaggcctacaaaccacaccaagaagaacgttcttaacagatggctcacgagagacataaaaggttctggaagtgccttcaggcccattaccatgactggccctgactctggccctcacagagcggcaagttcatgggtcactggctcacactaaatgctcagccgccagcacagatccaaacaagacctccatgagcagagaaactgcagcggctgaacacactccccaagcctcaggggagaaggtgtagaacaaatattttttaaatagccatcatgatgtccatgtttacatgaactaggtcctttgcttacctgctgtctcaacttctaaaagaatagtaattcagctgaaggactcccaaattaggaatgtcaa

SEQ ID NO: 2204 - DNA, 2672 bp, Homo sapiens
ggggccgctcgctcgcctttcttccctcgcctttctctcctcttgcttcaccctccccccttcttttcacgttgctggttttttttgttgttgttttatgctttaggggttttgttcctcggctcgagctcatgggtgtacattatcatgctcttcttttgtagagcagcccgacggccatggaggctgaagagacgatggaatgccttcaggagttccctgaacatcataaaatgatcctcgaccgattgaatgaacagcgagacatggaccggtttactgacatcaccctaattgtcgacggacaccattttaaggctcacaaggctgttttggctgcttgtagtaagttcttctacaaattctttcaggagtttacccaagaaccattggtggagatagaaggtgttagtaaaatggcctttcgccatttaattgagttcacatatacagcaaaattaatgatacaaggagaagaagaagccaatgatgtatggaaagcagcagagtttctacaaatgctagaagctatcaaagcccttgaagtcaggaacaaagaaaactcagctcccttagaggaaaataccacaggaaaaaatgaggccaaaaaaaggaagattgcagaaacttcaaatgttatcactgagtcattgccatctgcagaatcagaacctgttgaaattgaggtagagattgccgaaggcaccattgaagtggaagatgaaggcatcgaaacattagaggaagtggcttctgccaagcagtccgtaaagtacatacagagcacaggttcctctgatgattctgctctagcactgttggcagatattaccagcaagtaccgtcaaggtgacagaaaagggcagattaaagaagatggctgtccatctgaccccacgagcaaacaggtagaaggtattgaaattgtggaacttcagctgtcacatgtgaaggacttgttccattgtgagaaatgtaaccgttcatttaaattgttttaccattttaaggagcacatgaaatcacactccactgagagtttcaagtgtgaaatatgcaataaacgatatcttcgagagagcgcatggaaacagcacctaaattgttaccaccttgaagaaggtggagtcagtaagaagcaaagaactgggaaaaaaattcatgtatgtcagtactgtgagaaacagtttgaccattttggacattttaaagaacatcttcgaaaacatacaggtgaaaaaccttttgaatgtccaaattgtcatgaacgatttgctagaaatagcactctgaaatgtcacctcactgcatgccaaactggagtaggggcaaaaaaaggaaggaagaagctctacgaatgccaggtctgcaacagtgtgtttaacagctgggaccagttcaaagatcacttggtaatacacactggagataaacccaaccattgtactttatgtgatttgtggtttatgcaaggaaatgaattaaggaggcatctcagtgatgctcacaatatttcagagcgtctagtaacggaagaagttctttcagtaggaaacacgtgtgcaaacttgaacctgttaacattcaatgactatttttaggaacaagttggggaaggtgcatgtgctaccattgcttcaggttcaggtggattcagcacaagtgactgtggaacaagtccatccagatctgctccaggacagccaggtgcacgattcacacatgagtgagcttccagagcaggtccaagtgagttatctagaagtgggccgaattcagactgaagaaggtactgaagtacatgtagaggagctgcatgttgaacgggtcaatcaaatgccagtggaagtacaaactgaacttctagaagcagatttggaccacgtgaccccagaaatcatgaaccaagaggagagagagtctagccaagcagatgctgctgaggctgccagggaagatcacgaagatgctgaggatttagagaccaagccaacagtggattctgaagcagaaaaggcagagaatgaggacagaacagctctgcccagttttagaatgaaattacacatgaatatatttttaaatttacttgttgggtttttgaactgattatgggcagtttgactgtccttaattaagcctaacagacaagtggaccaaagttaagctgtttcctgttgtgctgaactgttgtccgttgaaacacattgattcccctccccctacttattgccacagaggagggatcttttccataactgaaggggagttttgagaagtatatttctggaaacttaaatggattatattcttattatatagttgggtaccgaatgtatctattttcattgtggtaaaagttcttccttttctctttcccaggtcatgttcttcctcaaattttttccatattgtaaaatcaaacttaaatcattagaatacaagtttatgtattctaatgcatgttagaaaattgaataatataggaaacacaaggctgcatgatgaaaagtgcattgttactgtgcagttaaattttggcttctggctttctttagtttgaacaaacgttcttgtctaccccagtagtcacagatgccatctttgcaacagaaagagtggtggtggcaaaatttctagaatgttctttagagcacactggggtaccggat

SEQ ID NO: 2205 - DNA, 728 bp, Homo sapiens
gccctcccagaggtacccactgtggtacaagaacatggggtccctgtggatcctctttgggatggcatggctggccttgatcatcaaactcatcctctcccagctggagacgccagggagggtatgttcctgctgccaccacagctctaaggaagacttcaagtcccaaagctggagacagggacctgaccgggagccagagtcccactccccacagcaaggatgctatccagagggacccatgggaatcatacagcatctggaaccttctgctcacgctgcaggctgtggcaaggacagctagttatactccattctttggtcgtcgtcctcggtagcaagacccctgattttaagctttgcacatgtccacccaaactaaagactacattttccatccaccctagaggctgggtgcagctatatgattaattctgcccaatagggtatacagagacatgtcctgggtgacatgggatgtgactttcgggtgtcggggcagcatgcccttctcccccacttccttactttagcgggctgcaatgccgccgatatgatggctgggagctctggcaccatacggcaccatgaagtagcggcaatgtttgagcggcacaataagataggaagagtctggatctctgatgatcacagagccatcctaacaaacggaatatcacccgacctcctttatgtgagagagaaataaacatcttatgtaaaatacc

SEQ ID NO: 2206 - DNA, 489 bp, Homo sapiens
ggaaaagaagacacatctcccaaccttttatttaggtctggcagaattttagggagtgaatgatttaggtgaagcaggtaaatggaaaatgtgattgacagctatctctgattctaattgggccagcagagctaggagggccatctggcagagcttttccttatgggcccagtggggagggggaatttgggactctctttgccctgtagctcttgtgtctaaggtaatccattgtcgtcctattccttctgctccatgtgtctcagagaactggaccccatcctgactgaggtcaccctgatgaatgcccgcagtgagctatacttacgcttcctcaagaagaggattagctctgattttgaggtgggagactccatggcctcagaggaagtaaagcaagagcaccagaagtgtctggacaaactcctcaattaacttgcctttttgagctgttaccatggcagggagctaattggcttatatgttacc

SEQ ID NO: 2207 - DNA, 979 bp, Homo sapiens
  misc_feature (1)...(979): n = a,t,c or g
ggaaaccgagaaagaacgagggaaaagggagcgatgttgatctcaggaagcacaaagggaccttcctagctctgactgaaccacggagctcaccctggacagtatcactccgtggaggaagactgtgagactgtggctggaagccagattgtagccacacatccgcccctgccctaccccagagccctggagcagcaactggctgcagatcacagacacagtgaggatatgagtgtaggggtgagcacctcagcccctctttccccaacctcgggcacaagcgtgggcatgtctaccttctccatcatggactatgtggtgttcgtcctgctgctggttctctctcttgccattgggctctaccatgcttgtcgtggctggggccggcatactgttggtgagctgctgatggcggaccgcaaaatgggctgccttccggtggcactgtccctgctggccaccttccagttcagccgtggccatcctgggtgtgccgtcagagatctaccgatttgggacccaatattggttcctgggctgctgctactttctggggctgctgatacctgcacacatcttcatccccgttttctaccgcctgcatctcaccagtgcctatgagtacctggagcttcgattcaataaaactgtgcgagtgtgtggaactgtgaccttcatctttcagatggtgatctacatgggagttgtgctctatgctccgtcattggctctcaatgcagtgactggctttgatctgtggctgaccgtgctggccctgggcattgtctgtaccgtctatacagctctgggtgggctgaaggccgtcatctggacagatgtgttccagacactggtcatgttcctcgggcagctggcagttatcatcgnggggtcagccaaggtgggcggcttggggcgngngtggccgnggcttcccagcacggccgcatctctgggtttnagctggaaccataccctt

SEQ ID NO: 2208 - DNA, 3158 bp, Homo sapiens
tcgtgacaagttcaaaaggaaaacttcctttgttttaatgcagctgtgcctcagaagcctgtgatttcctaggaaaccatctgggtttagcccattagaaaaatgcagtttaaagcagtgtcacactgggctgcctgaaggtacccttgggagatactggagcgcttctgcattcagggctgggtgctcaccattgatgggaacccttcctggacaggcggtagacaacatgtgaagtgactgtgccaggtgaattttggggttattcaccatttgacctacaggatcatgctcttttttcccaggcaaatgccaactgtgagaaggcagtctgatatcctggtgtatcttctatgtcaataaaatgttcctcatcaggaatggtatcatcttcgggtaactcaaaaagaccaatcaaagactgtaataatggagtccacagtttggtatactcagtgtcccatcattgggggacattctgttagtaagttggttatgccaaccgcacagatctttttctctacatttccagataccttcctgaatttcaggaataataattttttccaaaaccattccaaacatttttggttgtataccatcaaatatttcttgtagtgctagtgcccccatattttatgcaatacaaattaataaagactaaaaaactcttgataaacttggttgttttggaattctgaagtctctggaatagcagaatgaagatttgtttcctatattggtcaactgattcaggaggcatgtgctctattatactgtttagaagataaaaaccttggtggtcatttgctttggatgcaatcagcttctgaaagacacctagtaaccccaggaattttgtcagctgcagcacttgctattgtgtttgaaccgcgttctaagaatgcttgaagaagcctcactagagcaggaatatttcctgttctttcccaaagcactggctgaaggagatgaggaaataaggccatataggaagacgggatgtcatttttgtgtgtttccagaagcaaagacatcacttgaaagacgtatggaataaattcttgcacatcattttgtaagatttcagtaaacaccaaaaacaaagcctcctcaaaatttacaacagcagcagggttagctttgcaagttattcttatggataaacatattgcttcaaacatgtagtgattaaagtgaggtttgcttgggttcttactaacagctaatagcttctgtgtaagctgagtgatgagagtagggatgtaggggattatggcttcttgtaggagagaaaaacttctcatgatagctttcataatatattcattttctgaagagccaggaagtgtgagagctttgaaaaggtttgttagcagaatctcaacaaacggtgcgatttctgcagctgtaaagagagtggcattgttaggccctcgcatagtaaagagccgttcaagagcatgagctgcgtaagtatgaacaacaatacttccagcttgaagatgattaatcaagagaggaatcgagactaaaagatgttcttttggcacttgatttctaaaaatcataatatatttgataccgtcagctttaaggacaggaaattcattcacattagctgattttaaatcagggaggatgtgattcacaaagaactcagttaggtttacaagttcatttgcttgtgtaattccatgcttctgtgtttgggcttttgatgccaaagatgtcactaggtagatggctgcatctttgtgtttccagttgacagatggattttttgcgtattcctgcagcatggaattaacataaccagagaagattcctgtcacaggtccctcaaaaaacttgcataatcctcgtaccagatcacaagcagccctgcgtctagtatcaatatcagatccttccaaatctctccttatgtactcctcagaattatcttcaaatgcttcttcatcagcagctctaaattccatgttaggcacaataaccttttcacagatacttgtcagcgtgttctggtcctcaaatagattcttataatgaggtctctcacaaactgaagccagaaattgaattgcattacttaccaacaaatcatatttaacctcttgacccgttgtaactagtaaattccagatggctgtaacaaaacgaggcaggtatcgctggaattcttcatcgtacttttgtgcatagagtgcggcattatcacaaatctgggattttaagagctccaataagccggcttcctcttcatcatcagtttgtaaaagcttattatccaatgttaagagagtatggaaattattcatccaagtttccatattaccttcccaaaattcagggagatcctgaaagtttaaactatagaacaattttgagatcaggatcagggaagaaaacagaatcctcagggcagaggcatcatttgcatgggtactgcagagttcaatagtggccttaaaaagattagtcaaaggcaaagcaaaggcatccagaacaagcttaatttcagtccataactcgtttgacttaaattcatgacggtatcttttaaataatgaatgtgctgtacggaggactccattaataacatggaaatctccactctgaaagcgattcaccatttctgtcagcaagtcaggccatttctgtggaaaatcttctctgccaataatgctaattgcatcacttaactgcttctgaatttgctctgggctgctaagcatcaagtgcactatgttggctttaatggccactcgatcggcttcacaaattttgtttggttcatcttcaacaattctccagttccttttaatatagtttttgaatgttactgaagcacatactttgataacattatcctgggacttctccagtaatgtcaaaagcaacagtggataattctgatttccttcaacagattcaagaaatttctcagctggacgtcggatggcaggatcaggatcaagtgttttctttaaatattctgttagtgtttgcagatttgcatcgctgagttccattgctataggatctcgtggggatacagaaacggaggagggaaccccagccgcggaccgtagctggcactatccgctcctgccgccgctccgcctcacattcaaaccccggcaaaatggcgcgac

SEQ ID NO: 2209 - DNA, 1863 bp, Homo sapiens
ctgcccgggctgcgcggcgtctgcaggcgccaccgctgcctctttccggctgtgaccctcctcgccgccgccgcttggctgcgtcctccgactccccgcgccgccgagaccaggctcccgctccggttgcggccgcaccgccctccgcggccgccccctggggatccagcgagcgcggtcgtccttggtggaaggaaccatgaactggcatctccccctcttcctcttggcctctgtgacgctgccttccatctgctcccacttcaatcctctgtctctcgaggaactaggctccaacacggggatccaggttttcaatcagattgtgaagtcgaggcctcatgacaacatcgtgatctctccccatgggattgcgtcggtcctggggatgcttcagctgggggcggacggcaggaccaagaagcagctcgccatggtgatgagatacggcgtaaatggagttggtaaaatattaaagaagatcaacaaggccatcgtctccaagaagaataaagacattgtgacagtgggctaacgccgtgtttgttaagaatgcctctgaaattgaagtgccttttgttacaaggaacaaagatgtgttccagtgtgaggtccggaatgtgaactttgaggatccagcctctgcctgtgattccatcaatgcatgggttaaaaacgaaaccagggatatgattgacaatctgctgtccccagatcttattgatggtgtgctcaccagactggtcctcgtcaacgcagtgtatttcaagggtctgtggaaatcacggttccaacccgagaacacaaagaaacgcactttcgtggcagccgacgggaaatcctatcaagtgccaatgctggcccagctctccgtgttccggtgtgggtcgacaagtgcccccaatgatttatggtacaacttcattgaactgccctaccacggggaaagcatcagcatgctgattgcactgccgactgagagctccactccgctgtctgccatcatcccacacatcagcaccaagaccatagacagctggatgagcatcatggtgcccaagagggtgcaggtgatcctgcccaagttcacagctgtagcacaaacagatttgaaggagccgctgaaagttcttggcattactgacatgtttgattcatcaaaggcaaattttgcaaaaataacaaggtcagaaaacctccatgtttctcatatcttgcaaaaagcaaaaattgaagtcagtgaagatggaaccaaagcttcagcagcaacaactgcaattctcattgcaagatcatcgcctccctggtttatagtagacagaccttttctgtttttcatccgacataatcctacaggtgctgtgttattcatggggcagataaacaaaccctgaagagtatacaaaagaaaccatgcaaagcaacgactactttgctacgaagaaagactcctttcctggcatctttcatagttctgttaaatatttttgtacatcgcttctttttcaaaactagttcttaggaacagactcgatgcaagtgtttctgttctgggaggtattggagggaaaaaacaagcaggatggctggaacactgtactgaggaatgaatagaaaggcttccagatgtctaaaagattctttaaactactgaactgttacctaggttaacaaccctgttgagtatttgctgtttgtccagttcaggaatttttgttttgttttgtctatatgtgcggcttttcagaagaaatttaatcagtgtgacagaaaaaaaaatgttttatggtagcttttactttttatgaaaaaaaaattatttgccttttaaattcttttcccccatccccctccaaagtcttg

SEQ ID NO: 2210 - DNA, 342 bp, Homo sapiens
  misc_feature (1)...(342): n = a,t,c or g
ggcatttagagttacatacagacatatggtggaaaggggtcttgagttgatttggggcaaaaggcaaccgtccccatgcactagagatgaatcatgcctacctccctttgtcatgggaagtggcggccactgccacatctgctatgaggctcttcgccatcgttggctgctggaaatttggatacaggtaaatggtatataaggcttctttttgcttgtgcaccagaagtctttgtcccagcctccagatcagcagtcagtactcccctctcccaacctgtaggaagtacttgtgaaaagttatctatccctggctgagngggaggtcttacctcattgatg

SEQ ID NO: 2211 - DNA, 1758 bp, Homo sapiens
tttttgggattttgtgcaagatttaataaaaaacaaacaaaaataggaatggttgctttcaacattttccaggttgtgaaaggtttgccacgactctcaggggtgtggttctaagctgcatcagtggaacaaatacaaaatgctgtcctcctcctgggctggaaggcagtgcactttctcctcttaacagccagactagcgggtgaggagtcagtgctgtgacccaggccaagctggagtgtccgcatagctttttctctgaccagtggggattccatctaccttgaggcgtgctggctgggccccgtttccacaccagcacatggtgagacagggtagcttatcaacaggctgctgggccttaatactgacagtgagtgtggcgggtcacagccaggaaaggactaacacagatgccctcccagcccccactgctggcctaattttagaataccacggaaaaaagctttgatgaagacaacaggaagtcaacacagcagagagtggtgtggacaacccagaagccagcctcacgcattccatgcccacagttaacgatgacaacaacagcaataataataataataataaaacaaaggtacaggtgaaaagcagcgcttggggtgtgctgctgcaagctggggaaggcgcgtgctcaacttggatgggacacacctagtctttcttcaagtccctggattcaaagagcttcaaccgttcttgcaccgtcaggccttccttcagactcttggacctgatgtttctgagttgccgggtgacacaggatctgtctttcttcaagaagtcagggttgcttttagatttcattatatcatatccggacaccgtggcactgtcaggggacttctcccccagtgcttccgttgcagccttgagctgctccttcaacctgctgatgtcacagtcagccttagccttcgcgatgctgagctctgtgtagatgtctttgtacttgtcacttgcgtacttcttgtcccgcagtgccgtctgcagctcatccttgagggagctaatctcctgtttcaggtactgtatttccgattcctttacccgcaataagacctctagttcataggcatccttgccctgtgcaaggggtgacccagtggcctccccaccgccgtccccagtcagcagcgtccgcaaccgtgtgatctctgcagccaggcggttgttcagctcctggttgtgggcattgagctcctggttctcacgctggcactgccgcagggcctgccgctcggcctccagcgcctgggccagatgggcattctccaggcacttctgcgagtactgctccgagaggacctccagttcccgctgcaccgactgcagctcctccaggtactggcgccgcagggcctcaacatccgagttgacgctgctgatctgggaccgctggctcttctccagctcccgctccatttcctcccggtgggcgttcttcatggcttcgatggctgagatggtggccgctgtctcctcggctaggaggcggtctttctcttctcgaagtttctctagctcccgctggtgctgcctctggagatcttcaatcttctggtgcgtttcttccattgctgcaaaccctcgctcgcacgtggcctgcagcacgtagccctcacgggcgctctgctcccggcccagggccaccctcagctggtcctgcaggagccggttctgctccagaaggtctgaggcctccttctggctctgctccagctccttctcgagcag

SEQ ID NO: 2212 - DNA, 381 bp, Homo sapiens
  misc_feature (1)...(381): n = a,t,c or g
gggtnnnnnnnnnnnnnnnnnnnnnnnnnnnnnnnnnnnnnnnnnnnnnnnnnnnnnnnnnnnnnnnnnnnnnnnnnnnnnnnnnnnnnnnnnnnnnnnnnnncgcagatatgccaaggagggggaccttaggaaataacccaggctctcagttgaggctctgggaggaccacaccctagaagtggaggcaaaacagaagtagtctgagccttacaaagatttctaaccagcctggcgacagagagagatttcctctcaaaaaaaaaagaaaattatttgtgaggggttcttgtttctatggagcgtaggctgtgtattttgggatattttggggaaattgtgtcnggccncatattccccntagcncccagntanatgta

SEQ ID NO: 2213 - DNA, 851 bp, Homo sapiens
ctccgagaggccttcagagaattcgacaaggacaaggatggctacatcaactgccgggatctgggcaactgcatgcgcaccatgggctacatgcccaccgagatggagctcatcgaactgtcccagcagatcaacatgaacctgggtggccatgtagattttaatgacttcgtggagctaatggggcctaaactcctggcagagacagcagatatgattggtgtaaaggaactgcgagatgctttccgagagtttgacaccaatggtgatggggaaataagcaccagtgagctgcgagaggctatgaggaagctcctgggtcatcaggtgggacaccgagacatagaggaaattatccgagatgtggacctcaatggggatggacgagtggactttgaagagtttgtccggatgatgtcccgctgaggccgcgagggcccctccaggactgccaagctcccaaaggcggggctaagaggagctagagcttgcctcacccgctgtagccgccgagagcccaggatgtactggcggatggggcctgcctgcaccccggggaggcgcccaccccggacccccacccctccgcactgtgaaagactaactcctgcaactggaaaagcgggggcgcccgccgacgaggaggccaccgtgccaagccggcagaggtcatgcccaggcgccaagggccatgtgcccagctgctgctggctgggtgggccagggagcccgccagcagaccccacacagcatgtccgccccagggcaaagcctcccaacctttctctgcgcccgtcccagctcgcctcagccctgttatctcagaaccaataaaaatatttccaagagca

SEQ ID NO: 2214 - DNA, 1106 bp, Homo sapiens
gcatcgacaggctggtcctctactgcgggagccggctgggcaaatactacgtcaaggagaggtctaaggcaatggtggcttgctatccgggaaatggaacaggttatgttcgccacgtggacaaccccaacggtgatggtcgctgcatcacctgcatctactatctgaacaagaattgggatgccaagctacatggtgggatcctgcggatatttccagaggggaaatcattcatagcagatgtgggagcccatttttgacagactctgttcttctggtcagatcgtaggaacccacacgaagtgcagccctcttacgcaaccagatatgctatgactgtctggtactttgatgctgaagaaagggcagaagccaaaaagaaattcaggaatttaactaggaaaactgaatctgccctcactgaagactgaccgtgctctgaaatctgctggccttgttcattttagtaacggttcctgaattctcttaaattctttgagatccaaagatggcctcttcagtgacaacaatctccctgctacttcttgcatccttcacatccctgtcttgtgtgtggtacttcatgttttcttgccaagactgtgttgatcttcagatactctctttgccagatgaagttatttgctaactccagaaattcctgcagacatcctactcggccagcggtttacctgatagattcggtaatactatcaagagaagagcctaggagcacagcgagggaatgaaccttacttgcactttatgtatacttcctgatttgaaaggaggaggtttgaaaagaaaaaaatggaggtggtagatgccacagagaggcatcacggaagccttaacagcaggaaacagagaaatttgtgtcatctgaacaatttccagatgttcttaatccagggctgttggggtttctggagaattatcacaacctaatgacattaatacctctagaaagggctgctgtcatagtgaacaatttataagtgtcccatggggcagacactccttttttcccagtcctgcaacctggattttctgcctcagctccattttgctgaaaataatgactttctgaataaagatggcaacac

SEQ ID NO: 2215 - DNA, 451 bp, Homo sapiens
  misc_feature (1)...(451): n = a,t,c or g
gnnnnnatttganacccnttatgacttggaataccatnnnnnnnnnnnnnnnnnnnnnnnnnnnnnnnnnnnnnnnnnnnnnnnnnnnnnnnnnnnnnnnnnnggcacgagctgatcagccaccgttgcctggagaacaaggaattaacttggataactcaggccctaaactgccagaattttcaaaccggccaccagccccgtcgcagaatttagtctcaaaggaaacttcaaccacagcactgcaggcctctgttgccagaccagagctggaggtaaatgctgccatagtctctggacaaagcagtgagcccaaagagatagttgaaaagtccaaaatcccaggccgaagaaactcccgaactgaagagccaactgtggcctctgaaagtgtggaaaatggacatcgtaaacgatcttctcgacctgcttcagcctccagctctactaa

SEQ ID NO: 2216 - DNA, 353 bp, Homo sapiens
gcagagaggaaataatggcaggaagtcacagcagcccagaaacagccccttccaaagggcaggctgtgaccccacggcaactttgcaggcacctcccttgatttcctgtgggttcctcaggtagcccatcaggcaagagctgcctcaggaagggtttaacagcaggaagatctgggtagctcagatgggctctggatcacgctgctgggctggaatcttagctcccgcaaccataggggtagcccctgagccagtcccttcacctctctgaacttcagtcttctttcttatctggcgaggttgatgtcacaattcacggaaataattcaggtaaagcagagatcacaaattgg

SEQ ID NO: 2217 - DNA, 1322 bp, Homo sapiens
ttttttttttttttttttctttgtcagaaaatatatttattattgatagtgagtgaagtaaagatgtgagtattcactatagaggttttatcagccaaggttgccttcatattgataaaaataccttatctcacttgtaatcataaaacattatttccagtagaagaggtacattttctctcctttttgtcttcttgcctgtataatcaccataattaagttataatgaaatagctcttacataatcaaaggagaaaagaaagacaaaaccaacatgccacagcctagacaattccatccagcactgctgcctccagatctgttttctggctctctccacccagcactgctgccctcggatctatgttttctggctctctcctcgccccactccaattaatttagcccccaaccccatcctactttgttagggtggaggttcaccaaatgatggggcttgttcagaagagaaacattttatggtcagtgcaagttgaatagaaagtaccaaaaggtggagagggctgcccttctcttttaatcatcataagagggtttactaatactcaagagtgtcctttaatgactgatccctgatcaaggctttggcccttcaaactgctgctgttcaaaacgtgaaatgattctgctgaatccattcttgatgtctctctttagtggtcttctcattagtggtcttctcttcaaatgggttgttttctcactaggaaaaaaaatgttccatctctggaattaacgttgatggtgttttgctcattctgaaagtttttatcctcccttctcaagcatgctctgtttggcatgattgacacagtgcatatactgggtggccagagcggagcatttgagggtctggtgggtgttctcacggtaacactgaagaattttggcctgcagatcagcacagactggatgagactcatatcgcttgaactttgcttccacctcttcagcagctttctgatattgttcagtggtgactctgtagaactctgagctcctctcctccagtctagccagctgttctttgtagaatgcatcctgcttctttagcactcggtctttctcttccagctgcctagccaggtgctttgccttagcgcgttcctcctcgctacatatcctctcccgaaggatggctctggttaactgctcattggcagcagccctctctcggtccagctctttggcttgctttagtcgtttctgatcttcggattctttcttggcttgctccaatgccagctcctcagctactcttcttttcaattcttcatcagaaactgaggcaccataagcac

SEQ ID NO: 2218 - DNA, 572 bp, Homo sapiens
gaggagttagatcacttatccgtctctccctggcccacccttctctgtcacatggcttctttgctgaccgtgatacacaccacacttgtcttctctacctggaagttgtattccccatacccacatggctcacttcttcacttcattcaagtctctgctcagatattaacctcttcagagagcccttccttcacacactgtcttgcatagcagcctcccctacaagttgtcttctttctccttaacttttgtgatggttaattttaggtgtcagcttgactggattaaagaatacctagagaactggaaaggcattatttggtagtgtgtctgtgagggtatttccagaagagattgatatatgactgaatggactaagagggaaccatccgccctcaatgtgcaggtggcttgaaacaaaaacggaagaaaggcaaattggtcttactctcttggagctggaatacacgcttccattcctgcccttagaaccccagcggtgacggaaaggctgatgtaggtcctggagtcctgagacccaacagcctgggatcctgaaatccaaggtcgac

SEQ ID NO: 2219 - DNA, 1001 bp, Homo sapiens
  misc_feature (1)...(1001): n = a,t,c or g
aactatgttacttgaaacgttgttacatttttaaagattgtttagtacttagggtgagttgttgagtgtgagtagaaattaaacttgtgatttgtgaaaatgttgtaagattatctgagtaatggacaatttctaatattcattttttaaagtagctaactctgccttattatccccttccacttttcccctgggatgggtgatttatataatggaatgcagtgtcattgattgtgtttgaaggaggcacactaaatagcacactattgttatcttgaaaatttgttttattttgtttttgcccattttttaaatcatttcattctatttttgcccatgtctcttgtaatgagctacacatggaattaagtacacagagttctggtgatgtattcattcatgagtttaaggaagtgagattttcagcttcatttccttctaagcatctcaactaggagcacaggggagacaaaaaagattgcaacctctttatacagttgtgtttgacccttggcactctattcttacttcaattatcgtccattgtaatgatcccttttcatgtctagcttaaccctaaactgtgagttccttgagaataagaactttgtcacagtgatgttttaatatattctcaccacacaataaaggatctaagtgtgtgctcaataaatggggtatttgttggggaaatttaaacaaggaaatagtggaattattttctattcactatttgggataccctttctcccaaaggatattttttatttgagagtatcttatttacagtaaaaatcacaaatattatatatacaatttagttttgacaaatgtctacatttctatcctttacccaggccttcaataagaaaataataataatttttttcccaaagacataatctggntatttggtatttggctgaaacaatgaatatctttgatacatggattctttaataatgaatctgtatttagtatttagtcattacttcataatg

SEQ ID NO: 2220 - DNA, 569 bp, Homo sapiens
atctctatggagatggcctaggcgatatccctgagctgagagcatcaccctgtccccgaatccttctttcctctctgttttgtttttcattcccctccctctctcccctccccctccagtccacgacgactggctgttgaccctgttcaggcctcggtgaaggcttttggttactccccttcccaccccatcccttaattttattcttttgaagagtgcatttcaagctgccaaggtggagagagggattacagaaaggagaacaccttatttcagaaaaggtgtaccatacctgagagcaccaggaagtcgcatgagagatcacctgatacatgaacgtatgatgttccatctgcgcattgatgaataggcagcatttacaaattaactgatgtgttgctgtatatcatctctttgatgattgctcctcttctttgtatcctgtcttataatttcaacacatttgcgatactcaatgtctattctaaattaaccatgttttgtaccacaaactcattgcccatggatctgttgctgaaacaaggaagtcttaaacaagaagtggaatc

SEQ ID NO: 2221 - DNA, 363 bp, Homo sapiens
tgtcttttcacagaaaaacattgggtttctctctgggtttggacatgaaatgtaagaaaagatttttcactggagcagctctcttaaggagaaacaaatctatttagagaaacagctggccctgcaaatgtttacagaaatgaaattcttcctacttatataagaaatctcacactgagatagaattgtgatttcataataacacttgaaaagtgctggagtaacaaaatatctcagttggaccatccttaacttgattgaactgtctaggaactttacagattgttctgcagttctctcttcttttcctcaggtaggacagctctagcattttcttaatcaggaatattgtggtaagctggg

SEQ ID NO: 2222 - DNA, 357 bp, Homo sapiens
cggacgcgtgggcgcgaaccatggccggcatggtggacttccaggatgaggagcaggtcaagtcctttttggagaacatggaggtggagtgcaactaccactgctaccacgagaaggacccggacggttgctatcggctggtggactatttggaagggatccggaagaattttgatgaggctgccaaggtgttgaagtttaactgtgaagagaaccagcacagtgatagctgctacaaactgggggcctactatgtgactggaaaaggtggtctgacccaggacctgaaagctgccgccaggtgctttttgatggcgtgtgagaagcctggaaagaagtcaattagcagcatgtcaa

SEQ ID NO: 2223 - DNA, 404 bp, Homo sapiens
tatggaggccgccaggaccgctgtactccgggtgaagcggaagcgcagtgcggagccggcggaggctattgtgctcgcttgtaaacgcctccggagcgacgcgatcgagtcagcggcacagaagacgtcggaggatttggagagagcggcggagaataatgtcttccacttggtggccactgtgtgctcccaggaggaaccagtccagcctctcctgcgggaagttctgcgcccgtcacgggacagccagcagcgtgtccgccgtaatctccgcgcctcggctcgggaggtccggcacgagggccgctaccgggtgctttccagccgccgatccttggggaccacctcgagcggccaggagtccgagtacacgccggggaaccagaagccgccggaactcgggc

SEQ ID NO: 2224 - DNA, 423 bp, Homo sapiens
  misc_feature (1)...(423): n = a,t,c or g
ttccccgtcctgcgcgtggacgtggacaaagttctccatgtctgcattggtcaggacttcattgtctttcttccaggcaaaggtcatgggggagctgctgctgctggctgctgagcatgtaaaccggatgtccttgccacatagccatggtggtttctggctgggtgatgatctgtggcttcaggaagtcatctggggagagaagggtcaactgtaaagcgctgggttcttggtacacagaggaaccagctgctgttcatgctaacagaaactgacacagacaccaagcaggaaccagagcttgaggtaaatgtgcatcctcagccccaccaaccagangccgtaagagttgcaccatggacatctgacctcatctaattagaagtctgtgagtactgatcacctttatgatcacactccttg

SEQ ID NO: 2225 - DNA, 919 bp, Homo sapiens
  misc_feature (1)...(919): n = a,t,c or g
gcgttcgcagccgccggtcatcccgcggaggagcgcgcagccccggggaggccggaggacgcgcccatagaatgcccaggggcgaacaaactgtcctgagcccctctggtgcagccacctgcctgtcccatacgccccgcccaccatggagtccagagggaagtcagccagcagccccaagcccgacaccaaggtgccccaggtcaccaccgaggccaaggtacccccggcagccgatgggaaagcccccttgaccaagccctcgaagaaggaggccccggccatggaagcagcagccgccagcagcccccaccacgggcacctgccaagaagacctcggccaaggccgaccctgcccttctcaacaaccacagcaacctgaagccagcccccacggtccccagcagtcccgatgcaaccccggagcccaagggtcctggggacggggcggaggaagatgaggctgccagtggggggcctgggggccgaggtccctggtcctgtgagaacttcaaccccctgctggtggctgggggtgtggccgtggcagccatagccctgattctcggtgtggccttcctggtccggaaaaaataatacctgggggccaggcggggggcacggagccacttcctgtacagacccgaggaagccagtgcatgcagagttcacccttacctattcgtacacacgcacattcattacacacctacatacgcccccaacacacgcgcacggtgaagaggacgcccgagcccacccctgctgacccagggacttccccaaccttccagggcagaaagagcccaggctccggggttncacagcacaggatgtgggngcgagggcacagcttggggaacggcaagaaaggaatgggaccctgttttttnggccccccccaccctgggcggttggt

SEQ ID NO: 2226 - DNA, 292 bp, Homo sapiens
  misc_feature (1)...(292): n = a,t,c or g
gcctctttttttgtttttcctatcccaagttgtattactagttttggggagtttgcagacaattgaatattctatagggctgtgttgcagctttaggatgggatcgacctgtcatgtttttgaggttatccagggtgtatatctctgggagagaaggggaatgggcaaagagtgggggagtcttgagtcaagtttgggtttttgtttttttaaggagacaaggtctctgtaantccagggctgcagtacactggcctgaccctgggntcactataggacttggggctcagcc

SEQ ID NO: 2227 - DNA, 517 bp, Homo sapiens
  misc_feature (1)...(517): n = a,t,c or g
gcggcacgaggcggaggcctggaaggggaaactgaagcagaaagaggttacttaatgggctcaaggtcacctacctgacctaccagcagctcaatggccttcccaaagaagaaacttcagggtcttgnggctgcaaccatcacgccaatgactganaatggagaaatcaacttttcagtaattggncagtatgtggattatcttgtgaaagaacagggagtgaanaacatttttgtgaatggcacaacagganaaggcctgtccctgagcgtctcaaagcgtcgccaggttgcagaggagtgggtgacaaaagggaaggacaaaagggcagccaaactgctanacacacctgccacccagaggttccgctgggaaactgcttcttacctgctacaaggccagcccctnacagttacccgctttgggctnaaagctggaacangtganaatccctaggaccttgacttnaaggagcncaggacttgccaacatgcatanaaaaggacttgatgcatct

SEQ ID NO: 2228 - DNA, 454 bp, Homo sapiens
ctgaaaccatccctctccaagtgttggcgtttccctcccaggctggaatcaactccagggttaaaattaatttctcttccgctcacaacaatggtacagcctctccccaagtacatcctgtctttgtgcagaacacactgccttgccgcgctgcagcccagagccccagagctgggatgatttacccagccagagcccacagcagtactgtgatcctctgggacctgttcactcccctagtcaagagactcttcctagacactcagtttgagcctgtcctggggagggcaggtgggccgaaacttcggcagcccctcaccacccagaggcggtgctaacagcctgctgtatggtgggtctccactgcctggagctcgggaagccggaagttgggggatgacagcagcatcatgatgctgggtgtggagtgagcatggggctggcgtcgaggcca

SEQ ID NO: 2229 - DNA, 1088 bp, Homo sapiens
  misc_feature (1)...(1088): n = a,t,c or g
tccacttctttgaggtgccccgcaatgacacatgtccggagctgcctgagatccccaatggctggaagagcccatcgcagcctgagctagtgcacggcaccgtggtcacttaccagtgctaccctggctaccagggtagtgggatccagtgtcctcatgtgccagtgggacctaacttggagtgaggacctgccctcatgccagagggtgacttcctgccacgatcctggagatgtggagcacagccgacgcctcatatccagccccaagtttcccgtgggggccaccgtgcaatatatctgtgaccagggttttgtgctgatgggcagctccatcctcacctgccatgatcgccaggctggcagccccaagtggagtgaccgggcccctaaatgtctcctggaacagctcaagccatgccatggtctcagtgcccctgagaatggtgcccgaagtcctgagaagcagctacacccagcaggggccaccatccacttctcgtgtgcccctggctatgtgctgaagggccaggccagcatcaagtgtgtgcctgggcacccctcgcattggagtgaccccccacccatctgtagggctgcctctctggatgggttctacaacagtcgcagcctggatgttgccaaggcacctgctgcctccagcaccctggatgctgcccacattgcagctgccatcttcttgccactggtggcgatggtgttgttggtaggaggtgtatacttctacttctccaggctccagggaaaaagctccctgcagctgccccgcccccgcccccgcccctacaaccgcattaccatagagtcagcgtttgacaatccaacttacgagactggagagacgagagaatatgaagtctccatctaggtnggggcagtctagggaagtcaactcagacttgcaccacagtccagcagcaaggctccttgcttcctgctgtccctccacctcctgtatataccacctagggagggagatgccaccaagccctcaagaagttgttgcccttccccgcctgcgatggcccaccatgggcctattttttttgggtgttcatttgcccattt

SEQ ID NO: 2230 - DNA, 438 bp, Homo sapiens
  misc_feature (1)...(438): n = a,t,c or g
taaaattataattgaaaacaaaatctgacattctctgctaagtcttatctgaatgcttcagataatggtagtgtagtcagtgactaaaatatttttatcaaatttcctctctgtagacgcctgcaggtattgacgtctgtcagatctcgtcacattggctggtgccgcagctgttggagagtatttttctttatgattattttagaaaaaaaattttcttttccacaatgtggttctcttagaagaatgacgtatcttcttttcctcagcgagttggacacattgtgcccagggcagccctgtccttgggcagcgaccgcacaccaaagctgggaggaggctggtccngcggggcctggggcaggaagacagtgatttgcaggggtggctcccagacaccctgcccaggggatggctgggccaccacctgggggcgga

SEQ ID NO: 2231 - DNA, 514 bp, Homo sapiens
ggacaagagcggaggcctggggtgagcgcggcccgacgggcacgggctaggacagacggacgcagacggcccgacgacctgggcgttcggcggaggggcgctggggcctgactcgcggaaggggaaactgaagcagaaagaggttacttaatgggctcaaggtcacctacctgacctaccagcagctcaatggccttcccaaagaagaaacttcagggtcttgtggctgcaaccatcacgccaatgactgagaatggagaaatcaacttttcagtaattggtcagtatgtggattatcttgtgaaagaacagggagtgaagaacatttttgtgaatggcacaacaggagaaggcctgtccctgagcgtctcagagcgtcgccaggttgcagaggagtgggtgacaaaagggaaggacaagctggatcaggtgataattcacgtaggagcactgagcttgaaggagtcacaggaactggcccaacatgcagcagaaataggagctgatgggcatc

SEQ ID NO: 2232 - DNA, 1896 bp, Homo sapiens
ttttttttttggaaaccgagtggggactttactgatagtgacagtgatgacttcggagaggctgacggccggtacttcagggtgtgtttcaaaaagctgcccctggagggaggtggtagggaggcggtggggagctgcactcaccccggcctgtcccctccagctcagccagcagtcacactgcccagatttctttcttttcctctgccgcctgctcagcccgctgctcaaggcctttgcacaggctgccgccttcctccgccagggccagctgcccgatactggtgaggcccttgttcccttgcagtcctcgaggcaggctgtgtctgtgctgggtgccaggtctaggtcttctctcttctgcagagttgggctacacagagcagctgttccagttcctgcaggccaccgcccaggaagaagggatcttcggtgagtcccaaccagtcagcccaggctcctgcaggcagtggtgtttgctggtggctgctgccccctgcaggacagtgacaacccaactctaggaaaggcaggctgcagagtacagtcttctgtccagtcagagctctatccctccctgggcttctttaaacaagaggagagaagcctgtgcccagtggctctctgttctccctacctagagccttcacttctctcttctttccagagtgtgcggacccaaagctcgccatcagtgctgtctggaccttcagagaccttgagaaagacaggaggtttcctgaatacaccgacacctgggggggtcccagttaggatgacatcccctgggtaaaaggtaacaaactgggagacccaggctatcaggtcctctgtcttgaataccatctggttggtgttgccgctctggaccacttccccattcactcggcagcagatctttaagttgtgtggatctgctacactgtccttggtcaccaaggcagggcccagagggcagaaggtgtcgaaggtttttcccagcagccattgtttcccattacgtctcatttgccagtcacgagcactcacgtcatgagccacagtgaagccggccacgtgggcacatagcatctgtggccttgatgtgcttgcctttctttccaatgaccacggccagctccacttcccaatctacctcctggctctgtggtgggaggaccacctcatcatagggccccacgatggagctggcaaacttgctgaagatgatgggctccttgggcacgggcacgttctgttctttgcagtggtccacataattcatgcccacacacaccaccttatctggtcgtgtgactggagccaggaaggttacctccgaccgtggtaggactggcaactgggcagccagggctcttcttgccactgagagggtggcctctccctgctctaggaactgcgtcatcgtcttcgggagtgtggggtcaaaggcattgaggttgataacccctccaccattccctgtctccaggcccaagtgaggccccaccaggtggggtgcccggaactgcactagtctcatgtctctggagggttgaaagggccacttctgagcctgcagcagaactgtgagtaaccttcttctaccagacaccagcatcagagcctgctatacttcataaggtgaaacttttctagaggagcaactactaacatctacgcagtaagtcccagggattccagcgttccttcaaccagtgctttctgaaagttcccactgtgcttggctctgctggccgcggcggccgatcttcctgcgctgtagggttagagctcgcggggccgaaggtcaaagggcggcgggcgcctgagcactgccaccagtgaccgcagccagccggggaaatgcagcagctgctaacccagggccactcggccggatcacccgagagaaaa

SEQ ID NO: 2233 - DNA, 1341 bp, Homo sapiens
  misc_feature (1)...(1341): n = a,t,c or g
attatattagtgggaccagttatgacaagaataatcattatagtacttttcagattttataacctggagcagattattttaagttgattagtaggttctgttacagtttttcttttgatcgtgcacttatagtcttcatttaattcctcatagaatcccagtcacctttatatatcatattattggaagagattcatcttcataatctccagttttttcacagtgcctcacagagttaatcatgccttttggagctagaaggactttagaacttatctagttatgctcctttatattataagtaagggaatagaatcaataagacagtttctgcccaaagtcatgttaccagttggtgacagagctggaaatacgtagagatctatacccttaaatctctccactcacatgctgatatactttctactacaatatgctatagctttatggaactcagggtgatgatcagacgtgtcattagaacatgagtcctctgcttctgattcaggcatacttttgggattcttccatctttaaaggaaaaaggaagccattcatctatatttagtaacccagtaatatctcacttagtttagggttagatctttagttaattcaaccttatagatcatacttatgaaggtgataactgacacgtgttccctgaattttaatttgataggcaatacatctacccactccattattttttaaaacttcatttaatagtttaaacaagattggttttgttttcaatttttattcactcttcatagaatcacaattacctttatatatcatatgttattggaagagattcctcagtaatctccaatctctcatagtgcctcacagggttggtcaatggcttttggaactggaaggaccttagaacttatctgttatgctcctgatagccaatagcagatagaagcttgcaatcaagagggtaggacatgtgttcttcaatggatatcaaaggaagaggttgcaaaccaaagccatttggcaagccctgtagcctgggccatttaagacaggggcggtctcagccaaattgcacccatttaactatcccaaagagccacagtgcctacaacccaggccctaagttgatgaagaaaaagtcaaggaaggaggtgatacaattggaaatattcccatcaaatggttaatcttatttagaaaatgggcatattagaaaaagtccttccaagatgattttggataataaaagttgtatttgtggaaattggtattatctctgttttatgcacttacatttatcccttanattttgtttttagtgaccctacatgacattaaatttaaagtaaaact

SEQ ID NO: 2234 - DNA, 971 bp, Homo sapiens
gttgattctgaggtgcactgtgggaaagagcttgtcgctgcggtgttgctgttggagactcgattgttggtgacagcgaaagaacgataacaaaatgccggagcgagatagtgagccgttctccaaccctttggcccccgatggccacgatgtggatgatcctcactccttccaccaatcaaaactcaccaatgaagacttcaggaaacttctcatgacccccagggctgcacctacctctgcaccaccttctaagtcacgtcaccatgagatgccaagggagtacaatgaggatgaagacccagctgcacgaaggaggaaaaagaaaagttattatgccaagctacgccaacaagaaattgagagagagagagagctagcagagaagtaccgggatcgtgccaaggaacggagagatggagtgaacaaagattatgaagaaaccgagcttatcagcaccacagctaactatagggctgttggccccactgctgaggcggacaaatcagctgcagagaagagaagacagttgatccaggagtccaaattcttgggtggtgacatggaacacacccatttggtgaaaggcttggattttgctctgcttcaaaaggtacgagctgagattgccagcaaagagaaagaggaagaggaactgatggaaaagccccagaaagaaaccaagaaagatgaggatcctgaaaataaaattgaatttaaaacacgtctgggccgcaatgtttaccgaatgctttttaagagcaaagcatatgagcggaatgagttgttcctgccgggccgcatgctaatgctggtagacctggatgatgagtatgctgacacagatatccccaccactcttatccgcagcaaggctgattgccccaccatggaggcccagaccacactgaccacaaatgacattgtcattagcaagctgacccagatcctttcatacctgaggcagggaa

SEQ ID NO: 2235 - DNA, 867 bp, Homo sapiens
tttttttttttttctcatttcaaaatatttaattttgtctgaaaaggatacattccccggcttccctcccaccacatcactcccggcccaccagcaagtgacacactcgcacgcacacacgcacataaggccaatgggctacggtctgcttctgccctctctggctgggaagaaggaatttctctcttgcctccttcccccaacaaaggtaaagagaggggcccgctggaatgccagctcccagggaaggacacagagccccacacactctatcacatcacatgcacttagaaaaataaaaccaagtggtgttctggcatccccaacaccgtaagagagcaatatccacctggaagtcatctttgccattttctagaaaaatttattgcacttaattagcagatgttaaaggagctctggagtagagctttgccatgaaaaccagatgctcctcggccctttgcgttccaaggagcacggctcccggggcccaggtagagggctgcccagcttcagaggggttttcccccactggcttgcatgcctcccgccctgcctcaggccaaaggaccgtaggagcggcctgcacagcccctcagcagggttacatgtacccagacttaaggttcactgctaagtgccccctccaacctcagaagccagacaggaaaacctcttcctttggccaagggtaagagttacccaggtcctccacaaagttgccataaaccttgaaaactctccctctctctaaatgcacacgttcctccatcagatgagacatttataatatgaatattcttgcaaagttccagctcattcatgatttgtctgttctgaggttgcactgagggtgccacaaagctc

SEQ ID NO: 2236 - DNA, 1093 bp, Homo sapiens
  misc_feature (1)...(1093): n = a,t,c or g
tttttttttttttttttttgcgaggacaaagtcctttattagaaaatatatcaaaatcccagccccctgagccaggaccagaagagggagctattccagcataggcagaaaatgcccagggaggggcttccttcaccaaacaacttcccgggaacccataaatagaataaatattcacagaggtccgaggagaagccagatcactcttctctccatggaagagggaggggcttggggtccnagcccctgcctccctactctaggggcagggactcctaggaatcgtcacataaaatcatgacatcaaggattcacagtcataagccctacaggagaccctagagagagggacccctgaggtctacacgagcccagctccagtccagcagtgagggagaggcccctaccccctagcacggcaccagagttcagttccctcacatccctctgagaacagtgaggagctgagggtggggagaatacaaccccatgaattcggtttcatgattaaggtagacaggaaggaggagtcagtgtgaacctcggagggctgtgtggttggcagtagatagaggcccagggcctggctgggggcccggcgttgcagcatctcttgacggaaggcttgggaggaaccaggtgggtaacgtggcccagaaggagcccgaggaccccgagggtcagtcccaatgtctgctgtgatgttggtataaagaggccccagctctcgagccagcaactggtatgtcagtgagttcatcccatcttgcgtccaggaattctgggtacggaccaggaggtcaaatctgagggttagaggttggagactaagacccagaaaggaacagccagaaatctagggacctttaggattttcctggctaggggtacagaaccctgaggatccagtaacaattcccaggcagtccttccttcttcctacctgtggggattttcctcattgcccttatctcctcggtgcttcaccatcttatagtgtcctacagatgtggggggccgagagatcttcatcccagccaggcgcaccctatgggaaaagtgagggtatcatggggatccagagtagagaaaa

SEQ ID NO: 2237 - DNA, 3078 bp, Homo sapiens
  misc_feature (1)...(3078): n = a,t,c or g
cccctttcttaacacagcacaagccaatggccagctagacattcagacccgttgttgaatgttggatagaagggagcagcatcagacacaaaatttcaggccctggtttcatgtgcctttaatacttgtttttcctttcctctgtattcactaaacaatttttttttttttgtaaggctacttttgtagctttttgttttccctttgtatttatcatgtttttaatttcttctctgaggaggaattctctgaatctgtatcttccaattcaattcgttgccttttgaggccactgtggccatgaacagccctgctactatctgtggctggggtgtcagtggggtcctctcttgttccagcattgggggtctcacaggccatttcagacccgcaacaatctttgtgtaggagtgtccctgtcagggacgagttatcacggtcagtgtctgagtgtcctggggaagagtaggccaccacctccagctcccccaagttctgcccgttattgtgagggtgagggggacgagggtgtaagcgtccattgttgtggttggcacagatggtttcgaggctcctctcctcactgtcatcagactgggtcctgggacagttgccagacccgctgttgagagtggagccagatgccttggggacaggaggagaaggcggctcctcagcccgactgctcagggcctttccattgagcttcttggtttcaaaagggtgctctacagagccgctattgccagtgtcctgagaggtaccctctggcacctctgcccaagcatggctgctgtgctcatggcctgggccattgctgggagttctaggagtctcttctttaaaagtgtccttgctgcagccttcaggtggcaggtcctggttcctctgggccattgctatgtttagacaggcttccttactggaagaaggggctgggttgtctttgtggctggttcctgctctcccttcatctgcctccccggtcaccaaggaggtctctccatctttgttatttgagtaggagatataagagtagcggagccacttgtaagctttataaatttttcgctcaactgattctatgtcagaagttggtgatgcccggcttggttgaatctctagcgtggaagtgctccgctcaggggacgaggttggggaggaggagaggtcatccactttgatctgggggtaatcatagttgtcttctccaatgtaagtgttggtgggcttgattggggcactgggcttgtcttctcgggttgtcttctgtcggcgccgcatggcattccgctgccaggtagaggctcggcgttcattcagctcctcctcatcctcagagctgctagagctgctggaactgctggattcatcttcggggctgggtgcacgtggccggggaaagagatctgtgtctagttccacctcacagacattctcctcagaatcggactcattggaaagggccaggaggcgtttgtcttggtagcgccgcagagcagacagacgctgctggcgagaggctgcatcctcacacgtgggtgttggtggagttgaggctactgtgtttgtggtggtgaccgcaggggccccaggtggaaggcgttgtcggcagactcatctactgtgggaggcggggagcgaggcaatgaggccgaagactctgagtcagtgtagcctgagcgcctcgctgaccccagcgtgcagttggaggatagtactctcactgaggtcactgtctgagtcagagctccagccctcgatctctcggcgtaccagtgagtcaaagaaggccatcatccgggggtcttcctggaccgactggttggcgtagtcatgcgacaggccactcccactgttcagcacaaggctgatgtactcttcatgggtatagaggcagcgggaatcgtcctcaatccgaccgtcgaggtctccagtacatcctggctgcttgtatgggctccagatcttgataatcttttctacaccagaagagcagatcatgtaggtgtggggattaaatcggacttggttaacaatagatcgatgccctttcagcaccatgaaggctccgttgaccaccctaccaatgccacctgcttctggatctgcaggaattctcccacatgtaacaggttgaagtcatcagagcccgaaaaggatatactggtcacgatctcctgcaaaacagcagcttttcatggtgcatgagttgaagtaaccctgattgtcaaactgaaacacaggcaggcgggaatggatgtcatagagcacagggggcaggcgtcgcctcagggccaggagctgggtcccgttgctgttgaatcgtacactcatggcactttggagggacaggtttccaccatagcgcaggagagaactcctgaggttttcgaatgtcccagagtcccactccttccttttgaattggctgtggccaacaacctgggctccacagggttaaacatgacactatgaaaggctgatggatagtttgccaggcagaagggctctccatggggggattcccgaatgtcccaaatgagaacccggccatcatctgaggaactggcaaaaatgttgtcattcactgggctcacagacaagccatatactgcatcttcatgagcaaacacgtccaatgtctcactttcaacatcatggaggataacttgctcatcattgcctccagagaacactttagtgttcccactgttgaaaggccaggcaaaaaatgttggaatggtgctctcctttcagctgtatgggcttgaccctggagtggatggcttgttccatgtgccatagcagaacccggcggtcatctcctcctgagaccagccactggcctccattgttggagaattcaatggcattgacacagccgaagtggccgaggaggtccttcttgtagaggtttctgcagccccgcaggcgtctcctctgaaagtcctgagtgagcagggggtccccatgcaagcccgctgggacaagaagcccaccactgacctcatgctgncccccaggccagctctcctcttcatgctggaaccgccgccgccgccgtcgngccgccgc

SEQ ID NO: 2238 - DNA, 1090 bp, Homo sapiens
  misc_feature (1)...(1090): n = a,t,c or g
ccgaggcatcgacagagccaccatctccccttggccaggtactacattaaaccttctgaagtttcctatttgcaacccaactccttacagaatgtttaaaaggcatcaaagacttaaaaaagattcaactcaagctgaagaagatcttagtgagcaagaacaaaatcagcttaatgtcctcaaaaagcatggttatgtcgtaggaagagttggaaggacattcttgtattcagaagaacagaaggataacattccctttgagtttgatgctgattcacttgcctttgacatggaaaatgaccctgttatgggtacacacaaatccaccaaacaagtagaattgactgcacaagatgtgaaagatgcccactggttttatgacacccctggaattacaaaagaaaattgtattttaaatcttctaacagaaaaagaagtaaatattgttttgccaacacagtccattgttccaagaacttttgtgcttaaaccaggaatggttctgtttttgggtgctataggccgcatagatttcctgcagggaaatcagtcagcttggtttacagtcgtgggcttccaacatcctccctgtgcatatcacctccttggacagggcagacgctctgtatcagaagcatgcaggtcatacgttactccagattccaatgggtggaaaagaacgaatggcaggatttcctcctcttgttgctgaagacattatgttaaaagaaggactgggggcatctgaagcagtggccgacatcaagttttcctctgcaggttgggtttcagtaacacctaattttaaggacagactgcatctccgaggctatacacctgaaggaacagttttgaccgtccnggccccctggcttgcccatatattgttaacatcaaaggacagcgcatcaagaaaagtgtggcctataaaaccaagaagcctccttccggtatgtacaacgtgaggaagaagaaaggaaagataaatgtatgagaccgaccttgttcactccagatattaactgtattgaacacaacaaaatacattgaatttgtattaaacatataacgcataaataaagctcccatt

SEQ ID NO: 2239 - DNA, 872 bp, Homo sapiens
gggtaggatcctttaagaacagtctatcctcatagtaattttaaacacggcagctccttctcatttgatttgccctcctctacccaaattaaattgcctaattcatgagtaaacagctaataagagctcacggaagtcaatgagcccagcctcagaaaaacacaattttcaaattttggtagtcactgagtaaggctgcactaagtatagggtcccatttcaggtccaaagaaaaagagcatttcatccttctctgattgcatctgtccctgctgttgagcacctcacaaaccaggggcaaacaatgggctttgagggagatgggggctggggccgacatcccagaccccccaggacagccatctgttcctgactcgccttcctaatgcaactcccaggagcatctccctggcaaagggaacacagctcccacgtggggtctcccgggtggctgatgggtctggagttgtattagaaaatgggactcccagaaaattaaagagatcttgctaaggaagttcagcccgcctctcctctagtggtagaaaacttgaggtaccacgcagagaaaagggaacaagaacaggttatgtgccttctgcagccacttcacctttcccggagtaggacagatgacaaagagctcagatcaaaaccacaaaggtccaaggcttactttatccaagctccccatattcaagaaaaaatatcaaaaactggagaggactgttttcaaagcaacatcaaggcctgataaccaagggtcacatatattcctcctgttccttaacctctgcacctcaacccgttgcccaaatccagtccgctttttccccagtcttttccctttcccgaacctttctcctttccaa

SEQ ID NO: 2240 - DNA, 467 bp, Homo sapiens
cctcctgcagcaccccctgctgaaggggtcccccattgttttgcttccccagcgcccaggatgagcggtttaccatcgagcttacccgggcccggctcctgtcaagcactttagttagctgttggtgtcatgtttggataccagtgttttatatttatacatagagaggattttctaatatagcctattatatataaatagatctatctatatgcacatacatacatatatacacacacccagccgatctcccgctcccagactgctctcgtatgtggggaatgggatgaatccccatctgtgcctcgaccatcaaagccggagctccagggctggagggggggcagccatgtgtcctgacccccaccatccccagagcctgggttttccagggaaaggctttgtgcaattgcctggtcttttttttttttttttttctccatgtgcctccctgtccccaaatctct

SEQ ID NO: 2241 - DNA, 585 bp, Homo sapiens
gaaatcctaaaaacaaacaaacaaaaaaaacaattcttcattcagaaaaattatcttagggactgatattggtaattatggtcaatttaataatattttggggcatttccttacattgtcttgacaagattaaaatgtctgtgccaaaattttgtattttatttggagacttcttatcaaaagtaatgctgccaaaggaagtctaaggaattagtagtgttcccatcacttgtttggagtgtgctattctaaaagattttgatttcctggaatgacaattatattttaactttggtgggggaaagagttataggaccacagtcttcacttctgatacttgtaaattaatcttttattgcacttgttttgaccattaagctatatgtttagaaatggtcattttacggaaaaattagaaaaattctgataatagtgcagaataaatgaattaatgttttacttaatttatattgaactgtcaatgacaaataaaaattctttttgattattttttgttttcatttaccagaataaaaactaagaattaaaagtttgattacagtcaaaaaaaaaaaaaagtcgacc

SEQ ID NO: 2242 - DNA, 1792 bp, Homo sapiens
gtggctcaataaacttttattgttttgttatttatttttattcaaaagaatttgtttccctatcacaaaaattagataacaccaccaagagcagcaatgtccatggagttacattgatggtggagagttggctgggtattcccaatgtcccaaaggtcataaaggagggaaaagaaaaaaagaaaaaaatattcaaaacaaatccaaaacccatgatgactttggggagagacatcacatgacattttctgtttcttctctcattgtcagctgcagatgtatttcagcaggatcaagtacaatttgacttgagttaacccttcataccaattctagcaccttaattggtaccctgactgttagcagcaatcagcacattggactccccatctggtagtgccctccagcacacagcactaacaaattcatttgtatcatcttcttttcggtctttgtcgagaacacttttgactgtatcaaacttaaaagttagcaaagtcttagaaagtcctttatagtacaggtagagagagttattttcacttccacaagctatataatctccattggaagccaggcctaacaaagtttttttcattgaaatgacccttgaaggaacgtaggcagtatggtttccctacattccacagttttagctgactgtctgttgaggcagagacaatttcctcaccactcacaaactttgcataagagactgctttacggtgtcctttgaataccatgattggctgtttagtgttacgaagatcatagtagtggacacagtgatctgcacagccgaaagccaaatggtatctggaagaggggctgaatttaacacagcacacattagcctttgcctcaatgcttgccactgagttgtctagattggtagaccacagcttcacttttgcatcatcagaacctgaagccaagagtttaggatccatcaaattaaagtcaacactccaacacctcttctcatgctcctgatagacctttgacctctgtcctgtgaatccatcccataaaataacagtgccttcataatcactgctagctaacaggttcctatggtaactactccaactgatacagctgattttcgaattgcaggtcatttcattctcagggtaatgaatatccactgcatcctggatgacagtgtcatattcatagactttaatcttctttgtaactccagcaatcgcaaaatagtcacaatcccggtcaaattcaatactagagactatactggaaccattatagagatcactagcatatgacaatgtggctaaaggtcgtactgaattatatcgagtaaacttggacaagcatccctgaaattcatccaactggcttgcagttcgactgtcatctgagatacgagacatccttgtagaaaagtaacactgctccaagtcttcaaaatgagcagtaagtcgttttcgtcttgatgctaacgtgctattataccaaggctgtttctttgtctgagaactgccactgaaacctggaggttggctgtattctgtggaatcaataatactactgtgtgatggagaaggagcttcaaattgaggcactgtgctatcctcactgacaggagagtataagccactcatttcttccactctcttaatatcctcttccaaaacacttagctccttctggatctgttccagttgctctctcttatttcttcttgcaaccttgaggaattccataagaatctgtagttgggctgcatgtgattctgcttccagttgtttcttcttctgcactagtaact

SEQ ID NO: 2243 - DNA, 1063 bp, Homo sapiens
  misc_feature (1)...(1063): n = a,t,c or g
ttagttttttacaattttattccgtttcatcattctcaaaatatatcccccaaaagtaatctacaaaagagtgcaggctgctccccttaaagggaatggacaagtaatatacactacaaaacaatgtttaagatcatgtataaatgttactctgaatctcatttgttgtcatcaatttctttagtatctcagtgctttggggaatattcttaaccaaacccttcaagcttctggtagaaagtataggcttaaaagcttccactgtgattaggtctaatttcatcacatcagtataacacaagtacagaattgctgggattttccatacttgacagtagcttagaactgctgcaggaaggtcgtgtactatattcggttgttctagcaatggacaacacgccgagtctttgaaattctgtgtttttagggctctcaggaaaggagaaggaaggctgccggtggattctgaggttttataatcggtaacatgtcgacatgtgagaatagttatctgcatgttcttccttggacaagagccaaaaaccttttccagccactgatactgttgatcttctgcaacatagcaactgcactgacagagaaaaaccgagggattggattttagatgataaaacacacaaaaagcctctgtggaggacagatgtgtagtgtctgttgttctacaccattcattccagagtttggcacaaccaacttcctcccagactcctgaattcataacaaatgatgacagaaatgctactgcattatttcctatagcaattataaacttggagcacggatatttttctagcaaagaaacttccaaagatgtttttgtttgtcttcgaaggagccgcacttccctcttccgcgccagctgcagacgcacctccctgtcctcgggcgtctccctccgcccctcctcctcctcctcttcgtcctcagtcccagctcggcacggcgccttcaccacctctccgaagaacgtggccgccatagccgccccgtgaccggctgganacaactgcagcgccgcgggaccgcacgccgnttgcgcgag

SEQ ID NO: 2244 - DNA, 483 bp, Homo sapiens
ctgagaggggatcaatgctcagtacagccatatttgtctatgctgctacgtctccagtgaatggttattttggaggaagtctgtatgctagacaaggaggaaggagatggataaagcagatgtttattggggcattccttatcccagctatggtgtgtggcactgccttcttcatcaatttcatagccatttattaccatgcttcaagagccattccttttggaacaatggtggccgtttgttgcatctgtttttttgttattcttcctctaaatcttgttggtacaatacttggccgaaatctgtcaggtcagcccaactttccttgtcgtgtcaatgctgtgcctcgtcctataccggagaaaaaatggttcatggagcctgcggttattgtttgcctgggtggaattttaccttttggttcaatctttattgaaatgtatttcatcttcacgtctttctgggcatataagatctattatg

SEQ ID NO: 2245 - DNA, 709 bp, Homo sapiens
gtggccattcgacgacaggttagcgggtttgcctcccactcccccagcctcgcgtcgccggctcacagcggcctcctctggggacagtcccccccgggtgccgcctccgcccttcctgtgcgctccttttccttcttctttcctattaaatattatttgggaattgtttaaattttttttttaaaaaaagagagaggcggggaggagtcggagttgtggagaagcagagggactcagtgtggtgtaaaggaattcattagccatggatgtattcatgaaaggactttcaaaggccaaggagggagttgtggctgctgctgagaaaaccaaacagggtgtgggcagaagcagcaggaaagacaaaagagggtgttctctatgtaggctccaaaaccaaggagggagtggtgcatggtgttggcaacagttggctgagaagaccaaagagcaagtgacaaatgtttggaggagcagtggtgacgggtgtgacagcagtagccccagaagacagtggagggagcagggagcattgcagcagccactggctttgtcaaaaaggaccagttgggcaagaatgaagaagggagccccacaggaaggaattctggaagatatgcctgtggatccttgacaattgaggcttattgaaattgcctttcttgaggaagggtattcaagattacggaaccttgaaagccttaaggaattt

SEQ ID NO: 2246 - DNA, 510 bp, Homo sapiens
aatcacatataggtgccacagttatccccattttatgaatggagtgatgaaaaccttaggaataatgaatgatttgcgcaggctcacctggatattaagactgagtcaaatgttgggtctggtctgactttaatgtttgctttgttcatgagcaccacatattgcctctcctatgcagttaagcaggtaggtgacagaaaagcccatgtttgtctctactcacacacttccgactggaatgtatgtatggagtttctacaccagattcttcagtgctctggatattaactgggtatcccatgactttattctgacactacctggagttagcacagaccccacaagttaggggctcagttcccacggaggccatcctcacttcagatgacaatggcaagtcctaagttgtcaccatacttttgaccaacctgttaccaatcgggggttcccgtaactgtcttcttgggtttaataatttgctagaacagtttacggaactcagaaaaacag

SEQ ID NO: 2247 - DNA, 954 bp, Homo sapiens
ttttttttttttatgcataaaaccacatattctaattaatttaactataaaatgccaagcaaagacagcagatttataatatagaacaaacaccatctgcaccaccttaaatcattgttacagatatatttctaggaaaaaaatacacctgaacaattctcaagcctagattctaagatgctaaagtattaactaaataggattccaaacagacccagagaaagttactgcataattatttaaatattaacatgtactgagttcagaaatataaatataataacacataaacacagtttacaaattcatgtcaccattttcctgtgctccatgatttcttcaatttggctacatacattgggccccaggctttgcccttatctggaatcactaagagcccacattcctggccagtgggagcaaatgtgaagtcgtgggagcaagtccttgctattcctttaatgtccataggcatgatgttaccgtgggagtttaaaatttcactgatcacatcttgattttctgccttggaaagcgtgcatgtagagtatacaagtatccctccaggacgtaaggccttaattgcagaccttaacagctctatctgtagaagaggcaaattcctcctttgacttatcctacaggatgccttctgagagtcagaagaaaacaaccagcttcgatcatttgaacacggagcatccactaacaccttgtcaaacatttcaggctgggcatctcccatttttctgccatccaattcagacactttaattacatttatcaaaggctgtgggatgaaagattccaacgtctgccttagccacctcaatctcagactatcatattcattacaatgaagataacctggacaagcacactgcagcagagctattaatttccctccaggagcagcacagagatccagaaccttctccccatcccttaattcca

SEQ ID NO: 2248 - DNA, 426 bp, Homo sapiens
  misc_feature (1)...(426): n = a,t,c or g
ttgacaccttgtgacngattcgaatttaatacgactcnnnnnnnnnnnnnnnnnnnnnnnnnnnnnnnnnnggcacgagggcggagcgcgctgcgaggggagggctttccactgtcgctggcgtgaactcgcgtgcccgcaagctggatttcgggaatgctcagttcagaagagaaaaaattgccgggaatcaagtccttctttttgttagtcggtagtcgattgatgggaagtgttcaaaatcattcgatgtggtgacaaggtttcaccaggtactgccttctaacttgagctggccatttccacatgtcagataggaccaacttgccttaactacccgtgtgatacttaaacactgttgccggnnnnnnnncttttcttcaaaacaggaagcaacnagaatgagggcattccagtagcaggaga

SEQ ID NO: 2249 - DNA, 749 bp, Homo sapiens
gccctggagctcaggggtcaggctgctttgtgtgagatgtagttttcccatctcctgggaagggatctttcgaggttcccctctcagtcttcctccagggaatggcctccatgaggggcagggccagcttccatcccttctccagcccttggggaaactgagcaatatacttaacctgaatctctactcacagcccccaccagctctgaatgtctaacctgctcccctgattcgtaaacctaggggaaaccatctctctcacctaatgacccgccttgttctgaagctttctctaagcccttcccagttgcttcctagcacattccattctttgtgggcccagggcctggaccaggaccattgtgatacctgaccccgcccacctgggagtgtggctttgggtttcatccttccccagcgtgggtctctacgtccctgtttcccttgtatcaagacaccttcctcagcttccatgcctttggatcttccatgttcctccccatattcctggacttcggagatggcctctcccaagccaggtcaaggaggtttgggggagggttgcccctctgcccctctgttctgtggctgagcactttcccagtccagggcagggaaatattgggccctatcttgacccccaaatccagtgagctccagattcttccaaggcaaaagaggtaagcagatcacacctctttcttgcctctacatatgggcctattctggggtagaccagatttgggggc

SEQ ID NO: 2250 - DNA, 623 bp, Homo sapiens
  misc_feature (1)...(623): n = a,t,c or g
aagttacagtcccaccccacagtcatgctttttgcacttatcgcactggaaaagtttgcacagacaagtgaaaataaattgactatttctgaatccagtattagtgaccggcttgtcacattggagtcctgggctaatgatcctgattatctgaaacgtcaagttggtttctgtgcccagtggagcttagacaatctctttttaaaagaaggtagacagctgacctatgagaaagtgaacttgagtagcattagggccatgctgaatagcaatgatgtcagcgagtacctgaagatctcacctcatggcttagaggctcgctgtgatgcctcctcttttgaaagtgtgcgttgcaccctttggggggatgccggtttgggctttaagtacnaggggcnctttggcgnatncaatggctggccctcgagacagcaaatctcatcatgaagctcggattgggatntgaaattctggctntangntgccgcactgtttggacatgcngagtacctacgcncatctgaaaaagngncngtggatctgtaactgatgaaancaatgactntttaaagnacantgctntgaanagntttttacgganggttttgtccnatatgcntaca

SEQ ID NO: 2251 - DNA, 1281 bp, Homo sapiens
  misc_feature (1)...(1281): n = a,t,c or g
gaggctgtggatcgtttattgggctctgtccagccaggctgcagcacccgcctgggcctggcccggtgccaccaggtgccgggtgggggaggggagaaagtgcaggagcggccgccgcgcccagggctcgcccggtcctgtctccgtccctgaagcggtgcggcgctcaggtgagcgaggtgtcgtcgtcgctgccctcgccgcccgcgccgcccatccgctcctctctgctctcggccaccgcgctctcgtcgatgttctccagtgagtccgcatgctgcaccgacagctccgacagcgccaggctcggcaacgggctctgctccgggtgcagccacggcttgaagtgaggcaggtgcttctgtttccactcggggtaacttgaggcacgccttgtacatcttcttcatggccttgggagccaggaactgagaagatttattcaccacccacttgggtaaaggagcctttggggtccacctgggccaggtaggtgatgacgcagctcttgggccctgtgctctggatgaggtagcccgtctggatggacacagctcggaccaagtctttccgaggtgggtatttgggatgtttgactgagtagttcataatgatgtaatcagcgcccatggggagccaggagcggagggtgatgacatcacggttcttcaggggcttgggacacctccaggagtaatagcccacgtcagcgttgactgtcaagcgggcgatgtcaaaagtctcaatgacgttgctgtcccatttcttgcggtactcaatgtcgtgtaggacgtcgtagagtgtctcggctggcacatcacagcacttccatccggcacttgatcttgtgcagcgtccgatccatctccacagcctgcacccagacagacaccccagccctgctataggtcaggttccagcccacctcagcctcacactctgaccggaagctgcgaaagtcttggtcatcgggcacctggacactctcacggcccaggaccggccgaggcccttggggctctgtagaggccgccagcttctccatggggagtgtggggaggcccagggccctggtcctagtccggctctcctgggtcctccgcggaggctccgacaacgtcgacgcggctgcagatntgacgccaccttcctgggacctgagaagcagggtctgtacagctccagcaacactctcctcttcctccagaattctccagatcctcctcagcttcttggctctggtgctcatctcaacacagcagggtcttcctccatcaggcc

SEQ ID NO: 2252 - DNA, 556 bp, Homo sapiens
ggggtggtgggggttggtctctgtacctcctgttctttaccttgcttaccaagcccttccaccgactcactcctgcctccccagctaaaaattggctgtgttgcttttaccacagttaccaaggtctgagttttataaaatccaggatcacatctgacctcacctggtagatatctaggccaataaagtctaaagggctaaaaagaaggtacctctccatcctgtctcctcgaggccaggcagcacatgtgcagttaagaggcctcctggatccattgtcctcctgttgcttttcgttctaagtgatccaaactctattgctgatagggaataaaagcagggcaggctagtagtgggcaagtgctttgatggagcgtatctccaagcagggcccaagtttaggaggaggaagacctgatacaatgaatgaacagtgcgtcctcccaacccaaccaagaagtgtaattgtgttccgtctttaaccctgggcatggaatgggggagggaagagggcatgggacatttatttacattagtggcacatttattctacatt

SEQ ID NO: 2253 - DNA, 1425 bp, Homo sapiens
  misc_feature (1)...(1425): n = a,t,c or g
tttaaagcaaaaaaacgaaaaacaaaaaaacaaaaacaaaccttttggtaactgtgcactgtgtcctttagccagggccgtgccaacttatgaagacactgcagcttgagaggggctttgctgaggcttccccttggccatgtgaaagcccgccttgttgcctgctttgtgctttctgcaccagacaacctgatggaacatttgcacctgagttgtacatttttgaagtgtgcagggcagcctgggacacaagcttagattctctatgtatagttccccgtgtttcactaacatgccctctctggaaagcatatgtatataacatgtgtcatgtcctttggaaacctggtcacctgggtgaaaacccttggggattcttccctggggcatgactgatgacaatttccatttcatcagtttgttttgttttcctttttctttaaatcttggactttaaaccctacctgtgtgattcagtagggtttgagacttacgtgtgatactgacaggtaagcaacagtgctaggcattctagattcctgcctttttttaaaaagaaattattctcattgctgtattatattggaaaagttttaaacaaccaagctaaagctatgtgaaagttgagctcaaagtaggagggaaaagttactggtggtaccttgctgcctgctctgctggtagaattctgtgctccccgtgacacttagtacattaagaatgactacactgttcctcgtatgtgaaggaggcagtgctgactccgtgagtgtgagacacgtgctttgaactgcttttctattcatggagcactccatagtctcaaactgtcccccttatgaccaacagcacatttgtgaagaggttcgcagggataaggggtgcactttatagctatggaaacatgagattctcctctattggaagctaattagcccacaaaggtggtaaacctgtagattgggccttaattagcattgtactctaatcaaaggactctttctaaaccatatttatagctttcttaacctacacatagtctatacatagatgcatattttacccccagctggctagagatttatttgttgtaaatgctgtatagatttggttttcctttctttacttaccctgggtttggattttttttttttttttttttgaatggatttatggctgtcttaggcaatatgacaataatcctctgtagcttgagctacccctcccctgctgtaacttacgtgacctgtgctgtcactgggcatagggacagcgggcatcacgggttgcattcccattggactcatgcacctcccggatggtttttgtttttttcgggggttctttgggggtttgtttgtttgcttcttttccagagtgtgggaaagtctacagtgcaggaaaggctttnnaacctgccagctg

SEQ ID NO: 2254 - DNA, 1180 bp, Homo sapiens
ttttttggagctctttcaaaggatttatttgctacagaattgcttgagtccaccaatgagaagaactcaggatttctgtgtttaaaaggattttgcttactgctttatttttacaagtgctgccatatccaaaaagcacttctttttgccagcatttggcatgtctataagaggttagaaaaagtcagaatctatagaattgatgtctaaaaataggaaaaaaaaaagaatatttaaaaattcctcatttggataggtcctgagttgaaaacacattcatctgcaaaataacttttttaggtcagaatgctatatttttaaccacagatgctgaccttgaccttgactggtaaatatttccaggcaccatatggatgacaggacagacgccattcagttggccaaatctggatatatgccctacttggcttgtgaaaatttttgagtatctcttaaccccaaacctcctggttctctgaaactgattgtcttaatctgattcccaatacttttaaaaacaaataaacaaaacattccctgaaagatcacacatataagtatttgttgcctgtgaatagatacagagaaaccaagtacaaatgtgcattaacaattcagtgacgtagctgtggatctctggatggctatgtaagctgtgagaaagtcccccactggctttgcacttgctgcgcaccagaggtgaccatccaggcagtatcaacctgaagagggggtgaatcccagcagctgctcgatgggcttaaaccgccactcgtcagcctccagctcttctaccaaaccagctagtttttccatccgagcaacttgctgatcatgtttcacctgtttaagcgtggatgccacttgatagctaaaaacagattcgcagaggaatctctcagagccatcttctaacatctctccagctcctttggggtaggtgaaaagggctttccgtggtggggcaaggtctgagacactgaaaccagatccagtgacagaacttccactgaccccaccagctgaggaggatgatgatgaagcagccatttcctctctagcagagttcttacttcactacagagaaagaaaaacagcaattggcaagtttatggaagtgagagtgacaacatttcattctagctgctgtaagggccagcatacagttttgtaaagactt

SEQ ID NO: 2255 - DNA, 1076 bp, Homo sapiens
  misc_feature (1)...(1076): n = a,t,c or g
agcacccctaggaaagagatgattccaaacagctttcattaacggcatgtaggcacaggtccctttcccaaaagtggattgttagtagtagttcattcaacctttgttaaggggtagctttccagaatgtgacattgtcctcagaaagatagacataggcttaaacataatggacatcctaaataggaattttcagattgtttttgaagtgaaaagtgttttaatgtctttaaatggaattgcataactaatggtatttaagtattttacatgttgctaataactttgaatatgattgttgcaattttatggaacctgggtctatgggactgctttttaagcagtttaaaaaaggttttcaaagtttaaaagccaatcttagcatgtataatccttatgggattcttaagttttatcctatcttgtttttgctcaagaacgctttatcagtgacgtttgttagaattttgttttttgttttttttttttaaattgtttttgggctagaaatgagtttctctagttttatttgttctccctgagttggagttatgcaatgaatggcatttttgtggtaaaatactaatcctaaaatctgttaactcactgttcatttaagtagggaatatctgtatacattaatgactaggtaaaacaggaaatacattttgaatatacagcctaaaggcaggcagttacagggtttttgatttctccgattttatagggtgcaagttcccagtggcaggatgccctgctgtgtgactgactacactgtgtcctgagcagtggtaatttcaatcacctctcatcagtttggccagccctacaaccaccattcctagccctgtgttgcttgacagggatacctgtgcttggaatgggacattaagggaaaagtcctttacttttctcccccaatttttaccttcttcaatctttaggtttctttcccaggaaccacactttcccctttttcacaatggccaaatnaaactggaaggtgggggttttggttacaggggnttttttgagggcccaacccaacttaacctttnaccacatattttgggggg

SEQ ID NO: 2256 - DNA, 667 bp, Homo sapiens
  misc_feature (1)...(667): n = a,t,c or g
aaaaaataataatagtaaatgaaagcaattttagaggtggaaaataccttagaatggaatcatttgcattatttgacaaatgagagaagtgacatgacttgcctaaggtcatcctgcaaagttagtggcagagttaggacttgaattccagtcttctaattccttggtcagggcaatttctactgtgttatgctgtctgttagaaataatgacttatggaaactttgtctttaagttgtattattgtaaatacccttaaactggccaatagattttagaaaggcaggcatgggagtagatgctgagaattctagccataagaagaaaagtattttaaatcttacagaaatgtttaaacaacccaaaatacatgaataaaaatgacatttctttgtaggacctgccaactaactattcacacacatttatagaggttataaggatcttggctctagaacaaatttttgaaattaggatcattttaccatggatgttaacaaaattggaaattttttgtcactgagaaaattatcacaaagcacagtaaatacatatacttaccatacattttgtaaaaaacacattttttaaagaaatagggannnnnnnnnnnnnnnnnnnnnnnnnnnnnnnnnnnnnnnnnnnnnnnnngttggaggttccntga

SEQ ID NO: 2257 - DNA, 154 bp, Homo sapiens
cctcatctaaacatcaatgacctccccaaaggtttcatcttccatataccatcatattgggggttagggcttcggacaccatgaatttggggggtcacaattccattgcatagcattgtacctattcagcagtatccctttgagagttatgtcc

SEQ ID NO: 2258 - DNA, 375 bp, Homo sapiens
caagacctctcagctatacattgaggggttttagagcatccatgtgggcaacccttttttgtgcgggagagcaggtgttgctcttcagtatgtagcctaaaaaaatcttaattatttcatggatcatgaagcaaggatgaataatatcatgtcttggtaaatactaacaaatttgttaggtttggtgacatcatttacagattatttctttatgttgtccagtggttcttccttattgttgatatccataagctggcactggatgctctcagtaatgttaagtaattgtcaagcagcagttacctactgtgttcttaacactgagttgtgaattttttcttaaaagcagtactgtagtactgaatattcctgtag

SEQ ID NO: 2259 - DNA, 592 bp, Homo sapiens
gaagcaaagttactaaaaaataccacgaggtccttcagttgagaccaaagaccggtgtcaggggattgcacaaatcactcaccgacgtggccctggagcaccatgaggagtgtgactgtgtgtgcagagggagcacagggggatagccgcatcaccaccagcagctcttgcccagagctgtgcagtgcagtggctgattctattagagaacgtatgcgttatctccatccttaatctcagttgtttgcttcaaggacctttcatcttcaggatttacagtgcattctgaaagaggagacatcaaacagaattaggagttgtgcaacagctcttttgagaggaggcctaaaggacaggagaaaaggtcttcaatcgtggaaagaaaattaaatgttgtattaaatagatcaccagctagtttcagagttaccatgtacgtattccactagctgggttctgtatttcagttctttcgatacggcttagggtaatgtcagtacaggaaaaaaactgtgcaagtgagcacctgattccgttgccttgcttaactctaaagctccatgtcctgggcctaaaatcgtataaaatctgg

SEQ ID NO: 2260 - DNA, 2076 bp, Homo sapiens
  misc_feature (1)...(2076): n = a,t,c or g
ttttttatgcttggaatcgaatttcatgaatttattctaacacataaatcaggtaagagagaagtagatggatagatttttttttttttaaagaaattagcctccctggggtacttacagtagattgagtattgagagatttacaaagatataattctttggaagattacagaagatggaaacaaaatcaaatctttcactttcaggtactggagttcattaattctttcaccaaaagcacatcactgaaggaaaatcagaagtggttttttagttattattaaagtagttcaagacccagggaaccccttgagatgaacacaaaacagtattcaacttttcttcacaagactaccttgtactggcaagacttagaggacttctggcttgaaaaatattgcttagaaaacttaaaaaaaaatcaacaacaactatattttggacaaaacaatttttttttaatctgtcttgtaaaatccttacttccttttgagtctctgatggctacaacatttcatttgagatgtttggcagtcacagcttcaggggttatggttactgattatctaaaccccttaggtcagaatgaacaaacacagttcatgtaaacctggctgttattggagtcctctgaccaagagataatagtgaagagtgtggagagcctgaatgcccatggtggaaatgctggaaaaattaaaggtaagaaataaaacatagcacaggagattcagagggctgggatgacttctgagctgctctctatacccaaggccctttcaatttctagctgtgaaagatttttcatgcactgtggtgcctgatgtttcctgcaatttgacaaaaataaatactttacacaagaaaaggatgcaaggcttctacgttacactttggggatgctcaggagccaaggctcctgcttggctttcatttcacagggcctgcagccttgtctctggaaggtgctgattaggactgggaatggcctcctctggtcgagactctctgacccctaagtaaatgaacttgttcccatcccagtctccaaacagatcccaacactacgtttgtttttctatatcctgattgtcacacctggaagactctccttagtatacatgaggcttactgccatgagaccaaatgactagagagcatcttttaagagaagcttgctcattcaggaaaaattaaggatttggtacaaactgcaggccaaagggaagctgacatattgttttggtgtgtattcttgaaaacgcatcattaaatctacagtccctttgtcagcatgctgacttttacgctgcctcaaggagtcttccaccacctctgtgtcagctgggcagggttgctcagagatgccttcttcagcctcctcaggctctacttcctcccgggtcacaccgtcctctcctgggggcccctgatcattggcctcacttctctcctcatccacaccagcagccaagttgtcctcctcctcttcnncctctgcttcatcctcatcgccaagatcttctttctcttcttcatcatctacaaggctgtctttgttttcttcttcatttgaatcatctttttcctcctccgcatcctgcaactgttcagctctatgagcctcctctgatctccgattctgctcagaacgctcagataaatgccttggaagtggcacacagaaacattctgatattaccaccaagaccagacccataaaaaggccaaaaaccaaggtggctatgacgaaaaagacataagaacaccaagcaggaattccaagagtcactgtgaaatagttgtgaagatgccatatcttgccagagatgctaaaaagaccagccattccagacatcgttagagaagccggggatttccagccagtcagaggctcgactgattgccatttcttctctaagatataattctgcaggtcttcgaagattcctggggccacgataacggcggaatatcccatcctttgcatgaaaaaatgctgggagagtggtgacaaagaagcggccactcaaacctggttcttgaatgacatctaccttccccacacctcgtgcc

SEQ ID NO: 2261 - DNA, 840 bp, Homo sapiens
tttttttttttttgtgtttttgtgtttattttaaaaagttcacacaccttccccatctttgtcccagcactggttttggtgactccacccctactcccctatgagtcagcccagaatgtgaagccagtggccccagggcaggagatggccacccctcagccccaccgcagggtgaagctgggcccgaagctcctcctgtcctagggccacgctggctgcagtgaggcggcggggacggaatgtgagtgggtggagagctcctggcaggaaggccaggtagcacctctgccctcatggcactgataaggagccaggaagcagggcaggtggggcataggccgtggcagggtacctacatgtcaatcacacgtgatgggtgggcctgggtagctgcatgccagactgggcaccagactgtggcacacagctcaagggtaaccttgcatccaggcccttctgtgagagtaggatgggagggagttgcacccatctcctgtccgcccccccccaaaaatatatatgtatgtcgatatataatatagaggtatatacacctgtacataaaattgttgccaccaaccactaaatggttacactacaccaagacactaaaatggcagggagccctgggatcctggggttggcagacacagggaatagggggtagaggcccaggctaatttctcccttcacagcaaagcagggagagaaaggaaggagattcaccccttaacctgtctcagccctgggtcagaagagaagcctcccgcctggccaggcttcacctaccttagccaaattgtagccagacagacagtgccccctgacctcaaaaaaaaa

SEQ ID NO: 2262 - DNA, 1275 bp, Homo sapiens
gggaaaccttgcccattgccggccaaacacatcccattaagagcaggggctagcaagccacagcctgaggaccaaatacagccccacagcttgtcttggtaaatcaagttgtgctggaacacagcccatgaccatggtcattcccacagtagtagtagcaaaagcaaacagcccaaaaagccaaaaatacttcctatctggccttttacaggaaaagtttgctgaccctgcattaagggtacttcattccctaccctttcttgaacgcactagcagtgtcaaaggttagctgaactttgagcctaagcctccctaaatgacactagtagtgtcaaagattactgttactaaatgacactagtagtgtcaaaggttagctgaactttgagctaagctccctaaggcaaaaaagaaagaaagaaaaacctggtacaaaagaaagtcgatattaagaaggcaaaatgtaagttctctattagttgaacagagcaatcaaggaaccctgtgtctggccaaatttcgtcttagagcattctagacaaggagccccaagtggtctttggcagcaaatgagcaggcagaaaagtggaattcagttccagtatttagcccagtctctgctgcttaaaaggccttttgagaagaggacagaagaaaagccacttagtttgcccaaagctaaattaactaggaccacaagactacttttcaattctcctttgcaataattaagagtgccaatgcattcaaagcaactagtaattgtagtctgtaatatgcccaaatcagtagcaagtggtttatgttacataatattaatgggaatagcagaaaatagtgccgaagggtaaaatgttttaaaaaacagaccaggcactatgttagggggaaagtgggagctctaagccaaacaactaaagtatttcaaaagccacgtttcacccgtaaaaacaacactggaaaaagaaaatcagctgtgcaagtcccttccaaagggacctccatgggccttgctggactgtcatatttgtgattgctgctgccctggactcatcattgttcacataattcttagaaaatcagtcaaacaatattaaacagtaatttttaaatgttcaagctatttttgtttgcctttacaacacaattttttaaatggctgaaaacagattcatttcccttgtaccaatatgcattcatcaatgtgcacatcagagaacaaaacacccagtgcagtgtccagatcccagttgagtcatgaataggctgggcacg

SEQ ID NO: 2263 - DNA, 1139 bp, Homo sapiens
  misc_feature (1)...(1139): n = a,t,c or g
aagtagcagtggtcacaactgagagagccaaacatttctacagcccccaggacattcctgtcaccctctacagcgacgctgatgaatgggagatgtggaagagccgctctgacccagttctgcacattgacctgcggaggtgggcagacctcctgctggtggctcctcttgatgccaacactctggggaaggtggccagtggcatctgtgacaacttgcttacctgcgtcatgcgggcctgggaccgcagcaagcccctgctcttctgcccggccatgaacaccgccatgtgggagcacccgatcacagcgcagcaggtagaccagctcaaggcctttggctatgtcgagatcccctgtgtggccaagaagctggtgtgcggagatgaaggtctcggggccatggctgaagtggggaccatcgtggacaaagtgaaagaagtcctcttccagcacagtggcttccagcagagttgacctggggatttctgtcatgggtgtccctctgtactcagaatgggttcaggccaagtcggtgaagatggatgttggcaaaatagggaggatacccttcattttgctggaatggggggaccttgntcttgagcctcccaggggccagggcttnttccaggttaaactggacggaaggcccaggtctcagtttctttcaaccaggagaggccgctgcctagagcccctccccaccttttcctggatgggtgaggcaagccaggagagcaagcagtgttgtcctcacgggaggaggactgagcgactgggaaaactcggctctacatctcacccagaacggcttttagaaacaccacagctggagagtcctggctgagccttgggagtttcagctctttggcggggtgcccaggtgccatgcgatcagcgaagcctgcgagttggcaggactctgaggtttcctgcagaccatgccatgagattgaaggtgcggggaaataaagaaaaatcaccatttaggagactccattctttccctacaacccagctgtggtcccagagatcagggggtgttgccaggtgtggctggggaagggtctgggttcacaaactcaccggcactctttagtccccgtataacatggtggttaaggataaagatcttga

SEQ ID NO: 2264 - DNA, 299 bp, Homo sapiens
ggaatactgtaagctgcatgaatttatcttcggtgataaataacagtgccttctgggttctgtttttttaaaggggtctttgctaagccattaatattgaggtgaagagagaggagaagaaatggattatgcctgaccgtggagattagcagcctgctcaggtgaagggtggccacacttattaatgcactaatgagcaagcagggtcattctgatgattagtaattttggcaacataacttctgccccagatttgattaagccttcatacagacttcctcttccaggagattatcttt

SEQ ID NO: 2265 - DNA, 595 bp, Homo sapiens
  misc_feature (1)...(595): n = a,t,c or g
cgggtcccggctggcggctgcttccggtaggagagcggtgtagagcgagcaggtctcagctcctcgtcatgtcatacggtcccttagacatgtaccggaacccggggccctcggggccccagctccgggacttcagcagcatcatccagacgtgcagcggcaacatccagcggatcagccaagccactgctcagataaagaatttgatgagccagctaggaactaagcaggactcaagcaagctacaggaaaatctgcaacagttacaacactccacaaatcagctcgccaaggaaacaaatgaattgctgaaagaattagggtccttgccccttcccttatctacttcagaacagcgccagcagagacttcagaaggaacgcctcatgaatgacttctctgcagccttaaacaatttccaggctgtgcagagaagggtatctgaaaaggaaaaggagagtattgccagagcaagagctggatctcgtctttctgcagaagagaggcaaagagaggagcagctggtctcatttgacagccattgagggagttggaaccagatgcagagccagggaggatgaggttgnccatcact

SEQ ID NO: 2266 - DNA, 2551 bp, Homo sapiens
tttttttttttttttgaagtttttgctataaaacatttaatgttaacctacaatacaatgtaaacttttatgaaaaaaatttaaagtacactagatttcttcagtaaattatcacatgactattcaggcgcagtacaagttggggcactgcatcctttgtggatggatttccgttgctgtgttcctcacaagtcctaaaaaaaccagttgtagagcggagctccttgttcaagcaccggataatgatgcccctgattttgcattctgggggttatcgctccttctcagtcattttctgaaactctttgcttggccttggcaccattagcaattttcacaactgctcaattgaaggttctaggttctttttagcttagtttttaagagacaagtgttatcctctggccatctcttattccaaatatcatggtggaggcaagcaaggagaaagaagtatttgctagaggaaattctgcagaagtggaagaaaagaccagaagggctccactgagggtacaaatattcaactgactccaatcgagtgtctttgcttggtcacttcccatggttattcggctcaatctacaacttcagtcgtgggagtgcagaacaaaacttgaaacaagtgcttttagttgatgatttgccatttggaaacaacagctgaaatatcccagaggtgatgtggaaacaagagcaaatgcttgcagatcactggcttctcagtgtcttctccctcgcaggtctcatcaaaatccccaaaagtccttaggagtaacacagattgtactggcattaagtgacaaaatgtgcagcctgtatttgactgaggaggaaaggaaatggcacctaggcagcagcgcctagggtcagcaaggagaccggcctagggtctcagtaaagcagaactgtttcaaatgggactagaccggggcatgtgcttccggtgaatcctcttgaaacctaaagtaaatgggaaggccgccctaacagttgtactgacataaagggagacccttcttaatattctggcagctgacttccttcactgaacaactattatcaaaaggcgagaggcataaagtgcacactgtagaataagaagagactgaattatgatggaaaaaaaaaatcgtaacttccccaaagaggtgtggacagtgtacctagcctcacaaaggtccttaataccctcctgtgtgcctgcccagggaacagctgtgaattccagatggggaggaaggctctgacttaagtggaaaaattcctctgcatggttgtcagcaggaaggtttcacgtaaggttatccttatgtggagaacatgggttatcctgctgttcacgccagatacattttactgacaacagtcagatggtgattccactcatctggccttgggacagcagaaaacgaagtggaagaacaatagctggccagggacagaattaaattttcctagagatggtgttctagacagctatgccaaggccactgggaatttctcaggctctccaagttaatttctgtggggtgccttactctgccatgtgggatttaccccaacaactgaggactgcagtggatagtaaccatataattgctaccaaaaacagtggtccttaggttttagttaagcaagagagaaagccttgagactacaactccagcaagttaggctttatgttgatctgaaccccccgccctcacagcattctaggaactacagtaacgtcagtcggttgcagtggtacaacgagcctgcaccagtctagctacggaacactttggaatacttgtcagagcgcactggcatctgttaatacatggcctgacccatgtacccattaccataaactcaaccacagacgagacatccagaggttaaaaaaaaccctattacttcaacatagcaatagagagaaaggataaaagctgcctccagaaggtggctgcatcagaaatgaaaatgtgccttccaatagattacacaggctgggagttctgtcttggctcccttcaaggcctctggttctatccttaaaacaataatacacttccactgagacaggcagggcactctcctgtggttctgctggctccaccacaggccctgctagtcctttggaaaggcacccaggcttggccaattcaggaaagccccagggctggggggagcagcatgcacatgtcagaagaggaatgaagagctgctatcctttggttcagaccccataaccaccacctggtacagactccaaggaaaagctgcagttgtgtgtaaaggtgagttccaccacatacataggtgtatctttacatatacagcctttgtggggccacaaacccagatttcctcccactgctccaagtggggtgcacaggtggtaagaaaggacagcaagagttggaccaaaaagaatgacctctctgggaacgtgagagggacaatggcagaaataagcacaaaccagcccggggcacttttattacactattgtgggctaaggagcccagggcataaactcatgggtttaaagaattggctcttt

SEQ ID NO: 2267 - DNA, 545 bp, Homo sapiens
gagatcacacccttgccccgctgagccccgtgataacaagtcactccagactaacctgtgtgccagacatttgtgcattgttgcactttgaggttattatttatcaagttcttgaaggaagcagaaagagggactcctctctccctccgtgtatagtctctatgtttgtgctagtttttcttttttttctctgtgtccagtcagccacagggcccgcctccctgcaggaataaggggtaaaacgttaggtgttgtttggcaagaaaccacactgactgatgaggggtaaaatggaaccaggtagagccactccgggcagctgtcacccattcagaacttctttccgcagctgaagaaatgttcagtaacctgtttgacgctaattaaaacagagcctgcaggaagtggggctaaagtggcattcagtgatcctgttctgtagacttttctttctttttttaaccaaatccaaaggatgttacagaaaagctagccactgatattttgttttgtttaaaacctcgtgccgaattcttgggcctcga

SEQ ID NO: 2268 - DNA, 800 bp, Homo sapiens
gtgttgagtgaagagagaaaacatttacagaacacctggaaagaccttcgggcctggagctgagaaatacgtggaagcctcactagaatgagttctttattggttcggtggacagccaggttactaaggagcactttttgttaaataagtgaccaaaatccccttgggccatctcctaaaatgatctttatcataatagctacagtaaaaagaaagaaggagaggtattaatgtgggtggaaatcaggacagtttcctaatgccgtggcttacaattctgagatttctccaggcatcaggacatgtgcgcgcacaggacttggctctcttaggagatacttcagtttgtatcagatgtggctgtggagggtgctctttaagcattgctaactatgagtgggtccctctcagaaggaaggactgtaagaggtatgaaacttctgagaaaacgagctgtcttctcttaccaagcgcctgcagccgtcaaaatgctgtaggctttagtcgtctgccagttcccaagctgagctgtctccttcatggataggatttgtttgtttagaaacaacaacaaagttcattctgtttataactcagagcatttgttttttctgctgaggctaaaatacttgtttattctttcctagaggagaaaagaaaaagagaacaattaaaaacaagaaaaacaaaactagatattctaaatttcacaagcgtttttcaaaaagagacgaggccatatttttccttaaagaaaattactttttttttgacagagtgagacccagtctctaaaataa

SEQ ID NO: 2269 - DNA, 667 bp, Homo sapiens
tttttttataacaggttgccattttattgaatatctgcgacactttacattgttcaggaagtagctacttccagaaggctgatattctcctccaaattgtctttggctaagtactacagatgtgattcagtccaaactatatgcccaaactgattaaaattctcagtctctcctagcttgagacctcagatcctgagttataactttgacttgatcttcaagttgagatgcttcataaatatttttcttaaaacagggctatttaacataatttctttttcttgaaatatatgagtgtttttgatacaaaaacatatattacacatgagaatgtttaaagcatcaaaataatgattaaattttttacataacttaaatgacaggactacaatatgccccccacttttttgctgtttgaagtaaagaggaaagctctgtaacaatttcaaatacataggatttaacttatgttaatatcctgttataaaaaataactaccatataaagaatttaaaatatgcaaaagtaattagttcatttaaatttatacttatacaccggtgtcaatgaaaatatgcgaagttgccaagaaatttctaaggattaaagtggaagtaaaaaaacctgtttcaggcttcatttattgctacataatgactacttcaag

SEQ ID NO: 2270 - DNA, 462 bp, Homo sapiens
tgccgtttgagctgctgattttcatgagtcgccttcaaaactctcgtgtagggttgacaatgtgggggggtgggggatccagcttattcttttattttcaagtccattcttggggctggtggggaggcaggagaatacccctccctaagcccttagtgtgtgccgagcttgctttgtgatgttggcaggggaggggagacctgggtggtgactgagttccctttatcaaacccttcaatgggcacaaaattgagtgcttgattttaggttttatttttttatgaatgtccaaatctgtgtttccccctgccctcccagactgtgtggccagttgaaagtgtctggtttgtgttcatctctccctcatttctggagcagggcctgagaccctgccacatctcctatgctctgcatccacgcctcttttggacattaaaggttgattgatgcacaaaaaaaaaa

SEQ ID NO: 2271 - DNA, 747 bp, Homo sapiens
ttttttggctttgttccaataaaactttatttacaaacacagacagtgggcctgatttggcctgcaggctgaaggttgcccacccctcgcctagaagagatagggggacttttgtaaatcactcctttaatatctccaaatcccccctcctaacacaagacctccacctccctgcaatccattcataaaaattcatgtcagaataaccccgtgggtagggtagcaagaaggggtgagccagactggccagtgcatttgcagatttttggagctgggtgatgggctcattccactcttctatttttgtgtatatttgaacagttttccaagacagaaagtttaaacaataaaattttttaaaaagagaggaaaaccttctcagacagaaccacaagctgcaactagtgggaagtgtggggattgtgtgtcctgcccggggccgggccttcagaagcatgtgcagtcgcaccaagcccagggcgctgtgcaagagtgtactcacgaccagtagagcaagcatgagcaggaaggggcaagatgatgaagggcctgcagcacctgccaatcccggcacagggcggctagcccaggcatgaggaactggcccgccatggccacgaagctcgccaccatcgtaatcatgaaccgttttccaggggggcacagctctattccaacgactgaaattgttttcatctgctgcccaccacaagtgccctatgtggtgtgccagtgttttacggtctc

SEQ ID NO: 2272 - DNA, 996 bp, Homo sapiens
  misc_feature (1)...(996): n = a,t,c or g
cgtgatcccagctgactccggtcggcctcaacccaggggtggcgcaggcaccttgcaagcctcgagctgtagccaccctcaggcctgggaagaggcctgggccgacctcacacctcagcccttgcacccggccgggctcagttcaggcctgggcaccgagcttcaccctggggtggggtctcctcaggtggagtctgcagagtggacccagccaagggtcagggtcagcactgggtcagcgactccaatcttccagtggccagcacaccctagacaccccgaggagggagggctcctttctagcctgcccccccacccccacttcacccctccccagcttcccaaacttctgtctgcccaaatgggctctgaccgtgctctgtcggcccgagacatttggaagtcctgggggatgctggcaaatctcagctgttgctgaggagggggctgggaccccttcccatcccaaccttgagccccaggagataccgcgccccacacccaatcttgggacactccctatctggttggaagagagtaaccagtttccagagagccagagagtgagagagagaatgagactgngagagagagggnaaagagagagagagatgctgttgaatcagaaacagatcaacagcccaaagattttcctgtcccctggagtgcccagccccaggaagctccagggctgagtggtcaggagccagtttctccagcccctcctccccacagacccctagtggggaggggcagctgtccatttgcccaaagtattaatgcaactgaagctgtgatatttccaacgactgtaggaggaaaaattaaggggagagaggaaaacaaaaccaaccaacccctaaaatcattttcttattgtacataacgacctcattctcctgtatatgcggaagatataaccttatatttggtaagtgtttcttgtgctattttatcacgtgacctgtttataaaaatatatattaaaaaagttgt

SEQ ID NO: 2273 - DNA, 550 bp, Homo sapiens
gctcagatgacccctgagggctcttccagtcttgaaatgcattccatgatattaggaagtcgggggtgggtggtggtggtgggctagttgggtttgaatttaggggccgatgagcttgggtacgtgagcagggtgttaagttagggtctgcctgtatttctggtccccttggaaatgtccccttcttcagtgtcagacctcagtcccagtgtccatatcgtgcccagaaaagtagacattatcctgccccatcccttccccagtgcactctgacctagctagtgcctgggtgcccagtgacctggggggagcctgggttgcaggcccttcactggttccctaaaccttggtggctgtgattcaagtccccagggggactccagggaggaatatggctgagttctgtaagtttccagagttggctggtagagccttcttagaggttcagaatattaagcttcaggatcaagctggggggtatggaattggctgaggatcaaacgtatgtaggtgaaaggataccagggatgttgctaaaggtgagggacag

SEQ ID NO: 2274 - DNA, 1135 bp, Homo sapiens
agatttcggccaactagaggagtctggatggccttctgcatttcagaagccaaaaggacgattgccatatgaacttcaggactatgttgaagatacatcggaatacctagctcctcaggaaggaaattttgtttataagttatttagcctgcaagacctgttgttactcgtacgctgcagtgtccagaggatagagacaagaccacgttctaaaaaacggaagaaaatcagaagacaatttccagtttatgtactaccaaaagtagagtatcaagcttgttatggagttgaagctctgactgaaagtgaactttgtcgcttatggactgaaagtttattgcattccaacagctcattttatgttgggcatatcgatgcatttacttcaaaactttttctactggaagaaattacctcagaagaattaaaagaaaagctttcagcactcaagatttccaatttatttaacatcctccaacacattctaaagaaactaagtagcttgcaggagggttcctacttgttatctcatgcagcagaagattcttcactcctgatttataaggcctctgatggaaaagttactaggacagcatacaatttgtataaaacacattgcggccttcctgggtgtaccttccagtctctcagttcccggggtcccattaggatcccagcctgttattaccatatcatatccatcatggaagaataccttgtacttttccaccgaaatcactggataccacaacacaacaaaagattggtggaacgagaatgcctacacgcagccacaggaatccagtttccatggaaaccaaaagcagttgcttgcctgctcagcaagttgaaactgaaggagtggctccacataaaagaaaaataacttgaggactgtaccatggaaaactaaatttaaaaaaacagttataacagtgtttaatttagataagtttgagggaaaataatcagtaggcaagaggaacatttttcctgtagtagctagagtgccttgaaaaaatgtgttggctatgtgaaggaatatttcaactaaaatggaatggtatgcttttcacccttgaagtttgaggaggatcttgatatgttttaacattatcatggcagggaaatatat

SEQ ID NO: 2275 - DNA, 394 bp, Homo sapiens
ggtcttgtttggagttctgaacccatgatgttgtattatgcttctttctcctcttagcactctcaaatttcaggtttgtaaaacacagtttttgttttgtgttctggcaaagtgatctcaacatgtaagtagttgcagtaaaacacaggggcaaaggaagacaggcctgatgtgcccactcatctatggactcagagctgtgtgctttgctcctgcatcttgttgaggtgctgttccagctttgcatttctgtcaagtagaggcgaatatataaacagtgtggttgaatacatttaatgccagccattggaaactagttttaggcaaccactctcaaaaacagctttagaatttatgcccagttttcttgctttgaaagatactgagtaataac

SEQ ID NO: 2276 - DNA, 470 bp, Homo sapiens
aagaaaatgaacaggaaatcatggggaggagaagatatttgcagttcatgtatgtgacaacagcaccgagtatagcagaagtgttggcaaactttataaagcaaggcaccagatggtgaaaattttcagctttgtcacaactgctcatctttgctattgtgtgaaagcatccatacaccatgcattaaaaaaaaaatgagcatggctgcttcccagtaaaaccattcacaatcccaggtggcagtctggatttggtctgcactcatagttttctggtccctgatctcgaatatgtaaagagcacctacaaatcaacaagggggaaactggaaaaggcaaaagactttagaggatatccactcactttaaaggatatccagacgggccaataagcatgaaaagatgtgttagctttattagtaatcagggaaatgcaaacttaaaacatgtagcactgctacccatccatg

SEQ ID NO: 2277 - DNA, 795 bp, Homo sapiens
ggcgcccaagccgccgccgccagatcggtgccgattcctgccctgccccgaccgccagcgcgaccatgtcccatcactgggggtacggcaaacacaacggacctgagcactggcataaggacttccccattgccaagggagagcgccagtcccctgttgacatcgacactcatacagccaagtatgacccttccctgaagcccctgtctgtttcctatgatcaagcaacttccctgaggatcctcaacaatggtcatgctttcaacgtggagtttgatgactctcaggacaaagcagtgctcaagggaggacccctgggatggcacttacagattgattcagttttcactttcactggggtttcacttgatggacaaggttcagagcatactgtggataaaaagaaatatgctgcagaacttcacttggttcactggaacaccaaatatggggattttgggaaagctgtgcagcaacctgatggactggccgttctaggtatttttttgaaggttggcagcgctaaaccgggccttcagaaagttgttgatgtgctggattccattaaaacaaagggcaagagtgctgacttcactaacttcgatcctcgtggcctccttcctgaatccctggattactggacctacccaggctcactgaccacccctcctcttctggaatgtgtgacctggattgtgctcaaggaacccatcagcgtcagcagccgagcaggtgtttgaaattccgtaaactttaactttcaatgggggaggggtgaaccccgaagaacttgat

SEQ ID NO: 2278 - DNA, 632 bp, Homo sapiens
gaatggctgcgctggctccaaggagatggcctgggctgtcgggcaagagtcacaggacatccccatgtccaggggctgcctctgcatcggagatgtgacaggcatccccactaccctgttgcactgcatggccacgctgtctgctgctttcccagatgcagtgatatttggagtgcccagaggcacttgggcttccatggcaggctgtggccaactggagccgggaggacctgtgctaaatttcacaaggcccaccggttgtcatgatgggggattgtaatgcctcacttcagctttgacatcctctgccttgatgtcctctgcctaaaaaccaggggttcctagacttgaactctgattcttgcccatgtaactacaggcgattttccatcagcacagccttgtctggtttccttgcaggcagcaaggattgctctgccccatgcacaagtgtttcctgagactctgatcacagggccgtgatcacaaatacgggctggctgcgggggtggcaaacaaaaatggggtcaggtgcaggcactagtgactgaattgcagtgagcagtgatcgcctgcagaggtgagagcagaatcttctaccaattcaggaggggaggggcacactgggagct

SEQ ID NO: 2279 - DNA, 905 bp, Homo sapiens
ggtcgacgtctgaggttgctgatggattcttgcgaatgatctgatgctagaagctagcttattgaccaataagcagtatagatttaaattatcttcttgggttggtctgaggttgctgatggattcttgggattgatctgatgctagaagctatcttattgaccaataagcagtatagatttaaattatcttcttgggttggtctgaggttgctgatggattcttgggattgatctgatgctagaagctatcttattgaccaataagcagtatagatttaaattatcttcttgggttggtctgaggttgctgatggattcttgggattgatctgatgctagaagctatcttaggccctgtctctaactcactgtatgtttcaggcaaaacatgccacggttctaggtctgttttctcatctgcaaaataaacacccaaattagatgatacttattgttttaactagctataaaattccaatactatattccccatcattttcacttacttttacttaatctttatttgctacttttccacctataaagcgtaattttccatatcaagtaaacataaattcattaaaaaataaacacaaacccaaaatattcttattctaatatatctgcattaatagataaaaaggctttagctttaattttcatttttcatttctacctcttaaagtcaatgataaactcacaagtgtaaaatgaatgcatttaaaaacataaaagatacatttcaatgacaagaaatatgcaatgatcatgaaaatctactgtacactttgccacggtcaaagaatgaaggacaatatggaaaagccaatcttcaaatatatccttaacaaaaactctctcctgcatagtaaaagcatcatctaaacagcagctccaaccaaa

SEQ ID NO: 2280 - DNA, 361 bp, Homo sapiens
ggtaatcttgggaaagtgataagcatatcaggaagacatatttcttctagcttgatagaagagtgatgaatctaggatgtgacctctgctgtgtgagctgatgtctccctgatatatagtggctctgtgtgtgtttgcatagagagggaaagaggatgcatccgtgtctctgtttttcttcccggccgttcccaacagtgactgggtgattgaggggctggagcacgtgcagctcctcacccacgctgaaggcattcttctagtaatgggcatctgggcccattatggcagatcttaggcttccactctgtggctggacatcagccggttttgtgggcaccttcaggcgtattttctgggg

SEQ ID NO: 2281 - DNA, 437 bp, Homo sapiens
tagcttttatttagaattactaaagtacatatattaactacttttagttaaaactaaaaaatttgttttataatatggaatttgatatgtatatcttagtcatgcttttttttaggtaaaaattttgcacactgatttgaagtttaggaagaatttcttgatttgtagctttgagacacgaaggacatcctatttcatatcaaataggatatcaaagggctttttgggggtttatgggatatcagggagaacataatgcatgatttagtttgtagttttaaaatctaggatattattgaaattcaattgatgaatttttgaattcatcatttgagttttgaatgttagatattggattatcatacaaatttttgttaagttttctgttaaatactttttttttagatgaagtctgagagaaagtgagtgatgtgtac

SEQ ID NO: 2282 - DNA, 423 bp, Homo sapiens
gcttgctttggaatataagaaatacattcttgtgttgatttttcatttttattctttgcctatgtaatttccatgccattttttaatgatagctaaagattatgtaaattctcctatttcagtgactagggatttgttgggacgtaagtagagcttagactgttttcccaaggttgctttaccaataaatggaaagtttccttcttttagctgatgtttccttcaaaaggaaaatcttccatattatttaaaggaaatatttatgttcctttttttcctattgtgaattgaagcttttagattagttttgtgtccttccctagaactgaattgacagctgcagccttaagggattctcgtgatttaaatatgactgagagaggtgccacagtacactaagaaacgctgacacaagtgaaagtg

SEQ ID NO: 2283 - DNA, 448 bp, Homo sapiens
aggaggaatgttctcgcacagtcaatgagagggctgccaatgtggtggcctccaccaagtcaggccaggagcagattgaggacagagacaccatggatttctccggcctgtccctcatcaagctgaagaagcaggagatggagacgcaggtgcgtgtcctggagctggagaagacgctggaggctgaacgcatgcggctgggggagttgcggaagcaacactacgtgctggctggggcatcaggcagccctggagaggaggtggccatccggcccagcactgccccccgaagtgtaaccaccaagaaaccacccctggcccagaagcccagcgtggcccccagacaggaccaccagcttgacaaaaaggatggcatctacccagctcaactcgtgaactactaggccccccaggggtccagcagggttggctggttgacaggcctggg

SEQ ID NO: 2284 - DNA, 654 bp, Homo sapiens
  misc_feature (1)...(654): n = a,t,c or g
gatcatgagtcctgctttaagtatttgcagtgtagtaagagaatccatcttttactaggagaccagattccttttatacctcattcatcatgctggattgtaataaatttcagattttggaatgggcttatttaactgacctaacaatcttgatgatttccattagaataacttattctaaggtcaaaagtggaaagacactgttggtttttattttgatttcactatactcatttttgaacatggaaatacagtggtgaaaccacctatgcaaaaatgataacagtgaggaaattatgacagtgaaagagatctgacctaactaactatctatcttgcctcgaaactgcccttggtcgttcctgagtgtgggccaagctaactttgggagaaatttactttataggttaaattataatagcccttcccaaaactnnnnnnnnnnnnnnnnnnnnnnnnnnnnnnnnnnnnctttataataccatcagccttatcatttattcgtcatgtatggattgtttcctatatccactatcattaaaatttatccatttggaaatatttttttaatggaaaaaaaaaacacttcttcagtggaaaaaacaggttacaggggggattatattttattcnggctaaattngtacttcacag

SEQ ID NO: 2285 - DNA, 463 bp, Homo sapiens
  misc_feature (1)...(463): n = a,t,c or g
gtttgaaagtctaaggtgaagatgggggcagagggtgtccctggaaaggctaacgttctaatagagtttaactcaccattgccacttctgatggatagtctagttctgcaagaccaagcctttctgcctgaactctagtacctcaatcacaggctgggaatgacttaaggaaacgaagccagttccaaacgctaacacacagctgtcatacagattttgtcccacaaatgaaccaatgatataaangttatcnancctaaacttctgaattaactgtaaagtgatacaagagctttgtgttttaagggatgaaaaggttcagcctagttcttcagtggttccatacttaaaccatccaaaaatacaggtatgtatccttatccattgaaaagaanaaaaggcaacggggtgcancggtcacacctgcaatcccancgctttgggaaggcaaggnaagtggtca

SEQ ID NO: 2286 - DNA, 1109 bp, Homo sapiens
ttttttagaaaaggcaaagtttattccagtgttgacagagagagggtgagccttgcacagcaattctaaaaacatgtcatctccttcacctaagaggtaagaaccggctgtaagtcatggggtcactaaaccggccgcagttacagtaagcagaagaggtcacggctcaggccttctcagactttccctgggacacacggctctctgggggggcccggcgaaaccactcggaccaggagccatcgtacacggccacatcaggcttgccgcagaggtaggcagccaaggccacgtggcaggcggtgactcccttgcggcacgtggcaatgagaggctgcgagagatccaccttcttggtctggaacagagcacggagctcttctgggcccttctcgaagccatcctcagtcaggaagtccatgaaaggcatgttgacggcaccacggatatggcccgagtccagtcctactgcatccggctccggctcggtgcccaggaaccgcccttgagaccttgaatccaccagctggaacctcttagattcaaggttctccagcacctgctcgtaggtcttgagcagggagcggtcccagtgtggctttgaagacggccggttctgggcgtgagggctcggatgtcaccgggtggccctccttcagccagttccggaagccaccattgagcactgatacggtgcggtggccaaacacacggaacatccaccagacccggggagcatagaagctgcccaggtgttcaccatcatacaccaccacgtgcgtgtggttgctgatgcccaggcggcccacatactcggcgaagccagcctcgctgggcagcatcatctcgtagggcgacgccgtgtcccggcactcttctatgtcaaagaaagaggcgccgggtacgtggcgctcgaggtactccttgcgggcctctcgggtgcctggtgagtaccaggacgcgtccagcacccgcaggccgggccccagcttgccagtcctgatggactccgccagccacttggtggagaccagcgcccggtagagcacctgatgaaccatggcttcagctctgcgtgtcactcgccccggacgccgcgcccggaattc

SEQ ID NO: 2287 - DNA, 1554 bp, Homo sapiens
  misc_feature (1)...(1554): n = a,t,c or g
tggcacgaggcaacaaaaaggaattttttagtctgctgctattattaacatttattatctgtatcttttggctcaggaaatgacttcacctattttttccataagcagacctttaacagagtcacttaattgggctgcttaaacggatgttctgggagaaaattataatatttagtatttgtacaaaatatcaaaaagtattttgacaagtttctttttaagatagttcctaaagccttaccctggctagaggtgttttgtacaaattatatataagccagcctgatctaccaacatgccacagagaatcacaatcaacagtgtggggaaagtcagggcagtggaagtggatgcactctttttattttgaaggcttaaaccaaattgtcttggaattaaagctgtatttctgcagctttcggtacagagaaaaagaggaaagtgaagctgtgtcagttttaacattagctatatcaacatgtttaagaaagatagatgaagtcatttgcataaaggtacagcattgaaatactatgttgtgtttgtttttacatttttgcattaaaaaaaaacatgccgtaaaagccaagttaaatttcatattaaagcaagttctagtgtatgtgttgagttcctggtaatcacatacttgttcacatctacaccgtacttcatagtatgatttgtcaggggagggattgtggggtgacagttttacatttactttttcttcttaatgcagctggatctaagtaaaatgttttgaagtttatcagaaactaaatgtacttttaaaacgtatagggtcagggttgggggaaaaatacaggtatagtaagtaagaaaagtgacccatgaagaaagcatcgtgaggttgtatgttggttgactgtgattaaaatgcggggctggtgtaagttgtaagtggtggctgattgccgtgtaactatgtacatgattgttgggatggctgtcccatattttgtatattggaataaaaatttctataaattattgtaactaaaagtaaatattctaaattaagtcccacttcttaagtcacatggcttctgtcttggaaattttacctttaaaagattatttaagacaggaaccaggaggcttgggaacagggaaagagggaaatgttgtattatgtgggtcttggggcctctaaccatcagtatagggttttttctttccttgatggcagtagaaagacctcattttcataacataactactcttgatactttctttaaaaacactttttattaaagattctatcatgaggtatttggctgggagctgggaggctaaagcactcatgtcctggctcttcagtgaatttaannnnnnnnnnnnnnnnnnnnnnnnnnnnnnnnnnnnnnttccagtctccctgtcttgtaaaatgggagtaatacctacctcacagggttgttgtggggattaattagagataatgtctgtaaagcatttaaggttcttgaagaaggcactatataaatacaaaataatatctattaaagttggtttatttgtgcaaaaaaa

SEQ ID NO: 2288 - DNA, 2013 bp, Homo sapiens
  misc_feature (1)...(2013): n = a,t,c or g
ggagatcatgtacaaactggaagtgctctatgtcctctgcgtgctgctgatggggcgtccgaanaaccaggttcacagaatgattgcagagttcaagctgatccctggacttaataatttgtttgacaaactgatttggaggaagcattcagcatctgcccttgtcctccatggtcacaaccagaactgtgactgtagcccggacatcaccttgaagatacagtttttgaggcttcttcagagcttcagtgaccaccacgagaacaagtacttgttactcaacaaccaggagctgaatgaactcagtgccatctctctcaaggccaacatccctgaggtgggaagctgtccttcaacaccgacaggagtttgggtgtgtgatggggaagagggggcttatttaactcgtctggttgcaggttcatggaagaagggagccagcaggagtcgtcttttcaggttttggcaagctcgggctgttgggagagttttcctcccgaggggaccacctcctatgcagaccagatgttcctgctgaagcgacggcctcttggagcacatcctttactgcattgtggacangcgacgtgtaagtcaagggatgtgctccagangttactttgaccttcctgggggancctgattgaagttcaacgttgatgcattcaagagattcaataaatatatcaacaccgatgcaaagttccaggtattcctgaagcagatcaacagctccctggtggactccaacatgctggtgcgctgtgtcactctgtccctggaccgatttgaaaaccaggtggatatgaaagttgccgaggtactgtctgaatgccgcctgctcgcctacatatcccagggtgcccacgcagatgtccttcctcttccgcctcatcaacatcatccacgtgcagacgctgacccaggagaacgtcagctgcctcaacaccagcctggtgatcctgatgctggcccgacggaaagagcggctgcccctgtacctgcggctgctgcagcggatggagcacagcaagaagtaccccggcttcctgctcaacaacttccacaacctgctgcgcttctggcagcagcactacctgcacaaggacaaggacagcacctgcctagagaacagctcctgcatcagcttctcatactggaaggagacagtgtccatcctgttgaacccggaccggcagtcaccctctgctctcgttagctacattgaggagccctacatggacatagacagggacttcactgaggagtgaccttgggccaggcctcgggaggctgctgggccagtgtgggtgagcgtgggtacgatgccacacgccctgccctgttcccgttcctccctgctgctctctgcctgccccaggtctttgggtacaggcttggtgggagggaagtcctagaagcccttggtccccctgggtctgagggccctaggtcatggagagcctcagtccccataatgaggacagggtaccatgcccacctttccttcagaaccctgggggcccagggccacccagaggtaagaggacatttagcattagctctgtgtgagctcctgccggtttcttggctgtcagtcagtcccagagtggggaggaagatatggggtgacccccaccccccaatctgtgagccaagcctcccttgtccctggcctttggaccccaggcaaaggcttctgagcccctgggcaggggtggtgggtacccagagaatgctgccttcccccaagcctgcccctctgcctcattttcctgtagctcctctggttctgtttgctcattggctgctgtgttcatccaagggggttctcccagaagtgaggggcctttccctccatcccttggggcacgtggcagctgtgcctgccctgcctctcctgaggcagccgctcctgcctgagcctggacatggggcccttccttgtgttgccaatttattaacagcaaataaaccaattaaatggagactattaaataactttattttaaa

SEQ ID NO: 2289 - DNA, 1555 bp, Homo sapiens
tttcagcttcgggtgaatcactttaatgctgttaacggcaagtctgtaaaaggttcaggacaaagttcttttttctttcttttttaattataaaactaacagctgttagaatctttttttctttttttccttttttcttttcccagctacaaaatactctggggagatgcattataatttaaaatatataatattgcacaaacaaccaaaaggttaattaaactaaagaaataattacaaagagaaaaaccccatcccgtcaaaaaaaagattcagcattctctccatcccaccccctcactgaaggtttgaagtggaagtgacctcactctctcggtgtccctgacccacgatccctttcactcattggtgagcacaccagattaggtacaagaatcaccagagcagcatcgtgaagcaccaggctctccagagattcctgcagcccctcattcccccagaggtgcagctttaccagagtggagggtgagagcacaaaggctgggtctgtcttcaggaagaagagcttttgcagaagcctgatgagagtttcaagttcacccccaggatagcccttccagaagcagaagggctgaggcggagaaggctaggcttaccagagttgtaagtactcggctttgatcaccgctctgtaccgctggtagctgttttgtgtcctaaactacaggggagttgaggtgggtagctggttggacaaggtatcctgcccaggcaacacacagaagggcctgaagtagccccctcccttcttggggaggggaagaaacgcaagagcgaactcctgcaggtggcacagctgggctaaggacttgggtgcatctgacatgaagaagccctgggaaggcatggggacagaccagcgtgggctggaggaaaggaaggaggtgggtcagggtttggtctctggattctgaaccccaaaggagcctttccaggaatggaaaatgcctgggagggggagagtcccaagagaggcaaatttcccagagataagtgcctcttacccactgggataggaaccaaaatgtgttcactgtccctgtttagccaagggtaggtggcatggccctccctgcctgcttatgtatggacagagtatgttgtctcagcttcctccgagagagactggtggtttagcttctgtctacacaggcagaagggctagaactatcccttgggacttcccagcaggagtcctcaggaacagtgggtgttcagcagaaaaacacaggctcttctggtgaggaggataggtttcctctcccttgggtcatcctattgttggcacaagtcagagtttctggccgggatttagagagccccttcccaggtgtgagcaagaagccaagagggccagcagggagccaccagaatctgtgcccagagctctggttggcagaggagatttgggggaacattctcagtcttccagggctgggctgagacgagcgagggaggcgagagatgccatgggtgggggagctgctccctctggctccctcactcccagtcctcccactctacatcttccagt

SEQ ID NO: 2290 - DNA, 309 bp, Homo sapiens
  misc_feature (1)...(309): n = a,t,c or g
tgccattgttatctaattcttaccatatctcttaaaagtgttggctttcactatcgtattactggtagggaaagtgagtcccagaggcaaaaagtgcctcgccttaggctgctcattagtgagtaacagagccagaattaaatttaggtctcctggactacacaagctgtactctttcagtacaccctgcaccttnatacatgngctggggaaaattttatgcaaaattgnncttggtaantagaattttgaggatnaatntgaataggatccttaattttgggagtgngcngggnaaangnagtaatt

SEQ ID NO: 2291 - DNA, 1131 bp, Homo sapiens
acggtatttttgtttgtaagttaaaaagaaaaaaaaaaagaaaaagttccgggcattttgcatcagaaaacaactttgtcttggggcacacttggaagttgcatgttttctttccttcccttatccccattcggtcctctttttcctctctcgctttagttttcaaccttgttggtgctgagagagagaaccgagaggtcccagtacaagggcagggcagggcagggaagctgccaagctccgcaccccagaggagtgttctggactacagccttgtcttatggtcaaattgatacccttaataagaaaggaaaggaaaggaaaacagatcctcccctctgctttttattgtaaccagaatcaccctgaggtcccttctgaaccctctgggcctgcgctaattgtaggagccacagcgctcctagggtgagaggcttagccatccctgaccctggcagtgcactggtaagcagacactgcactgaaccaactgctatgctcagaatgtaccagaaacccaaacattggcaagtaattttgcaactttcaagtgcgttctttagaccaatgcattgcgtttctttccctgcttttgagatagtaggaagagttcttggtggtgtccccccccttcaattcttcagttgtatagtagttatagggaagatatgggtgtttttctttattattacttttttttttctgcaggtcagtaaaaggatttaagttgcactgacaaaaataccaaaataaaagtgtatttttaagttcccatttgaaattgctggcgctgctggccggatgcatttttgagtttgtattagttgataaattaacagtaataacaagattgtatgaaccgcatggtgcttgcagttttaaatattgtggatatttgtcctgcatcagaaacgagctttggtttttacagattcaactgtgttgaaatcaaacctgccgcaacagaaattgtttttatttcatgtaaaataagggatcaatttcaaaccctgcttatgatatgaaaatattaaaacctagtctattgtagttttattcagactggtttctgttttttggttattaaaatggtttcctattttgcttattaaaaaaaaaaaaaaaaaaaaa

SEQ ID NO: 2292 - DNA, 155 bp, Homo sapiens
  misc_feature (1)...(155): n = a,t,c or g
gtcaagactcagagcacacagccagcaccagaggccccatgaccctggacagancaggggagggggccaccatgctgaagacattcactgttttgctcttttgcattcggatgagtctgggtatgacatcgatagtgatggaccctcaaccggag

SEQ ID NO: 2293 - DNA, 723 bp, Homo sapiens
gaagaaagggccatgggtcctccctctgggcgctcatccaaggaacacttctctgacaaggacgggatcccgaggtggagaccatgggcgaaaccttcaccccggctgtgacacggctgcagcagggacctccttcaggagctctgagcctgcacctcttcctgaggctccactttaggggcctccctggacagtgaccaggcaggtccttaagtgagtgactgtggatggggagacagaggattccgatagatcctcatccttgttcggctgacagaactcggtagtgagcggccatcgcgagtgcgcctcactgatgtttcacccacgcaagtgcgggctctcgccctgccagcaccagacgcagctgagacctggacagcacagcgccgcgttccaggaccaccaaggagcaggtgccgggaggctcgtggaagcatcacacccgatgggcttcccggcctggtggaactccttcaggacacgctccacttctttattcaccttgcaatctttcccgtccacggcaaacgtgctcaggtttttagccgctccaaagcctcctggaaagatggcagcatcatggttggctgcactgaggttggccaggtctgtgattttgccacgggcgatcctcgcagactcggtcaaaacattcctgctctcgccttcggacggctgccccttggtgtggtcaatcacgtgcatctgagggacgtcagg

SEQ ID NO: 2294 - DNA, 709 bp, Homo sapiens
  misc_feature (1)...(709): n = a,t,c or g
gacaccagtggcatatcacggccatggggtctcagcattccgctgctgctcgcccctcctcctgcaggcgaaagcaagaagatgacagggacggtttgctggctgaacgagagcaggaagaagccattgctcagttcccatatgtggaattcaccgggagagatagcatcacctgtctcacgtgccaggggacaggctacattccaacagagcaagtaaatgagttggtggctttgatcccacacagtgatcagagattgcgccctcagcgaactaagcaatatgtcctcctgtccatcctgctttgtctcctggcatctggtttggtggttttcttcctgtttccgcattcagtccttgtggatgatgacggcatcaaagtggtgaaagtcacatttaataagcaagactcccttgtaattctcaccatcatggccaccctgaaaatcaggaactccaacttctacacggtggcagtgaccagcctgtccagccagattcagtacatgaacacagtggtgaattttaccgggaaggccgagatgggaggaccgttttcctatgtgtacttcttctgcacggtacctgagatcctggtgcacaacatagtgatcttcatgcgaacttcagtgaagatttcatacaattggcctcattgacccagagcttccttgggagacacatcactatgtnggattgtgggaggaaa

SEQ ID NO: 2295 - DNA, 419 bp, Homo sapiens
ggcccattctgcaaggtagagggcggcatcccatgtgaccaggcctgtggtaccgtgggagatgatggctgtgctcttggagagtgtgactgagcctcctgaggactgcaccaagagagggcgagagagtcagtccagcgatcagaaggcaagtggcttagaagacaagtagccatccaccacatggctgaataaaccatgacaggaccaatcgccactcagcaatgagaagcagctaactgttgacataccaacagttgcacgggcctcaagggtgtcacgcgacatgaaagacactcatctcaggccacacaggattccatctattgaacattcctgagacaacggaattctggcgatggagcacagctggggaaactgagttacagagcttgtctgcactgagtcatcaggagcaa

SEQ ID NO: 2296 - DNA, 1607 bp, Homo sapiens
cagaagtgagtgtcccagtgggggatgtggttgtggtacctactgaaggaaatgaaggggagaatcctgaagacactaaaacccaagtgattttgcagttacagcctgtgcaacaaggtttgtttatcgatggacacttttacaacaggatttatgaagctgggtcggagaacaacacggcagttgtagcagtagaaactcacacgatacacaaaattgaagaagggattgatacaggcactatagaagcaaatgaggatatggaaattgcttaccccataacttgtggggagagcaaagccatcctcctctggaagaagtttgtatgtccaggaataaacgtgaagtgtgtcaagttcaatgatcagttgatcagccccaagcactttgttcatctggctggcaagtccactctgaaggactggaagagagctattcgtctgggtgggatcatgctcaggaaaatgatggactccggacagattgatttttaccaacatgacaaagtttgctccaatacctgcagaagcaccaaatttgatcttctgatcagcagtgcaagagctccagtgccaggacagcagacaagtgtggtgcagacacccacttcggctgatggtagcatcacgcagattgccatctcagaagagagcatggaagaggcagggctggaatggaactcagctctcaccgctgctgtcaccatggccacggaggagggtgtaaagaaagactcagaggaaatttcagaggacactttgatgttctggaaaggaatagctgatgtagggctgatggaagaggttgtctgcaatatacagaaggaaatagaggagctactcaggggagttcagcagcggctcatccaggctcccttccaagtcacagatgctgctgttctcaacaatgtagcacacacatttggcctaatggacacagtcaagaaggttttagacaacagaaggaaccaagtagagcagggagaagaacagtttctctatactctgacagacttggaacgccagttggaggagcagaagaagcaaggccaggatcacaggctgaaatctcagacagttcaaaatgtggtactgatgcctgtgagcactcctaagcctccaaaaaggccccgggttccagcggccagcctccaccactgtcttgagcccttctcctcctgtccagcagcctcagttcacagtcatctcacccatcaccaattcaaccccagtgggtcagtcattttccatgggcaatattccaagtggccacccttcagccagggctccaagtcctgtgactgtccacacactgccttctggccctcagctcttccgctatgccacagtggtctcctctgccaagagcagctcaccagacacagtgaccatccacccttcatctagcttggcgctgctgagctctactgccatgcaggatgggagtacactgggcaacatgaccaccatggttagccctgtggaattggtggccatggagtccggcctaacctcggcaattcaggctgttgaaagcacctcagaggatgggcagaccatcattgagattgatccagccccggacccagaagctgaagatactgaggg

SEQ ID NO: 2297 - DNA, 1474 bp, Homo sapiens
  misc_feature (1)...(1474): n = a,t,c or g
tttttttttttttgctacagtctttagactaagcatgcaagacatacgactaagtgcaactgagtgaaatgttttttttttaaattttaatcattccctaaaggtttgaactgaggtatgcgtactaacagtttctcatgctgttatctttactcatgtctagctacacatgctgagaatgaactaatctaccagatttttatcctcttttgaataccaaactaaccagcaaccactcagtttagaagcacagggcccccttcccatgaccctgtctggctactgcctgcacatcatgaagctgcctggaaaagtttttttttnttttnttttttttttttaaagtcttgcgtgaccacagactgccctttatacagaaagcagagtgaagcttcaaaagtaactgccagagaagtttttgtaccaagcttatgagtggatgggagtgttacttttctttaaatgaaaaatgctgaccaaagcctaatcggaaaaaaaggaaaaattaaaaataaaaacaaactgaaggatatatgccaagataaaccaaaattaatacagtgatcacagcacagttcttaaacaaaagtggcatacaatctaaaaatatctctttttctagaaatactattatgtaatctagttcaattatggaagcttttctgtcctgactctaaactgtctcctttattggatactctaattgcagtggcatacattcattttttttttgagatgggactcccttccttctgtagctcctttaatattgtgtcctatttttatctgcagtagccccataaaatctctttaagagaatgagttttggtctctgtagaggtacacaaaaagaaaaaggaaaaataactactagaaaaaagtaacaactttggttccattatctacttggtcttctaaatttacgatgaaggagcagttctctttctcaggttgcaatagcctatcgcttgtcatttgcctctaaattcttttgcctcctttgatcaacaataagaggatatttggcttcatcagataaagcataaaacagagaacataatttacctttgtgtaatatctttggtaattttagaaaaaaggtacaaagaaagaatataaattaagcttcgaaaggctctcgaactaaaaaaaactacagtcctatataaataaatgacaggaaagtgggtgcagagctgaagtgtggaggggttcgtaaggactgaggttgtactgacctgtaaccatcacatttctgcataccatgtttgggacccccccaaagnccagggcctacgatgatatcttctatgagtttttgtgatactgggttggtgatataatattgcataacaaactgcagtaccaaatttgcatatttgaaattaacactttagcatttgctgaactcagccctcgttaactcccttaacaagttcaatctgaaatcgaatttgcattcaaacagtttaat

SEQ ID NO: 2298 - DNA, 3880 bp, Homo sapiens
atcttatttttctttttggtggtggtggtggaaggggggaggtgctagcagggccagccttgaactcgctggacagagctacagacctatggggcctggaagtgcccgctgagaaagggagaagacagcagaggggttgccgaggcaacctccaagtcccagatcatgtctctgtggggtctggtctccaagatgcccccagaaaaagtgcagcggctctatgtcgactttccccaacacctgcggcatcttctgggtgactggctggagagccagccctgggagttcctggtcggctccgacgccttctgctgcaacttggctagtgccctactttcagacactgtccagcaccttcaggcctcggtgggagagcagggggaggggagcaccatcttgcaacacatcagcacccttgagagcatatatcagagggaccccctgaagctggtggccactttcagacaaatacttcaaggagagaaaaaagctgttatggaacagttccgccacttgccaatgcctttccactggaagcaggaagaactcaagtttaagacaggcttgcggaggctgcagcaccgagtaggggagatccaccttctccgagaagccctgcagaagggggctgaggctggccaagtgtctctgcacagcttgatagaaactcctgctaatgggactgggccaagtgaggccctggccatgctactgcaggagaccactggagagctagaggcagccaaagccctagtgctgaagaggatccagatttggaaacggcagcagcagctggcagggaatggcgcaccgtttgaggagagcctggccccactccaggagaggtgtgaaagcctggtggacatttattcccagctacagcaggaggtaggggcggctggtggggagcttgagcccaagacccgggcatcgctgactggccggctggatgaagtcctgagaaccctcgtcaccagttgcttcctggtggagaagcagcccccccaggtactgaagactcagaccaagttccaggctggagttcgattcctgttgggcttgaggttcctgggggccccagccaagcctccgctggtcagggccgacatggtgacagagaagcaggcgcgggagctgagtgtgcctcagggtcctggggctggagcagaaagcactggagaaatcatcaacaacactgtgcccttggagaacagcattcctgggaactgctgctctgccctgttcaagaacctgcttctcaagaagatcaagcggtgtgagcggaagggcactgagtctgtcacagaggagaagtgcgctgtgctcttctctgccagcttcacacttggccccggcaaactccccatccagctccaggccctgtctctgcccctggtggtcatcgtccatggcaaccaagacaacaatgccaaagccactatcctgtgggacaatgccttctctgagatggaccgcgtgccctttgtggtggctgagcgggtgccctgggagaagatgtgtgaaactctgaacctgaagttcatggctgaggtggggaccaaccgggggctgctcccagagcacttcctcttcctggcccagaagatcttcaatgacaacagcctcagtatggaggccttccagcaccgttctgtgtcctggtcgcagttcaacaaggagatcctgctgggccgtggcttcaccttttggcagtggtttgatggtgtcctggacctcaccaaacgctgtctccggagctactggtctgaccggctgatcattggcttcatcagcaaacagtacgttactagccttcttctcaatgagcccgacggaacctttctcctccgcttcagcgactcagagattgggggcatcaccattgcccatgtcatccggggccaggatggctctccacagatagagaacatccagccattctctgccaaagacctgtccattcgctcactgggggaccgaatccgggatcttgctcagctcaaaaatctctatcccaagaagcccaaggatgaggctttccggagccactacaagcctgaacagatgggtaaggatggcaggggttatgtcccagctaccatcaagatgaccgtggaaagggaccaaccacttcctaccccagagctccagatgcctaccatggtgccttcttatgaccttggaatggcccctgattcctccatgagcatgcagcttggcccagatatggtgccccaggtgtacccaccacactctcactccatccccccgtatcaaggcctctccccagaagaatcagtcaacgtgttgtcagccttccaggagcctcacctgcagatgccccccagcctgggccagatgagcctgccctttgaccagcctcacccccagggcctgctgccgtgccagcctcaggagcatgctgtgtccagccctgaccccctgctctgctcagatgtgaccatggtggaagacagctgcctgagccagccagtgacagcgtttcctcagggcacttggattggtgaagacatattccctcctctgctgcctcccactgaacaggacctcactaagcttctcctggaggggcaaggggagtcggggggagggtccttgggggcacagcccctcctgcagccctcccactatgggcaatctgggatctcaatgtcccacatggacctaagggccaaccccagttggtgatcccagctggagggagaacccaaagagacagctcttctactacccccacagacctgctctggacacttgctcatgccctgccaagcagcagatggggagggtgccctcctatccccacctactcctgggtcaggagggaaaagactaacaggagaatgcacagtgggtggagccaatccactccttcctttctatcattcccctgcccacctccttccagcactgactggaagggaagttcaggctctgagacacaccccaacatgcctgcacctgcagcgcgcacacgcacgcacacacacatacagagctctctgagggtgatggggctgagcaggaggggggctgggtaagagcacaggttagggcatggaaggcttctccgcccattctgacccagggcctaggacggataggcaggaacatacagacacatttacactagaggccagggatagaggatattgggtctcagccctaggggaatgggaagcagctcaagggaccctgggtgggagcataggaggagtctggacatgtggttactagtacaggttttgccctgattaaaaaatctcccaaagccccaaattcctgttagccaggtggaggcttctgatacgtgtatgagactatgcaaaagtacaagggctgagattcttcgtgtatagctgtgtgaacgtgtatgtacctaggatatgttaaatatatagctggcaccttagttgcatgaccacatagaacatgtgtctatctgcttttgcctacgtgacaacacaaatttgggagggtgagacactgcacagaagacagcagcaagtgtgctggcctctctgacatatgctaacccccaaatactctgaatttggagtctgactgtgcccaagtgggtccaagtggctgtgacatctacgtatggctccacacctccaatgctgcctgggagcccagggtgagagtctgggtccaggcctggccatgtggccctccagtgtatgagagggccctgcctgctgcatcttttctgttgccccatccaccgccagcttcccttcactcccctatcccattctccctctcaaggcaggggtcatagatcctaagccataaaataaattttattccaaaataacaaaataaataatctactgtacacaatctgaaaaaaaaa

SEQ ID NO: 2299 - DNA, 598 bp, Homo sapiens
tgaagtacagtctctttggtccaaagctgctgacctctttgagtctgagggggccaaagtaattgaagtatcccttcctcacaccagttattcaattgtctgctaccatgtattgtgcacatcagaagtggcatcgaatatggcaagatttgatgggctacaatatggtcacagatgtgacattgatgtgtccactgaagccatgtatgctgcaaccagacgagaagggtttaatgatgtggtgagaggaagaattctctcaggaaactttttcttattaaaagaaaactatgaaaattattttgtcaaagcaccagaaagtgagacgcctcattgctaatgacttttgtaaatgcttttaactctggagtagatgtcttgctaactcccaccaccttgagtgaggcagtaccatacttggagttcatcaaagaggacaacagaacccgaagtgcccaggatgatatttttacacaagctgtaaatatggcaggattgccagcagtgagtacccctgttgcactctcaaaccaagggttgccaataggactccagtttattggacgtgcgttttgtgaccagcagcttcttacagtat

SEQ ID NO: 2300 - DNA, 611 bp, Homo sapiens
  misc_feature (1)...(611): n = a,t,c or g
caaaaacagaaatggacagcaggacaaagagcaaggattactgcaaagtaatatttccatatgaggcacagaatgatgatgaattgacaatcaaagaaggagatatagtcactctcatcaataaggactgcatcgacgtaggctggtgggaaggagagctgaacggcagacgaggcgtgttccccgataacttcgtgaagttacttccaccggactttgaaaaggaagggaatagacccaagaagccaccgcctccatccgctcctgtcatcaaacaaggggcaggcaccactgagagaaaacatgaaattaaaaagatacctcctgaaagaccagaaatgcttccaaacagaacagaagaaaaagaaagaccagagagagagccaaaactggatttacagaagccctccnttcctgccataccgccaaaaaagcctcggccacctaagaccaattntttcagcagacctggcgcactgcccccgagaaggccggagagaccggtgggtccgctgacacacaccaggggtgacagtccaaagattgatttggccggcagttcgctatctggcatcctggacaaagatctctcggaccgcagcaatgacatt

SEQ ID NO: 2301 - DNA, 2453 bp, Homo sapiens
cttaaatttgtgcaagatcgagtgggctcaggactgttatatagcagatggcaagcctcagcaggacaggtgtcagacacaaacaaggtatctcaacctcctggcacaacatcattttctttgcctgatgactgggacaacagaacctcatatttgcactcccccttctcaactggacgaagttgtatccccctccatggtgttagtccagaagtgaatgaactattgatggaagcccagctgctccaggtatcccttcctgaaattcaggaactttaccagactttacttgcaaagccaagccctgctcagcagactgaccgaagctcaccagtgagacccagcagtgagaagaatgactgttgccgagggaagcgagatggaattaacagtcttgagagaaaactgaagagacgcctggaaagagagggcctctccagtgagcggtgggaacgagttaagaaaatgcggacccccaaaaagaagaaaatcaaactgagccaccccaaggacatgaacaatttcaagttagagagagagcgtctatcgaattagttcgttctgctgaaactcattccctgccctcagacacatcctattccgaacaggaagactctgaggatgaagatgccatctgcccagctgtgagctgccctgcaccaagaaggagatgaggtggactgggtcagtgtgatggcagctgcaatcagtggtttcatcaggtctgtgttggtgtctccccagagatggcagagaaagaagactacatctgtgtgcgctgtactgtgaaggacgcaccaagccgaaagtaaaaacacaaaaacagatacccccctacttaatgtaattcaggactccaaccaagaggatttcttccaaatctcagcaaagctacaggactggtactcaagccagcctgtaaacggtgctatttctattccttatgggatcatttttccaggactctttgaagaaaagaaaaaacaactaaaaaaatttttgacactttttgtattttttccttaagagctatttgtggttgttgaggtttgaaaagctgactgttttttttgcaggggttcccaccaatttggaaggcattgaagcttgcaccttttcatgtacagcattaaaattttacctctctctgggatttaccagcttaagagtccaactcacttccagtgcccaaaagggcacccaccagaaattccagtaaatcctcatttgaggaagctctcccttgtttactctgttaccacattggggaaatttttaagtttttcactttgggagtttttgtttgtttcttcttttcctttatccacttttcttcttcctggtagactaggtttatttatctgagcaataacttctatgttggtttcagtggctggaattaaaacaaaacaaaacaaacttccaaacagtgtgttggtgctttagcgattgattgatgtacagaacacaaatgtctagtttctagtgtcactgatgaactagtgatgtagaaaagagacttctctgtaagtaattgccacagctgtattttggctttctccctgtcccttcctttctcccctattttttggtagcttgtatcaaatgttacagtttatattgtggaataaatccttcgtcctaacataacactaaatgctgattatttagagccattagagcacagcttcttctgcccctctactggttgcacagccagaaggggctgcttgcttttgcctctgcccaaccaggttgcagtagcagtggatgttagcctgcaaacaacattaggggattcttcttttgtgtcctgctctgtttggtgggccatatgcctacagccctcactaacaaagaacccctctgtcttcaaggactagaacctatctttaaagccgtgctcttttaaaataagctttctcagaatgttggcaaatcacttcaatcctcaaatcagtcttccttgtggaatgctgcctttattatatttgaattgacaggggaacttggtttagggttaagacgttggaaggaaatctaaggaaaattaatcctcacagaggtccgggtttagtatatgtcttgagaggagacttgtgaattcccagactctgcctcctggtttcctttctcatttctttctaactgtagctatcattactggctgtggatagcccatagctattttccttgcttttcttttttaaaggggtctgttctgcagtggagaagacattctggtgaccagacttttgcttaccttttcctattctgttgccaatttttgttttccccacattctatagccataaacctgaagatgagtaaaactggtgggtctttaataaaacaacaacaaaaacagcagtttgtgatatagcagaggtttaaatgtaccctccccttttatgcacttcaaataattaaatctctttaagaatgaaaaaaaa

SEQ ID NO: 2302 - DNA, 64 bp, Homo sapiens
tgtttttaaaaaaagaatatactaaaggtatatcaggctgttatttctaattcctaatacacac

SEQ ID NO: 2303 - DNA, 1403 bp, Homo sapiens
ggcggcttccaggtgggcgcgcaaggccgtggtcctgctttgtgcctctgacctgctgctgctgctgctactgctaccaccgcctgggtcctgcgcggccgaaggctcgcccgggacgcccgacgagtctaccccacctccccggaagaagaagaaggatattcgcgattacaatgatgcagacatggcgcgtcttctggagcaatgggagaaagatgatgacattgaagaaggagatcttccagagcacaagagaccttcagcacctgtcgacttctcaaagatagacccaagcaagcctgaaagcatattgaaaatgacgaaaaaagggaagactctcatgatgtttgtcactgtatcaggaagccctactgagaaggagacagaggaaattacgagcctctggcagggcagccttttcaatgccaactatgacgtccagaggttcattgtgggatcagaccgtgctatcttcatgcttcgcgatgggagctacgcctgggagatcaaggactttttggtcggtcaagacaggtgtgctgatgtaactctggagggccaggtgtaccccggcaaaggaggaggaagcaaagagaaaaataaaacaaagcaagacaagggcaaaaaaaagaaggaaggagatctgaaatctcggtcttccaaggaagaaaatcgagctgggaataaaagagaagacctgtgatggggcagcagtgacgcgctgtggggggacaggtggacgtggagagctctttgcccagctcctggggtgggagtggtctcaggcaactgcacaccggatgacattctagtgtcttctagaaagggtctgccacatgaccagtttgtggtcaaagaattactgcttaataggcttcaagtaagaagacagatgttttctaattaatactggacactgacaaattcatgtttactataaaatctccttacatggaaatgtgactgtgttgctttttcccatttacacttggtgagtcatcaactctactgagattccactcccctccaagcacctgctgtgattgggtggcctgctctgatcagatagcaaattctgatcagagaagactttaaaactcttgacttaattgagtaaactcttcatgccatatacatcattttcattatgttaaaggtaaaatatgctttgtgaactcagatgtctgtagccaggaagccagggtgtgtaaatccaaaatctatgcaggaaatgcggagaatagaaaatatgtcacttgaaatcctaagtagttttgaatttctttggacttgaatcttacttcattcagtaagagaactcttgggtgtctgtcaggttttatgtggtccgtaaagttaggggttccgttttggtttcctatttaggaaagagtactggccgg

SEQ ID NO: 2304 - DNA, 782 bp, Homo sapiens
  misc_feature (1)...(782): n = a,t,c or g
agctaacatttaccacagaggcatgtaaagaaaacgattctagcagagtaactataatacaaaagaacaatattccaattatgttcctatgttctatccaggaaggtttaagaggagccttttaaactgaactatattctaagaggtgggaaaaagttttcttttgtttttcttattaaccgtaccttgaaagccccaaataaatgttccttggtttagatgccctggtagatgaccaaaaaagtttgaccagttatcaaaatctacaaagactatatgagtcatgggtcgcaggtaatccaaatttggaagctcaacaatttcttcttctatattcggatagcttaggttcatttntcaaatcctttctccatgttctaaactttttggaatagtttattgcctgtttcagttttctctctgtatgtgaggcactagcagtaaaacttgtacaggtttgatttttcagatccaaaatgagccacactgggtttctgtaagaagcaatgttttctatggaaatgctgctgtgcactctcaggatcatgaaatgctttggtgcaggtgccacacttgattacatactgctgctcctcctcatcactcttttctttgtgcacttgatggatatgagtgttcatgtcggttaaattctgtgctgttgccgaacataaactgcagcgaaaccacagttttcctttatccagcatgatttggagacatctgctataatcttcttttctgttgactttacagatgtaactctcacggcaaccacaagt

SEQ ID NO: 2305 - DNA, 443 bp, Homo sapiens
gaaggagcaaaggcgacgccctggacaagtgtcaggctgagctgaagaagcttcggaagaagagccagggcagcaagaatcctcagaagtactcggacaaggagctgcagtacatcgacgccatcagcaacaagcagggcgagctggagaattacgtgtccgacggctacaagaccgcactgacagaggagcgcaggcgcttctgcttcctggtggagaagcagtgcgccgtggccaagaactccgcggcctaccactccaagggcaaggagctgctggcgcagaagctgccgctgtggcaacaggcctgtgccgaccccagcaagatcccggagcgcgcggtgcagctcatgcagcaggtggccagcaacggcgccaccctccccagcgccctgttcggccttccaagtccaacctgggtcattttccgaccccatttccgg

SEQ ID NO: 2306 - DNA, 723 bp, Homo sapiens
cattttatatatacaacaaatttttaattatgtactgaaaataaattacaggaaataactttaaaatgcaacagaggacaaagtcacaataaacattcccattgaattcccttggtgggggggggggggtgagattgcagtgctcaagataaatatcacaaatatatcaaaaacttcaaattgtctatgcattcacacactgacatgagccacaaacattcctttcacagggactgtacttatttagcctaccacaggaccagattttgccataaactacaaaacttttaatacaaaatcgtatttatatatttataagtcatatacatgccctatctgtgattttagaaaataaaagctacacactgtacagacactcttaactcatagctgtaggcaacatttttggatggaatttcttccccaataaaattaatggcatattttatatacatgaaggctaaactgcaaaaagacagttcagtttcccagatatgcatctccttttagggcaagtttataaatttaaaaaggcaagacaaatgtacacctcagaattactttcttagctacaagagttgccatgtaatttctgtgaagtttctgatacatgcatttatgtaatactggtattgaaggcagtaaagcaatatatacttttaatgtagtggctcaataaagcttcatgtcttccaatctggtctgaacagtgatcataatctc

SEQ ID NO: 2307 - DNA, 409 bp, Homo sapiens
gcatctcttcagggaagagagaagcaatgggcatgttagtatacaatgatcacagccacgcaggcctgcaagctgccttttggacaggctgttgactgccgttccaattagctgattggagaatgtggaatgcagagtgataatgctgcatatctgctatcaggcagcagcaaaggtttttgtcttgggaaggcaagctttccctgcaatattatctcagcagctccctagctgcttaccctgaaaacgagggatccaaacggagggtgttgcactctgctaacgctggtcctgtgcgtggctgtggcatatgagcggcaggtctgaaaaagcaggtgtgtgctgggacgggcactggactggaacgcaggcggacgctctcgggtttacctgcttcctgttaacagaa

SEQ ID NO: 2308 - DNA, 347 bp, Homo sapiens
  misc_feature (1)...(347): n = a,t,c or g
gcggcacgagcgaaagtgtctacggactgtgaagctgctgcccctttcttgacctcctcctccttcaagctcaaacaccacctcccttattcaggaccggcacttcttaatgtttgaggctttctctccagcctctcttaggaggggtaatggtggagttggcatcttgtaactctcctttctcctttcttcccctttctctgcccgcctttcccatcctgctgtagacttcttgattgtcagtctgtgtcacatccagtgattgttttggtttctgatccctttctgactgcccaaggggctcagaaccccagcaatcccttnctttcactaccttcttttttggg

SEQ ID NO: 2309 - DNA, 507 bp, Homo sapiens
gcccagttggcagcgggaggttgagtggggagtgttggggcataatggtttcagagaagaatctcaaatccctgctctgcctctgtacccttgggcaaatggcttcacctttgtcagcctctaaagttttttaatctatgaaatgaccaacctgccatgccccatttatgaggccataacaaggactaataagataacccaagtagagcctccagcgcagtgcctgaactactccttcatcccccacctccttctccctctgtctgcatgtgccagagcttggtttctttatctgcattcaaggaacctccctctgcttgagagtatgaagcagcagccctccaaggctgggaatcttggcacatctgttttgtgctcaaaactgtgccctgtgtactaagggacaaactctgttgttttcagacaccatcatccccacccctcatttgtaagatgtactttctttgggtaggtgagacacatgaacatgaatcaagaatctctcca

SEQ ID NO: 2310 - DNA, 526 bp, Homo sapiens
gcagcaagtcaccagatccaactcagcagccccttcggggcggctctctaacccacagtgccccagggccctccctgagccagcccctggcccagttgacgcctccagcatctggccccagtaccagcagtctgttcaacttgcaaaaatccagcctctctgcccgacacccacagaggaaaaggcgggggggtccctccgagcccacccctggctctcggccccaggatgcaactgtgcacccagcttgccagatttttccccattacacccccagtgtggcatatccttggtccccagaggcacaccccttgatctgtggacctccaggcctggacaagaggctgctaccagaaaccccaggcccctgttactcaaattcacagccagtgtggttgtgcctgactcctcgccagcccctggaaccacatccacctggggaggggccttctgaatggagttctgacaccgcagagggcaggccatgcccttatccgcactgccaggtgctgtcggcccagcctgg

SEQ ID NO: 2311 - DNA, 828 bp, Homo sapiens
tgcctgtttcaggtcgtctcggggaatacaattctccttctcttcagctttgcagcctgtgtcttttgtaagttaatggtatttgattgtggtcagagtgtgaggaaactgccctgcttcacaaggaaggtttttctgtacacccactagcctcttccaccgcgtttcaaattctggaactgacagctagaagcagtggtaggaggttgaaggattcaatggcaaaaccttaatcaaggaccaagtaccatcctctttgctttcttctctgggagttttaatgagcttgatgggtttgtcataaacattggcccaagtgtgggggacagattcccccactgttaaaattgttcttctagagaaagttagcttcctttagacgcaatgctattttttttcagactacagagagtacttaaccattcttaaacttcataacttataagtggaaacctgttactctgaatatttttaaagcatgtagagatatttgcaggaagaatttatgtccttaggagaagtcctagataattaaatgttttgaataagaactgttcccctttgcctctttgtctccaaatcagcaaagagccaaatatcaagccctcctctgctgttgcccctaacaagtctcttactaagtctgaccaggaaaatcgacccaatgtcattcagtgtagacttcaggggcagaaggaaagaggccgatgcagtcagtgcactggcccttctgcctccaggttcctgctatgttctggaggaagtatgctatagtacaatcctgaatttcatgcattaattcacccacgccgagccctatgcagtctc

SEQ ID NO: 2312 - DNA, 554 bp, Homo sapiens
  misc_feature (1)...(554): n = a,t,c or g
tcataacactttcacgtgtgacagcctaaggtttctttagttttaggatggggtggggtgggagtggttttgcatgtttgaccaggatgtgatgcctgtctttattccttgataagaagtagctgttacagcatttcaagcaaattattttaggtagaatagaacttactgccaaatgattatttatttagcaaaaattattctccaacttttcgaattcacaatttttctaagtgcatagagtagttttttacattgtcacgaattccttaatacctttatttaaaatggaaaaaatatggacaatattttagaaatatgttctacacatctaattttatctgtagtttaagtgatctaaattgagatgcctttgatatgaagagatttaccaacattatatgcactcgtgccttcaatgtggaatcaaactggttaacctcagcacagtcctctcgtttctgtgtttctgctgcactaattgccagggggtgggggagaaggcgaatgaattaattcatagtaggaggcggcnataggtgcancaaagggca

SEQ ID NO: 2313 - DNA, 625 bp, Homo sapiens
ctccgtctcaaaaaacaaaaaggtgacacatccagctctttctccaggtcactgcgctggaggacagatgtgccgtcttgtcctgcctgtttcacatcagcataggatcaaaggatgacaatgctgacagcttctgaagccgaactcaacagtctcataggctcctcacttgtcacttatttttccctagctccctcaaccgcaccccatccctttagatcgtgcgtctgttttagtgactctgacacgatgccgtcctcaccttccaaatacccagttatttattcaagaggggggaagtgggtagaggatgggatgttttggaagcactttgcaagttaccactatctgaaaatcccctgctgttgcggggagaagctttgaatgcactgaagagaattccttctaaatgaaggcaggtgatagtgttctttctgtaagtaaagggaaagaaaaaaaacatagtttgcttaccaggtggagacaagattcaagacatagcagaagagtggaagacaaatattttccacttaaatggaggctgtttttgacgttctctgccaaggatttagagctttcgttgaactaacataaaaggagtgcgagtcttagtagagatgttccg

SEQ ID NO: 2314 - DNA, 684 bp, Homo sapiens
aaaatgagaaatgcaactcttcttattccagcatggtaatcaaacgcccaagatatgcagggccaggctactgtgctcagacaaaaactctaataagcattttgctggaagaacttggtgaggtgttaaccctaggaaaatgtgggacaaacacttcccttataacagcaaaaatgtcttaagacctactctattataacatttgcaaacacacattaatttacatactaaaatagtaaatgaaatttcttggaagttcaaaaaaagatctttcaaatcttttcatcacaatagagtggaaatccgtctgtcttcagagttgtcgaacttttctttctgtgctttttatgttgacatctaacttgtccactttggttgtcagccggtcaagaatgtcatcttgctcctcaatttctgtctgcatccccagggctatgtccttcagacgacccagtcccatggacagctcatctaggttgctgtcgatcttctggtgataggctcgaaggtgtgggttctttgggtaagcatcagtactcatggcagaaccagcccctctggggacagggtctgtatcatccagctttctaaggtttgggtggctggcctggtactttgcttcctgttctttacttgtacttatagcttctttcaatctgttgttgggctgggaggtgagggtgc

SEQ ID NO: 2315 - DNA, 450 bp, Homo sapiens
ggcccgtgggaactgggagctgaggaattgcctaggaatcagcactgtggagaatgaggaaacgtggatatcaggattcctgtttgagtggtacccggaccttgggtcatgggaccaccactaattgtgaggaaagggagtaaatttaagtctggactctgagctatatgtgttagactcagaccacgtactatgtaaggacaattacttatctaggacaattgcttgacttccttgtatcttattcgaccaacctccatttattgagcaatttacctcgtgctaggcattgtgctaggtgctggtatgcagtggtgagcttacagacaagatcgctgctttcctggagcctctgggtttgcctaccctcattttccctagttgcaaaaatagacatcatagcatctcttgatgtggtgagggttttatggaggtgatcctgggaaagtg

SEQ ID NO: 2316 - DNA, 992 bp, Homo sapiens
tggatcgctccgctgaatccgcccgcgcgtcgccgccggtcgtcgccgccccccgtcccggcccccctgggttccctcagcccagccctgtccagcccggttcccgggaggatgaagttcgtgtacaaagaagagcatccgttcgagaagcgccgctctgagggcgagaagatccgaaagaaatacccggaccgggtgccggtgatagtagaaaaggctcccaaagctcggataggagacctggacaaaaagaaatacctggtgccttctgatctcacagttggtcagttctacttcttgatccggaagcgaattcatctccgagctgaggatgccttgtttttctttgtcaacaatgtcattccacccaccagtgccacaatgggtcagctgtaccaggaacaccatgaagaagacttctttctctacattgcctacagtgacgaaagtgtctacggtctgtgaagctgctgcccctgagctggaggggggtctcattctacaaagagagaggtggcccccctttcttgacctcctcctccttcaagctcaaacaccacctcccttattcagggaccggcacttcttaatgtttgtggctttctctccagcctctcttaggaggggtaatggtggagttggcatcttgtaactctcctttctcctttcttcccctttctctgcccgcctttcccatcctgctgtagacttcttgattgtcagtctgtgtcacatccagtgattgttttggtttctgttccctttctgactgcccaaggggctcagaaccccagcaatcccttcctttcactaccttcttttttgggggtagttggaagggactgaaattgtggggggaaggtaggaggcacatcaatcccttcctttcactaccttcttttttgggggtagttggaagggactgaaattgtggggggaaggtaggaggcacatcaataaagaggaaaccaccaagctgaaaaaaaaaaaaa

SEQ ID NO: 2317 - DNA, 1192 bp, Homo sapiens
  misc_feature (1)...(1192): n = a,t,c or g
tttttttttttttttttctgaaatgatctgtctttattatgtcatcagaaaacaaaaaaatcccccgagtgtaaacaggagaaatgtgctggttaagttactcatcattatcttattattaaccaaataaagcactatctatgtttacagtcataaaaaaagaaacagcctggagagaagtgggggctttgaggatggagagaagaccggggccagacacagactccacatctggccctgtgggatttggggttcccgtactgatccaagggctatttagatcttcagagttaggtgacaaatgggatttgatttccttagggaacaaactttgtgaaactgatcagaggctgagattccagtccctagtatagagtggggggaggggagggcaggcaggtgagggggcagggctgggtgggagagctgaagcccaggagtcttctcaacctcttcccaaaaatggggacccccccgaccctgtgctcatgagggaggaataaagaccagctgccatggacagcccctctcccagggcctctgacgctggcaggaaggggagcaccatcaatcctcctgtcccaactccctcgtgggatcaggttgggaccaggggcgggggcaccaggacaaagccccttggaggccgaggcacattcccatgctgatcagagctaaaaatggctccgtgggaaccgactggcagagcccagggagggagtgaaggggagggcaggaggaggtcaggaaggctgatgagcccagggcagaccaggggcctacatagacccagagaatccagagggcacagggggcaaaggacagacaccaagaaagagagaaatagagggccttgcagagagacgaggacagagagagacagaaatgcacacaaggacacacagaacctgagacacccagactgacaaagaggtagcaatttggggacaaagagaagcacagaaagaggcccccagagaagcaggagtggcatcgagagacacacccacaggaactcagcnnnnnnnnnnnnnnnnnnnnnnnnnnnnnnnnnnnnncttgtgcagtgaatgaacagatgaaacacacacacgtgcacgcgcacacatacagcagccagaggcacaataggcttggcagagatgaaaacagcaagggacagccagacccttttgcacaaagtacaaagcga

SEQ ID NO: 2318 - DNA, 473 bp, Homo sapiens
  misc_feature (1)...(473): n = a,t,c or g
agccactgtaccccacctctgtgtttgattttaaggggaattggcccaaaaaataacatttatattatttcttcactatgattcacatgtccctcagaagcctctaattacaatggaattcttaaaaaaaattcacatttctcagcaaagctttccaacgaaaatttttatgataatcctttgtcatataagttaaaatagtaaaactagacaatagtgagtaagtattatatttgagacacctgctagggcatctgatataaggtggatgagaggatcagtgtcctttgggagtttaccctctagggaagcaactacatgaaaagttaaataaattataaaaatcacattttgaattgataaaagttatgagacagaacataatttggtttttatttannnnnnnnnnnnnnnnnnnnnnnnnnncctccngggtggggtgctgcggccttcaacctcccgggtttcggggg

SEQ ID NO: 2319 - DNA, 469 bp, Homo sapiens
gggctttttatagctattacaaatggcacagttaaatacgtaagtgcaataaggtaagctagatttgagatggaattaaaaaaatactttcccatactttacacacagaatgtagtttgtatacagtttaggaaaacctactaagaagggaaaatcacaatgttttattaggggtgaaacacaaatcagaaaggcttagggaaataaaaccaagaactagttttgttggtctatttgttatgataaaggctaaactaatgttaacaagagacaaatatagtggctcaagtaagaaagaagtttatttatcatataacaacaggtcacacattcaggctgctgggtctttcacgggctccttcctttatgttgctctgccacctcttagggtcttgtcttaatctgcacggtcaagctaggacattgtcacacttatcttccagtcagtggggaaggggaaagagagagt

SEQ ID NO: 2320 - DNA, 2813 bp, Homo sapiens
  misc_feature (1)...(2813): n = a,t,c or g
ggcgcaatgggtatcgtgctagtttatgacatcacccaatggtaaaagtttgaaaaacatcgccaaatggctagaaaacatagatgagcctgnccaatgaagatgtggaaagaatgttactaggaaacaagtgtgatatggacgacaaaagagttgtacctaaaggaaaaggagaacagattgcaagggagcatggtattaggttttttgagactagtgcaaaagcaaatataaacatcgaaaaggcgttcctcacgttagctgaagatatccatcgaaagacccctgtaaaagagcccaacagtgaaaatgtagatatcagcagtggaggaggcgtgacaggctggaagagcaaatgctgctggagccattctcctgttccatcagttgccatccactaccccgttttctcttcttgctgcaaaataaaccactctgtccatttttaactctaaacagatatttttgtttctcatcttaactatccaagccacctattttatttgttctttcatctgtgactgcttgctgactttatcataattttcttcaaacaaaaaaatgtatagaaaaatcatgtctgtgacttcatttttaaatgtacttggctcagctcaactgcatttcagttgtattatagtccagttcttatcaacattaaaacctatagcaatcatttcaaatctattctgcaaattgtataagaataaagttagaattaacaattttattttgtacaacagtggaattttctgtcatggataatgtgcttgagtccctataatctatagacatgtgatagcaaaagaaacaaacaaaagccaggaaaacactcattttcgccttgaatatgtaaatgggattaattttgtcctgtgccttatgtggaaaggaacttctttggttttccttttttgttctggtggaagcatgtgcaggagacatatcatccaaacataaaccattaaaatgtttgtggtttgcttggctgtaattttcaaagtagttaattgaggacaaagggtaatgcagaagtgatagctttggtttgctgagtcttgttttaagtggccttgatatttaaaactattcctgccaccatttcttctccttggccacttcttccttgcgtctccctgcatgctgctttatttgcttctccctccccaaccacctcatggtatatttaagagtgaaagggacaaactagtaggtttgtcaagtttaatataaagcactgatgtaacttgctaggtaaacggaaagataagttctaactgcctactatccaatgtcagttaattggtgtcttcccccctcatttgctctcttccctaaaatgtgtcccagatgccttcatttgctgttttacttctatgttctgcttttcctcctctctttgttcccttcctgtctatccattgagtttatgaaatggaagagttaactgcatgcactagtgtttggagggtgttgtggtttgtctttctaattaggtgtatagcctattcactttcctagaataaatctcttaacctaaatttgagtagtctgcattttggcaactcctctagcagcttggtagcctagtacaggttgtttttttaaaaaaggaaaagcaggaaggaggagtgaatttaattaacatgtttgccaaatgtattgagatttggcctctgaagaacactttttcagtgttaagtttctttaccttaagattcagaaatactttagaatattattaattttaagtcctgtctttacatccttttggaaaacttgtattaccatgagtttggaaaaaggacaacgaaaggcttttcatgtaaagataagatctttagctatctctaaccctgtccttttttcactgcattttttctagttttgcttcattgcttatcattaggatagggtaagtgaagtttgctatgctgctagcatcctaagatgatacctttgttgaaagaattgtgaatagcatgattcatttctagcagaggctgagtttaggacagcagcttccattgagaagtctttctgtgtcgtgaatagcattttaatgacctcttggctcacataagcaaacaacatagggacgtatctgctatgaaaatccacaaatttttcagatagtgccctaaaaacaattttatatgcctcactggttgttattcttaggttattcccacaacttgactttatcattgtttactactagtaaaaagcagcattgccaaataatccctaattttccactaaaaatataatgaaatgatgttaagctttttgaaaagtttaggttaaacctactgttgttagattaatgtatttgttgcttccctttatctggaatgtggcattagcttttttattttaaccctctttaattcttattcaattccatgacttaaggttggagagctaaacactgggatttttggataacagactgacagttttgcataattataatcggcattgtacatagaaaggatatggctaccttttgttaaatctgcactttctaaatatcaaaaaagggaaatgaagtataaatcaatttttgtataatctgtttgaaacatgagttttatttgcttaatattagggctttgccccttttctgtaagtctcttgggatcctgtgtagaagctgttctcattaaacaccaaacagttaagtccattctctggtactagctacaaattcggtttcatattctacttaacaatttaaataaactgaaatatttctagatggtctacttctgttcatataaaaacaaaacttgatttccaaaaaaaaaaaa

SEQ ID NO: 2321 - DNA, 469 bp, Homo sapiens
  misc_feature (1)...(469): n = a,t,c or g
atttgaacnnngaanaccgtnnnnnnnnnnnnnnnnnnnnnnnnnnnnnnnnnnnnnnnnnnnnnnnnnnnnnnnnnnnnnnnnnggcacgaggagctttgtcatcctgagataaccatcagataggagtaaatatcagcgcaccacttccctgtcactctacagggatgtatgagaaattatttttaagaaaatacaaaaattatccctgtctaccactcctcattaaaattcttcttcttttttctccttccacattaactctctattcattcaacagaaaaagaaaagggctggatctaaaggagcttgttctgttaggcatttaataccagactccttttctaacacctatttctcaagaatagcaaacctattttaaaagtgagccaactattcagcttgaatgacatactgttcattttttgaattctgatgtagacaattagaaaactttctcatctttctt

SEQ ID NO: 2322 - DNA, 1187 bp, Homo sapiens
  misc_feature (1)...(1187): n = a,t,c or g
ctgttcttcatatacaaaaaagaatgtgtgaaatttttaaaatgtacattgcaaaagacgattattctactcaaaatttatttggtaagattttattaagactctaagttcaaacacccttcttgggaaaagctctacaggataaccacacatgctcaactacggggccagctgctgcagctgtgggaccccatcctgtggaagaggagagaggcactaaaaagatgaggtagccaggcctgtgcccacactacgagacctgcatcaccatggtgtgaggagcagcaacgtgggtcaactcggggctgggacgagatggaagagtaaaaggcctttcttcataggcctgcctattttatgaccaccagggtagacttttgtaattaaattaaggtccacatgactttagaaagacaaactaaaaaaccccaaccaaacgagtcctagctgtagctaactctgatttctgtaaattggatctgactttttctgcttacattcacttaaaatctcaaagactcaatgggtgtgaagtgctaacaccttgcggcaaaatctcaaattcatctgtgcccaggccctttgcacagcagggctcagcagggcaggccagggctctggtccctggtcccttgctgggggaggtgttccatccggccagcgcccggccatgcagccacgtgactcaagcacgggaagtgcaggggcccagacacatccaggctaaagggcagtgactaggggagggctgaccccaagctgaacagggttctaaccaaacgctcaggagctcccaggtgacagcaaccacgccaccatgaacacaccactgggtctgtactggaatttgggggcctcaaggcttccaggtggcagcataaacagggaggtggggcaggataggaatgcccccctctgaggctcggcagccgggtggaatgaaccactccctctcattcagtgacagcacaggcaccctcctcattctgggctacccagatcttccagccctgtccctccaccccacctctcttagcctaagcagcactgagggcctggagtggtctctgtccaccccacccccacatgcggggagccttcccctcgtgccnnnnnnnnnnnnnnnnnnnnnnnnnnnnnnnnnnnnnnnnnnnnnnnnnnnnnnnnnnnnnnngaaatggaatcag

SEQ ID NO: 2323 - DNA, 376 bp, Homo sapiens
ttttaataaaatcatttagagtgagtgagtgccaaccgatgttgcagaatcttttggcctaggcactcccagatgccaaaaagtcattttaaaatgtatgtcagagatgtaaacaaacattttggattttttttaaacagtatttatttggaatgttttcatttatctaaataactattgctattatgaattatggaaaattaatattatgtgtggcatatagtgacttcttaacacacacatcacgcaatctgcaaacccaggaaatgtgtatatctgtctttagaaattagtgtttatactcacttacagtggtttgtgaataaagaaaactggtttgtaatatcaaaaaaataaaagcttagtctgaaaaggt

SEQ ID NO: 2324 - DNA, 1194 bp, Homo sapiens
  misc_feature (1)...(1194): n = a,t,c or g
acttacaatagggttatgttccagtagacccattgtaaattgaaaataccgtaagttgaaaatacatttaatacgcctaacctactgaacatcccagcttagcctagcctatcttaaatgtgttctgaacacttaacgttggcctttagctgggcaaaatcatctaatacaaaacctattttataatgaagtgtttaatatctcaaataagagtattgtaccacatatcgttatcccaggataatatcagagtacaaaatttgaagtacagtttttaactgaatgtgtattgcttttgccccattataaagttgaaaaaccataagtcaaaccattgttaagtcggactgtttgtgttacatatatttgggattttttagtggccctttttaaaaagctgtttcttatttctgatcattgtgagtggggatagatgtgggaagnnnnnnnnnnnnnnnnnnnnnnnnnnnnnnnnnnnnnnnnnnnnnnnnnnnnnnnnnnnnnnnnnnnnnnnnnnnnnnnnnnnnnnnnnnnnnnnnnnnnnnnnnnnnnnnnngnnnnnnnnnnnnnnnnnnnnnnnnnnnnnnnnnnnnnnnnnnnnnnnnnnnnnnnnnnnnnnnnnnnnngantgancgaatgaatgtactatgagctgatactgggatttcaggtaccgcagtttgtgctgaatgatatgtttggggtaaatcagtttttttcttatagaatttcggcgtttttgctgcaactgccactaattttgcatttaaaagaacaaaagaggaatgtatttttcaaaggagtgaatgaggttaaaatcaagattttgaatggtataaatatgcaactaattcagttgtaggatattattaaattttttattgctaaatatgtttctttcatacgttgcagtgcttacagttccaacagctttccaagaaaacatttccatatttgtgttatttgtaaagtatacataaataatgtaaaataatttgggattatttcaactttacattgtatgtctgaatttcatcgatgttgtacctgggctcagtcaatagttgtcacaggtattaagccattttgggaatttgccacttttttctggggtaacctgttttagtttagtttacaggcatttaggaaacagaagggtaactttataggaggtaacaccaatatcctagtctg

SEQ ID NO: 2325 - DNA, 664 bp, Homo sapiens
gtctaatgaaaaggcactcgggagctatttctgaacggacctgggcttgtcggaccagtgagcggcggcggctgcgcggcggcagcggcagaaagcgtagctgcctttgctgtagtccacgccccctttgccgctccgggtgacagtctctgcggaaagtcacgtttgtgatttcgggagagcacagaacgggacggacggcgctcttgcttgggtcatcttggccaggttacgaagaaacagtttcctggtgaagcagtccctcacccctagtcagcccacacccctagggcctaaagatgctgaggtctgtatggaattttctgaaacgccacaaaaagaaatgcatcttcctgggcacggtccttggaggagtatatattctggggaaatatggacagaagaaaatcagagaaatacaggaaagggaggctgcagaatacattgcccaagcacgacgacaatatcattttgaaagtaaccagaggacttgcaatatgacagtgctgtccatgcttccaacactgagagaggccttaatgcagcaactgaattccgagagcctcacagctctgctaaaaaacaggccttcaaacaagctagaaatatgggaggatctgaagataataagtttcacaagaagtactgtggctgtatacagtac

SEQ ID NO: 2326 - DNA, 1049 bp, Homo sapiens
tttttttttttttttttttaaagttaatatacaaaatgtattctatttttaaaatggcacagaatgagaaaaaattcttcatgctgataagtgcctcattcccaaacagggacttcaaattgatcagattctcttgcaggcaaaagctttgcagcagtctgcatttactggaatattgctctttgaacacggccacattcaggtttgttaaatatatcctcttccgcttctggagttagttggatgttatctctgactggggacaggggtttcttacaaggaggaagcttttcagaatcttttttaaatccaaagtttttccagagctcattgagtttgatctgtaaccccggcttgttctcggcattatgatgctttctcttctggatgcttgccggcttcttgctcagcccactggctctggcaggtcctagaagtttgatcttggttgtagaaagagagtctgcagaactggacttatatagcccaggaaccttgttccttagaggtgtgtctttttttgagaaatgagataaacatagcttggaggtctggtcactttgactgtcaagtaacttaatattgcaatcagattcctctgaatcagagtccttactagagcactgagaaagctttgatgcatttgaactctgcagtgagaattctccactttcctgggactgtgaagaacatgccccttctcgtaagggatgagactcatcgtcactggactcctcgctctttaactgcgacacatcagacatattattctcaggcaaagaggtgggggaatcgctctttcttcggaactgctgcaatgctgtgcttggagaggggctcggcgttcttgaaaaatctccaagacctccagaccaactaaaacaacttcttagtgttcccaaagtgggtggtgaaatggtccttgtaaatttgctgctctcaaaagagtaggactcttcatctgtaaacactgttgccttgtctggaatatgatcacctggaatatgattattcggaatgtcatcacttgaattacgtgctacatctgt

SEQ ID NO: 2327 - DNA, 1560 bp, Homo sapiens
ttttttttttttttagaagttcatcatctttagacttaaggaattaacaagggtcagggagactacaccaggctgagggcttcttggttcctggagacatgcccagctacagcaaacacagggaaacacgaagggggcagctggaagatttggtcttgaacttggggggtgggtaagtgatgatccccacgactggagcagcaggaagaagttgtgtctgaggaagtgctgggccgcccagagggacagccctgccctggagcttgtcgccgggagggaagggaaacaagccccctccctcagtgctgaggaaaaggcacttggctgggtctcctcctgccctctccccatccgtgggagagacggggtccttgcctccttgcccctttcagccgcccagaagccggtcctggttcagcctctggaagaagcttttgccgaactcataggtgctgatcatgatggcacaggagggggcagccttgatgatccgaggaaggaagcctgcaaagagtcccttggtgcccgactcggcccggatcctccgcagcagcagcccaggtggagtccacatgcagggcggcttcactctcacagcctccaccgctcccagtgacatctggcgttgggtcttcaccacgtcaaagggtagagtcagcactgcagccaccattcctgagatgccaccagccacaaagctcatgcccacagaagtcttggtccttcggcctgaacccattgagccagctcttcaccagctcatagttgaaccagtacagggcttggggtgggggatgcactgagaagggcacatctcgaagggcagtggggccccagcccagccacagtgagcgccagccaccctgagccactgcagttcgaacacaggcacccagctcccggtacgacacatgctgagcctgcagctttgtccggcataagctccagggggctgatcacagtcacggtgcccaggcgggccagcgcgccagccaccatgggtgcgtagaggtcagaggtcagggctcgaccacacaggaaggccttcagttggtcataggcagtgaagtagatggcggtagctggcacagtcatcaccagggtggcggggaggccgctccagagggtcctggtgccctcgtgcctcacgatcttcacgaaggcatccatggtgccagtgaagcgggtagggtcttgaaaccaggtggcacagcgggcaccatttgggcacaggtacagaggctcccaggacaccattgcaatacaggaggcacttccctgtggattggagagaggagggcaatttggtataggagaggctcccacagtctggaggaaggcatcagctcgctggccatggagggccgctgagactgcaggcgaaccttcaccacgtccaggggtgtcatgaagagagaggtaaccacagccccggtgcctgaggccaccatttgctggagggggctgatgcccgcagggtcctggtcagccatcttgaagcttcagtcctggctctaggctggtgctcgctgcggcgcggcgcccagggtcaggcgggcc

SEQ ID NO: 2328 - DNA, 1597 bp, Homo sapiens
  misc_feature (1)...(1597): n = a,t,c or g
gtgagtacatgtggattttgctgtccacaaatacttgtttcagagttttcatggatacagaggcatggttgaaatgaagctgtgagccttctgctttaaatctgatgtaagaaactcctgttaacaaatagtaagtatgggttaattagccctttgatcaaagcctagctttacattgtttaggatctttggaaaacaattggtttggttgcccactttccgtaggatcaagagcagaacctttcacatggcacagaagaacccaggttgcgcttcatacctgcatattccagccttagcctgccatttctctccttggcactttgtgtcccagcaacactggtctcagttggtcatcctcaaacttgggttccatatccagcctcaggacctctgttcctgttactatggttccttgcatgtcgcctgctcttactaaagagctcgtgtgttttccagcacacttcggtttatctcttgatgatgatgctagtctctccctccgcaagggcgaaaggctgcctgttggtttgtaccagtgtttcctaacgtgtagctgcagtcagtatttggctaagctgttcccaggggctcaacagatgctttcggatgagccttaactgacccaatcctttgtgatgcgggagagattgctaggcctcgctcacctggccagaaccagggaaagaggccgcggttgcagcgcgattccagggatgtggcctggttacctgccttctctgatacgtcaagacaccttcaacaatggcttgcagctgtaccctgttggctgcacccaggacgcccttttcactgctaagcagtcctacctgaggcccaggggctgccagattgacccataaataatctccggcgcctcagatccagaagctgctgagcctgatcttagtgccttctcctttctctgtgtggccccccagcccctttccccactgccttgtgtccaaggccctttccttcatgtatccatggaggagagacaaaaatacacatcaataaaataagatagggaatccataaatagacattcagaagtatggccaacggatttatcttaaaaccaatggaggaagaagagtttcaataaatgttgtggacttccatttgtcaaagaccaaaacaaaggaaccccaaccttacatgtaatacaaacttaactcaaaatggatcatatatctaaatgtaaaatggaaagctataaaactgaaaacagactatctttacaacctaggcgtaggtatagtttttagacattacaccaaaagcacatgccgtaaaagaaaaaatagataaattggtggatttcattaaaattaaaaaactttttctctctgaaaaatcctgttaggctggggcgctgtgggttcctgcctgttatcccngcactttggggaggctgagttgggaagaaattaatagcttgaggccaggagttcaagatcatcctgggcagcaaagtcatacactcttgagggaagagagagaccttctcatattgttttatattgttttatactcagtacctgttttaagaaaaaaacaaggaagtgaaatcaaagacaggcagcccggcacc

SEQ ID NO: 2329 - DNA, 472 bp, Homo sapiens
  misc_feature (1)...(472): n = a,t,c or g
ttnnnaaccnttatgacatgattacgaatttaatacnnnnnnnnnnnnnnnnnnnnnnnnnnnnnnnnnnnnnnnnnggcacgagtggttttcaggactgaagcttcaagatggctgaccaggaccctgcgggcatcagccccctccagcaaatggtggcctcaggcaccggggctgtggttacctctctcttcatgacacccctggacgtggtgaaggttcgcctgcagtctcagcggccctccatggccagcggatgccttcgtgaagatcgtgaggcacgagggcaccaggaccctctggagcggcctccccgccaccctggtgatgactgtgccagctaccgccatctacttcactgcctatgaccaactgaaggccttcctgtgtggtcgagccctgacctctgacctctacgcacccatggtggctggcgcgctggcccgncgtgagcatagacttgggcctttga

SEQ ID NO: 2330 - DNA, 1027 bp, Homo sapiens
  misc_feature (1)...(1027): n = a,t,c or g
tttttttttttttgccttctctgaatagattttattgtgttttgctgatctgaatttggaaatttataaacattttacatgattataaaattaaatcaaaattttaagaggtaattctaaaaaacaacatatcaaaagcaaaatgaaacaaatgatccaagttgatgatctaaagttgatgatctaaagagagaaaatctgaatttaatcaagcttctagatctaactaccaactcacaggaaataagaggacactggaacatgtgaaaccaatactacataattcagactacaggaaattctagaagacaatctatttagtacaacaaattacaaggaatttaataaagaagaggtaaaagagaacctataaagggtacttaagttatcaaacattacagtacatgaattgaatcagattcaaataatctgtaaaaaaattaggagccaatctagaaaatctgaacaccgggtatatgaggataaaagaattactggtaatttgtttagctgtgataataatttttttaaaaagagaatatttacatttcagaaatatgtgtgtnnnnnnnnnnnnnnnnnnnnnnnnnnnnnnnnnnnnnnnnnnnnnnnnnnnnnnnnncttntatgtccatgggttcaactgaccttggaatgaaaatattccacacacaaaaaaaattgcgtctgtactgaacatgtacatttttcttgttgttattccttaatacagtataacagttatttacaatgnnnnnnnnnnnnnnnnnnnnnnnnnnnnnnnnnnnnnnnnnnnnnnnnnnnnnnnnnnnnnnnnnnnnnnnnnnnnnnnnnnnnnnnnnnnnnnnnnnnnnnnnnnnnnnnnnnnnnnnnnnnnnnnnnncataagtggtcctagaaccaatgccccacagatactgagggacacctgtgcatgtgtgtaaagattggtcacaatttggtaattgttgaagctggtttatgggacactgaagtcaattataacattttattttcatatatatat

SEQ ID NO: 2331 - DNA, 383 bp, Homo sapiens
gggaatctgccttctgcagggcagtgccctaggtgcattcaagccagcatagcaaatccacatcactagaaagactctttccgttttataacttgggaaactaaggccaaggcagtgacaaattgccaaggtccccaaaactctgaactgcagatctgcaagcttgaatggtggcaaggtgggccagtggtattttaaagccgtgtgcttttcagggcaccctggtgcttctccaaatgccggaagggtttccttgaaaattcatagcactactcagtcaggattctgcaggacagtgccctggggagtgcatgagtggatggttctgtgggtagaagccacgagctgaagatagttttacatgtttaaagagtaaagagact

SEQ ID NO: 2332 - DNA, 365 bp, Homo sapiens
ggtagggaaatagactctgcctcttgataggaagagcttcaaaatatttttgcaacctaccacatgaaagccaggtagttttaaagaccactaagaataaaaatagatctggaagtttggcgcaaggctgagttgagtctttaggtaccaaaatgatctaagtcattggtactgtagcatgggatctagcagataacagggtttgtgaaaagctgtgtaatatgacggaatgtgtttgggctttggaatcaagctggattcaaatgttcgaactgccactttctaagggaccctggccagttaatttaagttccctcatcacagcgttctcatctacttcacagggtttagttagagtgtgtaaa

SEQ ID NO: 2333 - DNA, 268 bp, Homo sapiens
  misc_feature (1)...(268): n = a,t,c or g
taattgagtattctaatagtaaactggtggacttaggatatgatagtggcaattagagggataaaaataaattgttcaataagtagagcaggaattcccaaacagcacttgatttccacttttctttccctcagagaggacaatacaagcacagaggcaaaaaaatggagcccgacacagaacctggtctgcattcatgccctgaatatctgacaagagaagcagacagaatcggaaacaaccatctggcatttgcctanattataat

SEQ ID NO: 2334 - DNA, 697 bp, Homo sapiens
ctgataaataacgttgaaagtagaggctgttggtgtcaaatagccttgtatttgaagcttggttactgcctggctggatgactatgggaaagttttttaactatacatgcacataagatggtgcacgtgcacgtagattaaatgagaacgttgtaaagcactcagaataatggtgattgggaggcgcccaataaatgttcgtgctctcctccatccctccaccttcccctaacaagcggaagacgccctgttttctctcactacctttattaacttgctgcccagtgagcttgagtattcctgagggcagaatagcttccccatcttgagtgggctgtctttcctcactgtgggagagcagcccctatatcattaagatccaaccctcattttggttatttcagcttcaaactgttccaagcttcaccttctgtgccagccaaatacgtggaagacaaagagaagatgctgtctcgaacaatgcagttggtggagctggcaaatgagacgtggctggtgaccgggaggcatcccttgcccgtcatcactgctgcgactttcctggcttggcagtcgctgcagcctgcagatcggctttcatgttcccttgcccgattttgtaaattggcaaatgtggacctgccctacccggccgtcctcccgcctgcaggagctgctggctgtgctgctgcgatgg

SEQ ID NO: 2335 - DNA, 337 bp, Homo sapiens
aaaaatcttttttaatggatgtcctaattgtacacagaacacaaacctatcttcacttctcaatgtgtaaatgtgtatctactaagtatacattaatgtgcattaaagacattcagaaaacataaaaaccaaagaaacatattaactgcataaaaatttaaagttgctaaatggtaaagcagctagaaattataaagtagggaaatgttgaatagctgacataaagattcttagtaagaacattttacattccaatattacaaatgagtacaatatgcaatgcatgaaaaataaagccaattctgagatgttgaagcacctatcagacgtacaaatg

SEQ ID NO: 2336 - DNA, 817 bp, Homo sapiens
agccccgttggctggtaagtggcaaaaccagtctatcgatccaggtatgtttgacccctaaatccatgcttctacacatttcccctaaagaaagttcctgcagttactttattttcaacatgtatcataaaatccttatttcaattagtacatagctattcacatttaagtcagcaaggtaagtatcactttatgataataaatattcgtatgagaaaaaagtctagcaaagtggtttattctttcaacttattgctggaagaagtcctttaaacaaaccagtgcagagaaaatgcctatcaaaagtatcagtttttcagctttcttcaccactgctttagatgtatcatttttataattttatctcttcatgtttttaaagagctgctacttcagatgacagtaactctttggtgtttatttttatttccaagattgtgatttttttaagaggctactttaaggctgtgaattgtctcactgtcttttcactctctctttttagttcttcaatatgggcatccaagcgctctagaatgtgatgagacctcagttcctcctcttccaaaaatctggtagctattgaaccaaggggagatacaggcaaggaacactcatgtaaacccaattccaatttcatcaccatttcagaaagatgacgattttctaatttgagtgactccagctgatccaaaatctccttatgctctactgctttgtcttctgccttttgcatctctgctctgagtcgcttttccatgtctgaggaagaacctttggtggaagcaatagtgatatctcgctgatgtaactcctg

SEQ ID NO: 2337 - DNA, 898 bp, Homo sapiens
ttttttttttttttacaactgaagagaaagttcctatttattctcaaatgccctgactaaactgctcaaaagcagtttatattttcaaaccaatgtcatgtcctcaacataaagttcaaattcatttactgtccatgacacttaagcatccagatcaataaattacaatacacatattctgtaagagtcttttataccaagaagcttgtttttggtcttcggcagtgacatttcctccccattcaccacacaaacgcagcccgctctcgtaacatgcggacaccaaagcgctgccactctcgctgataaatccacagttcctgtgttgtatccaaacaagccaacactgcccctcctttccatgcaatcagccgggggtccatgtccttaggccttgtgatcacatccacattttcaataattcgcctgaaggatggtggcattttgttgagaattctgtgctgcagaaattcttgagctttatgaaacatcaaaccacctcccaccactaggatggagctgtacatcttctttttggtgtcgtcagatgaacagcagtctatgctatggaggatggctttatccagggcccagggctttcccttcaaacagcgagatggcagtcttcctggacatcagtgcagtgagggcctcctcggaatcgttgcccgccatcaggccatctccctgtgcagaccccaaatctacctcctgggaatggagtctttctggaagatcagaggactggccacgaagatccccttcaaatccaataggtttggatgcagactttcggtcagcagtagcttttgcagactgttcttgtttgctctgtgtggccagcaggtaatgttcatcgtgaggatcctcaggatcgccctgagcctagtgccgaatt

SEQ ID NO: 2338 - DNA, 835 bp, Homo sapiens
attccggggccgccgccatcgctctcccgggcttagaaggcccgcatactgacgcgcagtgccagaccttacccctcacggtccttaagtctcggtcgccctcgcctcgcagcctgccacccgcgctcagctgcccgcctcctcagccagccatgctggagcatctgagctcgctgcccacgcagatggattacaagggccagaagctagctgaacagatgtttcagggaattattcttttttctgcaatagttggatttatctacgggtacgtggctgaacagttcgggtggactgtctatatagttatggccggatttgctttttcatgtttgctgacacttcctccatggcccatctatcgccggcatcctctcaagtggttacctgttcaagaatcaagcacagacgacaagaaaccaggggaaagaaaaattaagaggcatgctaaaaataattgaggttttccatgattcagcacctgcttttggtttctgtgagatgagctaaattgctttcatacccccagataagagctaaaaccacctaatgctcttatgggcacagctgtgtatagatttagttctctttatacttcatttctagcccagttgggttttgatttatataagtagtttagaccttctcttcataatcttgctctgagatggggaacagaacacacaagtatgaagtttctttcaggtgtaaataatgaaaaataaatgcctcataaatgatagtacaatgtaactatcaaagttttataattcattatgagttaaccattttaatgtttccaattaaacctcatagtgcaaaaaaaaaaaaaaaa

SEQ ID NO: 2339 - DNA, 912 bp, Homo sapiens
  misc_feature (1)...(912): n = a,t,c or g
tttgtctcaataatttatttattgactttattataatttcaaacatgcagacaagttaaaaatcatgtacaatataacccacatacccaccacctagatttaacaattgtaaccgtcataataataatgtagagagtaatgatgacattaccaaaatttcctaagtatattaattttctgaatcccttgaagggtatccaaaaaccccaaccacacagaaatcatcccaaaaaagtttcttcactatgaacccttcagtgaacttttccccattcataacatgggggcatcgctgagggagaactaccaaggagcacacagggtgagttactcttttccgtaatgacgcctcttggtttcttgacttagggagtcctgggcctgctcacttctattactcatatggcagattctgcttcttccttctttgtacactttcaggttttcaatgaaatagcacagttgccagatttagctaagaaaaatacaggatgcccagccagcttgaacgtcagataaacaatataaaaatataagcatatcccaaatattgtatgggatatgcttatactaaaaaaagtatttattgtatatctgaaattcaaatttaactgggcatcctgtatttttatttgctaagtctggcaactttatccctgaggcccttttaggagttgcctgagttcagaaatattttctgataatactaagtgattaattgccatttttcactgtgttgacatttgcactgttgggtgcaggcaggcattgagggagtaggaactacttgtatcttaggccaaggaatcaagggcaggagggccaattaaattactnaggtaggatgtccaccaattaaaaaaatgttttaatggcccattttgganctttagggacttccctttttggagg

SEQ ID NO: 2340 - DNA, 485 bp, Homo sapiens
gattccattggacttggcaaagtcagcttatctgaaatgttaacgctttcatagaaaggctttagcttttcttgtaaacctgctcaaagcaccgcgcccggcccagaaatgtcttttatagatggctttaaaaaatccaggacccatgcaaggttcccataaggtatttaaacttttaaaatatttatactgaatagatgcacaggtcctataatgctaacaagaggcaaaagacaaggaaagatttctctcacaattctactaccacagtttcaaaccaatttctttttcatctctctgttctttaaaaatgaagctttggacagattttctttagttcactttcctaaccatccatgagacaaaaaaagaacactgatcaagactgtggtggctgtttgactgcataagcacaaattgtggtctttgaaagttcttggctgagagatttggagttttattaagaataccaggaagccagcggc

SEQ ID NO: 2341 - DNA, 638 bp, Homo sapiens
gtttcactcaatggtgaaaaggtggaaacatttatgtaactttatgtgtatctgtcttgatatctactgacattgtctatatgaggaaaatgattactggtcatgctcctgtgagttttttgggaaggtagggtcatttctccctgcctgctttgtgccaactagcatgttgcatctacatgcattatgagtctggttaggcattactttaaacatacataaagagacagtaggacattgtggctgagtctacccagctcaaggtaaaggagaatgttgctaattttttagcaaactagaccagcattattactcaaactaaaaatatcacacctgaaaaatttaatttaggacctaaaatgtctagattagctttctgctttttttatttgaataactcattcagttgtgaatgaattcctctttatttggtgccacagtcaccaaatgacaaggatttgccactttcccaccaaattgtgagtgcttgtaatttaggtctctctaccttaaattcagtataaggaaacgtaattatgattgattttttccaaagatgacaagctgtgttgaaatacatttttttttttgaccaattgacagaatctaataagctttaataatcttccccttttatg

SEQ ID NO: 2342 - DNA, 508 bp, Homo sapiens
atgttcacaagcctaatgaagacttctaaagacttctcccccagtcccactaccatgtcattgaatgtatggaactgtagtcaagataactgtatttgcatgaaaatacagttgggtagtttagatttggacttggtttctggtgagccttgattgaatctacaccctatctctgccttttgttgagccacttgacctagccaagtatcagttttgttttttagctgtaaaattgggataaatagagctatcactagtgtttattgaggcggtgcttagcccctgttcataaattcttgatatgggttggtgccaccaatctgacacatgggcacaaaggaggagggaccgggaaggctacacagctgccaacagactctatctggacccagctttagtcaagacctcgcttttgtccttcccagcctcagtagaagtccctgcagtgcgaacctcctcacccttgatgtctgattgagttcctcatcccctggccttgatgtctgag

SEQ ID NO: 2343 - DNA, 141 bp, Homo sapiens
aaagtgctcccggtgcctgtggtccatagagtggagtgagtctctaagcaaatctggagggactctgggagctgaagattcagaatatctccacttattcttgccatagcctttgctgctcacctgttgggtgccatgatg

SEQ ID NO: 2344 - DNA, 590 bp, Homo sapiens
ggcgtgggtggtggctgggaactgtggcccaggcttagcggccgcccggaggctttttttcccggagactgaggtgggcggctcagcgttggccccacacattcgaggctcacaggtgattgtcgctcacacagttagggtcgtcagttggtctgaaactgcatttggcccactcctccatcctccctgtccgtcgtagctgccacccccagaggcggcgcttcttcccgtgttcaggcggctccccccccccgtacacgactcccagaatctgaggcagagagtgctccaggctcgcgaggtgctttctgacttccccccaaatcctgccgctgccgcgcagcatgtcccgtgtggcgtttgaggaaatgctgagggacagacaccttggagcaccagctccggtccctgttacagtgagaaaggtcccccacttcgggggatacttgcacttagccacatggtcctgcctcccttggagtccagttccaggctcccttactgagtgggtgagacaagttcacaaaaaccgtaaaactgagaggaggaccatgggcaggggagctgaagttcatcccctaagtctacca

SEQ ID NO: 2345 - DNA, 1347 bp, Homo sapiens
ccctagctggattccagccattgctgcagctgctccacagcccttttcaggacccaaacaaccgcagccgctgttcccaggatggtgatccgtgtatatattgcatcttcctctggctctacagcgattaagaagaaacaacaagatgtgcttggtttcctagaagccaacaaaataggatttgaagaaaaagatattgcagccaatgaagagaatcggaagtggatgagagaaaatgtacctgaaaatagtcgaccagccacaggttaccccctgccacctcagattttcaatgaaagccagtatcgcggggactatgatgccttctttgaagccagagaaaataatgcagtgtatgccttcttagggcttgacagccccacctggttcaaaggaagcagaagtgcaagcaaagcagcaagcatgaaccttaagcactgtgctttaagcatcctgaaaaatgagtctccattgcttttataaaatagcagaattagctttgcttcaaaagaaataggcttaatgttgaaataatagattagttgggttttcacatgcaaacattcaaaatgaatacaaaattaaaatttgaacattatggtgattatggtgaggagaatgggatattaacataaaattatattaataagtagatatcgtagaaatagtgttgttacctgccaagccatcctgtatacaccaatgattttacaaagaaaacacccttccctccttctgccattactatggcaacttaagtgtatctgcagctctacattaaaaaggagaaagagaaataacctgtctctcattcctaagttgcctcattaattttcatgaacaagaatatgtacctttttgatgctatattactgcgattaaaaagttcttgcaggtaatgtttatgatatgttaaacgttgtaatttcctatcgtaattataacattcccattcttttgtagatgaaacttctacatattgaaccacagattttctgagcttctaaatgtagcctttcattgcacatttcagtgatcagaatagatatccttttacacgcacaaaagcaatagattcattcagtggacaagttccttgtttaactacacagctatgatggaatgatatatccaagttccttgcctcagtgaaatatgcatatgtatatcatgaaagtgggatgccaagtaagcttaaaatggcattctctagcaaagagattagacttttaaataactcttataaaacaggttggcgatcatttcccaagattggtttcccttgagtttttgctaaaacaaatcttagtagttttgcccgtttaaaacaactcacaatcgtaaatg

SEQ ID NO: 2346 - DNA, 1094 bp, Homo sapiens
  misc_feature (1)...(1094): n = a,t,c or g
ttttttttttcagaatgaaaacacttacaaatcatttttattatgaataatttaggatatttgggacattcatttctgagtaaaatagttcaaaataggattttgttgatacctgttgatacatatttagaaacaaaaatgagatatccttttgaaagtttgcctttgtagtaaattcagtcattcaaattgttttctctcaagacccaaaaatgccaggggcattgccggctttgagtttattctttgtttctccatcaaattcttccatgggactctattaggtttcccaggttccagctcacctagtgggaaaggggggtaatcgggttcccaaaatgactttatcctttcctatggacatctggttaacagcttgaggggacagaggatcatgaaccaaagcatctgtgtaaaaggaaccaaggtatttctccgggttcatggggttgtcctgggcacacagatctgggcgcatgctgaatccatgggagattcttcccactgtgaaggggaaggcaccaccaccatgtgcgaaacacactttcagtttgggaaacttctcaaatactccacccatgatcatggagcaaatggctatggtggtctctgctggcattcctacaagccaagggagccagtatttggccattcgtccatccatctgcatgtcccagggatgcacgaacagggaacacttcagcctttcggctgccgcatagacaggaaagagctcctgcgcgttcaggtcccactcgttgacgtgggtgccaatttggaccccgggaaagcccagctctttcacacagcgctccatctccttgaccgccagctcaggggcctgcatgggcaacgtccccagacccacgaacctcctggggtagctcacaacggtgctggcaaggtcgttgtttaaaagctggcacaggtttaaagtgtcctcaggtttggcctttttggtccatttctctaatacgaacttctggatcccagcaattctctcgcacnactctgaagactttcccatctttcaacaactttgcttctcccttgctgtggtgttggagctgcacccagcctccgtagccaaacct

SEQ ID NO: 2347 - DNA, 1719 bp, Homo sapiens
cttgcgtgccccagcgacacaggcctcgaggctgtctctgacaagtgttcacaggaggtggggacgcctctgcgcgaggaacgaggagctacgggcctgggcccggttattgccatgggcagcggctgccgcatcgaatgcatattcttcagcgagttccaccccacgctgggacccaagatcacctatcaggtgccacccgggctcgcgggactgggcgggaagagggacgttctcgagagctcaactggctgcctgaaggcagtagtttcccgtgctgcacgcaggcatgctgcttcattcgcagacaactgtgaggctagaggatagtcagacccaggcccccggctcccaatgtggcagggaagacatacgtcacattggcagtgtttgtaggatatcgggctgtagggatccggttggggggttccaggtcccacagaaggtgagttgggtgacccatgagtatccctgaactgagtgaagagtaaatgatgcataggaagtttaggtaaggcaggagaaagtgttccaggtagagggaacagcatatgcagaagccaggaaggaggtgagatcatagcgtatgtttggaaacagaaagaagtaataggcctgagtggatgggagagaggggaacgctggagaagaggacttgggcttggggggcatgaggaggtcaccatttgtactacacccagtacagatgtccactgaggggcccattgccactcccctccccaggtccctgaagacttcatctcccgagagctgtttgacacagtccaagtgtacatcatcaccaagccagagctgcagaacaagcttatcactgtgtgagaccctagctcggggtgagcggtgggtggcaggggttgtcccaggaggaggaagggacaggcttgggggcctgactgtgttccaattatccagcacagctatggaaaagaagctgatcggctgtcctgtgtgcatcgaacacaagaagtacagccgcaatgctctcctcttcaacctgggcttcgtgtgtgatgcccaggccaagacctgcgccctcgagcccattgttaaaaagctggctggctatctgaccacactagaggtctgcaatgagatgggcttgggtttaccgacaggcagagttggggaaggtgttcccatgtctccaaagtcccccaaacctgggaccctgcaaaccagctcaggactcagggcagccaaccagccaggggtcctgggatgtgcccaccatgctttccatgctctgtctagctagagagcagcttcgtgtccatggaggagagcaagcagaagttgggtgcccatcatgaccatcttgctggaggagctaaatgcctcaggccggtgcactctgcccattgatgagtccaacaccatccacttgaaggtgattgaggcagcggccagaccctccggtggcccaggagtatgatgtacctgtctttaccaaagacaaggaggatttcttcaactcacagtgggacctcactacacaacaaatcctgccctacattgatgggttccgccacatccagaagatttcagcagaggcagatgtggagctcaacctggtgcgcattgctatccagaacctgctgtactacggcgttgtgacactggtgtccatcctccagtactccaatgtatactgcccaacgcccaaggtccaggacctggtagatgacaagtccctgcaag

SEQ ID NO: 2348 - DNA, 1333 bp, Homo sapiens
  misc_feature (1)...(1333): n = a,t,c or g
gaattcgcggccgcgtcgacccagaagcaaaagtccatggaggctgaacgactgaaacagaaagaacaagaacgaaagatcatagaattagaaaaacaaaaagaagaagcccaaagacgagctcaggaaagggacaagcagtggctggagcatgtgcagcaggaggacgagcatcagagaccaagaaaactccacgaagaggaaaaactgaaaagggaggagagtgtcaaaaagaaggatggcgaggaaaaaggcaaacaggaagcacaagacaagctgggtcggcttttccatcaacaccaagaaccagctaagccagctgtccaggcaccctggtccactgcagaaaaaggtccacttaccatttctgcacaggaaaatgtaaaagtggtgtattaccgggcactgtacccctttgaatccagaagccatgatgaaatcactatccagccaggagacatagtcatggtggatgaaagccaaactggagaacccggctggcttggaggagaattaaaaggaaagacagggtggttccctgcaaactatgcagagaaaatcccagaaaatgaggttcccgctccagtgaaaccagtgactgattcaacatctgcccctgcccccaaactggccttgcgtgagacccccgcccctttggcagtaacctcttcagagccctccacgacccctaataactgggccgacttcagctccacgtggcccaccagcacgaatgagaaaccagaaacggataactgggatgcatgggcagcccagccctctctcaccgttccaagtgccggccagttaaggcagaggtccgcctttactccagccacggccactggctcctccccgtctcctgtgctaggccagggtgaaaaggtggaggggctacaagctcaagccctatatccttggagagccaaaaaagacaaccacttaaattttaacaaaaatgatgtcatcaccgtcctggaacagcaagacatgtggtggtttggagaagttcaaggtcagaagggttggttccccaagtcttacgtgaaactcatttcagggcccataaggaagtctacaagcatgggattctggttcttcagagagtcctgctagtctaaagcgagtagcctctccagcagccaagccggtcgtttcgggagaagaaattgcccaggttattgcctcatacaccgccaccggccccgagcagctcactctcgcccctggtcagctgattttaatccgaaaaaagaacccaggtggatggtgggaaggagagctgcaanacgtgggaaaaagcgccagataggctggttcccagcttaattat

SEQ ID NO: 2349 - DNA, 386 bp, Homo sapiens
ctccactctgtgaacctgccgagctgtttttgatagccagcccctcccatcccacagaggggagcccagtgaccctgacgtgtaagatgccctttctacagagttcagatgcccagttccagttctgctttttcagagacacccgggccttggcgaggctggagcagctcccccaagctccagatcgctgccatgtggaaagaagacacagggtcatactggtgcgaggaagacaatggcgtccaaagtcttgaggagcaggagatcccagataaatgtgcacagggtccctgtcgctgatgtgagcttggagactcagcccccaggaggacaggtgatggagggagacaggctggtcctcatctgctcagttgctatgggcacag

SEQ ID NO: 2350 - DNA, 216 bp, Homo sapiens
  misc_feature (1)...(216): n = a,t,c or g
ctcgcatctagtaatctttaattttgtggtcattgtgcattttaaaaactgtagatgatnnnnnnnnnnnnnnnnnnnnnnnnnnnnnnnnnnnnnntttaaaaaataaaacatgtttactgaaaatggttcaaacatacagtgtatataaagtacaaagtaagaatcctattccctctcctgccctattcccaagtcgacgcggccgcgaattcc

SEQ ID NO: 2351 - DNA, 1003 bp, Homo sapiens
ttttttttttttacttcacagcaagatttattaatacatccaaaagaaaaaaaaaaaatgattttgtcacactatatacagataatacatacagtgtttcatacacatattacatcagtttttacacaagaaaaatatacataaaaatgtaaacttttgtatacaaaaacccttaaacaaattaaacaaggaccagataacaaaaggagaccaattcattattatttcatcaaatttttaaaacagtaatacagtacattcattgagatatatatggaaaatgtgagccatctcttcttgtttaaagggaaattacaaaccaaaagtcaatcgcctcccaagacgtggtcctcccagcaatgccgcacccaatgccacaagtatgcctgtccaccagaactgggggctcttaccaaaacctgcccatctcctcatcttgctcctacagtctgtgcagaaacaagtggctcctaacttttgtgcatataattaaactcccagccactatgaacacaaatacagaggagagattgtcagtttgtaagttccctttaagcggcttttatatttttgtatttatttttaatgcatggcctgttaaacatacttgggtgccaaggtgaatgagaacactgaaaaagaagggctttgagaaccgctagtccttgctaccgtgcagtttctttgttagaagagattttaaaactgtccaacctgtctcatttgctggtttcaaataagctacctcacctttgatttcccactgcaacttggtttcaacttacacttcagtactctagttgttagtaccatacaattgccaagaggctttttgttaaaggctacttctgatatcaggttccagctaagctactcagtaaaatggctcaaaccccagcctctctattttagtcttcaggagtactcttacttcactgttttttgtaacatcttacaatttaggattgtccatctaccttcctcgggctgcaagttcttgaga

SEQ ID NO: 2352 - DNA, 1360 bp, Homo sapiens
ccagggagggagagcttgtgaaaggctgtgatggagccacccaggctgatctgggcctcgggaacccagcggaagtagcacagtttccacagttttatgtgtgttccagagacacgtggcagaataacaccgtgcaggttggcgggtttggaaaaccattctctaaaatactgctccgtatcactgttctggctgtcggtttgctgagctggatctggctttggttttaatatcaatgaatttctccttggaagtaattcttggtcactgatgattccattctttaaggcagacggcattcctcttagtgtggagctgtagcttttctatacagaagagattttattatgttccggggattccctttttagaaagattgaaggatgcaatggcaaatataaactcaatactatgaaaaattaatggaatttcagcctcaaagaacattttcctcccttcctttgtgtccttattctaatcctcctcccctggaattacacttttttatgtgttgactctacctaggctgttactatcagcctgaatgggggcgggatgagagtacctcctatccactaatttgcttaaggataagttctaagacgggctagaaaaaacactagacctggccgattctatcaagaacaatggcaaactgaacagaggcagtcaggaggccaaatgtctgattctttgttctgtacctttcagtagtctgcaaattttctaccaaaaaaaatcccaagaatttatttgggaattattaaaaaggcaaacaatgaatgttattaggacaagaatatagcagtcaggaggccatgactacatcacagccaggcggcattccctgccacagtggcggcttgaatcatcaagaaatggataaatggggctttagtaaatcaggcttgcaggctcaaagctgcaatctgcccactctcaggtactgagactttgtgggcctcagacaccaggaagaaagttgggatacagtcatttgagttaaaaagggaatgacccctcagaaacccgcattagcagtgttactcttggaagtgcctttacttttaacgctctctgttctgaaaaagaggtgtttggttacgtgtgagccaacatcacgttttgttagctgtgatttacctttgtccgtttaaaagacttcacggagccattctgtatacaaggtgtgctctttccaatgtagaaggggttatggaaaagggtgcgatcctttgctgtaaactggagagaccagtcccaaacagaggggaattttaagcccttctcatcacccaattggatgtttttgcttatagcaaattcctgcaaaataaataaataaatatttgcaaaacta

SEQ ID NO: 2353 - DNA, 709 bp, Homo sapiens
ttttttttttcacatgtgtaacatttattatattaatacttaacaaagccctccaagacccaggctccccctaccccctaccttgggccacgtcttcatcttagtctttggagagaaagctctgaagtcaagtggtgagttttccagaacaagtggaggggcacagggaaggctctgagcaccaccttccccagaacacctcaagctctgccctggccccaggaatagaggtttctgccattcctgaaggtagagaaggtctgggatctgctcatcagtttgtaaacaaatgattcttctccttgacacattctgttctctgctctggccaaagctctgggccctgagacccagtgagatcctggtagctgtccaggctgagagggaggcagcctgcagcctcgtctgtcaccaggtccccttggagttgggaacaccgacgtcctgagacttagtaagaagagtctgaggggctactcctctctccccgtggccccagttactgggtgttctcgtatttcaggtatctaatcagcctgcctgggagcggcaaggtgtctaggagttttatacggtatttcccaatggcctttcgaacccgcagtcggcaaaggtgagccagaggtcttggaggttctgccttctccttgatgacggcccagtcctcaaagctgtcgatgtgttccttcagccgcgagcagagctgcac

SEQ ID NO: 2354 - DNA, 439 bp, Homo sapiens
  misc_feature (1)...(439): n = a,t,c or g
tttganaccttttgacnnnnnnnnnnnnnnnnnnnnnnnnnnnnnnnnnnnnnnnnnnnnnnnnnnnnnnnnnnggcacgagctggaagacagaggagacagtgggagagcaggtccacgagggaaccgggtttcacatcagcaggcctctccttcatctccccaatgaggacgccctgcagcttcagaggaggtcagagtcagaaagacttttcgggtcccgccccctgccagtaatggagaccccttctccagcattccctagacagcctgtcctcctgttttgtggccagcaggctggacgcttttcaagacaactcagttgctttgtgggactaatgtaattcaccacgtgaccttaagcaagtcacccgtcttcttctttttttttttaattttttttaaattttaaagacagggtcttgctctgtcgtccagg

SEQ ID NO: 2355 - DNA, 336 bp, Homo sapiens
gagagttactgcaaggtttaggcgagacaatagcaaaaatgttttcgggggctgcacaaaaaagagggaattgtagtagttttacatcgccataacaagcagaactggtacctgctggtggatggtctgtgcttcccagagcgggatctgtggatgcttggggagggggaccactgagatctttcagagggtacataatgttcaaactattttcatgttattgagatgttttgtctttcaacatttgtacttaacggtgcaaaagcagtgggtgggaaaatgctgtatccatcataggaacaatcaaggcagagaaccggtattgtatatagtcat

SEQ ID NO: 2356 - DNA, 480 bp, Homo sapiens
gagcagaccaaacgatccaagccacgctcagaagcctgttgacagtggtgctcctcatgctgtcgttcttcatgatttcccagcagagcaagttgatgatttgaacctcacttctggagaaattgtttatcttctggagaagatagatacagattggtacagagggaactgtagaaaccagattggcatatttcctgccaactatgtcaaagtgattattgatatcccagaaggaggaaatgggaaaagagaatgtgtttcatctcattgtgttaaaggctcaagatgtgttgctcggtttgaatatattggagagcagaaggatgagttgagtttctcagagggagaaattattattcttaaagagtatgtgaatgaggaatgggccagaggagaagttcgaggcagaactgggattttccccctgaactttgtggagcctgttgaggattatcccacctctggtgcaaatgttttaag

SEQ ID NO: 2357 - DNA, 193 bp, Homo sapiens
aaactggcaggtaatggaaaagaatcaagcatttattcctgcctctcatatgatggttcactggcaaagcaaatagtagatgagggaaagcactcttcataaatgtactccagatgcaaaattaaaaagaaatgacaggatattaccgtttggcaaccttaattaattaatggatttaggtgggctggggact

SEQ ID NO: 2358 - DNA, 555 bp, Homo sapiens
ggctgcttgctccactcaaacaggtatctgggagccagcactctggcagtccttctaagctctaactctggttttactgtttttcaggtgaaacctttgtcctggggaatagtctggcccgctccttggaaccacactcagactcaatggactctgcctcaaatcccaccaaccttgtcagcacctcccaaaggcaccggcccttgctttcatcctgtggcctcccaccaagcactgcctcagctgtgcgcaggctatgctccagggggtcggaccgatacctggagagccgcgatgcctcttcgactgagtggccgggacccctcctcatggacagtcgaggatgtgatgcagtttgtccgggaagctgatcctcagcttggaccccacgctgacctgtttcgcaaacacgagatcgatggcaaggccctgctgctgctgcgcagtgacatgatgatgaagtacatgggcctgaagctggggcctgcactcaagctctcctaccacattgaccggctgaagcagggcaagttctgaaccaggagaggcagccta

SEQ ID NO: 2359 - DNA, 700 bp, Homo sapiens
caggttcatcaaggtttgcgcagtggatccgcgaatgaagccagcctggaagatccccagtctcgagacagagcctgacaggggcagatgcactggaaggaccctgtctgggtttagcaaccaagcagccatcctggccccacaggtgtggacttctgggtcttctcctggctggcttcttgctagaggatttcaagagacccagcaagactgtattgtcccactgaatgctcaagatattggttagaagtagaaaaggggagggggtagtatttagcctctgtccccactaaaaattattcccaattgtcatttgtgtcatctgtttagcttacagttttaatccttgtcaaaatgatcatttgccagggtgcataaaacaccctatttgatgagaactggttttaaaggaaaatggggccatcagaaggaagccggttggtgtgaagagacgtctgggaagagcccctggcgagggccctcattccactgggtgacccagaaggagaaaaccgcgatggcgcttctcatttgaaatgttttctttatggacagtgtttagcaattgttataatgtgtacttttgttgattgatctgtatacatatgtaaaataatttgttctctgagttaattttgttggaacaaagactttagtgcttcctacattaaaacattttactgtaaaaaaaaaaaaaaaa

SEQ ID NO: 2360 - DNA, 232 bp, Homo sapiens
ccgactcttctagaaaaaaaataaagcagctgggaaattaattccaaattacactagagaactgggaaaaaacagatttcatggccatcaaaagcaataatgacaaacagtgaggattacattaaattagaagcagttagggactggtttgtgaccttgccctccatttcttttccacaagttcagcccgtggctcactgattatttcctccttcctgcatggctttagtac

SEQ ID NO: 2361 - DNA, 648 bp, Homo sapiens
cgttgccttttgtattcaaatgaaaatgctttgtacaactgaggagttacagtgaagtgttaaccaggggtccagggagcgagttgaaaagatggagtgagtgtatttgcagccagggagctgcagggtggatttgaggggccataccctctgagcacttaaaaaaggtatttgctccaggccaggcagcaggctgtggacacccttgccaccactggggactgccactgaggactccccgagcacgttgttccccgtcttctccaaggtgttgaggtgagctggggttggccccggcccaggcttctgtcccaaggagaagctgccactgacagtcatcctaccgcactgctaaagagaatgttcgcagtggtgggcggcgtgcctgttgccaacccttccagggacccggccatgggggaccttggccaaggatgcctggggcctgccagctgtgctgcaaaggtggggggcccacaccctaaaactaacccaggccccagaccactggaggccaaggcttccctgcacgggctaaggggagttgggatatcacccccaaagtgaccttgccagtgagctgttcagccaggtagccactgccctgccatctgtgcagagccagccaccttgggggctggggttccc

SEQ ID NO: 2362 - DNA, 733 bp, Homo sapiens
tttttttttttttttttgagatctgagattcctttaatcagaagcacgtgcgtcccacagtgtgctcttcaagccccaaagggcacgcctctaggactgcgtcccttagagcgaggctcgggctcttggtaaaaaagcatttgcttgattttatttaaacaatggtgaatcttcaaggtgccagtctacatgcccaacagtcctccaggcttcaaggccacagtcaccgtcactcagagactgcctcatttggcaagagagaaaaacagtgaccaccacagagggcagggagtgacaaagcttgtaggctaatgctgcaaaagccgctagaaactggggccacacacaagagccagcaggtgcgcctcggggtctgcgtggctcccgctgctgccgccctggaagggcgctttctccactggcttttctcgtgagtctttctcccaggccggccagattaccatttaggaacctttgccaattctctgactctgggaagcaaagtaagcatttgccaaatgcactgaggctggggcaatgggaattcttatgttctttaaaggccagtcaaggagaaattcatcaggaaaacatttcccaggacatcctcaggttggtctccacaccaaggcacacagactgtcaccttcccgaggtccctcaccagcaggacgtgtccagggtgcccagcacaaggacttggagcagcccagacacaaggacaagcggcaga

SEQ ID NO: 2363 - DNA, 1442 bp, Homo sapiens
ttttttttttttttttgaaaaagcagatttttttattatgatgtttctccatatttggcattgctgtaaatggctaacatttactgccaattcggtacaaatgtgtggtttggtaataccagaacagcaaatttaaatgaaaaaataaaagttaaacatttccacacaaggttttacagtctgacatttcactgcgtaggtaaaaagacactttttttttaactacagattattattcagcatgaataaaaaactacaacttttatttttaaacaggagtcactggttttaatttttacacattttaaaattactgtgataaaaaataatgaaaaagcttcttaataatgccatacacagtataatatagatttgtccccattatatagcatttaatatacaaaatagaatattgacacacttgaatctatatgtagttaagcaagttatttgaggagggtattttcatacagcctttcatcagaaaataaaatcctttcagacattttctagagagaagcaaatcctttcctgaaaacctggtcactaatcctgggtggaccaggttgcttgaaaatagtctgggaaattacgaaactccacccaaagggtttaaagtgtcctccttacacttttatttcccttctgacactaaaaccagacacacacacacaaaaacacattcacctacagctacagtcagggagtgaccagccaagatggaaatctcactgaaggctaccatggttctggaagtttgacagatcaatgtattgtataacaatatttttcattccatggtgatgtagttttcagggtttttaaaagggaactaaaattatgagacttaggtgaaactggaattgctccctgcctctgaattctgaagggagcgtggctttccttcatggcatgcccagagctcatcccatgctaattatccagcacttcatagacacaaatcatgttagttttccttttggggtggccaaggtttcctcccatagttttaggcatttggatatatataccccaaaagtgttatgtcctaagtgcctcagttctgcttgtatagtatcccacagaatacctacaaacactaaaaatacttttcaggatttgttgtgagtaaccaactctcactgaagttactacaaacttcaacagtttgggttgggatggccagataacacatacataggaaataaatctgctttcaaacagcaccaccatatagcacttaaatccacaattaaacataattaagatgactttcttttcccccacgtatcctaaaagggcacagcttcttttcccatttaatgaaaagcctcctatagttgtcgatgagcatcagttgacttattattgacaacgaagtgcacataatcttctttttctcattgagttctattttttgagcgccagtcgacgcggccgcg

SEQ ID NO: 2364 - DNA, 906 bp, Homo sapiens
agaaaattacatatagttttattttatgtcttaaataataataatcaggaaatttggataaatatataaaaagttattagcagccaggcatggtgactcactcctgtaatcccaaagggccccttgctcacactggcccagccctgcagcatggccatgttggtctctgagccttaagcctttggatgtggacacatttgtcctcttcctgaaaaatgtgagggtctgagaggccacgttcctgttcctgagtcatacgacagagtcccagtgacttgggtctgatgtctgtcccacagtgggacatccctgctgcatcccaatgccaccccgtgtcctggggacacccaaatgtgccattctctcagtatcacaagtcggggactgcaggaggctcaggtgccaggtgccttctgatgttcatggccacaagctcttcccactgtctctggctcccccagacgatgttccaggaggcggggtgtgccagaaggggccacgtcttgcaaaccaccgcgctgtcctctttgagaaggagtcttactcaggactggggcctgtgcacacattgtcgcctcttttcagcacttagagattccttcctttgtctagtggctgaagccaggggctgaagttggcctccaaatctgggccgtctcagagtgcggcgcagcctggagttttccatctgtggccaagacccagtttttgggaggaggccctcatgggtcaagccagcctgtaccaggatggggggagggggttcccaacctaggccccagccacccagactcccccacccccactcccttttccactgctctgacctcgggcactgttgaaatatagtttttattgcatttctgccgttttacaaaaatatgacaaaataaattaaaaacaaat

SEQ ID NO: 2365 - DNA, 876 bp, Homo sapiens
ttttggattcatgcagtctttattaatctgacaaatacagaaaatctgcaatcagctatcaaaattatatcttaccaagaatttgaaaggtatttataaaaaaggtgtattcacagtctgtctgaattaagtacaaagcagtgtccacagaagcagaaggcagacaacatgtgagagtaaatgatcccactgaaaccctcaccccagcacctccaaggacaccaaaaacaagacagtcctgtacttgctactatatgcagctgactttgaaactgcctagtctcaacaattacgtatttcaaaaggaaaattgctttctgggaaatcgtccctgctacacagacacacagaccaactggcaatgctgccaccacatgtcagggctcagggtggacccagcacatccactaagaggcaccctgctgcccaaggctgtgggagacagctttgatgttcaagaaaggggttcatttcagcaccagggtgcttttttatatgcaaatctgaggtgtttcccgttagaggagaggactatgcagatgatcacatgcagatgtctctgagctgtgagcccgatgacagctttgttggtacactctggccagccatttcacaacgcactatgaagagctgaaacctctgtttttaatctcttgtgttgtgggaatttaaagaggtgagaagatcacaaggatcacttctaggctcaaacttatgattatatgatagtttccacgccaagggcaaaaccaaatgtccaattttcacgtctccttccaaattcaatgttggaaggcaggtgaggaggtgaggagaagggcaggtcaaactgttccttatagacataacagcaaatttagagaaggagtactttac

SEQ ID NO: 2366 - DNA, 593 bp, Homo sapiens
tttttttttaaaatgaggaaccggtttattgaacagcttaaggagagcaaaaatagtggctttagctacattttttacacactgagcaggaaagtctaaaccatcccgttcccctgtaccccaaagagaacagggcttgctggaggccagtgccaagggcggagtcgtgctcgcagcagacttgaattaaccccatgtaggccggcgagcagttgcccgcgtgaaaacaccaccctcttctcctggctgagaagatcaaagctctttttttaccctcttttcagcaaaggacctatttgttttcaggcaggaggatgttaaacttgcagcctctgacacacggtggaacctgcagtgcttggagaaacggcacgcacacgtgaaaacatcatgcctactccaaagccttcttgttgctggcaggagggaagcttgagactttcccacgcatagtcgtgacccgcgtgggccgtttctgctctcagcaacattctctagtgttccggcttcaagcagcgcttgtcaggtttgaagctagccactattctgagaacgtcagaaaagcatggaccatctcttgcttggtgttgccg

SEQ ID NO: 2367 - DNA, 586 bp, Homo sapiens
cccttcccccttagcttaccaagtcaccatgaacaaagtaccaaagaggttacaaaacaggaaaagcaaatataaacagacaggatagacgtggcttcctttgtacatgcggcttttagaggcatctggagctctattcacacacgctagagatctctttaaagagaatttatctttcttaaaatagtttttaatattctacaacaaagataaaaaattttaaagatggaatgaaatgaaaaagctcttattttaaaaggcatcaaagtcactaacagtgagtttttaaatttcttttttagaagattacccaagttatcttgctaaaaatacattttttttaaacagaagtgaaaaaatgacaggtaccaatattactgtgttggataatttcttttataatatagaaaagaactttttttttctacaatagttctacagtcacaaagaggcttgtggaaaagggagctgcccgattgaattttttataaagaaacaaacaaaaccaaacacaaccgcaaaccaacagaaactgatttcacggccctcatttcaacagcttctccttctgccttgacccaccctc

SEQ ID NO: 2368 - DNA, 341 bp, Homo sapiens
ggataccattcaccagggctgccagggagttgaaggtttggcgggcttccatggtgtgattgccaccctaaacccttgaggaaggacaaaatgcacaaacagctttgtcctcgctggcgcagggctgttcatgtgtgcaccagcccccttcttcctgagtgccgtctgtgcctcacattccgtgtggtctatggggcagtggggcagctccctcaggcccctttgcaccaagagtggcagtctgggttctgctgggggcggtgacctcgatacccagcaaggcccagggctcctgctgcaccccaggcactgggcagagagcaccacaaaggcagcagcgt

SEQ ID NO: 2369 - DNA, 433 bp, Homo sapiens
  misc_feature (1)...(433): n = a,t,c or g
gaatctgctaagaacattatgaatcctgatcttgtgaaaactaaccattgctcgaattaaggaactcattccatttctcttgaggaacattttactgctgaaacagttggttcttttttaaaattttaaaannnnnnnnnnnnnnnnnnnnnnnnnnnnnnnnnnnnnnnnnnnnatgtgatttgatgcnnnnnnnnnnnnnnnnnnnnnnnnnnnnnnnnnnnnnnnnnnnnnnnnnnnnnnnnnnnnnnnnnnnnnnnngaaactccatacctctttgcagtcacttctcattttctgttccccctagncactggcaactaatttannnnnnnnnnnnnnnnnnnnnnnnnnnnnnnnnnnnnnnncatgtaaatgaaatgtggccttttgtggctggcttctttcatttaacatgntttcaaggntcatc

SEQ ID NO: 2370 - DNA, 857 bp, Homo sapiens
gcctgacaggctcagtggtgaccaggaacagaagcagccttcctgttagtagatgggggtacttctgtggtgggcagaagccttactaaaggggaagacagactttgaagtttctagacgagaaggaggctagcttctagcctgggtggccattattccaaaaggtcattgtttctcactagaccccagggcaccagatgaatttccaagtttaaactctttcctgcaggtgattactttgaaaaaggttggtccagaccattttgatcaagaacctgtatatgtgttgtgttagaggcatctgcctcaagtctatgtacagtgtttgctgcgggtgtgttccaatattcattttacctctgcttgggggttttgtgtgttcccctccccccatgccctgcctacccccttttccctgaaccacgtccttttgaataatttccagatggatttctgtagccataccaaagccagggtgttttcattcatgcggatactagtatttatagatgtctgactacctaacttaatttttgtttttgaacttctaattggggccagtgtaaggtcgatcccagaggctgatctgcaaatcaagctacatgtatttgtgtataagaccctgtgttcaggactgggtgacttttctaagaaatatggggtttagaatggggttgactgtattttttaacctaattctggagagaagattgtattttttacagttttttgggtttggcttccttctcacatttctttagctttgaatttttactaaataaatttcctcctgattaattttttttttctcatctgggaatttgaaatctcggtgcttactgttacaccaatttgtc

SEQ ID NO: 2371 - DNA, 519 bp, Homo sapiens
  misc_feature (1)...(519): n = a,t,c or g
attcggcacgagggcagccccagaaaaggaacctactctccatgcacgtctctctggagcaacctgaagacaggatcttggcctcaggacagttttgcaggctgggaagtccaagataaagccaccagcatctgacaatggccttcttgcaacatcctccaacagagaggaacaacatgtcctcacatggcagaagagcacagaggaaaaagaagaccaaactcactcttttataagagcattaatcccacataggagagcagagccctcatggcccttttgctccccaaaattctcatattctaataccaccacggtgggaaccaaannnnnnnnnnnnnnnnnnnnnnnnnnnnnnnnnnnnnnnnnnnnccgctcaaacctttgatgagaccacatcctcagcaaacacctagattaaaatctggtgagctcttaaaacagagaacataactacactatgcctgnnnnnnnnnnnnnnnnnnnnnnnnnnnnnnnnnnnnnnnnnctttaaaaaaa

SEQ ID NO: 2372 - DNA, 322 bp, Homo sapiens
  misc_feature (1)...(322): n = a,t,c or g
gtacatattgaattttgattcatctggaaggatctcggacatctctggagtccactcgagagcagcattccatgtaaggcctccaattgggcattgtaaagtaaagctttcagatcagctccagtaaaggagtcagttactgatgctacatgtcgacgcggccgcgaattccnnnnnnnnnnnnnnnnnnnnnnnnnnnnnnnnnnnnnnnnnnnnnnnnnnnnnnnnnnnnnnnnnnnnnnnnnnnnnnnnnnnnnnnnnnnnnnnnnnnnnnnnnnnnnnnnnnnnnnnnnnnnnnnnnnnnnnnnnnatgtaacctctg

SEQ ID NO: 2373 - DNA, 1409 bp, Homo sapiens
acatttcatataacaaatggggcttaattaaaaactttaacttggaataaaggaacagggatcactttatcttctgccttcatttaccttagtccaagattcttgcaaaacaggcaactgaacaaacattaggtttatgtaggtaaaatgtgaaagcatttctcctccactttttaaaatttaatttacccagtacagcggggcaccagattacttgatctttgtattttgcagttttgagccttgtgtcaatcccaagcacagagaggatctgccaggaaaaacattgcatctcggagtagacattttgcagtttgtttaataacaacttctaaagtaagttgaattcatccattgtcactgattcaccaagtggatgttgcattgtggaatttgcctgagtactgttgtcattctggctcaggcagggcacggtcagtttcttggccagggacattgctatgtgctgtgtgcaaggctctttagaagagagattggatttttttggcattatcagcactcatgctatttagtctacttctattttgactgactctttaaattagtacaatttttctacttgtcatataactcctggaacaatagtacgggaagccgtgatccttttccctgactcatgattttagtctttttccaaatcgctgtaattaaaaagataattttttttttttgctgctccaacgaccagcatgtgttggagcagatctccatggtaagccaaaagtggacttgtcagcctataactactctgcagctgccactaactctacaggcacagtaactacactttatacaggagcacatgccaaagtgcctgggaggtgccaataaaatcaagaaataagaaaactacaaaaaaagatacggtattaaccttggacataattttttttagggaggcagctttcccacttttataaagggggttgtaaatctcaagaggtcatttgttccccatagcagcatatctcatttttaaattgaagcgaattaaataggattttactactcaacattcattatactgttaatctttgctgaaatatatgctaacaaatgttaagcaagggaaactgaagacttagtcatgtggattgttagcagtgatctgcattctgtaaaagaggtactttcccatgatgtaggcatgaagtggtgccagtaagcgtagagcggaaatgttgactttagttaacattgggtttagcatttccagtgcagcattatcagtgggcctttaaaaatacttcgtaagtacattagctttcactttgttgttaaattatagcagactcattatagagaacaagtttgccttgattttgtttaaaatgacttctgctaagcacccagaagataaaattgacatatttttataatataagcat

SEQ ID NO: 2374 - DNA, 527 bp, Homo sapiens
gtcgccttctgtccccaagtctcccactcccaagtcgcccccgtcccgcaagaaagatgattccttcttggggaaactcggagggaccctggcccggaggaagaaagccaaggaggtgtccgagctgcaggaggagggaatgaacgccatcaacctgcccctcagcccaattccctttgagctggaccccgaggacacgatgctggaggagaatgaggtgcgaacaatggtggatccaaactcacgcagtgaccccaagcttcaagaactgatgaaggtattaattgactggattaatgatgtgttggttggagaaagaatcattgtgaaagacctagctgaagatttgtatgatggacaagtcctgcagaagcttttcgagaaactggagagtgagaagctaaatgtggctgaggtcacccagtcagagattgctcagaagcaaaaactgcagactgtcctggagaagatcaatgaaaccctgaaacttcctcccaggggcatccaagtgggaatgtgggattctt

SEQ ID NO: 2375 - DNA, 501 bp, Homo sapiens
ggatttttctgacaaaatcaatcgtgcccttgctgcagcaaagaaggataatgacttcatttatcatgatcgagttccagaccttaaagatctagatcctattggcaaagccacacttgtgaaatctaccccggtcaatgtacccatcagtcagaaatttactgatctgtttgagaagatggttcccgtgtcagtacagcagtctttggctgcctataatcagaggaaagccgatttggttaacagatcaattgctcagatgagagaagccaccactttggcaaatggggtgctagcttcccttaatcttccagcagcaattgaagatgtgtctggagacactgtacctcagtctatattgactaaatccagatctgtgattgaacagggaggcatccagactgttgatcagttgattaaagaactgcctgaattactgcaacgaaatagagaaatcctagatgagtcattaaggttgttggattgaagaagaagcaaccg

SEQ ID NO: 2376 - DNA, 870 bp, Homo sapiens
ttttttttttttttagatgtgttaattacctttatttcattatttcacaatgtgtgtatatatatatatatatttaaaaatcacattatatacattaaacatattttatttttatttatcaatgataccttaataaagctaaggggaaggaggtatttctctaactatctttgcaaaatacaattcatccattaacaaatcacagtaaattaggaagaataaaacttacatttcgacaaaaacctatgccatatttctgaaagcatcttccaaatcctattaaaaacatctttaaatatatttctctcagcttcttcccttatattttttattttttcatcatattttaattttagtaatttaatttctttctccttttcttcctctgatttatgcttatcctcttctactagtttaatttcttcatttaattggtcagtgtagattttcctcaaaacctcttcccgttgtttcagcctttcctctgtgtccttgtatatgtcatcagaaaagtaagccccttcgttgcactgcaccattttctctatcagctccaccaactcctgcacttgactttccttctctgccttactggttttcttgctgttgctaaaggcacagcagcggttcccgcactccttgacgatgctttttaggcccacatccgcatctgctatgaagtcatggaagctctggccctccaactcttctttgcgagtgaacaagatgaccatgtgcttcatggctgacttcccaaagacagccttgatcaatgcaacggttttctgctcctcctctgtgtagcggccagcagcagaactaggacaatagcatggggccctgggcaggaggagatgatgcagcggctga

SEQ ID NO: 2377 - DNA, 634 bp, Homo sapiens
atttcggcaccaggcaggaaggagcggcggcgacggaggaggaggatggaggcggtggtgttcgtcttctctctcctcgattgttgcgcgctcatcttcctctcggtctacttcataattacattgtctgatttagaatgtgattacattaatgctagatcatgttgctcaaaattaaacaagtgggtaattccagaattgattggccataccattgtcactgtattactgctcatgtcattgcactggttcatcttccttctcaacttacctgttgccacttggaatatatatcgatacattatggtgccgagtggtaacatgggagtgtttgatccaacagaaatacacaatcgagggcagctgaagtcacacatgaaagaagccatgatcaagcttggtttccacttgctctgcttcttcatgtatctttatagtatgatcttagctttgataaatgactgaagctggagaagccgtggttgaagtcagcctacactacagtgcacagttgaggagccagagacttcttaaatcatccttagaaccgtgaccatagcagtatatattttcctcttggaacaaaaaactatttttgctgtatttttaccatataaagtatttaaaaaacaaa

SEQ ID NO: 2378 - DNA, 1355 bp, Homo sapiens
  misc_feature (1)...(1355): n = a,t,c or g
gccttaaatataagaaatttattaatattattaattgattaataattgatcactgccatatgacttggattttacatttccaccacttcttcgtgttacttctttctaccctattatatcagcgtcccatcccaagtctgacacacctggaagtattgaatgttgtattttgattgtggatgacttgtttatttggttatatcttttgaacgcctcaggtgattctgtctgtctttggaggatgggccataggttcctgccccaactccattatctgttttccacaaagatagataacattcacttatcagacctaattccagcaaagcatacacgttcttaggttcttagcaaaccaaagtactttgtccacctctcctctccatctcccctccctcaaatcttcagtgggcagatgtgggagaagaaaggagctgtcactccaaaccttctggtgtttcagttggggagtctggcttcacagtgagctgaaactttcccttgccagcctccatcaatcccagccccttctgagggggctggagagtaattaacatcgccgtccacctgtgcacaggaagatgcctacagccacaccagcaatgatgaaactgcccaccaggacgcccaggaccagcgaagtgtaggagcggcttgtttggctccctttcgtgttttccgcggaaatatgtttctgcacatactgcacacaggtgtcctccaggaattcccgcagttcataccgagtgcggttgtaggcattgagctgctgcagggtgaaggtgaccactccggaggtgacctgggtgtctgcctgccacaaggctctctccggccggaaactcacaaaggagctcccattcacagccacttcgaagaagacattggctctagagccctcggggaggcagctcacagcccaggaagcagcggatggtcagaggaaaggccaaggtccgctcctggtgcacccaggcgcacgaggccgtggaactggagcaggtaggactgcaggccactctgcgtgcgcgcccagctctcgggctcctgcaagggctgcagctgaatgatcgtggtgttggtgtctgggccttccagcacgtgcgttaggtgtccccccagcgacgcgttgccctggtaccacacgtgataggggtcgcggaagtaggagatctggagcatatgaagtctttggaggccatctgaggcgtcttggctacaaaaggcccagccagacagcagcagtatcggcagcaatgttgtcaacatcctgaagttgaggctccggacctgggttcctggctcgggccnggctgctggctccgctggctgcagtctagggaaaagagaagtga

SEQ ID NO: 2379 - DNA, 1962 bp, Homo sapiens
tttttttttttaacaattttacattgacttttatttaataaaaccacctatttacaattcaaaaaagtcctactttgatacactttactaaataaaattaaaggttaactgtacaagcaattaaaacatgatatgtagcaagtgttatcaggagttttcagcaaactatttaaaatagtcaaaaactgagcagttaaaaagtaccttctgaagtgaatgccgtttctaaatgggatcccaatgcctggcgggagaggcagcctcactctactgtgcaggctggacaaaggtcccggccctgaagtcttagactgtgagagtcaacggcatgtgaagtggagtgtgcagacctctggaggagcagcacgtcaatgtctcatttccagtttacttaaaccacacacagaggcagcctctacacttgccaacagcctctgtgccgaggtgttaagggaccctggccggggactcagaacttagaactttctggcctctgaagaggacccaggaaactggcgagacctcatgtgacccctgaacaggtcatacaagccacttctgaactaagattgggaaggtgttccacactggcatgggatcctgttcagaagcggaatacatcgtagtgctatctggagagactgatgtgaaaactgcttcaccaggaacacgcagggctgggcgctgaagacacagaagatccccaggggcaatctgaacacactgcacgaggccctttgccgcgcccaccttctgtacgacttaaggaacatctttatgtacagtaagaaaatatatacatctttaaggaacggaacgcccgtatcatgaacaaaaataagtacatctgcgaggacaacagcgcaacagcctcaggcggcccctcccacaggcccagctcagaccagattacattcaacatcttgatgtcaggaaatggctacgtctggaggccaccgggacccccccgtgaagacaggacgcctcctccgagaggaggtgagtcagcatttaaaggccgaggcagaaagtggtctccacgatgctctgccagcctccctggagattcagctgagatgtaggggcagagtccgggaaacgtgacacatgatagtgctgggaaggagggcacggggccagccactggctcagcaacctgctcctgcacctcgaggagcatttagcaggtatggcaggcaataaaaagtccagagaacgaatgcccagctcggctttccttccccagcccctagcccaaggctcctgttacaagctatacagacagagccaaacagccctcaacatcagaaatgagatcagcctgggggcacccctggggtgggaagtgtggctgagaagggccgtggagtgcagagcaccccaaggcacacatgtacgcatgactaaccaagcccgtgaccgggtccgcagaatgctccccaggaccagcctgccagcggaccgcccacgtgggccctgccttcccagacactggcctgccctttaagactgcgcagctgcaaaacggttcatttctgtgattttggataaccaaagtcctcacacaaagttctacaattagtcaaggaaaagacagaacaaaaaatttgccaacgaccctgggaaagtcagctaaaatggggaggctgatggtccagtatgagcatctgacgagattgtctaggctgttagacgtgtgttgctcgctcctccgtctgtacaacgggtcatgaagcacacgttctaaagtcaaatgtgtgagggactcactggcacttaggatgggtccagctgtgcagggctcaaaggcagagaggagccactgctggcacaaggggccacctcccccacatgtgctgttgctgggctgctgcctgggcctccactgaacaggcaggtgggagagggcccagccacacatctctttctctaccctttaacttacagggggctgattccacc

SEQ ID NO: 2380 - DNA, 332 bp, Homo sapiens
  misc_feature (1)...(332): n = a,t,c or g
tttcttttgagggatgagggtagagttgaagaaagagtatttacaatgtagtcgaataaaaaatgacctgcgtnnnnnnnnnnnnnnnnnnnnnnnnnnnnnnnnnnnnnnnnnnnnnnnnnnnnnnnnnnnnnnnnnnnnnnnnnnnnnnnnnnnnnnnnnnnnnnnnnnnnnntatcaagtttgaatattgattaatggcaaggagatgaactactagattattttaacagttcaggagacagataatgaaggtgtggactatggaaatagctcatngaatataannnacancttctggangagcaccatcctcntataacacctctcgg

SEQ ID NO: 2381 - DNA, 390 bp, Homo sapiens
acctgttttcacatgtggtggcattcttactggagagtctggatttattggcagtgaaggttttcctggagtgtaccctccaaatagcaaatgtacttggaaaatcacagttcccgaaggaaaagtagtcgttctcaatttccgattcatagacctcgagagtgacaacctgtgccgctatgactttgtggatgtgtacaatggccatgccaatggccagcgcattggccgcttctgtggcactttccggcctggagcccttgtgtccagtggcaacaagatgatggtgcagatgatttctgatgccaacacagctggcaatggcttcatggccatgttctccgctgctgaaccaaacgaaagaggggatcagtattgtggaggactcct

SEQ ID NO: 2382 - DNA, 667 bp, Homo sapiens
gaggctaggtgagccgtgggaagaaaagagggagcagctagggcgcgggtctccctcctcccggagtttggaacggctgaagttcaccttccagcccctagcgccgttcgcgccgctaggcctggcttctgaggcggttgcggtgctcggtcgccgcctaggcggggcagggtgcgagcaggggcttcgggccacgcttctcttggcgacaggattttgctgtgaagtccgtccgggaaacggaggaaaaaaagagttgcgggaggctgtcggctaataacggttcttgatacatatttgccagacttcaagatttcagaaaaggggtgaaagagaagattgcaactttgagtcagacctgtaggcctgatagactgattaaaccacagaaggtgacctgctgagaaaagtggtacaaatactgggaaaaacctgctcttctgcgttaagtgggagacaatgtcacaagttaaaagctcttattcctatgatgcccccttcggatttcatcaatttttcatccttggatgatgaaggagatactcaaaacataagattcatgggtttgaaggagaaggcccaattttggaagaataagttactggggaagaatggaacttggagggctttttccaggggccaaactccctttgaagaaaggctaatc

SEQ ID NO: 2383 - DNA, 1874 bp, Homo sapiens
gcgccgcgggacctttgaggggaacgacttgtcggagccctaaccaggggtatctctgagcctggtgggatccccggagcgtcacatcactttccgatcacttcaaagtcagaccgaggacacggttgttaccaagaccaggctgttgccttggaagagcccagagcgtgtcaagggagacagccacatcacgccagaaatacatgacagctggattagccctggggagagggaggcccagatgtgggagctcaggggaggtgcagctcaacgtgggagtttgggaggaggctaccttgacctttgaatgccaagtggggagccagccagatgaaagtggttaaaaactaatatttatatgacagaagaaaaagatgtcattccgtaaagtaaacatcatcatcttggtcctgggctgttgctctcttcttactggttttgcaccataacttcctcagcttgaggcagtttgttaaggaatgaggttacagattcaggaattgtagggcctcaacctataggactttgtcccaaatgctctccgacatgcagtagatgggagacaagaggagattcctgtggtcatcgctgcatctgaagacaggcttggggggggccattgcagctataaacagcattcagcacaacactcgctccaatgtgattttctacattgttactctcaacaatacagcagaccatctccggtcctgggctcaacagtgattccctgaaaaggcatcagatacaaaattgtcaattttgaccctaaacttttggaaggaaaagtaaaggaggatcctgaccagggggaatccatgaaacctttaacctttgcaaggttctacttgccaattctgggttcccagcgcaaagaaggccatatacatggatgatgatgtaattgtgcaaggtgatattcttgccctttacaatacagcactgaagccaggacatgcagctgcattttcagaagattgtgattcagcctctactaaagttgtcatccgtggagcaggaaaccagtacaattacattggctatcttgactataaaaaggaaagaattcgtaagctttccatgaaagccagcacttgctcatttaatcctggagtttttgttgcaaacctgacggaatggaaacgacagaatataactaaccaactggaaaaatggatgaaactcaatgtagaagagggactgtatagcagaaccctggctggtagccttcacaacacctcctctgcttatcgtattttatcaacagcactctaccatcgatcctatgtggaatgtccgccaccttggttccagtgctggaaaacgatattcacctcagtttgtaaaggctgccaagttactccattggaatggacatttgaagccatggggaaggactgcttcatatactgatgtttggggaaaaatggtatattccagacccaacaggcaaattcaacctaatccgaagatataccgagatctcaaacataaagtgaaacagaatttgaactgtaagcaagcatttctcaggaagtcctggaagatagcatgcgtgggaagtaacagttgctaggcttcaatgcctatcggtagcaagccatggaaaaagatgtgtcagctaggtaaagatgacaaactgccctgtctggcagtcagcttcccagacagactatagactataaatatgtctccatctgccttaccaagtgttttcttactacaatgctgaatgactggaaagaagaactgatatggctagttcagctagctggtacagataattcaaaactgctgttggttttaattttgtaacctgtggcctgatctgtaaataaaacttacatttttcaaaaaaaaaaaaaaaaaaagat

SEQ ID NO: 2384 - DNA, 932 bp, Homo sapiens
gcccttctcccgcctccctcggccttagccatggcgagtagcggcggtgctggggcggcggcggcggccgcggcggcgaatctgaatgcggtgcgggagaccatggacgttctgcttgagatttcaagaattttgaatactggcttagatatggaaactctgtctatttgtgtacggctttgtgaacaaggaattaacccagaagctttatcatcggttattaaggagcttcgcaaggctactgaagcactgaaggctgctgaaaatatgacaagctgactttctggagaaattctgatgagatatgtcaagctctgcaagagggtttgaagattgcattgtagttgagaatgtacaatgaaattactgcatgcagcagtgtagaaaaattttactttttaaaagaattataaaaccatagctttataaatcagtggaaagtggcttacagagagaactatcagatgtgtttacatcacatcttattcactttttttaacagctctaatgctttggcattgctatgttcatatttatgtattccttatttatagctctgatagctttaattttctaagcagtctgtctatcagatgtgcacatctgctgtgccaggttgaagtatagtgggaaccatcagtagtaatgtgtagtagttatgacttgttgacatttccattataaactttaattttgaattgtttatgcattataactgtggatttatattgtattgggctgaaagttgacaggatttcagccaccacttgtgaatttttatttagattcattatgtatatcagaatcttgtttttgaataagagcatggagaacatttctcgtaatctactcttgaacagagaatatttagtctttcaaacagtttgttgggcagctaatagtgtgaaccaggtcatttttgtattgagtaa

SEQ ID NO: 2385 - DNA, 856 bp, Homo sapiens
aatacttttttttttttttttagagaatctggatctattgaaacatgtttaaaacggggttggtcacaacaggatgggcacaaatgggagcgggggaggggagtggggccgcaccagcccctgccagtgcctgaggctgcagcctggcgagtgcttttgcttctgcttctccacgctggtggttcgagatggtcccaagccccactggggcagggccctgccttgccctgcagaggcagggtggctccacttccccatctcctcccccatggggcttgcagggccatttatgatgcccaacaggtggcactgtcgcgctccttcctccctgtctccgtggcatcagaaacaggttaagggtagaggtagatggggagacgtgggggccacacagtctccggtggcagtgagggagcttgggaccctgaggggggcatgctgactccttgctggagaaaaggcacctagataggggagctgggcttgggggcctcccagggggtcctggggtgaggtggggagggaggctgaacgaagcaggaagcagggtggtgggcagaccccaatcctggtttccaaaccctcaccggctgcgggagaaggaagaaggaaggagtcctggagcagagccctgccctggtcccctacgcctgagcaagcctcatccccttcccacctggcccccacgcaagcccagctcgacctccttcccaccttccccctgccggctccaggccttccgcagagggggtggaaggttacagaggcctcaggccgtcttggtgccggggtccacctccttgtgggcccagagctccttgtgctgcttgcggccaaacccctcgtcgtagttgcc

SEQ ID NO: 2386 - DNA, 252 bp, Homo sapiens
  misc_feature (1)...(252): n = a,t,c or g
gtctcacagccttcagagctcagccacaaacagagatnnnnnnnnnnnnnnnnnnnnnnnnnnnnnnnnnnnnnnnnnnnnnnnnnnnnnnnnnnnnnnnnnnnnnnnnnnnnnnnnnnnnnncgagggatgggccgaattaaaggataggttgggctagttacttcagcaggagcatgtccttaggcacagatcactcatgctattgtttgtggttagatgccttagcgttccaccggcagcagggtctgc

SEQ ID NO: 2387 - DNA, 1616 bp, Homo sapiens
cgtaacgcgtcacgggcggcctggcagctggcggcattgaggcggacgcgtctagaggtccgtctgaccgcggcgtcgggacctggtttccgggcatgagctgagagcaccacgccgaggccacgagtatttcatagacattgatggaagcagaaaccaaaactcttcccctggagaatgcatccatcctttcagagggctctctgcaggaaggacaccgattatggattggcaacctgggaccccaaaattaccgaataccacctcctcaagctcctccagaagtttggcaaggtaaagcagtttgacttcctcttccacaagtcaggtgctttggagggacagcctcgaggctactgttttgttaactttgaaactaagcaggaagcagagcaagccatccagtgtctcaatggcaagttggccctgtccaagaagctggtggtgcgatgggcacatgctcaagtaaagagatatgatcataacaagaatgataagattcttccaatcagtctcgagccatcctcaagcactgagcctactcagtctaacctaagtgtcactgcaaagataaaagccattgaagcaaaactgaaaatgatggcggaaaatcctgatgcagagtatccagcagcgcctgtttattcctactttaagccaccagataaaaaaaggactactccatattctagaacagcatggaaatctcgaagatgatggttgtgaattactgtagcagcaaaagcaaattggtctccacacctaaaatcgtctgcctgtgtactttgtagatgtgaatggtactattcaacggagcacaatcacatgttagcatttggtaacataatgtttttggatgttcttatggatgtttcttccctaaactatgtatggaattgagcatcatccagaataaatagcgttgtatcccaaattgtgatttgaaccctgggatgctctaattggctggttggtttggatttgtaactccagaaacattctatagtgtgccagagcaaaaggcaaatacacaaaatattatttaaatcaggaaactaaaaatattaacatctattaaaaaattgagcatttttctacgctcgtgtgtcttttacaacataaagaaaaagtaaaaggcagggagggaagtgagagacagattttaaatcatgttcagaactgttgttccagaatttactacggcaatccctccaactggactgaaaaagagaaagttcttggcaaaaaggagctgattctttgaacaaatgttgtagtaatctgtttaagaattatgcttattgtttcaaaatcccaactagggaaaacatggtgtatatcttgaaaattgttcgtgttgacaaaactaggaatccaaattttaacattttataccacaacacaagttctatttggaaattgaacttttattctatagcaaccatttttttcaaatctaaataaccatgccttctataataacaaatgttgctattatcatgggacttttaaaattacatttattgcatgggattgtttttatagcatgagaatgttctgtttggaattatatcatggtcagtctaaatagaaaaagcaaaatttctttgaaaacc

SEQ ID NO: 2388 - DNA, 445 bp, Homo sapiens
  misc_feature (1)...(445): n = a,t,c or g
gcggcacgagagcctatggagcagccctgatctgcaaggagcggcatctctggcgctgctgtgcacagctgcttccatgaaagctgctgcctaacaccaccagctcacccttgaatctttgggcaaatccaagaactctcccaggctaagccccagtcttggggcttgnctgtcctgcatcatctggcaaccagcaaagggacaaggacagcggagatggtggcaattggcagagaggcaagacagcagagacagagaggcagcaattggtggtgaaactgagtggacanccaagtgtccatagtacagctgcctcgtgtggggacccactgctntaacgagccagncccgacacagaagctgagcacccccaagctggggaacctacagagacctgcacccgggtcccacgtggaaactggctggtgccattttgncttctgtg

SEQ ID NO: 2389 - DNA, 694 bp, Homo sapiens
  misc_feature (1)...(694): n = a,t,c or g
ggagagtgcagggatgtgaaattgtgggcaaagtggaacttgaaggaatgtttgtaggggcagagctgaaatgattagagatggaaatcattcaagccgaggaggccaggagaaaaataggagctattttcttgctgtgtggctcaaactcttaaacatgaagcttctgtgcatctttgggagggtgcgcgaggggtcatcagtttacgttgatactgtggaagtctcctattcaagtggcaggtcatagtttacagaaaaagattttgctcctgataccaaaggggcaatcaggcaatctaatcctcaccaatccctaattgattagctaattaaaaggactgagtttgaagtagagagcagacttggtgacaaagcagagacagaaagaagagggaggtcacaaggccaagtcgcagggccagcactgcagaactgagccagagtgcacancaaccctcaggatggctctgctaagggaactctgtgaaagtccactttttataccatcttttacccacctcttttcttaccccaaagttcctttatgtagctcgaaatgccaaagactggtatggtttcctactaccatttccaaaggatgaaccacatgcttcctgaccctggtacctgggaagagtatttttgaaaccttcatcaatggaaaagtggtttggggttcngggtttgacca

SEQ ID NO: 2390 - DNA, 614 bp, Homo sapiens
gttcaatagaagaaattaaaaaactatgccaggaacagttagagctcctgtctgaaaaaaaaattttgaagattcttgagggtgacaatggaatggactctgatatggaagaggaagcagatgatggttctaagatgggatctgatttagtcagtcagcaagacatctgtatagattctgcttcatccgtgagagagaataagcaacctgaaggtttggaattaaaacaaggaaaaggggaagatagtgatgtactcagtataaatgcagatgcttatgacagcgacatagaaggcccatgcaacgaagaagcagctgctcccgaggcaccagaaaatacagtccaaagtgaagctggtcagatagatgacctggagaaagacattgagaaaagtgtgaatgagattctaggactggcagagtctagcccaaacgaacccaaagcagccaccctggctgttcctccaccagaagatgttcaaccttctgcacagcaactggagctgctagaacttgagatgagggcaagagcgattaaagccctaatgaaagctggtgatataaaaaagccagcctaggtatttaacttgattttgaattttaggtatgtttga

SEQ ID NO: 2391 - DNA, 618 bp, Homo sapiens
ggcgagctctggagacctgtgtccctgtgcagacccatgcactgcccgatggcagggcccatgcactcagctggctgcaggacgccatcagggaaagcgctgagtatcgctgctctgtcctctcctcagcagggaacaagacttcgaaggtgcaggttgctgtgatgagacctgaagtgacccaccaggagaggtggaccagagagctctctgcctggagggctgtggctggggagcacgaccggatgatgcagagctggaggaaggcgtgggaaagctgtagcaaggacaccctgtagccaccaggaaggagtccctgacaccgacctcaaccccaacaagaccctgctgccactgaccacagccacccccggagaaggcctggtcccccacaactgtgaactgtcttgcccaagcctgctctgaacacagccattgggccaccacctgatgggcagaggcgggacagtggagaagcctggaacccaagtgggcctgtgtacaggaactaagacttaaaaaattaggtgcttacctgggacagtaagttctgtctgggcacaagcaggtaaccagggatggctaacaggcttttgatagctgctcgtgaactaaaac

SEQ ID NO: 2392 - DNA, 1546 bp, Homo sapiens
agaggcctctctggaagttgtcccgggtgttcgccgctggagcccgggtcgagaggacgaggtgccgctgcctggagaatcctccgctgccgtcggctcccggagcccagccctttcctaacccaacccaacctagcccagtcccagccgccagcgcctgtccctgtcacggaccccagcgttaccatgcatcctgccgtcttcctatccttacccgacctcagatgctcccttctgctcctggtaacttgggtttttactcctgtaacaactgaaataacaagtcttgatacagagaatatagatgaaattttaaacaatgctgatgttgctttagtaaatttttatgctgactggtgtcgtttcagtcagatgttgcatccaatttttgaggaagcttccgatgtcattaaggaagaatttccaaatgaaaatcaagtagtgtttgccagagttgattgtgatcagcactctgacatagcccagagatacaggataagcaaatacccaaccctcaaattgtttcgtaatgggatgatgatgaagagagaatacaggggtcagcgatcagtgaaagcattggcagattacatcaggcaacaaaaaagtgaccccattcaagaaattcgggacttagcagaaatcaccactcttgatcgcagcaaaagaaatatcattggatattttgagcaaaaggactcggacaactatagagtttttgaacgagtagcgaatattttgcatgatgactgtgcctttctttctgcatttggggatgtttcaaaaccggaaagatatagtggcgacaacataatctacaaaccaccagggcattctgctccggatatggtgtacttgggagctatgacaaattttgatgtgacttacaattggattcaagataaatgtgttcctcttgtccgagaaataacatttgaaaatggagaggaattgacagaagaaggactgccttttctcatactctttcacatgaaagaagatacagaaagtttagaaatattccagaatgaagtagctcggcaattaataagtgaaaaaggtacaataaactttttacatgccgattgtgacaaatttagacatcctcttctgcacatacagaaaactccagcagattgtcctgtaatcgctattgacagctttaggcatatgtatgtgtttggagacttcaaagatgtattaattcctggaaaactcaagcaattcgtatttgacttacattctggaaaactgcacagagaattccatcatggacctgacccaactgatacagcccccaggagagcaagcccaagatgtagcaagcagtccacctgagagctccttccagaaactagcacccagtgaatataggtatactctattgagggatcgagatgagctttaaaaacttgaaaaacagtttgtaagcctttcaacagcagcatcaacctacgtggtggaaatagtaaacctatattttcataattctatgtgtatttttattttgaataaacagaaagaaattttgggtttttaaaaaaaa

SEQ ID NO: 2393 - DNA, 1597 bp, Homo sapiens
gaggacaggtttgtgcgctggacgcaagcaccaggcgcagcctcgctcgccgacacccggccagaacgtgttacgagtcagtttttagtgaaaaaacattgagctaggagccaagacccatctcttcactattttggtattgtgcaagtcatcttacctctctggatctcagttgtctcatctgtaaaaaggagataaaaattatttacctgcctgaacatgaggtggaggaccatcctgctacagtattgctttctcttgattacatgtttacttactgctcttgaagctgtgcctattgacatagacaagacaaaagtacaaaatattcaccctgtggaaagtgcgaagatagaaccaccagatactggactttattatgatgaatatctcaagcaagtgattgatgtgctggaaacagataaacacttcagagaaaagctccagaaagcagacatagaggaaataaagagtgggaggctaagcaaagaactggatttagtaagtcaccatgtgaggacaaaacttgatgaactgaaaaggcaagaagtaggaaggttaagaatgttaattaaagctaagttggattcccttcaagatataggcatggaccaccaagctcttctaaaacaatttgatcacctaaaccacctgaatcctgacaagtttgaatccacagatttagatatgctaatcaaagcggcaacaagtgatctggaacactatgacaagactcgtcatgaagaatttaaaaaatatgaaatgatgaaggaacatgaaaggagagaatatttaaaaacattgaatgaagaaaagagaaaagaagaagagtctaaatttgaagaaatgaagaaaaagcatgaaaatcacccctaaagttaatcaccccaggaagcaaagatcaactaaaagaggtatgggaagagactgatggattggatcctaatgactttgaccccaagacatttttcaaattacatgatgtcaatagtgatggattcctggatgaacaagaattagaagccctatttactaaagagttggagaaagtatatgaccctaaaaatgaagaggatgatatggtagaaatggaagaagaaaggcttagaatgagggaacatgtaatgaatgaggttgatactaacaaagacagattggtgactctggaggagtttttgaaagccacagaaaaaaaagaattcttggagccagatagctgggagacattagatcagcaacagttcttcacagaggaagaactaaaagaatatgaaaatattattgctttacaagaaaatgaacttaagaagaaggcagatgagcttcagaaacaaaaagaagagctacaacgtcagcatgatcaactggaggctcagaagctggaatatcatcaggtcatacagcagatggaacaaaaaaaattacaacaaggaattcctccatcagggccagctggagaattgaagtttgagccacacatttaaagtctgaagtccaccagaacttggaagaaagctgttaactcaacatctatttcatctttttagctcccttcctttttctctgctcaataaatattttaaaagcataaaaaaaa

SEQ ID NO: 2394 - DNA, 855 bp, Homo sapiens
ctgtacaaaagctgttgaacttaatcccaaatatgtgaaagctctctttagacgtgcaaaagcccatgagaagctagacaataagaaggaatgtttagaagatgtcactgctgtgtgtatattagaagggttccaaaatcaacaaagcatgctgttagccgataaagttcttaaactccttggaaaagagaaagccaaagaaaaatataagaatcgtgaacctctgatgccatctccacagtttatcaaatcttacttcagttctttcacggatgatatcatttcccagcccatgcttaaaggagagaaatctgatgaagataaagacaaggaaggggaggctttagaagtgaaagaaaattctggatacttaaaggccaaacagtatatggaagaagaaaactacgataaaatcataagtgaatgctcaaaagaaatagatgctgaaggcaaatacatggcagaagcattgctactacgagctaccttctacctgcttattgggccatgccaatgcagccaaaccagatttagataaagtcatcagtttgaaagaagctaatgtgaagcttcgagcaaatgctctcatcaaaagaggcagcatgtacatgcaacagcagcagcctttgctgtccactcaagattttaacatggctgctgacatcgatcctcagaatgcagatgtttatcaccaccgaggacagctgaaaatactccttgatcaagttgaagaagcagtggcagattttgatgaatgtattaggttaagacctgagtctgctctggcacaagcacagaaatgttttgcattgtaccgccaggcatatacgggaaacaactcttcacaaatccagc

SEQ ID NO: 2395 - DNA, 1031 bp, Homo sapiens
gctttcagaagaattattagataaatggctctcctacccagagacccagcacgtgcccctcagccagcatatgcttggttttgctatgaagtctgttacacagatggtaatgggtagtacatttgaagatgatcaggaagtcattcgcttccagaagaatcatggcacaccctcatgcaactggagtctgttttaaggaacatcataaaagaacgaaaaggaaggaacttcagtcaacatattttcattgactccttagtacaagggaaccttaatgaccaacagatcctagaagacagtatgatattttctctggccagttgcataataactgcaaaattgtgtacctgggcaatctgttttttaaccacctctgaagaagttcaaaaaaaattatatgaagagataaaccaagtttttggaaatggtcctgttactccagagaaaattgagcagctcagatattgtcagcatgtgctttgtgaaactgttccgaactgccaaactgactccagtttctgcccagcttcaagatattgaaggaaaaattgaccgatttattattcctagagagaccctcgtcctttatgcccttggtgtggtacttcaggatcctaatacttggccatctccacacaagtttgatccagatcggtttgatgatgaattagtaatgaaaactttttcctcacttggattctcaggcacacaggagtgtccagagttgaggtttgcatatatggtgaccacagtacttcttagtgtattggtgaagagactgcacctactttctgtggagggacaggttattgaaacaaagtatgaactggtaacatcatcaagggaagaagcttggatcactgtctcaaagagatattaaaattttatacatttaaaatcattgttaaattgattgaggaaaacaaccatttaaaaaaaatctatgttgaatccttttataaaccagtatcactttgtaatataaacacctatttgtacttaattttgtaaatttggatttttatatatca

SEQ ID NO: 2396 - DNA, 1060 bp, Homo sapiens
ggtcgacgcctataaggatcttgaaattcaaatgaggaaagacgaaaagatgaacattagtggcaaaaaaaatgttgactcagacagactcggcatgggatttggaaattgcagaagtgttatttcacattcagtgacttcagatatgcagaccatagagcaggaatcacccattatggcaaaaccaagaaaaaagtataatgatgacagtgacgattcatattttacttccagctcaaggtactttgacgagccagtggagttaaggagcagttctttctctagctgggatgacagttcagattcctattggaaaaaagagaccagcaaagatactgaaacagttctgaaaaccacaggctattcagacagacctactgctcgccgcaagccagattatgagccagttgaaaatacagatgaggcccagaagaagtttggcaatgtcaaggccatttcatcagatatgtattttggaagacaatcccaggctgattatgagaccagggcccgcctagagaggctgtcggcaagttcctccataagctcggctgatctgttcgaggagccgaggaagcagccagcagggaactacagcctgtccagtgtgctgcccaacgcccccgacatggcgcagttcaagcagggagtgagatcggttgctggaaaactctccgtctttgctaatggagtcgtgacttcaattcaggatcgctacggttcttaatactgaagtcatgatgtgtatttcctggagaaattcctctttaaatgaacaagtaaccacatctcaggcggcagtgaagtccagatagttttgcagattgttttgctactttttcatatggtatatgtttctgatttttaatatttcttttgagaaattctgagttctgatgtaggagctttcctgtgatttctgtttcacgttccttcctgtcacaccctcctttggcgtctctgtgtatatccttgctttattttcttggaacctttgatttcaacactgagggcctggagacctcggctcctcctgctcctgaaccaggaggcttcatgt

SEQ ID NO: 2397 - DNA, 422 bp, Homo sapiens
ggctccaggacagcgtgggactttgatattgatgtgaacgcctctgtgtttgaaacaaacattcgagtggtagggaggactcctgtcttgttcatctgctctccaagaaggctggggtggaagtagaggctggatggccctgttccgggcctctcctgagaatggctgaggaggcggcccgaaaactcctcccagcctttcagacccccactggcatgccatatggaacagtgaacttacttcatggcgtgaacccaggagagacccctgtcacctgtacggcagggattgggaccttcattgttgaatttgccaccctgagcagcctcactggtgacccggtgttcgaagatgtggccagagtggctttgatgcgcctctgggagacccggtcagatatcgggctggtcggcaaccacatt

SEQ ID NO: 2398 - DNA, 1214 bp, Homo sapiens
tttgatgataaagagcaacacttttattattcttccagtggctccccaagtcccttaaacccgtgcccctcctcccgtcccccatgcaccctccaaaggagatgacaaaggcggcagtgaaggaggagaaggaggaagagaaacacctttattggaagagctgtgtggacaagagaacggggatgagagtgagagcatgggaggtggggtccaaggagctggtgcctttctcagcgccccttccagggactgcacagagacgggctggcacaccctgggtccaggcacctaggccctgcgatcccttgggagagggccttgtaggtggggagggaggcaagaggcctggggttcccacggagaagggggcaagaagccacctggtttcaccgatccatgctgtcgtccgctgggctggagaaacaggtctgtagcagcttttcacagaactccagctcctcctggtactcctcatgctgctgcagcagctgacagcggtggcggaggagctcctccaggcccagttccggctcccgacactcgcgcacaccctgcggaaagtctgtcaccaggctgcacagggctccaagcacgtgctcgtggaaggggctgtgctctgtccgcaccagggccaccagctgctggaccatccccatggagcacagggtccctttgtgttcagggtggcccaccagcaggttctgcagcaggaatgctgatttgaccttgagcttctgcacctgctgctgcatggccctcatcaacacagagaagccgtccaggcggaggaactgcagcagcccagcctcctgctctcggaccagacaggagatggcgaagagggccttgacgcgcaccgtgtcgcaggcgtcgcggtccagcagccgcagcagcttacgcagggcaccccaggcccagcacctgctcctggatggctgccacgttctgactgcacgtgccgatgagctgtgccgcccgccaccgcagtcccgcagcccccgcctccaggtaccggcccaccagcaggtgcatgccagacagctggcagaagtctgcggcattgtccatgttctcacacaggtcggccagcagctccagggcttactgaaaatataaacaaagaaacaaatacagtaggtaattgatgctatttgccaatgtttgcaaaggtcttggataacaaaaataagatagcaatcatggctttattatga

SEQ ID NO: 2399 - DNA, 609 bp, Homo sapiens
ggggggaggcgttccggtccccaagagacccgcggagggaggcggaggctgtgagggactccgggaagccatggacgtcgagaggctccaggaggcgctgaaagattttgagaagagggggaaaaaggaagtttgtcctgtcctggatcagtttctttgtcatgtagccaagactggagaaacaatgattcagtggtcccaatttaaaggctattttattttcaaactggagaaagtgatggatgatttcagaacttcagctcctgagccaagaggtcctcccaaccctaatgtcgaatatattccctttgatgaaatgaaggaaagaatactgaaaattgtcactggatttaatggtatcccttttactattcagcgactatgtgaattgttaacagatccaaggagaaactatacaggaacagacaaatttctcagaggagtagaaaagaatgtgatggttgttagctgtgtttatccttcttcagagaaaaacaattccaatagtttaaatccgaatgaatggtgttatgtttcctggaaattcaccaagctatactgagaggtctaatataaatgggcctgggacacccagcaaccttaatcgac

SEQ ID NO: 2400 - DNA, 921 bp, Homo sapiens
agaaaccacttaatttgtgatgcacgtaatatttgtgtgaacctgagaatatgtcacaataggaaaaagcagaaattatacttaggggacatgttaggggggtaaaaatatttaagcctcgaatgttttactgtcatctccactaactatttttacagaaaaagctaaaaactctgttgtaattattgtaagtttacttatttatacttttaaattaggcttttcatacttaaatttttttgacatttgcttttaatatttgtttcttaatgtggaaattgtgtattttaataatcaaattattaggataatagatatatttttaaacattcacctcattaacaaatagatctttgaatttttattaggttttttggctccagacaactgtttagctttaatgatatttctaaattcccagtgacttattaataaaaacaggaaaaatatttaggtaatgtcataaaatttattttacctttctcattttctgagaaaataaatgaaaaaaaccctagatattggcttttattaccaacagtgtgtagggtttttggtacatatggaaatttgacacaaaaaaatagggaatttgtatagagaagtttccctcttataaaaggactcccatttgattgttcgaaactataaaatgcatttttactttaccatatctgaaatgacaaaatatcgccctttgggaaaacctgactctttgcacgtgtaattcccagagtctacctcagttaaccaggcttagttttaggcaggaatgaattgaattaaattcagttcatcatctatgcagatttgtttcttttaagcacatccttccctcctgctgttgccctcctcccattaacttttctttttaatcttgaaattgtttaaaatattccatctttctttctctagcaaagt

SEQ ID NO: 2401 - DNA, 1815 bp, Homo sapiens
tgttatcaagtacttattcttcggttttaaaaaaaattaatggtaactgtatttttctcatttttagcattattcaaatgtttatattttaatacctttaaaccactttaaagttttttcatgtttaattatagttttaagaaaaactattttgaacaaccccaaatatagtgcatctagaaactaatgtatatttgattagacatcatttatagtggaacagtagactgtagtacatggtaatttttcttttactattaagatacaataaaacatgactaattttgctgtcaaaaatgtaaagaataatgataaatggagtttttatattttacttttaagattgcctgtctttaataagacaaagccttaagccttatgttataattttggttctaaaaaccatcatttcagtataaggaataagtatatttcgtcctcctctttagtttttttcttcctatttatttttattttgaaaaatttctacaccttctttgaattccttgtatgaatttttgtttcttagaagttaatttgtgtgaaatgagattcttcaaaacgatgaaacctcatagctctgagaaaaggttttagggttttaaattctaagcaaagcgtgactatggctgacagactacacatttaattatacagcttctctttcttaaccacaggcagattaacctcattgtggattgtccttcaggaccttagtcctcaggcatggtttctggtgcccactcctggaagccgctgttccctttctaccttcttaccagagcccaagggcaggcctggtcccggggaagcagcagcttgctgacataagtcagctgcaaaggctgaggagtgtgccctcagagaagcaccgccccccagtcttgtgccagcgcctagagccgcagctcccagggatgctccttccctggaggcagcccagggagagggactctggcagcgttcttcagatttgtggccactgtttctcatttgctggttgactgtttttatttcttaggcttttgctagttttagaaaatagggaagcagcccttgatttgtggattaaaagcaacatttgagcgatgatgcacaacagtccaggaaaatgggcggtggacacttgaggctgaggatgggagttgacatgagcagggagagggaggtgcgcgctgcttatctgtgattgttgctcacctgagtgtggctgattgtgtacatccagcagttacaatttttaaaaattatacttttacatttattttatatttttctcacccccagtaatttccttccaaagaagttcacatgtaataagtagaaattctgtataggaaaaaagcattaaaaatactattataactgcttcatttgctgggaacccattaaaagtaatataaattagctttttccagaaggatccttttgtagcagtgtttatgaatgtaacccccagcaaaatatggctatatattaggggagccagtttggagcagaggcctgaaggtcccctgctatgccagccgtggccacagctcgcagcccaagcactgtggagcatccacacctttgatggcaatgcagattggtagcaggttccataggcgtacaaaacagtattaaagctcagtgttttgcatattgttagcatttacaaatatttttgctttagtatgaggaaagtaaggatgggcaaagaagcgatcaaaatagctattgctacaacattttcgaaaacaaagttggggctgtatttctttaaaaagataagcctctaaaaatgcttggcaaaaaaaatatagtgttaaaata

SEQ ID NO: 2402 - DNA, 572 bp, Homo sapiens
gagaatgaagtgcttcgattcactcagaacatgatgatgcctatcatacactatccaaatgaagtcattgtcaaagttcacgctgccagtgtaaatcctatagacgttaatatgagaagtggttatggagctacagctttaaatatgaagcgtgatcctttacacgtgaaaatcaaaggagaagaatttcctctgactctgggtcgggatgtctctggcgtggtgatggaatgtgggcttgatgtgaaatacttcaagcctggagatgaggtctgggctgcagttcctccttggaaacaaggcactctttcagagtttgttgtagtcagtgggaatgaggtctctcacaaacccaaatcactcactcatactcaagctgcctctttgccatatgtggctctcacagcctggctgctataaacaaagttggtggcctgaatgacaagaattgcacaggaaaacgtgttctaatcttaggcgcttcaggcggagttggtacttttgctatacaggtaatgaaagcatgggatgctcatgtgacagcagtttgctcccaagatgccagtgaactt

SEQ ID NO: 2403 - DNA, 751 bp, Homo sapiens
gaggggggggcggcaacgaccatggaggccacgtcccgggaggcggcgccagcgaagagctcggcctcgggccccaacgctccccccgccctgttcgagctgtgcgggcgggcggtgagcgcccatatgggggttctggagagcggggttttggtccctcccaggcccaatacttcaaagcatcctacctctgctcaatatatattacttggagaggattgaggaaactgccctcaagaaaggcctctcaactcaggccatctggcgccgactctgggatgaactgatgaagacaaggccttccagtttggaaagtgtgacatgttggcgagccaagtttatggaggcctttttttcccatgttctacgtgggaccattgatgtgtcttctgacaggcgtctttgtgatcagcggttctcacctcttctgcacagctcccgccatgtccgacagctcaccatctgtaacatgctgcagggtgcaaccgagctggtggctgagcccaaccgcagggttctggagaccctggccagctccctgcacactctcaagttccgccacctgctgttctctgatgtggctgctcagcagtcacttcggcagctgttgcatcagctcattcaccatggggctgtcagtcaagtgtcgctatactcctggcctgtgcctgagtcagcccttttcatccttattctcaccacctccctctatgccatattaataaactgttatctcctgttcttcaaaaaa

SEQ ID NO: 2404 - DNA, 374 bp, Homo sapiens
tgtacgtcaacatgtacaacaccgggaatattgccagagttaacctgaccaccaacacgattgctgtgactcaaactctccctaatgctgcctataataaccgcttttcatatgctaatgttgcttggcaagatattgactttgctgtggatgagaatggattgtgggttatttattcaactgaagccagcactggtaacatggtgattagtaaactcaatgacaccacacttcaggtgctaaacacttggtataccaagcagtataaaccatctgcttctaacgccttcatggtatgtggggttctgtatgccacccgtactatggaacaccagaacagaagagattttttactattatggacacaaacacag

SEQ ID NO: 2405 - DNA, 501 bp, Homo sapiens
ggcggccagcctgtggatgggcgacctggaaccctacatggatgagaacttcatctccagagcctttgccaccatgggggagaccgtaatgagcgtcaaaattatccgaaaccgcctcactgggatcccagctggctactgctttgtagaatttgcagatttggccacagctgagaagtgtttgcataaaattaatgggaaacccccttccaggagccacacctgcgaaacgttttaaactgaactatgccacttacgggaaacaaccagataacagccctgagtattccctctttgtgggggacctgaccccggacgtggatgatggcatgctgtatgaattcttcgtcaaagtctacccctcctgtcggggaggcaaggtggttttggaccagacaggcgtgtctaagggttatgggtttgtgaaattcacagatgaactggaacagaagcgagccctgacggagtgccagggagcagtgggactggggtctaagcctg

SEQ ID NO: 2406 - DNA, 1444 bp, Homo sapiens
  misc_feature (1)...(1444): n = a,t,c or g
ttttgcttgcttttttttttgttttgttttgttttttttgcagttgtcagtcttcatgatccattctgtggcgagctgggaaaaaacgcagttgctaagtcaacgtctgaacagtgtgaggctcctgaatatctcccaggagtccctgcgcaactgtcctgagcatgagatcattgcacagagaagacagtccaccgcgcagcgctgactatctacagaggtctgagaggggcgcgtccctcttgtgtttcctctttttgccatggtaatactgattattggatttgccttgatgttgtttgtttgtcatcaaggaaccatggcttgtttgagttgtaccttggaagcctttgctggaagaacgaaagagccttgctgatccatgctgagatttgttggtgctgttggatgtgttagtggtttgggtgctttgccattttcccaactgcctgagaggactccaaggatacatcttgcgaccctactcggttcccagtggacggacggcaaagcagctgtttcggggttttgcatggtgttgcatcggaatctacatcactagagctggactgtgtggcagaagaggacgacactggacctgatgaagagtttgaagagtgtttactaagagattccgaggttttacttctacattttccaagggcttcattttcttcagatagattattattacatttatctaactgctgagtatctactatcaaggtaacaccatttccattgcatgaaggctcaggtctattcttcaagccccactgctttgatatccaatctctatatgtggcaacttcatctgttactctaattattctacctagtatgctttctgtttcattgttgggatagtactttgctattggtgatacagcatgactcaaaacaacgtaggcataatcaaaggcctgcttcacttgcatggccccatatgaactccttccaacatcgttacctggttgtaaaggatcttcgatataaagcattgatggcctgtagccatctagcatatttttctgtacttcatctttggccacatatgaaccaccatcctttatccggatgccagtctttaaataattgaagtgtcgtccatataattcaaaaaattctattaagagaacaccatagtttgtattggggatgcaagcatcttccctgggatgtaactgaaggaaactgactgccattaaaaagagactataagaaccaattccacctgtaaatacttcattaaggtccctctgcaataggaattgtttcaatactaaaaccaagtatggcaatacaggatatttcttggtaaaatctttgatgaggtcagctgctctcacgccattctgtacattaaagctgatatcaactttcacttcagtaaaagaatctgttaatttaataataggtacagttgctttgtctanaactttca

SEQ ID NO: 2407 - DNA, 332 bp, Homo sapiens
gaaggaagtagcctacgtccacgcctacaactgaagtctcttgacaaacacctcacccctgcctccgggatgaaagggggtaacctagacctgaatgggcttgaccatctcacaactgctcgcgtgacgaccgcattcgtggcaggtaagaagattgctgtatcaactcaagaaagcagtaacttcactgtctttgtattttgaattgcaacaacaactttgatatcaacaatgaagcaatgatatctaagaacaaaagagtatttgccaacagtcatcataatatcaagtgattgtataaggcagaaacaagctgtcacagacctgtgcgt

SEQ ID NO: 2408 - DNA, 697 bp, Homo sapiens
acctttcaagatctgtccttgccaattcctggcaaggaagaccttgctaagctgcattcatcaagtcatccaacttctatagtcaaagcaggatcatgtggcgacgatatgctccacaagggtggatagcttttttcatggaatatgtgaagaggtatgtatttattttctttgtattacatgattgttaaacctgctgtttctgctgtactggcagaacacttccttttttttctatcaatgatgtttcaggtttgttgtctcatgtgtccctagctggttttggggtccagtagtaaccttgcaagattgtcttgctgccttctttgccagagatgaactaaaaggtgacaatatgtacagttgtgaaaaatgcaaaaagctgagaaatggagtgaagttttgtaaagtacaaaactttcctgagattttgtgcatccaccttaaaagattcagacatgaactaatgttttccaccaaaatcagtacccatgtttcatttccgctagaaggcttggatcttcagccatttcttgctaaggatagtccagctcaaattgtgacatatgatcttctgtcagtcatttgccatcatggaactgcaagtagtaagtatataggtttaacagttgttcctagatttaaaaaaaaattaaaataagcctgggcgtggtggctcatacctgtaataccagcc

SEQ ID NO: 2409 - DNA, 646 bp, Homo sapiens
cccacaataccacctctgctaaagcttttcatttatcagtaagatctttcacaaagttaaagtatgacaagtaaatacacaggatgatattttctgtctgttgatctttggcacatttgtcaagttggagaatctcaaaaggcaataaaaatttctgactgttttgcacattcttttaatctttacatcaaaatataaggccgcaaaaaggcaagctgaaattttaggatatgtggaatagttttaatacagagttttacatacagtacccttacatatagaacaatgtgtttgcaaatttaaataatatctgaatgtacagtggcatgtattcttatcaaagataaattcaagtttactgtctatcagttctaaaatgcatttatacagattgcgagaactgataaacagaatgaggcataaaatattcaagtgttatgtcatcaaatagcctcctcttaacagtctttctccccttttaaaaaaatttcaaaacctatacatacatttttaatttttaaaaacagtctgttaaaaggtaacatttcatgttaaccaccaattcgtatagtctatagtaataaaactagatatgtgatataaatatgtgtagattatgtacatatgtacgttgagtgtttgttta

SEQ ID NO: 2410 - DNA, 2937 bp, Homo sapiens
  misc_feature (1)...(2937): n = a,t,c or g
gcgtgagcagccggaggatcgcggagtcccaatgaaacgggcagccatggccctccacagcccgcagtatatttttggagattttagccctgatgaattcaatcaattctttgtgactcctcgatcttcagttgagcttcctccatacagtggaacagttctgtgtggcacacaggctgtggataaactacctgatggacaagaatatcagagaattgagtttggtgtcgatgaagtcattgaacccagtgacactttgccgagaacccccagctacagtatttcaagcacactgaaccctcaggcccctgaatttattctcggttgtacagcttccaaaataacccctgatggtatcactaaagaagcaagctatggctccatcgactgccagtacccaggctctgccctcgctttggatggaagttctaatgtggaggcggaagttttggaaaatgatggtgtctcaggtggtcttggacaaagggagcgtaaaaagaagaaaaagcggccacctggatattacagctatttgaaagatggtggcgatgatagtatctccacagaagccctggtcaatggccatgccaattcagcagtcccgaacagtgtcagtgcagaggatgcagaatttatgggtgacatgcccccgtcagttacgcccaggacttgtaacagcccccagaactccacagactctgtcagtgacattgtgcctgacagtcctttccccggagcactcggcagtgacaccaggactgcagggcagccagaggggggccccggggctgattttggtcagtcctgcttccctgcagaggctggcagagacaccctgtcaaggacagctggggctcagccctgcgttggtaccgatactactgaaaaccttggagttgctaatggacaaatacttgaatcctcgggtgagggcacagctaccaacggggtggagttgcacaccacggaaagcatagacttggacccaaccaaacccgagagtgcatcacctcctgctgacggcacgggctctgcatcaggcacccttcctgtcagccagcccaagtcctgggccagcctctttcatgattctaagccctcttcctcctcgccggtggcctatgtggaaactaagtattcccctcccgccatatctcccctggtttctggaaagcaggttgaagtcaaagaagggcttgttccggtttcagaggatcctgtagccataaagattgcagagttgctggagaatgtaaccctaatccataaaccagtgtcgttgcaaccccgtgggctgatcaataaagggaactggtgctacattaatgctacactgcaggcattggttgcttgcccgccgatgtaccacctgatgaagttcattcctctgtattccaaagtgcaaaggccttgtacgtcaacacccatgatagacagctttgttcggctaatgaatgagttcactaatatgccagtacctccaaaaccccgacaagctcttggagataaaatcgtgagggatattcgccctggagctgcctttgagcccacatatatttacagactcctgacagttaacaagtcaagcctgtctgaaaagggtcgacaagaagatgctgaggaatacttaggcttcattctaaatggacttcatgaggaaatgttgaacctaaagaagcttctctcaccaagtaatgaaaaacttacgatttccaacggccccaaaaaccactcggtcaatgaagaagagcaggaagaacaaggtgaaggaagcgaggatgaatgggaacaagtgggcccccggaacaagacttccgtcacccgccaggcggattttgttcagactccaatcaccggcatttttggtggacacatcaggtctgtggtttaccagcagagttcaaaagaatctgccactttgcagccatttttcacgttgcagttggatatccagtcagacaagatacgcacagtccaggatgcactggagagcttggtggcaagagaatctgtccaaggttataccacaaaaaccaaacaagaggttgagataagtcgaagagtgactctggaaaaactccctcctgtcctcgtgctgcacctgaaacgattcgtttatgagaagactggtgggtgccagaagcttatcaaaaatattgaatatcctgtggacttggaaattagtaaagaactgctttctccaggggttaaaaataagaattttaaatgccaccgaacctatcggctctttgcagtggtctaccatcacggcaacagtgcgacgggcggccattacactacagacgtcttccagatcggtctgaatggctggctgcgcatcgatgaccagacagtcaaggtgatcaaccagtaccaggtggtgaaaccaactgctgaacgcacagcctacctcctgtattaccgccgagtggacctgctgtaaaccctgtgtgcgctgtgtgtgcgcccagtgcccgcttcgtaggacaccacctcacactcacttcccgcctctctttagtggctctttagagagaaactctttctccctttgcaaaaatgggctagaatgaaaaggagatgccttggggttcgtgcacaacacagcttctgttgactctaacttccaaatcaaaatcatttggttgaaacagactgttgcttgattttagggaaaatacacaaaaacccatattttcttggaaataatggctggattcctgagataagaaagtggggtttgatccccagtctcattgcttagtagaataaatcctggcaccaggnaacaacacttgtaaatttgtgaaaatgaattttatctttccttaaaaaagaaattttttaatccatcacacttttcttccctaccctttagtttttgataaatgataaaaatgagccagttatcaaagaagaactagttcttacttcaaa

SEQ ID NO: 2411 - DNA, 690 bp, Homo sapiens
tttaagagtccaagcatttattttattaccaaaaacaatttgttaataaacacgctcaatgcctccaatcctgtccctgaggataatcatgaaagtccttggggttgtagaggaaaccttaagaggaaaatggctacttggttatcaatgccttggctggtgacaaagaaaggacccttgcagggaccagtcacatgccatccttgggcctaaggagcccgaaagatgggaatggatgtgagctaaggatttaatcactgtcaagcagatcttgagggttatggttaagcctgataacagcctctttaacaagaacacacacatccaggatcccctcaaagaatccagagtcctcaggctccccacaaaatgtagtctggcagaaaagggaagtctttagagtctgcagaatgatgcaaacccaggccagagtggaccacactgctctcggcaccactcctaaaggcatccattggcaacggctgcccactaggggcactgccacttgcctggctcaaacttcaggacctggggaagaaatggtctggctctgcggccttcaaaccatctgggatctctggctcctcagctattccttgaagcttttccatgatgccccctgaaggtggctcaggggctggggggaggctcccctggggcttcagacagcacatagttagacaatttttt

SEQ ID NO: 2412 - DNA, 419 bp, Homo sapiens
ttgcggaattagatggaaaagatccggtgctttttatagttcaaacacagacaaatgctgttaagtctccaaaaatttgattagaagttggagtgctgagtgattttaagaacctgaaggcaacagcatttctaaacaattctttaaaaataaacttgttaggccacatcagcggttgtgcattaaatttcacaactcatggagaggaagaaaaaaagtcttgcttaactctaaacatacaagttttagaagaattttaatgaagtgcggctcccagaacaggaaaagccttatgttaaaacaattcagtccttgagtccttggctaacaactagattgaactacctacctgacttggaagtgaagtgtcctggaaaacatattttaaaaattttaacacttttctccccttgtagaaa

SEQ ID NO: 2413 - DNA, 1756 bp, Homo sapiens
acttttcccacattgtatgagattttccaaaattttggtgtgaattgggcacttttggaaaactcctgaaaaagaattagtttccttcatctgcagacctttgtccaatacggttaccatttctttatagtaactcgattagccatatatgtttgtttctagtcctgctcctttgctcctctcctatgccttcccagtgctggctccattttgaagactcaaggacagaggggaagcagatcataaagagaaaaaggagacagaagaaaggatgaaggaaggaggtcatggggagtgtggcttctgagcagtttagttgctggggagagcagacagtcactgcctacaatacagacagaaccttcctgctcactttctgtcctatctcttcctgaccttatgaaccagtgttagtagatgattaaaacatgacaagcaatggctcccttattttcacaggactaagtccgggccttcgtatcactagctgttgcccttttacaccctgcttcagccaccctgtccctgtcattggccctggacttcctctctgtgcccgtgtgtcctctgcctgggagccctctcctcccatagtcactttctctctgccaaactcatttcttcttgtgcccaagacctctctcctgagcccctgtggaaacttcaggaaggatgaatccgtctttgtgctccacggctcgtaccttgatcaggctgtgcatcacagtaattccgttctaggtaggcagagttgatctttgtctcatctgccaggctgcgggctcttcaagggcagggaccttgtcatagtcatttttattttcacagtgcttggaacatggtggaaaatgaatgttggaattattggagtaatataatttgtatcaaatgtccttttgaattaagagatttagttatgtttactaagaatgtaaactttgaattggtttgcattttaacaattaggatggtttattgatgtgaattttgaaatgtagaggtataatgttaaattattttatactttatggaaatcaagtgaaatgtttgaaaaaatgccgccattatcctctggtattttctactctctggaattatgtgctgtaaatgatcggctgtaaatgtgaggcacaccacccacccctgtgtgggaaagtgttgtgggcgcttcctgccacccacccacctctctgccgttgctccttgtgacacttgtctgtcgtctcccatccaaactccaagcttacagctacctcagtactgctttgcttgtctgaaacacctcctttgccttccttcagtgtcccgctcaggtgcaagcctcctccctaaagctcatctcagcttttgatctgaatgatgatggaaacatgcagacagcctctcagtcttactatttaatgttgtagctgggaaaaaacccagagaggttaactgatatactgggttgggactaggatgtgggttttgtgactctgaatcccatgttctcaaactacgctgccttccgaagtctggcatttgttagctcatgcttccttgtagtccagcttcttatgtgcctgttatattctccagtaagattgtaagccccttaagggcagggacgtctttgcatctctagcactgctatagtgttctatccttagttatgaactagataaataaatggtggtggcaacaatcctagtttcctaactcagattgtttcacgataaacacagttttgtatggcatgcttggccataatgtctgg

SEQ ID NO: 2414 - DNA, 967 bp, Homo sapiens
gtcgacttttttttttttttgaaaaggtatctggtttatttaggttgctgtgatctccctgagaaataagagtcagtatagaccaacactgtccaaccaatagaactttctgccatgatggcatatcctgtagctgcactgtcccctcatgtggctgtctgaacacttgaatgactaatgtgactgagaaactgagcttttaatcttaattaacttaaatttaagtttagccacatgtatttagtggctactgtactggacagtgcaggtctagctagaccagtggttctcaattgaggggcaattttcccccacaggataacatttggccaaggtctgggaggatatttttgggttgtcacaactgggggagtgcttctgatgtctagtgggcagaggccagggatgctgctgagcaccctaccatacaccagacagccccacaacaaagaattatcttggccccaaatgtcaagtacgagtttgagaaaccctggtctagactgtctagcacctgccttttgacaaggacagaccctcaactgcagcctgggaactgggattggccaaaggtcctgggctgccctcaggaagacagatgggtccagaggcctcagggaagtccctaagccctttattccatcagccaaacaacacgcattactggggcatgtgctgagcttgtgccagtgccaggacaggacagagacggatcctatcctgtgaaggggctgcctgctctccctccttccagggtccttcaaggatcttggcagggggatgggaggttggtgcagggagcactaaaggtcctagcagccattcataagtccatctatgtctccagccccacatggtatcagccgcttccctcatcctcataggcgatggcaatccctcgtcttccactcacagcttctgtcactggcgtctgacccaggcggggctccagcccttgccagctccc

SEQ ID NO: 2415 - DNA, 459 bp, Homo sapiens
  misc_feature (1)...(459): n = a,t,c or g
ataaaatctttaaatgcccatttgagagggtattatgctgatatcttaactgagatcctttgtgggcaaaacaagtgttcctcattttttaactgtgaataacatcttgcatctgaaaattagaaaataagaggtttcaggttctctctgctaaatccggtttagctactaagaagtgccaaatcatagaactgactctgtgctctgggtggtgtggctttctctgcccttcagagattccaggtcagggttccaggttggcttcctaagtagaaatccatttgtcaaaaccagacaccctcagttagtgaatgtttagggcatgggtttctgcccatgcatagggaaaggtcttcccaagtggggcagggctccacaaagaggaggatgggccttggaggctggctgacatcctgctttatacctgacatcttgcaggcagaaccnaaagcncaaccg

SEQ ID NO: 2416 - DNA, 1355 bp, Homo sapiens
ctagtctcgagttttttttttttttttttctgtctctgtgtttgaagtttcagtttctgttttctaggtaaggcttatttttgattagcagtcaatggcaaagaaaaagtaaatcaaagatgacttcttttcaaaatgtattgtttagcacttaactcagatgaatttataaattattaatcttgatactaaggatttgttacttttttgcatattaggttaatttttaccttacatgtgagagtcttaccactaagccattctgtctctgtactgttgggaagttttggaaacccctgccagtgatctggtgatgatctgatgatttatttaaagagccgttgatgcctccaggaaacttaagtattttattaatatatatataggaatttttttttattttgctttgtctttctctcccttcttttatcctcatgttcattcttcaaaccagtgttttggaagtatgcatgcaggcctataaatgaaaaacacaattctttatgtgtatagcatgtgtattaatgtctaactacatacgcaaaaacttcctttacagaggttcggactaacatttcacatgcacatttcaaaacaagatgtgtcatgaaaacagcccctttacctgccaagacaagcagggctatatttcagtgacagctgatatttgttttgaaagtgaatctcataatatatatatgtattacacattattatgactagaagtatgtaagaaatgatcagaacaaaagaaaatttctattttcatgcaaatatttttcatcagtcatcactctcaaatataaattaaaatataacactcctggaatgcctgaggcacgatctggattttaaatgtgtggtattcattgaaaagaagctctccacccacttggtatttcaagaaaatttaaaacgatcccaaggaaagatgatttgtatgttaaagtgactgcacaagtaaaagtccaatgttgtgtgcatgaaaaggattccttggttatgtgcagggaatcatctcacatgctgtttttcctatttggtttgagaaacaggctgacactattctctttgattagaaaataaactcataaaactcataatgttgatataatcaagatgtaaccactataaatatgtagaagaggaagttttaaaagaccttaagctggcattgtgaaggaacaccatgggtagactccttttggtaatggaatttggtatttaatggaatgcagtataaaggttggtgaagtgtaatataattgtgtaaacaaatcctgttaatagagagatgtacagaatcgttttgtactgtatcttgaaacttgtgaaataaagattccacctctggt

SEQ ID NO: 2417 - DNA, 3189 bp, Homo sapiens
acaaggtctgtttcttttcccttaagaaccacaaaagtgctaattttccctttacaaatgttacataaaatcttgattacaaaactactcaacaacttaatcctaccatccatacaattatatgttccttttcagcaaggtcaaaagccaacgatgtagtccctttgtacactagagattctttacataatagaagttcacagactgaaatatcattgctgcagtctttggagaacagaactggtccatttctgtgaatcctttttgcacggacaagactcaagactggctaggtgaaaactggtggcagggaccccagccctcctgttaactttcaggaccacctacttcatcatcaagtctgagaggctgaggttcggtcagcagcagctccgctttggctctgatcatacagtttttagtaatctttcctgaaaaacactggctttctctggaaaagcttcctcagctggaagctttactccctcctcgacagaaagtgaggattacagatgacatggctcaggtattcgtggacggcgtgttccagaggcgcggggcgccgccgctgcagctgccgcgcgtgtgcacattcaggttcccgagcacaaacatcaagataacgttcactgccctgtccagcgagaagagagagaagcaggaggcgtctgagtctccagtgaaggccgtacagccacacatctcgcccctgaccatcaacattccagacaccatggcccacctcatcagccctctgccctcccccacgggaaccatcagcgctgcaaactcctgcccctccagcccccggggagcggggtcttcagggtacaaggtgggccgagtgatgccatctgacctcaatttaatggctgacaactcacagcctgaaaatgaaaaggaagcttcaggtggagacagcccgaaggatgattcaaagccgccttactcctacgcgcagctgatagttcaggcgattacgatggctcccgacaaacagctcaccctgaacgggatttatacacacatcactaaaaattatccctactacaggactgcggacaagggctggcagaattcaattcgccacaatctctctctgaatcgttatttcatcaaagtgccgcgttcccaggaagaaccaggcaaaggctcgttctggaggatagacccagcctctgaaagcaaattaatagaacaggcttttaggaaacgacggcctaggggcgtgccctgctttagaacccctctgggaccgctctcttctaggagtgccccagcctctcccaatcacgcgggagtgctgtctgctcactctagtggcgcccagacccctgagagcctgtcgagggaaggttcgccggcccccctggagcctgagcctggcgctgcacagcccaaactcgctgtcatccaggaagcccggtttgcccagagcgccccagggtcacctctgtccagtcagccagtcttaatcaccgtccagcggcagctaccacaggccatcaagcctgtcacctacactgtggccaccccagtgaccacctcgacctcccagccacccgtcgtgcagacggttcacgtcgtccaccagatcccagcggtgtcggtcaccagtgtggccggactggccccagcgaacacgtacactgtctctggacaagctgtggtcaccccggcagccgtgctggcccctcctaaggcagaggcccaggagaatggagaccacagggaagtcaaagtgaaagtagagcctattcccgccattggccacgccacgctcggcactgccagccggatcattcagacggcacagaccaccccggtccagacggtgaccatagtacaacaggcacctctaggtcaacaccagctaccaataaaaactgtaacacaaaacggcactcacgtggcatcagtccccactgcggtccacggccaggtgaacaatgccgcggcgagtcctttgcacatgttggcaacacacgcatccgcatcggcctccctgcccacaaagcgccacaacggtgaccagccggagcagccggagctgaagcggatcaagacagaagacggcgagggcatcgtcattgccctgagcgtggacacgccaccggcagccgtaagggaaaagggtgtccagaactagcgaccgggagagcttttctttaacgatatcaactctgtggtgccaaaaggagacgcggcctcccgccagcactcgggggtgcagggccctgtggttggacttcacctctcagcactgaaaacccaaaacccagctggccttaacactccttaaagacagaagtcacacttgaacaaaacccacacacaacaaaacctgatttgggagacggtgtctccactgagcacctgctgggctgagcttctacctacgagtgaaactctgtcctcccgcgaggaccaggcatcgctgtgtgaggacggcacggccagcgcctgctgtgagtgggtctcccaagactaggcctcaggacgcggggggagccatccccgccgccctcacaggacccaccaggcagcggagacatgtggaattagagtattttgaggtgtcctttctttacaaaataatggggtcttgggcatttcacatcactccatttctactgagactttcagaatcacacaggccctttccgtggatttcatttggggcaaagaaacaacatagttttgtttttgttttcagcctatggaatgatttccttttgtctgtcttgttcaagttcagacgaagctactctggcatctgcacatttccgtgttaacagcagctgccctgatgaattttatccacctccatttccagcatgtgggctcccgtggaacaggtggacggacgctgtggccgcatggaaccttgagaaccccagggacgagccagtgccgggaaggaactgccgggactcaccgagctgcacttaactgttctctttctggctattttttgttgtttgtttcctttgtgttgactttgtccctgggcaaaattttccactctgagtaaaacaagtctcctaagtattgtgtatgtttaaaacgacagaaccatttctacttcatttggaaaaagattcagtcttttatcacaggcccttttgaaactcagatcccaggtctctccgtggtatgtttgtatttggggtgtcctccggctctagg

SEQ ID NO: 2418 - DNA, 393 bp, Homo sapiens
ggaggaaggatggtgggagagagcccaggggatagctaccactgcagggagggggaagaagagcaggggtaggcgagaggaggaggagaaggaggaggaggaaaaggaggaggcaagaggaggaggaggaggaggaaagagaagtatcatatgacacttcctttgtcctttgagtctgtttgctcatgaagaacaaagattatggaacatgattctcaaatttgttcaggtatgctgttcttgatgacatgccatgaacttttgatgtgttttattttatcctgcaaataaaaacattctaccagcaaaaatggatgcaaactcaagtttcaagtgggagcccatgtgcccataaaaaaataaagttgctgaattaagtatgattagtctgcc

SEQ ID NO: 2419 - DNA, 1853 bp, Homo sapiens
ttttttattttttttttttcaagctttgtctgctttatttcactacattaagttaagcaataaggcaaaacagtaacctgtcattcataaagatcaaggagtacctctctgtcccaaaagggaccaaaaagggtgtttcttcacaaatatgcatgacacttagctcattatgctgataagcacttcaaacaaaagaaaaggtcagtaggtgaatcaagtaacaaatccaaattaacttagcctaagtttccaaagctgtagtttcaagtgctaatgggatctaactttcctgtggtggtgcatactgactagcattaaaatttttgcacctcatctaatataaaaaaggcaacaaatacaattcctaattcaccagctgcaggtattgaatcatttctacgaacacacagaatactagcttacactaaaacctatcttgaggaaacattaaaccagtggctctattattctgcaagttagtttggcttctgaagaaaaaagtttatgatcaaagtgttttgtgtttctgtgtatgggaatgatgagacccatacttcaacattattactttggggaataaataccagctacctgccataaacgcatgacatgtgtgtagtctatgcaaacgtgtaaacatatgaagctattctctactctatgcccatttcctccactggcaaatatggagcagtgatttcacagtaggctctagcaggtagtgaaataaaaatttgagactctgtggggtcacaaaaaaatgaaactctttctatagtctgcaaatctgtaattacccatccccctgctccaactcctaagaggctaaatgttattaccataatgttagagatgagtattttccttcttacactgcatcacatatattactctgtaggactgtttcataaaattggcttgacctttgtacaattagtacaatttagtgtcttttagagtacaatttagtgtcttttaaaagcttcctaaatatttaaaacattttcaagggaagcttacaaggactatgtccccatctgtattctacattataatgttatctttaattttttaagactttaaaacaagaccaaggtaaacaaaaaatctgtattttcctcaagtctcttggccacttactaacaatacttttacagaaaacacggtgcagctggtggtctactttatcaagtttcattttagaaaacatcatagaaattaaggttagcaacccaactccaggataccaagtgaaaacagcaagtctgctgttaggccagaactgtgggctacttgctgaactattttatggtttacaatcaaaatggtcttatttgactcaccacatgacaaaagtcttaaacttagtaagggggaaagttcttaatatccagttttggattcaagagattataatagttaatttccccttcaaatcaatggaaagaatgctagttgagaatattctaaaaatctagcctttaaaatgttttctgcattccagaaatgaacctgtccactcaggttttctttgggttcttttccaggtcccaaacagaacaacttaactgagttaaagaggcagaacagggaaggggtaggaagtaagacaaataaagattgcccccctgtggcagcattaatccctgggtattgtggcaatattgaaaacgaatggaatctgctacccccttgacatgacatgtaattgtttgcttctcaaattcttcttaaaagatccatattttactgggaaaaaaattaagaacaactaatacgtgtcctgtattcacttagaaaaagagggcaaatgagagtgccttaacaacttcacaggtttttccaatcatcat

SEQ ID NO: 2420 - DNA, 1402 bp, Homo sapiens
ccgcctccttgccgcccagccggtccaggcctctgggaatcatggcgcttgtcccctgccaggtgctgcggatggcaatcctgctgtcttactgctctatcctgtgtaactacaaggccatcgaaatgccctcacaccagacctacggagggagctggaaattcctgacgttcattgatctggttatccagggctgtcttttttggcatctgtgtgctgactgatctttccagtcttctgactcgaggaagtgggaaccaggagcaagagaggcagctcaagaagctcatctctctccgggactggatgttagctgtgttggcctttcctgttggggtttttgttgtagcagtgttctggatcatttatgcctatgacagagagatgatatacccgaaggctgctggataattttatcccaggggtggctgaatcacggaatgcacacgacggttctgccctttatattaatcgagatgaggacatcgcaccatcagtatcccagcaggagcagcggacttaccgccatatgtaccttctctgttggctatatattatgggtgtgctgggtgcatcatgtaactgggcatgtgggtgtaccctttcctgggaacacattggcccagggagccagaatcatcttctttgggtctacaaccatcttaatgaacttcctgtacctgctgggagaagttctgaacaactatatctgggatacacagaaaagtatggaagaagagaaagaaaagcctaaattggaatgagatccaagtctaaacgcaagagctagattgagccgccattgaagactccttcccctcgggcattggcagtgggggagaaaaggcttcaaaggaacttggtggcatcagcacccccctcccccaatgaggacaccttttatatataaatatgtataaacatagaatacagttgtttccaaaagaactcaccctcactgtgtgttaaagaattcttcccaaagtcattactgataataacattttttccttttctagttttaaaaccagaattggaccttggatttttattttggcaattgtaactccatctaatcaagaaagaataaaagtttattgcacttctttttgagaaatatgttaaagtcaaaggggcatatatagagtaagggcttttgtgtatttaatcctaaaggtggctgtaatcatgaacctaggccaccatggggacctgagagggaaggggacagatgtttctcattgcataatgtcacagttgcctcaaatgagcaccatttgtaataatgatgtcaatttcatgaaaagcctgagtgtattgcatctcttgatttaatcatgtgaaacttttcctagatgcaaatgctgactaataaagacaaagccaccctgaaaaaaaaaaa

SEQ ID NO: 2421 - DNA, 335 bp, Homo sapiens
tgctatttatcattgtagacaaattctgttgcctttcagcaacgtatgctgaactagtatcataagatggtgcatcagttcataagctagtgcataagttttgtgtcaaaacttttaaatcctgaagttctgcagttatcatcttagttattttctatctaattaggcttataattgcaaacactagtcagcttgtggatctctgtgtttcaagttcttttccttcacgaggttcagtacctgctatgttgatctttggcagtgccagcaggttaaattttgacctgctcaattaaaaataaacactggcgtttataatgaaaaggtttttttgt

SEQ ID NO: 2422 - DNA, 423 bp, Homo sapiens
gcggcacgagaactggaaagaaagattgaaacagagttgtgaaattattcagagtactccctatgggcgccccgcaaatattagtgggagtacctcatcacaaagaatttatatcacttaccgaagagcctctgaaaacatgactcagaatacgttggctgtcactgacatatgtattattatacccagtaaaggagaaagcccaccacacacgttctgcaaagtcgacaagaatctcaataacagtatgtggggatcagcagtatacttgtgttataaaaaatcggtggcaaagacgaacactgtatcttacaaagctggcctaatttgtagatatcctcaagaagattatgagtcattctcactaccggaatctgttcctctattttggttaccaatgggtgcaaccattgaatggtggcc

SEQ ID NO: 2423 - DNA, 1143 bp, Homo sapiens
agaggcttttacccatttcccccttaaatcgtgaaggcttccccttccactttttggccagcacccaacttttgcaactatgggcatttgtactttcacaaccttttgtgctaggtagatgcctgtgactttttaacttggggggtggggggattgcaaatgaaggaactttttacatggatctttttaatctcagttggaacgcgggaggggggaacttggttcttgggtcacacaagctctatcccaaagcaaaatccaaatgttaataatattagcctgatgcagataccaaagataatttctttcctgcagaaccttagactcgtgtattaagtacgattacccagcacttgcattagtctaacctcagtaattccaaagcttagatgtatattttggtatatttctgggatattaaaaaaaatgtcgtttaacttcttgtttgtttcagtgtaatgctcttaaagtcatagcatgaaaataattgaactgtcctattcttagtagtttgaaataatagtatttttgtatgttttgggtgtgtctatgtatgtattaacataacagttttcactgcctaggtgttcataataaaaaagaaaatgaaaaaagttctgagtgtacataatattcaataataatctcccaccaggtgtcaatttagattgcatattcctcattactgttcccaactgggattttgttttcttttaaagagacagtgatcgtgtttttctaaagatgttttttttctctctttcaatatcttaactcactttttttttcttccttttttgtcttaattattaattcaggggtgtttgtccactgttgtcaaacgaggggcacaaggggaattggcccccgctacctagaactttttgttttatgtactttaaaatgtgagtttgagttcttctttgtggaaacttaagatgtggtgtaaatgattctttccaaaattgtccagcagcttgaatgaggcagtgacaattctgaggtggtttattgggagtccttctacatttctcttagataactctgcactctgggtggctattgtgtagccttactgccccagagtgcctgttagccaaatatttcccctctgataggaatattttctaagaatcagctgat

SEQ ID NO: 2424 - DNA, 485 bp, Homo sapiens
gctgtcccagtctcatcctgccccccctccctcctaactccgctgtcacttctctcctcttggtccctagaagtgagagtcctgaggcacaggaagagcaccaagtctttcaacatgatgtccccgacgggcgacaactcggagctactggctgagattaaggcaggcaagagcctgaagccgacgccccagagcaaggggctgaccacagtgttctcaggcatcgggcagccggccttccagcccgattcgccgctgccttctgtgtcacctgcactgtcaccagtccggagccccacaccgccagctgcggggtttcagccgctgctcaatggaagcttggttcccgtgccgcccactactcctgcgccgggagtgcagctggacgtggaggctctcatccccacgcacgatgagcagggccggcccatccccgagtggaagcgccaggtgatggtgcgcaagatgcagctgaagactgcagg

SEQ ID NO: 2425 - DNA, 1162 bp, Homo sapiens
ggggcagaggttgggaagatggcgtggcgaggctgggcgcagagaggctggggctgcggccaggcgtggggtgcgtcggtgggcggccgcagctgcgaggagctcactgcggtcctaaccccgccgcagctcctcggacgcaggtttaacttctttattcaacaaaaatgcggattcagaaaagcacccaggaaggttgaacctcgaagatcagacccagggacaagtggtgaagcatacaagagaagtgctttgattcctcctgtggaagaaacagtcttttatccttctccctatcctataaggagtctcataaaacctttattttttactgttgggtttacaggctgtgcatttggatcagctgctatttggcaatatgaatcactgaaatccagggtccagagttattttgatggtataaaagctgattggttggatagcataagaccacaaaaagaaggagacttcagaaaggagattaacaagtggtggaataacctaagtgatggccagcggactggtgacaggtattatagctgcaaatgtccttgtattctgtttatggagagtaccttctctgcagcggacaatgatcagatatttcacatcgaatccagcctcaaaggtcctttgttctccaatgttgctgtcaacattcagtcacttctccttatttcacatggcagcaaatatgtatgttttgtggagcttctcttccagcatagtgaacattctgggtcaagagcagttcatggcagtgtacctatctgcaggtgttatttccaattttgtcagttacgtgggtaaagttgccacaggaagatatggaccatcacttggtgcatctggtgccatcatgacagtcctcgcagctgtctgcactaagatcccagaagggaggcttgccattattttccttccgatgttcacgttcacagcagggaatgccctgaaagccattatcgccatggatacagcaggaatgatcctgggatggaaattttttgatcatgcggcacatcttgggggagctctttttggaatatggtatgttacttacggtcatgaactgatttggaagaacagggagccgctagtgaaaatctggcatgaaataaggactaatggccccaaaaaaggaggtggctctaagtaaact

SEQ ID NO: 2426 - DNA, 1361 bp, Homo sapiens
tcggagcctgcggagggtggtggtggtggtggtggtggccctcgcccgcctcactcatgcctcctcctcctctgctctcgctcaggcgcctcggtggcggttggtcggcggttacgcggctggtggtcgcggcggccggggctcgctctcggggaggccggggcggatctcgcggcgcaggcggcggcggccgaggtggggtcgcgcggcggaggcggctcgagcttcgtgctgcgcgctcgctcttgggctcctcgctgcaggaggagtgtgactatgtgcagatgatcgaggtgcagcacaagcagtgcctggaggaggcccagctggagaatgagacaataggctgcagcaagatgtgggacaacctcacctgctggccagccacccctcggggccaggtagttgtcttggcctgtcccctcatcttcaagctcttctcctccattcaaggccgcaatgtaagccgcagctgcaccgacgaaggctggacgcacctggagcctggcccgtaccccattgcctgtggtttggatgacaaggcagcgagtttggatgagcagcagaccatgttctacggttctgtgaagaccggctacaccattggctacggcctgtccctcgccacccttctggtcgccacagctatcctgagcctgttcaggaagctccactgcacgcggaactacatccacatgcacctcttcatatccttcatcctgagggctgccgctgtcttcatcaaagacttggccctcttcgacagcggggagtcggaccagtgctccgagggctcggtgggctgtaaggcagccatggtctttttccaatattgtgtcatggctaacttcttctggctgctggtggagggcctctacctgtacaccctgcttgccgtctccttcttctctgagcggaagtacttctgggggtacatactcatcggctggggggtacccagcacattcaccatggtgtggaccatcgccaggatccattttgaggattatggtctgctcaggtgctgggacaccatcaactcctcactgtggtggatcataaagggccccatcctcacctccatcttggtaaacttcatcctgtttatttgcatcatccgaatcctgcttcagaaactgcggcccccagatatcaggaagagtgacagcagtccatactcaaggctagccaggtccacactcctgctgatccccctgtttggagtacactacatcatgttcgccttctttccggacaattttaagcctgaagtgaagatggtctttgagctcgtcgtggggtctttccagggttttgtggtggctatcctctactgcttcctcaatggtgaggtgcaggcg

SEQ ID NO: 2427 - DNA, 400 bp, Homo sapiens
gatttttttaaccttagtgccttccgcccacagaaacaaggtacataggcattagagcacatgttactatgagtagttggaaatgcagcagttattttatgtctgtgtttctggacacctttcttaacaaatcataactgcgtttaatagttacgtggtggtctgtgacttcgttgttcaacaaaatcgtttgtgtgcatttcagagacaacgtgtcctaattttgcctcccaaaagtggttctctacaatagataaaaccaatgggagccaaaaggcaaggcattagaattattctgtgtttatcctcaagatgttgttattagcatcatcaagattcagacaaaattctacagattaaattattaaatctcctgcaacccatcttaggacagctttca

SEQ ID NO: 2428 - DNA, 641 bp, Homo sapiens
ggtatgaggaagagagaaacaattagaagttctctgtcacacaatctacacactaccaggaagttattctagaaaaaataacgttctctaaaacgaaccatgcaatctgacacccgtcttccacctctcagggaagagaaacttcaaaggcaggaggcagggccaatgcatgatgtgttctattgtcccaaggagacctgcctgagccttgaccctagtttctgatggctttccgtgttgagtgtagcctaagaagcagaaactgaatctactggaacctttctgaatagggtttatttaatcacatgcactgtttcctgtttaaagcatttcccaaaatggcatagcacctcctctccaatggtggtcaaattgcgatgtgtacccttgggggaacttgaagaatttctatgatgtacatgggcaggaacagcttgaaaggaccaatttctgagtctcagcttccatttgcactccgtaaaattgacctacctgggaatgtgtctatggtctgctagtattccagtcccccttctcctagcatacaaaataaggcagacttctcacccatcccaaaacttttatgttgtgtagggtgcaggggtgaggggctgtacaaactccctgaaacgcttgagagg

SEQ ID NO: 2429 - DNA, 534 bp, Homo sapiens
aatgctttgaaatgatttattcacctgggaaagtgatcacaacttgctgctaattaaaaccaacaatagaacagtgagtacaattgaagtccatcattgttattatcataaatatgcacccaacaaaaaacaaactaaaagaaaatacactcaaaagcacacagtgggcacattttgtctttgggtagtggaagtgtaggtaatgtcagtgtttggggtttttctttgaatttttaagctgttttagaaataagttttgttattaggaaaattatttttaaagaaatatacatctgagggaaaagagaacaaaggcatgataaataaggggtccttggttggagatgatgcatccagaacattttggataaataagctactttgagttaagggccttctcggcctcctacatcaacacagaatctcaccccaccctcctagtagacactttcctcccagccccctatcagctacaaatactgtcagcttacacagcaggcactattattattattatgtgttctttttgctgac

SEQ ID NO: 2430 - DNA, 310 bp, Homo sapiens
gctataatgaatttgttcaattatctcttaggatgttgtcctcatgtacatggttaaagtcagacacatctttcaattcggaggaagagggaaatttcaagcaaaagtggagggaaggcaatttccttttaagcaaatagtgaggaagttgcatacatcacttttattcacattccattgacaaaaattttgtccatggccacacttagctgcaagggaactaggaaataattgtctgaaactcagcagccatgtgccgtgttaaaattattatatttatggaaccaggagaaaactttttttttttttt

SEQ ID NO: 2431 - DNA, 263 bp, Homo sapiens
gagcagatgagcttgctcaggatcagggccaccactcaggggaataaagctctagggacctcccctttttaggagtgtaggttcccaagatctccctcctaaatgaagtggccgctgctcactccagggaaaacgaatcttgttaccacatccaccacggatggctagaacaggggaccggtaccgcatagcaggaggtgagcagagggcggataagcattaccgccgagcattctgccccctcagatcagcgggggcattag

SEQ ID NO: 2432 - DNA, 734 bp, Homo sapiens
tgtggagcaacatgctgttttaatcagtgcctgggtgctggcgggctgaggcctaaaatggcgtccacatcaagtgatgataggacaaaggttttatagtctcctgtaaacaggaagtgtcctggtctgacgtaactgctacattgttcccagatagcttctttcttgatcttcaggggtacgtgtcttccagccagagtaggtgtcttctggccggcccttttcatgcttctgctatcttgccggcgcacgctgctggtgcacactgctgacacaagtggcccttgcgccttgggactgggcctgagaagggaggagttattcatctccttaagctttcaggccccgggagaatcttacattcctgtctatttggttatagaaaagggaaaagggatgactttctcaataactacttcaggtgtgacataggggtggcgtgggcaccttggaaaaagaaaaccttaattttttgggtatgcttgagagacgggctggtgtccaccatgtcgttgtatcaggagcatcatctggattgtctggaaacacatctgtgcctgcaagacagttatgttgagaggacaaggcggtgtggacagggagaggcatggcctcatttgctgcttcacaaatgaaagaccctgtctggattaaggagggaaggtaattcctgaagggctcagagtctggtaagggtagaggccccaagacaaaagttcagccatacatgattg

SEQ ID NO: 2433 - DNA, 377 bp, Homo sapiens
  misc_feature (1)...(377): n = a,t,c or g
gtatgaactttctagaacatacatacgatggatgatagatatcatgccagtccagttacccaccgggacagttggtttcttcgtgcatagcctaagccctcagtcacttagattgtaatgcacaaactttnnnnnnnnnnnnnnnnnnnnnnnnnnnnnnnnnnnnnnnnnnnnnnnnnnnnnnnnnnnnnncagccatanacaccccgangtaaatatcaagggaaagtgaggatatgncanacatcggagaaagcaaatanntcctcaaaaaaaaaaantnccntcanttcanggntgataaanngtgacctaaaagcatttgctgctgttgtgccgtanagctgtgtgaggacaancacngtgtgacnaaaatc

SEQ ID NO: 2434 - DNA, 2661 bp, Homo sapiens
cctgggattgatggagttaaaggtgacaaaggaaatccaggctggccaggagcacccggtgtcccagggcccaagggagaccctggattccagggcatgcctggtattggtggctctccaggaatcacaggctctaagggtgatatggggcctccaggagttccaggatttcaaggtccaaaaggtcttcctggcctccagggaattaaaggtgatcaaggcgatcaaggcgtcccgggagctaaaggtctcccgggtcctcctggccccccaggtccttacgacatcatcaaaggggagcccgggctccctggtcctgagggccccccagggctgaaagggcttcagggactgccaggcccgaaaggccagcaaggtgttacaggattggtgggtatacctggacctccaggtattcctgggtttgacggtgcccctggccagaaaggagagatgggacctgccgggcctactggtccaagaggatttccaggtccaccaggccccgatgggttgccaggatccatggggcctccaggcaccccatctgttgatcacggcttccttgtgaccaggcatagtcaaacaatagatgacccacagtgtccttctgggaccaaaattctttaccacgggtactctttgctctacgtgcaaggcaatgaacgggcccatggccaggacttgggcacggccggcagctgcctgcgcaagttcagcacaatgcccttcctgttctgcaatattaacaacgtgtgcaactttgcatcacgaaatgactactcgtactggctgtccacccctgagcccatgcccatgtcaatggcacccatcacgggggaaaacataagaccatttattagtaggtgtgctgtgtgtgaggcgcctgccatggtgatggccgtgcacagccagaccattcagatcccaccgtggccccagcgggtggtcctcgctgtggatcggctactcttttgtgatgcacaccagcgctggtgcagaaggctctggccaagccctggcgtcccccggctcctgcctggaggagtttagaagtgcgccattcatcgagtgtcacggccgtgggacctgcaattactacgcaaacgcttacagcttttggctcgccaccatagagaggagcgagatgttcaagaagcctacgcccgtccaccttgaaggcaggggagctgcgcacgcacgtcagccgctgccaagtctgtatgagaagaacataatgaagcctgactcagctaatgtcacaacatggtgctacttcttcttctttttgttaacagcaacgaaccctagaaatatatcctgtgtacctcactgtccaatatgaaaaccgtaaagtgccttataggaatttgcgtaactaacacaccctgcttcattgacctctacttgctgaaggagaaaaagacagcgataagctttcaatagtggcataccaaatggcacttttgatgaaataaaatatcaatattttctgcaatccaatgcactgatgtgtgaagtgagaactccatcagaaaaccaaagggtgctaggaggtgtgggtgccttccatactgtttgccccattttcattcttgtattataattaattttctacccccagagataaatgtttgtttatatcactgtctagctgtttcaaaatttaggtcccttggtctgtacaaataatagcaatgtaaaaatggttttttgaacctccaaatggaattacagactcagtagccatatcttccaaccccccagtataaatttctgtctttctgctatgtgtggtactttgcagctgcttttgcagaaatcacaattttcctgtggaataaagatggtccaaaaatagtcaaaaattaaatatatatatatattagtaatttatatagatgtcagcaattaggcagatcaaggtttagtttaacttccactgttaaaataaagcttacatagttttcttcctttgaaagactgtgctgtcctttaacataggtttttaaagactaggatattgaatgtgaaacatccgttttcattgttcacttctaaaccaaaaattatgtgttgccaaaaccaaacccaggttcatgaatatggtgtctattatagtgaaacatgtactttgagcttattgtttttattctgtattaaatattttccagggttttaaacactaatcacaaactgaatgacttgacttcaaaagcaacaaccttaaaggcccgtcatttccattaggtattccctcattctgcatccctggcttgaaaaacagctctgttggaatcacagtatccagtattttcacacggtaagcacattcggggccatttccgtggtttctcatgagctgtgttcacagaccctcagcagggcatcgcatggaccgcaggagggcagattcggaccactaggcctgaaatgacatttcactaaaagtctccaaaacatttctaagactactaaggccttttatgtaatttctttaaatgtgtatttcttaagaattcaaatttgtaataaaactatttgtataaaaattaagcttttattaatttgttgctagtattgccacagacgcattaaaagaaacttactgcacaagctgctaataaatttgtaagctttgcataaaaaaaaaaaaaaaaa

SEQ ID NO: 2435 - DNA, 685 bp, Homo sapiens
gagccactttcccgtccctccactgtggagctgcgttcctgtgagggaggaggccctctgtggtggcgagggtgagctgagcggacgccgccgagtcgaataagaataaaagattctggaggagttggagaagagtgtattcagcccccaaaccacgagatcaacaaagaaatgcacaattttgaggaagagttaacttgtcccatatgttatagtatttttgaagatcctcgtgtactgccatgctctcatacattttgtagaaattgtttggaaaacattcttcaggcatctggtaacttttatatatggagacctttacgaattccactcaagtgccctaattgcagaagtattactgaaattgctccaactggcattgaatctttacctgttaattttgcactaagggctattattgaaaagtaccagcaagaagaccatccagatattgtcacctgccctgaacattacaggcaaccattaaatgtttactgtctattagataaaaaattagtttgtggtcattgccttaccataggtcaacatcatggtcatcctatagatgaccttcaaagtgcctatttgaaagaaaaggacactcctcaaaaactgcttgaacagttgactgacacacactggacagatcttacccatcttattgaaaagctgaaagaacaaaaat

SEQ ID NO: 2436 - DNA, 653 bp, Homo sapiens
gcgggcgtcttccgagacgcactgggggccggatgtagaatcctgcttatctgtgaaatgcagttaacacatcagctggacctatttcccgaatgcagggtaacccttctgttatttaaagatgtaaaaaatgcgggagacttgagaagaaaggccatggaaggcaccatcgatggatcactgataaatcctacagtgattgttgatccatttcagatacttgtggcagcaaacaaagcagttcacctctacaaactgggaaaaatgaagacaagaactctatctactgaaattattttcaacctttccccaaataacaatatttcagaggctttgaaaaaatttggtatctcagcaaatgacacttcaattctaattgtttacattgaagagggagaaaaacaaataaatcaagaatacctaatatctcaagtagaaggtcatcaggtttctctgaaaaatcttcctgaaataatgaatattacagaagtcaaaaagatatataaactctcttcacaagaagaaagtattgggacattattggatgctatcatttgtagaatgtcaacaaaagatgttttatgaaatgtcagaaatattaacaaaaattctcagcattaaagaaaacattgattttcctttcctgactataa

SEQ ID NO: 2437 - DNA, 563 bp, Homo sapiens
  misc_feature (1)...(563): n = a,t,c or g
aatacaagtagatcagatgcatttcttcattgtatcaagtaactccagtttaatgtaatacaatttagtgcatttcagtatctcattcacagttcgacttctgtccaaatacttgtgcaacaaaaagttaagaaatggagacgaactccaggtgacattgtcattacacagcttcaaattctaagacaactcaatgatctttgaaaagcgtacgctgctgttgcctgggccggcgacaccaatgtccctggtaacttcctgggctccctaaaagtgttcccgtcattctatttcccgagcagtttgtaagaatgccaccattatccctgaattaacaagcagccagtccgcgagtgttcatgataaaactgaattcatgtgtccaccccactccagcagatcagtgtgacatcttttacgcaaaaattgtttttgcatcctggccccgatagggcaggaataccggagccgggatggtctgcatcccccaggtcnggccccacggcaggggtaatggggcagagcaggggcggagtcagggggtgtggccgggccccatcccc

SEQ ID NO: 2438 - DNA, 869 bp, Homo sapiens
tggttaggtcatgagggtggagatcatgaatggggttagcaccttataaaacaggcttgagggagcccttctgtcccttctaccatgtgtggatgcagtgagaaggcaccgtatctctgaagcagagagcccgccctggacacctggatctgcctggcaccttgatcttggacttccccagccctcctaagaactgtgaagaaaataatttttttgttgtttacaaattacccaggctaaggtgtttcattgtaacctgaatggaccaagctggtgtgaccctgttggaaaactggcagtatctaccaaaagccgaacatacgtataaactgatccagcagttccactcctggggtatgtacaccacagaaagctatgtccaccgagacattggcaagaatgtttctaaccacacgctgactgtagccccaaacctgaaacaacccaaatgtccatccaccaacccaaatgtccatccacagttgaagctacagtgaagtcacagggtcgaatactactgcacagcaacgaatatgaatgaaaatatcgctatgcacagcaacatggataaatttcacagacatgaggtcaagcaaaagaggtcagagtcctcatcatcaagagagaattcattgtatgattctcttcctacaaaaagtacagaaataagcaaaactgatccatggtgttagaagccaggggaacagttaacaggggagggatactggggaggggcatcctggagtgctggtctacctcatctgggtgttgatttcacgagtattgtcagtttgtttccagactccctgttggagatgtggaaataaaaaccacctaaacaagagcagagaggccatttggtcaaaaaa

SEQ ID NO: 2439 - DNA, 830 bp, Homo sapiens
  misc_feature (1)...(830): n = a,t,c or g
tcccctgggggaggtaggacagggctgggcttccctctcatcctccccctcccaatctccttccacctccctccctcccgccagctccacgatttttcggtgtttctctgtacatagttttctggcgggataggggaggtaggatggatggggtttggggtgggtaggccatgggaggggagaagcccctccttggcaccccctcttccctgactgctgtcccctacccagccttgcccccttcatccttttgcgtttggtattgagactctcctagactctactcctctttcttttgtatggacagttccccttcagtcccatccccctacacatacacccagccggggccaaatttatacttatataaaagttgtaaatatgtgaaattttatccctgtgccctttcccaacctaaggccctacccctggaccctcccaaaccttccttctctcttctttggctgttgtaantatctggggtttgtactgtacatatccggggtgtgtgtgtgtgggctgggggcaacccttctgtacagagcttcctggccccctccccccccgcccctctgcttccctccccacccaccacctcaagggtagggagttgctcttcctacctgttttattttgttttctcgttctccctccccaccccactcccagccttatctatcccccctcactgtccccttttctccactcccagccccatttcctttttttctggagtgtgtggtgaaacagaaaaaaacatgtttaataaacggagattgttcttttaaaaaaaaaaaaaaaaaaaaanggatctttaattaagggggccg

SEQ ID NO: 2440 - DNA, 510 bp, Homo sapiens
  misc_feature (1)...(510): n = a,t,c or g
gtgtatttttcttgtcattgtcattcttcctgcttactctgccagtatacaagtcactaatgcaaataggagcagaattactgtggagttgcccatcactgcacagaggaatccagaccccttggtatgttcagcttcctcatctgcctcctggcttcatctccttccccttcctcataacatccgctgcgatttaccacgccagttcctcaaaacacaggctcttcatggcttcacaccagttatttctctacttggaatgctttggccacacttgatctgacttaaaaacttctactagtcctcagtcctttaagggttaactcaggaatcaccttttctttcctttccttttcttttttcttttctttctttcttcctttctttttccttccttccttctttccttcctttctccttccatccttccttcctccctncttcctttcnttcctttncccttccttcctttcttgngtccnttcntncctnattnccttcccccccccc

SEQ ID NO: 2441 - DNA, 1284 bp, Homo sapiens
gcacgagggcggcggaactagccaggcctctgccggggcagcgactggcgctacctggggccagcgggggcggtggccccatcaacccggcctcgctgcctcccggcgacccgcagctcatcgctctcatcgtggagcagctcaagagccggggcctttttgacagcttccgccgggactgcctggccgacgtggacaccaagccagcttaccaaaacctgaggcagaaagtggataattttgtgtcaacacatctggacaagcaggaatggaatcctacgatgaacaaaaaccagttgcgaaatggtctgaggcagagtgtggttcagtcagggatgttggaagctggagtagacaggattatttctcaggtggtggatccaaaacttaaccacatcttcaggccacaaatagaacgagcaattcatgagttcctgggcggcccagaaaaaagcagctgtgccagcaccccctccagagcccgaaggccagggaccctccagctccatctcaggacacttcctaagaatacgccagacacctttttgaaagctaatttttggtgaagaaatggattcggttacataagagtgcaacttcagactgaagataggccaaggtcgtcactgatctcaagatttcaacctttgaccatgggcagtgaccagattgaaaggggagcaagttcggcagtgggagagttgaccgtgtcaccccctgcattgtgctgccatttggccagcctgtccaagggcatgacaccaagtagacactacagagagagaaacactacagcaacccagggttgtcctgaaacagacttttatacttgaacatggagactgcacatggactttagggtttgtgctgtgggataaacggaagctacagtgagaacatagccagtcccaaagacaatttcaaagaaaaatgacagtaaagattagctgggagtagtctttgacagtgcttatttgatactgtctctcagagtttgcaaaccagattgtacaagtcattagcgtcagatagctttaaagttgtgaccttcttgtacatgaatcttctagccagtttcctttcctttgtaacgaaacatgaaatcctagaatgtatgagaagttcagacattaggcataaggaaactcgtttgcaggctctctgtccagggctgcttcctgtcctggaggggccagtgagtcttaggtatgtttattttattctcacatttgtgtttttttagaaaagtgaatggtcaataaatggcttatctttcataataaa

SEQ ID NO: 2442 - DNA, 860 bp, Homo sapiens
ggcacgagttatctcagaggtaaaactctttaatctcagagcgcccctcccaactgccgatcccccaacccctcactctctcccccacaccagggccggagagtgagggcccctgccccccaccttgggtggacgagggccctttaaggcacctgtggaggtggggggcgaggggcgggagctggtaccatcctggatgcagggacgggcttcgattggcaggctgttgtggggatggatggaaccaatgaaagggggtgccagaggcagggacagtttggggccatccctgagggggtcagggaacaagttgtcgggacgtgggcaaagacgaccccagtccccgtagtgtaaagaacgtaaattgaaggccccgggccaattctgggaagaggagggcttggccacgcccccaggaagctggagccaattgggagggagaactcaggaaaagcggacggtgactatgtagagactggtcaagccctttacaggatttgagccaatcaaaaaaagagctgtccagcgactaggggatggagccaatgccgtgcgagcaaatcccttgtcgctaggcggaaaacaaaggagttgacccatttagagcttagaactcagcgagccaatcccttaatagaaggaatctgtcgctaggcggagagagacgacagacccaatcgggaaacgggacagatgccgctcctcggcgcggcaggtcgtgggctggaaggacggcggggattggcagaggcgggacaatcttgggaatgggagacgcaaggaggccggtcccggatcggcctcagattagcaggccccgggagtggggcgggggcgtagtgtgggactgggcggacgcg

SEQ ID NO: 2443 - DNA, 937 bp, Homo sapiens
ggggtcccttcttcatcctttcatctctagcttataattcaaagtctgggattgagtggccaatcctaggtcacatgtccatgtcctatctccaaggggggctgggaattgaatatctggcattttccactttcacttcttatgaattaaggaattctacaaataatagaagtgggattcaggtggtaggcagacaaaaaagcctcacaattatccactacgccacccttgtataaccttaccctcattcactgtctactctcaaaactgtggagctactaatgaagatttgtaaaccctgggcttatgagcacccattcctttactacaactcagattgctctagaagctcagttcccagcacttggatttttccagtagctgaattctacctgaaggaagggcagaaacaaagggtgaagaagaggctatcacttccaagtatcctgcacccctgggctcaagacctcactggggagggagtcttttgggccacccaccaaacagcactggcattatgcctctcaccctagaccatggttacacgtggtaaaacaaccccttctggtgatacattcacaactctctagtttcccccaaatggcactatggggagcgggagcttgccttttcctcagacttaaaacaataagttttccccgtgtttcccctctaatgctgttttcttttgaccaagcatatctgaattctagagaagtcaggaggaacacacccattctcggtttgaagggactgatgttctgaagtacaactgggcacagtcccaggctcttcaggacgcttcctccattcacacagcggggatgtgattgttactgcgggtggtgtgtgctggctgagaagccactgtgaattgattcttcttctgaagtttatgtttctactttttggaaatgaataaattacagccagtcca

SEQ ID NO: 2444 - DNA, 460 bp, Homo sapiens
gcggccaatggggcttggggccaggggcagagaacccgaacagcaagagagccccaggtgatgctggctctccacgtggcatccggcagtttttcacttgcagccattcattcaacttggcaaagtaggcaagctcagcttgtggtttccattttgcagatgggcccccggggtcagtgatgggaagagcagaagaggatgccagcccagcctggcccaggagcaggtgtcgttgtggaggaaagcttaaactcaacagcctctacccaacatctgccacctgcatggccccagatgcccccggtgcaggccaggtcaaggtgggagtaaactttctttgcctccctccccacagaagcaccagacccacctgagccccagagcctcatgccagcagctccttgttgttcctcacctgaggctagagcagcagctgccagcttatagatggggcggatgg

SEQ ID NO: 2445 - DNA, 393 bp, Homo sapiens
ggcacgagtgtgatgtgtacatacagtggaatattattcatccttaagaaagaagatgctgatatgctacaacacggatgaacctggaggacgtggtgcagtgaaataagctggtcacagagagacaaatcctgggtgatcccacttacatgagacaggccgacggtcgcaaggtcctacggtcaagcatccgggagtttctatgcagcgaagccatgttccacctgggagtccccagcgtggggaggaacgacattcgagtgcagctgctcgactatgtcatcagctccttttaccccgagatccaggctgctcatgccagcgacagcgtgcagagaaatgctgccttcttccgggaggtgacgcggcgcacggcgcggatggtggccgagt

SEQ ID NO: 2446 - DNA, 423 bp, Homo sapiens
gcgagccacgtatgaggtgcctgccctgggctctggaccccgggcacacgagggacggtgccctgagcccgttaggttttcttttcttggtggtgcaaagtggtataactgtgtgcaaataggaggtttgaggtccaaattcctgggactcaaatgtatgcagtactattcagaatgatatacacacatatgtgtatatgtatttacatatattccacatatataacaggatttgcaattatacatagctagctaaaaagttgggtctctgagatttcaacttgtagatttaaaaacaagtgccgtacgttaagagaagagcagatcatgctattgtgacatttgcagagatatacacacacttttttgtacagaagaggcttgtgctgtggtgggttcgatttatccctgcccaccccatcc

SEQ ID NO: 2447 - DNA, 2037 bp, Homo sapiens
  misc_feature (1)...(2037): n = a,t,c or g
ggacgagcagcggaggcggtcgggagcgatggtgaagatggcggcggcgggcggcggaggcggcggtggccgctactacggcggcggcagtgagggcggccgggcccctaagcggctcaagactgacaacgccggcgaccagcacggaggcggcggcggtggcggtggaggagccggggcggcgggcggcggcggcggtggggagaactacgatgacccgcacaaaacccctgcctccccagttgtccacatcaggggcctgattgacggtgtggtggaagcagaccttgtggaggccttgcaggagtttggacccatcagctatgtggtggtaatgcctaaaaagagacaagcactggtggagtttgaagatgtgttgggggcttgcaacgcagtganactacgcagccgacaaccaaatatacattgctggtcacccagcttcttgtcaactactctaccagccagaagatctcccgccctggggactcggatgactcccggagcgtgaacagtgtgcttctctttaccatcctgaaccccatttattcgatcaccacggatgttctttacactatctgtaatccttgtggccctgtccagagaattgtcattttcaggaagaatggagttcaggcgatggtggaatttgactcagttcaaagtgcccagcgggccaaggcctctctcaatggggctgatatctattctggctgttgcactctgaagatcgaatacgcaaagcctacacgcttgaatgtgttcaagaatgatcaggatacttgggactacacaaaccccaatctcagtggacaaggtgaccctggcagcaaccccaacaaacgccagaggcagccccctctcctgggagatcaccccgcagaatatggagggccccacggtgggtaccacagccattaccatgatgagggctacgggccccccccacctcactacgaagggagaaggatgggtccaccagtggggggtcaccgtcggggcccaagtcgctacggcccccagtatgggcaccccccaccccctcccccaccacccgagtatggccctcacgccgacagccctgtgctcatggtctatggcttggatcaatctaagatgaactgtgaccgagtcttcaatgtcttctgcttatatggcaatgtggagaaggtgaaattcatgaaaagcaagccgggggccgccatggtggagatggctgatgggtaaggttttagaccgggccattacccacctcaacaacaacttcatgtttggggcagaagctgaatgtctgtgtctccaagcagccagccataatgcctggtaagtatacgggttggaagacgggtcttgcagttacaaagacttcagtgaatcccggaacaatccggttctccaccccagagcaggcagccaagaaccgcatccagcaccccagcaacgtgctgcacttcttcaacgccccgctggaggtgaccgaggagaacttctttgagatctgcgatgagctgggagtgaagcggccatcttctgtgaaagtattctcaggcaaaagtgagcgcagctcctctggactgctggagtgggaatccaagagcgatgccctggagactctgggcttcctgaaccatttccagatgaaaaacccaaatggtccatacccttacactctgaagttgtgtttctccactgctcagcacgcctcctaattaggtgcctaggaagagtcccatctgagcaggaagacatttctctttcctttatgccattttttgtttttgttatttgcaaaagatcttgtattcctttttttttttttttttttaaatgctaggtttgtagaggcttacttaaccttaatggaaacgctggaaatctgcagggggagggagaggggaactgttatctcccaagattaaccttcacttttaaaaaattattgtacatgtgatttttttttttcctgttcatacatttgtgctgcccatgtactcttggcacatttcaataaaattgtttggaaaataaacacagcaa

SEQ ID NO: 2448 - DNA, 736 bp, Homo sapiens
ttcaggttcatgttaatctgcttcttatagaagctaggatgcaagcagaactcctttatgctctgagagccattacccgctatatgacctgatgcctttccttcattaaagatgattctggaatgatcagcagatatagtctacaagggggaaggtactaagccccaggaccaatggtagacaaaataattcagaaatccattgtgccatgattcctttagtttctgctatttttctgtggaaaaccactgctggcacaagcagtgactgtttggcagcttcaagtttagagctgtgaagacaggctgccattcacagtattttgctttttgacagtacaagatgctgtgtaactgttttaatacagcaaatagtaactctccaaatcctgttgcttttatgttaaataagataacaagaattggagcatgcaaagaatgggacttggataatgacttaagctttatatgtaaagaattttagaagatcttggtgctgctattcctgctggaggaatgaatagatggctgtttcagttaagctattagtaataaaagtgaacattgctactatctgagcctacatacataacttgtgtgatttcaaattaaacttgcattatgtgttaattttcttgcatctaaaaaagcatagaattcctactcacacagctcagcaacaaccattttgatggtaacagttaatttctttcattagttttttaaattcagggttc

SEQ ID NO: 2449 - DNA, 1064 bp, Homo sapiens
tttttttcttgggcattagggatgatttatttattatttgtgtccttgtccactgtaaaaaagggaagcttaaaaacacaagtgtgtgttcaggttcccagcctgaatacaaattgtattcaatttccgagtgaaatgtgtccagacagcaggagagatctacttatctgtgagactgaagagcctccttggaacgaactaatcctgaaagaagaactacttgtgaagggcaaacagtttagttcaagaaagcaaggctatgcaataccacagcaaacttcattcaatgaagactgagctccagccatgtcttaagagcgggaagaaaaagcagcaaacaggctctatctccacaggctctggggacagtgacggctgcagtggctccttcaggatgctcaaccctgggctctggaacaccaagcacaggcctcagctcttccatgatgaataccttttaaaggcatcagctgcagcatctctgttgcatacaaattcactaagtacaaaaaaactcctagacttttgggcccattgcttattacataaaattgtttccagcagtagggtttaagacaaaacacaagtgaaataaaatgtacaagtttgttccatagaaacactgaaaacacggttatgtccttctacaattcagtaaaacaaacactgccacaaacaccctcaggttcacagtttagatttcattcattcaataattattttctaagtactttcattactggggatgcagtaatgaataataaggtccctgttttcttggagcctctgttccagcagtggggcaggggagacagacagcaaacaaaataaatcaatataccacgttagtagtcacatggttactgggtagggaaaggaaagcttctgcacacctaaaccccttaagagcaatttgaggctgctgcaaatatcacggcctcttttaggggaagataaaaactctaagttttatatatatatatataaatagagatggggtctggccatgttacccaggttggttgatcttgaactcctggcctgaagtgatcctcctgtcttgg

SEQ ID NO: 2450 - DNA, 1315 bp, Homo sapiens
  misc_feature (1)...(1315): n = a,t,c or g
tttttttttggtggttctcaaactgtgttcctagaagcatcccatgtgcccccaggccaagaggtccaggttctaccccgacccacatcccctgaatcagagcagcttttttttcattttaaaaattttgatctgtttcacacattatatttgtttgaacttcccatgtttaaaaattttgaagaaaatccctggagtagacaatccctagagcactgacatgctgtggtccaaggttcaccaggaacagtgcctgtgccctgccacatggcggggttccttcaagcctctggtgatgaaggtgctcagggaaaggaggacggaggggcgcggaaggacccagccactgctgccaccctggcctctgctctgtgttcacgggggagcagactctggggaggcgcccctcctcaccacggcctgcaggccgggctggagcctgcgccttcaggggccttgcatctccagctggaccccctggcacaggatgtgctgcagtagcccgttgaccacatccagagtctcgtccttctccagcacgatgtcataggagtccatgtagcgctcccgccgctcctccaccttgtcattcaggaagccaattttgagaatgttctgcacaccaggaaccccatcggccatggtgaggtccccgatagagtctcccagcaggatgacattggttttgccctcaagttgctggaagtaaccacagttctcacacacagagctgttcttgttgtatgtgtgtatcagctggcccttaaatccctggagaaaaccatcttcattaaaatccatgtagttagacacgatgtggatgttggggtggaacactttcatctgtcggataatttccttccaggatatcaccaatgcccgcagaaaagatgaaaaggggaatgttgttatggtagagtgtgttgaagaaggtcttatatccctccctgagcattgcattggactctctaaccacctgggctatctgaaacttctgaatcttctgctgacataggagattgtgtgctttggtccaccattccaccatatgaggtagcttctccttgacggtccggtgtgggtcgatctcaattgggtaatagtggtgaaggagcgctgtgagctctttccgacactcctcactgatgatcttgctattatccagaatattgtaagaagaagggcatcgctttccattatatgcaaacctgctcaaggtcatgtcaaaatcagaaatcacctgtaaaccggtctccggcgccttncgnngggcgcccacgatctcctgcactcgccnaagtgccgcatcaggacc

SEQ ID NO: 2451 - DNA, 2881 bp, Homo sapiens
ggcctccccggcatccccggtttgccaggattccctggggtggctggcccccctggaattacgggattcccaggattcataggaagccggggtgacaaaggtgccccagggagagcaggcctgtatggcgagattggcgcgactggtgatttcggtgacatcggggacactataaatttaccaggaagaccaggcctgaagggggagcggggcaccactggaataccaggtctgaagggattctttggagagaagggaacagaaggtgacatcggcttccctgggataacaggcgtgactggagtccaaggccctcctggacttaaaggacaaacaggctttccagggctgactgggcctccagggtcgcagggagagctggggcggattggactgcctggtggcaaaggagatgatggctggccgggagctccgggcttaccaggttttccgggactccgtgggatccgcggcttacacggcttgccaggcaccaagggctttccaggatccccaggttctgacatccacggagacccaggcttcccaggccctcctggggaaagaggtgacccaggagaggccaacacccttccaggccctgtgggagtcccaggacagaaaggagaccaaggagctccaggggaacgaggcccacctgggagcccaggacttcaggggttcccaggcatcacacccccttccaacatctctggggcacctggtgacaaaggggcgccagggatatttggcctgaaaggttatcggggcccaccagggccaccaggttctgctgctcttcctggaagcaaaggtgacacagggaacccaggagctccaggaaccccagggaccaaaggatgggccggggactccgggccccagggcaggcctggtgtgtttggtctcccaggagaaaaagggcccaggggtgaacaaggcttcatggggaacactggacccaccggggcggtgggcgacagaggccccaagggacccaagggagacccaggattccctggtgcccccgggactgtgggagcccccgggattgcaggaatcccccagaagattgccgtccaaccagggacagtgggtccccaggggaggcgaggcccccctggggcaccgggggagatggggccccagggcccccccggagaaccaggttttcgtggggctccagggaaagctgggccccaaggaagaggtggtgtgtctgctgttcccggcttccggggagatgaaggacccataggccaccaggggccgattggccaagaaggtgcaccaggccgtccagggagcccgggcctgccgggtatgccaggccgcagcgtcagcatcggctacctcctggtgaagcacagccagacggaccaggagcccatgtgcccggtgggcatgaacaaactctggagtggatacagcctgctgtacttcgagggccaggagaaggcgcacaaccaggacctggggctggcggggctcctgcctggcgcggttcagcaccatgcccttcctgtactgcaaccctggtgatgtctgctactatgccagccggaacgacaagtcctactggctctctaccactgcgccgctgcccatgatgcccgtggccgaggacgagatcaagccctacatcagccgctgttctgtgtgtgaggccccggccatcgccatcgcggtccacagtcaggatgtctccatcccacactgcccagctgggtggcggagtttgtggatcggatattccttcctcatgcacacggcggcgggagacgaaggcggtggccaatcactggtgtcaccgggcagctgtctagaggacttccgcgccacaccattcatcgaatgcaatggaggccgcggcacctgccactactacgccaacaagtacagcttctggctgaccaccattcccgagcagagcttccagggctcgccctccgccgacacgctcaaggccggcctcatccgcacacacatcagccgctgccaggtgtgcatgaagaacctgtgagccggcgcgtgccaggaagggccattttggtgcttattcttaacttattacctcaggtgccaacccaaaaattggctttatttttttcttaaaaaaaaaagtctaccaaaggaatttgcatccagcagcagcacttagacctgccagccactgtcaccgaggcgggtgcaagcactcggggtccctgggaggggcaagccctggcccacaggaaagccagggagcagccctggggccccatcaggccctgctagacggcaccgcctgaaggcacagctaaccacttcgcacacacccatgtaaccactgcactttccaatgccacagacaactcacattgttcaactcccttctcggggtgggacagacgagacaacagcacacaggcagccagccgtggccagaggctcgaggggctcaggggctcaggcacccgtccccacacgagggccccgtgggtgggcctggccctgctttctacgccaatgttatgccagctccatgttctcccaaataccgttgatgtgaattattttaaaggcaaaaccgtgctctttattttagaaaacactgataatcacactgcggtaggtcattcttttgccacatccctatagaccactgggtttggcaaaactcaggcagaagtggagacctttctagacatcattgtcagccttgctacttgaaggtacaccccatagggtcggaggtgctgtccccactgccccaccttgtccctgagatttaacccctccactgctgggggtgagctgtactcttctgactgccccctcctgtgtaacgactacaaaataaaacttggttctgaatatttttaaaaaaaaaaaaaaaaaa

SEQ ID NO: 2452 - DNA, 1706 bp, Homo sapiens
atcagtcaagagagtaactgaaagacctgcgggactgattcacgtggggagaatgttcaaagcactgtcacccggcttctccgcaggctttcctcttccccagtggcccactaatggtatcactccgagtctcaatggtctggctgtgttagactctctccttttgtgtttttacatgcagcactactcttggttttatttcagtctgacatagagttaactgcaatcagattgtagtctgatttatatgaataacggttgctaattttaggactgggtgaaagctatgccattcattatgtctggctgtattagaatgacatttcctatgaatgtctacggtctgttttaggtgtttgctaaacttctatggcttccagggtcttcttacaatgcattcctttaacttgtccctggaagcattgctacccattttcagcttctctgcctctcttctgatacaaggacagaagaattgggtagatattcaccttttaggggtgcaagtatagctttaagtttgtgcaagtgaaaatgttgaaaagtgagtaacctcgatattaaaatcatccttgacatgaaacagggtgaagagaagctgtccgtggcggctggtgttggctggcattggcactgggctgtgctgacctagccattacaattccaggggctaagaaggctcagggcagacaaagtcaagaggaggaagtttttgtggacaatgaaaagttattttcgtacctttctaccaaaaccaagtttcaggaaaataactctatgttgtttattttcagtgacacttatgtaaggccctgtgagttgtatttatcctgtatccggcactgctaagctttttcaaggtatctttccaatcctgctggatgtgggcagttcaatgggctgcaggggctgggccaaacctccccttagccagtcaggcacgggcattgttccttatcaggaataacaaaggtactacatctttccagccatcagcacgttgtacaacttaactttttaacatagtccgtctgtttactgaggcactggcgagtcccagggctgatacagaaccttccctagagggaataccagagttagctgggtatagaggtggctcaaaggaagtgtccgtgggcagggggaggaatgaacaaaatggcgctgtttctttggctcagactcctagaatgcttgacaagacagaatttttttggaagaacctcatctcactatagttacttttttcacttttgttatatatgtatttattagagcatttgaatattggtacctttaaaagggtcatttggtgttttgctgttgagctggtttttgagtcatagatcttgggcttcctttagaagccacttaacttccatacactataataaactgtgaacatatttttgttacctaatgcatccactgatgaacatgcaaactttgggcataatgtgaactaaaattgaaatggaaaatgttagtggccattttgcaacaatgaagaggatagcactttatctagatgaaaactggatttcttatctttgaaatatcttgaactgtttattgctcagaacttaagtaagcatgccaacatttcgtttgtttatgcttgaagtgaaatggtttaccttttcactggagaagaccaaacaggggtgatccttccatggttaatggttttaataccaagtggatgg

SEQ ID NO: 2453 - DNA, 865 bp, Homo sapiens
ctgttcatttccatccatctacccatctacccattcactcatccgtccacctatccatttatcacccatctacccatccatccacccactcatccatccattcatccatccacccacccacccgtccatccacctacctattcatttatcacccatccatccacacacgggtctgtgcagattcattaatatccacccatgcatccatatttatctattttctatccatcagccatccattcattcatatccatccatccatctatccatccagatgtttattgagcacctgtgttctgggtcctatttgggagccttgttaaccaccaagaccttcctaagccatattgtggtatacagacagatacaaaaaaaaaggctctctccctgtctgatctcatgcagcctgccttggagacaagactctccccagtgctgtgtgcttggagagaggaaagcacacagccctggagtcagagacctgggtttcaattctgtctccacctcttattagctagctatggactcctctctgagcctcgattacctcatctgtgaaatggggtaatggtgtgagcagcgtttccctgggggatgtgatgcagcccacttggggcctcatgcactcagcatctctttattagcaaacacttattgaacccctagtacatgccaggcactgttatgaggtcccggggatactttataacaaaagggacagaagcattcctgctcttgtgaagtttacattgactagatagtaaacaaaataaatgaaatatgcagtgtgtcagtgctggtaaacccgtggagaaaataaagcaaggttggggtctggggttgggaaaaaaaaaaaaaaaaaaaa

SEQ ID NO: 2454 - DNA, 456 bp, Homo sapiens
  misc_feature (1)...(456): n = a,t,c or g
cggacgcgtgggcggacgcgagggattttcttttaatttgttactacttagtcacaaaccccacattattccagttaggaattacttattaaggatttggaaatacatatgcccatgcttaaattttatagctttaatttgtgttatttctttattgacgggaagaggtacatctttttttccttactgaaaacaaatatggattaattgcctcaaatttgtataagtgattggctagagattcttgttttcangacaaagatggcaatatacacttaangttgtnatngnangtngntactgaagtacttanatttttaaaatttcanatcctaaatcacttcttgtangagggttttcattaactgcagtntatacagttcactacntatgggtnganatgagtnttttgngtgcngtatttctttctgnattttaatacctggtaagnacata

SEQ ID NO: 2455 - DNA, 1937 bp, Homo sapiens
  misc_feature (1)...(1937): n = a,t,c or g
tctgagcacattatctgtgattctttcatcctcccagaaaggatcagtgttagaatgggaaatagagtgtgccatcttgctcttttgttggcagatgtacccgcttccctccagccccccatccttggcatgtatattagtaggagggcttcacaccagcactgctcactgcgactcctggaaatgtgtggggaattgggtgagcccctcttccccacgtggctcccatctgtaactctccatctgtgatttgcaacaggtcttccactggctcgaggctgcgnagggtggaccgacagggcgcccaatagagtttgtgggnanatggagnattgcacagatgcagctgcacaatggtcttcctccacccctctggaatcacccatttaggcaggcctcaagtagggcaaaaatgtttatttggtaccgggggtctcctgaccttgtctagcattcccacccactcttctgcacttcttgcaaggtaacttgaatcatcacttatttctctgccacctggttttagggactggcactctataaatgacgctgactttgtatagaaggattttgctaagggggcaaaaagcccagataccattttaactgggcccagctcattttctcctttcattttacaaaagaaatcatgcagaagcatcaattaaaactgatttatttatgttggtacatccaacaaaatagttggagccacaaggcccttgtctttttaaaaaaacaaaatattttgaagatggtgaaagtgactgattttaataatgagataggtcacttaaaataacagtgcctttgaccttaaaacatggcactggcccatgtgacctttgccatttcccagtacttccctttacagtctgcagcctataaacagtggtgtctcaaagcaaaggaaacctccacaagtgctgcaacagtgcattagtttttatgtagcaatttgtttataaaaattcccatcccataatgcatgaccttcctaaaaatatccacagcctccataggcaaggtgagctttctgtgctacccacttgttagattccagccacctcagggattctgatccatgtcattaacgaccatcccagggtgtgagggcctgattaaagcttatcgaactagacatttgtttattagatgagctcggcattattattttctcaataactggtagaagggaaattttaaacataacactcaacccaaacaaaactacttcgtgaggctttcagcaaaaaggctgcttaaaagcatgaacccgggatgcagagcagcttttgtgcacggttccacttactgtaattgtttctggttctttcctctaacaccttccatgtatgtcaactttttatcaccgtcaggcatagactcgtggagattagtcattatagctcagacctaagctaattatttaaaataaatacatgtaaaggccactgccacattctcagcagacttccacttgcctaatgagattagtgattcaactgacttgaagcacagtaacatcttattttatgcacattccctgtcttttgctggactgatgaagccagtcacccgcccttctctgttttttggttttttttttcttaaccccaggtatatggaaggggagttgccttcacttttctggaaatttgtcttcgtctgacatattagagggcctcgttttgtcctgttcttgttcagaccctctcgttctacgtcctgtgctgaggggactgtccttaagctacaggacagcgagctgggtcctttctgccacttcttccccactcccatgcccagggaaggcctgggttgctgatggntactttattaaatgaggttgctttgcanttttcaacaggngaatgaagggaagacgtaacaagggttccaggaaactttttacaggangattggggttcccacaa

SEQ ID NO: 2456 - DNA, 799 bp, Homo sapiens
  misc_feature (1)...(799): n = a,t,c or g
ggcacagtgttcgacggccgccccatagagtccctgtcactgatagacggcgtgatgcccgacgtggtgcagacgcggcagcaggcattccgagagaagctcgctcagcagcaagccagtgcggcggcggcggcggctgctgccacggcagcagcgacagcagccaccacgacctcagccggcgtttcccaccaaaatccatcgaagaacagagaggccacggtgaatggggaagagaacagagcacattcagtcaataatcacgcgaagccaatggaaatagatggagaggttgagattccatccagcaaagccacagtccttcggggccatgagtctgaggtgttcatttgtgcctggaatcctgtcagtgatttgctagcctccggatctggagactcaactgcaaggatatggaacctgaatgagaatagcaacgggggctccacccagctcgtgttgaggcactgtatacgagaggggggccatgacgtcccgagtaacaaagacgtcacctcactggactggaataccaatggaacactcttggctacgggttcatatgacggttttgcaagaatatggacggaagatggtaacctgggccagcaccttaggccaacataaaggccccatctttgccttgaaatggaaccgaaagggnaattacattttgagtgctggtgtagacaaaacaacaataatttggggatgcccacacaggagaagccaaacagcagttttcctttncatttcagccctgncccttgnatgttgggattgggcagaacaacacgac

SEQ ID NO: 2457 - DNA, 415 bp, Homo sapiens
aacaaatgtaaagcactgaggagggaggaataaagcatacaagttaatttctaattttcgcaagcctgaaccatcctaatctgatagtaggatgtatggcttcttccttttcaccttgtgtgatgtttaatttgagacgatctagccataaaactagtaatcttgaattcctcttgagctggatggtgattagccattgtgaaaacagattatatggaaattgtgcatattgctaaattttaaaacatggatttatcaactgataataaaatatatcttacaagataaccacttgttttttaatgtaaaattgcacaagggcttaagtttcattgcctttcacagtttaatctgtatatgaaatggtgtagatacagtggaaatggttttccttaaaaccatctctttaaagctg

SEQ ID NO: 2458 - DNA, 524 bp, Homo sapiens
  misc_feature (1)...(524): n = a,t,c or g
attcccattttcatgcccaaatgttgccttttccaagaccactctggcctgcacacccctatcctgtgcccatataaaccccaagctctacaagcagaggaacagaagagcagcagagtagcaaaatggcatggcagaggagagaagagaaggagcatctgaatgtcaggaggagttcggctgaggacggttggaaagcagataagccggggatggctgaactccaggggaagatcatcttcccactccatcccctttccagctccacatccattcctctgagagccaactccattcacttcagttaaaatccccacctttcactattcctttcaggtttgatgtggacctggattctttccttaggatggccaggacaaaggacgggattaccaaggaggaggcaggattttaaaaagggctgttcaccctggattnttcccattgagtgggaattagggccttccaggaaaaggcaactggttaaaggggcattnatttgttaaccacacccttaggatggt

SEQ ID NO: 2459 - DNA, 447 bp, Homo sapiens
cttatgaaccatgttccaaacctttgcgttgcttttctttccatcgtgtctatttcataacatccctgtgaggctggatgtgggaacttcagcactgccgtactcttgggaaatttgtccaaggccacccggctgagcagcggttgaaccaggacaccatcaggcatgcgtttcttgtctccaccacaccctcaacccacttcccaacgcgccttgcgacaggggctgcggtattgcatccacatgactgataaactagtaaacacacatgaattcattttaaaagtgtattcaatcagttaggtaaactaaaaaccttaagtcttcgttcgatttggaatgcagccagagaacaaatggaaaatttttcaaggtagagaagatgaaaactcagaacgccctcttgtggcatctctacccaccctaggaacactatggctctttccc

SEQ ID NO: 2460 - DNA, 383 bp, Homo sapiens
aagagatatatttaggaatatgatgtaacaaaatggaatgtcgagattatcctgcttaactaacaaactattattaatataaaatgacctctaacatttggatcatagaatttctctgacttttaaggtatttcagttatttacttttactcagtgaacaatccccaagctaagtaacttcaggtaacaatgatgtataggttgatggggctcagctgggtggttcttctgctctgcatggtgaagctgaagtcacatctgcagcttcattcaactgggagcttagcttgggctgtgccactgaagatggcctgtcatcctctagggcctctctccacttggcatccattattcagtaatgtatgctgaagctcgacatcatg

SEQ ID NO: 2461 - DNA, 1124 bp, Homo sapiens
gaagctttttaaaatataatttaaaactattttgtaccagtacaatatattaattttacaaatgtaaaatttttatcagctgttaaagcatttgcaaaaaccacacattctacttcagctttattgcacaatatctataagaaaatattaatttttaaattagaaaacataaaaatgctttcaatatagaagagacaatctgattttaaagacaatactctataagaatgtctactcagaaaataacaaactttcacaggataccagctggacagatgcttcagcagatccggtacaaagcactgtttaaaaccagtccaagatacttaatccaaactgtatcatgattcttcattagaaatctagacaccactcatggtggtttcttacactttaaaaagttgaggcattttcagtgtgagcattctgaatatctcttacatatcaaaaacaatacttccaactcaatagccatttgcagggttctttttccttcatgcagattatcactggcaactgtttttaatgactattcatgaccattttatttatgctgatagaaaacatcaagttaaatacgcttttaaaactttgtcctttacaaaaatcagtgtataaatttgcatcataaaaattagtgttgagaccatcaagatggccttcatttatatggttgtatattagttggttttcccagagttgggaatggcagatgtctcacttttcgtatgtagtgtaatcaggaaataaatccaagcactaaactggaatcccaagacagattaataaggttgcatgatggattttagggggttatgaccctggacgcatatactaatgtgggcgttaaaatactgacagcaaaccctggtgggaatttaatttacctcagacaataaacattatctggagagacataaaggaaaatgttcatttgcatattatcagcgtggctgtgtgtatcatagaaaagaaaaagaacctttattagaacgaggattcaccagattgatacatatatagaccatacatcttttcctattaaagcatgttgattcaatctcatgtgttttcaagtttatgcctttgtgggcagggaaattatcttttggaacttatggcct

SEQ ID NO: 2462 - DNA, 455 bp, Homo sapiens
  misc_feature (1)...(455): n = a,t,c or g
ggatatctgcacttgcattatttacannnnnnnnnnnnnnnnnnnnnnnnnnnnnnnnnnnnnnnnnnnnnnnnccaataaatagataaagaaaatgtggtacnnnnnnnnnnnnnnnnnnnnnnnnnnnnnnnnnnnnnnnnnnnnnnnnnnnnnnnnnnnnnnnnnnnnnnnnnnnnnnnnnnnnnnnnnnnnnnnnnnnnnnnnnnnnnnnnnnnnnnnnnnnnnnnnnnnnnnnnnnnnnnnnnnnnnnnnnnnnnnacaaacaaaaacaacaaaaacctgatctcagctgancgtggaggctcacaccnggaancccacactttggganacngangcacgnggancttntgagncanganttttaaancancctgaccnacatggggaaannntgggtnaanttaaaaatacnaaaaaactnggctngggaggnaagaacccgnantacc

SEQ ID NO: 2463 - DNA, 566 bp, Homo sapiens
ggttagtagtgtgtacttcatgccaggacattgggtattttctttaaagtgaatatagaatctcaagatatacgtagcttcatcattgacatttcccagagccaatagtcagcggatcggtcttgtgaacaccactgccagctcctgtgtctacatctcagaggagcccatgtgctctgtttctctccaccaaagcaagctctgctgggcgtgcttctgggaaaaaaacaattttctttaagaagaagatgaatgtccaggaatttaaagaaaggatcgattgccttttatttatgagtttctagctcttgaagttattcacatgcagttcagttagtcaagtaaaattttttttcaaataaaagtatccaagtggtgcagttattattatatccctctttaataattttgctttttatttttcccctcttctttttctgtaacttgaattttatttcctgtaatttatagtgtgtagctgtaaattgaaatattcataactgtgaaattgacttaattcatatgttgtctccataactttattttttttaaatgcatattcaggg

SEQ ID NO: 2464 - DNA, 549 bp, Homo sapiens
  misc_feature (1)...(549): n = a,t,c or g
gggtgtcctttccatttaaatatgaaacattaagtaccatatgaatggtagagatggcggatactaagcctgactggtcatcagttttctgggtgttttaacatttcaaaagcctagtcctaacccctaaagattgatcagtagagctgagttgagtctagggcatctatgtgttttgttcttttttaataataatttttaagaattacannnnnnnnnnnnnnnnnnnnnnnnnnnnnnnnnnnnnnnnnnnnnnnnnnnnnnnnnnnnnnnnnnnnnnnnnnnnnnnnnnnnnnnnnnnnnnnnnnnnnnnnnnnnnnnnnnnnnnnnnnnnnnnngnnnnnnnnnnnnnnnnnnnnnnnnnnnnnnnnnnnnnnnnnnnnnnnnnnnnnnnnngcggaccacgagctcaggagatcgaagactatcctggctaacanaaccctgtctctactganaatacaannacaaacaaacaanaaaattagccaggantgtggcggaacctgtntcccagcaatcaggttctaagnangngaatcctttacc

SEQ ID NO: 2465 - DNA, 533 bp, Homo sapiens
ccaagatggcggcgcccagcgaagtggccgcgatagcccctggcgaaggcgatggcggaggcggcggctttggctcctggctggacggacggttggaggcactgggagtggaccgagccgtttatggagcctacatcttgggtatcctgcaggaggaggaggaagaagagaagctggacgctctgcaggggatccttctctgctttcctggaagaagattccctccttaatatgctgcaaggagattgtggaccgatggtcagaaactcagaatgttgtcaccaaagtgaaaaaagaagatgaagtacaggccattgtcaccctaattgagaagcaggcacacatcgtagtaaagccacggatggtgtcagaggaggagaagcagagaaaagctgtcctcctggcccagtatgctgatgtgacacatgtagaggttgagcagcatgagaagggtgattcacgtgctaccaccactgtaccattggttctgacaaacttctgttccgaaacacaatgtggaagatgtccttaat

SEQ ID NO: 2466 - DNA, 490 bp, Homo sapiens
caataattttgcaaatagtgacagacctatgaaggcaactgcctttcccgcagaagtcaaagacttgaccaagagaatccgcactgttcttatggccactgcccaaatgaaggagcatgagaaagaccctgaaatgctaattgatctccagtatagcttagccaagtcctatgcaagcaccccagagctcaggaaaacctggcttgatagcatggccaagattcatgtaaaaaatggagatttttcagaggctgcgatgtgttatgtccatgtagcagctctagttgcagagtttcttcatcgaaaaaaattatttcctaacggatgttcagcgttcaagaaaattactcccaatatagatgaagaaggagcaatgaaagaagatgctgggatgatggatgtccattatagtgaagaggtcttgctggagttgctagaacaatgtgtggatggcttatggaaggcagaacgttatgaaataatttctgag

SEQ ID NO: 2467 - DNA, 597 bp, Homo sapiens
gggaatgccggtgaatcctgccgctgcgtggatgagaagtgaatgcgtgctcggagctgcgagtgacagcgggcaggaggcgcccagggacacttggtttctccagggctggaaggcttctagaaggttcctcatcaagggaagtgtggctgggggcgccgtctacctggtgtacgaccaggagctgctggggcccagcgacaagagccaggcagccctacagaaggctggggaggtggtcccccccgccatgtaccagttcagccagtacgtgtgtcagcagacaggcctgcagataccccagctcccagcccctccaaagatttactttcccatccgtgactcctggaatgcaggcatcatgacggtgatgtcagctctgtcggtggccccctccaaggcccgcgagtactccaaggagggctgggagtatgtgaaggcgcgcaccaagtagcgagtcagcaggggccgcctgccccggccagaacgggcagggctgccactgacctgaagactccggactgggaccccactccgagggcagcctcccggccttgccggcccaataaaggacttcagaagtgaaaaaaaaaaaaa

SEQ ID NO: 2468 - DNA, 470 bp, Homo sapiens
ggagaaaagacttgggttggagtgaaattctggtctcagacaccaggagaccagagtctctgaggatgaagtttcctacccctatttgtagggaaaaggacttgagtgcagggaaaactcaaatcccaggccctgggaaatagtaaaataatcaaagggttttccatttcactccacttgttagtttatcttggcactgaagaggcactttcgagtatctaacttttgccattgggtggggtggggacagctgctcgcggaacagcccctagtcggctgcttccagagtaagcagtctttatgggctttctctgaggcccagtcactgctcctgggacccaagtcccctggaggggaggtggaaaatcagtgctacggggccagtctttcccgtggctgccaccagcgaatgaaacttttgtatgatacataaagtgcttgagtctatttttaataaaaagggaaaaagc

SEQ ID NO: 2469 - DNA, 650 bp, Homo sapiens
agggtacacatttccaggaacactgatcagggtccaaggattcagcatattgggatagtgaatggtctctgaagacctatagataattcagtatctactcaaggaggtgatctttaattaactgcactactgtgactgagagtaagacttagtacaatacattaccaccaacagtcatggatctggtcaaaggaggctgtagcaaagtttcttcatcattaaattgcttcttaagttcttctacagattccaaatggagttggagaaattctgctggtgctgctgatgcttcttctttaacaggatctatcattctcttcagaagtactaggtcatcctttcggactttcaaacaaagtttctcaatttctcggatattggatcggagttgctgaactgtacgtcctgcattgatatgctcttcatgcaacttgtcccagattctgcacctttgatacttctcaatatttatctggtgctttcttaacctttccaggtctgttgggattactatcttaatgaatttctggatagctggttcaagacggcgtaatttcactttttcttcatcttcagacatcctaaaaaaatgttgtatgacctccctggtaacagctgtcttctccactcatatagaaaaacctcccgcc

SEQ ID NO: 2470 - DNA, 758 bp, Homo sapiens
ggcatatcctatatagaatctattacagagctacgttatctccacaccttttgaggaggacagaagggactggaccgtgttggagctgccgcctggcaggtggtgggcctgggatctagccgcctctcctgccctgccttcctcttccccaaggggatgggcccaggaggcagctgggttgcatggagaggtccaggagggaccggaggtgtgacagatactgtgagcccggcgggccgcgcctggctgggtgcctcggtacttgaattctgtcttgttttccgcattgtgtctgtccacccgagttctctgtcgtcacttaactttgcattggatttggttgttgtactttgcccctgaatgtggacaaagctgtgggcaagaggtcagcaggacccgcctgggggtgccggcgttggtgactgcgggtcggggctcctagaacataggagccggctgcctggcctcctttctcctccaggaagagtcattctttggcatttgtgtttagagccaggaggaaggcggaaggtagggagggagggctggtccccctctgagggggctctagtgcctgaccctgacctgtcctcattcgacagctgaaactgttaagcgctggcccagtccccccaccccacccagccgtgtactgcctgggctcccctcaaagggaaatttttacggaaacatcttggcagcaagtggaaaaagatctatggcccatgaaccaactgaaaactccaagaaccctctgt

SEQ ID NO: 2471 - DNA, 3305 bp, Homo sapiens
ggcgccgacccatgctggctgggaacgtgtctcccggtgacgcagccccgggtggggaacgtggtgcggcggaagaggcggtggtgactgtacgcgcctccgccgcccccgagaggacgcgccgtgcagcggctgagtggcggcggcggcgacggcaaacccggagctgccggccggcgcgcgggaggaggacgcgggtgcggtctaggaaacggagctgcgggcggaggctccatgttgggaagcggcgccgttcgtgcttgttagcgggaatccgggagccgcggggtgagctggcgggggccgggccctaagtgaagatggaggccccgctgcggcctgccgcggacatcctgaggcggaacccgcagcaggactacgaactcgtccagagggtcggcagcggcacctacggggacgtctataaggccagaaatgtacacacaggagagctggctgcagtaaaaatcattaaattggagcctggagatgatttttctttgattcaacaagaaatatttatggttaaagaatgtaaacattgtaacatcgttgcctactttgggagttatcttagtcgggaaaaactatggatttgtatggaatactgtggtggcggatcacttcaagatatttaccatgttactggaccattatcagaattgcaaatagcctatgtatgcagagaaaccttacagggtcttgcctatttgcatactaaaggcaaaatgcatagagatatcaaaggtgctaatattttattgacagaccatggcgatgtaaaattagctgactttggtgtggctgcaaaaataacagctaccattgcaaaacgaaaatctttcattggcaccccttactggatggccccagaagttgcagcagtagagaagaatggtggctacaaccaactctgtgatatctgggcagtaggaataacagcaattgaacttggagaacttcagccacctatgtttgatctccacccaatgagggctctcttcttaatgtcaaaaagtaattttcagcctccaaaactaaaggacaaaacaaaatggtcatcaacattccataattttgtcaaaatagcactaaccaaaaacccaaaaaaaagaccaactgctgaaagacttctgactcacacttttgttgcacagccaggtctctctagagccctagcagttgaactgttagacaaagtgaacaatccagataaccacgcacattacactgaagcagatgacgatgactttgagccccatgcaatcattcgtcataccattagatctacaaacaggaatgccagagctgaacggacagcttcagaaataaattttgacaaattacaatttgaacctcctctgagaaaagaaacagaagcacgagatgaaatgggattgtcatcagacccaaatttcatgttacagtggaatccttttgttgatggtgcaaatactggcaaatcaacctcaaaacgtgcaataccacctcccctacctcctaagccaaggataagcagttaccctgaagacaactttccggatgaagaaaaagcatcaaccataaaacattgtcctgattcagaaagcagagctccccaaattctcagaagacagagtagcccaagttgtgggcctgtggcagagacttcttctattggaaatggtgatggtatttcaaaactgatgagtgaaaatacagaaggatcagcacaagcaccacagttaccacgaaaaaacgacaaacgagacttccctaaaccagccatcaatggccttccacccaccccaaaagttctgatgggagcatgcttttcaaaagtttttgatggctgtcctttgaaaattaattgtgcaacatcctggatacatcctgatacaaaagatcagtacattatttttggaactgaagatggtatttacacactgaatctcaatgagctacatgaggcaacgatggaacagttatttccacggaagtgtacttggctgtatgttatcaataatactttaatgtcattatcagaaggaaaaacctttcagctctactctcacaatcttatagctttgtttgaacatgccaaaaaaccaggattagctgcccatattcaaactcacaggtttccagaccgaatactaccaagaaaattcgctttaacaacaaagattcctgatacaaaaggctgccacaaatgttgcatagtcagaaacccttacacgggacataaatacctctgtggagctttacagtctggaattgttttacttcagtggtatgagccaatgcagaaattcatgttgataaagcactttgattttcctttgccaagtcctttgaatgtttttgaaatgctggtgatacctgaacaggaataccctatggtctgtgtagctattagcaaaggcactgaatcgaatcaggtagttcagtttgagacaatcaatttgaactctgcatcttcatggtttacagaaattggtgcaggcagccagcagttagattccattcatgtaacacagttggagagagataccgttttagtgtgtttagacaaatttgtgaaaattgtaaatctacaaggaaaattaaaatcaagtaagaaactggcctctgagttaagttttgattttcgcattgaatctgtagtatgccttcaagacagtgtgttggctttctggaaacatgggatgcagggtaaaagcttcaagtcagatgaggttacccaggagatttcagatgaaacaagagttttccgcttattaggatcagacagggttgtcgttttggaaagtaggccaacagaaaatcctactgcacacagcaatctctacatcttggctggacatgaaaatagttactaagcaacagaaactgatctcaaatgacaggaaaatgaatatactccattgaaaggaaaaataaggaaattcaatacaaactgcactatgatttgctttaactattatgggttatattgcaaatgatctgtactttagggtagaattcaatattttctgcagctggaaacagctagtctatctcttgccactgtgtggtggttatatcaagtttgcttaataaaagctatgagacaaatagtcctctagttccaggaaacacagtctttttttaaaaaaaacaatgtttgtaacaagggtgccatggtatttttagataactcgtgattatcttaagagaggtaaatttagtgatcattttatatcatgtcttattccttcttaatgaacataatttgttaaattctcaagcaaggttttcaccttttatattggccattctgtatg

SEQ ID NO: 2472 - DNA, 284 bp, Homo sapiens
aaaactgcacccgacagacaactttgcacaaagttcctgctttggactgagatggtttacaccagcgagtgaggtcccactctgtggccatgccaccctggcttctgcagctgtgctgtttcacaaaataaaaaacatgaatagcacgctcacgtttgtcactctgagtggagaactaagggccagacgagcagaggacggcatcgtctgggacttgcctctttatccagcccacccccaggacttccatgaagtagaggacttgataaagactgccataggca

SEQ ID NO: 2473 - DNA, 378 bp, Homo sapiens
agttacatatttataatattttttttctacatttattaaccccacattggcagaagatttccttctcaggcacagtcccagcttcatagccataatcccatgttagctctgttcttgctttcacatacctagaaagtagaaatttgaaaagaatcataaaataccctaaataactaccaatgaaccaaattatatcaattttcatattaacattaaccatcctcaaaaatatgatctgttctctcacccaacatccaccaattaggaatgaccttttattaagaataaccatttgagttttatttcaaatctactaaaaatgttaagtaagaaggaacctatcaatatgaggaagaagtgtattttgccaacagtggg

SEQ ID NO: 2474 - DNA, 771 bp, Homo sapiens
tttttttttttttatatgaataaaattttattgaattttagataattagaaagaataaagaaatgcaagataaatgctttctaaacagcatctgatagcatcatcttttcagtgtcatggtattttcacttttctttataaaaagtatagacattcatttatttaaatttttacaaagtaagaaccatcaaatggaaaaaaaaataagtaatgctaaagtaaattcagctttttatcaatactgaaatggttgggcaatggttaggttctgagtgtagccttcttgggaaaaacagtgtttgcagcagctgttggtttcccattcattcacataactgaaaaaaatgtccaggaagcccactccctgtgaagactacgcttgccaggagaagagagcaaaaagtatggtggtaagagggagtaagagaacacatccagaaagaaaagacactcttattgagacatgggatgagtatcataagtaatctaggaaacaaatctgagaagaaatttgtgggttgcttaagtgtggttaaggcaagacagtcactaatgcaagtatggccagatctacatagcacaaaataaagtgggggagtttgtaaattaatctggtgaaccgcaaggccagccaagccaggtagtaaccacaaaagtaatctctttacagtgatgtaaaatgcatctgggcaacactgcaaccctgagctgacacaaatgtagggtagacacttccaggagcacaccagaagataacacctttagtctcag

SEQ ID NO: 2475 - DNA, 611 bp, Homo sapiens
  misc_feature (1)...(611): n = a,t,c or g
ttgaacatcaggaagggaacaaactctgggacacacttgccttttaaggaactgttattacttcaccgtgaggggcnccgcggttttcattttttggaagttcagttgaggaccaaggaacccaccatttccaggacacaataggcatttccaatctgttttcaaattgggtgtcctctttgatagtggatgtgcttgtctcacccacagtagtttacattgctctctctgttgacatacttgaacatttgcccagncttgaataatgtgtgcttccagctacttccccccaccccccaaaaaaaagcaatantgaagctacattcccacttggttgaaatcaggctacaggctgagtgctagcttaccttgtacatggnnctttctccaaaccccggagtcctcctggcttcctgacntacctgttacagatattgngtgaaccctagttgnttttgangatnancacattggcttaagtcaatcngtannaatgttaagttgtncangggaaaattcttannnggnanccnggganaaaagggcnttntgacacanaacaanaannccgngtnanaancaagaatttggggcnnntngttaantagttg

SEQ ID NO: 2476 - DNA, 554 bp, Homo sapiens
gagttttatatcctcctgtttctaaatctggatgacagtgtaacactccagtaaggtgaattgtgaattgctgaaattcttcagatgtttaaaagagttttcagtattcctcatgttagaattaatgcagagaaaaattatatcctttgaactagttacatgttgtggacttctggcctgaggctcttggggattatgtgacatattggggaaagggaacaacatttcctgcccctgtggcctgttaactagaaatcctagcccagcaaatccagactacgtttgtgagaagacaggaaggcacagattagggttgaagccagccttcaacaggtttggctggcagtagacacagtggagcacatcttaactattttggtaggtcctgggtttctcttggtagtttttgatagaaaggggaatggtgtgaggaaaaagtgggcatacatttcacctttccactgataaggcaggtggaattgggatagtcagtggatgggccaatagctggtggctgtgagaagaataaggatttccatactggtgtgtcatat

SEQ ID NO: 2477 - DNA, 785 bp, Homo sapiens
ctcaaacaaaagttgttccaaacaaaatgatgaactttgatttgaacaggtgcatttaaacaaccggaaatgatcacttagaaaattcaattaaaatgctgttgttttgtaatgaggatttttcttctgatttcaaattccatgaactcctattgaaaacaaacaatgtacaggtaatatatgcacattgtagaaatgcaggaattatctattggaattaccctaaagatagaaattttatctatttgcttataaaattgattcagaaggttattaccttaatgtagttattactgaattgccaggaaatgagtggagacagagctttaagataaaggatactaaaaacagctaagaactccaggactcaggtcaaatcaaggaactgataataagatcattgaactgtataaattaagtcaaagaactcctattaaaaacaaacaggtaatatatgcacattgtagaattgtaggtaagcaaaaaggagaaggttgatcatgctttgctgtatgtcttcgtagactttctcagtccactctcagtacacgttttattttacttgctcatcctgattatactgtttttaccctccacttaagtcattttttgaatttaaatggtgaatatctttctgtgtcaaatatttcaacattaatatgtacatagtattaaatggatttactataaattatttagcctattcttactggccacagtagtctaactagatctttatacatttgtatttttctagaataaactcaaaaatgtgtaagaaaaaa

SEQ ID NO: 2478 - DNA, 2854 bp, Homo sapiens
  misc_feature (1)...(2854): n = a,t,c or g
gaattcggggcgctacggcggacccggctgggcagttccttccccagaaggagagattcctctgccatggagtcctacgatgtgatcgccaaccagcctggtcgtgatcgacaacggatccggtgtgattaaagctggttttgctggtgatcagatccccaaatactgctttccaaactatgtgggccgacccaagcacgttcgtgtcatggcaggagcccttgaaggcgacatcttcattggccccaaagctgaggagcaccgagggctgctttcaatccgctatcccatggaggcatggcatcgtcaaggattggaacgacatggaacgcatttggcaatatgtctattctaaggaccagctgcagactttctcagaggagcatcctgtgctcctgactgaggcgcctttaaacccacgaaaaaaccgggaacgagctgcccgaagttttcttcggagaccttcaatgtgccccgctcttttcatctccatgccaagctgtactcagccctttacgctacaggcaggaccacaggggtggtgctggattctggggatggagtcacccatgctggtggccatctatgagggctttgccatgccccactccatcatgcgcatcgacatcgcgggccgggacgtctctcgcttcctgcgcctctacctgcgtaaggagggctacgacttccactcatcctctgagtttgagattgtcaaggccataaaagaaagagcctgttacctatccataaacccccaaaaggatgagacgctagagacagagaaagctcagtactacctgcctgatggcagcaccattgagattggtccttcccgattccgggcccctgagttgctcttcaggccagatttgattggagaggagagtgaaggcatccacgaggtcctggtgttcgccattcagaagtcagacatggaccctgcgggcgcacggcttttctctaacattgtcctctcaggagggntctaccctgttcaaaggttttggtgacaggctcctgagtgaagtgaagaaactagctccaaaagatgtgaagatcaggatatctgcacctcaggagagactgtattccacgtggattgggggctccatccttgcctccctggacacctttaagaagatgtgggtctccaaaaaggaatatgaggaagacggtgcccgatccatccacagaaaaaccttctaatgtcgggacatcatcttcacctctctctgaagttaactccactttaaaactcgctttcttgagtcggagtgtttgcgaggaactgcctgtgtgtgagtgcgtgtgtggatatgagtgtgtgcgcacatgcgagtgccgtgtggccctggggaccctggggcccagaaaggacgatgaactacccgcagtggtgatggcctgaggcctggggttgaccactaactggctcctgacagggaagagcgctggcagaggctgtgctccctcctcaggtgggcctctggctgggctgtgggggactccgtttactaccacagggagacagagggaggtaagccatcccccgggagaccttgctgctgaccatcctaggctgggctggccccaccctcacccccacccccaggggtgccctgaggccccaggcagctgctgcctccactatcgatgcctcctgactgcacactgaggactgggactggggttgagttctgtctggttttgttgccattttggtttgggaggctggaaaagcaccccaagagctattacagagactggagtcaggagagagcaggaggccctcatgttcaccagggaacaggaccacaccggccactgaaggagggcaggagcagtcctccctctgaatggctgcagagttaatgttcccagcccagtcccctttcgggggccttgggagagtttaaggcacctgctggttccaggacctcgctttccatctgttcttgttgcaatgccatcttcaaaccgttttatttattgaagtgtttgttcagttaggggctggagagagggagcttgctgcctcctgccttgctacactaatgtttacagcacctaagcttagcctccagggccccacctctcccagctgatggtgagctgacagtgttccacaggttccaggaccatttgagattggaagctacactcaaagacactcccaccaggctctttctcccttttcctcttgctcactgccctggaatcaacaggctggttgctggttagattttctgaaacaggaggtaaaatttttgctttggcagaggcccctaagcaagggaggggtgttggagagccagtgcccttaagactggagaaagctgcaatttaccaagttgccttttgccactgtagctgaccaggggactaggttgtagaggtgggaaggccccctctgggcttgatcttgtgccattcttgaccttggacctgcttggttaaggagggagtgggccagaccagagtgcccaggagctaatggagcccaggctttgattcttaggagtggtccaaagccttcagcctagatggtgcaaagctggggcccagcctgtcttcaccggcaccctcacctgtgacaccaagacccaccccaatcccagacttcacacagtattctcccccacgccgtcctatgaccaaaggcccctgcccaggtgtgggccacagcagcaggtatgtgtgaaagcaacgtaggccccgcggactgcagtgcgcttagccaactcacctcccttctcttagcccaagcctgtccctcgcacagcctcgcacaaaccacattgcctggtggggcccagtgtactgaaataaagtcgttccgatagacacgtca

SEQ ID NO: 2479 - DNA, 1546 bp, Homo sapiens
gcctcagtatagacttggtatctgtgaaggactgagttcatgaatatgcacagaagcacttaaaccatgcctcttatttctataatatctgaaaatggcttcataaaagttaagtcaggagaacactgtttacatgacacttcttaactcatttttaatgtttatttttaatttcaaaaacttgttgcctatttggttttcagtactgcataacactgactttcttaaattagtcatagttgcaataatttacttaaatttggtaatgtcacatttgggttggggtttcagtgggaatagtaacttgccgctagtgagaaatggcattgaatactaaagactcaatatgaacaggctttatagacccttagagaaactgttgccttaatgtttggtgcaatttctagtagtgcataagtgaatttagttcttatgataaggtaactttgagactgtttttagcttagtaagaattgtggaaaccacatgtttattgtgcccatcattttacacaaagaaaagaggattatattatttcttctaaggaagtaggagttttcttcctaaaagtgcttacatattgtagtactattacttaaaagttatttatgaagttgggagccttctagtttgcctgtgttgatgtattttgaaaacaaaattgcaataaaggatgagcttccatcggtgtgtatggtataccagatacagatggttgcaaggaaaccttttcccccactagaatagtctattagtaactgctaagtcctagcttgcatttttgaaaatgcctttctgcatgttagcacccagactttcctttgtcatattcctttatagctacaacttaactgtagcttatcagagaagctctgtagtcctacactgaagtgtgttcccttggctgttcatatggggctgggtttggttgaacttccattctgtataaatgctagaacacagttactacagattgattcacaaactgcatgtgctggtgcttgaggcagccaaaatggaatgctgtggaaagcatatctatatcttaaaaaacactcagacaggagttaaggacagctttaataatttttttgtttaccacttaatctttatcaactttgattttagttagggcttagctcatggttgaagaaaagtggaaaataacaagtgcccatttaggtttgaagaatccagaatgttttacctttgactttatgagttatagaagcttggctttgctctaggtttcatgttcccaaatgagccatctgtcagtatattcacttaattcttactaatttcagtttcctgtaaaggaaacaacttacatattgatgcttaaatccagaaagtgtaaaaggttttcttaaactgttaaaatatagtgtctgatataaaggatgtaagttactcagcttctgctcctaagccaacagtgttgtctcagtgtgaaatttaactgtaaaaactacttgtaatgtcaagagattatagatcatattattaataaaatggacctgggtctaaaaaaaaaaaaaaaaaa

SEQ ID NO: 2480 - DNA, 405 bp, Homo sapiens
aattcggcacgagacgggcccttctcattctccagatggcaggaatgaggcctcttcagacaggtcacccagtctgcccttcaggcttcccatccattattttttctcgacatcctttggtttttttcaaggaccccccaaatttgtgatgatgtatttgtctacctgtttacttgtttctttccacctgactgtgaaccaccgctggcttgcttttcactgtacacctataggcctggcactcattcagtgcttagcatgtaatttttaaattaagactgccttagtgagaaaatttcagcaggtgagttaagggcacgaggaaagggcctttgtgcagaagtaatgacataggcaaattgtcaaaggagaggttccctggtgtatttgtagaagaaagtagac

SEQ ID NO: 2481 - DNA, 2309 bp, Homo sapiens
gaattcctcctctcttcaccccgttagctgttttcaatgtaatgctgccgtccttctcttgcactgccttctgcgctaacacctccattcctgtttataaccgtgtatttattacttaatgtatataatgtaatgttttgtaagttattaatttatatatctaacattgcctgccaatggtggtgttaaatttgtgtagaaaactctgcctaagagttacgactttttcttgtaatgttttgtattgtgtattatataacccaaacgtcacttagtagagacatatggcccccttggcagagaggacaggggtgggcttttgttcaaagggtctgccctttccctgcctgagttgctacttctgcacaacccctttatgaaccagttttcacccgaattttgactgtttcatttagaagaaaagcaaaatgagaaaaagctttcctcatttctccttgagatggcaaagcactcagaaatgacatcacataccctaaagaaccctgggatgactaaggcagagagagtctgagaaaactctttggtgcttctgcctttagttttaggacacatttatgcagatgagcttataagagaccgttccctccgccttcttcctcagaggaagtttcttggtagatcaccgacacctcatccaggcggggggttggggggaaacttggcaccagccatcccaggcagagcaccactgtgatttgttctcctggtggagagagctggaaggaaggagccagcgtgcaaataatgaaggagcacgggggcaccttcagtagcaccggaatcagcggtggtagcggtgactctgctatggacagcctgcagccgctccagcctaactacatgcctgtgtgtttgtttgcagaagaatcttatcaaaaattagcaatggaaacgctggaggaattagactggtgtttagaccagctagagaccatacagacctaccggtctgtcagtgagatggcttctaacaagttcaaaagaatgctgaaccgggagctgacacacctctcagagatgagccgatcagggaaccaggtgtctgaatacatttcaaatactttcttagacaagcagaatgatgtggagatcccatctcctacccagaaagacagggagaaaaagaaaaagcagcagctcatgacccagataagtggagtgaagaaattaatgcatagttcaagcctaaacaatacaagcatctcacgctttggagtcaacactgaaaatgaagatcacctggccaaggagctggaagacctgaacaaatggggtcttaacatctttaatgtggctggatattctcacaatagacccctaacatgcatcatgtatgctatattccaggaaagagacctcctaaagacattcagaatctcatctgacacatttataacctacatgatgactttagaagaccattaccattctgacgtggcatatcacaacagcctgcacgctgctgatgtagcccagtcgacccatgttctcctttctacaccagcattagacgctgtcttcacagatttggagatcctggctgccatttttgcagctgccatccatgacgttgatcatcctggagtctccaatcagtttctcatcaacacaaattcagaacttgctttgatgtataatgatgaatctgtgttggaaaatcatcaccttgctgtgggtttcaaactgctgcaagaagaacactgtgacatcttcatgaatctcaccaagaagcagcgtcagacactcaggaagatggttattgacatggtgttagcaactgatatgtctaaacatatgagcctgctggcagacctgaagacaatggtagaaacgaagaaagttacaagttcagcgttcttctcctagacaactataccgatcgcattcaggtccttcgcaacatggtacactgtgcagacctgagcaaccccaccaagtccttggaattgtatcggcaatggacagaccgcatcatggaggaatttttccagcagggagacaaagagcgggagaggggaatggaaattagcccaatgtgtgataaacacacagcttctgtggaaaaatcccaggttggtttcatcgactacattgtccatccattgtgggagacatgggcagatttggtacagcctgatgctcaggacattctcgataccttagaagataacaggaactggtatcagagcatgatacctcaaagtccctcaccaccactggacgagcagaacagggactgccagggtctgatggagaagtttcagttcaaactgaaacttcgtcgacgc

SEQ ID NO: 2482 - DNA, 1762 bp, Homo sapiens
aatatttcttctgacagtggacagctgacatatcaccactttccttctactgtgagtgtctctggatgggcagaaaggaatggccagcccctggttatggtcatctaaggtcacctctgaaatgctgtgagcccctcttccttcctctcctctgctatttcccatctctgctgttggcaggagaatagaaccctgggctgccagagatgcaagtgtgtgacgatatgggtgctggtgcatatttagtatgtgcctgtgtccagccatgtgcatgtgtggggtgtgtgagtgtgtgacccagcccttcccccgtgggccaagcagagagagtggccttgaggaagccatagcagcaggaccagcatgggcctctgctgcctctgtgaccagcctgggcagatgaagtcaactgccccatctgtcagggtaccctgagggagccggtcactatcgactgcggccacaacttctgccgggcctgccttacccgctactgtgagataccaggcccagacctggaggagtcccctacttgcccactctgcaaagaacccttccgtccctgggagcttccggcccaactggcagctggctaacgtggtggagaacattgagcgcctccagctggtgtccacactgggtttgggagaggaggatgtctgccaagagcacggagagaagatctacttcttctgtgaggatgatgagatgcagttgtgcgtggtgtgccgggaggctggggagcacgctacccacaccatgcgcttcctggaggatgcagcgggctccctatagggaacaaatccataagtgtcttaaatgtctaagaaaagagagagaggagattcaagaaatccagtcaagagaaaataaaaggatgcaagtcctcctgactcaggtgtccaccaagagacaacaggtgatttctgagttcgcacacctgaggaagtttctagaggaacagcagagcatcctcttagcacaattggagagccaggatggggacatcttgaggcaacgggatgaatttgatttgctggttgctggggagatctgccggtttagtgctcttattgaagaactggaggagaagaatgagaggccagcaagggagctcctgacggacatcagaagcactctaataagatgtgaaaccagaaagtgccggaaaccggtggctgtgtcgccagagctgggccagaggattcgggactttccccagcaggccctcccgctgcagagggagatgaagatgtttctggaaaaactatgctttgagttggactatgagccagctcacatttctctagaccctcagacttcccaccccaagctcctcttgtccgaggaccaccagcgagctcagttctcctgacaaatggcagaactcaccagacaacccccaacgttttgaaccgggcccacctgtgttctggcccacactggcatcacaggggggagacacacgtgggtgtggatggcccagggtaccctggggactcaggctgctgccagttctgctcaccaccatccgtgcttggcacagaagtagctgcatagaaagggcactggatttgaagtcagaagacctgggttcttgaaccagcctgtcaaccagttgtatgactttaaacaaggcatctcacctcttttcatcttgttttcttccaataatgttagagttcatgtaatcacattctctagaaccatttagtttgtgttaactatgaaccaagcagtgtggtggccactggtgacttga

SEQ ID NO: 2483 - DNA, 915 bp, Homo sapiens
tttttttttttttttttcaggcttttgctttctttattcagtcacgactacacgctcctatgtgactgtcctatggtacttggggaccgggcggtccacctgcagcctgggggaggacatccctataatgaacatgctgcctgggcttcagggggccactttggtggccaagatggcatccaggacaccccccaagtgcaccacctgcacctggtggaagccgtgcagctccagcaagcactgatactcgcccaggctccgctccttgccttcagtctgcaccagcatgttcagtgactgcatcagggcgcgctgcgcaccctcttctcctcatccaggagcgtctccaccagcagcaggccggcccctggcttgcagctctcggcgaccctgctgagtaacttgtggactttgtcgtctggccagtcatgcaggatccggcacaggacgtacagctcagcgctggggagggggtccctgaaaaagtcacctgctgcgaagtggatctgcactgcctgcggtccggggggttggaagtgggcggccagctcgataatgtctgggaggtcaaacacagtcacctgcatacgagggtactcacgggccagctctcgggccagtgcaccggtgcagcctcccacgtgccaggccgggaggagaagcgggacagattgaaggccgtggccacctggcacgcagtcagcttcgtcatgccgtgcatggcccgcatgaacctcagccgcgtctccgggctctggtagtacgcatcctggaacagatcttccgccttcttccccaacgccctgtggtgctggtttgttccctctcggatggcaaactccaggtatgtaaagaggttccatgtgaggtcattattgtgcatgatgaagccgtgcagagagtattcgccatccg

SEQ ID NO: 2484 - DNA, 433 bp, Homo sapiens
  misc_feature (1)...(433): n = a,t,c or g
acccgttttncntntttgaannaccnnnnnnnnnnnnnnnnnnnnnnnnnnnnnnnnnnnnnnnnnnnnnnnnnnnnnnnnnnnnnnnnnnnnggcacgagaaaatctaaaaatgaagagtagaacttcaaaagaaaatataggagaacatatttatgactttgacataggaaggtttgttaacacatagagtaaaccagaagggaagagattaagttttaaaacttctgttcaagaaaagacaccatagttataagggaagcacaaatgaatgaagttggaaccatgtaccatatccgaaaattaactcaaaatggatcaaagacaatgtaagatctaaagctataaaactcttggaagaaaacaggtctgaatcttcaatttggcaaaggatgcttanataatgccaaaagcacaagctatnaaagaaaaa

SEQ ID NO: 2485 - DNA, 428 bp, Homo sapiens
gtgaaggcttggggagtcttgtgcatcctggaagatggacacttggggcttcaagctctttgaaggatgggtgttttcaatgttaaaacttgtttgaaaggccttgccgaaggaagtccttgaagtagctttcttgtctgttgaggtatttctcactacctgaatcttctacagcattcctgcagactggggacatcgaacccattaaatgaagccattgtggttttgaacagttccatttttcgggccgccttccttttattaagctgaaatctgtatcacttcaccttccatacattgttctgatctcgtcccttgggagacttagaggattcttgccataacgtcttcctcatggaggctcttcatgtggggcctgtgtagttgggcacaccccctgcctgggcttctggctataggctgctcac

SEQ ID NO: 2486 - DNA, 420 bp, Homo sapiens
tcattatttttaaccatcagaaattatcttgttctcttgtttctaatagtctgtcccttttcacagagccaagactttatcatattttacaatgctgtaccccattgctaagaacagtccctgccacatgacaagctctttaaatactgaatgaatgaatgaatgaataataacagcaaagtatacctactccatgcatgtttaaactaggtgcaaggcattgtgatagataacttataaatgtaccagacaaggtcatttatggtcgggtatgtgccatgtataggagaggaatattaagtgccttaagatcaaaatgctattggaattctcccctgacccaccccattaagacattggaggagttttatttagtaaggctgtttgctgagttttggttggacagtggcaggaatggct

SEQ ID NO: 2487 - DNA, 438 bp, Homo sapiens
gacactcttcagcgaccacgcaggcactttcccggtccccagtataccataattgaagaaaaatgatggaagagagtggaatagagacaacaccacctgggactcctccaccaaatcctgcagggctggctgctactgctatgtcttctacccctgttccattagcggcaaccagttctttttcttctccaaatgtatcctccatggagtccttcccaccactcgcatactctactcctcagccgccccttcctcctgtgaggccttcagcaccattaccttttgtgcctcctcctgcagttccttctgtcccaccacttgttacttctatgccacctcctgtttctccatcaactgctgctgccttcggtaatcctcctgtatctcacttcccaccttcaacttctgccccaaacactcttttacctgcaccccctt

SEQ ID NO: 2488 - DNA, 417 bp, Homo sapiens
ctctgtctcaaaaaaaaaaaaaaaaattatatatataaaaaaaattaaattcagggcttatagccactaaagatcttgcaacatccagaagttctcttctggatctattatattctccttcatatcatatctactttacttaaacactagcattccagataaaattaagatgtcattttatcttacatttaaatgattattggctactattaacagaattgtatcctaatttcagatagaactatagaatattttagaatcttttgtaaaataaccttaagagcagccttgggaaccctgtcatcatttatacttcttaaaaattagaaaactgtgttataaggtacaggtaacaagttgagaaaccaatttgtgaaatgctaccgatctatatctacatattttcagtgaggagga

SEQ ID NO: 2489 - DNA, 879 bp, Homo sapiens
gataggcgacacgccggcgggcggctgaggcgggaatggctgctgtactgcagcgcgtcgagcggctgtccaatcgagtcgtgcgtgtgttgggctgtaacccgggtcccatgaccctccaaggcaccaacacctacctagtggggaccggccccaggagaatcctcattgacactggagaaccagcaattccagaatacatcagctgtttaaagcaggctctaactgaatttaacacagcaatccaggaaattgtagtgactcactggcaccgagatcattctggaggcataggagatatttgtaaaagcatcaataatgacactacctattgcattaaaaaactcccacggaatcctcagagagaagaaattataggaaatggagagcaacaatatgtttatctgaaagatggagatgtgattaagactgagggagccactctaagagttctatatacccctggccacactgatgatcacatggctctactcttagaagaggaaaatgctatcttttctggagattgcatcctaggggaaggaacaacggtatttgaagacctctatgattatatgaactctttaaaagagttattgaaaatcaaagctgatattatatatccaggacatggcccagtaattcataatgctgaagctaaaattcaacaatacatttctcacagaaatattcgagagcagcaaattcttacattatttcgtgagaactttgagaaatcatttacagtaatggagcttgtaaaaattatttacaagaatactcctgagaatttacatgaaatggctaaacataatctcttacttcatttgaaaaaactagaaaaagaaggaaaaatatttagcaacacagatcctgaca

SEQ ID NO: 2490 - DNA, 908 bp, Homo sapiens
gcaaagatgccccagagaagtttcggggtcttggtgtacgaattgaggatgatgtagtggtgactcaggactcacctctcatcctttctgcagactgtcccaaagagatgaatgacattgaacagatatgcagccaggcttcttgaccttcactgcggcccacatgcacctcaggttcaaaatgggtgtcttctggcagccctgcacgtgtgctttctgagtgtctctgtgtgtgcattaatatatgcattccatttgggagcatagcagctgtgtgaatgtatgtaattgtgtgtggggggttttttgttttaagtagttagaagtctgggaaaatgaatttttgaatagtatgttactgcagctttggtaacattaattctatagaattaatgatcagagcaagtttaatttttaaacataaaggtcttggttacacatgtccatgcattccagttaacacatttaaacatatagaaaattcacttcttctttcaagtccttccctttctatacttttgctgagatcaacccaatatcataagaagtttgtgtgatgcctgtatttttagctaattaccaaggtctctgcctatgcaaaaattcatctttcggtgattgtgggcggccaatacataccttctgtaactcctccctacctattctagatcctgcatatctactggagccatatgagccctcaggggcactggtgtcctgcagtcttactagtcagccacagtccaggttccagcaacactagctacctaccaaacaaaacacttctgagcttttcttgccatttggttgcctgggacctggaaagtgtttagattcttgataaagatggaaatggaagagaaagaaaattatatatgtatatactaaagatccagacatcagggctg

SEQ ID NO: 2491 - DNA, 480 bp, Homo sapiens
ttcggcacaggggcaaggcttataagacaacatggggagatggtggagaaaactcaccttgcaatgtagtatctaaacagccagggcccggtgacaaatggtcagcttcagcaaccaacaacgggagcagccagtggtggatacattaaacgcataactaatgatgccagagaagatgaaatggaagagaacctgactcaagtgggcagtatcctgggaaatctaaaagacatggccctgaacataggcaatgagattgatgctcaaaatccacaaataaaacgaatcacagacaaggctgacaccaacagagatcgtattgatattgccaatgccagagcaaagaaactcattgacagctaaagctactgctgttcttctttatcatttattcacttccgtagctcctccttgaaagttattaccttttcagagtttaagttttcggttccacgctcttctaattgggagataatatgg

SEQ ID NO: 2492 - DNA, 1031 bp, Homo sapiens
  misc_feature (1)...(1031): n = a,t,c or g
aaaagccctgggtcccagcagcagagagacaggacagaggggatgcttgggcggggagggacggtaacctgcagaacagattccatttttatagaacgagtacacgtttgctaaaacagtcctgctttcccagactggattcccaccacagggacagtcggaactcaggactagctccagcgacatctttcctccgaattcaagccttctatcacaatgtcaaaacagctatttataaagccattttcattgtacttgataacagcacgagtcccaaaacttttagaaataaaataggacattggcttgattgaaaagagggactttttaaaaattgttctttcgtcagaagccttttggatgacttacaatagctctgatgaagataccaccccagcgtcagtccaataggtcagtgagtttcaacaggcatccatccctcccatgaagggattctggtgatgggaagtttctgtaatgacaggaaagcattgaccctcattgattgtcaactttggtattagccatgaaagacaggatgctcattgggtgttctgtagagtgaggaatgctgcctattccctcccagaacgtctgacccagggggtgtgtgttgagggagccctgggggaaatggaccaagttttcccacagagcagtattaggctgaagagccaggtgactggtaggccccagctcccatcattccctcccaaagccattttgttcagttgctcatccacgctggattccagagagttttccaatttgggaagccatgagaaaggtttttaaatcttgggaagatggagagagggacataggatagttgactccaacatgacaggaagaggctggagattggnaattggccatcaaccaagcctgtagtagtaaagccatggtcccgcattggaattacttggggaacttatacagttctgatacccaggctctcctagaccagttcaaccaattctaggtgggggactcaggcatcagtgtgtttcgtagcttccccgggtgttttc

SEQ ID NO: 2493 - DNA, 283 bp, Homo sapiens
  misc_feature (1)...(283): n = a,t,c or g
ggcattcggcagagcttgnnnnnnnnnnnnnnnnnnnnnnnnnnnnnnnnnnnnnnnnnnnnnnnnnnnnnnnnnnnnnnnnnnnnnnnnnnnnnnnnnnnnnnnnnnnnnnnnnnnttctttataaattaatcagccctcaaannnnnnnnnnnnnnnnnnnnnnnnnnnnnnnnnnnnngtgtgtgccctgcagttgttagatgtttatgtattaggtcaatgttactaaatgtataatttaagtcttctatactaactttgagcactttttttttttttt

SEQ ID NO: 2494 - DNA, 619 bp, Homo sapiens
  misc_feature (1)...(619): n = a,t,c or g
cccacgcgtccggtaatgtttttctccgagttgtcagaaataactggaagaatacaatatatggccattatggagccaggggctagttggtggtttactatacatttgggggctacctggtcacatttaatctaggtttttttttctttttttaagtaaaggtgtggtctcttccctgtacttatgaataaggacaaagccctatttttgtttccacataaagatcagctactgaattggtgaatttcctgacagacaatgctatctaaccataagttcatgttaggggaagcatttttccatcagtttctttaaaattggattgtctggtgagttttgatattaaacattatgtagctaagttttttttttttagcatttctttttaatttttcaatctatattcacaggcccatacttcagtcagtccaatcatagtacagggatgtgggggtagatgctatgaatttcttcatngaaaaatacggatcattngaatttnggggggataaaatagttcaccatgggtatgagatattnattntttaaancaangtaaattagantttttaaaaagcccaaactggnggcnggtttngaaatanggggnccttttagg

SEQ ID NO: 2495 - DNA, 810 bp, Homo sapiens
  misc_feature (1)...(810): n = a,t,c or g
gtactctaaaaaaatttcctattaacatgaagttacaagatttcattaagtttttaaattaaatctcaaatcttttgttactaagtagcaacatgactgcttttcttcttaaaattcatctgttttataaactgtcagcatcatagtatccttctggataatttgtgagtgggcagcatctgtacttttcagaagggaagaatagatatttaataatttactcaaggttgtaccgttgcagaatcagaaattagaatctcagtcctgttgagatgtgctctcaagataaaatacatgtgccatgcaaataagggcatagctttcttgtctagcaatggttggcccagtatgtggcccaacatatatttcctgtagaaggaatgagaatcactcctatgttgatgaccatagctgaacatgactggaagaattttagcatgaccagttgactttttttcctatcaccactggctagttctgaaagtataaagtgttaagttataaactgccagcgttataattcctcttctggtaaaatgaaaaatcagtannnnnnnnnnnnnnnnnnnnnnnnnnnnnnncaggtggaccacctaaggncaggagttcaaaaccanggtnnnnnnnnnnnnnnnnnnnnnnnnnnnnnnnnnnnnnnnnnnnnnnnnnnnnnnnnnnnnnnnnnnnnnnnnngnnnnnnnnnnnnnnnnnnnnnnnnnnnnnnnnnnnnnnnnnnnnnnnnnnnnnnnnnnnnnnnnnnnnnnnnnnnnnnnnnnnnncagcctgnggnncnagngncaaaactccggg

SEQ ID NO: 2496 - DNA, 1035 bp, Homo sapiens
ttttttgtcattgcttttctcttttctttccttttttttttttaaagagaccattccactttattataacatctggatgcataaggactcatgtaaagcagtcatacaccattatcattaaaacccatatggtaaaatacatacacagtccaacaaaaggctaatacatagtaaagcctaagcatactactatgtaatattataatacataacttggagactttagttagagtactatgttatctattcagttttgaaaacattcattaagattttaaatgcaaattcattccttatttggaataaaacaaagtcctctaagttataacaagtattggtcataagttttcagacctattcattaaattacaaagaacccaaagaattctgtgatgtccagtagaagtatgtaataaaaacattgcatatgtttctagtgtgatgtctttagcaattgtttactgaagtaaaatgcaaacatcaatctttcaaaatacaagatcagaaggtagttttcttcttttttgtctatttgtgaaatccatcttcatcacattttaccaaaaattgtttttacaaatatgtaaaagtacattagataatactaatgaaacacaggtagagttctagcatatgcagatcaatgatcagtcaaatcatcttctccaagaacgagattcattgtcctcttcttcttcatcatcatcttgaagtaatgagtcatccaccaaagactcttcctgaaattcttcttcatcaggctcaacttcttctgtttcaacagctgaaatattagttactggtttattccatgccagttttagatcttgccctttgaaacgagctccatgaactgcagctgcttcagctttctgctcttgtcttgaatggaattactggatgaagtgaggaatcatcaatctgacaatcttcaatttcaccatattgcgcaaaatgaggaagaagatcttctctatcgctctccgtaaatgcagaaatctccaatggcctggggaggggattcaacacaggatg

SEQ ID NO: 2497 - DNA, 1628 bp, Homo sapiens
gtgtgaattctgttggctttgtatgaaagagatctcagacttgcattacctcagcccctctggctgtacattctggggcaagaagccatggagccgtaagaagaaaattctttggcagctgggcacgttgattggtgctccagtggggatttctctcattgctggcattgccattcctgccatggtcattggcattcctgtttatgttggaaggaagattcacagcaggtatgagggaaggaaaacctccaaacacaagaggaatttggctatcactggaggagtgactttgtcggtcattgcatccccagttattgctgcagttagtgttggtattggtgtccccattatgctggcatatgtttatggggttgtgcccatttctctttgtcgtggaggcggctgtgggagttagcacagccaacggaaaaggagtgaaaattgaattttgatgaaggatgatggtccaatcacagtgggcagatgcctggagagccctcaagaatccccagcattggggaaagcagcattgaaggcctgactagtgtattgagcactagtggaagccctacagatggacttagtgttatgcaaggtccttacagcgaaacggccagctttgcagccctctcagggggcacgctgagtggcggcattctctccagtggcaagggaaaatatagcaggttagaagttcaagccgatgtccaaaaggaaattttccccaaagacacagccagtcttggtgcaattagtgacaacgcaagcactcgtgctatggccggttccataatcagttcctacaacccacaggacagagaatgcaacaatatggaaatccaagtggacattgaagccaaaccaagccactatcagctggtgagtggaagcagcacggaggactcgctccatgttcatgctcagatggcagagaatgaagaagaaggtagtggtggcggaggcagtgaagaggatcccccctgcagacaccaaagctgtgaacagaaagactgcctggccagcaaaccttgggacatcagcctggcccagcctgaaagcatccgcagtgacctagagagttctgatgcacagtcagacgatgtgccagacatcacctcagatgagtgtggctccccccgctcccatactgcagcctgcccctcgacccccagagcccaaggtgcaccgagcccaagtgcccatatgaacctctctgccctagccgagggacaaactgtcttgaagccagaaggtggagaagccagagtatgaagtggaatgaatgctcctgttctgagaagcacacttgtaactgcatcttttggaatttttttttttttttttccaaggggtagagatttatgtattttatttcacagattctctggtcacaggtttttgcccagggaaattctgagaaattcacaatttcttaccagataaaacatgaaaagtttgccgttagttcccctcccctcccctccctctttttagttttaatttattagttaaactgatggcagcaatccatgaggtgtgtcaaagagtgtacatatgtatgtgtgtatattgaatgctaaacatattactgaaagacacattttaataaagatttctgtcataattca

SEQ ID NO: 2498 - DNA, 2406 bp, Homo sapiens
  misc_feature (1)...(2406): n = a,t,c or g
aattagagggtcagaaacacccaggttcctccagaaagctccttggacccaacaacttaacaaatcaacttggctggaagttagagtcattatatgaagattgggcttgaagtatatatttttgcatttaaaagtatcacctatcatattttccactcgaaaattgacatagtagcattgaggatactctgatctagaaagccaagtatttgagcaacatctatagagatctacttttctcctatgtctcctaggctttccatgataattaggtaatacatttaagaaggatatttatttctgttttgctctattcaaagaaacggaatgggatagttattctgtaaactaagtttgtatataactttatttgggtttaatttccacaactggtatctgcaaatattgccagcattttagccatattttgggagaacttggtgtttgaggtcccagggaaatgaggtctgatccaaatgaaatgcaagcacaatttgcttacagccatttaactttctgttgggaggatgaattaacaaactcacattgtgcagtccgcttaatccaggcacttttctttgtgcaggtgtagtgagtagttacttctctcccttacacagatgacttgtgaaactcaagctcaccatcttcagtgctggcattttactttgccactacccaaaaacaatgtgagatgtgttcagtggcctctggtactctttgcagggcaagaatcaaacaacatggggactgagggaaggatggggaagtgtagccacagttcttccaaatgtaaatactttttgtttgttctagtggtaaaatgcaaatgcaatccatatttgttaggatggtcaggtctcatgagaaatctatgctatgtgtccagagcttttgaaacagagtccattggagtgggagttagggagtgtagtggatgccaaatatgtttttcttcagtgcttaagagaactgtttcctgaagtccagctttgaacataaacaggggtgtgggttgggggaggagcttaggacaaacctctctggatgaaggtcagcaatagactgaagtcttgactgcatggaagaggaaaaacatcagaactgtcctgacaatggaggggacagtgagctacgccacaactgcccaacgnaggtgaaacttgcacctgcccaggccggatgaacatcagcctgcaagaactagttgtttgagttgatttgcagtgcctctcaatgggcaagtgcccacattttccctggcagagatctccaaaaatttaaaacagaataataatggctatatcgagtgttttctcagtattggagaaatgcttaggtcctatgatagcttcgggacatctttctgtaattttcctcaattaacgggttggtaggggtaaatcttatgacacctttccaccgtcgatttgagatcagttttaatggttaaaatgtttactctccttctgtcaaccctcacctttttatttacacccctccctttttttctgtacagggagagaagacatattgactctgactggacaccctgattcctccaaatatatataccactgtgtattaatctttctctcagtgttttataggagtactaacatttattgctctgtcaataatgaaaggctcgatgtaatatagctgtaatttactttccatatgaatacagtggctaggttcataaaagagaattgtgtgagtctgggattaccacatctaaaacattattctttaatgggataatacaattcattgagcagctaccacttaaaaaacttgcaggacagttagagcctgcatttctagttaagatggatcttgtaaatttaaaattggattaacattggagtgctggggtggctgcaataatttgggggctaactccatttggtttccaagatctcacttctgcattatctttatggctctttaaaccagccacctagccaatcaagggcaattcccatctcatccatcactcaggtctttgtaaagggtgcaagccaagctctgcagacttttgcaggattgtctagcctgagtaccgggctacttcttaaatgccgtcactcctgctgagataaatgcgtctttaaaaatagtctctgtgggcaggtcactggggggacaatgtacaggcattctgggccatccacttctttttccactttcatgttctaccccaagagactcccgatgtcgggctgtggagggttaaagggatgaggctttcctttgtttagcaaatctgttcacagttcttgatgatgtattttatgatgcccagcctnggaaatagttgctttccatagtctcaactgtattgtgtcatctcctgatgctgatttttgatcttttgttttattaaaaataattagtgaaaaa

SEQ ID NO: 2499 - DNA, 4019 bp, Homo sapiens
  misc_feature (1)...(4019): n = a,t,c or g
tttttttttttttttttgcaaggacacgcgctttatttcggaagtgataattccagctccaggtgggtgaaccccggaggacctagtgtccccccccaactccattctcacctataccagctcgggacagtccctgctcgcgcccagcccacctagaaacagtcccttcttgctgagttccaagtgtgcaggcgaaagagatggggctgttcttcagatttctcttcccagctttcagcccccgagctgcccacagcgtttcaccctccacatcccggccgccctctgggcatgcgggtgaagagtgcggcgcgacgctgacctctagtggtcggccttggtagtgcagggcagacgggccgagggttgagccgcgggccgtgcggggacaggccacttgttcccatcccgctttcctcgccccactcctcgtttacccgcacccctctgctccttggttgaggctcaaggattgagcctgacaacccaggcgtctttgggtagttgccttcccgggactaggaaccctaggaatgggtggcggggtggggcggggacagttctgtctctccgctcaccctgtcccgccgccgccctcatagggccaggcacgcagttaatgtctgccatccatctattcgtcaaatatttgcggcacacctgcctagccagagagaaaaggacacgacacgacccgccccccggggctcgcaagccagtcctggggcctgaccgtgcgggaaccgcggcaaacactgggctgcgaaagcgcaaaggagaccgaacccattgggggcggagggggaggagggccaggcaagtccctggaggagacaatgctctgaaagacgagcagaagttagctgggtggagaagcggagagcggcgctccggtcgcggggctcagcctccgcagaggctccgcggctgagggcgagcaggagaaggtaaggccacgcccccctgttgtgattggccaaccggggtccgacgtgtgggcccgctggctgacatgataggttttaccggtgtcccaagagcggagcccgccggcaggcgccgggccccctgggagctgggctgagacctttgatggggtctccgcgggtcgcccccctagggcttctccaggctgcggtacttcttgcgctgcacggacaccgggtccttaaacagcaccgggtccagacgcagacgagaggacagcaagggcatgtggccgaacgctgccgctatctggttgatgcagtcgggggctggggcaggcggctttggcctgggccccgggccccccaggcgccagtggagcagcctccctggcgctgccttgccatagggcaccttgatagggggcagcttggtgactgctgctactatgaaattcatcaggacgtcccanacaggtgggtgcctcatctgccagggtcctcagagccttgggcagggagtgggtgaagagagtgtggtaatacctatggtagaaggcggctgtggtgagaaccatggagaattcgttggtcctctcagcagtgtagccccagccaccatgggcctcgtcccagaaatggctcgacgtcaggaagcccaccatccgctctgggaagctctgccacaccagaaaggcaaagtccacctcacttgtggaaagactgctgcgggcatcgaggctgaggatggcatctgttctgatggtgctatatgggtagaagccgatcactaaccttcctgtgcccatcaatgactgtcaagggcacagctgtcttccggccacctggatgggagtggcctctcattgctccagagaaccaagatctgggcacagtgctgggagcctgccaccgcctggatgagcttcagagggggctggcctgggggccccacccagatcagggcgctgaatctgccctcagggcgggagccctgttgcaggtagtagaaggggaagtcctgggggcttgtggaaaaagtagacagggccaggagtgcccctggggggctgttccacagcagtgaggggttagctgatgttccaaaaatccggtcctgaataacctccagagtggtatggatgaccttctccactgaggagaagtaggcatcccatagaaactgggtctgctgacgcagggcgaggacccgtgcaggggacatctcctggagggcagccaggacctgaagtgggagcctctcatcagctacgatggctgccttggtccagtcgatgacctcggagaagggcagctcccagcgggggctgagaagcactgggatgcagccggcctgcagggcttggaggaagcgcgaggcagcctcgggacggtggccagagatgaggcagaaggtggcattgggcagcgtctcctggcgctgggtctgcccaggtccagggtcttgctcacagcgcccatcccaggggcaggcagaggagccagtgtctgctgtgcgccacccacccctctcctcttccagggctagcagggctaccccgggctgggggctgtgttgccgcagctggccaggagccccacctcgcaacgggtgggcttcagggagaaaagggagggccacatcaaagccgggccggaaggagtccaccgtggggctggcctcagccaccatagcctgtcccagctggaaggtcctggggcagggagccgggtggagacggaggaccagatggttcctgcccctgttccattgcagaggcattgagctgcactctccagtctgggcgtccaggctgaggaggaggaggaggcaggccccagcagggctgaatgtgtagaagcgagagccctcaatggaagccaggatcctgcgatgagtctcagagatggttccaaccgctgggtacacgaataccttaaggccatcgcccctgcactttgaggtatcaaagcaagattcccagttgcagctgccaccatgaggggcttgaggaggtgaaacggcatcttctgggagctctccaggctgggagaagctctgcaggagctctgcatccagccagcggggccagccttgggaagccccgggccgaggtctgggaggcaacgccaggcggagaagggagaagcctcccagcaggacaagcaggagccaggaggctgacagtgccagccacagggactttcttctcctccacgactgcatgtggccacccacagtcagggctagggaagctgggaggcctctgccagcaagcaggaagagcagggcctggggcgggagaccagagctgggaccgacctgctagtcctgtgctgtcattgtacagatgggaagactgaggcccatcgagaccaggccgcctgtctaaggtcagatagtgagtcaccagccaggcaggaggaggccaggtgggacccagcttgctggcctggcccccctgctctcaggactctgccttctcggcctttggacaaccaagccagccttttccctcccagcagggacccctgcccctgggcactgctctggctgacgcaacccctgtccagaatgcagggccgtgtccccctgccctcctggctgcaccccttgaccttgccctcaactgagaggagggctgtctgccaggccatggggaccagtcagagctcccacaggaggcggcttggccagggacaggctggagggagctgggctggtcttcccactcctccccttgcctgagcagccctggctgcccctgtgcccgctggcagacgcttctgggctgtggcccctgtggctggagctaaaattagaccctgcatcccatgtggatcatcggcgtcagctgaggtcacagcctgggtgcagccggtgtccccccgccttggagggccaggagggctcggggtcctgatccttatccactctgccgctgcaccagctcaggaagtgcagcccctcttccccgcagcccagcagctgccttgcaccatttggcttggagctatcacagtgcagaggccagggccgttgtgccaagccccccaaaccctatggtatcactcccatccctttccagtcgg

SEQ ID NO: 2500 - DNA, 462 bp, Homo sapiens
ggattggcattggcctgcagtaaattaggacagggatttttaacttgtatttggggtagtgagcatgcagacaggtcacaaataggaagggaatatataatttgaaaatgcatagattggctccaggtccagccagaaaaggagagtacctcaaagaagatggggattggctgtataccctctaaagaggcacattatacgacttaagaggtcggagtgtggagaagacgtgagattttcatatttatcaaagaagatatggtttttaaaagactgataaatatggcattaagcagctgagttataaaatgagtctagagaggtggtacctgtagttgagtactgtatgtacctctgggaacaaacatatttcttcctgttcttgctagtttcagagaggaggagtgaaaagagcaatcaacagcaaattctgcgtggtggtttgctgtgagctccacagca

SEQ ID NO: 2501 - DNA, 1494 bp, Homo sapiens
gggagtggggagagaggaaagcagccctcaggccctaccaaccttgactgtcctatccctagaccttatttaaccccaaccagactgtggtaaagatgttccttgtgacctttgacttctcggacatgcctgctgcccacatgaccttcctgcgccatcgcctctttttggtgcctgtgggtgaggagggaaatgctaaccccacccaccgcctcctctgctacttgctgcacctcaggttccggagctcccgctcaggccgcttaagcctgcatggagatatccgcctgcttttttcccgccggagcctggagctggacacagggctcccctacgaactgcaggctgtgaccgaggcccctcataatccacgttattcacctttgccctgattgccagcactctgaacccatgcgggctaatgacctgcccatcctgctccatcttagagaacatatatggagagacagcaagagacccttcaggcttgaattaaagccctcaccatgctcacgcccaaatggattatttgggtgtttaaagcttctgattcttactacaccctgccctacttcgggtactccatgtgcctgtcccctcccttgggtttcccaggccagcttaggtagtagggaggaactggagctaccctgagattttctcaagttcccaggcaagttatgccaggcgttgcctccctgtcctgggcaggggcaacttgttattttatttatttttaatttataatttattcaaattggattgccttggtaacctcccacacctgataattggcatcactcctccccgcttcccactctcagatattgctccaacctcaggagttgaagagggcttatgcggtgggggcaggaggagaactgctttccctcagctgaggggaagaggggctattccagagggactgagtcagtagccaaagactcagcttcccctgtccttccccagtcccttcacttcccctaccctctgacctatctctgaaagccaagttatgcgtatgtgtgtgtgcacaagcttgtctttgtgtggtatgtgtgtgtgagtgtgcatgtatgcacacacacaggggttaaccacccctcacctagggctccagactccagttgtccctctcctcctacctgtgtctccttgttttggggtcctgactgaagaaggtgtccagggggcagagtcagggccaagcactggggtgcctcctctcacctggccagactctgacccacctacctcagctggggtgaggggcacccctcaaactcagtcatgtggttccaaactaccccattccccactccagactctgacccagcctcagtcctaactcctggggctgggctgaggggaacaagcatttgctgaaacttgaaaaaacaaagcaaatcaaaaacaggaaaaaattgtacctggtacttttttttagaaaaaaagattaaaaaagaaagaataaattcttgtttggaaacttga

SEQ ID NO: 2502 - DNA, 328 bp, Homo sapiens
gacaagaacgaaactccatctaaaaaaataaaatagaataaaagatgggaaccattcttagcttatgggcagtataaagctaagctgtgggccacatttggcccataggctgtagtttgctgacctctggtctagagtcttagaatcttttagttttagaataatgaccattatttttgtaataatattgtatgctagttattaaaagattgcaaactatattaaagttaaaaggatgtaaaaaacttaggcatggctgggattacaggcgtgagccaccctggccggccttatgtgaacatgtctaaacacatacacacacattgca

SEQ ID NO: 2503 - DNA, 1303 bp, Homo sapiens
agtttaagtaataaatgtttaatcaaagaattttacatattattaacagcattcatttggccaaacatctacacgtttgtagaatcctactgtatataaagtgggaatgtatcaagtatagactatgaaagtgcaaataacaagtcaaggttagattaactttttttttttacattataaaattaacttgtttacaaaatagggctttgccaaacttcattactgaattgtaaagtcaatgactgtgttgtttttaaaatatgtaccaaggaaatacaaattggataatgatcatttttcatgctcaggagagaacagcacagaaataaaggatactggcacaaggtgccaagggaaacccgggaacccattggtgtacactgtcttcacacagagcattctttctcaccttaactgcaggctgtgcaagatgcctcagtgtgatgcaaagactctatattggaaaaattacaacttgggtctaaaaacttattgggtggttggatatttttaatccaaaataaatttataaaaaaatcctttaatggactatttcagtttaatatacagtaatacactgtagataaagttaatattccccccactaatttaatagggattgatatcaatgtttctgatcactggagaaataaaaactaatgtggacctttgatatccatggcataggaggattcccacagtttatcctaagaggatctggggaatattaaatattctaatacagtgtcttagcaatatgaattttaagtacaaggatatttcaaaagcagggtttggaaaaaaaaaaagtaatcaaaacccataatcacatctcttgtggataacaatattaatataactttttacccagcccaggacttgcctgtacaaactcagaactgaaagtttggtatctgtagacttctggtaacaatctggcaaaacactaaatggagtgttgtacttatctattttgcttatgttatgctagttttgataatatttaagtaaaacagccattccaacagtttactctagttttaattacacactgtaccattgtatcctaattacaactaagaccagtattttcttcacagtaagacactgataactaggaagttgatttttttcaacactaaacagtaatcacacagcaaatgagtattgcgcagtagaacaaacacatgtcagcatttgctagttaggcaaacaaactgattgaacatttagttgttatagttagtgtaaaagcaaggccatgggtggttttatggaggtctttgcaattcatagcatagtt

SEQ ID NO: 2504 - DNA, 380 bp, Homo sapiens
agaggaagaaaatggcagagaatacaaatttgatgtttcgtcagagttactagagtggatttggcatgataacatgcagtttcttcaagacaaaaacatttttgaacatacatattttggatttatgtggcaattgtgtagttgtattcccagtacattaccagatcctaaagctgtgtccttaatgacagcaaagttaagcacttcctttgtcctagagacatttattccattctaaagaaaagcccacgatgcttcagtggattgaactgttgacgaaacagtttaataatagtcaggcagcttgtgagtggtttttagatcgtatggctgatgacgactggtggccaatgcagatctaattaaggtgcctaatcaaa

SEQ ID NO: 2505 - DNA, 280 bp, Homo sapiens
ttttttttttttttggtaagaacagacactttattgcacactatggtgggggagagaggaagaggggtctagggtgacaatgcctcatcccctcccctgggctgagtggttttgacccagggctctgaccagccatgggacacatggacttgaattgttctgaacttatgccagaacccaaagtgacggcctggtgtgtatgcttgggtctgtataaagcagagctttcaatgagaagaggccctaggccccctcccccagccaaagtcatcgggcccca

SEQ ID NO: 2506 - DNA, 772 bp, Homo sapiens
atccgagactctgtctaaaaaaaaatagtattaaagatactctaaatttggaaagggaaatgaggttattacaatactaagcatctgacaggtcacttgtcatggctgaacaaagctgggataaaattacagcatttcaaatcccctcttcaagatggttgggtgtcaagttactttaagattttcttttcaaaattaaaatcactacatttcattgtttcaatactcacaggacacctgtaagctcttattcagaaatcaaatgacaatttctcaaatttttctatgtattttctctggtgttttaatggttttttttctaattattactacttcacaagtttctttcacaaacttcttcacagggttaaaaattttttttcttgttataaagttctgggtttcagaatttcttcaccaccagactggtacatatatccacatttatctttattcatttctatgaagtcgttttttctatatgcttcacctttgacattcatgatcctgtcacattttcaggcctctctgtccagtatttttggcttttgtagctctctttttagacaaagcagcttcttcagtaatatcctcttcttctaagtatacactcagtcttacagggaattcagaacttactatgaaactatcccctgccaatttgatatcacattcgttatcttcaagatgtgttgcatcctcatcctctgctgttgactcctcaataggagaaatggatccatcatcatccaaaaatttgtatctacgactg

SEQ ID NO: 2507 - DNA, 3446 bp, Homo sapiens
tgaatttttaacagaaaattttatttcaataaatattttgccctccaagtgacaactacaatttcagggaggtaaaagtataacctagaagtaatttagaattattccacttttcaattttgcctgagtgaagaatacagtttgggcctgaagtctgctaagagactgcaccgcagtgacacgtgcagaaagtcaaaaggacacatggaaagcagtccatctttggtgcacgcacacagccatgtgcacggcacacgtgtgggtagaacgtatctgcacatacatgcgtaaaataatgggactcacgcaagtttcatttctctttcaacccttctggggctcccagaattctagcattaccaaggatttacacataaacttcatcatacattgaatcatttgggtttacactttctttacaaagttatatcctaaatgggtagagcagcttgtcttaaataacaaggttagaattctgagacacaacgaaagttgtgcaagctttccgctgaaagaaatttgcaacgagacacaaataccactgcaggggctttgaatataggagacattgataaacagagctataagtcagtgttatcaactgcaaaatcatgactttaccaccacccaagccagaaaggcccaaaagcaccaccacgaaaattaatcctgtgtctgaaacttttcaagactaattaaaagggttgctgtgtccaagcatgaagaacgcagggacgcttctgtcaatcattaggcgaacactggcctggggacttgggacatcaggaatgtccatgccacattagtgcttactcgcaacgaacagtgaaaactacacgcttaaggacaagtttcaggatgttccacacactgactcattccatggagaaaatccagaattgattcagacgtcccatgggaatgcaattttccagctctatgccagatattttctagctcttcattaaaaagaatccaattccactgacttcgatagggccatggtaaagaacaatgtgaaactcctataaagcaaggagttggtgtcgcctggtcagcgaaatgagccacagcaacctcacacatacgattcaatgtaaagcaaattagttcatcactttattacatcttagtgctttcttaaaataaatacagtaatatcatatcaaacatacagtgagaaataaagcccacgtgtgaaagtatggtaacagaaagctcactcaggactgtgtaactcagcacttgagaaatcatacagcctttagttccctatttacaggacagagagcggctgtgtcgaacacgatatatacaaaatcgcaagagactgtacttctcttcaaaggactgaggaaaggggaataagacctataattccttctagccttctgtaccatgttccctccttatgtacacgactcactcatgttttttgtctatctaaaattatgtaacagttaaatttgtcctcttttttctccccaattattgatcttttgattttttctgcagtttgagatagattcaagtaacactcccaagaaaatatgtgcaaaactaatgttagtggctccagaatcttccggcagctggtcagttgcagcagtgtctggcagccatggctggcacgcacctgctcctgggaatgtccgcgctccacagaagcatcaacaccattgggaccaaggcagaaagaacccaaagccatccacttacttggagttctgaaataactgcaaataaccacttaattgtttttaaataggcaacaaaacaaaagtatccatctacaggggaaacggcacgctcctctgagagcatgcagcgcttccagatgcagaatccagacaggacaagccgtgacctaacaaaaccactgaagggactgtcagcttaagtgcatcaccttttgggacaaacatgctcagaatgaaaaatattctactttaccaaaatctgtctttattaaagtgaacaaaccattagagcactacccaaaacttaatgaatgatggctgcagttggctcggcttgcctactttaaatgaggcaaacatcagctcctagtgccattccccaccctcatgaccgcgtgccagaagtcatcatcttcacatttgtagacgttgttctagcggaagacaggctttgcagatttcggtgcttttagtgaactggtgttttccgtaaactttttctgagcagcaagggataagaattttttttcagaaatcttagaattggatataaatgttggcagtagacacaaccaataaatatcatacaatttctcaaatgaaaaagatttcccattatgaattcctttgctatagacattcaaacaccccaagccaagattgagcctcagtcccatagtcacgagattacagctggccaatatgagggtgtcaggcaatgtgcaagggggcgaggtgagaagcaagaaagcaaagtggatcacgtctaatctatgctgaaggagaacttcaagtaagggagctccgtggcccgggacctggctgtgaacaccctccgctgggagcctcagtggtcagcagtggccacagcagtgcgagccactgcaaaagcggcatctactcccccatcctcaccctgcctggcatcctctgcgtgagatgagcgctgagagaggggttttcttctgctgtctagaaacctctttgcaaaaggtctgtgactttgcacacttcgtacccaaatagatgaaaacaataaataaggaccccgtggcaccctctggatgccaagccacaagggcatcatttacgagtctgggtcaccctttggacgccagctgcaccggggtcatttacgagtctgggccttctttggcactgcaggccgcttgggctgccacaggtggttgtggattgtgagtgcgtccacactgacagacatggttttggctgggatcaagttaaactgttttcggtctgagctgtatttatacagtttgtcgatcattttcttggtgatgttctttggccccgtgccagtgagtttgtagatttcctcagtatcaggatagtagcagtaaagcgccctgaactggcagccagcatcacgaaacagtatgatgtagtgattggcatcacacttctccagctcctccaatatggaattcttgtggggttcgttcacttttccagccaggcagcaatgggatatggcattgtgaataatcggcttgtttgatttactactgggctccttaaagagcttgggaccgctgagagggtgtgcccccggaatgaacgctctcgggttctgtcgtcgccgcagaggccaaggacaggctggagcctgactgagtccggctcaagttatcagctgccagagacagaaacagacgacggttcatgaacggattccgacagacaagtacctgtcccctgtacctgttcccctcacctcgccctgca

SEQ ID NO: 2508 - DNA, 397 bp, Homo sapiens
gggccgatgctgtgggggtgggcgtggagagaattcttctgtgggtcctctggtgttgagtggtcggcttggtgtggtgtgcggaggagctccaggcccgtcggcgcggagtggtctcacgtgtgaaacatggctacagattggctgggaagtattgtgtccatcaattgtggagatagcttgggtgtctatcagggaagagtgtcagctgtggatcaggtcagccagaccatttctctcacccggcctttccataatggagtgaagtgtcttgttccagaagtcaccttcaggtgagttgtcctgactgactcttctgaatccaacctggtggtctgtggagcttgaacctaggtctgattgctagtatttctcttgggcatatggtcggcttttt

SEQ ID NO: 2509 - DNA, 595 bp, Homo sapiens
  misc_feature (1)...(595): n = a,t,c or g
gatttgcctgcctactggcctgtctctcacaatccatatattcaagaatgaacactatactttgcttcaaaccttcagaacattcaaaccgtttatgtttctcatctaatcaaatagagttactctctaagccagaagctgtaaactcatctcttttccctttattcaagctgtcaatttttgtctcctaaacatcttctagttatattctcatttctctgttcacattgcattaataatgatgataaacatttgcattcttattctgtgccaggcaacatgctaactgctgtatatatattattatatttgtactttgggcaagaatcctgtgaaggatttttatctttgggactactagaagagaaagctgagttgtagagagagtatgtatttaagtccgtttggggctggctataacaggaataccacagactggggtaacgtggatggaaccaaaaatttatttgggctcacagttctgggaaccggggggaaatcccaaagggcatggatgcttaggcatctgggttgaggggccntttgtggctttgttcatcccctggcccggagggcggnaggggtaggagagggg

SEQ ID NO: 2510 - DNA, 389 bp, Homo sapiens
ctcagttcagactagccacatttaagtgcttcatagccacatgtggctcatggccatccatatttggacaatgtactttagactattgcatctgtatactcttgtgccgtcagctggggggtggggtgtgtgtgcgtgtataccaaggcagtgagcatctgagctttgaacctcaaagaccaaaatgccctgcccattttcctgcttatcagctgaggaatctttacccacattgacacatgggcttgttctgacccaagtgcatgcaggcttccagagcagattcagaggcctaacttagtcctttagctttcctcccagcacagaactcccaaggttatctgcaagtaggccttgcctagagagactgagttttcaagttgcagttt

SEQ ID NO: 2511 - DNA, 1087 bp, Homo sapiens
  misc_feature (1)...(1087): n = a,t,c or g
gcttccgctggagtttgcagttttccagctttatacaggattttcctttgactggaagagtcaaggatatagagactcaacagtgacatttattgtacaacatcaaggggaataggatactcatcaaactgggattattcttatcaaaacatggtcttctttgaataagaaaaatacatagttggttattatggacttaaaactgtgttaaatggatattctgataaaatatttgctgctctgtagagtgtggaaaatctgagaatattagctttactcatcttgagctttgaggatgttctctgtacgccgatggtttcatattaactaaaaaagctgggtattgtaaaatctcatttataaaaactcagatgagaagaaaattttctttgatggtgagactgttgtcttagttcaggaaattatttaataatcctttgttacctgtgaatgaaggaactttgtaattctgatttatcgtaaaacatgagcctttccagagtcagcttagacactgttgtcgcaaataggccatgctttgccttatgccaaggaggcccagagggagggcctagtcttcctctgttgctgtacatatattgaaatgctttttttttttattttgcatttgttatctataatgagctttctgagccctgatattatgtgagacaaacaggagttattgatgttatacactcccttccattcaggattttctgcttggagggaaatatgttgaccttagagaattgtgaatattgttgcaattcttgaatatattaccatgtgaataatagagactgtgttgctctctagtataagctatatttatttttgattcatttgaattactagttataactggagaaattttgttacctctatcctggcttgcctgactggctgtataatagcagcagcctcttttagagcatcctaatgaaaaccatggatgaaagggattaatggtgatatcctnaagcntgccgtagaaaatggcctttggtcccnaccgtaacaatttcctcnccatccacaattccangggttgtgggagagtgggacattcccacccggaacaccc

SEQ ID NO: 2512 - DNA, 1233 bp, Homo sapiens
cggctcggggctgtgagcggctcggggccgggggtgggcggcggtgcggcgggcggccgacgctcctcttcggcggcggcggcggcggccatgcgtggggcggcgcggctggggcggccgggccggagttgcctcccgggggcccgcggcctgagggccgccgccgccgccgccgctgctgcttctgcttgcgctgttgccgctgctgcccgcgcctggcgctgccgccgcccccgccccgcggcccccggagctgcagtcggcttccgcggggcccagcgtgagtctctacctgagcgaggacgaggtgcgccggctgatcggtcttgatgcagaactttattatgtgagaaatgaccttattagtcactacgctctatcctttagtctgttagtacccagtgagacaaatttcttgcacttcacctggcatgcgaagtccaaggttgaatataagctgggattccaagtggacaatgttttggcaatggatatgccccaggtcaacatttctgttcagggggaagttccacgcactttatcagtgtttcgggtagagctttcctgtactggcaaagtagattctgaagttatgatactaatgcagctcaacttgacagtaaattcttcaaaaaattttaccgtcttaaattttaaacgaaggaaaatgtgctacaaaaaacttgaagaagtaaaaacttcagccttggacaaaaacactagcagaactatttatgatcctgtacatgcagctccaaccacttctacgcgtgtgttttatattagtgtaggggtttgttgtgcagtaatatttctcgtagcaataatattagctgttttgcaccttcatagtatgaaaaggattgaactggatgacagcattagtgccagcagtagttcccaagggctgtctcagccatccacccagacgactcagtatctgagagcagacacgcccaacaatgcaactcctatcaccagctccttaggttatcctaccttgcggatagagaagaacgacttgagaagtgtcactcttttggaggccaaaggcaaggtgaaggatatagcaatatccagagagaggataactctaaaagatgtactccaagaaggtacttttgggcgtattttccatgggattttaatagatgaaaaagatccaaataaagaaaaacaagcatttgtcaaaacagtttaaagatcaagcttctgaaatttcaggtggacaat

SEQ ID NO: 2513 - DNA, 875 bp, Homo sapiens
  misc_feature (1)...(875): n = a,t,c or g
aagaatttccattcattttagtttcctgctaattgacatcttcactacataaaatactggtataaaaatactgcgtaccaagatttgatacaactagcaaatgttcattggtttacaacaaacccaaaatactcatcaaatatgggctgttggatttagaaaaataagattcttgagcgattccagctgcatttgtttatacagaacacatttactcaggaccctgcagtgtcagcttcgttctttgggtatgcagccttctatctggatctctgcaggccagccagaatatctgttgttcttagcatcagagtggttgatcttttctctctgaatttcggaagggagttccaagccttttgctgcaataaatacccagctagacctgaatttcatgttcctgatttctttacttccaagtgcttctatggcattcttggcatcgttattcagtcttgtgcttccgtcgtcataggtcaccatgaagagcagggattttggagcagcactctgaataaactttgtcatcggtccagagttatcgccttcatacatatcaaaacatcgtgttgctgtcacattcccagttacatagttgacaatggcaatgtttattcctctggcaacatttcccagctgttctcccataagtaggttatcctcaaagcagattttggcgtacttgcttctgccacctccgctgagtaacctgtaggcataggtgtcagatgggcagggagtccagtggtcacatttttgccttttggggactggagcaccagccaatgggcgcatcttccaggtgccgctccccacntggncntggnggcagctcccaggcgaccgcagccagcggagcccctgggtcaggaagg

SEQ ID NO: 2514 - DNA, 908 bp, Homo sapiens
ggtttccttaatgattctttaacagagtaactggattggccaaggtctgattcaagaggctgtgaggagagtagagaacaaatagactttgcctctcagagttcagagctttaagttgtataagcatggtccatgtccacctcttgtagacacttattccttaaaagtttccatcatgaaaaataatatcatgtcaaaattttataagcacccagaatgtcccagtagtcaaatgtagtgtctttctccagtctctgttttcgataataaataccttgctctcaatttaggatgatcgtaaagcctatgttcatgctgtgagtcattgtctcccacagcttttgaaacatcgttctttgtcttttctatacaacacctgattctttgtgcctcagactcattgctatcaggaagagactttgccaagatccaccaccacatttggccagtagtgtatacacattaaagtgagagctgatgaaatcacaatgctctattttgttccgacaatcagtatgaaggggtaggtcccagtttgccaatgagcaacagcctctgtatgctggtgtccaagacttacacaaaacaagtgtcagtgcagtcacagcattttcttgaatgctgttgtgacagactccagttataaacatctgcgagccatatggcacaactcatagctaaagaggccggtacagggcacatgcacagagctttgaagaacatacacaaacctgttgaatcaagttactttcctcatcctcagagactttgacaattcagagctcacagatggcagggggaattctcaggcttcccttcctcctgattgacactttttaaaggaagtgatgtggaagttgttctagaagttagatggacagtgggagcacattcgtgagtggggcttg

SEQ ID NO: 2515 - DNA, 399 bp, Homo sapiens
caaaagggcagtaaagaatagggataatatattttaatgtaaatttggaagaaggataaaatcacccacagttactctccctattattttcactgggtcaagttttaatcttttggcttcatgagttccactccctttgatgatatatgttgtatatttttagttgtaaagcagtaatctttaactgtagcattcctctaattataaacagtgaaaaatcaaaatcagtccagagttcttttgttgacttaattcctgatcagtatagacaggactatatatatttaatcagagaattacattatatctgaagatggagctcaggagaatgcaccaagactttgaattgtatttacattcactgtcagtaaagacctggctacgctttgagaaatcagg

SEQ ID NO: 2516 - DNA, 1026 bp, Homo sapiens
ttttgacactgaactttatatttaataattacagtaagaattttttggtagattttattcacacacattttaaaaatcatgaacaaagtcattaattctgaactcaagtaacagtcaaaaatattttaatttaaattaaggcactacatacacatttctttaaagcacactgatgttattttatttacacactattttaagaattaacaataaatacacattttccatctcctccttgtccttcatttataactttatatgttaacaaggaagtaaaaccctccaaataaaaggaattaaatgcaataatccataaagcttatcagatatgggcacaagaaggagacacccaaaaacaatgtaaaaacattttaatcctttaatgttacaagaatttatctataaattcttatgccattcctagtggaataataatataaaacctatacacaaacattgaaatatgttttattctattgctatttaccagaagaattgcatataaataacagcagcagaactgtccctatgttatacatgaatgtacttattctgaattcactgactgaattaaaaacacttaactcaaacttttcctattaccttggggtattgttttcacaaacaagtaaatgtttcctagagccaaatactttctacacccagaaaatagagcagcatgttagttatttaacaaaatacacaccaaaaccttaatgtgaaaggctagttttactataagatttttctcagtggtactaaaggagtcaatggctttaacagtgataattttttaaaagatacaaatgaattaacacatagttcaatataatatatgttttattaaataaatactattcttcttgtcccatcaacatatactttttacatttttgcttaatttacaattcgagttaatattttgagaacgtaaggaaagacaaataggtaaatgtcttgttgaaagggttaagatactgacaggacataccttcctgttccatcctatataaaatccactcatga

SEQ ID NO: 2517 - DNA, 927 bp, Homo sapiens
aggatataggttagcatcatctggttgtgatgatcatctcgagtaatgggccacctggtgggtctggccagcggcaacaaggctgtaaatcaattaattattcagcattccctccccaagatggggacactctgcaatcttgggttccctatttggatctcctaaggccagttcctgggaattgtttaagtaaaagacatggttaagcattatgagagcacagaagaacaatacagaaaggccattttctttgtatgactaaagcctcgaggttagcaggtatggtgtcaatgaggtagtagtatgggttttgtgatcagtgggaatgcatgaaaaaatgctctagtgggggtgagccaaagccaagccccccttcctactgtctcagaagaagccagacacaaaagaccacatatatgtgtaatcccacttatatgaaatatcccagaatagaaaaagcccacagaaataaaaaggagatccagtgggttgccccagcggacaggtggaggggaagatagggagtgactgcctagtgtgtacaggcatttattttggagtgatgaaaatgttttggaaatagttaaaggtggtggttgctcaacatcagtgaatgcaaccaaattgttcacttcaaaatggttaattctatgttacgtgaatttcacgtcgattaaaaaatatatatacaggttgagcatccctaatctgaaaatccaaaatgctccaaaatttcaaaatttctgaatgccaacatgacgctagaagtggaaaattccataactgatctcatgccagaaatcacagtcaaaatgcagtcgaaactttgtttcatgcacaaaattatttaaaatattgtatcaaattacctttaggctatgtatataaggtgtatatgaagcataaatgaatttcatgtttagtctt

SEQ ID NO: 2518 - DNA, 921 bp, Homo sapiens
gatggacggtgatgagctcaggaccagccagcaaccccatcaggcggtaatgcctaccatggtcacccatgacttcctctcgccactgctcggagctcctgcaaagccacaggaacaacacatttctgctccgtacgagaagctcctattgtaagtcggtgacatggctggggttttctctcagcaaatattgagcaaacactgactgtgccaggtgatgtgctgggtcccaaacccttcccagacccagccctggcactcacggagatccagctaggaagtccgggaaaaggtcatcggggaaataaacaaagtcaagcacagtggatgaacgcgctgctgccgctccccacacctcttgtggtggacatcacttacgcttcctcatggtgcatgtcacttatgcttcctggtgccctcccagatgacccccccttgggccactacacacagctgcacccggcaagagcagacaaggatggtctactcactgagcctgcaaggctggtgtgcaggacaggccagctacactccccaggtgtgtgcaagaccggggacgagtcagtcattgggaggtgaggtgctcgggcagtgtgggatggaggaggagggagggaaactgagtgtgggctcttcgtattggagaggaggggacggccatggcacaaagactcagatgggaaagtgtgagaaagcagagatttcaaaggagctacggtggagacccacagaagaggaatgctgaggcttttctgtctgaaatgctgaatagactctagcacacgcaaaacagcccaccacagcgagctgcaggattcttccgggcttttaacagtggtcttgtaaaaaaaattagccgggcatggttgtcccagctactcaggaggcagagaggggaggactgtgcgcccaggaggttga

SEQ ID NO: 2519 - DNA, 1782 bp, Homo sapiens
gcggggtgggaagagggttagtcttatgtgagcctggctgctcagcgtctcctggccgtcatgacagctgcttggagacccgtgccttccagatggctgggagatgcctctgtggggatgaaatggggcacccctggccatcactcatgtgtagtccaggtttgagaggactggaaggggggtaaggtggggaggtgggcagggcatgttccttggatcaacagcccgccagctgattggatgtctaggaatgactgaaagaaaccaaaacagcctgtccactgctgctgtgggatggaggaggcgtaacgagaaacactaacagtatattgacctcttagcagaaccgcttccattctggagatcacggctgctaaatccagcatccccacttcattttacccccagcatattgttctgtagtcttttcttgaaacatcttgattgcttttcctcggcagctttcaaaaaaccaaataataatagttatccgtcttctacttcatggaagattgttttggtgccctgaccctctgaagtgcccagttcctgccatctgaaacctcggcctgatctgatctcatgttggaatctgcctgtctttcacacagggctggtcttggtcctttacatgccagttttgcttgtgaattcttgcttttttcctctcatcagccttaagtttaggcgtttgttgttctccagtgatgtagacagttcccttcacaagtcacagttcttcccataaatgaggcccgctgacctctgcgggactttaaaaatctattcagatatttccgagtaagtggcttgtttaaattcttcctgtgtctttctttattccttaattggttggtggaaagaagagatgcttgggaaccttgggttcttaggtttggattctttaataatatctaaaaagctaaattttaaataccagctttacataaatgattgttgactctggtctgtttctgacacctttccagaaaaaagtcaattgttcaggtacaccaaagaggaagaagagctgtggaggccaccctctacaaagctttatagaacttctggatctaactcacaaacaagcttccagaagagactagagaccttaggccaggagatgaaggagttcagtagcaaagtcacacctgtccaattccctgagctttgctcactcagctaatgggatggcaaaggtggtggtgctttcatcttcaggcagaagcctctgcccatccccctcaagggctgcaggcccagttctcatgctgcccttgggtgggcatctgttaacagaggagaacgtctgggtgggcggcagcagctttgctctgagtgcctacaaagcttaatgcttggtgctagaaacatcatcattattaaacttcagaaaagcagcagcccatgttcagtcaggctcatgctgcctcactgcttaagtgcctgcaggagccgcctgcccaaggttccccttcctacacctgggcacactggggtctgcacaaggctttgtcaaccaaagacagcttcccccttttgattgcctgtagactttggagccaagaaacactctgtgtgactctacacacacttcaggtggtttgtgcttcaaagtcattgatgcaacttgaaaggaaacagtttaatggtggaaatgaactaccatttataacttctgtttttttattgagaaaatgattcaccgaattccaaatcagattgccaggaagaaataggacgtgacggtactgggcccctgtgattctccccagccctttt

SEQ ID NO: 2520 - DNA, 295 bp, Homo sapiens
actgcttttgccacttactgtgagccttaaactatttcacaaacaatacaaaatcaagacaaaaaattaataacatatccagtgcccccacttaagacataaaacatgagtgtcattgaagccagaggcagccattggcctgagtttgttgattcgttcccaagcagttgaagacagttttgtttttctgtggatgtctgtctcttctccctatgctgggtgcagccctgcattgccactgtggttggatttcagtggccttgtcctgtgggcgtgctttggcagcttgcttttt

SEQ ID NO: 2521 - DNA, 534 bp, Homo sapiens
  misc_feature (1)...(534): n = a,t,c or g
gccgcgcatcagccctaggcaccccagtcccggctgccccctccgccgccaccgccgcccgccggcaggttccctggtcagcgtcccatcccggtcgggagttctctccaggcggcacgatgccgaggaaacagtgaccctgagcgaagccaagccgggcggcaggaacttctgcaatgtcccatcaacctctcagctgcctcactgaaaaggaggacagccccagtgaaagcacaggaaatggacccccccacctggcccacccaaacctggacacgtttaccccggaggagctgctgcagcagatgaaagagctcctgaccgagaaccaccagctgaaaggtacaagtaaaaacttgtgtgtatctcaaggaagtagcataatgatatttagcccattcaaaaggaaaaagnnnnnnnnnnnnnnnnnnnnnnnnnnnnnnnnnnnnnnnnnnnnnnnnnnnnnnnnnnnnnnnnnnnnnnnnnnnnnnnntcaagaccagccttggcaagatggcaagacctgatttctac

SEQ ID NO: 2522 - DNA, 579 bp, Homo sapiens
  misc_feature (1)...(579): n = a,t,c or g
gggattggagtcattaatatcctaggcaagaaacatggaagtgaagacttctttctctgcaagggaaaccgatgatcccactcctgggaaatagtagggaaacttggtatgtgtattcccatgtgtcctctagggagttggtaatggttaacctgacttcagcttccaggaattggctactcttcccgttttctatagtcatttgaatccacgagcttgatttgcactaatttgaccgacattgattttgtgtgtgacttggtttatggggccagctgactgaagtaagcagaccttttgggcaaaaatatgctttgacagtggtctcccacctatttgttccactgtctgccttcccctggttacttaaaattcatcagcttgtccaactggaccttctttccttcctgctgaagttgatttgaagtaaaaccttagatttgatgttaaaacagttgtcaaatctgttggtaaataagatttgaaggaccctactctgtctcccttgaaaaaggggaggaatgtcantgttactgtgtcaataaactgatttaaagttgaaaaaaaaaaaanggaaaa

SEQ ID NO: 2523 - DNA, 504 bp, Homo sapiens
  misc_feature (1)...(504): n = a,t,c or g
tttggaanacctttnnnnnnnnnnnnnnnnnnnnnnnnnnnnnnnnnnnnnnnnnnnnnnnnnnnnnnnnnnnnnnnnnggcacgagagacagatcnnnnnnnnnnnnnnnnnnnnnnnnnnnnnnnnnnnnnnnnnnnnnnnnnnnnnnnnnnnnnnnnnnnnnnagatcttgtctcaaaccaatacaaacacaaaagccattacctttnnnnnnnnnnnnnnnnnnnnnnnnnnnnnnnnnnnnnnnnnnnnnnnnnnactgttataaaaacagagggtactagagatagcaagtaactggggtgttgcagagaccagcaccaaatggacacttttgccttgacaattgcaggattgtacagaattgggagaggaatatgtatttttgattcagggttatttaatgccgtgtgtgtgagctgctagtgttatggatcccatcctttgagaagcattatccaatgtgatattgattctcanaggctggcaacccttaaccact

SEQ ID NO: 2524 - DNA, 1066 bp, Homo sapiens
gacaaccaaatatacattgctggtcacccagcttcttgtcaactactctaccagccagaagatctcccgccctggggactcggatgactcccggagcgtgaacagtgtgcttctctttaccatcctgaaccccatttattcgatcaccacggatgttctttacactatctgtaatccttgtggccctgtccagagaattgtcattttcaggaagaatggagttcaggcgatggtggaatttgactcagttcaaagtgcccagcggcagaggcctctctcaatggggctgatatctattctggctgttgcactctgaagatcgaatacgcaaagcctacacgcttgaatgtgttcaagaatgatcaggatacttgggactacacaaaccccaatctcagtggacaaggtaatcttgacgaccactttgttctaaacatacccgccttgctttcactcgactagtgcacttaataggcctgggctcagggttatgtaatgccattgggccccccatggacatgggagggccttggggtcagcacttggacaccctagtgggatgggggagtgagaggcctccatgggtcttcactgctgcttggggccctccgatgctgctcaggatacagaggcaaggcagaagcctggagtgggcggggagcagggcctcactgaggatgaggcgtgggggcggccttagaaaccagcagtggctcctttgagagtctggtgagggtcactcactccattcttgctggaccaggaattgtcctcttgttctgcgctgttgagagggtctgatttgggggagtgacagtgttggggggcgatgaggtctcctgggctcttgcagtgagccttgtgagcaagctgaccctgtggaggtgagacactctggattggaccagggcggacatgcctcacatcatttgtagaggggacgcaacatctctgcaggtggcccaaatggacaactcccttcctagtgtctgtcaagaatggtttgcctttggtagcagggagaggtggaggattgcctatgagaaacagcggcagcccccaacaa

SEQ ID NO: 2525 - DNA, 1025 bp, Homo sapiens
cacagcctactatcagcaatagtccttgtttattagaatctgcagatgtccatattacatcaaatataaatatatattatatttacatttccttcttagctttcaatttaggtgagtgtatttatagataatgccactaacgcaccactattctaatcctcagtgcaactcataccttctttccattagatgctcattaatgtaagacagcatcttaaaagaggggtactgttcttttttaaaataaaaggaaagaaagggaatccaagaatggaggtctagacatttcctaagagatttttgttttgttttttatacttagaaatacttgaaaaatgtggtccctttttgtagtactagtctctacttggggacaagaaaatagaatatgcaactcagaaaggaaagagcccaaagacgagagaacctgcttgttagctcattaacctgtttagtaaagatctgctttaaaatgcctgatgctgtgcagtatcatacaaaacaatcttcagccttcaaagcagctgatgcaccttctcagagatctgtttgtctgattaacagtctgctgccttggtgggccttggtcttggtcactttcggtcatcgatggttttaatgaattctactgctgctgtgaactgcatccaccaataggactcctctccagacagacagctagcataaaagctactgatatactgcacagtagacagcaaacagggtggatttgcctttatcaacacaaacaccaacacaggaacaaagtcatccgctccagggacagagtcctcattggccaggctcaggaggttcataatcgtagagcacattctcaggatgcactgcactttgtcccggggggttttataagcacttattgtcctgatttctgattgtgcagatggccatggtgcttctcgaagataaacctctggtatctgaagagctctgtgatttgcagtcactactttagacaatctctggatatgttcatgaagaacctggtcgcgaagtatgtcccc

SEQ ID NO: 2526 - DNA, 3071 bp, Homo sapiens
ggtgggtttatctcaaggcctgagtagccggtaacaaacgagggttcccgggattggaccgacgcagccatgcctctgcgacttgatatcaaaagaaagctaactgctagatctgatcgagttaagagtgtggatctgcatcctacagagccatggatgttggcaagtctttacaatggcagtgtgtgtgtttggaatcatgaaacacagacactggtgaagacatttgaagtatgtgatcttcctgttcgagctgcaaagtttgttgcaaggaagaattgggttgtgacaggagcggatgacatgcagattagagtgttcaattacaatactctggagagagttcatatgtttgaagcacactcagactacattcgctgtattgctgttcatccaacccagcctttcattctaactagcagtgatgacatgcttattaagctctgggactgggataaaaaatggtcttgctcacaagtgtttgaaggacacacccattatgttatgcagattgtgatcaaccccaaagataacaatcagtttgccagtgcctctttggacaggactatcaaggtgtggcagttgggctcttcgtcaccaaacttcactttggaaggacatgagaaaggcgtgaattgcattgattactacagtggtggggacaagccatacctcatttcaggtgcagatgaccgtcttgttaaaatatgggattatcagaataaaacatgtgtgcagacactggaaggacatgcccaaaatgtgtcttgtgccagctttcatcctgagttgccaatcattatcacaggttcagaagatggaacagtacgtatttggcattcaagcacctaccggcttgagagcacactgaattatggaatggagagggtatggtgcgtggccagtctaagagggtcaaacaatgtcgctttgggctatgatgaagggagcatcattgttaagcttggtcgggaggaacctgccatgtccatggatgccaatggaaagataatttgggccaagcattcagaagtccagcaggccaacctaaaagcaatgggagatgctgaaattaaagatggtgaaagattgccactggcagtaaaggatatgggcagttgtgaaatataccctcagactattcagcacaatcctaatgggcggtttgtggtggtgtgtggtgatggggagtatatcatctacacagcaatggcattgagaaacaagagctttggatctgctcaggagtttgcatgggcccacgattcttcagagtatgcaataagagagagcaacagcattgtaaagatatttaagaactttaaggaaaaaaaatcatttaaaccagattttggagcagaaagtatctacggcggcttcttattgggagtcagatctgtaaatggcttagcccttctatgactgggacaatacagaactcatacgaagaattgaaattcagcccaaacatattttctggtctgactctggagagctagtctgtattgctactgaggaatcattttttatccttaagtatctgtcagaaaaagtcttggctgcacaggaaacacatgagggagttactgaagatggcattgaagatgcctttgaggttcttggtgagattcaggaaattgtgaaaacagggctttgggtaggcgattgcttcatttacacaagttctgtgaacagattaaattattatgttggaggagaaatagtcaccattgcccacttggacaggacgatgtatctcctaggctacattcctaaagacaacaggctttatctgggggataaagaattgaacatcattagctattccctgctggtttcagtcctggaataccagacagctgtcatgcggagggactttagcatggctgataaggtccttcctaccattccaaaagaacagaggaccagagttgcacactttttggaaaagcagggcttcaagcagcaagctcttacagtatccacagatcctgagcatcgttttgagcttgctcttcagcttggagagttaaaaattgcataccagttagcagtggaagcagagtcagaacagaagtggaaacaacttgctgaacttgccattagtaaatgtcagtttgggcctagcccaggagtgcctgcatcatgcacaggattatgggggcctgctgctttttggccactgcctctggaaatgctaatatggtgaacaagctagcagagggtgcggagagagatggcaaaaataatgtggcattcatgagctacttttttacagggcaaggttgatgcctgcctagagctcttaattagaactggacggctgccagaagctgccttcttggcccgaacttacttacccagtcaggtttcaagggtagtgaaactctggagagagaatctctcaaaagtcaatcagaaagcagcagaatcccttgctgacccaacagagtatgaaaacctgttccctggattaaaagaagcctttgttgttgaagaatgggtgaaggaaacacatgctgatctgtggccagccaaacaatacccacttgtcacgccaaatgaagagagaaatgtcatggaagagggaaaagactttcagccctcaagatctacagctcaacaggaacttgatggggaaacctgcttctcctactccggttattgtggcctcccacacagccaacaaagaagaaaagagtttactcgaactagaagtagatttggataatttggaattagaagatattgacacaacagatatcaatctggatgaagatattttggatgattgactgtaatgctttccatttacctgactaaacagatcattattatatataggtattgattgctaccctgaccacagtgctttggactatgagaaacttcttagatttttatatgtaaatgctgtggaccactgggagcacaatgcccacatcatcttaagaagagtttatgtgcagcatttaaatcactgtgttttccttgttaactaaaacagacatgggctttgatttttttcatactattagaccatatctcataaaaccttttgaattaatgaa

SEQ ID NO: 2527 - DNA, 2050 bp, Homo sapiens
  misc_feature (1)...(2050): n = a,t,c or g
tcttcctctctgtttgcttatggcacaacagagaaatggggtaatttttcaggagggtggagagaaacacttgaaacttgtggggaaactctatgaccagtgtcatgacaccctagtacagtttggtggatttttagcatcaaatctaagtacagaagattatataaaacgagtgccttcaattgatgtactctgtaatgaatttcatacaccccatgatgcagcatttttcctgtctaggccaatgtatgcccatcatatttcgtcaaagtatgatgaacttaaaaaatcagaaaagggaagtaaacagcaacataaagttcataagtacattacatcatgtgagatggtgatggcgcctgtccatgaagcagtggtctccttacatgtttccaaagtctgggatgacatcagccctcaattctatgctacattctggtcattgacaatgtatgaccttgcagttccacacaccagctatgaacgagaagtcaataaacttaaagtccagatgaaagcaattgatgacaatcaggaaatgcccccaaataaaaagaaaaaagagaaggagcgctgtactgcccttcaggacaagcttcttgaagaagaaaagaaacagatggaacatgtacagagagttctacagagattgaaactggaaaaggacaactggcttttagcaaaatctaccaaaaatgagaccatcacaaaatttctacagctgtgtatatttcctcgatgtattttttcagcaattgatgctgtttactgtgctcgttttgttgaattggtacatcaacagaaaactccaaatttttccacacttctttgctatgatcgagttttctctgacataatttacacagttgcaagctgtactgaaaatgaagccagtcgatacggaaggtttctttgctgcatgttagagactgtgaccaggtggcatagtgatagagccacatatgaaaaggaatgtggaaactatccaggattccttaccatattacgggcaactggatttgatggtggaaataaggctgatcaattagactatgaaaattttcgacatgttgtacataaatggcattacaaactaaccaaggcatcggtacattgccttgaaacaggcgaatatactcacatcaggaatatcttgattgtgctaacaaaaatacttccttggtacccaaaagttttgaatctgggtcaagctttggaaagaagagtacacaaaatctgccaagaagaaaaagagaagaggccagatctatatgcattggctatgggctactctgggcagttgaaaagtagaaagtcatacatgatacctgaaaatgagtttcatcacaaagacccccctccgaggaatgcagttgccagtgtgcaaaatgggcctggtggtgggccttcttcatcatcaataggaagtgcatctaaatcggatgaaagcagtactgaggagactgataaatcaagggagagatctcagtgtggtgtgaaagctgttaataaagcttctagtaccacacctaaagggaattcaagcaatggaaatagtggctctaacagcaacaaagctgttaaagaaaatgacaaagaaaaagggaaagagaaagaaaaagagaaaaaagaaaagactccagctactactccagaggccagggtacttggtaaagatggtaaagaaaaaccaaaggaagagcggccaaataaagatgaaaaagcaagagagaccaaggaaagaacgccgaagtctgacaaagagaaagaaaaattcaagaaggaagaaaaagctaaagatgagaaatttaagaccactgtccccaacgcagaatcaaaatcaactcaagaaagggaaagagagaaggagccatccagagaaagagatatagcaaaggaaatgaaatcaaaggaaaatgtttaaaggagggaggaaaaaacaccagttctggggtccttggaattcacctgtttccccaggatcagatatttcccagagccttgaaagggggaaccaaaaacgcccgcaaattttgntacttnacccttc

SEQ ID NO: 2528 - DNA, 882 bp, Homo sapiens
gcggccgcgatggcaaggcatcctgtgaattcatgcgctgcgagtggcggggctgcccagaggccgggggagcagacagggccggtgctccctctggaagcttgggtgaccggggccctggctcccacgggatggagggtgtggtcctgtggtcagagcccaagcagcactcaggagaggggagaaaggaggtgcacctggcagcccacatttttgttgctccccaaatccctccccacgtggggatgagaaccttcctgctgtgatgtgacaccttcggggacattgaccactcaaaactcagatcatctcgcccaccctggagagtgcagagctatctgtagacttaggaatacttgatgggcagcggtgcagaccccgggcacctgcgtgcagcctcctgttctcggcagcttctgtcgctggccctggggtccccacagctgcagctctcctgtgaggttgcacggcatcagaaccatcctgaccttcttagggacgtgcctggaaccacctcgtccacgtccacgtccacctgggggcctcgggaggctaggcccctcctcaaaggcccaccagcccggcgctcatgctgagccccaggcacgcagggccggccacctctctcctgaagccattggccgctcctccacccagtgcttctgcccatgcctgccccagcagcccctctgcacggtcaccatcgcctgggcctgccacagcactggtgctcacctctacctcctgtcctcaggccgtgcggacgacatggccagcacgcagaaggagccctcccgggacccaggaccccccgtggtggactccgcggcacatgcttcccaaggtggtcccacggagggtgttactgggcaccagtggact

SEQ ID NO: 2529 - DNA, 484 bp, Homo sapiens
aaattattttaagatttttatagttttttttaattagaatttatttcagatgttttgttcatgatactatccttcagggttatgtgcttatcaatgaaataaccccagaggagtgagggaaaataacgtgtagccagttatattcaggaataactactgtaaatgatgaacgtgttaggagacctccaatatttgctacttgccaatcctaatttagttacaagaattggtaggcaatcctacttaattttggcaaaagccccgtcatctaaatggcagaataactcagagcatgtctttgaagatgctgggcgtctaccaccaccttatgtccccaccctacccaacaaaaataagtaaaaagaatatggtgtattctacaaatttgtggcatgctcaaagtttatgatcacataaaggcaagaggatacttcatgaataatacatttcaatgcaaataaacagatggttcacttctactagc

SEQ ID NO: 2530 - DNA, 1814 bp, Homo sapiens
tttttttttagtttgtagatagatttctcatagatttatttctgcgtcatattatatatagatatatgcatatataccttttttttttttaatacaatctatatacccttcccttccccaccaaactcacaaaaggagattaaacccttccaggattgccatcaagcttcccgagatggccagggccaagaaagaatcatctctcaacatgttaagaaacggctgccattcttaggctctggggttgaagcagcagcattcccaggacccaagggccagagagaggaaaagaaatgactgtagtgtgacaggattctaggatgaacatgtccagtgactcctggcatggcagactggctcccagaattctcagggtgtgagtaaaggtgggggccctatggctcttcagaggctgctcaataggtcaggggtagggtataggaactggggatcaggcatgcagggatggggtggcagaaaaaacgcctgtgggttatgctccagacagagcgacccccatcaggctacccacctactcaatgacatgtaatgaacagggacagatgctgagctcttaaggaaacaagggagagagcatggcagcggggagcaatggaacacatgaagtcacaaaaaacagaaagtaccaacaaaaacatgacctacatttgactcctccctagagaaggtgtgatctatgtttggggttaggggaggtgaagggtcatgaacctaggattatcagctggccaggggcacagaaggctctctgaggactcctaagaggcaggcaggcagctgggaccccacatccccagggaggaaacgacagttctttcaattcgacttggaccaaatcttggcgctccctcggagccccttgccctttgaggctttcttgcctgggctggcgctggttggtgcccaggagctggttccctcagctcagtcaggtgttgctcagggtcctgagatgtggctgcggctgctgctgccgtcgtaactttaatggtttttttaaggttggcaacctcactctcaatctgctgcttcaggcccagctgctgctccttgtgttggttggcacggctcacctgctcctcaatgcctgacagcacgacctcacagcccacacaccattcctgcagggttcgggcaatggcactgaggtcctggcgctggatgtcccgcccgatgctgtagtcaacctcgagccgctggttgcgctggtccagggagccacgaagcacgtcagcatacacagcctcaatcacaaggtcttccagctgccgcacattacgcagggcaagagcctccagcaacactgcatatgggatacactttactttagcagccagggtgacaactgagaggtgtcgaagcttattcttctgagcctctgttagtggaggaagattccgggcttcagctaagtagtcagcgtatgtcccataagcaaacactgtgagcagccggaaggtagaggcaaagtcactctcagccagctctctaacattgggcatgtccagcagttctccaaacacgtagacaccaggggcctccagcacctgatggatgagtgtggccagcgctgcccccttggccgacttggctaggagcagaaattgctcctggttctgccctgtcaccttcacttccgcactcatcactgcactgagtgtgggggacttgggctcaggatgtccagagcctgggtcaggctctgcgggccgctacctggaagcttcgacctccagcgcaccgggcggggccgccgctccgtcacctccggcagctgttccaagcctttcctg

SEQ ID NO: 2531 - DNA, 228 bp, Homo sapiens
gtcatgattgtaataatgttacatgatcatgggtgtggcattctctaacaaatgatggtgaaaggaaagtagttttcataaaactcatggctctgatttgcacagtcccacttgcttttgatattgctatgtcaaagccaaagggcacttcttttaaggctactttcagaacttttgtattttcggctaaacttataaatgcagttggtgtccagttgggaggcccag

SEQ ID NO: 2532 - DNA, 1099 bp, Homo sapiens
ggcaagctttctgccttaaagatcacccgagagctgagaaacgtgttgccaaaagaaattgcataaaaatagtcgcactagtgagctctgggtggcggggtgattgtgagcagtttttacgggctaccgtggctcctgtttttcacaaagtattaacaggtgggtttaaaacgtcagggagcacacaaaacactcagagaagccgaacaggcgccccggggctgccgggagggagacggaagctggcgggacagcgcccttcagatggcgcggtacgctgtcgatgagacctcaggtttttaaaaacagtctttaaacttcgaccctacaccataaggactacgtcgggtcaaaattacttctggtcaagccgcgggccccaggtcccaagggcttgagcaagtcccggtctgcgacaacacgaggctctcccgtgacggggcctagccaaaggctccccccgcagatctcctgggattcagaactaccaaatcgccggcagacaggtctccaatcagaggaagcctgtgacggccgccaggataaaataaaaaggacaatggcaagtgatagcaaagacgtagagaagctggaattctcctaaatccttggtaggagtgtaaaatggtgcagcttcttctataattcagcatcccctaccatactccctggaacccacccaagagaaatacgaccagagagacttgcatgcaaacattcctaacagcattgtccacgccaaccagaacgtccaccaaccgcggatgcatgagcagcagggaaatggccatgaaaagaaactgctgagacatgggcctacatggatgaacctcaagaacgctaggccaggtgaaagatgccagacaagaaaattccattattccatttatgtgacacttcttaaaaaggtaaatctctagagaggaagcaaattcatgtttgcctgggggtgagagtgggatcaactgcaaacaggcacgaaggaacttttttgggtgatgaaaaataaaactttggatgtcgaacatattttgaaactagattgcaatgatagttgcataactgtatacatttattaaaatcgtggaacacttacaaa

SEQ ID NO: 2533 - DNA, 564 bp, Homo sapiens
  misc_feature (1)...(564): n = a,t,c or g
tcggcgtgctgcgcctccgcggcatgcccatgcgccagaattcggttccctcaaaattataaaagcaggaaagctcaagacaaagaaatccaacaaggctagtgatttcagtgatatggagaattggccaacaccaagtgaattagtgaacactggatttcagagcgtcctcagccaaggaaataaaaagccacaaaatagaaaagaaaaagaagagaaggttgaaaagagaagtaacagtgacagcaaagaaaaccgggaaacaaaattaaatggtcctggtgaaaaccgtcagtgacggatgaggctcagtcaagtaatcaacgtaagagagctaataagcacaagtgggtaccactccacttagatgttgtaagatcagagagtcaagaaagacctggatcccggaacagctcaagatgtcaacctgaagcaaataaaccaacacataacaataggagaaatgatacacggagttgggaagcgagattgagaaaaaagngatgtcaagatgacgtttccagtgtgagaagtgagggtggtaatatcccgaggttcctttag

SEQ ID NO: 2534 - DNA, 392 bp, Homo sapiens
gcaatccaaagagacaaatggaaaccagtcaactgatattgatagtacattggccaacttcctagcggagatcgatgccataacagctcctcagcctgcagctcctgtaggagcttctgctccacctccaactccacctcgaccagagccaaaggaagcagcaacatctaccctttcttcttctacttcaaatggaacagactccacccaaacatctggttggagtctgttccaaaggaagcagcaacatctaccctttcttcttctacttcaaatggaacagactccacccaaacatctggttggcaatatgatactcagtgttcactggcaggagtcggaattgagatgggcgattggcaggaagtctgggatgagaacacgggatgtta

SEQ ID NO: 2535 - DNA, 992 bp, Homo sapiens
  misc_feature (1)...(992): n = a,t,c or g
ggaatagcaaaaaaaaagggaaaacaacccaaacagccatcagcaggtgaatggataaacacatggtggatatccatacaatgaaacactgctcagctgtgaaaaaggaacaaactattgaaacaatatccctgttcaggagcaggatttggagaatataagaagcatatcttttataatttaaaaacttgctttctaagatttgaactgaaagatcttttttgaagatgagtgtcatggaattgacatgatttgaagtgttatggcacttcctttgaataaaaaaatcaaagttgctaacaagttccatgtacttaaaaatattgggacagagcgctcaaagctatgaaaagttttgggccaccccatgaatatgagataagattaacaagagaggagaaggaagtgaaaaatatggctttccatgcatttccaattgtatgaattaccattgaaggctagtgatgaaatgttactctctaggagtcagtgttttcacatctaaaaatggtatcagtcatagaaaaagcttatctgtctactgccaaaaagggaagagggtaatagcacgtattgagcacctactgtatattcagatgaggtcctgccatacgaaattcagtccccactgttctgggggccatgcaatcgtctttagataataggtgtggggctaggggttccgctgtgaagttaccttccttcccagggtgctcagccagcacaaagctgtggtgagatttgggtccaggtctcagactccagattccaaaccacatttaaaaaaataaaatcatcacctgcagactgcctatagctttgacagtctccggtgtctccctttcgtttgcatccctcgggtggaaaaaaggtttatgaataattttagtaaaatttgattccaaaagacatttcttggattatcacattggggtctcaaagtgtgggtccctggaccagtgacatcagcattacctggggcactcnattag

SEQ ID NO: 2536 - DNA, 1239 bp, Homo sapiens
ttttttttttttgtctctcagagaattatttaataatagaattaccatacttttggcgcaaatgtgtccaacaccaatgtgacaagtacatatatcagaatcactctttcctcagagaatcacaccttcccttggctctgcctgtggatccaaatcaagcctgggtgtgtctgacaataccagggcacggtttgcttcccggccctccatctctactgtttggctacagcttgagttcactaggcatcggctcccctctcaggccagccagcaagttgttagctgccaacaaggacatggtgttgcgggttctgtgggtggcactgccaatgtggggcagaatcacacagttcttcagggtcaggagagggtggtttgtaggcagtggttctgggctcgtcacatccagtccagcagctgcaatcttaccactggccaaggcctggtacaggtcgtcctggtttacgacgtcgcccctgctgatgttgatgaacacagctgtttccttcatcttctggaagaagtccttgttgcagagtccctcggttgcaggtgttaaggagcaggccacgacgatgaaatcagattgggcagccagctcaggggtagacacaaactctgcctggaattctgctgcttcctcaggcgctggggctggcgccctgtgtacagaaatctctggacaccgaatggtttcagacgccgagcaatggcctgggcctatgcggccccagcccgatgatgccgacagtgctctgcgtgagtccatagccacacagccagaggggcttccacgaggtccagccaccattcttcacttcctcgatggcctccggcaaccggcggcaggtggtaagtagcagggagactgcgagttcggcggtggtatctgtcaggacatctggggtgtagccaactcggatcccacgcttcttgatttcatccaaagccaagtggtcgatgcccacagacatggtgctgatgactttgagattggcccctgcagcatcccaggatcctcttgtccacgtggtcggagaggaggcagagcaggccgtgggcccccgccacacctcgctctagctccttggcagggatgggctcatccgagtcccactgctccacctcacagtctgccgcccgggcgagcgcgaccctaccctcgggcgggtatcctgcgggtgacgaacaccttcatgagtcgcaccggtctcatccgcaggtgcagcgccgacccgg

SEQ ID NO: 2537 - DNA, 1220 bp, Homo sapiens
  misc_feature (1)...(1220): n = a,t,c or g
ggagctgtcgcgtaccctgtagagtcggtctctgttgctctttttgcctgaggagtcttccatcctacgtcgagctctgactcccgtgctgtcgagagggagtccccggggacacctcggcacgcagcggagatgcctctttttgccaccaatcccttcgatcaggatgttgagaaagcaaccagcgagatgaatactgctgaggactggggcctcattttggatatctgtgataaagttggtcagtctcgcactggacctaaggattgtcttcggtctattatgagaagagtgaaccacaaagatcctcacgttgctatgcaggctttgactcttctaggagcatgtgtatcaaactgtggcaaaatttttcatttagaagtatgttcaagagattttgctagtgaagtaagcaacgtattaaataagggtcatcctaaagtatgtgaaaaattaaaggctcttatggttgaatggacagatgaatttaagaatgatccacagcttagtctaatatcagcaatgattaagaaccttaaggaacaaggagttacgttcccagctattggctctcaggctgcagaacaagcaaaagcaagcccagctcttgtagccaaggatcctggtactgtggctaacaaaaaagaagaagaagatttagcaaaagccattgagttgtctctcaaggaacaaaggcagcagtcaaccaccctttccactttgtatccaagcacatccagtctcttaactaaccaccaacatgaaggccgaaaagttcgtgctatatatgactttgaagctgctgaagacaatgaacttacttttaaagctggagaaattattacagttcttgatgacagtgatcctaactggtggaaaggtgaaacccatcaaggcatagggttatttccttctaattttgtgactgcagatctcactgctgaaccagaaatgattaaaacagagaagaagacggtacaatttagtgatgatgttcaggtagagacaatagaaccagagccggaaccagcctttattgatgaagataaaatggaccagttgctacagatgctgcaaagtacagaccccagtgatgatcagccagacctaccagagctgcttcatcttgaaggcaatgtgttcaccnggtggggacctcttcnttggatggaaaagctgggaggatatttgnttgggaaaacctttccaggaactcttcc

SEQ ID NO: 2538 - DNA, 521 bp, Homo sapiens
  misc_feature (1)...(521): n = a,t,c or g
gcggcacgaggcagtgtggctttttgcacacttgccctgtcttcctgagactacttcagtaagccatgcttccttcttccccacttttatttggtgtcatgaatagaaacttccaaatgtaaccatggaagctaagtttggcctgctttgctttttagtctccacaccatgggcagaactgctgtctttactacttcatctcacccaagtcccgttcccaggcagccaggggcctgggtttgaataattgcagggccagcctgccatgatctttctcacttactcctctcccattcagcaatcaaccagactgaggagttttgatccctagtgattacagccctgaagaaaattaaatctgaattaattttacatggccttcgtgatctttctgctgttcttactttttcgaatgtagttggggggtgggagggacaggttatggtatttaaagagaataaacattttgcacatacatgtatttgtacnacagtaagatcctctgttaaaaccagctgttc

SEQ ID NO: 2539 - DNA, 1131 bp, Homo sapiens
agacagttttgaagttttcaaagactggctctgctgttaagaagttgtacttaaagcggaggagctaagccacctgccaaaatgtgcaaaggacttgcagctttgccccactcatgcctggaaagggccaaggagattaagatcaagttgggaattctcctccagaagccagactcagttggtgaccttgtcattccgtacaatgagaagccagagaaaccagccaagacccagaaaacctcgctggacgagggccctgcagtggcgtgattccctggacaaactcctgcagaacaactatggacttgccagtttcaaaagtttcctgaagtctgaattcagtgaggaaaaccttgagttctggattgcctgtgaggattacaagaagatcaagtcccctgccaagatggctgagaaggcaaagcaaatttatgaagaattcattcaaacggaggctcctaaagaggtgaatattgaccacttcactaaggacatcacaatgaagaacctggtggaaccttccctgagcagctttgacatggcccagaaaagaatccatgccctgatggaaaaggattctctgcctcgctttgtgcgctctgagttttatcaggagttaatcaagtagtaatttagccaggctatgaaatcatcctgtgagttatttcctccataataaccctgcatttcccattaatctacatatcttcccacagcagctttgctcagtgatacccacatgggaaaaatcccaggggatgttgcttactctttttgcccacactgctttggatacttatctactgtccgaaggccttctttccccactcaattcttcctgccctgttattaattaagatatcttcagcttgtagtcagacacaatcagaatcacagaaaaatcctgcctaaggcaaagaaatataagacaagactatgatatcaatgaatgtgggttaagtaatagatttccagctaaattggtctaaaaaagaatattaagtgtggacagacctatttcaaaggagcttaattgatctcacttgttttagttctgatccagggagatcacccctctaattatttctgaacttggttaataaaagtttataagatttttatgaagcaaaa

SEQ ID NO: 2540 - DNA, 626 bp, Homo sapiens
aagaaagggtattaaaattctagatcacatatggacccgggaaggttttctcaccctctgttagtgacatcgagtctcccactagacaaaataggtggaaaaatctctcgagggctcacattgttttgtcatcttcaggaaaaacaccaccaggccataccacagcctgcccagtgaggcggtctttgccaacagcaccgggatgctggtggtggcctttgggctgctggtgctctacatccttctggcttcatcttggaagcgcccagagccggggatcctgaccgacagacagcccctgctgcatgatggggagtgaagcagcaggaaggggctcccaagagctcctggtggtgcagcctgtgctcccctcagaagctctgctcttcccagggctcccggctggtttcagcaggcgactttcttccaatgctgggcccagacttcttgcctggggtgctggcctgccctcttccggccgcttgctgcctgtctgctttccttggtggctttgcctgggtgctgggcctgccttctctggctgcttgctgcctgtctgctttccttggtggctttggcttctgcactccttggcgtcagcctctcaggtcctccattcacacgag

SEQ ID NO: 2541 - DNA, 949 bp, Homo sapiens
  misc_feature (1)...(949): n = a,t,c or g
caaactggactacaagcaacaacaaagcattctggattccctgtgaggatggataatgctgtaccgattgtaccccaggcaccagctgctcagccactacagattcagtcaggagttctcacgcagggaagctgtacaccactaatggtagcaactctccaccctcaagtagccaccatcacaccgcagtatgcggtgccctttactctgagctgcgcanctggccggccggcttgggttgaacaagactgccgctgtactgcaggcgtggctggaagggactcaagcaaattctcctgccttcaaactttgggcaacagttggcctgggggtaagctctacacaactcttgtccagcccacagcaatgattccagaggccatggggagtggacagcagctagctgactngaggaatncccactntnatngcaaccagtacagcactatcatgcagcagccatccttgctgactaaccatgtgacattggccactgctcagcctctgaatgttggtgttgcccatgttgtcagacaacaacaatccagttccctcccttcgaagaggaataaagcagtcagctccagtctcttccaagtcctctctagatgttctgccttcccaagtctattctctggttggggagcagtcccctccgcaccacatcttcttataattccttggtccctgtccaagatcagcatcagcccatcatcattccagatactcccagccctcctgtgagtgtcatcactatccgaagtgacactgatgaggaagaggacaacaaatacaagcccagtagctctggactgaagccaaggtctaatgtcatcagttatgtcactgtcaatgattctccagactctgactcttctttgagcagcccttattccactgataccctgagtgctctccgaggcaatagtggatccgttttggaggggcc

SEQ ID NO: 2542 - DNA, 782 bp, Homo sapiens
tgggtggggtgggcattttgtttatttgtttggtggcaatcagtggtagtagggagtgggagggcttatattggtttttccagctattaaggggacatattgtgtcgttgtgcttttcacgttataaaatgtttatatttaccagtacagcactgggctttataaagactgcactcagaaccacactgcacagtccagttttttaaaaagctgctacatgacagacaggtaatcccactgagtgagttttgagaaacaaatcaaacgaagtaaacaagaaacataaaaaccaaatagcaaatgaataaaagcctgttcttgtaacttattcaacttttgccaaattcctaccaatcacttgctttttaaaagaaatgtataatagccaaaagagaaattatgtccctgttgtacagaagttagaatttttgactccaggcagcagtttgcttcagtgatcttggaacaagttatccaattgcctctacatttgcatcagtttctctagctgcaaaatgggggataatactatatacctacctcacagtgggagggcaggagattttgaggccctgaggttttaggtggggctgtgaggggccaacgcttgacacaaagtccatgggttattattcaagaatggcacagggcccatcgggccttttagaaagacaagacaggggagtgcttgtttgatatttcaagggaataaaggccggagctcctgaattggtagtccaccttaaaagagagacctgtatttggagatattttatttttta

SEQ ID NO: 2543 - DNA, 890 bp, Homo sapiens
  misc_feature (1)...(890): n = a,t,c or g
gggaaagatccctggtctcgcagtcagaagacccgagttcaagatgtgggatctctgaacatggcccttcagttctttcttccgagagctgtgctgatggccaagtaagatgagggctatgaaaagcctctgtagactgcaaaatgagcatgggagaggctgtcattattctggaattgggagacagatttacagagggcctgaacacaggattgaaggtggtgaatttccattcggctgcctgggcgtctgcatgtataaaaagcaaacctaagtggtttttttctcctccaagtgaagatgaaagtgttaaaaatagcaaggaggtgaaagtgttcaaaatagcaaagtggcctgtctcctcttctcctaagcagactgttcaaacagacgcccagtaggaaggtgcaccttttgatactgggcacgtggtggtgatgcctcctctctcctagcacaggccgtggctttgtcatctccagccctaactgggagcaccgagggttccaaccaggcaaatgcaggccctaacggntnctttgaaaacgggcttttctagaaccaggaacctcaagtaaaaactcccccagctacctctaaggcccatcacactcctgtctcacgcccacctatgagaaaggaaaaggtgatggtcattgagctgggctgcagaggagtgtgaggtgcagacaccatgaggtacccacagccaggaaaacgaggatggtcggggagacgcgccagcgaagagctggggcccctgcgtgggacccctcaggggttcccagggggcgtggggacttggcgcagtccttttcagagggctgttttaccaacaggaaccgtaacattaaacctgctcagaccccttgactcagcaatttcatgtt

SEQ ID NO: 2544 - DNA, 1713 bp, Homo sapiens
gctcaacacagccatcaactgcagggatgaagtggtgtctccccttccatctgctctgcaggggtccctcaggctccctatcagcccctccagctgcctcagttatctctgcacccccatcttcctcctcccgacatcgcaaacgtcgcaggacttccagcaagtcggaggcaggggctaggggtggaggccagggttccaaggaaaagggccgagggagttggggaggccgccaccaccaccaccacccactgcctgcagcaggctttcaaaaagcaacagcgcaagttccagtatggggaattattgcaaatactatgggtaccgcaatccttcctgttgaggatgggcgccttcgggtgttgaagcctgagtggtttcggggccgggacgtcctagatctgggctgcaatgtgggccatctgaccctgagcattgcctgcaagtggggcccgtcccgcatggtgggcctggatatcgattcccggctcatccattctgcccgccaaaacatccgacactacctttccgaggagctgcgtctcccaccccagactttggaaggggacccgggggcagagggtgaggaagggaccaccaccgttcgaaagaggagctgcttcccagcctcgctgactgccagccggggtcccatcgctgccccccaagtgcccttggatggagcggacacatcagtcttccccaacaatgttgtcttcgtcacgggtaattatgtgctggatcgagatgacctggtggaggcccaaacacctgagtatgatgtggtgctctgcctcagcctcaccaagtgggtgcatctgaactggggagacgagggcctgaagcgcatgtttcgccggatctaccggcacctacgccctgggggcatcctggtcctagagccccaaccctggtcgtcgtatggcaagagaaagactcttacagaaacgatctacaagaactactaccgaatccaattgaagccagagcagttcagttcctacctgacatccccagacgtgggcttctccagctatgagcttgtggccacaccccacaacacctctaaaggcttccagcgtcctgtgtacctgttccacaaggcccgatcccccaggccactaagtggccccctaaacagaaagtgtgaagaggctgccctcgctgctcataaggacctgggggaagaggaaagtgtcccaaggtctttcctttctgactccaaaaatagtttcctttcttggatctgcaaagaaagcttttcttccgtcgctgcctcagcctcctccctatgcctctggcacctgcgcagcaaggctggctgtgctggagtcaccatcatcttcctctcccccagcctcccaggctggatggcatggactgtttgctgacctctgttctcttagggcatgggaggtgggaggatatcaaattctctagccctttcctcctattctctagcccttctattctcccaaggagagagattcccatttctcctcggccattgtacctagctcttgtccctagctgcatttcagtggaccatggatagagggactgagggttagacggggaagactggcagggaggcacgcaggtactgtgaaaatccttccctttgccctcccccagtgggagagggggttgggttttcaatgtgagaacagcacaataaacttgatgtctaggtcagtggcccccaaaaaaaaa

SEQ ID NO: 2545 - DNA, 1127 bp, Homo sapiens
ttggccaacatttccgggcagctagacttgtctgcttacacggaaagcatctgcttgccaacttttggatggcttgctgcactggatggtgtgcccgtctgcagaggcacaagatccctttccaactgtgggacccaactcggtcctgtcgcctcagagacttgtgctggagaccctctgtaaactcagtatccaggacaataatgtggacctgatcttggccactcctccatttagtcgtcaggagaaattctatgctacattagttaggtacgttggggatcgcaaaaacccagtctgtcgagaaatgtccatggcgcttttatcgaaccttgcccaaggggacgcactagcagcaagggccatagctgtgcagaaaggaagcattggaaacttgataagcttcctagaggatggggtcacgatggcccagtaccagcagagccagcacaacctcatgcacatgcagcccccgcccctggaaccacctagcgtagacatgatgtgcagggccggccaaggctttgctagccatggccagagtggacgaaaaccgctcggaattccttttgcacgagggccggttgctggatatctcgatatcagctgtcctgaactctctggttgcatctgtcatctgtgatgtactgtttcagattgggcagttatgacataagtgagaaggcaagcatgtgtgagtgaagattagagggtcacatataactggctgttttctgttcttgtttatccagcgtaggaagaaggaaaagaaaatctttgctcctctgccccattcactatttaccaattgggaattaaagaaataattaatttgaacagttatgaaattaatatttgctgtctgtgtgtataagtacatcctttggggtttttttttttctcttttttttaaccaaagttgctgtctagtgcattcaaaggtcactttttgttcttcacagatctttttaatgttctttcccatgttgtattgcatttttggggggaaggcaaattgactttaaaaggaaaaaagttgtgggcaaaaggatggctaaggtggcgaaaattttcaccacactgagttcaaaaaggtggaaaattatcccttttcccatggcgtttta

SEQ ID NO: 2546 - DNA, 568 bp, Homo sapiens
ttttgtgaagtgttccaactttatttaaaaccagacagccctgctaccatgcccccgctcctcagcattgctctaggggaggagctggatgaactatggcccttctgccaagcccaggtgctaggggaggaaccccttgcttgagatgtacaggatggactcctcacttcttctggggcttgtgccctgggcccgttgaatcttgtcagctgtggccccatctgtgggctcccgtgcagtgggacaatacgagggctcagctcagcctcattccggtgttcgatggccacatctgcagcctgagccacatcgccaacaagaagcaaagccttgaccttctgctcgggacccacgcgggaagcatacttcttggcttcgtatttgttatgttgtttcatgcagatctccacaaaaggcaggtagccaatgggtgatttcttgctcttggaaaacttctctagctcttcccaatcttccaaatctgccagggcagtcagcttcagccaccagagcctcttgtcagggatgcggaagtcacgtgccagctgctctgcacgcttgttgtgac

SEQ ID NO: 2547 - DNA, 790 bp, Homo sapiens
  misc_feature (1)...(790): n = a,t,c or g
gtctctaaacccctggcttgcaagtaatctgttactgtggccagaggaaccgatacaggaaagcttcagaaagtcaagtttgccttgctcttgaggcctgggtggaaacaggtccaagtgttgagctccggctaacacggcctgtgcaaaacgaggccccacgcatcagcctggggtgcaagacccgaaccctggggggctctgggcctccaggtcagacctcccctcctgggaaagccacaccggccaggcctgcgaccacgcgtctccggtttacctcantgccaaggggaacgcttggaaaacgctctggaaattgtctttgggagccttttaataatgtggccagctaatcatgacaagcgtctatgagaaataaaatgcattctgcacatgacagatgatgaactacccgaaatatctcgtgagaagctctggcaggaacagcagggtgtctggattcttaagcacaacacattcagcagccagacccagaaactcaaaggcagcgttgggaagccactgcacgtttgtaaggagtcaggttgtccacacaatggcgctattttgggattccggcttctctgcctgtgacctgctgaaaccattcatgccggcatcatgcctattggaaactctttgaagttattttgaaacgagaatcgactcaatctattccactatagtttcatacaaagcatatttttttttcctcatttcaaaataatttcagacttccaaaaagttccaaaaataggacagtgtgtatacccagttccccaaataacat

SEQ ID NO: 2548 - DNA, 2477 bp, Homo sapiens
tacaaattcagtgctccagttgtgccaagttctttcaattttggaggcccagcaccagggatgaattgagttatctctttctttcctgctgtgtgcttgtagtgaagagcttgtgttcctcctagtagtggttccagaactggttcatgttatctattctaaactaataatcaatagatggacaaaagaaacaacaaccccaggagatgggacctgatcatgcaacctggcactggaaaagaaatcagcgggattttgggggtgggggggatgggaggtaccttagagggagtattttctttattttttgaagaaagtaagatcctgactctgaagcttcaaagtgacactgtggaaatctgaaacgaggggatgtcatgaaggcagcttttctttttctgaggaaaaaataggcatgggctacaggactatttaaaatgtctcatttacagtataaaactcaaaggtagatgtaatttttacacctatgagtatttgtccaatttctgtctcttcctcaccattgggtatctattctttatatgtaaataagataaggtcatctgatagccttattcagtcttcatcattttcatcattgttcctatgtagattattggacatttattgtagcactacataactgattataaaaatctgtaaatgaattagcactttcatattgaaaccaagcctgctagcctatgtataaaatagcaaaatgtttgctgtttataaaaagatgtaatggggtggggggcaggggtaatttcaagttattaatttaaaaatgaactagcaattttgtacctggtgactttgtggtgcactcacctctgatagtgacttgaattcggtatgtaaaaaggggttagtggtatttcattgctgctaaaaatgacaactccctctgtgtcctgtttttcttaaagctgtcagtgtacaagtgggtatttgaataccagaccttactgtaaaaaataaaaaaggtggtatctagagcatgtaaattggatataaagttctgctcttaaagagttgatctaagagtatggctaaacatctatatatgcaatctattaaaagaacttaattcggctattatgtcttgatttgattgcagttttttcctaattataacaaatttttcctcattggcctgtttttaatcctgtgcctagaaggagtacaaaatgcacactttacaaaattgatatttaacacttacccactcccctttccccatctcttctaccgctcttgttgatcgtggtatctgatcttgactagataggctgaaggcacatggttccctccaaaaaccactattgataccactacaaaaacaagccagcaaaaagatactgtagagaggttggcttgcttccctctcttcctaactgcatgttgaaaaataagccggttattgatcttaaacatcggtcagatgagtcatacattgggttattttttatatacatgtatacacaaaatatttcaaattgaaagcaacatcttaatggattcaaaactattacaagctgttgtctaaaacaggtgagaaaaaaatttataactgtaaaaacaaatgcacatattgatatttaaaatgcgtaattaagaaaacccattgttgttgtgtttttcttgtataccaataattaagccactactgttggcactgtttggttttctattttaacactgaaggagtgaaagtatttcctatatttatgaatttactactaaaatcttggcaaaaaaagaaaaaaattgtctaacgtgtgtgggtgaaaactgttaatcaagtgtttctactcccccccgaaaatcccctgaaagttggacaccaactgtataccctaggttgcttaaagggatttcactattatataaagtcaataaaaatgaagtagttgtatatatgcaacattgtgtacagaggggaaataatgaatagtattaaagaaacattctcgtcttcctttacctttaatcccctaatacctagtctactttttaaattttcagacttcactgctttttgaattcataattctaattttcacattattgttaatggaaaatcatatctaataaaggttttagttattcccatgcacagtatgaaaattctcatttgctgaggttttgtttcaagaaaatgtattggcatgtctttgagaacatgttttattgtctcctgtgtcatataatccaaactaatctccgtttacagactttaacttgaaattagaccttataattaaactatttaaatagtgttcaaatgatagtttctaatgcatcaaatatatacctcagttttcatgatttcctttaacattataatttggtatagatcaagaatcttaacatgtatcagtttctagatgaggctgcaggatttttggaaaacttttttgaatgtatttacaatattctcttgtaattagctacatagggacttggctttt

SEQ ID NO: 2549 - DNA, 2294 bp, Homo sapiens
  misc_feature (1)...(2294): n = a,t,c or g
cttgcgagctcgtcgtactgaccgagcggggaggctgtcttgaggcggcaccgctcaccgacaccgaggcggactggcagccctgagcgtcgcagtcatgccggccggacccgtgcaggcggtgcccccgccgccgcccgtgcccacggagcccaaacagcccacagaagaagaagcatcttcaaaggaggattctgcaccttctaagccagttgtggggattatttaccctcctccagaggtcagaaatattgttgacaagactgccagctttgtggccagaaacgggcctgaatttgaagctaggatccgacagaacgagatcaacaaccccaagttcaactttctgaaccccaatgacccttaccatgcctactaccgccacaaggtcagcgagttcaaggaagggaaggctcaggagccgtccgccgccatccccaaggtcatgcagcagcagcagcagaccacccagcagcagctgccccagaaggtccaagcccaagtaatccaagagaccatcgtgcccaaagagcctcctcctgagtttgagttcattgctgatcctccctctatctcagccttcgacttggatgtggtgaagctgacggctcagtttgtggccaggaatgggcgccagtttctgacccagctgatgcagaaagagcagcgcaactaccagtttgactttctccgcccacagcacagcctcttcaactacttcacgaagctagtggaacagtacaccaagatcttgattccacccaaaggtttattttcaaagctcaagaaagaggctgaaaacccccgagaagttttggatcaggtgtgttaccgagtggaatgggccaaattccaggaacgtgagaggaagaaggaagaagaggagaaggagaaggagcgggtggcctatgctcagatcgactggcatgattttgtggtggtggaaacagtggacttccaacccaatgagcaagggaacttccctccccccaccacgccagaggagctgggggcccgaatcctcattcaggagcgctatgaaaagtttggggagagtgaggaagttgagatggaggtcgagtctgatgaggaggatgacaaacaggagaaggcggaggagcctccttcccagctggaccaggacacccaagtacaagatatggatgagggttcagatgatgaagaagaagggcagaaagtgcccccacccccagagacacccatgcctccacctctgcccccaactccagaccaagtcattgtccgcaaggattatgatcccaaagcctccaagcccttgcctccagcccctgctccagatgagtatcttgtgtcccccattactggggagaagatccccgccagcaaaatgcaggaacacatgcgcattggacttcttgaccctcgctggctggagcagcgggatcgctccatccgtgagaagcagagcgatgatgaggtgtacgcaccaggtctggatattgagagcagcttgaagcagttggctgagcggcgtactgacatcttcggtgtagaggaaacagccattggtaagaagatcggtgaggaggagatccagaagccagaggaaaaggtgacctgggatggccactcaggcagtatggcccggacccagcaggctgcccaggccaacatcaccctccaggagcagattgaggccattcacaaggccaaaggcctggtgccagaggatgacactaaagagaagattggccccagcaagcccaatgaaatccctcaacagccaccgccaccatcttcagccaccaacatccccagctcggctccacccatcacttcagtgccccgaccacccacaatgccacctccagttcgtactacagttgtctccgcagtacccgtcatgccccggcccccaatggcatctgtggtccggctgcccccaggctcagtgatcgcccccatgccgcccatcatccacgcgcccagaatcaacgtggtgcccatgcctccctcggcccctcctattatggccccccgcccaccccccatgattgtgccaacagcctttgtgcctgctccacctgtggcacctgtcccagctccagccccaatgccccctgtgcatcccccaccttnccatgggaagatgagcccacctccaaaaaactgaagacagaggacagcctcatgccagaggaggagttcctgcgcagaaacaagggtccagtgtccatcaaagtccaggtgcccaacatgcaggataagacggaatggaaactgaatggggcaggtgctggtcttcaacctcc

SEQ ID NO: 2550 - DNA, 530 bp, Homo sapiens
  misc_feature (1)...(530): n = a,t,c or g
ggaactcaatgtttgactatgaatgtttcgttataactgcctggaaggttagcgtcaaagaagttgagatttttaaagtcttcttctaggggtttccagcagagccaaatgttagaaaaatctttccgctcctctgaagagtgaagtgagcaaatacaacccagcagtaggttattgaagacagcagccccaggttttggaaggtgacaatgaaatgtgaagaagttacatttctcaaacttgaaagttagtgacggcttaccaaattttaatgaaaattaaatatgacttagaagcattgatttatgaaggcttatgatgtcatcggtttcgacagaaagcaaactccagcaggctgtgagcctacagggagttgacccagaaacatgcatgattgtatttaaaaaccctgggcacaggttgtgaaaatcttggagaaacacgacccttgaaaacncccggcaaaatntggnctntccctcagaanaagccagtgccgtgcanaattcgtanacacntctttttgtgat

SEQ ID NO: 2551 - DNA, 1397 bp, Homo sapiens
cacagctggccgtgggcagaattctgctttaattgcaggtgtctctgactccagtcccatgcttcttcccttccagtgcagtgtctacttgctaatgatcacgtctcttaaccttagaagattgttctctgttattcgaatcagtattataggagaataagcttctctcttgcctctcacagaaagtactgaaatcccaccttatgtgatgaagtgtccgagcaatggtttgtgtagcaggcttcctgcagactgtatagactgcacaacaaatttctcctgtacctatgggaagcctgtcacttttgactgtgcagtgaaaccatctgttacctgtgttgatcaagacttcaaatcccaaaagaacttcatcattaacatgacttgcagattttgctggcagcttcctgaaacagattacgagtgtaccaactccaccagctgcatgacggtgtcctgtcctcggcagcgctaccctgccaactgcacggtgcgggaccacgtccactgcttgggtaaccgtacttttcccaaaatgctatattgcaattggactggaggctataagtggtctacgggctctggctctaagcatcaccctcggtgggtttggagcagaccgtttctacctgggccagtggcgggaaggcctcggcaagctcttcagcttcggtggcctgggaatatggacgctgatagacgtcctgctcattggagttggctatgttggaccagcagatggctctttgtacatttagctgtggtgtgtgcttcagaaaggagcagggcttagaaaaagcccttttgtccgtaggagttgatgtggtgtgagtgatatatttctatgtttttaatgtacagcatctgtactttgtttgccttgataaaggtaagataaatgaaacgctgaactatgctaatctggaatttgtttttatttgcctgaaatatatttttttctgtgaaaaaattaaaacgtacttaagccaggagaatgaattatacagtgattgaaaatccatttaattcctatgacttttgttttgtattgcccaagtcaaactacatcacttgtatctccagcccaaatgtagtctgccttgaaaagtctttcagctgtgactgcaggaagtgggagtgtttttattgttagctaattgctgtgactgcaggaagtgggagtgtttctgttgttggctaattgaagttattaggctcagcttcagtcatgtgtaagttttgcagtgtaatacatatgtagtctggtctgtatatatgaaaatttgaattaaactgcagaatgtttatgtctagttatggtttaaattttcttagtagtatataaaaggtaagagtactgaaaaattaataaaattgcaagttaagaaaaaaaaaaa

SEQ ID NO: 2552 - DNA, 1865 bp, Homo sapiens
  misc_feature (1)...(1865): n = a,t,c or g
tactcaccattacattctatttaattgctttgagccagacaggctgttttctttaccatgaaatatactaatcattcaaaaaagccttgtgtttaagaagacagcaaaaaacatcacttcaaaaaggcaacttttttttttttcttggcatcaatgaatatgcacttcagaaatctacagagaacttttttcactttgtatttgttccacagcattctagccaggagtacaaaataggagctcttcaagcagcacatgaagatggcccaggagccttcagccatccagagcagcagagcagcacctaaatctccacacacttcccagtataaccactaagaacacactagacccttggcattaggggatttatcatttccagttctattatctgggaatgactccaagggtttgtgacaagcttttgaaacgtaagtgctaagacgagtgtggacaagtcactgagctaatgaagaatagacccactgtctgcttggctctgctattttgtacctgtcttcacatgtggggaaacttcataactgtgcccacaaatcagagaaattcgcaaaggactagacaatgtattgcctgtgaacttcagaggcaactggaaatagtgcaactggaaatcaactagcttcatacataggcggatttgtttccagggaccaaaagcacagaagataagaaaacttttcaggtgatggccatattctcatcatatcctctctgtgtggagtctgcctgttgtcacaaaaaccttgaccctacatcaagttacaccttaacaaagggaagatacaggcatcagataaaaggtacttgtttgaaaggcagccataagggagaactgaacttaaaaaaaaaaaaaaaaaaaaaattccaagctggtttcaacagtactttgtttccagaacaaagaaatgtttctaaccacatcttgtaccccttcctcatcaactccagactaccacagacctttttccaaaactgtgtgtcacacatccaggtcttgtgctttagagctgcctctcaggcaattttagccagccatttctccaagtcctggatgtcagcagagcccacgtcccctcttccacccttggcactgcactccaggaactccactttgaggggcaactgtgagaattcaaactctttgcctttcttccccagctgagcaggggcagtgctggaactgtccagtgtgctgggggcagcagaacgggtaactcgtaaggtgttgagttctttctccagctgctgttgaattaactttgctgattttgccattgcaatatcttgcttattgcaggctattaagaatgatggtgtattcttcagacccatactgtcaatgaggacttgatacagaaactcagccacatctttcacctctcgctggaatgctgcactatccacaacaaacacaatagccctggctgaagacttaaaccgctctaagaactgaagcctcaaactctcatggccgggaaggtcaatcaaggtcagactattgcccctgttattgttgactctgtatacagcacagctgtcagtaatggacgtctgagtgtctctataaaggcctgttaacaacctgacaaagagcaacgttttcccggaatcacaaaggccaacaagaagaacagctctctgactgctccttctgctccggattaacttccagaagactagcgtcagcagcaccgcaagaaccgccaccactactgacaacagcgttgggtccgtctgctgcagctcctgccgcaaggtgtctaggtagggctggnaatgcncccggcaccgccgccatctccagccnggcgagtccgcggaagccatggatgagacgcgtggtc

SEQ ID NO: 2553 - DNA, 1247 bp, Homo sapiens
tattcttacctctactttgtcaccttctactggctccttaactaaaatctgccatttggctctctggttaacagtcccttcctgtaaagtctaaaatcttaattctaaatccacagtttaattcacaagctagtacttgactttttttctgtatttgacatttttgacaacccctactttaaagatttattcccttgacttcttacattttgctcactcctgaaccaccccccaccttttggcctcttcatttattccttaaatgttattcctcagacctccattttttttttctctcttaatcacaacaccacttctcacgcttgggtaattttaattcagcagttcctaaatccttatctttagccagactcctcaatccatctgcctgttgcacttttcttggttgtcccagagacacctgtgtgtgtcttaaaacattcattctctgcaaaacctactctaatgcctgtgtcccttactttggttaattttagaaccattatattctaagttttctaggctcattcctctcctccaccttcccctatcatttagtgtctaagttttactgattttatctccacctctctgatacatcactctttcatcttcattgctattattaataaatacctacagtactaacctgcctcctatacctagctggtctcctctctgttgctcaatgttaccacagcaggctttctagaagcactctgacagtgttactccctaatatccttcagtgacttcaggaactttcaggagaaagccaaactcctctgtttggtgtacaaggtcttctgatgtgtttcctccaccgaatgttctggtgaaacagacttacacttcttcagaagccacatttggccaggcctcccgccttggtaaatgctgtactctttgcatcaagtgtgctagtcatccttccccacttggaaaattcctatgcatcttgcaggcctgacataagcatttcctctgtgaaacctcctttgctccactcaaggagagtcatctaacttccactttcgtgtcaccactgtaattacaacctacctctattgtatgtcacttaaatcgtactgtattgttttatttttcaaaagtctttactagaatgtgagctccttaagggcaggaaaaggaacctttttattttttgcatctccatagcatagtttttggcatatgaatgtttaataaatgtttgttgaataaattgattttaaagtgaaaaaaaa

SEQ ID NO: 2554 - DNA, 702 bp, Homo sapiens
attattatttttattattacttatgaaaatctgtttttcagaaacacgttgtcagatatccaaggaatgtatttttaagcatgttcaccacagtaatattgtaataataaaaaatgggagacaacacaaatagaggataaaggattagttaaataaattttagcacatctgtgggaggcaatatagagaaaggatggatgtgggctctggagaagacatggcctgattccaaatcctgcctcagccctatgagctcatgggccttggtctctgtgtcttaggttcttcaactataaaaatcatggtaatcatgcccactttacaagggttattgtgaggaatgagacattacatgtaaattgtttagaagagaaacagggcatagtgagcatcccataaattgtagtattacacagattatgacttaccctttagaagaagaagggcagatctgtaggtactaccatagaagaatacttattagaaaaagactttttgccccttatagatgttgtggggcggggggcggtaaatgatccactcatatattcttagacttgagtgtacatgtccaactacatgtaaattactatgttataattagagaattataggaagagaacaatagttaagcatttttcatattttcagtccaactttcttaattttgattctgaatgaaaatcttagtatggaaaattg

SEQ ID NO: 2555 - DNA, 172 bp, Homo sapiens
ggagtacaatgaaaagaatttaaacatggttatttggtaggagaagttggaaatccagtagccacaaaatgaatttaccaatcaaggtctgatttcctagttacctgacactgaagtcagattgcttggatttggatcctgacttgacttatgtgaccttggactagcttct

SEQ ID NO: 2556 - DNA, 419 bp, Homo sapiens
gcataaattaagggctggttgtgtattcacattttatgataggtttatatttcttttctatttttataattataattccctttcaacagtttttcctgattaaagatattttagtagctggcttctttttaaactctttttaaactttttaaagtttttaaactttaaattttaagaagcttttgtaatatgtgatttgtctgtttatgccttattttgtttgttattttgaagcaaacataggaagtggcttactgccttgtataaaaagatatcagagaacagtggagtcatttggaaaaagcgcagtggtaaagtggcttcggaagtgattttttccccttattttctggcacagtgctttctaagatgatgttgctcactgtagttttcttttacttttaaaggcatgaagggcc

SEQ ID NO: 2557 - DNA, 497 bp, Homo sapiens
ggttcatgacatcttctatcccttcccccaatcagagggagaggacgagctctgctttctccgcgccaatgaatgcaagaccggcttctgccatttgtacaaagtcaccgccgttttaaaatcccagggctacgattggagtgagcccttcagccccggggaaggtgagcagagcctgacgaatgctgtcgactcatcgcgttagtcacgtgtggttcaatatgctgtttgttcattggtcggcccccccactcagccagcacaccctgcgggagaaggaacagggatcggcaggaagccagccttccccagtgactgcatgatctggcagggcttagagcacccaactgttggcttattcaggcagcagatttactgagcacctcccctgtgccaggcccttagcacaaccaggggttggccacctacggcccacaggtcaaatccggcccaccacctgtgttcataaataaagttttattggcactgagccacaa

SEQ ID NO: 2558 - DNA, 1072 bp, Homo sapiens
gccgcccggaccgggcatggtgttgggcgccgggcccgcctcgcctgtctcggggagcccagggtaaaggcagcagtaatgctaacgctagcaagtaaactgaagcgtgacgatggtctcaaagggtcccggacggcagccacagcgtccgactcgactcggagggtttctgtgagagacaaattgcttgttaaagaggttgcagaacttgaagctaatttaccttgtacatgtaaagtgcattttcctgatccaaacaagcttcattgttttcagctaacagtaaccccagatgagggttactaccagggtggaaaatttcagtttgaaactgaagttcccgatgcgtacaacatggtgcctcccaaagtgaaatgcctgaccaagatctggcaccccaacatcacagagacaggggaaatatgtctgagtttattgagagaacattcaattgatggcactggctgggctcccacaagaacattaaaggatgtcgtttggggattaaactctttgtttactgatcttttgaattttgatgatccactgaatattgaagctgcagaacatcatttgcgggacaaggaggacttccggaataaagtggatgactacatcaaacgttatgccagatgataaaaggggacgattgcaggcccatggactgtgttacagtttgtctctaacatgaaacagcaagaggtagccccctctcccgtcctcatgctccctctcagtcccctggattgccccagtcctgtgaccatgttgccctgaagaagaccatcttcatgactgctcattgtagatggagaattcaacataaatacagcaagaaaatgtgtttgggcttctgaagagttgtctgcttaccttaacatgtttacttttttgaacttgtactgtataggctgttggtgaaattcttaagaagttgtaatgaactcaaaattgaggccagagcttgctttcccttttcccaaacaaaattggttttctgcacaagcgatgctaatgatgtgttcagtgtaactcgcagattggcaataagatacccgctacaaactgtgaa

SEQ ID NO: 2559 - DNA, 1269 bp, Homo sapiens
caatattcagtttgatgagcactattaactaaaatatgaaacttaaaaacaaaagcaagttgtccttaaaagttctttttttaagtaaattgttgacatactgcaaattttctatgcaaacttgcctcctgctgttatctgtgaagctcaggaaatccaaacatttgtgtttcaacaagggacagtaaactgtgtgtttacagccaaaagaaatgcctcatagttcttaacctcaacttttgtagaagtatttttttctctgtaatatttttattggctcataaagatgttttcgtatccgaactcccaaataagtgaaattacagtagattatattaacaaaatactttttaggtaggccatgcttgagactttttaaaaatataactttttccttaaagttttcaggctatagcaaaaggtagttatgtatgccagacctaatatgagctgccaccaacacccctagaactttcagccatggtgtcttcagaattgtagcgcatttctgaatctagcaaatcctccttttacccgttgaatgttttgaatgccctgactctaccagcgcccataaatgatctctagaaggactgttagtaccaatctgtttttcaactttgaagctaaaaaccctgatatggtaatattatggtgcatagcagaggtctcggaaaaaaaatatttctgtttcactttactttcaggttaaaaatgtttctaacacgcttggcaacttcccttatggcattaatcttgttgagggagagagacagaatcctggactctccaaagtatttaactgaaagtagggcctgctctgacagggcccatgtcccacaaggctgcttggccctcagtgggtgcttggctgtgctggatgatatgttgatctgtattggataaggaccaatgacagcaaagcaaaaatggctttaaagcttggtgttacttttcttaagttgtttaattatagttaagcaatttcaaaaatgctccaaagaaatgtgaaaggaccttttgtcacagcacttcagaaaatacacaacagccccttctgcccccgcacagaaatgctgcagagtatataaaacttgagacatttttgtaggatgcctgacgaggtgtagccttttatcttgtttccggatgcatatttattacgagtactctggttaaatattgaaaagttatatgctgtagtttttagtattttgtctttgtaatttacagaagttattggagaaaataaacttgtttcattttgca

SEQ ID NO: 2560 - DNA, 396 bp, Homo sapiens
atcaccttaccagaaagacttttctatatgaaatattttatataaaacaaaagaccattctatatgaaatattttgtataaaataaaatcctgttcctccctatcctctttgccctgctttagttttcttcttactgctcatttatttgcttatttattgaccgtctcccctgcttagaatgtcagctccagcagggaagggatttttttttctctctctttttttttttcagacgggatttcgctatgttgcccggctaggcctcgaactcctggactcaagtagtccggcctgccttgtcttcccaaagtgctgtggttgtagatatgagccactgcgccctccggtgctagaatagtacccggcacacagtagaagcttattaaatatttgct

SEQ ID NO: 2561 - DNA, 900 bp, Homo sapiens
agtaaaaaagttttatcatagcaaaaaatatgtatttataaggactgtcaggagggataggctatttccaatatcacagttttgtttgttggtgccttgaaaagataagatttattactcaagagaatgaaatccactgataggttcacagaaacatgttccatctacagcgtaaactggaagatttttctggaagtggctgttggccgacgccaggtgtttgaataaagacagcagcatcttggtgttatactcaggaacagcttacccccttccatagggtaaaaagtggcttcttaggtctgcaagaattcgggttgtactcgggctactttccggaattctttagtgtgggtcttagggcactgcatctcacaccagctgatgggaaccatctggatacctgactcactgtgggctaccaccactcccagctcgttctcggcggtggttagcaggtagttggactgtgcatcacctaaggagatcactttggccaagacaatgtcacctgggcggaaactcttataaatttcaaccttgtctttttcagttgctcggacatcttccttgcggatagttcctcgaaaagagttcttaagaggcatggaccccacatacaggatgtgtactttggcaaagcgtgaattgatgctagaagaccttacaggttacaatagctcccacatctggcagtaactgggactctgtttctctcactacagacaccactggaagcgcgccattctcgctgctcttcatcagacagccggcaagcgacgaaaagatgtagccgtggcgggtgtaggtgccgctgcccgggcctgccctcctccaagttacacagacgttcgccggggatgcagtatctcacaggtggcgccatgattgccgctgtcc

SEQ ID NO: 2562 - DNA, 721 bp, Homo sapiens
tttttttttgtcatgctctcagaactttattaggtggggattgggcaagagaaaacccctgaaacagttgcccacgtggttcaagacaactagaatggagatgtgttgcttggagataccttagatttttaaaggggagctgactggctgaataactcagattatttttttttttttcatggtcagccagtctctagtaagtctctagggacatgaccagaccagaagcccctgttctatatgaagacaaacaggtggccatacttgggtggagggataccgctgctattcccagatgaagatttggtggaaggagaccatgacagatgacaaacggaacagtttctcaaaaacagaggtatgaagtaattacacaggaaagaaaacaatttccaaaggagtgagacaagtcgtgattcttcattggtacctgacccctatacccaaacagccttgaaccagcccttccagagactgcccctagtggcccactggcgagtgcaggctgtgaagaagacctgaaggcagatggggtgggggtgcttattttgctacagtggagaaggggcttgaatggggagggcagacctggctaacatctgccgccatcccccaactcccccccagacttctatcacatttacaaatacatacataaatacattacatacagtagccagtctgggaggcagactccccacagagggcatggctgacacat

SEQ ID NO: 2563 - DNA, 590 bp, Homo sapiens
ggagacaaacagcggtgcagcccttgcttgcaagccattccacattagacttcggattgatttatggcaggatccctgctgtgcgagaactgcagggggggtggggggcggctatttcttgctgctaactcaggcaggatgtgtctatatcctgtctcagtttatgtagctgctcatcagagccagaggttagagcggagaggacccacttccgccaggccggcctgctctgctcagctcagctgggctaggccccaatgccacagttactgcgcgtgagtcatgcacagcaatccattgccttgcccttgggatggaaggggtcaaggctcagtgagaagacggccaggtttggcagctttatatagaattcaccgcctctggcagaagcagaggattgcattaagtgccaaatgaaattccacctcagccattgctcaattcctccagatgtcactgggcactgggagtcacatgatgctggtggtcagcagctgggacccttcccaagggtggcccgtggttgggcaagtatttctgggggacttgcagagttccctgggggacaaaagggttgtgaaattacaagg

SEQ ID NO: 2564 - DNA, 463 bp, Homo sapiens
cagggcataagaattgggttgtgagcaaatttggaagagtcttacctgttcttcaccttaaaaatcaacataaacgtaaaatcatcaaatatgatccctcaaaatactgccacaacctgaagaagataggggaggatttctcaaacaccattcctatatccagcctgacttgggaattagaaggagggaatgaccctatgagtaagaaacggcgaggagagttctctgactttcatggccctcccaagaagataataaaagtgcagaaggatgagagttccactgggtctctggccatgagtacaaggcccaggagggtaatagagagaccacccttaacacagcaacaggctgcacaaaaaagaacttgtggattccattactccttctaaattcatcttcctgttacctgtttctggatactcaggaaacttaaaaatcctacctttttaagacttctgga

SEQ ID NO: 2565 - DNA, 387 bp, Homo sapiens
gagagaaacagagtcccagttactgccagatgtgggagctattgtaacctgtaaggtctctagcatcaattcacgctttgccaaagtacacatcctgtatgtggggtccatgcctcttaagaactcttttcgaggaactatccggttgaaatttataagagtttccgcccaggtgacattgtcttggccaaagtgatctccttaggtgatgcacagtccaactacctgctaaccaccgccgagaacgagctgggagtggtggtagcccacagtgagtcaggtatccagatggttcccatcagctggtgtgagatgcagtgccctaagacccacactaaagaattccggaaagtatcccgagtacaacccgaattcttgcagacctaa

SEQ ID NO: 2566 - DNA, 997 bp, Homo sapiens
cagctgttgtcatattttagaggcccagtcagctagttttcaggtggtgtcccttactaatcctgattggttgacatcaaaacagcattcttcttctaggaaaatacataagccacgtgtttcagcagttaggagatctagtccccttcgattttgcaaagcgaccactgccaaggagcctatccgaatttgtaaggtgacaatactttgagcaatgttatccaggctttccataaaatccttggacaagcgttggtaataggatagggaagttgcaatcccgctaactcccattcctacctctgctgttattcctagccgttgtgtctggtggttgcagttaaaggtataatgagggattggttgttgggagctatattaatttcgggggctaaataaacaactgtataggttccagtccaattggctggtaaaacataagtaggaactggtcccacacgggaaaaagagtccttgtttttcaagacaaaattgttttctatggtgaacatgtgggttagcttgttgttttcactttcccaagttattaaagtccctggtaaggtggccaagggaaaatgtgaacacagctagtgggcctaccttaacggtatttagactatatatttaaagtgtccttgactagggatggtttccataaaaactgtacaggttttctaaatgatgcagcttgggtaactgcatagcttacatgatcatgtgaggggttaataatctgtatggtgtagttacattggtgactttagatgtcccagggcctgaccaaaattttggcttctcttaatacaaagtggcacctggaattttagctctgtgtacattgatattgggccccaaatgggtttctgtgggatgcaaccccagaaagggtactctgatagtactggagaaggtttactgcttgtcctgtcatcgtagttcatgtttttttccccaaggccaaagattgggctgggattggggtggtagtgtattt

SEQ ID NO: 2567 - DNA, 1131 bp, Homo sapiens
tgctagggaggatgtcgggttcgtcgctgcccagcgccctggccctctcgctgttgctggtctctggctccctcctcccagggccaggcgccgctcagaacgagccaaggattgtcaccagtgaagaggtcattattcgagacagccctgttctccctgtcaccctgcagtgtaacctcacctccagctctcacacccttacatacagctactggacaaagaatggggtggaactgagtgccactcgtaagaatgccagcaacatggagtacaggatcaataagccgagagctgaggattcaggcgaataccactgcgtatatcactttgtcagcgctcctaaagcaaacgccaccattgaagtgaaagccgctcctgacatcactggccataaacggagtgagaacaagaatgaagggcaggatgccacttatgtattgcaagtcagttggctacccccacccagactggatatggcgcaagaaggagaacgggatgcccatggacattgtcaatacctctggccgcttcttcatcatcaacaaggaaaattacactgagttgaacattgtgaacctgcagatcacggaagaccctggggcgagtatgaatgtaatgccacctggccccactctgggcctttcttgggaattctggctgaaattatcatccttgtggtgatcattgttgtgtatgagaagaggaagaggccagatgaggttcctgacgatgatgaaccagctggaccaatgaaaaccaactctaccaacaatcacaaagataaaaacttgcgccagagaaacacaaattaagtactgcttacaatatctttaggttcctgaaactggtggcaacatgacctgctaaaattttctgcttggacctctttggttctctcccctttcaagtgagcaacaccacaatgactgtctaaagcatgccttatttagcctctcctgtaagggtgatctagccaggtacattttaaacaatgcttcagtgtagaaggtgtaaactattttgggcttgatgtgctgtgaatgttgcttttttttttttcctttgttaaaatatttaaatagaagtgaaaaggtcctctgaggatcagatcatgcatgcgccattttttac

SEQ ID NO: 2568 - DNA, 739 bp, Homo sapiens
atttgaagaaagtgagcaacagtagttaaatgtgggtgcatataaccaaattccccttcatcaagaatggaggagaagagagaagaatgaaatcgtgaagattcatcccagccgcaactcaggatccaacacaactttaactgggaggaatacattgtttgatcatttttaaaacatctgtgaatgagtgattccggaggcctgtgaattgtgtggggagcttgctttgatggcactgtgttaataaaagttgtagggactgtgcacctaagaggctaagaggtcccactcatccgccctgtgaaccagctgtaaagaaatgtagttaagaaatgcaaagaaatgtgttatcttggcacttgggtttgattttcctttttttaaagcactgcaaaacttctttaggatactaaaacatcctaattgggctgtttttttgttttgttttgtttttcagctaaaggcaaagataatttttttttcagctgaagtttttcttttttgcaactatgacatgaattgagtgataaaatggctctttgaaaagtagatattgtctgtattgtaaatgcttagtcatattcatggcaaagtgttcatttcttgagatggttctttcacaacacacaagaatcaagatggaacgcaaggaaaatctttttgttttgaccgaggtaaccagtttatgtgtgttccaatccataggggaagtggggggaaagggcgagaaaggatcaga

SEQ ID NO: 2569 - DNA, 717 bp, Homo sapiens
tgtattcacattctgttacactctgcctattcattgatatatgatattctgtaaatattgtacaatttgatcttttttatggtttaaattagttaattacatacaaattgattggcttatcacaaaaatcatttcatcagtaaaccttgttaacattttgtactggtgacccacctcttaggactttggtcttatccacgtgtatgttgttttcatttggtccaaataatattttatttgtatgggtatcttctaagactaaataggtagttgtgttctttatttttaaaatttctttttagagcaaatgttatgggttcttacccaaagagtcaaaaactatttcttaagaaagagcagagttattcatgactgttctttatacactaaaagcatgcatctaatctaatagtcctcattattatgcttttagttgtatgagtctctttctatgaactgaacacaaaactcaggaattggggggcttaatttttagatcagtgcttgtactaggcttagttatatgaatctttataacacataattactaactttgtagccatatatgtaattgactttgaatgttatttacctgaaattaatcttccttcacacatggaccgtaaacggttcccagttgtctgagagcctcatgagggtttctaggatttatgaccttatgaccagtttttttcatttaccaagattttattttcc

SEQ ID NO: 2570 - DNA, 487 bp, Homo sapiens
gtgtttttcctgtgtttgcacgttgaaatgaagctgacaacctggcaagacgctcagccgcttcaaaccctttttgtcaattaacttattttttaatacttgaaaagaagtaacttcgtttgtgtatctttactagaggaactgatcacctgcgcccgggtgcgggagccacagcggcatctggtgcgtcctacgcgacctggtccggggctgcccggtgctcctcacgtgcatctatttattagcctttctcttcgtatcactggcctggctggcatcagggagctgcccagaacccctgtgtgggtcctcctcacagctttctgtcccctcctccacccggtgcctgcctcaccctggcgctagaccaatctggaccactcatgtgatgagggtgcatttccgttctgttttggggccaggccaacagcagagctgccactctcaccctcccagtgagaattccggctctgcagaactcgccttg

SEQ ID NO: 2571 - DNA, 527 bp, Homo sapiens
gggaaaacgcgggcttatcgtggcctttaaaatccggcttggagagcttgggtcgcctctgaaggagaaccattttccatctctttcatagttttttcccccagtcagcgtggtagcggtattctccgcggcagtgacagtaattgtttttgcctctttagccaagacttccgccctcgatcaagatggtggttggacggccttcctaacctttacggggcctggcggtgctgacgcctgagctggtaggggtggagcaggtaggaaacagcaaatgcagaagctgctgcgcggaagtcggccatggactggaaagaagttcttcgtcggcgcctagcgacgcccaacacctgtccaaacaaaaaaaaaagtgaccaggatttaaaagatgaggaaatggatttatttacaaaatattactccgaatggaaaggaggtagaaaacacacaaatgatttctataagaccattccccggttttattataggctgcctcctgaagatgaagtcttactacagaaattagg

SEQ ID NO: 2572 - DNA, 323 bp, Homo sapiens
ggcgagaggttcgcgctggtggagcaccccagcttgcagagacttcagcgttccatgtctgctgtgctgtggaacccagagtgctcttgcctggatggctgagaatcccttggaacctggaagcacctactccatgatggcccggtatagtgcaggctcaatataatcttcccgcaggaggaccaaactggagacagtcctggctctgaggaaacaggaaggaaggagggtgaaaggaaggcccacctgcacacaatggaaagatgaaaaagagtcacctaccatgggacctggcaaagtacttcagaacttttattccttcc

SEQ ID NO: 2573 - DNA, 956 bp, Homo sapiens
cctcactgaaatcttgttcatctttaggatttctccagcacctcagttcgaattcccactccttatgtgcaagtggcactcttggctttccaattctgttttttatttaggtgactcaatcagtggctgaacttctgatcctgtggcccctttttgtagcttcagactgaaactggatgcctttgtagaacatattcacgcaaggattctgtatgaacagaaaaggatgcaataaaggaggattcctccaaaatgttttaattatatgtccatacaatatataaaatatatgcatcattttagctggataagaaaagcaagtcaaatgaaatgacacttctcgaaacttaagttaaataatcttgtaggaagaggtatattttgtctttttttaattattttagcattctgtacactgacaacgaggtaaaagaaaatgactgaaacttacaagtgaaagaacatttcacaattaaatccacaattgtatacatttatcttactcacatgtcagtgaaaaatcaccaactattataaaaagaggacaaattgtatcacaaaagaagcaaaaattagaaaaaattcataaaaaaatatatccaactatgaaaagcgttgctctcttggtgtcttcacatccgtctcttctgtgtactgatgtacaacacattgtttcctcggataaatgcatccccatacttattcttcagttgtccatttacatattcttctgtctgctccagggctatattcatgtagccatccaggcaagccaggacccctcgataatccactccagaatttaattttaccacaactggtcgtccgatgatttgctttaagaagtcactaggggtttgcttccgaagactcattttaacaatcctcgccggcgggaaccagaaccctcactccaggcgccccacgagcccggccgccgcggatgatcccagcca

SEQ ID NO: 2574 - DNA, 527 bp, Homo sapiens
gcaattaaactggtttatatgactcaagaaaacaataccagtagatgattattaactttattcttggctctttttaggtccattttgattaagtgacttttggctggatcattcagagctctcttctagcctacccttggatgagtacaattaatgaaattcatattttcaaggacctgggagccttccttggggctgggttgagggtggggggttggggagtcctggtagaggccagctttgtggtagctggagaggaagggatgaaaccagctgctgttgcaaaggctgcttgtcattgatagaaggactcacgggcttggattgattaagactaaacatggagttggcaaactttcttcaagtattgagttctgttcaatgcattggacatgtgatttaagggaaaagtgtgaatgcttatagatgatgacaacctggtgggctgcaggcccagtttagaagaagtgagttgggggttggggacagatttgtggtggtatttcccactgtttcctccctaattc

SEQ ID NO: 2575 - DNA, 375 bp, Homo sapiens
  misc_feature (1)...(375): n = a,t,c or g
gcggcacgagactggagtttgggtctgaggagcctagacactcggaggcagcagactcaccgagatccagcaccgtccacatactgtcccagttgctgagactccgccagtgttgctgtcatctttctttactgaagtcggccctggatccaatggaactgaagggtgaaggtcttgtcctttccctggaagaacagnnctcaaagccatcttccactgnttcccttatcggnaccttnttcaagatgganctttttgnatgcctntnatanaacancangatntnatnntntgntnttntanngtaggnnattnnggattnnnnannttccnngnngatttnattgnnttntttatnnntntnnnnntnttttt

SEQ ID NO: 2576 - DNA, 688 bp, Homo sapiens
  misc_feature (1)...(688): n = a,t,c or g
ggcactggagtttgggtctgaggagcctagacactcggaggcagcagactcaccgagatccagcaccgtccacatactgtcccagttgctgagactccgccagtgttgctgtcatctttctttactgaagtcggccctggatccaatggaactgaagggtgaaggtcttgtcctttccctggaagaacagctcagtgctttgaccttgtcagaactccgtgactcagagccatcttccactgtttcccttaacggcaccttcttcaagatggagctttttgaaggcatgcnagagagcaccaagatttcatctctgttggcagaattggaggcaattcaaagaaattcagcatcccaaaagagtgtcattgtctctnagtggaccaacatgctgaaagttgtagcattgcacctgaagaagcatggactgacttatgccaccatcgatggctctgtcaatcccaagcagagaatggacttggtagaggcatttaaccactccagaggccctcaggtaatgctaatctctctcttggccggaggtgttggtctaaacctgactggaggaaatcacctctttcttttggacatgcactggaatccatcacttgaagatcaagcttgtgaccgaatttaccgagtagggcagcagaaagatgttgtcatacacaggtttgtttgtgaggga

SEQ ID NO: 2577 - DNA, 368 bp, Homo sapiens
ggggaagttatctttgttttttagttatctaggaaactaaaaaatcagaaaagttagtttgattttatcagatacatctgctacatctaatgagatgatcatatagtttttttcctcccataaactgtgaatataatgaatcacattaattgatttttttaaatgttaaaccaatctccatttctgggataaattcaacttagtcatgttgtattagccttttgtatatcttatatctataatactgaatgagattatcatactctttacatgtatttgaagccatgtcattaagtgcatacaatttttattaaatttttaattggacaaataattgtatttatttatggggtacgatgtagtgtttt

SEQ ID NO: 2578 - DNA, 412 bp, Homo sapiens
gggaagtacttaaattatttgaagtcctttctaaattaatctgcctcaaagattttttcgatgatataattaccaatgtcctaattttttatcctattaataccatattatgcacttggatctgagttgcttatcaacacttggggcggctgataaatattccctgtaattaaaaaaaattgtaagcagtcaaaaaccaatataccttcaagagtgttataaataaataaaatttacaataacatttacatgacacctattttaatgttttgtccattttatgttccaatgataattaggactaagtggtgagcagttcatgtaaaaatgactttacagtagttataaaaccaaactcacactgctgaagtctactaggcagaagaactgaacaagagcaggaaggtgttat

SEQ ID NO: 2579 - DNA, 2374 bp, Homo sapiens
cacgagggagcgctaacgtctttctgtctccccgcggtggtgatgacggtgaaaactgaggctgctaagggcaccctcacttactccaggatgaggggcatggtggcaattctcatcgctttcatgaagcagaggaggatgggtctgaacgactttattcagaagattgccaataactcctatgcatgcaaacaccctgaagttcagtccatcttgaagatctcccaacctcaggagcctgagcttatgaatgccaacccttctcctccaccaagtccttctcagcaaatcaaccttggcccgtcgtccaatcctcatgctaaaccatctgactttcacttcttgaaagtgatcggaaagggcagttttggaaaggttcttctagcaagacacaaggcagaagaagtgttctatgcagtcaaagttttacagaagaaagcaatcctgaaaaagaaagaggagaagcatattatgtcggagcggaatgttctgttgaagaatgtgaagcaccctttcctggtgggccttcacttctctttccagactgctgacaaattgtactttgtcctagactacattaatggtggagagttgttctaccatctccagagggaacgctgcttcctggaaccacgggctcgtttctatgctgctgaaatagccagtgccttgggctacctgcattcactgaacatcgtttatagagacttaaaaccagagaatattttgctagattcacagggacacattgtcccttactgatttcggactctgcaaggagaacattgaacacaacagcacaacatccaccttctgtggcacgccggagtatctcgcacctgaggtgcttcataagcagccttatgacaggactgtggactggtggtgcctgggagctgtcttgtatgagatgctgtatggcctgccgcctttttatagccgaaacacagctgaaatgtacgacaacattctgaacaagcctctccagctgaaaccaaatattacaaattccgcaagacacctcctgggagggcctcctgcagaaggacaggacaaagcggctcggggccaaggatgacttcatggagattaagagtcatgtcttcttctccttaattaactgggatgatctcattaataagaagattactcccccttttaacccaaatgtgagtgggcccaacgacctacggcactttgaccccgagtttaccgaagagcctgtccccaactccattggcaagtcccctgacagcgtcctcgtcacagccagcgtcaaggaagctgccgaggctttcctaggcttttcctatgcgcctcccacggactctttcctctgaaccctgttaggggcttggttttaaaggattttatgtgtgtttccgaatgttttagttagccttttggtggagccgccagctgacaggacatcttacaagagaatttgcacatctctggaagcttaggcaatcttattgcacactgttcgctggaagctttttgaagagcacattctcctcagtgaggctcatgaggttttcatttttattcttccttccaacgtggtgctatctctgaaacgagcgttagagtgccgccttagacggaggcaggagtttcgttagaaaggcggacgctgttctaaaaaaggtctcctgcagatctgtctgggctgtgatgacgaatattatgaaatgtgccttttctgaagagattgtgttagctccaaagcttttcctatcgcagtgtttcagttctttattttcccttgtggatatgctgtgtgaaccgtcgtgtgagtgtggtatgcctgatcacagatggattttgttataagcatcaatgtgacacttgcaggacactacaacgtgggacattgtttgtttcttccatatttggaagataaatttatgtgtagacttttttgtaagatacggttaataactaaaatttattgaaatggtcttgcaatgactcgtattcagatgcctaaagaaagccattgctgctacaaatatttctatttttagaaagggtttttatggaccaatgccccagttgtcagtcagagccgttggtgtttttcattgtttaaaatgtcacctgtaaaatgggcattatttatgtttttttttttgcattcctgataattgtatgtattgtataaagaacgtctgtacattgggttataacactagtatatttaaacttacaggcttatttgtaatgtaaaccaccattttaatgtactgtaattaacatggttataatacgtacaatccttccctcatcccatcacacaactttttttgtgtgtgataaactgattttggtttgcaataaaaccttgaaaaataaaaaaaaaaaaaaaaaa

SEQ ID NO: 2580 - DNA, 563 bp, Homo sapiens
ggaaaaagttaatggccgaagtgtcgaatgcttatccaggagaatcaagagcttggaaggcagctgtcccagggacgtattgcacaacttgaagccagagttggctttacagaagaaatacagtgaggagcttaaaagcagtcaggatgaactgaatgacttcatcatccagcttgatgaagaagttagagggtatgcagagtaccattctagttctgcagcagccagctgaaggagacacgccagcagttggctcagtaccagcagcagcagtctcaggcctctgccccaagtaccagcaggactacagcttctgaacctgtagaacagtcagaggccacaagtaaagactgcagtcgtctgacaaacggaccaagtaatggtagctcctcccgccagaggacgtctgggtctggatttcacagggagggcaacacaaccgaagatgactttccttcttctccagggaatggtaataagtcctccaacagctcagaggagagaactggaagaggaggtagtggttacgtaaatcaactcagtgcagggtattgaatagctct

SEQ ID NO: 2581 - DNA, 397 bp, Homo sapiens
  misc_feature (1)...(397): n = a,t,c or g
gagggccggcgtggagtgaagcgggggcagagtggcaggagaaatgatgttgaagacagctaggagtctgctcatgcaggacgctgtaagcagtcatgaacgttctggtttatattccgaatgtgacagacagccaggaagctacgaagccattttagttttttgagcagaagcatgacatcagttgattcgtgtttttaaaaaagtatgtgctgttgaatggagaagatgctgaaggagggtgctgtnnnnnnnnnnnnnnnnnnnnnnnnnnnnnnnnnnnnnnnnnnnnnntaattgtggtgatattaagaggcaggaccttttgggaagtgactgagtcatgagggctctgcctccatggagggagtaatacccatacagaaggggcttcgga

SEQ ID NO: 2582 - DNA, 2181 bp, Homo sapiens
  misc_feature (1)...(2181): n = a,t,c or g
cattttcacttgcctcatcttttattaagaataaaatacttttaagatgtaaacaaagggaaccatgaccaaggattaagtcaacgtatctatttttattatgaaacattaaattttgacacattgcctcatttgcttttttaaaatctattatctgacttaaacctattcagcaaaaatgccaataaattatattaatcatactttgggtctttttaaaactaggaacataatatgttttatgataaacaataatactaaatctgagttgtatgaactgttaacttggaaatttgttttagatgtttagcttaaaacaaaaagaaaaccaatcacattaatacactgttgcaaaagtttctccggaatgccctccacatcactgtgtgtcagcatccttcggcttcttcactgaggtatggaatgcagccatatgtaggtgtcaaggcactcattcctaagctgtcctatcctgcacatcttagcaatcacattagatggagggctgatgatatgcactaactcccaacccaggctatcttgcttttaaataaactaatttctttaaaagaaaatcatcaactaaggactcaaatgctgaatttagaaataataattccaattcaatacacattcaatcaaatgtgttagtacttaaaagtcacaaattttgccaaagtaaacaacgaatgaactaaggcaaatagcattgtcacccacatgccttaaaatggtatatttttggtgtttgaagctctttgcaaattacattttgggacagttcagatggatttaaataaaagatgtgtgttctacataaattcagttttaaggttttcaacatgggtggcaacattacaaaaatatatcaatagtcttaatagtgaatgttttccacctggtttctaaatctttattttccatggaggtaaaccaaagtttagagtccatcttcagagttatgatataatctctattgttcctagagatttgaaaactagatatgatctagatccttgccaggatcttcactttcatcatcctcatcctcttggtctccagattcaagttcatcctcttcttcaactggatgaccaagatccttgagtttattcttcaatgacagtattttctgatcttgatcggccaagagcaccaagagatcatcttgttcttttttagaatctgtaatttccaactctagtttgtctttctcagtttgtaaaatggcaatggtactattagatgaatccagctgctctttaatggcagttctttcctcagacagagctttaatttcattctttaactctttggtctcttgtaataatgctgacagtcttccttctacatcagtagttttggtggctattatagtctcggtctctccttgtacctcaactgattttgcaaacgcttctgttttctgtaacagttcctgcttttctgtctgtagtttggtgatctccacagattgtgagtttaactgagactttaaagttgccagttcctgttttaattctgcaacttgttcagaatctctagctgaaactattgctgaagactgttcatttgtgccagatgtttgggaagatttcatattttcaatcatagagtccttttcagtcagctggctttgtaaaagttcctgattacggttttaattcttctatctcttctcgcaatctaccaatttcttctggctgaatgccattcatctgagccccctcactgtaagaaccttgatgctgattgtcttttcctagctgtattttaagaagattatactggtctttgtgctgctggatctgtgatacttgctgtgtgactgccgtctggagctgttcattttgacattttaatgtagaaacctgctgccttaattcctcaagttggagatcttgctctcgaatcatatttttgtagtgagtcacaatattgtcatgctgttctaatgtttttttcacctcttcttcttttttatcttcttcactggacttataaatagccttagttataacaccttcaagttcttttaccagcttcgtaaactcatgatcaaatatcatgtattctgggactggggaaagtttggctggggtttctgaggatgctctggaatacaactcatgtttgnctaataaatcccaggnttctctatggaattccccttggncaatc

SEQ ID NO: 2583 - DNA, 1505 bp, Homo sapiens
gtccttttaaaccactgtgccttctcaccctttccatcttcagtttgaacgactcccaggaaggcctagagcagaccctttagaaatcagcccaagggggagagcaagagaaaacactctagggagtaaagctccccgggcgtcagagttgagccctgcctgggctgaaggactgtcttcacgatgtcagtcctgaggaaaaatattggggactccaaatgtcctctggcagaggacccagaaaaccacactggctccaacttcctcctcatggggcattacacttcaaaacagtggggagcaacttttccaccaaagctacaaacctaaaatgctgctgccccaaagcacaagagggaagagcaccgccggggccacaggacgtctgtcctccagtcacaggccatccttgctgctccctactgactctagcttacttcccctgtgaagaaacaggtgttctcggctgagcccccaaccctctgcagaaccaggttgatctgccacagaaaaagcatctttgaagacaaagagggtgaggtcttcatgagtctcctgggcccaaagccatcttctgatggaaggaagagagtagggccagtgaaggctgcccagagagaatgtcacagatgaggctgcccctgcccccccccccccagggaggtttcatgagctcatgtctatgcagcacataagggttcttcagtgaaaagcaggagaagagcccacttgcaaggatagctcattaggcccatgaccgatgcagggaaggccatgccggggaagctcttcctgcaggtattttccatctgctgtgccaaggctgagcggcagaaacttgtctcataaattggcactgatggagcatcagctgtggcccacagagagccttgctgagaagggggcaggtaaagcagagattttagcattgccttggcataacaagggcccatcgattccctactaatgagaggcagggagagcatgggcaatggagacccaccaatgatccccaaccccggtgggtactggctgcctgccctgggccaggggaatggctccttataccaaagatgctggcacatagcagaacccagtgcacgtcctccccttcccacccacctctggctgaaggtgctcaagagggaagcaattataaggtgggtggcaggagggaacaggtgccacctgctggacaatcacacgaaaggcaggcgggctgtgtactgggccctgactgtgcgtccactgctgtcttccctacctcaccaggctactggcagcagcatcccgagagcacatcatctccacagcctggtaaattccatgtgcctctgggtacaaaagtgcctcaacgacatgctctggaaatcccaaatgccacagtctgaggttgatatctaaaatctatgccttcaaaagagtctctgttttttttttttaacctggtagacggtataaaagcagtgcaaataaacacctaaccttctgcaaaaaaaaaaaaa

SEQ ID NO: 2584 - DNA, 231 bp, Homo sapiens
gccccaaactaccagttccagcgagttctatccatgattttgatggtgataatcaggtatatatcaagagtacttgtgtggatcttaacgattctggtcatactcggttcacttggaggcacaggtgtactatggtggctgtatgcaaagcaaagaaggtctcccaaagaaactgttactcctgagcagcttcagatagcagaagacaatcttcgggccctcctcatttat

SEQ ID NO: 2585 - DNA, 1024 bp, Homo sapiens
cagtatcttttctggtcctaatttttaaaatacctgatcagaatgaagccatcatagtgtaaggcagcatatttgtctataaggagactttccaaagacagtacccatccaatgcaaataataaatttgaagctaatcatctgttgtgctttaaaatgagcaaattcacatgtctttattgccctttgaaagttggttaatctcaaaaactaccttttttttaaatatcctttgcaaggtcaattgtaacagttgtccatccttcctcttccctttgaaataaacacaaatagaatatatcttacagctgcaagaaaacctgagtcctttccaaaacaaaggtgactgaagtaaattatctctaaaacttattccatagacttcatttattaataagcatattgtgaaaatctacatttgttttagatttcatgtttacagagcttttcacaattgtattaggatctttcacaactactctctgggttttatgaacagtaaagaatctggctcatgtgaccctctattcatagctcccctttggctcctgtgaaggagctgatagttccctggagtaaataaatcaaaacaagatatccttgggagatttttagctgttaatctactcctggaccccatcctgggaactgagggaaaactcctagagagatatacaaatctttgaacaaaatatttacatgaaaagtggccagttttcttccttggagtagcaatctgtaaaaataagtgctgctgtttaaaaagtagcatgccctacaccataccaatgtattagtgagaatttggcgattctcaccaaacaacaatgaagtttcacatttggtactggatggagcttgggttagatctgccttttaaggcaaagtcaactctttcaacttaattctttttcaagggagtaatgtactgtctacacttggcttaaactaacttctattatggactactttcaatgtacatgtaaatgttcatgcatcagaagccaatttcttttaacagtaca

SEQ ID NO: 2586 - DNA, 622 bp, Homo sapiens
ggtacttagtaagcatgcttctaattgtggttcccttccacttacctttgtgataggggtaccaaaatctgtttaccctcatctttgctctcttccagaggaacaggagaggtagttgggtcagtgtgccagaaaagcagaagttgagtatgtggagttcatagctgcatgtatgagtgtttgtggggcagggaacttttaatggaaaacatttgtgttgcatcgaaaacagagcgaggcccccggttagagtctgtctgctttgtctgtcagtctgttccctaccagcactagtcactgttctcctggggagtctcaggcatattgtggtttccttcctgctcttgctagcccctaatcttgccagagtttttgtgtcatgggtggccccgtgtgcagtctggagtaagactgcaaggttggtgactaatggctttgaagaaggtacttcagcccacatacggactttgggaacctttttaggttaacccttaggaggagggagggtctctagcacaaacagtggaagaaacatgctgggattacaggcgtgaaccacgcacccggcctgagctctatctaatctgagtgcccctgaaattgacatttgttcattatttaa

SEQ ID NO: 2587 - DNA, 2660 bp, Homo sapiens
agaagagtatattggtgacatgtacagccatgatgggaatactgatgagccagaatgggtaaagacagagcgagagcagttttgttgagtttcgggataagaaccgtgatgggaagatggacaaggaagagaccaaagactggatccttccctcagactatgatcatgcagaggcagaagccaggcacctggtctatgaatcagaccaaaacaaggatggcaagcttaccaaggaggagatcgttgacaagtatgacttatttgttggcagccagggcccacagattttggggaggccttagtacggcatgatgagttctgagctgcgggaggaaccctcatttcctcaaaagtaatttatttttacagcttctggtttcacatgaaattgtttgcgctactggagactgttactacaaactttttaagacatgaaaaggcgtaatgaaaaccatcccagtccccattcctcctcctctctgagggactggagggaagccgtgcttctgaggaacaactctaattagtacacttgtgtttgtagatttacactttgtattatgtattaacatggccgtgtttatttttgtatttttctctggttgggagtatgatatgaaggatcaagatcctcaactcacacatgtagacaaacattagctctttactctttctcaaccccttatatgattttaataattctcacttaactaattttgtaagcctgagatcaataagaaatgttcaggagagaggaaagaaaaaaaatatatgctccacaatttatatttagagagagaacacttagtcttgcctgtcaaaaagtccaacatttcataggtagtaggggccacatattacattcagttgctataggtccagcaactgaacctgccattacctgggcaaggaaagatccctttgctctaggaaagcttggccccaaattgattttcttctttttccccctgtaggactgactgttggctaattttgtcaagcacagctgtggtgggaagagttagggccagtgtcttgaaaatcaatcaagtagtgaatgtgatctctttgcagagctatagatagaaacagctggaaaactaaaggaaaaatacaagtgttttcggggcatacattttttttctgggtgtgcatctgttgaaatgctcaagacttaattatttgccttttgaaatcactgtaaatgcccccatccggttcctcttcttcccaggtgtgccaaggaattaatcttggtttcactacaattaaaattcactcctttccaatcatgtcattggaaagtgcctttaacgaaagaaatggtcactgaatgggaattctcttaagaaaccctgagattaaaaaaagactatttgggataacttatagggaaagcctagaacctcccagtagagtggggatttttttcttcttccctttctcttttggacaatagttaaattagcagtattagttatgagtttggttgcagtgttcttatcttgtgggctgatttccaaaaaccacatgctgctgaatttaccagggatcctcatacctcacaatgcaaaccacttactaccaggcctttttctgtgtccactggagagcttgagctcacactcaaagatcagaggacctacagagagggctctttggtttgaggaccatggcttacctttcctgcctttgacccatcacaccccatttcctcctctttccctctccccgctgccaaaaaaaaaaaaaaaggaaacgtttatcatgaatcaacagggtttcagtccttatcaaagagagatgtggaaagagctaaagaaaccaccctttgttcccaactccactttacccatattttatgcaacacaaacactgtccttttgggtccctttcttacagatggacctcttgaggaagaattatcgtattccacgtttttagccctcaggttaccaagataaatatatgtatatataacctttattattgctatatctttgtggataatacattcaggtggtgctgggtgatttattataatctgaacctaggtatatcctttgggtcttccacagtcatgttgaggtggggctccctgggtatggtaaaaagccaggtataatgtaacttcaccccagcctttggtactaaagctcttgatagtggatatactcttttaagtttagccccaatatagggtaatggaaatttcctgccctctgggttccccatttttactattaagaagaccagtgataatttaataatgccaccaactctggcttagttaagtgagagtgtgaactgtgtggcaagagagcctcacacctcactaggtgcagagagcccaggccttatgttaaaatcatgcacttgaaaagcaaaccttaatctgcaaagacagcagcaagcattatacggtcatcttgaatgatccctttgaaattttttttttgtttgtttgtttaaatcaagcctgaggctggtgaacagtagctacacacccatattgtgtgttctgtgaatgctagctctcttgaatttggatattggttattttttatagagtgtaaaccaagttttatattctgcaatgcgaacaggtacctatctgtttctaaataaaactgtttacattcaaaaaaaaaaaaaaaaaa

SEQ ID NO: 2588 - DNA, 1270 bp, Homo sapiens
tttttttttttttttttttatattaaacagtttatttcagtaacattgtaagggaacaattaatcctcagtaagtcagcaaaccagtgacaagaaattgacaaacactccttctacagcttcctgagacagcaggctggcttgtggccccctgggtggtaacatcttaaggaatcctatcatgtttgtttatatatgctaaactgtaaaaacaaacacttcatgcgacaatcattcttaggtcaaacacaagaacgaactattttgaaatcaattcctcacactttttccctgaatatgcagtactgtactactaacatctaattctgtagaaaataatgcatttgttagtgactttgttagagcttgaaaagaccgttttagaaattatttaaatgatcactctttaaaaattttttttaatctcagaatctactaatgtgacagacaaacggtatgcttaacagagtcataaatactgtgtataattgcttgaccatttctggcatttaaatgacctcccagaatattacacaagccctgagactagtgagcatcttactactgaccttgtacaataccaaagcttcataatgctaaagaaaaccaaaacaaaagacaatggtttacacagggaaataaccctaaggcaatatgaaaacagtcataatttattactgataaagagtaaaggcatccttcccatagagggggggaattcacagggaacactaattatatcagatgaaccacggggatagaaaataggcccatttttaaaattcattgagaaattattactttttctccacaactgtgattctatacaaaatataaaccctgcaaaccttatgtgctacctgacagataaaagtagcaggagccagactcttgaagcacttgagactgatttctacaaagtccaggaagagcaatgattccagtgtgcagtgctgatgcatgtgtgagccttaacatgttattcagctctggttgcagccccatctacatgggcccagttagtttttagggagtcacagattaggcaggcaacgaggggcatgatttaaaaagcacatcatacacatgagacaagcagcttcaaggacggttttctccggcaatgcatacttactgtgctctttctattcagacagatccacagaccacctttcaagagcattcctctctcatttcctccatcacccaagataaatctagccacccttttttgttaactgtgccttttctttcaactttttgtccttgtt

SEQ ID NO: 2589 - DNA, 385 bp, Homo sapiens
  misc_feature (1)...(385): n = a,t,c or g
ggagagtctgggctttgaaagggctgatgggcttctcagggtggaaagaactctggatatcacgcaggaagtctggcttcagcacatagccacagccgccattctggcggaaatgcccatcacagatgtccatttcaagccctgcagtctgcatattcatggccactgagggccccaggagaaaagaagagcaagattcaccatggaggccttccagcccctctttcagggagttaagaagataggtactgggtgcacggtacctgctggtaatatccacttgataggcatttctcagccttaggcaattttctttgaggcattccccaaccctaccnttcattaggaggaanttattttccccacctggttgcttccttncatt

SEQ ID NO: 2590 - DNA, 1204 bp, Homo sapiens
ttttttttttttttttttgctagtttagtgtttgcatttattttaaaaatacacaaaatagaaatttttacatcaaagtgtgataacctcacttacacattgttccatacttacctggttttgtttgcatctttctgcaaacattaaaaggagatggatttgattctgatttttttgctatggttcatgtaaacagttgagactgctacataaagtaggttgttgtcaaaggtgaagtggccacagaatcccaagaatagaataattcaatttggtttaatgaaattggtggaggtcttagcagatagataatccaagactaaatattgtcttctaggcattttaaaaattaagaactttgaggttttcttcatgttgtaaacataacttagaccttgttggcattaagtttacaaaagaaaatattaaaccatgatttttatcatcctgcccatgtcagtatacactctctttattatgagaatgaaaccaaataataagcaaaatacatcaggaatttcaaattgtactgcaaagaaggtcccagctggtctcttctgggagtgatctaactaacttaagctgaccctgtgactggctgaggataatcccttctgtccactgcaccgtgcaatgccacaggtcatgagatggtcagttcctcttgctctgtgtcgtctgaagcaagtcgaggccctacttctggttccgcccttcttccttgggcttagatttgctgggttagtagtttgctactattgtcaagactgtactgtccctttaaggtaccacatgccaccatagcttacacagcagtcctttagtactttatccacctcctgtttactgagatcttctccacactcttgagtcaaccgagactggatcatgtttcggcgtacccgggtaatttttggaaaaaatttcaagcaaaacctgtcgatgctgatcactcatgtctccagactcccagagggcaaacaccttctgctcatccggggaagcagcagtctgggggggaaaaggcaccagtatctgcttgcaaccggcggccagcaccgtgtcctgtagcatgcggtccgagatgccgctgaagagtgtgtggccggggggcaggctggccaagtgcagattgaagaggcgcttgagttcgctcagcgtgagcacaaactgtctctgaaaggtggcctccacgaaggccttc

SEQ ID NO: 2591 - DNA, 771 bp, Homo sapiens
  misc_feature (1)...(771): n = a,t,c or g
ccccaaatgggagcatcccttccctcatctagtaaaattgagaagaagcagaaattgcacctagcaagagcccccaantacacacaaggccttaatggaaaacttgtattccctaataaccagctaagcaaacccagacgcactggtcaggctggaacaagacattaaaaagttaaaggctgacctgcaagccagcagacaagtggaacaaagactccgcagtcagatcagctccctttcgagcaccgagcgagggatccgctcagaaatgggccagcttcggcaggagaacgagctgctgcagaacaagttacataatgctgtgcaaatgaagcaaaaagacaagcagaatatcagccagttggagaaaaagctaaaagctgagcaggaagcccgaagttttgtagagaaacagttaatggaagagaaaaagaggaagaagttagaagaagccactgctgcccgggctgttgcgtttgctgctgcatctaggggagaatgcaccgaaaccttacggaatcggatcagagaactagaagcagagggcaagaagctcacgatggacatgaaggtgaaagaagaccaaatcagagaactagaactaaaagtccaggagcttcggaaatataaggaaaatgagaaggacactgaggtgttaatgtcagccctctcagccatgcaagacaaaacacagcacctggagaacagcttaagtgcagagacgagaatcaagctggacctgttctccgcactgggcgatgcaaagcggca

SEQ ID NO: 2592 - DNA, 336 bp, Homo sapiens
ttcagctggtgcatggggtctgcaaacaggtgtttgagcgattctagatgcagtcttggcgccaagggcctctgagtgtggaccaacggtgccgcctagtgttcgttctgggaaacgcactggcttcatgagcactgtctcatgaaggtctggggtaagggtgattctctgaaactatggcctgagcttcgaatttaaaacccacactctcacgcctacctgggcaaattcaatcttgcccaatcaccaaacagccaggacactgggatccagctgattcagctggaggagaaagaagcgttttcctctgcccccaagaaaaccctcgttccgaat

SEQ ID NO: 2593 - DNA, 560 bp, Homo sapiens
cctgtccagtagtcagtaatctgtataaaatatttcagagcatatatcttctccaattccacacagcacagaaaccaacaaagcagagagagcaaaaggaaaacatgttttcttcagcagagactatttcattatgaaacactcattgtaagagctattgccagtagaaaaagtatgttgccatgccttctgatttaagggattcagaggtttcactgttatcatgacaaccttttgaaatgtcagggctttgagctcaagtagtaagtcaatgaccatgacaatagtgtggactgtgaatgtgcccaagtccttgaatcctacagaccttgctaatggctccgttcacgacacccaactgggtcctgaactcttaggattaacccgtttgcttatggctgaggaacttggggtctacaggacaggtggctcctccaagtcttaagtctcatgaaaggcagaaccagaatgaagatccaggtctcctcctaggtcagctagtgcttaaatgtgagttactgtcactttctagaaacctcctttttactgcacatttttcc

SEQ ID NO: 2594 - DNA, 425 bp, Homo sapiens
  misc_feature (1)...(425): n = a,t,c or g
ggagagagtaagttatcaaggaaataattcaagaaaatttcagaaaactgcaaggacatgcattttatattgaaaaggtccattgaacgctcagcataatagatgcagaaggatctacccatcctgaagcttcctggtgtgacattgcaaaatatttgggataaagagaagattgttaaagctttcagaaaaaaaggggcaaatcaggttacatacccaaagttaaggaatccaaaagcatcaaacttcttgccaacactgttggaaacacatagatataagaaggcagtaaaaaaatatagtaagaaaatggagcagtgccttcaaaattctgagggaaagtgtttcaacccgaaaattctggctttagccaatggttctgaaggtggaanaagtatggtttccaatattcangggcctcaaaa

SEQ ID NO: 2595 - DNA, 796 bp, Homo sapiens
  misc_feature (1)...(796): n = a,t,c or g
gcgtaaaatgaatttcctttgatacagaactctaagagttaagctttgttgagtctattcctgtcatggcgatacaagaatatttctaagttttttgcccatccttttccagcccttgtcagattggttggttattgctgcattgctcaaaaaatagtgaggtatagaaaaggggactagaagttgggtccatagacttagactgtctctgctgtgtcacataatgtgtcttctgcaagtcagttagtgtgtctaatctttacttttatgtaaaatgggacttgatgatagaaaagagtgtgaaatggaaatattctgttttgtatttcagtctgaaaacttagagaatacagtaatcataccagatatcaaactacatagcaatccttctgctttcaatatttactgtaatgtacgccattgcgttctggaatggcagaaaaaggaaatatcattggcagccgcatctaagaactctgtgcagagtggagaatcagatagtgatgaagaagaggaatccaaagagccccctatcaagcttccaaaggtaagccactgagttctattaatatttagatgtgtaacctgcaggtgttctgggctataatgcatatatacgcattgctaaaatactttgctttatgtaaaattgcacactaaaaataacacgggcttatggggcaaaaataggtttgggagccaggaaaaggggaaactctggcaactttattaactaagggnggctaaccaaagtccaattatttggttaattccactggggaagccgccgggnagg

SEQ ID NO: 2596 - DNA, 1416 bp, Homo sapiens
  misc_feature (1)...(1416): n = a,t,c or g
tttttttttttttttttcagggtaaaaagcccaaccattactttactttaatagaggacagctactggtgttaaatacatttattgtaaactttagacacaaaaataggttctctaggccattcacatgcacattaaaaccaacaggtgcaaactacaacaatgcatataattatacaaatgatgccactctgtgatgtttacaggattgctgtccatgcaaggtgatcataggcattatttatgaagccttaagatccagaagtgttgttactaccaaacctctgattaacactgtgaagtaagtgttttggaaggcagtttcatgagttggcaaacatttctttaaagcaaatgactgcttctaagcttagccgtacaagagattttggttgaactgaaaatattagtatttcattactgtgtgcagctctgtgatgggccaagcaagttgttggcacatccaccaaaaccaattacttctccttcatcggctggcacaagctgtgtgccataaccttggtttttcggtatatggatggattaaattgtatccattcatttttactgatgcagtaagtccaggcatcacttagtggctgtttatcagtggtaaatcctccaaagagaaaaagatgatctgaagaaactggtgttagtgagtgccaagatcgaccaactgggcatatgcccttgtggaattaattcattcccactccccatgtatcccagattaagatagtgaagatcattcattctagcatctcgatatctgcctccaaacacgaagcctctatttccgacagttgcacaggcatgggcagcacgaggtgaaggtgctttaccagtagttataggctgggctccaggtaaatgtttcagtatctaaaatatgtacatgatcattccatcctcttggatgacttgaattccaaaaagatgtttcatcgaattcaaaagttcccaatactttatcttcaggcaaatatccataccctccaaaaaatattaacttgtttttatatacccagacaccaagtttgtcctttgatgatggaggaattccttggcaatcaattctttcccactgtaacactctgtctgtagaccttgaatccagcatgtagaacttattggtattgcctcttgaatggtgtcctccaaacaagtacagcaccctgtctacacacacagcacagcttcctgacatagaaggaggaacatcaccttcagtgttgatttttttccatcttccagtctccatgttgtagatccatagttcttctctaggcagataaaagtcatataatcctctgacttgattactcttgtagccgccccagacgaacatgtggcgcccgtcgctgacggctacgtngagacctgcgctcagcggggcaggcaagctccatggact

SEQ ID NO: 2597 - DNA, 93 bp, Homo sapiens
ccccgcgtccgggagtatatcaagagcaaatgaagtaaatgattctttcctgcgtgtggggagtcaccatcattttatttcaaagggagttcc

SEQ ID NO: 2598 - DNA, 3204 bp, Homo sapiens
agctttatgccatgaaggtattgaagaaggccacactgaaagttcgagaccgagttcggacaaaaatggaacgtgatatcttggtagaggttaatcatccttttattgtcaagttgcattatgcttttcaaactgaagggaagttgtatcttattttggattttctcaggggaggagatttgtttacacgcttatccaaagaggtgatgttcacagaagaagatgtcaaattctacttggctgaacttgcacttgctttagaccatctacatagcctgggaataatttatagagacttaaaaccagaaaatatacttcttgatgaagaaggtcacatcaagttaacagatttcggcctaagtaaagagtctattgaccatgaaaagaaggcatattctttttgtggaactgtggagtatatggctccagaagtagttaatcgtcgaggtcatactcagagtgctgactggtggtcttttggtgtgttaatgtttgaaatgcttactggtacactccctttccaaggaaaagatcgaaaagaaacaatgactatgattcttaaagccaaacttggaatgccacagtttttgagtcctgaagcgcagagtcttttacgaatgcttttcaagcgaaatcctgcaaacagattaggtgcaggaccagatggagttgaagaaattaaaagacattcatttttctcaacgatagactggaataaactgtatagaagagaaattcatccgccatttaaacctgcaacgggcaggcctgaagatacattctattttgatcctgagtttactgcaaaaactcccaaagattcacctggcattccacctagtgctaatgcacatcagctttttcgggggtttagttttgttgctattacctcagatgatgaaagccaagctatgcagacagttggtgtacattcaattgttcagcagttacacaggaacagtattcagtttactgatggatatgaagtaaaagaagatattggagttggctcctactctgtttgcaagagatgtatacataaagctacaaacatggagtttgcagtgaagattattgataaaagcaagagagacccaacagaagaaattgaaattcttcttcgttatggacagcatccaaacattatcactctaaaggatgtatatgatgatggaaagtatgtgtatgtagtaacagaacttatgaaaggaggtgaattgctggataaaattcttagacaaaaatttttctctgaacgagaggccagtgctgtcctgttcactataactaaaaccgttgaatatcttcacgcacaaggggtggttcatcgagacttgaaacctagcaacattctttatgtggatgaatctggtaatccggaatctattcgaatttgtgattttggctttgcaaaacagctgagagcggaaaatggtcttctcatgactccttgttacactgcaaattttgttgcaccagaggttttaaaaagacaaggctatgatgctgcttgtgatatatggagtcttggtgtcctactctatacaatgcttaccggttacactccatttgcaaatggtcctgatgatacaccagaggaaatattggcacgaataggtagcggaaaattctcactcagtggtggttactggaattctgtttcagacacagcaaaggacctggtgtcaaagatgcttcatgtagaccctcatcagagactgactgctgctcttgtgctcagacatccttggatcgtccactgggaccaactgccacaataccaactaaacagacaggatgcaccacatctagtaaagggtgccatggcagctacatattctgctttgaaccgtaatcagtcaccagttttggaaccagtaggccgctctactcttgctcagcggagaggtattaaaaaaatcacctcaacagccctgtgaagtgacctcagtgagatatttggtaccatggtgtaagctgatagcacaagttctggcgacaggtagcacgtatctgagagacacctgcaagcacacactgtcccagctggtacccataatgctgctgttcctggctgctggctcctgctttcctctcttctcgctttaaatggattgttagcaagttagattttcctggagcttcggaagaaatgaaaatggaaacatgatgaagatatagtcactgaatcaatgagaaaaataatgaacatatgaataccacctaaaaatacactgaataaagtacaccatatagcattatttttataggaaatatttcatgtcccttaaatattctttgttagttatagggatggacagtttatgttaagcacttagcttaaacaatccgtttatattagcactgtatcccttgtgccatccaacattttgtatgtttttgtaaacagttcatatacagtacatttctgtactgctttctttaatgtatacatgccttgtttaacttggaatctattattattaatcaattgactattaaatctggttaaatagttcacctggattaacagtattgttggacagtcctaaaaatggccagattgtggaacagctgttgaatgtaatacttccaaaatgtacatatctttccccacgtctgtttcactggttcgttcatttgtttgtttcttaaagtcaggtgctctgtcagactaacctagagagctgttatggtagagaaagttatcatatgtgtgtggcatgaaatcaagaatacacctatgaagttagtccatatactttgcaactccttagagtacttttttccttaattaaggaagtagtccttgcacttctaatcttacatagcatccatacttagaatttggcatatcatctgggattttgccaatatacgtcaaagccctttaagagtcatggtaaggagatgggtgaaggaaaatttagcaacaggtaattgaagtcctattggatatttcatgtttaaatagatattctatattaaacactaatttaaatgtaataaaggccaaagctcctgttatgaaattgggatttaaactttcttattttagggaataaaacattattgatcaaacagtatctgttctaacctaaaattatagggtaggggcagggctaagtgaacaggcattgaggtattttctgaatccctcatgataatttataggccacatactgcttcctttgacttccggga

SEQ ID NO: 2599 - DNA, 581 bp, Homo sapiens
  misc_feature (1)...(581): n = a,t,c or g
ggacgaatcatgactctcactgtgctggtaactcccccgttcttgcttctcaggaagcaaatgtaggaaaaatatagtaacatttctaaggaagcttagagatacaaaatgtttaaatgtagcacaaaaattgtgactctacttataataacgtacagaagaataactccacagtagaagttaggcatccatggctgcaggttttctaagaaatgggacgtgtgggtgacctactgcactgcccactgccctctggagggaaccatggggtaattagagtcattggccaagaagggccaggggtccacgcagcttccgccctgaggagttgcactgtgcagtacagccaggcggccacaggagccactgtggcaagggaatgcatgtgtcagtgtgtcaggcgtggtcagtaaaaggagttgtagaaggtaaaccggagaaaaactcagaatttaatccctccggagtaatctttgggcctcttcctcctttccngtgtgtggatggtttccttttgttttttaaattntttttgaccctnctgctttttttgganttccgggatttttgggaagccagaa

SEQ ID NO: 2600 - DNA, 796 bp, Homo sapiens
tttttttttccagttctgacacctttttaatagaaatcactgtttttaggaaacaaatagcacttttgtaatttttttttacaatgtttcttaccttgatcttaatttaagtaacactagggaagacctcaatatcttttattttcctttttaatttaaaaaaaagttttttttccccagatacaaagatttttgcccttgcataaaaaaacagtgcccgaacgatgacacaaggactcacaaagactcacgggacctcactgacactatgattcctactctaccatgcaaggtcttggctacccttaattggactgtcagcctgaaaaacagcttttctattccttattttagtttttgttaccaagaaagtaaaatgaacagtaaaataaaactttccttaaagaaaaaaagaacaaaaacaaaaattaaagaaagagaaaagaaacgtctccattcaattcacacacacctgggtcgcgtgctgcttcactcaagatcttctcttcttataaatatagaaaagggatggagcttgttttcaagtaaaatcactgatccacctttttttccttcctggacacacacatccttcttccctgccttgggaaaagggccagtggcccgggctctgcttgttcttggagaggagacagcgggataaccacggagatgcgcgactcaccaagcagggaaggaaggagactgggcaggcttcaggagtggtggggttaccgcgcagggagcagagtgcatggggagaagaacctactggctgttcttggtgtcagtctga

SEQ ID NO: 2601 - DNA, 503 bp, Homo sapiens
  misc_feature (1)...(503): n = a,t,c or g
gagttcaggcaccatagctgaaagaagcatttgaataggcagagatgctttaaaatgagacaagatccaccccgtaaaacaggccactgaaacattttttaaaaggtagctccatggcctttctaggagactcatctctgccttcattctcctgtaggtataaccaaggcaaggaaagcccactccagtgttctggccttgtggagagtggacagccatgcagatgggctcaggtccctggagggcaggcacttggaattcctcccnggatttagtccnatcctggcttcttttccttttaagcctcccaagctggnttccccaatgactggccctcccttggcttttttccgggcnacttgttctaaacaggagntgaagaccctttggacaaaggggcttgcnagatccttgggggnaattcaagcctctnggtttggaagcaggttgaaggcttgggccagcttgggggcattgaggaaaggaaattcnaagcaattgac

SEQ ID NO: 2602 - DNA, 698 bp, Homo sapiens
gcgcaagtttgacattgaggcctggatgccaggccgaggccgctttggagaggtcaccagtgcttccaactgcacagacttccagagccgccgcctccacatcatgttccagaccgaggctggggagctgcagtttgcccacacggtgaacgccaccgcctgtgctgtcccccgccttctcatcgcgctcctggagagtaaccagcagaaggacggctcagtgctcgtgccccctgccctccagtcctacctcggcactgatcggatcacagcccctacccacgtgcctctccagtacatcggccccaaccagccccggaagcctgggctgcctggccagcctgctgtaagctaagaacccacccacagcagccctcgggggtgtcactgcttcctggagttcaggagaccccggacacctgggacctgtgttcctgagcccgtcctgacatctgtgttcttcctgtcagctccacgcccgggcccctggaccacggggtccacctctcctctgtccttgctgcctcagagtcagtcactgaccctgttatcattgagggtcccagtgggaagcaggacgtctgggctttacggttctagggacaggagaagcagaggaagaggcttccatccctccttccttctttcctcctacagtgctgagcaaaaagtccccaataaatggtcaggacaaagaa

SEQ ID NO: 2603 - DNA, 729 bp, Homo sapiens
cctttttctcaaagcaagattcccatactaactatgtacttcaatccatatcagaaggaatccccctctaaaatgaagattgttctatatccagttggtgttggtattaggagatctgcacatcccacaccggtgcaacagtttgccagctaaattcaaaaaactcctggtgccaggaaaaattcagcacattctctgcacaggaaacctttgcaccaaagagagttatgactatctcaagactctggctggtgatgttcatattgtgagaggagacttcgatgagaatctgaattatccagaacagaaaagttgtgactgttgggacagttcaaaattggtctgatccatggacatcaagttattccatggggagatatggccagcttagccctgttgcagaggcaatttgatgtggacattcttatctcgggacacacacacaaatttgaagcatttgagcatgaaaataaattctacattaatccaggttctgccactggggcatataatgccttggaaacaaacattattccatcatttgtgttgatggatatccaggcttctacagtggtcacctatgtgtatcagctaattggagatgatgtgaaagtagaacgaatcgaatacaaaaaaccttaaagccaggcctgtcttgatgatttttggttttttttcattgtcctgttgaaatcaagtaattaaacatttaagagccacaaaattggt

SEQ ID NO: 2604 - DNA, 441 bp, Homo sapiens
  misc_feature (1)...(441): n = a,t,c or g
ttgcataaaggtagttgccatactatttttgtgtttcaaattttataactgctcacaagtaaccctgtgtaactttggatgttttaaatctggtcccaaatgtggtacttttggggtggcttggatgggaaaatagaaagttacttaaaggattaaggtgtaggacggaatgggttggttttcttgagtgttaaggcttgcaagatgctctgtgaactcttatgaaactttgtaagacatcagagggttcataggagagtacttcatagggcttcattgtgaggatctcaaggacagcttcttagaggtggcctgaagatcaattaactagtctatttttagaagaaaatttcatctttttggacaggaatattgcaaatttggcttcaagcaaataattttctgattttctgttcagacaacagatcagatnacaaaacg

SEQ ID NO: 2605 - DNA, 533 bp, Homo sapiens
gcggccgccgagggggaggccgccgctgagatgggggcgctgctgctggagaaggaaaccagaggagccaccgagagagttcatggctctttgggggacacccctcgtagtgaagaaaccctgcccaaggccaaccccgactccctggagcctgctggcccctcatctccagcctctgtcactgtcactgttggtgatgagggggctgacacccctgtaggggctacaccactcattggggatgaatctgagaatcttgagggagatggggacctccgtgggggccggatcctgctgggccatgccacaaagtcattcccctcttcccccagcaaggggggttcctgtcctagccgggccaagatgtcaatgacaggggcgggaaaatcacctccatctgtccagagtttggctatgaggctactgagtatgccaggagcccagggagctgcagcagcagggtctgaaccccctccagccaccacgagcccagagggacagcccaaggtccaccgagcccgcaaaaccatgtc

SEQ ID NO: 2606 - DNA, 287 bp, Homo sapiens
aagaacctgcccaccctccctgccactgctggtacccaagcaagtcacctggagccccaagaatcagcctgcttgcacaagttaaaatcagtgccagcgtacgtcaccatggggccatgaacaggcatgattatcccactgccatcaccacccaggcccaaagactagctcacctggcattccagttcctacccaaacttcaccacagcctctactaactactacaccataagccactgaggaaatcacagaacccactgacattgtacagctaaataaggtcgagc

SEQ ID NO: 2607 - DNA, 733 bp, Homo sapiens
  misc_feature (1)...(733): n = a,t,c or g
aggacgacctccacttcataccaaacgactagaagattatagtctggataacacatggttaaacaggactgacaccatgattcagactcctggccccctgccagcaccacaactcacatacactgtactgcgggagaacagtcggcccatgggagaccagattcaagaacctgagtctgatcatggttctgaaccatactttttacacaatcctcagatgctgatctcttggttaggccagccgaagttaaaacacttaaatcggaaggacagaacaggaatgaactacatgaaagtgagaactggagtgaggcatgctgttcggggtctaatggaggaagatgctgagcccatctttgaagatgtgatgatgtcatcccgaagccagttagaagatatgaatggaagaatttggaggacaccatggttattgatctgcctccatcaagaaatcggcgagagagagctgagctaaggcccagacttctttgactctgcagctatcatagaagatgattcaggatttggaatgcctatgttctgaagtctgaagaaaatttacaaatctggaactctattatttagagctagaggcctatatactgggatagcttgnatggggaaaaacncttttgatgngaacnganttggtttttaatccaatgantnagggcnatnccttttttccnnggncgaaaaagganctngtaattncccaagggaanggtgggga

SEQ ID NO: 2608 - DNA, 497 bp, Homo sapiens
ggaagtttggtgctttgctccctgtgtttgcgaaacaggtatctcgtgatttcagaaaagcttgaggagattaagtctttccgggagctgacctgcctggatctttcctgttgcaagcttggagatgagcatgaacttctagaacatctcaccaatgaagccctgtctagtgtaactcagctccacctgaaggataattgtttatctgatgctggggtgcggaagatgacagcaccagttcgagtgatgaaaagaggccttgagaatctaacattattagacttatcatgtaaccctgagatcacagatgcagggcattggatacctcttttcttttaggaaactaaactgcttagatatctctgggacaggggctcaaggacatcaaaaccgtcaagcacaagctccagacccacataggccttgttcactccaaagtgcctttgaaggaatttgatcatagtaactgcaagacagagggctgggctgaccagatc

SEQ ID NO: 2609 - DNA, 533 bp, Homo sapiens
ttttgcagtttaatgtttaatgcccaattatctcaatacaaggaggcttacatggtgctcataaagacacgaccaggcgaaaccaggccggcaggaaatgacccgcatgagtcccagcacggggaccatgttctctcggttccagctcaccctcgaaaagtgccacaggcaaggttcttcagctcacccaggagccagcaggctggccaggcgtgtggccaccatggtcactgaggatcctcgtgggagaatagggttctgggacctcaggatacaatcacaagaaccagaaagctgcttccaaacaaccccagaaggttttcacttcacatgcgctaagccacacaacacctggatgctggggcacccaaaccctttccctaaaactctgaacactgcagaatggaggttgagaacacttggggagggagaacaaagtcagaaccatcctaaagccagtttttcaagcttgaccacctccctcttcctccctgaaggcacaccagccgatcccattactgtggaaaagggac

SEQ ID NO: 2610 - DNA, 1910 bp, Homo sapiens
ggtcttgggaacaagacctacgagcacttcaatgccatgggaaggtacgtggacaagcggctggagcagctcggcgcccagcgcatctttgagctggggttgggcgacgacgatgggaacttggaggaggacttcatcacctggcgagagcagttctggccggccgtgtgtgaacactttggggtggaagccactggcgaggagtccagcattcgccagtacgagcttgtggtccacaccgacatagatgcggccaaggtgtacatgggggagatgggccggctgaagagctacgagaaccagaagcccccctttgatgccaagaatccgttcctggctgcagtcaccaccaaccggaagctgaaccagggaaccgagcgccacctcatgcacctggaattggacatctcggactccaaaatcaggtatgaatctggggaccacgtggctgtgtacccagccaacgactctgctctcgtcaaccagctgggcaaaatcctgggtgccgacctggacgtcgtcatgtccctgaacaacctggatgaggagtccaacaagaagcacccattcccgtgccctacgtcctaccgcacggccctcacctactacctgggacatcaccaacccgccgcgtaccaacgtgctgtacgagctgggcgcagtacgcctcgggagccctcggagcaggagctgctgcgcaagatggcctcctcctccggcgagggcaaggagctgttacctgagctgggtggtggaggcccggaggcacatcctggccatcctgcaggactgcccgtccctgcggccccccatcgaccacctgtgtgagctgctgccgcgcctgcaggccgctactactccatcgcctcatcctccaaggtccaccccaactctgtgcacatctgtgcggtggttgtggagtacgagaccaaggccggccgcatcaacaagggcgtggccaccaactggctgcgggccaaggagcctgtcggggagaacggcggccgtgcgctggtgcccatgttcgtgcgcaagtcccagttacgcctgcccttcaaggccaccacgcctgtcatcatggtgggccccggcaccgggtggcaccctttcataggcttcatccaggagcgggcctggctgcgacagcagggcaaggaggtgggggagacgctgctgtactacggctgccgccgctcggatgaggactacctgtaccgggaggagctggcgcagttccacagggacggtgcgctcacccagctcaacgtggccttctcccgggagcagtcccacaaggtctacgtccagcacctgctaaagcaagaccgagagcacctgtggaagttgatcgaaggcggtgcccacatctacgtctgtggggatgcacggaacatggccagggatgtgcagaacaccttctacgacatcgtggctgagctcggggccatggagcacgcgcaggcggtggactacatcaagaaactgatgaccaagggccgctactccctggacgtgtggagctaggggcctgcctgccccacccaccccacagactccggcctgtaatcagctctcctggctccctcccgtagtctcctgggtgtgtttggcttggccttggcatgggcgcaggcccagtgacaaagactcctctgggcctggggtgcatcctcctcagcccccaggccaggtgaggtccaccggcccctggcagcacagcccagggcctgcatgggggcaccgggctccatgcctctggagcctctggccctcggtggctgcacagaagggctctttctctctgctgagctgggcccagcccctccacgtgatttccagtgagtgtaaataattttaaataacctctggcccttggaataaagttctgttttctgtaaaaaaaaaaaaaa

SEQ ID NO: 2611 - DNA, 427 bp, Homo sapiens
  misc_feature (1)...(427): n = a,t,c or g
ctgaagtgggagaggccgagagaaatttcggtactgcgcatgaaccgagcgtgacgttgaggtttgaaataaccggcaaagagtaaaggctgaaactagcttcctgaaagcttcgtagggcccgagccctgctgagcccaggttctgcgcccactaggaggtgtcatgctgactgctttttttaaagccctagaatcttggcttcggcgtttggggtaagctccgttctcgttctcaagcgcgtttccggaaactctcgcgggattgacgggccgtctcgagagccggcatctcctaggagctagtcctgggtcctcggctaggcggcttggggtcgcggcgtaactggggagccagccttgacgccggcggaccccgccttgttgattcctgggcaacgatgggattgatgantttgatgttgggc

SEQ ID NO: 2612 - DNA, 1209 bp, Homo sapiens
ggacgctgatgcgtttgggttctcgtctgcagaccctctggacctggtcacgattccataatgtaccacaacagtagtcagaagcggcactggaccttctccagcgaggagcagctggcaagactgcgggctgacgccaaccgcaaattcagatgcaaagccgtggccaacgggaaggttcttccgaatgatccagtctttcttgagcctcatgaagaaatgacactctgcaaatactatgagaaaaggttattggaattctgttcggtgtttaagccagcaatgccaagatctgttgtgggtacggcttgtatgtatttcaaacgtttttatcttaataactcagtaatggaatatcaccccaggataataatgctcacttgtgcatttttggcctgcaaagtagatgaattcaatgtatctagtcctcagtttgttggaaacctccgggagagtcctcttggaccaggagaaggcacttgaacagatactggaatatgaactacttcttatacagcaacttaatttccaccttattgtccacaatccttacagaccatttgagggcttcctcatcgacttaaagacccgctatcccatattggagaatccagagattttgaggaaaacagctgatgactttcttaatagaattgcattgacggatgcttaccttttatacacaccttcccaaattgccctgactgccattttatctagtgcctccagggctggaattactatggaaagttatttatcagagagtctgatgctgaaagagaacagaacttgcctgtcacagttactagatataatgaaaagcatgagaaacttagtaaagaagtatgaacccacccagatctgaagaagttgctgttctgaaacagaagttggagcgatgtcattctgctgagcttgcacttaacgtaatcacgaagaagaggaaaggctatgaagatgatgattacgtctcaaagaaatccaaacatgaggaggaagaatggactgatgacgacctggtagaatctctctaaccatttgaagttgatttctcaatgctaactaatcaagagaagtaggaagcatatcaaacgtttaactttatttaaaaagtataatgtgaaaacataaaatatattaaaacttttctattgttttctttccctttcacagtaactttatgtaaaataaaccatcttcaaaagagct

SEQ ID NO: 2613 - DNA, 642 bp, Homo sapiens
  misc_feature (1)...(642): n = a,t,c or g
gcagtgaagcatgaagcctggtggggatgtggtactcccatctggtgtggccaccagctctgccaatgttcctgtagccttggaaaacttgctctctcggttcttttgggtgctgtgtactccccagcttccccccttccccccccattttgcacctgggtttagtgaaaggatggcatttggttgacccatatagaaacccagaatgaggtctcagggccaggaggcctggtatttgtaggccagggaaggggaagaggcaagtggtctggggtatcaccagccagccctctctgatttggcctctactccccataagtcacagtaccataagcaggcttctggcctcagcaatttggtctttggtgcccaagtttattgtgagaatttcctgaaaactctataaaaggtctcttcctactgtaggcctctaatgtttctcccntttttgcttcagtccactcttcagtcttgtaggcctagttttcaaacctgcacatgtgtcctacctggccacagcatgcaggcctcaggcagctgggccagtttgggagcctcgggtgatgtctgcanggtctggggctgcctctgcaccctgctgtgggcttcagggttggggagggctgggccacccgggtgaga

SEQ ID NO: 2614 - DNA, 587 bp, Homo sapiens
acaggtaaaccccaatatcccagtggcttcataaggcagagtttatttcttcctttcatgaagtccactgaaggactacagctctgtaaggcagctttcctccaagctgtgacttggggatccacgctgctaaaattttgtagccacttcatttgaaacaactggctttcaggctgctggaggagaggaagagaaaaggaaaggggtatgtgcccactttctaaagtcgccacttctgctcacacaacctcgcaaagccgcaaggagcctggagactgtgggggaagcacatgaccgtcgggccagtagtgcctgtttctgcacagagaaccctgggctggctgtgctgcttcagcaagcattgtgccttttctcttccgctcagcaaggcaaccaatttcccttttaccttgaacaggattcctgaatccaggccgacaaagtttcggggcaaagtccagacctgaacagaagcttcctgacacttagtccagcgccgtctttgacgctaaggaccacgctcaattgtccctcccaacaggatgtggaggagcagtcctggactctgaacggccacccagacattc

SEQ ID NO: 2615 - DNA, 1621 bp, Homo sapiens
cctgtgaattttacttgtgaaatcattcctgtaatgtttagtgtttgaaaatgaaatattgaaattaggtttccagagtaacactgtccccggaaaaggatatgagaagtggtggatgttggatgggggtgggttgcacagtcctgtgcgggttcccatgggctttccagcgtttcatttagtgaaggaatgctcacactagatgtaggcacagcttcctgtggggcccggcagcaaagccccagggtgctccctgtcacctcacaacaaaatgcactaagaaacgtaaagaataagaggaattaatacccaccattaaaggatgtccggccaacctattgtggaaatttatagaatagtatacaccacagttctgaatagtgatatcacataaaaatacatactagaggacctgccacgccatgagcagtgtttttgctttttgggggccagtccctggggtgtggagccgctagggtttgcacccatgaaacagagaaaagccacaccctccaaggtgtggctttcattttgggactgctgcagggagggcagaggcattgctgagactgcctggcaacggctgatgccccaggtaggaccttttccatttcaaagtggtgttctaagtctgcgtccaacactgtgtgaggaaaaaggttggtgcaaaaatattcctggtcatccacccattaaaatagttagatgaggctattgccttgatgacagctgcccacactcctcatgaaattaacccgtatgccggggcatttccaaatgtctgactcgtgaaattaacccatacgcaggggcctttccaaatgtctgaaaaggcagtggtgtcttttggggaaaatgttatgcatggaagccatgacctttttgcttagttgacagcaatcccttcttgtattgccaatcaaggttcatttgagatgcagaggaatgagcttgagccttcctccttttccttccggttttattcttcctcttgggaacatccctccactccgcactgcttcctgcagctttgtagagctggatttggaacttcgggatttggtttctgagtctgtggaggcaccgacttctcctgtaagaaaatgaatgttgtggaaattctttggctacttaactaaaactcgtgactgtataagtttggctacaaataagtaagaaattaatcatctgctctgtttctgctaatttctggtgtcacttcagtaattctggtagcagccgttgaatctgtcagtctcttaggtaacttcctgtaaacgatttggaaataggatgttttcaacgttcttttgtcttttgctgaagtcaggatagattcaagacataatctcttgtaagatctaaatagagcaaatgtaaacaaaagtgcatttttgtattcttgttaattttagatgctttcctagcttacaaaaagttctatttttgggttaaaaatcaatcaactttctgatatttccccttctgcaatgttattgttcataagaaaacacgagctgaaaatggaaatctgcagttgtttcagttgtcttgaatttctttcagtggccacatcatttccacgttttccacatccgggaggaagcctggactgtgcagc

SEQ ID NO: 2616 - DNA, 1686 bp, Homo sapiens
gggcgggggtacctgtacccacgtagtcgccggttaccgatcggactaagttccagaagcaagagataaagtaataatgggtactgtggggaaaaacacagaagaacaattcggtaatatagtggtgatttacaagtcaagttaaaatgtccccagaagtggccttgaaccgaatatctccaatgctctcccctttcatatctagcgtggtccggaatggaaaagtgggactggatgctacaaactgtttgaggataactgacttaaaatctggctgcacatcattgactcctgggcccaactgtgaccgatttaaactgcacataccatatgctggagagacattaaagtgggatatcattttcaatgcccaatacccagaactgcctcccgattttatctttggagaagatgctgaattcctgccagacccctcagctttgcagaatcttgcctcctggaatccttcaaatcctgaatgtctcttacttgtggtgaaggaacttgtgcaacaatatcaccaattccaatgtagccgcctccgggagagctcccgcctcatgtttgaataccagacattactggaggagccacagtatggagagaacatggaaatttatgctgggaaaaaaaacaactggactggtgaattttcagctcgtttccttttgaagctgcccgtagatttcagcaatatccccacataccttctcaaggatgtaaatgaagaccctggagaagatgtggccctcctctctgttagttttgaggacactgaagccacccaggtgtaccccaagctgtacttgtcacctcgaattgagcatgcacttggaggctcctcagctcttcatatcccagcttttccaggaggaggatgtctcattgattacgttcctcaggaatgccacctgctcaccaacaaggtgcagtacgtgattcaagggtatcacaaaagaagagagtatattgctgcttttctcagtcactttggcacaggtgtcgtggaatatgatgcagaaggcttttacaaaactcactctgctgctgatgtggaaagatttttgttttcttgtacacattgacctgcctctgtttttccctcgagaccagccaactctcacatttcagtccgtttatcactttaccaacagtggacagctttactcccaggcccaaaaaaattatcccgtacagccccagatgggatggaaatgaaatggccaaaagagcaaaaggcttatttcaaaaccctttgtccctcagttccaggaggcagcatttgccaatggaaagctctaggaaacaccagtcttgagaggtggccagccagactgcctgtccacatgcgtgtcagcacatacagccgcttcctggaagccgcctggaatgtcttcacggcagcgtttgctcacacagcagcttttgcacgccccaggcagccccgactgctgaaatccaacttgagctggctggtggtccctggatcctagagcccttcacttcgggttactccctctttcttgcctctatttcttagttggaagaaataaactcacaaattatggtgcagtaattttccggggaaagtaaagcctcaggaatgcccacgcctttcttccaaagcctttgtctctgagacctcttaagttctaagattaaatgcccctcgctgttcttcctctg

SEQ ID NO: 2617 - DNA, 430 bp, Homo sapiens
ggtgagactccatctgaaaaaataaaaataaaaaaccttctcaaaaacaaaaaatttagttaagtatcataaagacatcctgaaggtaggggaatttttaaaaatctgttttggagaaagatgacatactctgatcatagttgtgatgctaccagtataatgttttatacctgaagcaaggaagtcagtgtggagcaaggtctagagcagtaaactgagacgctggagagtctaccattaatcagatctgtgatggtggggaggccttgctctctcttgcctccatttcttcatctcttcaaattattgggcagttggggttagggtccagctcatgtgtgctatttttaaggactcccttgggcttgcttttttctctggttcctccaggggatgggaaattttaccccggaccattttccctagtacc

SEQ ID NO: 2618 - DNA, 1193 bp, Homo sapiens
ccagactggggtgccctttggggaagtaagcatggtccgggactggttgggcattgtggggcctgtgctgacccctccccaagagcatcctaaacgaccagtgctgggactggagtgcccacagtcagaagtgagtggtgcccgattctggggctttttccggaacctctgtggacagcctgaggtcttcttccatcactgttttgtccacaatctatgccctctgcttttcctggctcccagcgggcgcaaccttactcctgctgagctgcctgccaagcagcgagaacagcttcttgggatctgtgatgcagccctctgccggcaggtgcagctgctgggggtgcggctggtggtgggagttgggcgactggcagagcagcgggcacgacgggctctggcaggcctgatgccagaggtccaggtggaagggctcctgcatccctctccccgtaacccacaggccaacaagggctgggaggcagtggccaaggaaagattgaatgagctggggctgctgccactgctgttgaaatgagtgcccttggggccttgcatgggacacattcaagacctcgaagtcattcttggccaagcagatgacaacacatctcctggactggagcaaaaggtccttctgtgcaccctggtcgctgggaaacgtattctttgatctgttgaactgtcttccaacctgccatggcagttttgacactactcctgtttgccctcctgattcctgctttctttaccttttaacattgcccctttcaggggcccccactttgtagggaatctgcagaaggtgtgcttttgcacttgcagactgctctacctcagtgtttccttgggagactttattcagctgagagtgccctagacagtaacttctaaggtcacgtttactatttcagaggaaatatcttgccaggatacctacccatccttatagaacagttacctttagctgacccctttcctcacagggaccaagacaaagcatgggacatgaaattaagagtgaacttcttatgggaggctgcagctggatcagaggaaaaatccagtgtgacagagtgcaagtcagaagacctggcttttcatcccagctttgaaacttggaactttttgattgacaaattaataaacctctctatgcctcaggctcctcatctgtaaaaaaaaaaaaaaaa

SEQ ID NO: 2619 - DNA, 841 bp, Homo sapiens
cacatatagaaataatgaatttccctgatcattaaattcttcccagctatttccttctagcagatatattcactgagaagaaaagctttaatctttacttaaaagttactttgaggggtcaagctaatgaattttagatctatgtattcttaaagattgcaagaaaaaaaagagagtatctgttccaaccagagaacatttcatctcaattatattacattaaaatgaacatgacattaatggtcaataagaataattcttcttatactgagcatccatagatatattcctagaagtatgagaagaattattcttattgaccattaatgtcatgttcattttaatgtaatataattgagatgaaatgttctctggttggaacagatactctcttttttttcttgcaatctttaagaatacatagatctaaaattcattagcttgacccctcaaagtaacttttaagtaaagattaaagcttttcttctcagtgaatatatctgctagaaggaaatagctgggaagaatttaatgatcagggaaattcattatttctatatgtggaaactttttgcttcgaatattgtatctttttaaatctaaatgttcatatttttcctgaagaaaccactgtgtaaaaatcaaattttaattttgaatggaataatttcaaagaactatgaagatgatttgaagctctaatttatatagtcacctataaaatgttctttatatgtgttcataagtaaattttatattgattaagttaaacttttgaattgatttgagggagcagtaaaatggaaagctatatctattcctaaacccttatttaggacat

SEQ ID NO: 2620 - DNA, 466 bp, Homo sapiens
  misc_feature (1)...(466): n = a,t,c or g
gaaatatgtaatctctttttttttcctcttaatagccttatgtttatattggggttttattgtttttgcttttcagtactgtaagattgatgttaaaggcatggtgttcaccccacttcatcagcgtacataagttatctcttcttttggacccttattttatgccataatgtatgtcattgaaagtgcccgacagagacctcctaaaaggaaatacctatcaagtggaagaaaatctgtatttcaaaaactttatgacttgtatattgaagaatgtgaaaaagaacctgaagttaagaaattaagaagaaatgtgaacttgttagagaagcttgttatgcaagagactttgtcatgtttagtggtcaatctatacccaggnaatgagggatattctctgatgctcaggggaaaaaacgggtcanattccgagaccattcgactgccctatgaaggaaggagattg

SEQ ID NO: 2621 - DNA, 555 bp, Homo sapiens
cctagccactgggctgggatcttctgggtcatgtgactgtgtatccaggagcagaaacttgtattctcaggattcaggatctacccagcaccaaagatgtattttcaggagaacagacctagaaatgggcctgtctggcatttccagagtcaggcaaagcaggcagggccagggagcttctgtgggtctacacaagaaggttcctgtgagggctatcagttgttgccttctagcttgctggtaactttggcgcctccgccaagccctgccagactcccctggctgtgatggcattctgtgccatcctccttgtccccagcctctgcaggatgccctccctacccacctctccctgggccttccttgtccactgggctggattcatgttcaaaccactggactggcagggcaacgacttcttctcacctcaagatgaggtcctcgcccccttgtcttggcataaaaacacctttaaagcatgagccatgtgcttctttgcccttctctgtcctgttccaatcttctgcctcccagtcatccctggggaacatggga

SEQ ID NO: 2622 - DNA, 895 bp, Homo sapiens
  misc_feature (1)...(895): n = a,t,c or g
caaggatccctaagagagaggcaggggtgttcagctctcccacctctgctggatgaacttgcagagcctccttggtgacccagccggtgcagagactctgctcaggacaacacccttgcctgggacccccacatctctggccccagcagcagcccttgggggggtccctttatcttcctccactcctacccaggcttcctcagcaggagatgaggcaggacatttccactccctttctggaaggttcagaaggttaatgagagctaagcacgtaagtccatttagggggatgaacttctgggaagagaggaacctgggtcttggctgacgtccaagggcgggctgggtgacggtccctctgatcacggaccctgtccacccactgcccagggncctgcctcgacccctctgaccagccaccgagccccagagggatctccatgaatgtcagagacattgactggaggccttatctccagtgggagaccccttctcttcccactgtgggccggttccagcctgggctgtccaggaagtgacctctcagggcctgggaagggtgtggccagtggatctttgttggtctcaactcatctgccttgggtctaaggctggggtgaatggaagggcccacctggaccctggagggacaccaggctcatactaaaatcccaaaaagtgaaaagctttccccaggcccaagcagagaaactggaccttgaagctacatctctggacttagtcctcaaagtaggagacatttgcctctaagctgttctctcccaccccacctttctgtgagccgccggttccctgttgtccacatcaagctgtgtgctgggcactgggtgcaggaatagcttgaccacagtctctatcctgggggtaaaggggt

SEQ ID NO: 2623 - DNA, 1220 bp, Homo sapiens
taaaacccccaacttggccagaccggggattaccctgcaggagtcacttgtgtgtggcacattgtagccccaaagaatcagcttatagaattaaagtttgagaagtttgatgtggagcgagataactactgccgatatgattatgtggctgtgtttaatggcggggaagtcaacgatgctagaagaattggaaagtattgtggtgatagtccacctgcgccaattgtgtctgagagaaatgaacttcttattcagtttttatcagacttaagtttaactgcagatgggtttattggtcactacatattcaggccaaaaaaacttgcctacaacttacagaacagcctgttcaccaccacattccctgtaaccacgggtttaaaacccaccgtggccttgtgtcaacaaaagtgtagacggacggggactctggagggcaattattgttcaagtgactttgtattagccggcactgttatcacaaccatcactcgcgatgggagtttgcacgccacagtctcgatcatcaacatctacaaagagggaaatttggcgattcagcaggcgggcaagaacatgagtgccaggctgactgtcgtctgcaagcagtgccctctcctcagaagaggtctaaattacattattatggggccaagtaggtgaagatgggcgaggcaaaatcatgccaaacagctttatcatgatgttcaagaccaagaatcagaagctcctggatgccttaaaaaataagcaatgttaacagtgaactgtgtccatttaagctgtattctgccattgcctttgaaagatctatgttctctcagtagaaaaaaaaatacttataaaattacatattctgaaagaggattccgaaagatgggactggttgactcttcacatgatggaggtatgaggcctccgagatagctgagggaagttctttgcctgctgtcagaggagcagctatctgattggaaacctgccgacttagtgcggtgataggaagctaaaagtgtcaagcgttgacagcttggaagcgtttatttatacatctctgtaaaaggatattttagaattgagttgtgtgaagatgtcaaaaaaagattttagaagtgcaatatttatagtgttatttgtttcaccttcaagcctttgccctgaggtgttacaatcttgtcttgcgttttctaaatcaatgcttaataaaatatttttaaagg

SEQ ID NO: 2624 - DNA, 756 bp, Homo sapiens
ttttttttgagtttaagttaaacacccatatgaatttattaaatccagactgtgttaaagggcggcggtctaggagggggagtgtggtagggggacgagggacaagatgatgaacggccgtgggcatcccgtaggggggcccggccccacccccgcccaacccaccccctcggcaacgctgcatcagcttcaccatgattcccagtggtgctgggctggcagggcgagatggctggaaacacagagggacagagggacagacagcgcctccacaaacaaaccctgggcctgccccggcccctacgtcacacgctgggccctgacctgaggcgggcctcccaccgccccggcctgatctgtccagggaaagggcgacagggaggggaggcgagggggccgggacgcaggggtagtggtcgccaggagccggagcaggtgaggaccagtctcgactaatcctttttcttgtcctctgctggctttggaggggcttcctggggctcgctggcagagctggccccctgggtgggcttggtgggcagggacgtggaggcctcctccctggtggcggtggtcgtggtgggtgcaggtgtgggcgtgagggcccctgctgctgtgggaacctcggccacgggggcggcagctgtggggtcttctccactcatgccaaactcgttgactcgggtggggtcgacgcggtagatccaccgttggtagaggtagatgaagaaaaccacatcgtcccgcaggcagccg

SEQ ID NO: 2625 - DNA, 2468 bp, Homo sapiens
gtcgccgcaacagtctgcaagttcgcgctgcacagcggctacagcagctacagcctcagccgcgcgccggacggctgccctggccaccgcgcgcgcctcgccccggcaggaaaaggatgcgcctccacttagcaaggctgggcaggatgtggttctgcatctgcccacagacggggtggttctagacggccgcgagagcacagatgaccacgccatcgtccagtatgagtgggcactgctgcagggggacccgtcagtggacatgaaggtgcctcaatcagggggtgactccttggtggaaaagtctcagaaagccactgccccaaacaagccacctgcattatcaaacacagagaagaggaatcattccgccttttggggaccagagagtcaaatcattcctgtgatgccagatagtagttcctcagggaagaacagaaaagaggaaagttatatatttgagtcaaagggtgatggaggaggaggggaacacccagccccagaaacaggtgcagtgctacccctggcgctgggtttggctatcactgctctgctgcttctcatggttgcatgccgactacgactggtgaaacagaaactgaaaaaagctcgtcccattacatctgaggaatcggactacctcataaatgggatgtatctatagtaatgtaatttcaataccttggggcagggacatgttttgtttataatttatacatctattaagttctggatatttacagcttcttttgtttttaattgggccagaagattctgcaaatcccaaatctttctttattatttattgtaaaaaaagtttccttagaagtcataaaatattttgaaatttagagaggaattcatgattaaagattcctaaaaatataattctgatttatgtaagctgtccctgaaaataggaaatgtgtacttagctgagagaaaattcagcatctcaggaggtggtattaggatgactgtgttaacccattaccttttagaagccaactgttggcccccttaccatgctggactgctatagggcccagcttccccttgttctgtggcccttttcttcctccttgaagctcccagtattctttttcttttcccctctaaacctgtttctgaggagtgggatctcaaggcaagttcatgccttcaatcaggatgttacttaggggtggggtatacctaaattataaaccttatgtacaagtcagtaagccttagggaaggtgagtgtgggtccttcctaatccctctgacgtcatgtcatataggtggctgcctccttagactgacctttgggagaaaaaaaccccagactttgaattagtaacagctctaagatggtcatgcagtgagataggaaatcaagatggaagcagagaatctggcatgccaaaaactaacagaaacttagttgaaggcaaagagagcaaggagaacgtttaatacttcattacatcaaatcaacactgctccatggtgagagcacagcaactcatttatatatatatatatagggctttgttgatgaaaaacgacaatttgaaggagaggacgttgagtggattcctgggtacagcttttgtaaaaatgtcaccatggctttcatccaatggaatgagtcgatgttttttaatgctataaaatgttagaatgtgccatcagctaatgccaggcttacgtatttctagaccataaagcagtttttcacaaattcatctttacagaaaaccagcatctagcttagcatctttccccttttaatttgtaggcttttaaaggcaaatcattcccaccatcacttaacgccgggattatacacattctagaaatgattctgagaggagtgtatagtatggtgcctatctacactcacatgatattcttattcacgttttttttaaccataagtggcaaatattttaaaatatttgaaaaacactccagaatctagtacgctttatttttagactgaacctaaagtaggttgttcttttaacaaagggtttaattcgggtggggaatataacatatcaaaatacatgaacaaatggaaagttacttctagaaaagcaaagaaattgggtatcatttttgtttcttgggaagctaattttgttgaatgtttagaattgagcaaagatgtaaatttttgaagggcagtttagaaaaattaactttgtgaatgaacttaagatgtctgtactctatatgtgatgctgtgcagtttgtttttatatggaaagatgtcaactatagccataaccaataaaataaaaactgatgaggcatgtcagctttcagcacatcttttatacatgaagaaattaattttgtgttgctatggtgttgaaatatccaagatgttctgtatctatgtaaacatgattcctttaataaattgtattttattattaagcctttttttccttttaatataatcataagttgctatt

SEQ ID NO: 2626 - DNA, 1520 bp, Homo sapiens
  misc_feature (1)...(1520): n = a,t,c or g
tcacgcttcgtggggcgggacgaggagaagccaaacgtaaagacaccaggagtttctcgggcccagctgtggctgctgccggggagccccaagccttgcgnggtccttgcggcgaataggagtctggtcaggcgtcaggctagtccgacgaagagtgggtgtgatcagcactggaaaagatgcctgcccctgctgccacatatgaaagagtagtttacaaaaacccttccgagtaccactacatgaaagtctgcctagaatttcaagattgtggagttggactgaatgctgcacagttcaaacagctgcttatttcggctgtgaaggacctgtttggggaggttgatgccgccttacctttggacatcctaacctatgaagagaagaccttgtcagccatcttgagaatatgtagcagtggtcttgtcaaattgtggagctctttgaccctgttaggatcctataaaggcaaaaaatgtgctttccgggtgattcaggtttctccatttcttcttgcattatctggtaatagtagggaactagtattggattgaatgaatagtcttccattttggaaacgttcatccactctcatatttattttttggtgcctgcatgtttgaagactgaagccaggctaaaagctcttgatgaaatttgagggtgctgaagatgttcccactaatttccagccatcacctttggtggggtgggcttcggaggacagtctgtctgaacctgccagtgctgaccctgcagcactttcagcatatgcacatcaaagttggagaccgcgctgaacttaggagggccttcacacagactgatgtggctaccttctcagaattaacaggggatgtcaatcctttgcatttgaatgaagactttgcaaaacacaccaagtttggaaatacaattgtacatggagttttgatcaacggacttatctcagctctcctaggaactaaaatgccagggccaggctgtgtatttctttcccaggaaattagctttccagcccctttatatattggagaagttgttttagcttctgcagaagtgaaaaagctgaagcggttcattgctattattgcagtgtcatgttctgtaatagaaagtaaaaagactgttatggaaggctgggttaaagttatggttccagaagcttccaaatcctgaaatagatgttttaaagatgcaacctcaaacaccaatgctgttgttaaagagcctatggggaattgctgctctttaccaaagaatggttgataggcccagaagcccatcttagttaggggaagggagcaggaagagggttgttcaaatgcccactttccagtttggccttatgcttcatgcagacttgagtgtatgcaggatttcattatctgcctgggttttttgtttgttttttgttttttaattcaagaagtaggctgagccacctcacccacccccaagatgaattttgaaaccataggctgctggttgtcccaccaaatccattctcttttctttcc

SEQ ID NO: 2627 - DNA, 1044 bp, Homo sapiens
gagaacctggagcagggatgaagtcatgggagataatctgctgctgtcatccgtctttcagttctctaagaagataagacaatctatagataagacagctggaaagatcagaatattatttaaagacaaagatcggaattgggatgacatagaaagcaaattaagagccgaaagtgaagtccctattgtgaaaacctcaagcatggagatttcttctatcttacaggaactgaaaagagtagaaaagcagctgcaagcaatcaatgctatgattgatcctgatggaactttggaggctctgaacaacatggggatttcccagtgctatgttgccatctccaccgaaacagaagtccagccctgtggaataaccaccacagcccggccatgctgtgacctacaagcaaactaaatagccaacatttctgaacccctaagtctcctgtgccaagctgctccctgaaatggacttcttcatctgtacagatttgttaaaccattctatttgcttcttaataataggatttatattagtactcattaccattggacacaatgacataagtactctccacagtaaagcagacctttcacaacagtcactctgtgtcctaaaattttccaacatagatgtgatttatataactttgttgatacgtaaattgtcttggggtttacggaaattaactattatgtttgcactaagatttgctgggagtggtaggtggacatatctatatatcaataaggactaaccgtcttttttgtacataggagattgataatactgtatttgttttaagcccacagtgttttactccactttcaaaaagatcaatttggcactttttttcattttttttaatggaaataagatttggtctctcattttaggttaaatgataactagaaagattaaactagacagatagtttaggtgggagtatattttttaaaactcaggaacatgtatattggtcctgtgttaccaagtttatatgtggacagttggaaaaggaattccctggaatggtcctgagggtt

SEQ ID NO: 2628 - DNA, 738 bp, Homo sapiens
ggcggcctccgtgtgcagcgggttgctggggccacgggtgagtggggcgactcggcaggtccctgcgagtcggaggtggggtccctagtttccgcctcacgcgccctccctccacgggtgctgtcctggagccgagagctgccttgcgcttggcgcgccctgcacacctccccggtctgcgccaagaaccgggcggcccgagtacgcgtaagcaagggggacaagccggtgacctacgaggaggcacacgcgccgcactacatcgcccaccgtaaaggcctggctgtcgctgcacacaggtaacctggatggagaggaccatgccgcagagcgaacggtggaggatgttttccttcgcaagttcatgtggggtaccttcccaaggctgcctggctgaccagctggttttaaagcgccggggtaaccagttggagatctgtgccgtggtcctgaggcagttgtctccacacaagtactacttcctcgtgggctacagtgaaactttgctgtcctacttttacaaatgtcctgtgcgactccacctccaaactgtgccctcaaaggttgtgtataagtacctctagaacaatccccttttttccatcaagctgtagcctgcagagaatggaaacgtgggaaaggaatggtatgtgggggaaatgcatcccctcagaggactgaggcatagtctctcatctgctattgaataaagaccttctatcttgaaaaaaaaaaaaa

SEQ ID NO: 2629 - DNA, 751 bp, Homo sapiens
  misc_feature (1)...(751): n = a,t,c or g
tttttttttttttcaaggcaatcaagaataatttattatggccttgctaatacaaggttccaaaaaatgactggttttgatataacgtcatggtggctaggtaaaaacatacatgttccagaaatgcacactcaagtgtgcaggagtacaatcacacgctcgggatctgctttcaaattcctcagcagagaaaaaaggggaaaaaaatgttctcacaatcagtaattgctgaaggtccactctgcacccccactgcaacaggcaccagaggaacagcggtcagtcttgggcacgttgctgaatcccatgagtgatggccaattcaggaggcgaacgacccagcaagttccccaccacagcggacatggaacacgcacgagaggcagagacatgaaggacagaaggatggaaggaagtacggaatgcatattttaacataagaattcgcaaagcaatgcagcagccctaaccacaatgagaacgcatcagccttgtattcttagatctcacagcaccctgtactgaccacgtcgctgttcactagcagccttggtactcttctccttggcaattcccagatacagtggagaggtcggtaggancacaggagctnggntggcaccgagaggctcctgccccatgctgggnactgctgagccctgactagcgcggccgggttgatctccaacacggcaatcttcccgccaaagagggaggccagnaagnacagcaccntttgntccgaagtgcg

SEQ ID NO: 2630 - DNA, 1065 bp, Homo sapiens
  misc_feature (1)...(1065): n = a,t,c or g
tattttttttttagcatccttttggggcttcactctcagagccagtttttaagggacaccagagccgcagcctgctctgattctatggcttggttgttactataagagtaattgcctaacttgatttttcatctctttaaccaaacttgtggccaaaagatatttgaccgtttccaaaattcagattctgcctctgcggataaatatttgccacgaatgagtaactcctgtcaccactctgaaggtccagacagaaggttttgacacattcttagcactgaactcctctgtgatctagggtgatctgttccccctctgatgaacatccctctgatgatcaaggctccccagcagggntactttgaagggaacaatcagatgcaaaagctcttgggtgtttatttaaaatactagtgtcactttctgagtacccgccgcttcacaggctgagtcccaggcctgtgtgctttgtagagccagctgcttgctcacagccacatttccatttgcatcattactgccttcacctgcatagtcactcttttgatgctggggaaccaaaatggtgatgatatatagactttatgtatagccacagttcatccccaaccctagtcttcgaaatgttaatatttgataaatctagaaaatgcattcatacaattacagaattcaaatattgcaaaaggatgtgtgtctttctccccgagctcccctgttccccttcattgaaaaccaccacggtgccatctcttgtgtatgcagggctatgcacctgcaggcacgtgtgtatgcactccccgcttgtgtttacacaagctgtggggtgttacgcatgcctgcttttttcacttaataatacagcttggagagatttttgtatcacattataaatcccactcgctctttttgatggccacataataactactgcataatatggatacgccttatttgatttaactagttccctaatgatggacttttaagttgtttcctttttttttcttttttgctactgcaaacgatgctataataaatgtccttatcaaaaaaaagtcgacc

SEQ ID NO: 2631 - DNA, 5652 bp, Homo sapiens
cacgtgcatgtgtagcatgccttggtttttcctttggcatctgaaaaaggcacaacctgaaagacctagaacccagtgtcggtccccaggccctttgggacaggaagagaagagccgtgtggccgcggggaggatgtcctgcggcggggctgtcctcgcggactgactggactccatctcccagcgggcgccgcggcgcggccacgcccccccactccccgcgcgcgcccggtggagacttcgattttcagaattcctcctgggaatgctgactccttgcttggtgccctgatgcttctctgagataaactgatgaattggaaccatggtgcaaaagaagaagttctgtcctcggttacttgactatctagtgatcgtaggggccaggcacccgagcagtgatagcgtggcccagactcctgaattgctacggcgataccccttggaggatcacactgagtttcccctgcccccagatgtagtgttcttctgccagcccgagggctgcctgagcgtgcggcagcggcgcatgagccttcgggatgatacctcttttgtcttcaccctcactgacaaggacactggagtcacgcgatatggcatctgtgttaacttctaccgctccttccaaaagcgaatctctaaggagaagggggaaggtggggcagggtcccgtgggaaggaaggaacccatgccacctgtgcctcagaagagggtggcactgagagctcagagagtggctcatccctgcagcctctcagtgctgactctacccctgatgtgaaccagtctcctcggggcaaacgccgggccaaggcggggagccgctcccgcaacagtactctcacgtccctgtgcgtgctcagccactaccctttcttctccaccttccgagagtgtttgtatactctcaagcgcctggtggactgctgtagtgagcgccttctgggcaagaaactgggcatccctcgaggcgtacaaagggacaccatgtggcggatctttactggatcgctgctggtagaggagaagtcaagtgcccttctgcatgaccttcgagagattgaggcctggatctatcgattgctgcgctccccagtacccgtctctgggcagaagcgagtagacatcgaggtcctaccccaagagctccagccagctctgacctttgctcttccagacccatctcgattcaccctagtggatttcccactgcaccttcccttggaacttctaggtgtggacgcctgtctccaggtgctaacctgcattctgttagagcacaaggtggtgctacagtcccgagactacaatgcactctccatgtctgtgatggcattcgtggcaatgatctacccactggaatatatgtttcctgtcatcccgctgctacccacctgcatggcatcagcagagcagctgctgttggctccaaccccgtacatcattggggttcctgccagcttcttcctctacaaactggacttcaaaatgcctgatgatgtatggctagtggatctggacagcaatagggtgattgcccccaccaatgcagaagtgctgcctatcctgccagaaccagaatcactagagctgaaaaagcatttaaagcaggccttggccagcatgagtctcaacacccagcccatcctcaatctggagaaatttcatgagggccaggagatcccccttctcttgggaaggccttctaatgacctgcagtccacaccgtccactgaattcaacccactcatctatggcaatgatgtggattctgtggatgttgcaaccagggttgccatggtacggttcttcaattccgccaacgtgctgcagggatttcagatgcacacgcgtaccctgcgcctctttcctcggcctgtggtagcttttcaagctggctcctttctagcctcacgtccccggcagactccttttgccgagaaattggccaggactcaggctgtggagtactttggggaatggatccttaaccccaccaactatgcctttcagcgaattcacaacaatatgtttgatccagccctgattggtgacaagccaaagtggtatgctcatcagctgcagcctatccactatcgcgtctatgacagcaattcccagctggctgaggccctgagtgtaccaccagagcgggactctgactccgaacctactgatgatagtggcagtgatagtatggattatgacgattcaagctcttcttactcctcccttggtgactttgtcagtgaaatgatgaaatgtgacattaatggtgatactcccaatgtggaccctctgacacatgcagcactgggggatgccagcgaggtggagattgacgagctgcagaatcagaaggaagcagaagagcctggcccagacagtgagaactctcaggaaaaccccccactgcgctccagctctagcaccacagccagcagcagccccagcactgtcatccacggagccaactctgaacctgctgactctacggagatggatgataaggcagcagtaggcgtctccaagcccctcccttccgtgcctcccagcattggcaaatcgaacatggacagacgtcaggcagaaattggagaggggtcagtgcgccggcgaatctatgacaatccatacttcgagccccaatatggctttccccctgaggaagatgaggatgagcagggggaaagttacactccccgattcagccaacatgtcagtggcaatcgggctcaaaagctgctgcggcccaacagcttgagactggcaagtgactcagatgcagagtcagactctcgggcaagctctcccaactccaccgtctccaacaccagcaccgagggcttcgggggcatcatgtcttttgccagcagcctctatcggaaccacagtaccagcttcagtctttcaaacctcacactgcccaccaaaggtgcccgagagaaggccacgcccttccccagtctgaaaggaaacaggagggcgttagtggatcagaagtcatctgtcattaaacacagcccaacagtgaaaagagaacctccatcaccccagggtcgatccagcaattctagtgagaaccagcagttcctgaaggaggtggtgcacagcgtgctggacggccagggagttggctggctcaacatgaaaaaggtgcgccggctgctggagagcgagcagctgcgagtctttgtcctgagcaagctgaaccgcatggtgcagtcagaggacgatgcccggcaggacatcatcccggatgtggagatcagtcggaaggtgtacaagggaatgttagacctcctcaagtgtacagtcctcagcttggagcagtcctatgcccacgcgggtctgggtggcatggccagcatctttgggcttttggagattgcccagacccactactatagtaaagaaccagacaagcggaagagaagtccaacagaaagtgtaaataccccagttggcaaggatcctggcctagctgggcggggggacccaaaggctatggcacaactgagagttccacaactgggacctcgggcaccaagtgccacaggaaagggtcctaaggaactggacaccagaagtttaaaggaagaaaattttatagcatctattgggcctgaagtaatcaaacctgtctttgaccttggtgagacagaggagaaaaagtcccagatcagcgcagacagtggtgtgagcctgacgtctagttcccagaggactgatcaagactctgtcatcggcgtgagtccagctgttatgatccgcagctcaagtcaggattctgaagttagcaccgtggtgagtaatagctctggagagacccttggagctgacagtgacttgagcagcaatgcaggtgatggaccaggtggcgagggcagtgttcacctggcaagctctcggggcactttgtctgatagtgaaattgagaccaactctgccacaagcaccatctttggtaaagcccacagcttgaagccaagcataaaggagaagctgggcaggcagccccattcgtacttctgaagatgtgagccagcgagtctatctctatgagggactcctaggcaaagagcgttctactttatgggaccaaatgcaattctgggaagatgccttcttagatgctgtgatgttggagagagaagggatgggtatggaccagggtccccaggaaatgatcgacaggtacctgtcccttggagaacatgaccggaagcgcctggaagatgatgaagatcgcttgctggccacacttctgcacaacctcatctcctacatgctgctgatgaaggtaaataagaatgacatccgcaagaaggtgaggcgcctaatgggaaagtcgcacattgggcttgtgtacagccagcaaatcaatgaggtgcttgatcagctggcgaacctgaatggacgcgatctctctatctggtccagtggcagccggcacatgaagaagcagacatttgtggtacatgcagggacagatacaaacggagatatctttttcatggaggtgtgcgatgactgtgtggtgttgcgtagtaacatcggaacagtgtatgagcgctggtggtacgagaagctcatcaacatgacctactgtcccaagacgaaggtgttgtgcttgtggcgtagaaatggctctgagacccagctcaacaagttctatactaaaaagtgtcgggagctgtactactgtgtgaaggacagcatggagcgcgctgccgcccgacagcaaagcatcaaacccggacctgaattgggtggcgagttccctgtgcaggacctgaagactggtgagggtggcctgctgcaggtgaccctggaagggatcaacctcaaattcatgcacaatcaggttttcatagagctgaatcacattaaaaagtgcaatacagttcgaggcgtctttgtcctggaggaatttgttcctgaaattaaagaagtggtgagccacaagtacaagacaccaatggcccacgaaatctgctactccgtattatgtctcttctcgtacgtggctgcagttcatagcagtgaggaagatctcagaaccccgccccggcctgtctctagctgatggagaggggctacgcagctgccccagcccagggcacgcccctgggccccttgctgttcccaagtgcacgatgctgctgtgactgaggagtggatgatgctcgtgtgtcctctgcaagccccctgctgtggcttggttggttaccggttatgtgtccctctgagtgtgtcttggagcgtgtgccaccttctccctctccactcccagaagaccaaactggcctttcccctcaggggttcaagaatgtgtacagtctgtggggccggtgtgaacccactattttgtgtccttgagacatttgtgttgtggttccttgtccttgtccctgggcgttataactgtccactgcaagagtctggctctcccttctctgtgacccggcatgactggggcgcctgggagcagtttcactctgtgagggagtgaggggaaccctgggggcttcaccctctcagagggaaggggcaccagagagggaagggaagaattggggggggcagccggagtgagtgggcagcctccctggtttccttcttgcatttccccaagccgggcagtt

SEQ ID NO: 2632 - DNA, 453 bp, Homo sapiens
  misc_feature (1)...(453): n = a,t,c or g
cggcacgagggtgtcataatgtagtggaaaaggctagagaatagaagtttaaaaatacgagttctaacttaactttgtaactatgtaatttgggcaaatatataaacctcctggtggatatttatctataaaataggattaatgccagatctacttacttacacagtaacaaggatcaatctagataatgtaagaacactctgaagatataaagtgtttggaaagattacggagggctgcccatgattaaaatagaggggagcagggattgggtaatatactgaaatagacattcaagagagggctataccccgatctttttttttttttaagacagtcccactctattgcccagggtggnagtgcagtgggcatgatcatgggntcacttgcagttcctgacctcccgggggtctcagggttgatncctccttaccttcaggcctccccaag

SEQ ID NO: 2633 - DNA, 868 bp, Homo sapiens
ggtgcgcgcttggcctccctagtgcgggctggcagtgcgggcagagcccggctgagaggggcggccctggaggagacggaggcggcgggtgggcccgaggcgcaagaggaagatgaggacgaagaagaggcgctgccgcactccgaggccatggacgtgttccaggagggtctggctatggtggtgcaggacccgctgctctgcgatctgccgatccaggttactctggaagaagtcaactcccaaatagccctagaatacggccaggcaatgacggtccgagtgtgcaagatggatggagaagtaatgcccgtggttgtagtgcagagttgccacagtcctggacctgaagaaggccatccagagatacgtgcagctcaagcaggagcgtgaagggggcattcagcacatcagctggtcctacgtgtggaggacgtaccatctgacctctgcaggagagaaactcacggaagacagaaagaagctccgagactacggcatccggaatcgagacgaggtttccttcatcaaaaagctgaggcaaaagtgagcctccagacaggacaaccctcttcatcactggtggctgagctttttcccagcaggaatgggtcctcgaatcatcgtgcctctttcacagaaaggacgttgtggtggcctcaccccaggcatgcccaacaggaactgtcagcataaacctgggggccctcaggactaggacagggtgagccagtgctccctcctttcatgtacttggcctgagactgacctctccctaggtccaaatgccctagtcacatggcagacccacggcctggcccactgtataaaataaacctgtttgcttcttagtttgaaaaaaaaaaaa

SEQ ID NO: 2634 - DNA, 1118 bp, Homo sapiens
  misc_feature (1)...(1118): n = a,t,c or g
cctggccctgattatctgttttttgaatagtgaccctaatgtgcttttccagttccagtaaacttttgaataaaatttttcagccagtgtcttccatctaggtcccatcttctgggtcataatgtaaatttcttcccaaaagcccagtggtggccactccagatatttgatcagaggattgagagactcaggctttttggtggaaaaagcataccagagcttctgttccattatatggtgtccaaagtgaatgccatttgccaaaaaagcgaagtagcaatattgccggcatccaacagcgtccatataaacggaggcagaattccatatgtcaaattggtcaatgctgtacctggacaggccacattggaatagagaccctgctggttgaagttcctgttcaaagccacactcaaaaggtcagtggcatatttggaagagctgtagggttccttgcctttgctgtgctggaagtcctcgaggctgaaattagatttccttgcactgcgagatgatgtccagatgagctgagatggattgtcactgtgacagaggagaggctccagttcccgaatcaggataaaatggccaaagacattggtctcaaacacctcctgaaatccatcagcagtgatcttatcaccctgggtcagcaggccttcagctgtggagaacatatgaatcacttttcttgaaaagaggccaaagaaaagtgctttgatatttagttgtggattaggcatgatcccagcatttagatatatacagtctaatctctgaaacctttgcttaagttccttggaggcccggaagaccgactgcaggttgctgacatccacctggacaatggtgacctcagcagtggggtgagaggccagcagagcagcacagacagcttctgccttgctcatgttcctgcacgccaaacacagatgaagctcatcatcttccgccagcagccgcttgcagagggccaggccaatgccactgctagccccggtgatcaaaaccacctttcgcatcttcgcgcactcacacttccaagcagtgaagnaagacgccaccgctgctttcggaagtcctacgatttcgggccgcctcacccgtcaccaatcaga

SEQ ID NO: 2635 - DNA, 851 bp, Homo sapiens
gtttcttgtggctgccatcattccttggtttgtgactgcatctccctctcctctgtcttcacatcacttcccctctgtatatataatctacctctgcctctctcttataaggacacttgtgacgggacttagggcccatccagattacccatgataattcccttattccaagattcttaattatatctgaaaggaccttttttccaaataaggtactatcacaggttccagggagtaggatattgaatatcttttttggggagggggcaccatgcagctcactacactattcattgcacacaaatgaatttttcactttttaagatgcattcttggtgctcaaaccagaacgagtttgtctctaaaagctattgtctgcacaggctgctgcatgctcgttgttaaatggatggacaggctattctaaattttggttgatacttttgctactatgggcaattaacttgaaaaaaataatcgatcccaactctgtgctctgatgtacctcttctgccccgtttatgacacctttgaccaaatgccttctatggttcacagtgcaggcacaaaactacctctgatacagaagggttctttacaagcttattttacataccgtgaatccctcacctaaagggagaggtgaaagcaaagactgctttgaatgggtattgagggagattgtgtccataccaagccaccctgaagaagtatttcacttgcagtagaactgtggatttgtgctgtcatttcaccttggaataaacacctatctctaagcaggaccaagaatgacttgcaatctatatgtaatggctacttacttattcaataaagttaagatatacgtt

SEQ ID NO: 2636 - DNA, 476 bp, Homo sapiens
  misc_feature (1)...(476): n = a,t,c or g
ggtgncccccttggacaccccccctttnnnnnnnnnnnnnnnnnnnnnnnnnnnnnnnnnnnnnnnnnnnnnnnnnnnnnnnnnnnnnnnnnnnnnnnnnnggcacgagctttgatgccaggccacagagtttgcagtcctttttggagactcaggggagttattgaacaattagaaactaaaggctgatgtgacctccacaggatactggctaaacgcatgaactcttgaaccagatggacctggatttaagtctggattctgccatttccttgctgtgtggccttaggcagattattaacctttctgagcctcagttttctcatctgtcaaataggagtgaaatacctcatacagggttgtgaagagtgaagtaaactaatgtggaaaaggcattctgcagtgtctggaattcagcgacccctcagtacatgttaacacactaatactttctacgtaatcatacctgtaacaac

SEQ ID NO: 2637 - DNA, 523 bp, Homo sapiens
caaaaaccatggcccacccaatagaacataatgaggagagtacagaattgcttctgggatatttctgacaaagatgtatatgcttcattcatacatgaggaaacatcacacatactcaagatgggagagccattctaaaaaataactaggcagaaatcttcaaaaatattaaagtcacggaaaccaagaaaaaatatgaacctgttccagattaaaggaaactaaacagacctaacattttaatacaatgtttgattttgaacttgaactttttgttatataagacactattgagacaagtgctaatgcttgaatagggctgaaggattagattataataatacattaatgcaaatttcctgattttaaacattgtagtttgattgcacaaggagaatgtctttatgtgtggaaaataaatagtcaacattctgtcttcaagcttctgagaaaactctgcttttagggcatagatagaagtggatgataattcacctgttcctctgctactaattgagctgct

SEQ ID NO: 2638 - DNA, 708 bp, Homo sapiens
ggatccccggggaggcaggtcccaggagcagaccctgcccccagcccccacagacacaccccaatctgaaagccatgcgtggtcggtgtatataggaaccatgtacagagcccagagaagccccctacatccccccgggaaaaaaaagaaaactagacagaaactcatctatatattctgtatctggagttccgttttgaatattaactgtgttatttttatacactttttaagccttaactcgccattgatttaccagtttaacgtttcctggggtttctttgcccatggggttctctgcccccacccccggccctttgtttgacttgcgtcgtctgatactcagtattgtagctttttgtccgcatgttactccctgtaaatacgctgttatacatactgttaacacccctttgctttttctatgggacctccaggccaccatatttagaactagttaccttattaaaaaagaaaaaacagtctgttggcttctcagtctgcatcttggaggcagggaggtgagggcaggtgcccctcagacacttcaggaaggtagtttgcattctatttaaaaaagggagtggggagcaaatgaaaatcaaatgtggggggaaaacactaaagggggcaagaaacaaaggaattacaaaccctctgctctttgtatttctctgttgtgaagaataaactgtacctgcacccgga

SEQ ID NO: 2639 - DNA, 717 bp, Homo sapiens
  misc_feature (1)...(717): n = a,t,c or g
tataaaacgaagcacataatagcaactaacttaaagggtgattctgatgttaaatgaggtagtgcatggtgagaaaccccattcagtgcatggtaagcactcaatgagtgttggctattactgaccttgaggagttcagaaatctttcccttgtaaaggagcttaatccattgcgtccttactgctcatccatttacgttcctggtcagtgatgtgttgaaggaatgattttttaatagaggcttcaaattttctttgcttataactgcagaaagtttagaaaaacaatgaattacccctgtgaaaatacaccttatttctgcatgccaccaagacctgccagatacacttcacccctatatttgtccaagataatatttctgaactataaagatatttgttttggaataaattagaaaagctactttagagaagaaaagttacagaattttactttttcttcacttacgtaattagaattcctatgcatggttttgaacaggaaattttccttgaccccttcacaggccttgcaacaggggtgcctcactttctcagcctgaagctctgaacccctcgggggaaggagagcatgcaggtgagcaagtgcaggagctagagcaagcactttgggcaccggcaagatcaaaactccatgcatcccacagcantgcctaaggtagtaccatgaccctggtgcccanaggnatgcnttaa

SEQ ID NO: 2640 - DNA, 415 bp, Homo sapiens
atttttccttgttcaaccaaaatctgagcattctttctatgttgaaaacactgaaaaactaattttagttaatgaactagaaagaatattgatttttaagaaacagaaaaatactacttattttccttctcaaataacgtttctttcaaaaacttctggctgaagtataacatgctggtagttaacataaatcttgtctttctcttgttctttatctttctttgttatttagatgcttgtataaatgtcttttgtttttattaagtgcctaattgacagagcttaatttgaagaagtgccctaatttattgaccacttaagaattgcctttattggggtattttatttgttcctgcgtctttttgatgtttgttcagtctactcatccctgtgagtatgtgtgggggacagctga

SEQ ID NO: 2641 - DNA, 587 bp, Homo sapiens
ttttgtgaaaaaccatagtatgccctttacttcatttgcttttagctatttcataaacaccacagagaaactggacacagtttgtgatgaaacttagaaaaatttctttttccataacataaacatgtcagtttttccctttagatccttcttccactcccgcttcactgtgctgaagagatattgagttcttccagatttttgcttagctgggtggtttccgaactcaacggactctccaggtaggtagttccagcacagggctttcctgtcactggatctatgacttttccaactttgaaaacgatctcagccagttcatgtttcacatgctttgctcgtggaacaggtaaagctctgagaagcacaatatccccaactgtgcactgctgaagggcatcgtgagcaaagtaggttttccgcttattaaaatactttaataaatagggatccagaacaagcctggtcactctcactttagcagtcttttgcatttttgtcccaatcaccttccccacaatccatctggcatggacggatgagcgaactacggacattacgtggctttggtcacctccgccaagact

SEQ ID NO: 2642 - DNA, 1086 bp, Homo sapiens
gggagggtctacacgaagcgccgctgggtctgggtgcccggaggcagcagcgttcgcggagttcgcccgctggcccccgatcaccatgtcggctttcgacaccaaccccttcgcggacccagtggatgtaaaccccttccaggatccctctgtgacccagctgaccaacgccccgcagggcggcctggcggaattcaaccccttctcagagacaaatgcagcgacaacagttcctgtcacccaactccctgggtcctcacagccagcggttctccagccatcagtggaaccaacccagccgaccccccaggccgtggtgtctgcagcccaggcaggcctgctccggcagcaggaaagaactggacaggaaagctgccgagctggaacgcaaggagcgggagctgcagaacactgtagccaacttgcatgtgagacagaacaactggtcccctctgccctcgtggtgccctgtgaagccctgcttctatcaggatttctccacagagatccctgccgactaccagcggatatgcaagatgctctactatctgtggatgttgcattcagtgactctgtttctgaacctgcttgcctgccatggcctggttctcgggcaacagctccaagggagtggactttggcctctccatcctgtggtttctgatcttcactccctgtgccttcctttgttgggtaccgacccatctataaggcctttaggtccgacaactctttcagcttctttgtgttcttctttgtatttttttgtcaaatagggatctacatcatccagttggttggcatccctggcctgggggacagcggttggattgcagccctgtctacactggataatcattccctggccatatcagtcatcatgatggtggtggctggcttcttcaccctctgtgccgtgctctcagtcttcctcctgcagcgggtgcactccctctaccgacggacaggggccagcttccagcaggcccaggaggagttttccccagggcatcttcagcagcagaaccttccacagagctgcttcatctgctgcccaaggagccttccaggggaattaagttcctc

SEQ ID NO: 2643 - DNA, 490 bp, Homo sapiens
  misc_feature (1)...(490): n = a,t,c or g
cggccctaggatttggtagccccgaagtgtgggctctctccagtaccagactcatttcagtaccagcctttgggaagtcgtgtgaatacctcggtctcttagccacagggatagaatggcggcctgacggagccgcggcgccggcgaagtcgcctgaggcgncgagctggaacccccagaccagctcaaacgggagccaaaactcgaagcttggaagaattagcaggaaatggcggatgaggcgttgtttttgcttctccataacgagatggtgtctggagtgtacaagtccgcggagcagggggaaggtggaaaacggacgatgtattactaagctggaaaacatggggtttcgagtgggacaaggattgatagaaaggtgagcaggttggatttgaaaatttttccttgcaaggtttaccaaaagatacttgcnaaggttcaaggaatgaagttagatatcatgaagttcaatttgtnaaagattttt

SEQ ID NO: 2644 - DNA, 347 bp, Homo sapiens
gaaacaatgtggaaaactgtgtaaatttattattctcttatctttaagaatcacagttccacagtcttaaatgcctattacattttttgtaataatagttcttgaggaaagtgctgaatcttgtattctgagtgttggggaactgtctctttccttaaccttggcccttgagaaaatatagctaattcacaactagcggtattaaaaaaaatgagttaacaactgctaatttatcctatagcaaagtgctagatcagagctacaacacatttaagtagaaagaaactagaaacatatatttaaccagaattaattttctagtggggctcaggataccaaggaagggt

SEQ ID NO: 2645 - DNA, 1068 bp, Homo sapiens
ccataatacttcataaccacagtaaagtattttagagctctctttgaaggaagcacatcttgattcatgaaatatctgaaacttcagaggcggcctaagtttttcttaaccatgtgacattagtgtgagtggaaaccaagagtataaacctaagccctatgtactaaacaaattacataagttaacctgttactgccacatcatacattcggatttaaatacgaaaaacaccacacagaaaacaaacatttttttaaaaaagatttaagatcataaataggtcattgttgtcacaacacatttcagaatcttaaaaaaacaaacattttggctttctaagaaaaagacttttaaaaaaaatcaattccctcatcactgaaaggacttgtacatttttaaacttccagtctcctaaggcacagtatttaatcagaatgccaatattaccaccctgctgtagcaggaataagaggcaaggtattagcactaagaaaaacagcaaaattcctgaacaaaatcatctgtcattttaaaaaagggataaaaaaacaggctaagtggtgagcattttagttaagaaggcccagtgttgttatgcaggactttccattaaaaaaaaaaaaaaaatcgaaatattttaactcaagtacgtttaattcaccacagaggagctaaaagaaaagagagggggttggtaaaatacagtatactttctttaaaaaagacttgggaggaaaaaaatcaacttagaagatcatatgaaagggcaatcacatggaacccagttagtgtcctagtttattactagtcttcagatccagaaaacagagtaagacactaggtaaacagaacacctaggcacatctgtaaggcatttgtttcctatcacacagcccattctagcttaacacccaccaactgagatgtagtgaaatactaaaactggatgctcaaattatgtttttatccaaccaaaaagttctttaaatataaaattcccccacttttaaactctggccctgggcttctgtgatacccacaggacttttaagggtttatggcaatatg

SEQ ID NO: 2646 - DNA, 584 bp, Homo sapiens
gaagagctgacgattagaacacagaagtttaaagcaatgttgtggatgtgtgaagagtttcccctctctctggtggagcaggtcattcccatcattgacctaatggctcgaacgagtgctcattttgcaagactgagagatttcatcaaattggaattcccacctggatttcctgtcaaaatagaaattcccttgtttcatgtcttaaatgcacggattacatttggaaatgttaatggctgtagcactgccgaagaatctgtatctcaaaatgtggaagggacccaggctgattcagcttcccacatcacaaactttgaggttgatcaatctgtgtttgaaattcccgaatcttactatgttcaagacaatggcagaaatgtgcatttgcaagatgaagattacgagataatgcagtttgccatccagcaaagtctgctggagtccagcaggagccaggaactttcaggaccagcttcgaatggagggatcagccagacaaacacctatgacgcccagtatgagagggccatccaggagagcctcctcaccagcacagaaggcctgtgccccagcgccctgag

SEQ ID NO: 2647 - DNA, 884 bp, Homo sapiens
  misc_feature (1)...(884): n = a,t,c or g
tttttttgagttaagggtcttgcgaggtcattctggacttggggtgggccttaaattcaatgaccagggttcttataaagagagcggccacaggaagacggaggagaaactggaagatgcagccgcagcaagggacacggtggccaccagcatgggaagaggctgggagctgccccagagcccctgggaagagactgtagccccgctgaccccgattccagatctctgggcctccactgagagccagcctgtcggaggcagcccggggaagctagtgtggcaaggagggcccagccggtctcggtgatagcccggggctttagcagagggccagcgcggtctcggggtcccccacgatgtccctgtgcaccagcttaaaggtgtcaatgaacagctccatccagtcctgccgctctaccccggtggcgaacttggcccgctcggcggtgtagaccagcacggccaccagctgggagtaggcggccgggtcctgcgtgagctccgtggcgtttagcaactgttggatcaggggaatggtccctggggaaggtggcgtccggcccctcttccgtgcggaggaaggtgaccgggggctcgccgcccaggccacggtgcatctgtttggcagggaaggtctgggcacacgatctgagggtccgggcagaggacgtcctccatgtcatcgatgaacttctcagcgaccaggtcggagaacagcgtcatgttgcgcacctgctgtggcttgtcgcaggcgatggagtagaggttttcactctcgtgcttctcgtggaacatgtccccgnatncgatggccgtcactgtgnancngngccacagcgccnncaagttgaggtcatcgtcccgagggtcgtggcgcccgtccg

SEQ ID NO: 2648 - DNA, 393 bp, Homo sapiens
gaggagctggtggaggtgagggaggcgctgagccgcgccacgctgcaacgggacatgctgcaggccgagaagaccgaggtggccgaggcgctgaccaaggctgaggctggccgcatggagctcgagctctccgtgaccaagctgagggcagaggaggcctccctgcaggactccctgtccaagctgagcgccctcaacgagagccttgctcaggacaagttggatctgaactgccttgtcacccagctggaggaagaaaaggccatgctgcagggccggcagcggcaggcggagcaggaggccacagtggcgccggcagagcaggagtggctggaggagctgtggttggagcaggaggtggcacggcagggcctggagggctcctatgaatgg

SEQ ID NO: 2649 - DNA, 1139 bp, Homo sapiens
gtatcctgaacaggttccctaaatagcctaagaggcccctaagaatgccagacgggggagaaaaaaaaacccaaaaaccaaaaaaaaaaagacacctctccaattgctgggagggcctgggaataggtgaagatcaaaccacagtgggagaggagggtaaagatgtgagcttcaagcgggtaaatggcaagccacacctcccagttccctaggagggaatcgccacggccgacttcagcattctcgtctttactaagacttacccatagagaactacagcaggaaaccgatttcttcattcattctctttaaaaagtatgaatgcccagtattaagcttctatttttatttgaaccaaacatattctttggttaactatgtcatgggttctcactataatcaacaaagcatacttcatatattttatatctaaatgaaaatatgcttaaaattcaactggaaccatggcatttcacatcaatttgagctcagcaatatgcctaatttggacattttaattttagaaaaccaatttttaaaaattcttaaatgcagtgttttcagaacatagttaccaagtcagagaataaccacttatattttaaaaagattaaaacattattatatcctcaaatcaacaatgtttttttgtgggaaagcttacagaaaattataatgttaaacctcatagccaaatcagttccttattctctggttttagaaaacacaaacaaaccttaagaagtaccgaggttccttctgacttaaaaggttaatgttttattcaggaaccaataacaataattcctcatcaaagacagctaacttagtaaggtcaattgacaaccacctctaacaacagaggtggcaaacagataaaaattgtttaacagagaaaaatattatttcagggttcagaatgatgttgaatactaggagactcaaacttgtaatccttgaaactgacagctagttcccttcaatactttaggggttcatagaagtattaacagaaatgggaaacatggtgatattacaactataaagacttgacatttttgttaaaagagaaagttcaaagacagttaaggggagtgttaaataatgctgactggggggaaatgatatagatacttgct

SEQ ID NO: 2650 - DNA, 665 bp, Homo sapiens
ggaaagttgcagttaaaggaagttatctattgttagcagaggagggggtcacaaggtacatggtggggagatgataagacccattgtccagaagaagaatgtcacaaggtcgatcaatcgatcagttaaggtaggacagggacaggtcacaatggtggaatgttgtaatgttggttaatcagttaaggcaggaactggctgttttacttcttgtgtggtttttggttgcctcaggccatctggatgtacccatgcaggcttgggctaagaggcctgaaacccaccactttcccatgtcaaatctttagtagatgtacccccaagatacacattcctcggaccttcttttccatagttaaaacttcacccctgaaatgtagaaacaggaaggtttttttttaagtttcagtgcaaactcggagcaagtgtcataattttctgtctccgatgtgtagaggtgacattttctcagaactttcatgttaagctggaaaactggaaagcgagtccactttgtcattctgtcactcactcattttctcactcaacaaacatgcctcacacttatctaaatctgctaggctaaaagaggtccctggtgtctgtaactttctaattctgctagaattctagagtgagctcatgaaataaatgaaaaggatgag

SEQ ID NO: 2651 - DNA, 358 bp, Homo sapiens
  misc_feature (1)...(358): n = a,t,c or g
ggaaaaaaacagaacactgcttcatatggagaagcccctcctgcccctcctggtcattgtccttttcatccctcccacaggtagtcactgagttctaataccacagagtcttttgactttcttttgagccttatgtaattagaatcacaaaagatgtattcttttgcctgacttttatacttagtattgtttttgaaattcatcttgtgtgtaactgcgatttgttcattttcattgcttagtgaattattccaaaagttggatatacctggttaaaccaccacccgaatgaaaaaaacagtttttgggccgggcacgatgggcttcacgcctgttatncccaaagtggaaacntttt

SEQ ID NO: 2652 - DNA, 162 bp, Homo sapiens
gccatggtgtgtcatgctcacttttgtgaaagctgctctgctcagagtctatcaacattgaatatcagttgacagaatggtgccatgcgtggctaaacatcctgctttgattccctctgataagctgttctggtggcagtaacatgcaacaaaaatgtgggt

SEQ ID NO: 2653 - DNA, 735 bp, Homo sapiens
agaagatgaagaaggaccaaaagcaaatgatcatagattatgattcagaaagttcatcctctgggcttggacacagtagtgatgacagcagttcacatggatgtaaagtaaatacagctccgcaggaatcctgaaaaataattctaatgttactatcttaggaatagcaaattatgtccagtcatagagaagaaagcttcataataatacattcttacctaaagctcactgtcatgatgttaggtatttaaattcttaaagatgttgggttgtttattagtggtatttttatgttgtcttattttaggtaagcttctgtgtaaagctaaaaatcctgtgaatacaatactatcctttacaggcagacattattggtaaacaagatcttgccctccaatgaaatgacttacatgttttaaaaaaccgagttggttttattgaatttaaaaagataggtaactaagtagcatttaaaatcaagatagagcattccttcttgtatcagtggggcagtgttaccataaacacggtgtatatgttgttaaaccctatgaagagtaacagtgtaggaccagactgcctctctcaggatatgtgcctggatattttgtgggatacctcccctggcactgggccaaaacactatgcttttggggtgttaggactggaaatatttttaaggagtatttaaacctttccagtattctgtttcacggcttagatgggaatggtatc

SEQ ID NO: 2654 - DNA, 742 bp, Homo sapiens
  misc_feature (1)...(742): n = a,t,c or g
aaaccctctcggaagaacgatggacccacgcctttgcgtgaggcatgatctcgagctcttccagcttttgaaattccaccgtattgtgaatgctctttacaaacacagtgacactcaaaaaggaaccaacaagaaaacataagttgcatttattcacgtccacgccatctaaagctactgtgtacagtaatcaggactggagaagggacgatttagtatctaaaaacaacaaaaaaaacactgggacatgccccctgaattgcaagttggagttcgtaagaatctacttgctggcaagccggtttcctccctgagaagcacacttcccgcttccttctctccttccagcgtcttctgtccctctcagttaaggcctggacagtgtgggatggtgttgcaatctctcctgcagagctgtcagtcgcccgtgggctcgggctgcgtgcactcaggctcccggtcgctgggctctgcgctccgccgccgcagctcctccaccgtctgcagcagggccgaccgctccagttctaaggtaagcatggcctgcttcagcttgctctcactgctcaggagcttctcaatggtggcctcaaggctttggatcctaccatttgccacctgcaactgttcaaggaggtcaaggttctgtttgcgtaagctgctgttggttttctctaatttatccattctttggttgtcactgagaggagaggaatcgataagttcttcntctgtgccgaac

SEQ ID NO: 2655 - DNA, 861 bp, Homo sapiens
  misc_feature (1)...(861): n = a,t,c or g
gcagaggcttcctcatggctcacaggcactctacgaagtttctaatgggcagaccacgcggcaggtagcacagtgcgctccgtctggtcaccatgagaccgacctgcgctgagtccccactgacctggagagggagggctggtgacagccgtgtcttctgtgttgagggaaatttatggactcagattcagccccagaggagatgggataattgttatggacccatgtgtgggcatgatcctgtggaacacaggtttgggatcatagatgtgaattaagacaccaccgagatacgggctgtgaggttcatactgtgctgatagcactcgtggtgtctgtgaaatgtgggtaagacattcaaacctggtttgatactggaaactcttcctttaaaactgtgaccatgatttcattcagcccctccacacccctatgtctgccttgtttcagagtgagttttctatggagcctgtggccttttgcagcccacctggtggcttcttaatgtaactcttcccctggtcgcctggagtggaccactcatctgcaggcctctcctgcatggggagggtaggcagggagcagcatgtctgcaggggtgaacctttgctcttctgtcaggcgaggcccaggctgcaccagccacctgccacatggtgacagtgccacgggccctgcgtatggcccctgcaaccgtgctctggcggggcacacctgggctgctgcaggccaaggccgcttgtttcagtgaagagtcccatgtttagttatgggattaaagtcccatnttttaagccattgccccagggttcccgtgaaccccagaaaccaggtcaaatgggaccacagtggccagatcct

SEQ ID NO: 2656 - DNA, 479 bp, Homo sapiens
  misc_feature (1)...(479): n = a,t,c or g
gtgatgatgcatgtaaaaaagcccagcaaacaggagcgttttacctctttcatagtctggctcctctgcttcagacttcagcacatcaatacctggccccccggcacagcctgttagagttggaaaggctcctgggtaaatttggacaggatgcacaaagaatagaagattctgtgctgattggatgctctgagcagcaggaagcatggtttgctctggatctaggtctggatagctccttttccataagtgcctccttacacaaacctgaaatggagacagagctcaaggggtctttcattgagctgagaaaggcactctttcaacttcaatgcaagggatgcctccttgctgtccacggctcaagctcttctccgctgggcatgatgctcattcagttcttgcaggcagaagtggggcagcccaccaagaaggaacgtgggntggcagcaagcgtgtgttgcccttccnattatttt

SEQ ID NO: 2657 - DNA, 1171 bp, Homo sapiens
  misc_feature (1)...(1171): n = a,t,c or g
aaaatggggagtgcactactatccagatttgatttggtctttatcctgttagatactccaaatgagcatcatgatcacttactctctgaacatgtgattgcaataagagctggaaagcagagaaccattagcagtgccacagtagctcgtatgaatagtcaagattcaaatacttccgtacttgaagtagtttctgagaagccattatcagaaagactaaaggtggttcctggagaaacaatagatcccattccccaccagctattgagaaagtacattggctatgctcggcagtatgtgtacccaaggctatccacagaagctgctccgagttcttcaagatttttaccttgagctccggaaacagagccagaggttaaatagctcaccaatcactaccaggcagctggaatctttgattcgtctgacagaggcacgagcaaggttggaatttgagatgagggaagccaaccaaaagaagacgctgaggatatagtggaaatttatgaaaatatagcatgctaggaacttactctgatgaatttgggaacctagattttgagcgatcccagcatggttctggaatgagcaacaggtcaacagcgaaaagatttatttctgctctcaacaacgttgctgaaagaacttataataatatatttcaatttcatcaacttcggcagattgccaaagaactaaacattcaggttgctgattttgaaaattttattggatcactaaatgaccagggttacctcttgaaaaaaggcccaaaagtttaccagcttcaaactatgtaaaaggacttcaccaagttagggcctcctgggtttattgcagattaaagccatctcagtgaagatatgcgtgcacnnnnnnnnnnnnnnnnnnnnnnnnnnnnnnnnnnnnnnnnnnnnnnnnnnnnnnnactgttctctgaaaaatgatgtcccaaaagtattataataggaaaaaagcattaaatataataaactaatttaagaaatggggtcttgctatgttgcccaaggttggtctcnnnnnnnnnnnnnnnnnnnnnnnnnnnnnnnnnnnnnnnnnnnnnnnnnnnnnnnnntgtgagctactgcatctggagactttatcacttcttaaattagtttattanatttaatgctttttccnattataa

SEQ ID NO: 2658 - DNA, 2208 bp, Homo sapiens
gacactggaagcagtaactttgccgtggaggaaccccgcactcctacatagacacgtactttgacacagagaggtctagcacataccgctccaagggctttgacgtcacagtgaagtacacacaaggaagctggacgggcttcgttggggaagacctcgtcaccatccccaaaggcttcaatacttcttttcttgtcaacattgccactatttttgaatcagagaatttctttttgcctgggattaaatggaatggaatacttggcctagcttatgccacacttgccaagccatcaagttctctggagaccttcttcgactccctggtgacacaagcaaacatccccaacgttttctccatgcagatgtgtggagccgggcttgcccgttgctggatctgggaccaacggaggtagtcttgtcttgggtggaattgaaccaagtttgtataaaggagacatctggtatacccctattaaggaagagtggtactaccagatagaaattctgaaattggaaattggaggccaaagccttaatctggactgcagagagtataacgcagacaaggccatcgtgggacagtggcaccacgctggctgcgcctgcccccagaaggtgtttgatgcggtggtggaagctgtggcccgcgcatctctgattccagaattctctgatggtttctggactgggtcccagctggcgtgctggacgaattcggaaacaccttggtcttacttccctaaaatctccatctacctgagagacgagaactccagcaggtcattccgtatcacaatcctgcctcagctttacattcagcccatgatgggggccggcctgaattatgaatgttaccgattcggcatttccccatccacaaatgcgctggtgatcggtgccacggtgatggagggcttctacgtcatcttcgacagagcccagaagagggtgggcttcgcagcgagcccctgtgcagaaattgcaggtgctgcagtgtctgaaatttccgggcctttctcaacagaggatgtagccagcaactgtgtccccgctcagtctttgaagcgagcccattttgtggattgtgtcctatgcgctcatgagcgtctgtggagccatcctccttgtcttaatcgtcgctgctgctgctgccgttccggtgtcagcgtcgcccccgtgaccctgaggtcgtcaatgatgagtcctctctggtcagacatcgctggaaatgaatagccccggcctgaccctcaagcaaaccatgaactcagctattaagaaaatcccatttcccagggcagcagccgggatcgatggtggcgctttctcctgtgcccacccgtctttcaatctctgttctgctcccagatgccttctagattcactgtcttttgattcttgattttcaagctttcaaatcctccctacttccaagaaaaataattaaaaaaaaaacttcattctaaaccaaaacagagtggattgggctgcaggctctatggggtttgttatgccaaagtgtctacatgtgccaccaacataaaacaaaaccaagccttggctcgttctcttctctcttcaatctctggaaaaataagtacatatagttgataacccctcttagcttacaggaagctttttgtattaattgcctttgaggttattttccgccagaccttcaacctgggtcaaagtggtacaggaaggcttgcagtatgatggcaggagaatcagcctggggcctggggatgtaaccaagctgtacccttgagacctggaaccagagccacaggccccttttgtgggtttctctgtgctctgaatgggagccagaattcactaggaggtcatcaaccgatggtcctcacaagcctcttctgaagatggaaggccttttgcccgttgaggtagaggggaaggaaatctcctcttttgtacccaatacttatgttgtattgttggtgcgaaagtaaaaacactacctcttttgagactttgcccagggtcctgtgcctggatgggggtgcaggcagccttgaccacggctgttcccctcacccaaaagaattatcatcccaacagccaagacccaacaggtgctgaactgtgcatcaaccaggaagagttctatccccaagctggccactatcacatatgcttactcttgcttaaaattaataaatcatgttttgatgagaaaaaact

SEQ ID NO: 2659 - DNA, 1715 bp, Homo sapiens
tctttttaaaatagacatttgtggggctcacacaatatatgaaatagtaccctctaaaaaagagaaaaaaaaaatcaggcggtcaaacttagagcaacattgtcttattaaagcatagtttatttcactagaaaaaatttaatatcaaggactattacatacttcattactaggaagttctttttaaaatgacacttaaaacaatcactgaaaacttgatccacatcacaccctgtttattttccttaaacatcttggaagcctaagcttctgagaatcatgtggcaagtgtgatgggcagtaaaataccagagaagatgtttagtagcaattaaaggctggtttgcacctttaaggaccagctgggctggtagtgattcctgggggccagagtggcattatgtttttacaaaataatgacatatgtcacatgtttgcatgtttgtttgcttgttgaatttttgaacagccagttgaccaatcataggaaagtattactttctttcatatggtttttggttcactgggcttaaggaggtttctccagaatatctatgggccacagcagcataccagtttccatcctaataggaatgaaattaattttgtatctactgataacagaatctgggtcacatgaaaaaaaatcattttatccgtcttttaagtatatgtttaaaataataatttatgtgtctgcatattgcagacacagctctgagagcaacagtttcccattaactctttctgaccaatagtgctggcaccgttgcttcctctttgggaagaggaaagggtgtgtgaaccatggctaacaatcttcaaatacccaaattgtgatagcataaataaagtatttattttatgcctcagtatattattatttaattttttaggtaatgcctatctcttggtctattaaggaaagaagcaatcagtagagaattcaggatagttttgtttaaattcttgcagattacatgtttttacagtggcctgctattgaggaaaggtattcttccatacaacttgttttaacctttgagaacattgacagaaattatgcaatggtttgttgagatacggacttgatggtgctgtttaatcagtttgcttccaaagtggcctactcaagaggccctaagactggtagaaattaaaaggatttcaaaaactttctattcctttcttaaacctaccagcaaactaggattgtgatagcaatgaatggtatgatgaagaaagtttgaccaaatttgtttttttgttgttgttgttgttttgaatttgaaatcattcttattccctttaagaatgtttatgtatgagtgtgaagatgctagcgaacctatgctcagatattcatcgtaagtctcccttcacctgttacagagtttcagatcggtcactgatagtatgtatttctttagtaagaatgtgttaaaattacaatgatcttttaaaaagatgatgcagttctgtatttattgtgctgtgtctggtcctaagtggagccaattaaacaagtttcatatgtatttttccagtgttgaatctcacacactgtactttgaaaatttccttccatcctgaataacgaatagaagaggccatatatattgcctccttatccttgagatttcactacctttatgttaaaagttgtgtataattgttaaaatctgtgaaagaataaaaagtggatttaaattaaa

SEQ ID NO: 2660 - DNA, 304 bp, Homo sapiens
aagtggtcgcagtgtctgcgaccggggctgccaacggcctcaacaatggggcaggcgggacctcggcgacgaccagcaacccgctgtcgcgcaagctgcataagatcctggagacgcggctggacaacgacaaggagatgttagaagctctcaaggcactttcaaccttttttgttgaaaatagtctgcggactcgaagaaatttacgtggagatattgaacgtaaaagtttagccatcaatgaagaatttgtaagcattttcaaggaagtgaaggaggaacttttaaagcataagcgaagatt

SEQ ID NO: 2661 - DNA, 1115 bp, Homo sapiens
ccttaacgagagccgcgagggcagcggccgcggcgtcttcaagccgtgggagcgagcggaccgaccgctccaagtttgttgaaagtgatgcagatgaagagcttctgtttaatattccatttacgggcaatgtcaagctcaaaggcatcattataatgggagaggatgatgactcacacccctctgagatgagactgtacaagaatattccacagatgtcctttgatgatacagaaagggagccagatcagacctttagtctgaaccgggatcttacaggagaattagagtatgctacaaaaatttctcgtttttcaaatgtctatcatctctcaattcatatttcaaaaaacttcggagcagatacgacaaaggtcttttatattggcctgagaggagagtggactgaggcttcgcccgacacgaggtgaccatctgcaattacgaagcatctgccaacccagcagaccatagggtccatccaggttaccccacagacacactttatttcctaagggctggccaaggctcccatagaggcgctgtgtcagtgaagatgtacgactacctgttgggaaggacaaagggatgaggctccagagagagttggctgccacagcctctgccaagctttgtctttggggcttgctgcagaaacctggcctacggaagatacgacaccactgggagggttgtgtaggtgccaggggaccatcgtggttctctagggcgctgtggaaattgggtcttgggctgggtggcatctggcagtcatgggtaacacttgcttttccagttaatgtggccatgtgattccaagtgtcatgttgctttgtggcaagattgttgtgtgacttgtttttttgtttttgtttttgtttttttaaaggaaactatttgtgggctataggaaactttctgatgcctccggattgtgttagtagtagccatcaggagggtctccaactaaaacacttgttccctgcttgctcctttcccctctcattgttcagcattcttgtcaagttgcccagcttggagttgtctgtcacgcacatgtgtcctgtgggttataggctaggaagggacagggagtcttccctgctggatgcgtt

SEQ ID NO: 2662 - DNA, 583 bp, Homo sapiens
ctctgactttccccctattatcatacctagaatataactacagaattatttttatacactaggtaacatgctagtcttatagtgtattggtagaaactaaggcttgttggtgacagcttggtaatagtattctacagattaaagattctctttttcccagtttttggaggggccttttaccatcattttggtgcctttcttatatttccagtttctgaatattaaacgacagttaagattctaaagctctattgtccaatacagcagttaccagcccctgaaaaatcaggtttttaatcacactagttacatttcaagtgctcagtaggtgatcactgtaagaagttgtactgggcaatgctgctctaaagggtagctgtggtattatgagtgtttcaatactgataagtaacatcgggtttgacccttaaacattgctgctttggggattgtattggctttttatgcctcattgtataacttgagttaccttgaaaggctggaaacaggctttttgatgtaaacttttgaggatctttatgaggttaagataatcttgattcattctactttgagtatatgt

SEQ ID NO: 2663 - DNA, 907 bp, Homo sapiens
  misc_feature (1)...(907): n = a,t,c or g
gggggaaaaagtctaactggcggaactcctgggaactggggcgatgggctcttagtatcggaggattggagccatctgatttttacctgaaattccttagtctctcctgtgttggggaaatggtcaccttgccttcatggacctgggctttcagctgtccatacctggccctggttgatggcggcatgctgggcagtgcacgtgaagacgcacannnnnnnnnnnnnnnnnnnnnnnnnnnnnnnnnnnnnnnnnnnnnnnnnnnnnnnnnnnnnnnnnnnnnnnnnnnnnnnnnnnnnnnnnnnnnnnnnnnnnnnnnnnnnnnnnnnntcttaaaaccacagtatttctaggtcagtataacacacctgccccagggacttacaggtgtggcagaagcttggacttctggcttttctctctcttgcacccaggcacgctgcagctaccatttcctcccttcactacgttttagattctttccttttcattcctgtcattaccatgctaacgtacatctctatccaccttgctgttgggcaggtatgagcggcttgctggctgttcttccttgccttttggtctgtttctacttagctgactcctcaattgggtagaaacattcttcatcaatactatactgttataggctgtcccttgtgatttcaaactctagtaccagatactgttctctggttggttcttatgggcatcacttgtttttctggctaaatactagatctaaggtaggaatatggcttttgttttactagcagtgttcaagccctactgtgagcgcactgctagactgtcagatctctgagaatttcagaggattcctatataatgttaagtgactaaacttaataaacttaattaaaatcaacatctcaagatattgaaaaaa

SEQ ID NO: 2664 - DNA, 1087 bp, Homo sapiens
gcgtccgctcgcccggaccctgaggctgctgggcccaccctcccggaaccgtccgaccctcggtggcctcggctcgttctgccatctccggtcctaccctggggcggagggtggaaggcagcttccgtcgaagaggagggggctgcggtggccacccgggcggagccgagttattttaccaagaaaatggtttgcacgactttgaacatatactatccatgctgatgggacaggatccaatatgaatataaatgatggaggaagacgacgctttgaagataatgaacatacattacggatatatcctggggctatttcagaagggacaatctactgtccgattcctgccagaaaaaactccacagctgctgaggtgattgagtctcttataaacaaacttcatcttgacaaaacaaaatgttatgttctagcagaggtaaaggaatttggtggagaagaatggattctcaatccaacagattgtccagttcagcgaatgatgctgtggccccgaatggctctggaaaatcgcttaagtggagaggactaccgcttccttctgagagagaaaaaccttgatggatcaatccattatggtagcctgcagtcatggctacgggtaacagaagaacgtcgcaggatgatggaacggggttttcttccacagcctcaacagaaagactttgatgatttatgtagtttacctgatttgaatgagaaaactctcttagaaaacctacgaaatcgctttaagcatgaaaaaatttatacctatgttggcagtattctaatagttattaacccattcaagtttcttcctatttataaccccaaatatgtcaaaatgtatgataaccaccaactgggaaaacttgagccccacatttatgctgtggctgatgtagcttatcatgccatgcttcagcgcaaaaagaatcagtgcatcgtgatttcaggagagagtggttctgggaagactcaaagcacaaactttcttattcaccaccttactgctctcagtcagaaaggatttgccagtggagtagaacagattattcttggagctggaccagtacttgaggccgtc

SEQ ID NO: 2665 - DNA, 369 bp, Homo sapiens
  misc_feature (1)...(369): n = a,t,c or g
gtgatgctgctgcgtcagcatcgcaaagtggtggagttacaggcaggatcgacggtgaaccagccagcccaccgatgttgagattacaaatggaagaatagcaactttacagtggaaaaacctagtgatgattaccttaaccaagtgaataaagtgaacgtccctaggactgggacgagtaagtatccagggcctcctgacatgatgctctggaaatgacatgacatcgcttctgtggcacgcctgtctcaaatgcacaacccaaattcaatcaggaggaatcnnnnnnnnnnnnnnnnnnnnnnnnnnnnnnnnnnnnnngtaaacctatattcttggaaaacatgggaggatagaagtagtttcagc

SEQ ID NO: 2666 - DNA, 415 bp, Homo sapiens
  misc_feature (1)...(415): n = a,t,c or g
agataatgcatttttttagggctgcacatttgattatcattgtgtttcaataggtttaaatggtgttgtgtatcccttgagagcagtaccacccttgagagcagtaccagtttaatttgtcattgatgaaatgaaactttttttctttttgtctcctctattaggtttcagcgttaaaaacaatggccagtcagggaggccccaagtatactctctcacagcagccttgggcacaaccagcaaaggtcaatgaccttgcggcaactgcatataagacaataaaaacaaagctgcctgtgacattgagaagtatgtccttgtacctatccaataaagataccgagttcatcttgtttaaacctgtgaggaataatattcagcaagtnttccagaagttccacgctctgtttaaagg

SEQ ID NO: 2667 - DNA, 472 bp, Homo sapiens
gatccccatcacctttaggggttccctgcttggctcctttccagctgaaaaactagacctgtgccattggggaagctggacaaagtctagggggcccgcctggtagagggtcccgggaagctggatctgtcagcctcggccctgaggcccctgttaactcaagactgtgagctgcctctaggtggtcacgtctgggagctagcttgtatggcttctgaccagtatcaggatttctgttctgagagcagcgtgggcagcaaggcagggcagcccagaggtggcagcggcaggcaatctggtcactaggtctttgtgatgccaaaaataaaagagggtggggtgggtgctttctgttcctctgattggatggagtccgccagcaggcatggggctacattccagtgcctgactatagggaggcactcctgattccatggagcagcccggactttgagaatgggctctggtttgc

SEQ ID NO: 2668 - DNA, 671 bp, Homo sapiens
tttttttttttaatttttaataacaatttatttccctttaaaaagatcaaatgtttttctcataatatattattttacaacaacaaagaaaaagaaagagagaaggaaagaaagacctgaagagaaagaaataaccagattttagctcaaagagtatagcctgggattaattttttaagatttgtttgtcaatttcaaaaactcagcagtggaataaagagcttaatacaggtatgcaaaaaggaagccctcgagatgttttcaccaggatgaaatgggattagctttgtagttcctataatcttcttcacagaagaatgcaatttcagtttcactggcgattccagctgctttcagagtgctgtcttctttcagcaggagtctttcgtcatcttccaaactcaacacaagttcatttgtctttgatttatgtgcttgatgaataatctttagtgcatcatatttataatttctgaatggtggtggcaggttggtccttaaagggacatcttgctttagaaatacgataaattcctttacagtttggtccaaattcactccgtgatacactacaggtttgaaattgcgatgttcaaaggaacggatgaggcgaactgtgatggtcacttctccaggagccatgtgaagaaattcctgttcccggcgtcccc

SEQ ID NO: 2669 - DNA, 1728 bp, Homo sapiens
aaaagctagtttcctgagtgaacaagccataacctcccctaaacaccacctaggtatttgttagaagtcacactattactccaatgtcatcagacacctaaggtctgccagccaggctcctggctgggcaatggaagatggtgtggccctgttagtctccgtgtgtggcttactagccagccttgggaactgccaactcaaattctaagaaagccactgctttctcatcatcactctataccaatacttatttctggccaaatgaatctgcttctctgcccctcaaacttttagttcacaattcatcttctaccttaacttggggcttcttggggcctctggccttccttacttaatgtcttcttttccctactctaatgcatttctaactcactttggagctttggttttctaatgtattatccccacttgccagtcaactggaccccttcctcctcggtttcaggactgcctacattaggaaacaatggcagtcaaacccatggctttggagaaagtaaatgtttgccagaaaggaatactagtcacagtggcctttgtgagttgctgcaactcagctcttccccagcacagatcttttccccttatcctgcagaaaatcaagccctgactctgcactccccgaagtagtgatgttaattaacaactgaagaggtaactaaatctcacatgcaggtctaatgactaataattggagtacggctgctagacaactgcattttagtatttctcttccattctcctggttttgtagacccagaagattgaatgagtgacataaatctttagttcggggcaagccagggtgggctagggtggtaagctggaggacttcatccttcagttaggctgcacaagtaacattacctaaaaggcactaacatgctcaggttccccagaaagaggcgtaagaagggcctctccttaggcagagcttccacctgccatccgtcttgggttcagtgagcttcaaggctcacaatggggaaggcactgtcattttccccaggaaaagctgtgttccctatgctgaacacaccatacacattctcatctggaatctaaggagcagcttttaccctgatccagtatcctgaggaattttaagcctccactcaaatgacctgcctgtgttgtcatttccatgggaaagaactctttccacgagatctgctagttccaggcctctaagacaggaacgtatgtgccataagtgggtctacttcacagactcaatgaggcagaaattattgtagttttctcctatttcttctgcacccaactttctccttgtatttcaaaggccaggcccatgtacactaacgtccttgaaatttgcagttctgtatgcttctattccaaatcattcattaccaataaaaacgaaataccaccctttccattttatagacctcatcccctatttctgtcagacagttatatgacagggtgactgtggaacctcttagttcatccaaagtctacctgaagtgctagactttcagactcttatcactgaaatccttaaggttgaggaggctttatttccctagcactggtgaagggcttcaactgtcaaacctcagaacaaatgcattagggccttagaaatgtcaatggggcaggaagaaaacacaatttctaactgcctgtttttgtataatttaataaaaaccttttaaacattaaaaaaaaaaaaaaaaaaaa

SEQ ID NO: 2670 - DNA, 886 bp, Homo sapiens
gtgacttcaacatgatagaattttatttttctctcccacgctagtctggctgttacgatggtttatgatgttggggctcaggatccttctatcttccttttctctatccctaaaatgatgcctttgattgtgaggctcaccatggccccgctttgtccacatgccctccagccagaagaaggaagagtggaggtagaagcacacccatgcccatgggtgggacgcaactcagaagctgcacaggacttttccactcacttcccattggctggagtattgtcacatgggctactgcaagctacaagggagactgggaaatgtagtttttattttgagtccagaggacatttggaattggacttccaaaggactcccaactgtgagctcatccctgagacttttgacattgttgggaatgccaccagcaggccatgttttgtctcagtgcccatctactgagggccagggtgtgcccctggcattctggttgtgggcttcctggaagaggtgatcactctcacactaagactgaggaaataaaaaaggtttggtgtttcctagggagagagcatgccaggcagtggagttgcctaagcagacatccttgtgccagatttggcccctgaaagaagagatgccctcattcccaccaccaccccccctacccccagggactgggtactaccttactggcccttacaagagtggagggcagacacagatgttgtcagcatccttattcctgctccagatgcatctctgttcatgactgtgtgagctcctgtccttttcctggagaccctgtgtcgggctgttaaagagaatgagttaccaagaaggaatgacgtgcccctgcgaatcagggaccaacaggagagagctcttg

SEQ ID NO: 2671 - DNA, 301 bp, Homo sapiens
  misc_feature (1)...(301): n = a,t,c or g
catgcctgaccacaatttgtggttccaagagtgtgatttttatcatcatttgggaggatgttggggcctctggcatgactgatgactgtctctgagtgggagtgggctttgggaagggcgatggggcttgctggacaccccattggaccgtcattttgatgtaggaggcctgtgggttgtcttgccctttaaatgtgggttggtggaacaaaactctggtttgttcaacagggcattntaggaatgctttttgnccccctgcacagtggggtagggtantttcccgtttttcccttccacc

SEQ ID NO: 2672 - DNA, 552 bp, Homo sapiens
  misc_feature (1)...(552): n = a,t,c or g
aatttgaanccnttgacnnnnnnnnnnnnnnnnnnnnnnnnnnnnnnnnnnnnnnnnnnnnnnnnnnnnnnnnnnggcacgaggttgagagtgctttccggggaggcgaccgccgcggtggaaagtgcaggagtgggcgaggaggaggaggaagaggaggccatgattgattccggagcgcagttaatcaaggcataatggcatgattttcagttttgctcataaagtttgccagtaccaccatccatttcaaaaatcgtatccaagcacgaaggacttgacacagcaagcaaaagacatacagaacataacagtccaggaaaccaacaaaaataactctgaaagcattgaatgcagcagaataacaatggatctcaagttcaacaattccaggaaatatatttctatcactgtgccatccaaaacccaaacaatgtcaccacacatcaagtcagttgcgacgttgtggtcttgcatgaatctcatcaaggttacaaacttactcagttttcatatgngttgctggagtttttgattttacctaattaatgg

SEQ ID NO: 2673 - DNA, 823 bp, Homo sapiens
gtttaagcacccagcctaagctactgcattgtttaaagagcagcatcaaggacactttctccaaactggaactctcttctttgtcaaatcttgtactttaaaattctacaattctgttacattgttgtttaaatcacagactgctcagatccattttactgcagtagtttccaagtgtgtaacttggctttagtatttatcagttgccagaaagaaacaggttgtcatttggaagtttttgtggttattttttcccatttttattcttcagataaaagcagtaccccaaaatagaaaatgaaaattttcatgaaacaaagagaactcccttgttaaaaccagcttattaactctgtattctgtcaaatgcatttttttctaacaactgaccatggatgttgtgaaggtgcattttaatttaaacatggaaaagatttttttcataattacatactaggaatgtaaaattataattttgccatgacttaaagagcacagttgatatcccaaaggttttgatgctaagaagctacagttattctaaatgcactaaaatgtttgaggcaaatctaccttagaggcttttttggtatggtattttttaaaatatttagattttatttaaatttcctgtgagttattctgtatttgaaaagatgttcgtgtcttcccctctgtattgaatgtttcactcattttatttttaatcaaatattttatagaaatgagttgttgggaagagtttaacatgcactatttatagtactttgccgttaacaggcaatgttctgaaactaaattaatttttgttcagggaccttaa

SEQ ID NO: 2674 - DNA, 985 bp, Homo sapiens
ggaacagggagcagacgttctgcaagtagggagcacttcatgagtggcaagtgtggtgtctctggtggtgttccaacggacactccctctggaatgtcatgagaattaaaaactggggcataagggaagaagatggctgagaatggagcctcggtttctatgtctgtaaaacaactgccaggaactcctgccaccgccaccggctcccatggcccacatacccagtgggggtgccccagcagcgggggcagcccccatgggcccccagtattgcgtgtgcaaggtggagctgtcagtgagtggccagaacctactggaccgggatgttacctccaagtccgaccccttctgtgtcctctttacagagaacaatggcagatggatcgagtacgacaggacagaaaccgcgatcaacaacctcaaccccgccttctccaagaagttcgtgcttgactaccacttcgaggaggtacagaagctcaagttcgcgctctttgaccaggacaagtccagtatgcggctggacgagcatgacttcctgggccagttctcctgcagcctgggcacgatcgtctccagcaagaagatcactaggcctctgctgctgctgaatgacaagcctgcggggaagggcttgattacgatcgctgcccaggagctgtccgacaaccgcgtcatcacactaagcctggcgggcaggaggctggacaagaaggacctctttgggaagtcagacccctttctggagttttataagccaggagacgatggcaagtggatgctggtccacaggactgaggtgatcaagtacacactggaccctgtgtggaagccattcacagtgcccttggtgtccctgtgtgatggggacatggagaagcccatccaggtcatgtgctacgactatgacaatgacgggggccatgacttcatcggcgagttccagacctcagtgttcacagatgtgtgaggctcgagacagcgt

SEQ ID NO: 2675 - DNA, 1693 bp, Homo sapiens
  misc_feature (1)...(1693): n = a,t,c or g
tcgacttttttttttttataagttcatccagctttattgaaacctattacagaagacaatccaaataaaaccactgtctcctgtagaaatctgagttatgttgttttactacaaaagaatataaaacacattaaattacagtgtgaaggaattttaaaaatgaacagtgtatcctcattaaatgtttgcaaagtttcttcctaagcacttacaactagttacagctcttttaaaaattcagatttctacactcagtttaacgggagagacattcacacttaggtacttcagccccaactttcacggactattggaaattagaaggtactttgttgctaagtgaaaaaaatgcacattttttcatatcagggaaaattatactggacttaacagttttaaatgagcaataactcagatatattagagagaaatcacctcttgccttacaaataccaaataaattccctagactcccctcccctgtagagaccatcagctcactgtgaaggcttgagcctcagtaggtaaaatttgaggaaaaaaatgagaaatggctaaaagaggcatctgctgcaggaaccttctgtgactgtcaaacattccctcttcaagctcccttttaaaacccagtccattcccaacatcactgaaaatgaaaagaataaacttgctggtcctcatgtcaaggcagtgttttcattgtctcttgatattttatcccatttcctattgacaacatctcccctacccctgaaattatttagaggttccctctatgacaaacccttgcttttttttagctttaggtataacactgacatcttttgaaaaacgtgttagtaaatactcaagttctggcctcaattcctgatgtatgaagcatggaagcagtgctgtcctgtggagattgcttttgcaccaactacacaggaaggtccttgacctctaagcatgcctttagaggttagaattcacagaaaacaaattcaattgtcaaacacctgttcctaattttgtgcaaagcaatacaacatagcacaactccatttgttgtttttcgttgtnnnnnnnnnnnnnnnnnnnnnnnnnnnnnnnnnnnnnnnnnnnnnnnnnnnnnnnnnnnnnnnnnnnnnnnnnnnnnnnnnnnnnnnnnnnnnnnnnnnnnnnnnnnnnnnnnnnnnnnnnnnnnnacctccatttattaggctatctcatgcaaacttaaaattaaaaaaataatcccaggccccaatgtagatcatgaacctacttaagactcattatggtaaaaacaaattcttacatttttctgtctttctaaaagtgtagtggttatggctaaagactaatcaacattacagatccaatctgttgtcaaagaacacaatttctgacctggtaacaaaattgttctgataatctgacacatggccaagattctcagacaagaattaaaggcattcttttggattctgtcctttaataactttcagaggcttccagctcagtaaagacactgatcaaatcttggtaaaaatgggctcgtgtgcagactttaggtgatgttcttcagcaaattcaacaggccaaaggagtgtttgtcactgacagagctctcaccactcactggttctgtgccagttttccatagcctcctctcccagcatcgtagtcctgccgatactcaacccga

SEQ ID NO: 2676 - DNA, 349 bp, Homo sapiens
  misc_feature (1)...(349): n = a,t,c or g
ggcgaccgccgcggtggaaagtgcaggagtgagcgaggaggaggaggaagaggaggtgatggcgacggaccaggggagggggagatgctccgtctagctcagacgccacgcaggctgccgtcacccttccgggtgacataccggccttggggacttgacacaagcanaagacatacanaacataacagtccaggaaaccaacnnaaataactctgaaagcattgaatgcagcnaaatancaatggatntcnagttcaacaattccagganatatatttctatcactgngccatncanaacccaancnatgtcaccacacatnaagtcagttgacgacnttgtngtactt

SEQ ID NO: 2677 - DNA, 837 bp, Homo sapiens
tttttttttttttttttttgctaggcgattacaacagctgatttttatttttcttcttgattctcttctacagtttccaaattctctacaatgaacatgtacttctttttaatatcaaaagacaaaagaattggtacgtaaaaagaacatccttcccatcttcaaggtcaagattgaacgctgactcctgcaggaagtcttccaggattcccaggcaggaatgatggctccctgtccctgtagctccaggagttcttgcttcacgcacgcctcacataccagactgaatgttggcaggaggagtgaccaggtcggtcatctgtgtccctaccacctacaacaggccagcaatctacccgtgtgtgtttgttggacagaattaaccatgatgggcggccgagggcgcctggagctatttgggggcttggagagaacctcttaggagagtgtcaggctctaggccagtgtcaccagaggaggtcagtctcagtccttggagtggtgggatggaaaccagacgggactggcatggtccacagttcttgccacaagagggcttcaggagaggctgagggcccctctgaggcgtgtgcttggtcagggtgagcaagggcaatgcagctcatacaaaggcccagatggacagagggacctagcccagcccacgcatcggtaccgagcctggctcaggggcaggccgaggcttgtgcagtagacaaacatttacagcagacaccaggcagctcctggaaaccactccccaaaaaacagcattggaatcggggacccccagctgtgaacgaaggagcaaggaggccctgggagaggaggagaacg

SEQ ID NO: 2678 - DNA, 643 bp, Homo sapiens
gacgggcgatggctgtggtccttctgctaatgcaaacaacaaaacgggcacactagtcacccccgagggaggccaccatcactgtaactgttggccaaagctacaaaagaagcgagggaatccaaccgagcgcaggccaactgagaacagcttcacctgccttctgcggcggcagaagtgaagtgcctgaggaccggaaggatggtgcagtcctgctccgcctacggctgcaagaaccgctacgacaaggacaagcccgtttttttccacaagtttcctctttactcgacccagtctttgtaaagaatgggaggcagctgtcagaagaaaaaactttaaacccaccaagtatagcagtatttgttcagagcactttaactaccagactgctttaagagagagtgcaacaacaagttactgaaagagaatgctgtgcccacaatatttctttgtactgagccacatgacaagaaagaagatcttctggagccacaggaacagcttcccccacctcctttaccgcctcctgtttcccaggttgatgctgctattggattactaatgccgcctcttcagacccctgttaatctctcagttttctgtgaccacaactatactgtgggaggatacaatgcaccagcgg

SEQ ID NO: 2679 - DNA, 393 bp, Homo sapiens
ggaaatgtttgtatggaggacagaaataattcatttcatggagagacaagaggatcactggcagtaaaactgcaggcattatttatgggagactcaaaggagggaatgccccgtgttggcgggcctgcctttcaatccttgtcacaagtcatgatccagaagctcggccaattgaagaaagggtctccatgaagtggagctcatgacctgcctgcatcagcatcactgggggcattttttaaaaatgcagataccagcactgctgggggctggggttgggagtctgcaaactcccctgctggttaaaattgcaaactgaggtttcagaactattgtgccaaagaatcataacttgactccattggggaagtaatggacccatggttttgattt

SEQ ID NO: 2680 - DNA, 942 bp, Homo sapiens
gaaacagcaatgccaaaaggaacaagggggcctggaataggaaatgcctctctttctacgtttggttttgtgggagctgcgcttgaaatcattttgattttctatcttatggtgtcctctgttgtcggcttctatagccttcgattttttggaaactttactcccaagaaagatgacacaactatgacaaagatcattggaaattgtgtgtccatcttggttttgagctctgctctgcctgtgatgtcgagaacactgggaatcactagatttgatctacttggcgactttggaaggtttaattggctgggaaatttctatattgtattatcctacaatttgctttttgctattgtgacaacattgtgtctggtccgaaaattcacctctgcagttcgagaagaacttttcaaggccctagggcttcataaacttcacttaccaaatacttcaagggattcagaaacagccaagccttctgtaaatgggcatcagaaagcactgtgagacgcacagacggcgtcttctgccaccaagagacccgagaactccagattcacgacattcctgtcccatgtagaagcatttccattcaaccgtggcccctcttcagaacctagacctatcagtgccatttttttttcataatctacgaagaacttggctatggctgatcttttttaaatttaactttctgatggaccctgtagtttccagttaagtgcagattccttacagacatatagaacagcgcattcttctgtagacatttgctcatgttgggtaaatacaatcacccatatgaaaaaattggttttcacctgatatgaaaatgttagaaaaggcaaactccgggacttctaaagatttacttaaatcccattatgtactttattcagaatgtagaagctgacttgaaaggcatccttggtactaagtgaa

SEQ ID NO: 2681 - DNA, 1712 bp, Homo sapiens
gaaaaaagatcacagaataattttatttataatgaatgttattctctccagacttcaactcatcagtttactcttataacagagaatcaatttaaataacaccatcaaaatggaatgaatataaaacaatctgctattacgtatcgatttctttgataggatataattatagccaattagtcttgcaacacatggtccatttccagtgaaattctcaataaactgctaggaattacagtccttcatattgacattttattgtaaagtctgctagacgtggctctcttgattgctttggaagtcagtcaaacaaatgctctgaagaaaaggctgacaccgcaaaacaacttcatatgaaatctgtccacaaatgggatagcaatgcctccagatcctttggtttttatcagtccctttggaaagttaattaattgatgattgttcccttaaaattctattttaaataggacaatcactgtctatacagtctgtgccagcgtccttgactttcttgcttccactgattggttatcaaatcatacagtgatggtagtcttattttatcccatatttttgctgtaaacattaagaatataccaaggacaactaacaaaccagaccatacatactgaaacgtgaatggtttagcaaagaatataaacgaaagtacaatggtcattgcttttcttcctgttgtcactgttacagcaataagtgcaccaaaaattttaatcaaagccagaacaaaggagattccaaaatatccagtgagggaaaaaaggaacgcataaccataggtccgaactggattctttgcacaaaatgttactgcagggcctaatccactagtgcatgtcaatcccagtaaaatgtatacaaaaccaattgaatacgaatacaataccatttcagaattagaagcattatgaagtttcatagctttctcttgaacatttccaatgacggcatctcacatagtgccagggaaataagcaccacacccgtcaggttgaaatttggtgcagttgtgctgtcagcgagggtaaaccatatcaggccaaggctcatacatatggcagcagacacatctgcaacattataacgctttccttgaataaaaactcctcctagcataacaggaatcaatttgcagcacttgaagatgacttgggtagggtaattcaggtagcccaaggaagtgtttgataaccccatagtacccacagttagaaaagctattatcatgtaggtttttcctggtattctcctccttttgtcctgaataagctgaagttctattaggccaaatatggagtaaaaggcaaactgcactaaggtaaggtaccagccacaggacttaaaaccctccactgaaaatattaattcctgtaaatacccataaattaggtaaaatacaaaaactccagcaacacatatgaaaaactgagtaagtttgttaaacttgctgagattcatgccaagtaccacaacgtcgtcaactgacttgatgtgtggtgacattgtttgggttttggatggcacagtgatagaaatatatttcctggaattgttgaacttgagatccattgttattttgctgcattcaatgctttcagagttatttttgttggtttcctggactgttatgttctgtatgtcttttgcttgctgtgtcaagtccatgccattatgccttgattaactgcgctccg

SEQ ID NO: 2682 - DNA, 939 bp, Homo sapiens
ttttttttttttttcaaattttatattaattttatttaagtatacacgtcatataaaagtttcatctcataattttaaagacacataattacttatatatataatgcttcaaactactttattaattatcattaatccttttggtccctgaatctgcctttgcttcctcttctaaggcttgatgcagaatataactgcccatggagggcaggggacaagaaattaagggtcccagggagacccagtttcagttatccttgatgatgctgagaggcattcagcaccacgaacatgttgttcaaacataaatgagaaaataaagtatctgaacaatcttcatgaggtttttccacacaaagtgtatttcacatttctatagatttaactactaacaagctacatccaaggaacttaactactactgaatcctcggaggtatcatcaatatccagcttccaatttccactctctaaaatatttctccattgtgctcctagatttccaggtgcccacatttacagtaggtatgattttctggggcttcagccactggacaaagcgcttcatttctaggtagctgctgtgttcactgtaaggaattccatatattgaaatgtttcctttggtctggggaataacatctgctattctagtgaacttgttagagtgtgtccatcctgtaggtcgaaatgccaaaatctgattgtatttcccaccacacttcttcaaatgactctgtaagcccttaaaattaatttgcatcattgggagaaggtgaaccaatgaactgcacatgtcggtagtgatgagtgaattaatttctggtatattgaggcactgtagagttttatatttttcctgggacatgcccacttttgaacctaaaacatcagcaatggctaggaagactttctcttttccaatagagtaagtcccaca

SEQ ID NO: 2683 - DNA, 369 bp, Homo sapiens
tcagttggacaatcaggattccccaagcccctgactgctctcccttttacaactggatcccaagatgtctcgaatgcattttcaccatccatttcgaaggctcaacctggtgctccaccttcctcactgatgggaataaattcttatctgccttctcagccaagtagtctccctccttcatattttgggaaccaaccccaaggaattccccaaccaggatacaatccatatcgccatacccctgggcagcagcagggctaatccttacattgcaccaccccagctgcagcagtgccaaacaccagggccctcctggcttcattcctccaccttctgggaccccctgttcagatgtaccaagatgcctcc

SEQ ID NO: 2684 - DNA, 764 bp, Homo sapiens
cttacttaccttacttacctaaagattatcacagtatttaaactgtaacttaagaggtaaaagtctattaagtatgttgatgaatataacctgcacagtggctggcagcaagtaaaccctgtttgggtgttcaactttaattttttgttgaaatatgtaagcaggagagtgcacctaccgcaagtgttcagtttgttcatttttaaaaactgaaccccctgtataaccagcagtcaataagagcaacggtagcagcacctcagaacacccccagcacctccttcagttcacttgtcccatcccaggggtgacaactgtcctgtctcccaggacaaccaaaacaaaggttgttttgcatcttctgcacttttaatgaatggtattacatggtgtatgttctttgcaggttggtctctttcactcagcgttgccttcaggagagtcatccacgtggttggtttagagcacattgtgtcactataagccttcttatgaagacactagactatccatctcctatatggatggacttttgggttgtttccaattgtggtttacgaggagtagggttgctgtccacattttagtacctggtttttggtgaacacatttgcttctgtggggtgtaaaattaggagtggaattactgagtcatagggtatgcatgtgttcaacttttgtggatgtttccacatgattttccaaagtgaaaccctgttttgagatctggaatattgactgtctttcactctccttggacccta

SEQ ID NO: 2685 - DNA, 1461 bp, Homo sapiens
  misc_feature (1)...(1461): n = a,t,c or g
cgtcgaccactgcagtccaacttcatttaaatatgtagaatattttcggtggccaatgctactaaatatgcgagataacaaccctgaagtcaggcaagctgctgcttatggcctgggtgtcatggcacagtttggtggagatgattatcgttctttatgttcagaagctgttccacttctggtaaaagttattaagtgtgcaaattccaaaaccaaaaaaaatgtcattgctacagagaactgtatctcagcaatagggaagattttgaagtttaagcctaactgtgtaaatgtagatgaagttcttccacactggttatcatggcttccactgcatgaagataaagaggaagctattcagactttgagttttctctgtgacctacttgaaagtaaccacccagttgtaattggtccaaataattccaatcttcccaaaataatcagtataattgcagaaggaaaaattaatgagactattaactatgaggatccttgtgccaaacgcctagctaatgtcgtgcgtcaggtacagacttctgaagatttatggttggaatgtgtatcacaacttgatgatgaacagcaggaagccttacaggagttgctaaattttgcttgaagcactttaatataacttgaatattatctattataaaagtaactacaaataagtgttgtgaatagattttattataaatcagagaactgttttctccctgctaagcagtttatagttcttctccatgtttctccagaattaatcagtgttagtcctctgtttatctcgcatgttttatcttccaaacacagaccttggtgataacctgtgcttcaaactgtcttaaacaatgtttgtcacctttcccctagttgatgtaaagtatataaattgttgctatttgtttgaactattattgatgctagccaagcagtatacttgatgtgaagatgtcatgctatcacaatatgctaagagctcacaaaaataagatagaatttccaggacaaacatctttggaattgtgagtgaaggatatagtggcaggcttgtccctctttaattaatactcttggtatttgtggtgatgggaggatgctgttactaggagagttttgagatactgcagtggatgtgggatgtatatgaacttcttcataatgtactcctgggaactgggtaggacatatccatattgtagttcccaaggtgtctggttgagagttagagaacttttaaatttctttagccagacaggtctctatttttttaagttatccaggactccaagaaccatagttctgaaaagggagtctgatncactaatattgggagcatgtaccagtgttgcaaagagtagtaacagtatcctgggagtcagtgttatgtgtttcagcagagtattattttgtatatgtatgccattttctccctgcaaagcagctcaacaagagaaaaag

SEQ ID NO: 2686 - DNA, 619 bp, Homo sapiens
atcctctctttaataaggattataaaggttataaaaggtttatagaaattacatcttatggtcaaaatgattaaaattttatagattgtttataaaattttgaaaaacaaatttatttggcttcatgctgtttttattagagctaattgtttagaaaattaagtgtcctctcttaaagaattaaggttttcactttttttttttcaaacccttgagttatcactctggttaaatgaatgacttattttacaataacctgtaattttattttgtaatgtcaagtgttttaaaccttttgtatttgacaagctttccaaaatcaaattataaattatgtatttttctaacctaattaatcctttaagatcttaggtttccctaaagtcctaaaatgacataatttgggcttatttgggtataaaaattatataggaagcattgtcaaatgtgaaatggtgtttggttttctttgggctgtatttgtataaatatgttattggtgtatgttccaaaattatgtgaaactcctataattctaatataacttaggtgtacattatcagtaataatccataattgttattattaaaattattgtgtgccacaggagggtaaaaaa

SEQ ID NO: 2687 - DNA, 113 bp, Homo sapiens
cttcctacagaccctgctgagcagctcaggggcgccggcatcagggcagttgccatctgcctccatgcgattaaaattcctacggctgcatggcggcatggaacaagaggaaa

SEQ ID NO: 2688 - DNA, 298 bp, Homo sapiens
aattgaattggcagcatccttgaaatacctccggacaaggatctgggggtgggggtggaaaagcaactgcgaaatagcagacggagaaattcctttggaagttattccgtagcataagagctgaaacttcagagcaagttttcattgggcaaaatggggtaaggatttttgtgcttaacacagcttcgaatctgtttatgtatgtgtattattgagcggtggtggtgattgtgttttgtgttttcaaacaaacttgccaccttgctaagctggtcatactttaaagaaataggcatgc

SEQ ID NO: 2689 - DNA, 2440 bp, Homo sapiens
ttttttttttagagccagctattgttttattgaagcaaaaagaaaacagaacaaaaacaaaaaattgtttcccaagacattgaaatggctgacatcttttcagtaataatcagaacaatatttatttttatatttaaaattcatagaaaagtgccttacatttaataaaagtttgtttctcaaagtgatcagaggaattagatatagtcttgaacaccaatattaatttgaggaaaatacaccaaaatacattaagtaaattatttaagatcatagagcttgtaagtgaaaagataaaatttgacctcagaaactctgagcattaaaaatccactattagcaaataaattactatggacttcttgctttaattttgtgatgaatatggggtgtcactggtaaaccaacacattctgaaggatacattacttagtgatagattcttatgactttgctagataacgtggatatgagttgacaagtttctctttcttcaatcttttaaggggcagaggaaatgaggaagaaaagaaaaggaattacagcaatactgttctttctataggaaggattagatatgtttcctttgcaaatataaaaaaaataataatgtttactactagtgaaaccaaggtattaggaaaataatgtacaagcatctcttgcaagaaagggtaagattgttatgagtgaaatcgccttcctcaaattttattcccaatacctccaaatattatcttatttggaaataaggtctttgtacacaatataatgttaaaatgatttcattaaggcattagcggtgggccctgaggccagtatgactggtgtcttaataaaaagggaaaacttgggcacagagatgtacataaagacaatgtgaagagtcatagggacaagatgccttctacaagccaaggagagaggcatggaacagagcccttccttgcagacctcagaaagaaccaactctgctggaatctagatttgggatttcagcccacagtacggcaatacaattacagtttaaatcagcaatctatgatgctttgctatggaagccctagcaaatgaatacaaagacattctaagtaaaagaaggggaaagaaaggaagagatggtctcagtagagatgaactcaggtgcagaatctgagtctcacagaagggctactatgcagaagtgggtaaaggaatgagaacactcaggagctcggtgggcacacagtcatggggactaggcagttccaaggattgaaatacggataagcaggtcgagaaaagcgacatccagagaacttgtagatgagtcgtccgtggtttgtgacattgaaaaatgagacaatgcctgcctcatagtctaggaaaaccccaatacgacagggagcacagccataaagagagtcaaaaccttgggatcagaagaggaggagtcctcaaaagcattatattcacatgtattctgtaatcctataacccagtagccatattgaggtctatatctggagtaaacttttgaataatttacacttggatcaaaagcaaacccagagctcttccttttattcagactacttattttactgtgtacgcccaggatccaggcaatctttccagacacatctacttcccagtaatatttccccgaagagaaatattggcagccgaagacaccaaaagcagaaaaatcacatggatttgaattcttaaatgtgcaggtgcgtacagttttcacttgtctctgatccacagaaatagcaacattcgaagtggcactgcctggattcagcatcacgtccacccagtagtactggacatctgtcagctctttaagaacttgcagcatcccactcagatctggtactcggaatacactctttagtttcttggaaacagattttggcttcttcaatgtccagctttcactccttttcatgacgtcaatcacatcctgcagcatctctactgacgatcccgtcaacctccgctggagatctgagatgagcgtgctggcatcctgcctctgctggaccagctggtctgtagctgctgccaggttgtccagcacattcacctcaccttcctccagcttttgcagctctctctgctcctcattgtccaagatgactctcatttcattgaaccctttcagaatcttctgtctctcgatcttccaggcggttctctcttgtctgatgtcatcttccagcttctcagcctcttgatcctcctttatcagcctctgcagggctacctgcagcttttcctgacattccttgaccacctcgtttatgcggaatgtttggtgaccttggtgttcctgagacagttcacaaacccagcaaatgacttttccatcctccttacagaagatctggagtttttttccgtggtgctcacagacatctctcttctgcccctcctgtgggctcatcttgac

SEQ ID NO: 2690 - DNA, 150 bp, Homo sapiens
gctttactgagaccctaacatagatacattagattctggttaccttagaaattagtctaaaaaaggaagggaccccgatggctggataggtgatttgacaggattctaattttgtcacaccatttacctgatacttcaacagggtttctc

SEQ ID NO: 2691 - DNA, 1853 bp, Homo sapiens
gatgtgagacagtattcagaataatgaagataataatgatgattattataataatgatgatgattccaaggaaaaaacctacagcgaatgttccatttctaccccgcacgcagacactctccctaacactgataacctgagaccccagcactggacggaagaatgctggcgtctccgtgtgtactggttcagggttctggccccagccttgtcaggaccccctggtgtccagagcccccacccctcccgcaacaagcagctgatgccccagtgattctctatacatttttcacctcggccaatatgtccaggaaaactgcttacttctcttttcttgcctggagccttcattgttcacccttacgttgcaatataggaattaatgctacaaaataaaagtaaagcttacctgaaaagtgcatagtttggggcaatggtatctacatctcccactgtgggaaaaccagcaaagcatcaaaactctcaattctcctgttaccgaatgcagatctgaattataagatgtttatgtttgaccattgtttcaacaatgggattttgttacgaattatccctttaactgaaaccctcagttttactgtttacattattaggaaaacagggatatcttttgaatctaaaaatttgatgtacagcatgtgatttttgaagtttacatgtaaagtcacagtataggtgaaataacgtttgtcatattttgagacgtatcctgcagccatgtttttacgtgagtgttttagtcaaagtacatggtagacagtctttcacaataaaaggaaaaggattttttttcctccaaatgtacatttatcaacctaatgattgatttttttaaaaagagatttcgccccagtctgggtttatgaaagttcattgccctaaactgtgctgattgtttttaatcaagttataaatttccaacctagatcatgtatctaccaactctcctgcattttccaaaaggcattgagcttaaatattagtcttgcttagagtaggttatccacttacatggctgcgctaaagccatgcctttgaaactccttgtttaaaacatgatatgatttttgtgggcagtttcagaaaagaaaacaaacaaacaaaaatcgaccctttaattattacttgcaactcaacagatctccctgccgtactgccttttccaggaactttacttcagggctgtccagattgcagttgtgccccgtgtatgtggatctagttcacagagtctttggaagccagcagtcgtgccctccgtatactgtccactcattttatgtagatttggtatcctcagcagccagtgttaacaccactgtcacgtagtgtacagattcatcttttatgtatttaaagtaatccatactatgatttggtttttccctgcaccattaattctggcatcagatcagtttttgtgttgtgaagttctactgtggtttgacccaagaccacaaccatgagaccctgaagtaaagataaggtacacatacattatttgagtaactgtttccttgggggccaatctgtgtatgcttttagaagtttacagaatgcttttatttttgtctataacaaacagtctgtcatttatttctgttgataaaccatttggacagagtgaggacgtttgccctgttatctcctagtgctaacaatacactccagtcatgagccgggctttacaaataaagcacttttgatgactcacaagatgaatccttttttcctctgtcccaattgtgtgtctctgttccaaacacattttaaatactcggtcctgacagtgtctttagctaatccttgaagaaataaaagtggaattgaaa

SEQ ID NO: 2692 - DNA, 713 bp, Homo sapiens
  misc_feature (1)...(713): n = a,t,c or g
caaccagcgagtctgcaaatgctgggcaggtcacaggccaccctgcaacccagcgattagactgggggagatagagcttattgggctgtttccctggttcatgtgaccaaggggggtctggggttgggggtgaaggaagaaggaagaagggagaagggactgtcacaacagtgttccatgcttgcactcagaaaatggcagaacagttacaacaatgagaatctttatgcatatagctttgtgatcaatacaatccttcagaacaacaagagacaaacaaaggaatacaatgtcccaaacagctgcagtccacaggctgacattgctaactagatttagatcatctggaggcttttgtaagaggaactgaggtgcagaggcatcagaatgagttgattcccggcaaaagggctaagaggctacagacatatctaaaaatcaagaaaccactacttgttaagtacttctggtgtttgcatacagtgtccaatacatagggaagatagcaagtccatactggtctttgtacatgctgtgtggtagagggctactgcaggtttctttattttctaaagtagggcaaggctcataaattggacccatttcacttgtggtttacttggggacatggctggctgttattggggacacnggtgcttttaatagggntccttgggttttccaatttctgacagggctttttaccccggggg

SEQ ID NO: 2693 - DNA, 477 bp, Homo sapiens
  misc_feature (1)...(477): n = a,t,c or g
tggnttnnaaaatggaaattcttatccntatnacnnnnnnnnnnnnnnnnnnnnnnnnnnnnnnnnnnnnnnnnnnnnnnnnnnnnnnnnnnggcacgagaggattttgctaatgaggtgatacccctaaactgtcatcgatgccagcgcctgggtagtgtggtaagagtgatactcccatgactcatgaaagatggtctccccacgtgctttaaagcaggatggttgcaggagaaagtattggtggactgtgaacagcccccatggcaagggtgcatctggagctggaggaagagcatccacagagtgtaagtagtttgtcctgggaatggagatgtcaggcttgggtgtggtgtccgtgagagggcaggcagctcctctatgaggccagatcattcggggccttggattccagtcttaggagaatanactttattctctaggtcctggcanccntcactggctgagcctgattgg

SEQ ID NO: 2694 - DNA, 700 bp, Homo sapiens
ggtaacattgccttcaattaacagtagcttttgagtaggaaaggactttgatttgtggcacaaaacattattaatatagctattgacagtttcaaagcaggtaaattgtaaatgtttctttaagaaaaagcattgtgaaaggaaaaaggtaaatacagcattgaggcttcatttggccttagtccctgggagttactggcgttggacaggcttcagtcattggactagatgaaaggtgtccatggttagaatttgatctttgcaaactgtatataattgttatttttgtccttaaaaatattgtacatacttggttgttaacatggtcatatttgaaatgtataagtccataaaatagaaaagaacaagtgaattgttgctatttaaaaaaattttacaattcttactaaggagtttttattgtgtaatcactaagtctttgtagataaagcagatggggagttacggagttgttcctttactggctgaaagatatattcgaattgtaaagatgctttttctcatgcattgaaattatacattatttgtagggaattgcatgcttttttttttttttctcccgagacagggtcttgctctggcgcccagggctgggagtacagtgggcatgatcttgggctcacttcagccttgacttggggctcaagtgatccacctacctgagccttctgagttaact

SEQ ID NO: 2695 - DNA, 404 bp, Homo sapiens
gctggaagaattcttctcagccttgaccctggagcactgggaacaactggtctcctgtgatggctgggactcctcgcgggaggggactgcgctgctatagctcttgctgcctctcttgaatagctctaactccaaacctctgtccacacctccagagcaccaagtccagatttgtgtgtaagcagctgggtgcctggggcctctcgtgcacactggattggtttctcagttgctgggcgagcctgtactctgcctgacgaggaacgctggctccgaagaggccctgtgtagaaggctgtcagctgctcagcctgctttgagcctcagtgagaagtccttccgacaggagctgactcatgtcaggatggcaggcctgggatcttgctcgggccctactgttgggg

SEQ ID NO: 2696 - DNA, 604 bp, Homo sapiens
aatcgtttcaaactttattacttaatgaaacagtttctatatactgcttccaattactttaatccttttttctcgttaaattttttttgttgttcttcagttgagctgagatacttttaattactttttattaactgcttccagaaaccgtaacaggtgcaggaatagattgatgatatccaagtagaggctgatggcagctaatacgtactcttcaggtgacagtttatgcatcagtgagtgtgtgtcatagatgatgaatccacagaaaagaagggctcctgcagcggctaagaccaactccattatctcactataaaaaaaaaactatagggaagagattaaagaaatatgtttatatttgagaacagtattaacaggacttaacttacttcctctaatgatttactgctacattatacatttgacaatggtgtacaactttgaatacaaatgttaaaagcagaaaaaggcaaggcaagtccaaacttgcctctgttggatggaaggatgaatgagtggttatattccattaaactaaattacccactttgaaaaacagcattccacatataaattatttaaaaatatatttcgtttttcc

SEQ ID NO: 2697 - DNA, 757 bp, Homo sapiens
ccccgcccggtactttttccggagcggcccaagcggcagttggctcagaggaccccacgtttaggattttatagggaagaggaggaatttttcgtagaaatccccgctcgtgcgtgctcgtggtggaggctgctggcaatggcctacgtcgtcataccgggcttccttgccctgtccgggggtttcatcaccttaaatggttttgaaccaatgaaggtgtattcccttaaaaagacggacagcccatcgtgtgaactatagagtttgtggacagatttatattgggttcatagtggcgtcatgcacgcagactcctgcaagttcccctaagttcttagaggactgctttgccttttgatctgagagttgcaaagttccataaagaatggcccttgtggataagcacaaagtcaagagacagcgattggacagaatttgtgaaggtatccgcccccagatcatgaacggccccctgcacccccgccccctggtggcgctgctggacggccgcgactgcactgtggagatgcccatcctgaaggacctggccactgtggcattctgtgacgcgcagtcgacgcaggaaatccacgagaaggttctaaacgaagccgtgggcgccatgatgtaccacaccatcaccctcaccagggaggacctggagaagttcaaggccctgagagtgatcgtgcggataggcagtggctatgacaacgtggacatcaaggctgccggcgagctcggaattgccgtgtgc

SEQ ID NO: 2698 - DNA, 495 bp, Homo sapiens
gggacaactgactttctgctttcacctttgcttgtcaactctcccttctcctcattctcttttaatgttaggccccttctccagtcttttccttttactctggtcttttactcgtttttgtatccatttttatttagccccatcacatcattgcttaaccgctgctctcctcccattttcgcttcaccctctttacagcagcctgtccctctcccgatctcagtgatgatgctctaagtggttaagagttgattccggagccagggctgcctgggtttgaacccaggatctatttattagcttgggtgacccagagcaagttattctgcctgtgactcaattttcctcacctttaaactgggggatcatggttagtttagcattttcatagggattgttggtggaaatttagggtgaggtggaatatatggaaacactttcattcagtggcctaggcatatgtaggggagagttgggctgtttcacatgattatt

SEQ ID NO: 2699 - DNA, 748 bp, Homo sapiens
aggtcattccaatgtgcggccaaagttgagaactactggcctagggattagccacaaggacatggacttggaggcaaattctgcaggtgtatgtgattctcaggcctagagagctaagacacaaagacctccacatctgtcgctgagagtcaagaacctgaacagagtttccatgaaggttctccaagcactagaagggagagtgtctaaacaatggttgaaaagcaaaggaaatataaaacagacacctctttccatttcctaaggtttctctctttattaagggtggactagtaataaaatataatattcttgctgcttatgccagctgacattgttgccctccctaaagcaaccaagtagcctttatttcccacagtgaaagaaaacgctggcctatcagttacattacaaaaggcagatttcaagaggattgagtaagtagttggatggctttcataaaaacaagaattcaagaagaggattcatgctttaagaaacatttgttatacattcctcacaaattatacctgggataaaaactatgtagcaggcagtgtgttttccttccatgtctctctgcactacctgcagtgtgtcctctgaggctgcaagtctgtcctatctgaattcccagcagaagcactaagaagctccaccctatcacctagcagataaaactatggggaaaacttaaatctgtgcatacatttctgggatgcatttacttatctttataaaaaaaggg

SEQ ID NO: 2700 - DNA, 611 bp, Homo sapiens
tttttttttttttttttgcaaattttaaatttttattaaaaatcacagtttttaaaaatgtccagtgacacaatgtagctcttctgaaatgaatggaaaacacaacacactgctaaccagtggagggagctctctgcagggctgggagacctgacaatgcagctgtagcctctgcaagtgaaaatccaggccgacttgcagtcattggactgatgtccaagtgcaatcaccatacagcagctacaggcagggctggctgatagggagtatgggagaaggacacgctcagatgaaaacatgcatgcaacgattttcaccactgaacacactgttttctgtgatagaaactgtcggccctgctgggggacaagatattcacggcctcactagccagtgtgatgccaccagggcagcctgcccctgatgctcctttgttacctgctaaagaaggaccataaggtaaaaggcaccttaccttatggagtgagcccagaccccagggaaaagcttgggtagaacaatccaaggggcagcctgggtatgagaatccagcccaagctagctgctctagaacctggaggcctttcccagcttcccaaatgtagcccttt

SEQ ID NO: 2701 - DNA, 370 bp, Homo sapiens
  misc_feature (1)...(370): n = a,t,c or g
cagaaaaaaacacagaaatgtgcaatgtcatgatgcagttgaggaaaatggccaatcatcctttattacatcgccaatattacacagctgaaaaactcaaggaaatgtctcagcttatgctaaaggaacctacacattgtgaggctaaccctgacctgatctttgaagatatggaagttatgacagacttcgaactacatgtactttgtaaacagtaccgacacattaataactttcagttagacatggacttgattttagattctggaaaatttcgagttttaggatgcatcttgtctgaattgaaacaganggnttcatctaattgatgagttaaataccgatatggatatntttgtgtttctgctat

SEQ ID NO: 2702 - DNA, 581 bp, Homo sapiens
ggtcacagaaaaaaacacagaaatgtgcaatgtcatgatgcagttgaggaaaatggccaatcatcctttattacatcgccaatattacacagctgaaaaactcaaggaaatgtctcagcttatgctaaaggaacctacacattgtgaggctaaccctgacctgatctttgaagatatggaagttatgacagacttcgaactacatgtactttgtaaacagtaccgacacattaataactttcagttagacatggacttgattttagattctggaaaatttcgagttttaggatgcatcttgtctgaattgaaacagaagggtgatagagttgtgttatttagccaatttaccatgatgctggatatcttagaggttctattaaaacatcatcagcataggtacctcagattagatggaaagactcagatttctgaaaggattcatctaattgatgagtttaataccgatatggatatctttgtgtttctgctatcaacaaaagctggtggattaggaataaatctgacttcagcaaatgttgttatacttcacgatattgactgtaatccttataatgaca

SEQ ID NO: 2703 - DNA, 835 bp, Homo sapiens
ttcctttcagtcatgtggctcttcattctactctccttggctctcatttcagcaccaatcatgtggccctgagggacacagggaaccagctcattgtcactatgtcctgcctgaccaaagaggacacgggctggtactggtgtggcatccagcgggactttgccagggatgacatggattttacagagctgattgtaactgacgacaaaggaaccctggccaatgacttttggtctgggaaagacctatcaggcaacaaaaccagaagctgcaaggctcccaaagttgtccgcaaggctgaccgctccaggacgtccattctcatcatttgcatactgatcacgggtttgggaatcatctctgtaatcagtcatttgaccaaaaggaggagaagtcaaaggaatagaagggtaggcaacactttgaagcccttctcgcgtgtcctgactccaaaggaaatggctcctactgaacagatgtgactgaagatttttttaatttagttcataaagtgatgctacaacagaataatcaccatgacaactggcccacacctcagagactgattctgatctcccaggaattctgaaggaccctctatccttgacaacaatcatttgcagccaggtagcaacggcggtagtcagaggagctatgatagaccacacccaagcaaggctgccctcaaataacatctcaagatcttagttcttatgcattccatcagtcagaagtgaagaagaggtggagaatctggattggggaccaggaaatcacttgtattttgttagccaataaattcctagccagtgttgaatgaaaaaaaaaaaaaaaa

SEQ ID NO: 2704 - DNA, 3665 bp, Homo sapiens
  misc_feature (1)...(3665): n = a,t,c or g
gctgggagcaaagcgctgagggagctcggtacgccgccgcctcgcacccgcagcctcgcgcccgccgccgcccgtccccagagaaccatggagtctggcagtaccgccgccagtgaggaggcacgcagccttcgagaatgtgagctctacgtccagaagcataacattcaagcactgctcaaagattctattgtgcagttgtgcactgctcgacctgagagacccatggcattcctcagggaatactttgagaggttggagaaggaggaggcaaaacagattcagaatctgcagaaagcagggcactcgtacagactcaagggaggatgagatttctcctcctccacccaacccagtggttaaaggtaggaggcgacgaggtgctatcagcgctgaggtctacacggaggaagatgcggcatcctatgttagaaaggttataccaaaagattacaagacaatggccgctttagccaaagccattgaaaagaatgtgctgttttcacatcttgatgataatgagagaagtgatatttttgatgccatgttttcggtctcctttatcgcaggagagactgtgattcagcaaggtgatgaaggggataacttctatgtgattgatcaaggagagacggatgtctatgttaacaatgaatgggcaaccagtgttggggaaggagggagctttggagaacttgctttgatttatggaacaccgagagcagccactgtcaaagcaaagacaaatgtgaaattgtggggcatcgaccgagacagctatagaagaatcctcatgggaagcacactgagaaagcggaagatgtatgaggaattccttagtaaagtctctattttagagtctctggacaagtgggaacgtcttacggtagctgatgcattggaaccagtgcagtttgaagatgggcagaagattgtggtgcagggagaaccaggggatgagttcttcattattttagaggggtcagctgctgtgctacaacgtcggtcagaaaatgaagagtttgttgaagtgggaagattggggccttctgattattttggtgaaattgcactactgatgaatcgtcctcgtgctgccacagttgttgctcgtggccccttgaagtgcgttaagctggaccgacctagatttgaacgtgttcttggcccatgcctcagacatcctcaaacgaaacatccagcagtacaacagttttgtgtcactgtctgtctgaaatctgcctcctgtgcctcccttttctcctctccccaatccatgcttcactcatgcaaactgctttattttccctacttgcagcgccaagtggccactgggattcgcagcttcctgtctgtttatatattgaaagttgcttttattgcaccattttcaatttggagcattaactaaatgctcatacacagttaaataaatagaaagagttctatggagactttgctgttactgcttctctttgtgcagtgttagtattcaccctgggcagtgagtgccatgctttttggtgagggcagatccagcacctattgaattaccatagagtaatgatgtaacagtgcaagatttttttttttaagtgacataattgtccagttataagcgtatttagactgtggccatatatgctgtatttctttgtagaataaatggtttctcattaaactctaaagattagggaaatggatatagaaaatcttagtatagtagaaagacatctgcctgtaattaaactagtttaagggtggaaaaatgaaaatttttgctaattatcaatgggatatgattggttcagttttttttttccagagttgttgtttgccaagctaatctgcctggtttatttatatcttgttattaatgtttcttctccaattctgaaatacttttgagtatggctatctatacctgccttttaagtttgaaactaactcatagatgcaaatattggttagtatttaactacatctgcctcggctcacaaattccgattagacctttatccagctagtgccaaataattgatcagatgctgaattgagaataagaatttgaggtctacattcttggttgttaatttagagcgtttggttaaagtatgtccttcagctgactccagtataatctcctctgctcattaaactgattccaggagattggatttgctgtgactagatacagatggagcaaatgtcctaacagagaaatagaggtgatgctgctaaagggagaaatgccagggcggacaaagttcagtgtcgggganttttccccgtgacattcactggggcatgagattttggaagaagttttttactttggtttagtctttttttcctcctttttattcagctagaatttctggtgggttgatggtagggtataatgtgtctgtgttgcttcaaattggtctgaaaggctatcctgctgaaagtcctgctttcctatctagcatttattcctctggcaaacttttctttcttttcttttttaaagtaaacttgtgtattgagtcttaactgtatttcagtattttccagccttatgtgttacattattccaatgatacccaacagtttatttttattatttttttaaacaaaatttcacagttctgtaatgtaggcacttttattttcattgtgatttatatataaggtaatgtagggttatatttgggagtgactgcaagcatttttccatctgtgtgcaactaactgactctgttattgatcccttctcctgccctttcccaggtaatttaaattggtcatggtagatttttttcatagatttgaaaaacttttaggttgttaccaagtatgaagtataaatctggggaagaggttttatttacattttagggtgggtaagaaagccaccttgttacaaattttttaatttccaaaataatctatattaaatgagggtttctgatctgtactttgtgtttagctacctttttatatttaaaaaattaaaaatgaaaattatgttcttacaagcttaaagcttgatttgatctttgtttaaatgccaaaatgtacttaaatgagttacttagaatgccataaaattgcagtttcatgtatgtatataatcatgctcatgtatatttagttacgtataatgctttctgagtgagttttactcttaaatcatttggttaaatcatttggcttgctgtttactcccttctgtagtttttaattaaaaactttaaagataagtcctacattaaacaatgatcacatctaaagctttatctttgtgtaatctaagtatatgtgagaaatcagaattggcataatttgtcttagttgatattcaaggctttaaaagtcattattcctgggcttggtaagtgaatttatgagatttactgctctagaaagtatagatggccaaaggaccgttttgtattgcttcctgattaccagtctgattataccatgtgtgctaatatactttttttgttatagattgtcttaatggtaggtcaagtaataaaaagagatgaaataatttaaattcttaaatgaatcagtttttcttccctttctcctttccgtctttcctctctctgtccttccccgaaagtctactcgggtgggcaaaaatgaaaagggggaaagggaattatgggatc

SEQ ID NO: 2705 - DNA, 1278 bp, Homo sapiens
tggtgtcttctcttctcccctttccgtctgaataatgggttttagcgggtcctagtctgctggcattgagctggggctgggtcaccaaacccttcccaaaaggacccttatctctttcttgcacacatgcctctctcccacttttcccaacccccacatttgcaactagaagaggttgcccataaaattgctctgcccttgacaggttctgttatttattgacttttgccaaggcttggtcacaacaatcatattcacgtaattttccccctttggtggcagaactgtagcaatagggggagaagacaagcagcggatgaagcgttttctcagcttttggaattgcttcgacctgacatccgttgtaaccgtttgccacttcttcagatatttttataaaaaagtaccactgagtcagtgagggccaccagattggtattaatgagatacgagggttgttgctgggtgtttgtttcctgagctaagtgatcaagactgtagtggagttgcagctaacatgggttaggtttaaaccatgggggatgcaacccctttgcgtttcatatgtaggcctactggctttgtgtagctggagtagttgggttgctttgtgttaggaggatccagatcatgttggctacagggagatgctctctttgagaggctcctgggcattgattccatttcaatctcattctggatatgtgttcattgagtaaaggaggagagaccctcatacgctatttaaatgtcacttttttgcctatcccccgttttttggtcatgtttcaattaattgtgaggaaggcgcagctcctctctgcacgtagatcattttttaaagctaatgtaagcacatctaagggaataacatgatttaaggttgaaatggctttagaatcatttgggtttgagggtgtgttattttgagtcatgaatgtacaagctctgtgaatcagaccagcttaaatacccacacctttttttcgtaggtgggcttttcctatcagagcttggctcataaccaaataaagttttttgaaggccatggcttttcacacagttattttattttatgacgttatctgaaagcagactgttaggagcagtattgaggtggctgttcacactttgaggcaactaaaaaggcttcaaacgttttgatcagtttcttttcaggaaacattgtgctctaacagtatgactattctttcccccactcttaaacagtgtgatgtgtgttatcctaggaaatgagagttggcaaacaacttctca

SEQ ID NO: 2706 - DNA, 423 bp, Homo sapiens
ccgggagggtctttcaaaagaactcatgtacggctgttaaaaaaagtcagcagaggctcaggaagacttaaagtgtgcagaaggcggggaagggagggcccattgcatgcaccaagaggaaattggaaggaacaagcgacgttggctgctaggagagcctgctcccaacatctaggggctgtcctgacgggtcacagtgggtcgaactgagccaatgagagcagctctggggagacccactggtgccctggaggctgggtgggtttgggttggatgaattctgtgtgtccttttggaaatgtggaggccatgaggggggatcagggctcttagggttttgacccttaagagttttgtatctgtaattcaaaggttctttagttctgggatgctgagattcgggatagggttcctaatggcacg

SEQ ID NO: 2707 - DNA, 492 bp, Homo sapiens
ggtttttaagagctactgaatttgaagagaccatatcagtttcatctgctcaaattagatgaatttgcagttcatatcccaaggtttgttgttcttgttttttataggacgtgcaatccctggtataaaataagttgaaatccagttgactcatcattctatgaaggtgttctgagcaccatgctggtcattccacagattggcaaattgtggcttctgtgaactcatctcccctggaacttagcagcacaagcgatatttcttttctgatttgtgcatgcaatctttcccctacttttcacggttgcacttctttgtttacagaagagattctgggtcatttccacccctgccactccactctcccagcctctctcattggttcacagagtatctagaaggcctcaaaataaaatcatctttagagtaaaacataaataccatcctaacctgttctgcaggaggtcaggggccttcttgttagagagcagg

SEQ ID NO: 2708 - DNA, 3330 bp, Homo sapiens
ggtgcgctcaggcggcgctcccggagatgccccgcggcagccgcgctcggggctctaagagaaaaaggagttggaatacagaatgcccatcctttccaggagaaagaccactgcaggtcagaagagcaggtctcaggacagcaggggcagctgcctctctctctgaagcatggctcaggtgtggagaagggtttcagaacacttctgggaatccgtcattaacagctgaagagaagacgattacagaaaagcaccttgaattatgccctagacccaagcaagaaaccaccacatctaaaagcaccagtgggcttacagacataacatggagctccagtggaagtgatttgtcggatgaagataagacactttctcagttacagagagatgaattacagtttatcgactgggagattgacagtgacagggcagaggctagtgactgtgatgaatttgaagatgacgagggtgctgtggaaatctcagactgtgcttcttgtgcaagtaatcagtctttgacaagtgatgagaagctgtcggagcttcccaagccaagttctatagaaattttagagtattcatcagatagtgaaaaagaagatgatttggaaaatgtcctactcattgattcagaatcccctcacaaataccacgtgcagtttgcatcggatgcaagacagattatggagagactgatagatccaaggacaaaatcaacagagaccattttgcatacacctcagaaacccacagctaagtttcccaggactccagaaaattcagcaaagaagaagcttttaagaggtggactagcagaaagactaaatggactgcagaatcgagagagatctgctatttctttgtggagacatcaatgtatttcttaccaaaagacactttcaggtagaaaatctggtgtattaactgtgaaaattttagagctgcatgaggaatgtgccatgcaagttgccatgtgtgagcagttattggggtcaccagccaccagctcctcccaaagtgtggctcccaggcctggagctggcctgaaagttctcttcaccaaggagactgcaggctacctcaggggccgtccccaggacactgtccggatcttccctccctggcaaaaactgattattccaagtggaagttgccctgttattctgaatacttacttttgtgagaaagttgttgccaaagaagattcagaaaaaacttgtgaagtgtactgtccggacataccccttccaagaagaagcatctctttggcccagatgtttgtaattaagggtctaacaaataattcacctgaaatccaggttgtgtgtagtggtgtagccactacagggacagcctggacccatgggcacaaagaagcaaaacagcgcatcccaaccagcactcccctgagggattctctcctgggatgtggtggaaagccagggagctgcctcgtggccaggagctggagtccgagtggtggtgcaaagagtgtattctcttcccagcagagacagcaccaggggtcagcagggggccagctcaggacacacagacccagctggaactcgagcctgccttctggtacaagatgcctgtggaatgttcggtgaagtgcacttgggagttcaccatgtcgaaggcaagacagttggaagggaagtcttgcagcctggtgggaatgaaggttctacagaaagtcaccagaggaaggacagcggggattttcagtttgattgacaccctgtggcccccagcgatacctctgaaaacacctgggccgcgaccagccctgttgaagagataaaaactccatctggctactccagccttgtgttacatcctcacagctcatccaaatctgggacaaattgatataattgacgaagaccccatttataagctttaccagcctccagttacccgctgcttaagagacattctccagatgaatgatcttggtaccccgttgcagtttctatgccacggtgatttaccaaaaaccacagctgaagagtctgctgcttctggagcaaagggagatctggctgctagtgaccgatgtcactctgcaaacgaaggaggagagagaccccaggctccccaaaaccctgctggtctatgtggcccccttgtgtgtgctgggctctgaagtcctgggaggcactcgctgggggttgcccctcacagcctcttcttcaagggacgctctccgtgaccagggtcggattgtttgtgctgaacgaactgtcctcttgcttcagaagccccttttgagtgtggtctctggtgcaagttcctgtgagctgcctggcccggtgatgctcgacagcctggactctgcaacacctgtcaactccatctgcagtgttcaaggcactgtggttggcgtggacgagagcactgctttctcatggcctgtgtgtgacatgtgtggcaacgggagattggaacagaggccggaagacagaggcgccttttcctgtggggactgctcccgggtggtcacatctcctgttctcaagaggcacctgcaggtcttcctggactgccgctcaagaccgcagtgcagagtgaaggtcaagctgttgcagcgcagcatttcctccctgctgaggtttgccgccggtgaagatgggagctacgaagtgaagagtgtcctcggaaaggaagtggggttgttaaattgttttgtccagtccgtaaccgcccacccgaccagctgcattggattggaggaaatcgagcttctgagtgcaggaggggcctctgcagaacactagcggttgccgcaggatctgtgaactttgcaatgtggctgcaagggtggtggtggtggtggtgatttggggtagttatttgttaactatggacacagtgaacgtagtttacgatcttgaaatgaaacttagatttttctggggaaatgttcagatacagttttgtgaactgtaaatcaaaatacctttttctacagtttatcttttattttctgcaaatttaggaacatatttactcgttttcacattgaatcttaagtttaagctcttcatttggtatttaggcaatatatgagaaaaaaattttttttgttcatttgtaattttaacaagttgaacattttaccatgattgaacatgtttttattacagtatttaacattcccccaaagaataccctgcaaagtgtaaacctttgtcccatactgtgatattactgttctgctacaataaatgtcaaacctaagcactttgcagttcactacttttgggaaaatgttctagggaactgtatcacaggtgaaactgttacccataaagtgtagctctc

SEQ ID NO: 2709 - DNA, 536 bp, Homo sapiens
  misc_feature (1)...(536): n = a,t,c or g
cccctctttgtntncccttcgtnatactcgtnnnnnnnnnnnnnnnnnnnnnnnnnnnnnnnnnnnnnnnnnnnnnnnnnnnnnnnnnnnnnnnnnggcacgagatttttatgattcttatatatacccatgcattttaatactaaacattttaatatatgtccctttagtcatgggatgnnnnnnnnnnnnnnnnnnnnnnnanaatactctgngacaagggctcacctaggctttacttattacagatgtganggctgtnggcaaacaaaacctccgtagagcttgggnggtagaaactgaatcctgacactgatatttcactgtctgagccgaggggagcctgatatttctgtgtttcatactggctctacctggngtaatcattcctcaaacctcaaaccaagaattctgctgagaangcagaggacattgntagaggcagtctccccgtgcctgtcgctccccatattccaaggaactggctggctttaatcccgaactgaatcattggattaagtagcacgatctggtta

SEQ ID NO: 2710 - DNA, 480 bp, Homo sapiens
  misc_feature (1)...(480): n = a,t,c or g
ggcngtancttgtctttntnctcctgatatnttngacatgccnnnnnnnnnnnnnnnnnnnnnnnnnnnnnnnnnnnnnnnnnnnnnnnnnnnnnggcacgagacttggggcgctccagggcaggggtgtgcccacttggcatcacgtttgtgggtaggtggcctggaagatgagcgtatccaagcatgggtggcccctggttcctttgaggtaggaggtgagatgctgagtgtgagggccatgtgtattgagggcccaggacagcctggaagccccagggcgctgtgacctccccagtcagcagtgagctgtctccaggccggggctcactggctgggactgggattgagaggaaggcggagaaaacaggcaggagaaactgaangggtttcagctggcgggacaggaagtgtggncccaggggcttgnccccnnaggaatacnnggggaccaaanngcttggcaatggggatnatatc

SEQ ID NO: 2711 - DNA, 494 bp, Homo sapiens
  misc_feature (1)...(494): n = a,t,c or g
ttgacatgattacgaatttaataccgactcnnnnnnnnnnnnnnnnnnnnnnnnnnnnnnnnnnggcacgagctctcattatggatcctggcaaagataatgaatctgagtctacttcactttaaaactaacttaaaatatctgaaaataatgctttggtatgcctttgtggtaagagttgtacaggttatgcattttttaagataaaccataccagtgattcttcccctgggctgtcagtgctacaaaaatttgaacacacgaactggtccccaccttaggccctttagtttgatttctgtgtaagcaaaaatgtcctactttaggcatgacaatattggtattggtggcttagaaatataaggtttgtgatggtgattatcagtaattatgttaagagttcataataacttcattcattatgaagtcattgatatcacttgaggggattactacccaaaagaattataccacctaaaggggaagtgagtgca

SEQ ID NO: 2712 - DNA, 105 bp, Homo sapiens
tctagggcaataagcaaggtgtgttccctggggtacatctcaattctgacttttgaatggtcatcaccagtaatgattctggacttacattaaacctccttttgg

SEQ ID NO: 2713 - DNA, 805 bp, Homo sapiens
gagcctgttttccccactcttgtcattttaagtcaatagatttcctgggtttcttcccccgcccccccactttgccttttcaggggataggcatctccttagatttttgtttttcttcacttagggtcagctttatgattcgttcttctgctgtcatcctttttcatcctattcacagcctgtaccggtgagggaatttgtctcaaaagcattcagcccttcaaagatttttattgtggtgaactcagaactgataaacagaaaaacagaaacagaaaaagggaactgatatgggggcgatcttgatgcgggttgtgtctctcatgcatgataactcagaggacaggctcctcggtagtgcggtagtgctaactctgtgaagtttcttcaccctccttcctagccctggaggcggggtgattcatagctcctgttccaaaggcattcagcagccattcgacctgggaaagaaacagagttttagaaaatacaggccaaatgtagagacgcctgtgattaccaggatgagtatgtcagtgcaggtggcttctgaatttctgtttctgagtttgtttggctgatgcctaaggaaaggggtcccttacagccctgttttataccttagttcttggtggcaacgtgggtgttgctgatctctctgatgtgtttttctgtgcactgaaaacaccagacatgctccgtgacatcctcggagcatctcccatcataatggagtgttcctaacctgacaaagaatagcatattacctccccatctactcaaaataaaattatagtaaaattta

SEQ ID NO: 2714 - DNA, 626 bp, Homo sapiens
  misc_feature (1)...(626): n = a,t,c or g
ttgatttcgtacagcacagtggcttataaggaaccagcagtgtttttccctgagtaattatgaacttagtcaagatcagaagctgggttttggggttgagaagagttcatttatttaaataaagtttctatttaaaaacctttttaaaaagttaacatcataaatattctgataatttgcatagtagtaaaaattagaagttgaaattctacctaaagctgtagttgccgtcaattgtgtaacatgtgacaaaggttttcccatatgtcatttcatttgattctcaccacaaccatccaaggttgatgttattctcatttaacattgagttaacgaaagtagttgattcactctcgaagtccctgagtgtgagctcttcatcctagcactgtgaagtggtttgcctgctggggcctaaactcctcattccctttaacaaagcttcactggagtgctgcagttctcaaaatatgtaacagttaacacatttttcaaacagggttaggaagcaattcccatagccatcaatacttaaattcaggagtccttttttggttggttggtttggtttggntttagnggccaggcccctttctggtggccaggcctgnagtggngtggtgtgc

SEQ ID NO: 2715 - DNA, 751 bp, Homo sapiens
agcctataaacaaaaactagtttgaggcacccaagcatttagtgagagattgagaatgatgcttaatggatcaaaaaagcaattaggagtatgttcctgattttattctctaaattatactcaatttcatggtaattacatgaagaagttacctgcaattattcttaacactacatggaattcactgggtaattgtgggtcatttatttcctgaaagtcacgtgaaatccttagctggttgaatgttgcacagtatttgagaattacggtttgaagtgatttctgtgggagggaatcattgcaatgtatattctaaataaagtcatctaactattaaaaaaaaaacacccttcctaacccttcttttcttaaaattccacattcatccacaatctcatccctttgtagaaattcttgcctgaattctcaccaagttttgaattcctaaggtagccccgatctaggatgtgaaggctgcccagaaaaagtttatggctggaggagtatcatacagtgtctacatatgatagtacttacagattaggtctttggatgctttaacacaaaagatttttggtatccttattagtcaaataacgctattcttttgtggttctagaccctggcttctatctccctgtgatttgttttaatgctgaaatgacttggctatccaaagcttctagtctagaggtctgttggttgaaggcagacatttccaagtttggttgaaataatacgaagccggact

SEQ ID NO: 2716 - DNA, 690 bp, Homo sapiens
ggacagcattgccaagagccctgactgggcctggcttggtaactcactcctgtaatcccacctgcccctagaagtgcagatatactagaaaatacagctgtctttgttccagtgaatatgtataaggggtgacatgccttggtggaaagcagctcagattgtgtggactcctcaatccctgctctaccaagagctctccagttccaaaactgtacactcagtggctatgttctgtgtgcctgctcccaatacagccattatgttgttcatccagatttgaggaatttaaggttttcactcctctttggggtagtattatttaagtaagaacttctaggaaaatagtatgagtttggttatttttccctcggcagcaggaattttctgaatatttagcacattcagattgctccaagaaacagcattgagcaatgctgtacatgtgctttctcctaaggctggtctcccctgtctcctgggttctggaaagactcattgtccttcagggaagggagcatttttcctcactgccattgctgagccttttctcctgttgtatactatttagcccagcatgaagccatcgccgactgtaaggagtgatggatagaagtgtttacttggtttgtgaggccttgtctctaaagggtaacagtctgacaaggaaaacatttcaaagagccctgacca

SEQ ID NO: 2717 - DNA, 393 bp, Homo sapiens
gtgaaaagcatccccaaaatttcaatgatgtgaatttttaaattacctttatttctttaaactaattccattgattgttacttaaattttccacctggaatcatggatttaaaatttccccacctcatgggaaaaaaactaacccagaagttcaaagcctttaaagtttcatctgattctggccttagaattgtccttaaaagctttctcctggccgataggaggaagcatatatcaaggaggttctttcccttcccattatcattttgtggcaagccttaagttaacaatgtgtctaccaagaacaattgagttttctaaaagtaataatgaagattatgcaattctaactgtagaagagatagctattaaaataatcagtagcctgggcat

SEQ ID NO: 2718 - DNA, 554 bp, Homo sapiens
aggatgtcactgagatccctcaaatggagcctcctgctgctgtcactcctgagtttctttgtgatgtggtacctcagccttccccactacaatgtgatagaacgcgtgaactggatgtacttctatgagtatgagccgatttacagacaagactttcacttcacacttcgagagcattcaaactgctctcatcaaaatccatttctggtcattctggtgacctcccacccttcagatgtgaaagccaggcaggccattagagttacttggggtgaaaaaaagtcttggtggggatatgaggttcttacatttttcttattaggccaagaggctgaaaaggaagacaaaatgttggcattgtccttagaggatgaacaccttctttatggtgacataatccgacaagattttttagacacatataataacctgaccttgaaaaccattatgggcattcaggtggggtaactgagttttgccccaatgccaagtacgtaatgaagacagacactggatgttttcatcaatactgggcattttgtgaagtatctttt

SEQ ID NO: 2719 - DNA, 405 bp, Homo sapiens
  misc_feature (1)...(405): n = a,t,c or g
gattttctgtttgcaccaaaagtgagaagtcaatgccttgcctttgtgcatcccattactaatggaggataagaagttattttcttcaaaggctgacttccagaatttttggctgaacactttttgtcaagtgtatattccctttgtaggcctttctgtatagagcccacaaacatcgtgaatgtgaatcatgtcattcagagggttagtgaccatgcctctgccatgaacaagagaattcattactacagccggctcaccactcctgcagacaaggcactggtaagagacaaaacattactaatagtctaaaattcagttgaaatgaacagtgaacaatataagccagggcacctcccagtgattgaacttctttctgactgnatttcaaggacagcatcatgc

SEQ ID NO: 2720 - DNA, 458 bp, Homo sapiens
  misc_feature (1)...(458): n = a,t,c or g
ggtgnnttganttcgataccntnnnnnnnnnnnnnnnnnnnnnnnnnnnnnnnnnnnnnnnnnnnnnnnnnnnnnnnnnnnnnnnnnggcacgagcaagggtgtagccaggcttgaactttcttataagattcacagagatactttaagacttaaatatgcttagctagaaacaagtattagcatattttaagataacatttaatatcattgcttttggctccattattagaaaccatgatacctcaagagccagaaaaagtgtccatgtaataaaaagtcagctgagtatcttaagatgttttttctttaataaaaagttaagaggtagagttaaactaccaaatattcgtttgttcactcagcaaacatgtatttatcttctgacatttgccagggatagaactaggcattggagatagaaagctgaataagtcatgaatggtccctgccaagaaa

SEQ ID NO: 2721 - DNA, 473 bp, Homo sapiens
  misc_feature (1)...(473): n = a,t,c or g
gaaaaacccgacagtctctgcaagcctgagattgactgttagaggtgtcccacgttgggcatgaatggccttgctcagctactgatggaggctgccctgagaatagcatgaccttggctgaaagctgagatgaaccctgaggggctaacagctggaggctgtcagctaactgtatttcccacttcatagccaatcgcagggagatctgagtagcacatcttcttgtctgccacatacggtaaataatttttagtcaattagttttaatttcaccaaaattgtgccagactagaatatcataaagaattatttactgaactgaagcagacagtatcagtgctccactcattgggctggtccaatgtctccccttacttctcctcaccggggaacttgcctcaattcattgaccaattggagttggggtagggnccgggcttggttggcttttttgaagncacccnggtggggca

SEQ ID NO: 2722 - DNA, 397 bp, Homo sapiens
  misc_feature (1)...(397): n = a,t,c or g
gccatggcgcggaagaaggtgcgtccgcggctgatcgcggagctggcccgccgcgtgcgcgccctgcgggagcaacgtgaacaggccgcgcgactcccagctctacgcggtggactacgagaccttgacgcggccgttctctggacgccggctgccggtccgggcctgggccgacgtgcgccgcgagagccgcctcttgcagctgctcggccgcctcccgctcttcggcctgggccgcctggtcacgcgcaagtcctggctgtggcagcacgacgagccgtgctactggcgcctcacgcgggtgcggccgactacacggcgcagaacttggaccacgggaaggcctggggcatcctgaccttnaaagggaagactganagcgaggcgcgggagatcg

SEQ ID NO: 2723 - DNA, 987 bp, Homo sapiens
cttgtgctcacatgtggcaccatccttggttgccctcctggagaaggcattcacggcctggggtgggatggctgggctgtagtttagcctgggccttgggccagtgggggacagggcctgtctgcatgaagtggaccggagacctgcagaccccaggaaagtgtcactatgggagggaggggcaggcagtcaagtggctggtgccatggggtgaagccaccatgggctgggggtgaagagccggcaggaaggggaccagtcacagggagtgtggacagtcaggggtttgctttctgctcctgagttggggtgtgcagcgtggagcccacagcctggttctgggccagggcacagtgccaggggctccgctctgacctccaggagggagactgggcccgggacccctgttttctgctccctggactgcctagccctgagtgccacggatgaccagcgttctgttttctcttctcaataaccctatctcttcacacatccccaggcccagtgcttgccggctgtggtgaccctgcctggtgctggagggcagtatgggaggcaccagtgtgccttgctcaccccattagtgtcatcctgccatcttctgtgtccccttggccctggcacacacccatgtggcaaacacgggccgtgactccccttgaacagcttcgaggcgggtgggcttctggagccctcttggctctgaggacagccacagtggggtcagacgtcagggattggtgcagccccacgtcaggggtgattgtcttgactttctctccatttgagttctggggtgggtggctcccttcccccttgcttacaggtgctgtcctggggcacaggaggtacgcgcctgggctctgcactgttctcttccctctgctgcaaagcccagttaaggaaatgtctccagggtccaaagagataggatggtctggggccccacctgtttggaaggggaacagccagggaagaaccacc

SEQ ID NO: 2724 - DNA, 1198 bp, Homo sapiens
tttttttaaaatttaatgagataacttaatgaacattgttggtcatcttaaaagaattacggttagcaataaaaatccagcaaaggcaaccacataggctattttcattgtctaaaatgtgttaactatatacagaatataaatccctagaatacagtattaagtggaaaatttttctttatatatttgtattttaataaaataacagcaatatctttcttaaacatgcatttttccacctaacagtatccatttagttaatataaaatttatttaggtagaaacaccaaaacaaagatacgaccaatacacttgtggaatacaattaagatagctcttcacattaaactgcagggaccatctttgtttttcagatgcctagcacagtgcctggcagacagcagatgatcaaaagatgtttaatgaatcgctaagtacaatctgttttgcacatacagtcaaaatccagacaagtttgcaaaggtacataagttggatataggctttctggctgacttcatgggggtcccactgatgactaggagtaaatcttcatatccatagaaaactggaaagttgataattgtctttcctgccccccacttttgagtgccttccctggagctgtggaggatgacacaaagggtaataaagggggggagtggaggaggaggaggcgaaggaggaggaggagagctggggaagtggctgctcctgggtgtagtgagatgtctccagccagggccaagcagcagcagtagcagcagcagcagtagcagcagcagcagcaacagcagcagcagcagcaacagcagcagcaaaggttaataaatcatgctttgaaagaactcatggaaatagaagaagtgagtgaaaatgtattacaagttcacttaaatggactgctgcagatcaatgacaaaatcggccctaaaggaaatcacaaggcagttaaatctggaaaatgtagttggagataaagtttttggaagctttgctgaaaacctttcatttcttctggaagctttaaaaaaaggtgaccgaactagcagttgcccagtgatcttcatattagatgaatttgatctttttgctcatcataaaaaccaaacacttctcctaataatcttttttgacatttctccagtcctgcacagacccccaattagcagttattgggtccttacatggtagattg

SEQ ID NO: 2725 - DNA, 796 bp, Homo sapiens
aaacataaagtagtagaaataagacagtaaatactgtatcctaatatccagtcaggatacagaaaccataccattaacttgaacagggataattttaatataaaaaactgttaactgataatggtattaacttttaagagggatgaaagagagctatgatgtcctaggactgagagtaccccaggaaagaatacccttgaaagggtctccccttccccatggtgaagtcaggcctaatggagagagtggctacagcctactcagtgattgggaaattccctgtcttgccctgggccagagctggtgtaccgctggtggatcaggtcttacaagcaaagaacctcacactcccaactggtaagccagaagcctcttgctagggtgtgagcaaaacttggacaggaactctcagtagatgtttgtgtttgtcaagattctccagacaaacttccttaaaaggattggcttgtgttgttattattaagtctaacaagtccaaaagctggagtgtgaggcaggaggctggaaacccaggaaagctgatggtgcaaggtccagtccaaaggtatctgttggaggattctcttgttctgggaagaggacggtctttttttctcttcagaccttcacctgactggatcaagcccactaacatcgaggaggacagtctgcattactcagagttcactgattgatttaaatgtcaatctcatataaaacaccctcacagaaacacctagaataatgtttgaccttataattggaaaatcagagcaaaagttaaatctctaaaaaa

SEQ ID NO: 2726 - DNA, 617 bp, Homo sapiens
cggttccctgtgccacctggcgagctcagcaaactaaaagtctctttgtcttcatcgtttccggcactgatgtgagcacatcataagcacaagacctggacacctttacaatcagagggcctaggactggagctctggatctgaccggagcaaagaggaagcacgcaaatccggacatgacgacgaggaggcagtagagacccatcctcaactgtgcccttgttgagctgcttgaggcagaaggcacagacgaagtgctcggggtggaacttcttggccatggcggtgatgcagcggccggtgatgggcttctggcagccagaacacagcgagccgcgccgcttcgtggtagtgcacctcacagtagggctgcccgtcgtgctcgaagaagctgccgttcacgaatggcgtgaagcattcctgccaggcggagagaggggctcagggagactgcccctcgggctagagctgcaccctgtgtgatggggccgaggtgggcatagtcggcacgctcggagtgactcctacttgctaggcgtttcccatgtgccgtgttgtcctaaacgctcatttttcatttttattttattaaataaattttttttgtagagaaaaaa

SEQ ID NO: 2727 - DNA, 823 bp, Homo sapiens
  misc_feature (1)...(823): n = a,t,c or g
gtttttgtttaacgtggacaaagacttacagataggtgcaaaaaataaatcctcttttgcaacccagaactcattgttcagtatgagttttgatacatataagaagggatattatgatacctgagacagttgattgatgggagtattgatagccataaaggttggttccaggccaggtgcaatgggtcaagcctgcaatccccacaccagnnnnnnnnnnnnnnnnnnnnnnnnnnnnnnnnnnnnnnnnnnnnnnngaaagcttttatcttgagaacatggtgtctggagttaaaggtattggcatactccacacatctgtaccattcttgagtgatcgcttaggaatgaatgtgatttgaactcattcatgttgagagggtgtcaaattgagaaccaggtagatccccaccacctacagtaaaaaggaccctaaagtaaattggttgaagaaattagatcccaaagattcttggtgaattttgaagtcttcatcagtatatccatattaaaacgagatgacagaagccaaagtaattatgggctgacaggacaactggatcagtttcattaaaaagggcaaacttgaagataaatcttttgactccagctctttagaggatctaaagtgaccttgatggacagtggaagaaatcacaacatggaattcctcgaataacaatttattgactttaaataattttgtctaatgctacatatacacaattaaaaaacctttacactatttctagaaagtcagcatgtatttttggctcgaagtttctctagtgttttctgtggaaggaataaaaatttgagtttc

SEQ ID NO: 2728 - DNA, 807 bp, Homo sapiens
tttttttttcaggaatatccctagctgctttcatatcggctttgatctgctcactggtgacctgacagcctttctcacagctgctttcctcgaggggaaactgcttcgacttggcccatctgatgggagtggtccctctttcgaagtggagtcttgccttttccacttactgacaattctctggactgcactgactctccagttttttcttcacgttcagagtaacgccgagtaccgttcttaggaatccagacttcttggagttctagactatcttcttcatcatcactctctgaatcatgaacagtaattgaggttggttttactacacgctgaagaccactgggtccctggcttgttcctcatcaacatccacaggaataattgcctggctgtgagctggagtattatttccactctcggccaccacctctccatcttcttggacgatgtcttccatctcatttaatgcgtcagctgcaaactgctgctctcctggctgcagatcttgccgaaagtcattctcctcgtctgagtcatctggatgatggtgattgttgtcgtggatgttggcattgttattctgggcattattatcgtcattgttggagttctggttgctaacaagagctgatgaaacaccaattcctgtgcctgcactcagaccaactcgagcacaacccttgggtggttcacgaaacatctgatccagtgaaataaactctaggctgggtaataattcaataaactggccaaaacgagtccagcttcaaaccatggcaccgtactaggttgacatcaaccaat

SEQ ID NO: 2729 - DNA, 191 bp, Homo sapiens
gaactggatgaaacaagattagctgtaagttgataattgttgagactaactggtattactcattattattgccggatttcatatctgattaaaattttccacaacagtataaaaacatataaagcccaatgccccccaaaacaagaaaaaacaaatacccacttgaatttaggaacagtctttttaaagtt

SEQ ID NO: 2730 - DNA, 377 bp, Homo sapiens
ggatttttttgatgaattaatttttactatgaggattctcacatggtgattttgtaattctatcattcctccttcatttgttactattgtactgtaaggaaaagctttctcatcttcatctgttcattcatgtatttattcagatgagtgttattttattggttttaatctgtcacaaacattgatttgatgctcaaattatatccctcagattggctcttcaggctgacttcagtgtcctttctaaaacctttttatttttaaatgattttaaatttatataaaagctggcaaaagtacacaagtgcttatatacccttggcatacccagattcttaggaacttttgagaataagttgtagacatgtgccatatta

SEQ ID NO: 2731 - DNA, 772 bp, Homo sapiens
gaaaatgagataacacacagcaggaccaagctgggtgcccagcatgcagtaggtcctcaatcaatgttttttaaagacagaaccagtgagtaatgaacactggccttgccctaaaaactgtttcctacatcacctccccacacccaggtacttcaaacacagtgatggcagcttctccaacaagcagtggatcttcttctggtttggcctggctgatatccgggactcctatgagttggtcaaccacgccaagggactgccagactcctttcacaagccagcttctggacccaggcagctgaccctcaccatggacactacaggccctggaatggccagggtggaccaaaagcccatgccagctgggcatgaccccaggcaagccagccacaggctgaagggggcttgttggctgagtgatctgcagaggagaaagcagccccagctctgccccagaggaggcgctgaagtgggacaagcacaggaaagaaggggaccagtctaggaccccaacttgactcactctaaagctacaaccaaatggccttcgattttcaacctggggattaggggaggggagggtgccttccagggctctactcaggactaaccctaagggtgagctagtttctgtgcctctgtgctatgttttgaggctcccttacccaaaataatacccctgcctgcgtgatattctaccattcattttaattcctttgggtcttgcagtttttcaggaggccttgattaaaatgcaaatacttgtctgaga

SEQ ID NO: 2732 - DNA, 348 bp, Homo sapiens
ggtaactgtgtcacacacctgtatggctagctgggaagagaggaaagggatctttggaatctggaccagtacatacagcacagacaaaagtggggcctggtctgttgcaggagttgcatacattacaaataagtccctggccttcaagttctttaaattcttagttttatttctaggcctcaatgccttttaaatcctgacaggaagatgaaaaaaaaaaaatcaagtgcgggattttcattcttcttaactgatggaaacgattgccattttatgtttaatgttttcatgtgtcaccaaagagcattaaccttggagtcggccggccgcgaatttagtagtagtagg

SEQ ID NO: 2733 - DNA, 542 bp, Homo sapiens
gttgggcagagagggggcttaaggcccctgggcacaggctgggatcagggcagtgagcgaagggcagctgtgtcctgccctcccttctggaggctggaggggagaggccaagcccttggaaaatgtatcaaatgtctggatgtcgcataagtgcgtgtatgtgcgggacaggccccgagaagctagtgactcctgcacacccccattgcacaaatgaaatcacagcccaggagggagggtagcttggcactggctgagaaatagagctctctccccgcccctccccctaaccacaagggattgtcctgacaacttgtggggatagaagggctcacagggcaggggtctcagctgcccccatccttagggcaggggagttagtgtggagccgagagcaggtcccagctccccctgccagccgcactgtcccaggcccgggacccccgcaataagcaccacatgggtgaggctgtccctgtcagggtcccctgccagggtccctcctggggttctgggccatttgaggggctctttgatgggcc

SEQ ID NO: 2734 - DNA, 544 bp, Homo sapiens
  misc_feature (1)...(544): n = a,t,c or g
tttggananccnnnnnnnnnnnnnnnnnnnnnnnnnnnnnnnnnnnnnnnnnnnnnnnnnnnnnnnnnnnnnnnnnnnggcacgaggtggggcctttgggaaattgtgagggcagagccctcatgaatgggattagtgccgttacgaaggggaccccagggacctaggtagccccctttcaccatctgaggatacagcaggaaggcactatctgtaagaaagcagnnnnnnnnnnnnnnnnnnnnnnnnnnnnnnnnnnnnnnnnnnnnnnnnnnnnnnnnnnnnnnnnnnnnnnnnnnnnnnnnnnnnnntaagctactcattctatggcatttgttgtagcagcccaaacagactaaggtaacatattaggcataccatagcatacctgctgaaaaccaaagagaaaggtattggtgagtagccagggagaaaatacatataccatcaatggaatagcantaaaattaaaaactaacttttcaatggaaacaattaaaaccngaccnttaaccatggctntaaaggtggaaaaactgcccgg

SEQ ID NO: 2735 - DNA, 548 bp, Homo sapiens
  misc_feature (1)...(548): n = a,t,c or g
gagaaaaaaaagaaaagaaaaannnnnnnnnnnnnnnnnnnnnnnnnnnnnnnnnnnnnnnnnnnnnnnnnnnnnnnnnnnnnnnnnnnnnnnnnnnnnnnnnnnnnnnnnnnnnnnnnnnnnnnnnnnnnnnnnattgggggaaaaaaaatgacctcctgccttgggtgtcattggcaggactggtgggacctgatgggtatgggtggccccgtcagtcactgtccatctcccttctttcccagcgtcccctgggctccccctgccctcattcaccccttgctgaacctaccctttcctggaccattcaggcaccatcacgggtattgctcaggctgaggcctgtaccagcaccgcaagggtgacctgtgacctcctaaggggcatggtgtatggagtggtaaggtcagccatccagctagtatgtgatgccaaccactgggttagcttcctgcaaaacaaacacctcctctacctaaagagtgatgtncagataaattcccccacattgaccttnangggaaggtgactgggatcaaggcctggag

SEQ ID NO: 2736 - DNA, 1152 bp, Homo sapiens
tttttttttttttttttggtggactcacttgtttaatgtcacatggcttagtagggacagatgcacacccaaggctgcctggcctcaaagtctgttcctttaatgtctattctgtgttgctctgccctctgactgagagctgagggggcctgttagtcctctctggttgtgtcttcatctgctgcccctgtggacaggagagtgttggtctactcaggcggtgcttgactattagccagaagggaggttttctttccctgagttgtctcagcctttctggcctcactctccctgcactgcagtacagtccttggctccaaagctcagctccactgccagccccaggctgatgccagcccttctccatggggtggaagcttccggattcagacctaggccttgcaatctctcccacagggtgccttctttctggatggggtcttcaatcaactctgggacctgcaaggtcacctcacacttcctttcagataagggagggttagagctgctagggtggtcacaggactcatggttcaagaaagtactcaaggttccagaaagctagacaagtgattgctggactgggctgggaacagagtgatcctggggcagtagtgaggaacaggccacggtcctacttgtggatgaggtgaggagagctgcagaccccgtaaggaatccctcagcctgcctgtgagtaacaactctgaagggctttctgagggccctgggaaagtctgatgaccggagctgaaaggtgattctgtccaaggaagatcacgatggccaagaaccaatgtagggtcaagtttcaggtgtctgttgcggaggaatcaaggctgaagtactctgaactatccatcctttcttccatccatccaacacatatttagggagctcctgccaggggccgacgatgcttagtgtctccagcgacattactctgttcggaggcatcaactccctttgtttaggtgttgctcggaggttccatctaccatgtgggactgtagagtcagaccaggattcacatcccagctctgtcactttctgtcactgactttaggcaagagacttcatctctttgaacctcattttcttcatctctccagacagctgggtggtcctcgtaacccgtgccggggctccacc

SEQ ID NO: 2737 - DNA, 427 bp, Homo sapiens
gcacaaatgtgtgtaccttaatcatacccatatgtaaaactagagcggtggcatgaatcccaagaagtgggcggttgcccacagctgtacttctgtctcagatggataactgcaatcactaaccttttttgaagaatttgatatgatactgagaaaatagtgattaatcaaagccccttttaaaatgggaaggactttcatctatagggcattaactttttatggatccagaggaaaaaagcagtaaagaataggtgaaacatttattgtatacttactttcggtccagcattatgctttacatacttaaatttctaattcatcttatctgtgaagtgagtactattgcaaatatgaattcactttacagatgaggaaactgaggcctggagaggttaaagtaaatgatctaaggcgaatccaggca

SEQ ID NO: 2738 - DNA, 1305 bp, Homo sapiens
tcgacttttttttgaactgatgaattcattttaatcacagaaatttgcctgggcttgagcaaactgtggggactcaatagatttggaggcctcctctcccttctgagaggcctgcctgcttcctgccctgatgaatccctaatttcagtacaaactgaggaacttgaaaaacatctgtgcactgggaccgcccctcacaggagggctgaaagcaggcacagctgagtcagcggcacattcagcagggcgttcagtggggaagcaggagacagaggccggcgctcacaggacccgctccagggcttgtcacagccacacatcacagcactttgggttttgccacaacagagcagctctgagctcaatccttgcacctcagaagtgcatttatgattaaaatcatgctcgacatgaagccctgttatgatgtgcagtttaaaaagagaaacgggtccaaatcagcaccaacagagccccccagggggctccaagactcgccccagagacagcagaaggaccccatgtgcgcgctgatctgtaagaagggtggtggatgcagcagcagggggctgcgtccaaaggcagcaggtgggggcctctcatagtgtgacccctgggcaggcccactcccctaccccggtaccctcacctgaaaaatgggacagcaacacaatgagacaacagagactgtctagaatataaagaaaagaatgaaaaggtccatcccaagggcagcctggtggggacggggacaggcagtggggggaggctgcctctggaagacctgtcccagcagaatcagcccccacctctgccctgccttcccaacctttgaacccacccaggcagtagacacattcccctgggaaacagaatttgcaaggcaggtggaaagagcagcactcacactggctgtgactgctgaaaaatgctcattggcccttctcgaggactgaaaggagattcggaatcacatttaaaattaacccgtgacccacttcctgtaaaactgaagatcaccctctaacagccctaacaaacaggctctggccgtctcctgaccctaacccggtggagcagctgactggacgcagtgacgccaccactgaggttctgcagggtggaggcggccaggctggctcactgcatgaggtggacggtagctgccttgcggatgagccgctcggtcaggggcgagttgggcttcaaggcatcacgctccatcagaaggctccgggctacgttcttatggacgctggaggtgcagtttaaggccgcgtgaatcagcagctggttgaagacgtc

SEQ ID NO: 2739 - DNA, 577 bp, Homo sapiens
gagagaaaataaaaatagcttttttttccctagaattgctaattactcttaacaacaaattaaattcaaagcctgtccttgagaactggaaatgtaaaatcatggttcaagttttataccttagtgattcctcagtaggtgttactaggagttcactgaatgaacttagggagtgaaccttcgatgtgcttgattttcttttgtgccttagtttctctgaatagcagaggcatcaaattttggtggggaatgagaggagtattaggggaaagtttgaaaatagctctcctggagatggagggcacacagagtggtcctcaggctcaccttgactgagttgattcacagttatcctgcatcagaccattagatttctttagtgctatgattataatagggatttttgaatcaccaaaaacagtttttagatgtttatgttctttgttttactatcaatgttgtgctggttaagggagagaaaagttcaagaagatcttacatatttgaaaggaaattggtactcttgaaggctatgcaacatgagtctttgaacaagaattccttgctactttgattc

SEQ ID NO: 2740 - DNA, 483 bp, Homo sapiens
gtgaaggcaagcttgatgcaaaacctcctgacctttcctacctgaagagccctttgacttctaggaagaaaggtcaaaaatgttatcttcagttgtgttaatcccagttttagtgcagcttaggaggctgctagttaggaagatggcagtggctgtaggctgggttgccagaaaagatggtggcctagtcttattattcagatggagaacttagaaaacctgaagagtacccaaattggattgtattttaatggacaatggctgtattttttccatggttagaagggatcctaatggaaagcacctgttatttttaagtttctaagggtctagttgttcagaatccccaaggatatttccctaacctcactcagtcacattgtaggagccagtgtagctatggaattatcttaggaactcaagcttctaaaactatccatgtagtcaaatctaggggaaaaagcaaataaaatagtagaattt

SEQ ID NO: 2741 - DNA, 4168 bp, Homo sapiens
ccgctccacctctcaagcagccagcgcctgcctgaatctgttctgccccctccccacccatttcaccaccaccatgacaccgggcacccagtctcctttcttcctgctgctgctcctcacagtgcttacagttgttacaggttctggtcatgcaagctctaccccaggtggagaaaaggagacttcggctacccagagaagttcagtgcccagctctactgagaagaatgctgtgagtatgaccagcagcgtactctccagccacagccccggttcaggctcctccaccactcagggacaggatgtcactctggccccggccacggaaccagcttcaggttcagctgccacctggggacaggatgtcacctcggtcccagtcaccaggccagccctgggctccaccaccccgccagcccacgatgtcacctcagccccggacaacaagccagccccgggctccaccgcccccccagcccacggtgtcacctcggccccggacaccaggccggccccgggctccaccgcccccccagcccacggtgtcacctcggccccggacaccaggccggccccgggctccaccgcccccccagcccacggtgtcacctcggccccggacaccaggccggccccgggctccaccgcccccccagcccacggtgtcacctcggccccggacaccaggccggccccgggctccaccgcccccccagcccacggtgtcacctcggccccggacaccaggccggccccgggctccaccgcccccccagcccacggtgtcacctcggccccggacaccaggccggccccgggctccaccgcccccccagcccacggtgtcacctcggccccggacaccaggccggccccgggctccaccgcccccccagcccacggtgtcacctcggccccggacaccaggccggccccgggctccaccgcccccccagcccacggtgtcacctcggccccggacaccaggccggccccgggctccaccgcccccccagcccacggtgtcacctcggccccggacaccaggccggccccgggctccaccgcccccccagcccacggtgtcacctcggccccggacaccaggccggccccgggctccaccgcccccccagcccacggtgtcacctcggccccggacaccaggccggccccgggctccaccgcccccccagcccacggtgtcacctcggccccggacaccaggccggccccgggctccaccgcccccccagcccacggtgtcacctcggccccggacaccaggccggccccgggctccaccgcccccccagcccacggtgtcacctcggccccggacaccaggccggccccgggctccaccgcccccccagcccacggtgtcacctcggccccggacaccaggccggccccgggctccaccgcccccccagcccacggtgtcacctcggccccggacaccaggccggccccgggctccaccgcccccccagcccacggtgtcacctcggccccggacaccaggccggccccgggctccaccgcccccccagcccacggtgtcacctcggccccggacaccaggccggccccgggctccaccgcccccccagcccacggtgtcacctcggccccggacaccaggccggccccgggctccaccgcccccccagcccacggtgtcacctcggccccggacaccaggccggccccgggctccaccgcccccccagcccacggtgtcacctcggccccggacaccaggccggccccgggctccaccgcccccccagcccacggtgtcacctcggccccggacaccaggccggccccgggctccaccgcccccccagcccacggtgtcacctcggccccggacaccaggccggccccgggctccaccgcccccccagcccacggtgtcacctcggccccggacaccaggccggccccgggctccaccgcccccccagcccacggtgtcacctcggccccggacaccaggccggccccgggctccaccgcccccccagcccacggtgtcacctcggccccggacaccaggccggccccgggctccaccgcccccccagcccacggtgtcacctcggccccggacaccaggccggccccgggctccaccgcccccccagcccacggtgtcacctcggccccggacaccaggccggccccgggctccaccgcccccccagcccacggtgtcacctcggccccggacaccaggccggccccgggctccaccgcccccccagcccacggtgtcacctcggccccggacaccaggccggccccgggctccaccgcccccccagcccacggtgtcacctcggccccggacaccaggccggccccgggctccaccgcccccccagcccacggtgtcacctcggccccggacaccaggccggccccgggctccaccgcccccccagcccacggtgtcacctcggccccggacaccaggccggccccgggctccaccgcccccccagcccacggtgtcacctcggccccggacaccaggccggccccgggctccaccgcccccccagcccacggtgtcacctcggccccggacaccaggccggccccgggctccaccgcccccccagcccacggtgtcacctcggccccggacaccaggccggccccgggctccaccgcccccccagcccacggtgtcacctcggccccggacaccaggccggccccgggctccaccgcccccccagcccacggtgtcacctcggccccggacaccaggccggccccgggctccaccgcccccccagcccacggtgtcacctcggccccggacaccaggccggccccgggctccaccgcccccccagcccatggtgtcacctcggccccggacaacaggcccgccttgggctccaccgcccctccagtccacaatgtcacctcggcctcaggctctgcatcaggctcagcttctactctggtgcacaacggcacctctgccagggctaccacaaccccagccagcaagagcactccattctcaattcccagccaccactctgatactcctaccacccttgccagccatagcaccaagactgatgccagtagcactcaccatagctcggtacctcctctcacctcctccaatcacagcacttctccccagttgtctactggggtctctttctttttcctgtcttttcacatttcaaacctccagtttaattcctctctggaagatcccagcaccgcactactaccaagagctgcagagagacatttctgaaatgtttttgcagatttataaacaagggggttttctgggcctctccaatattaagttcaggccaggatctgtggtggtacaattgactctggccttccgagaaggtaccatcaatgtccacgacgtggagacacagttcatttagtataaaacggaatcaccctctcgatataacctgacgatcccagacgtcagcgtgagtgatgtgccatttcctttctctgcctcagtctggggctggggtgccaggctggggcatcgcgctgctggtgctggtctgtgttctggttgcgctggccattgtctatctcattgccttggctgtctgtcagtgccgccgaaagaactacgggcagctggacatctttccagcccgggatacctaccatcctatgagcgagtaccccacctaccacacccatgggcgctatgtgccccctagcagtaccgatcgtagcccctatgagaaggtttctgcaggtaatggtggcagcagcctctcttacacaaacccagcagtggcagccacttctgccaacttgtaggggcacgtcgcccgctgagctgagtggccagccagtgccattccactccactcaggttcttcagggccagagcccctgcaccctgtttgggctggtgagctgggagttcaggtgggctgctcacagcctccttcagaggccccaccaatttctcggacacttctcagtgtgtggaagctcatgtgggcccctgaggctcatgcctgggaagtgttgtggtgggggctcccaggaggactggcccagagagccctgagatagcggggatcctgaactggactgaataaaacgtggtctcccactgcgccaaaaaaaaaaaaaaaaa

SEQ ID NO: 2742 - DNA, 635 bp, Homo sapiens
tggatctgaaagccaaaatgccagatgaccatgcacgaaaaattttgctttcccgtattaataactatactatcccagaagaagaaattgggtctttcttatttcatgctattaataagccaaatgctcctatctggctcatactcaatgaagctggactatactggagagcagtaggaaatagcacttttgctattgcctgtcttcagagggctttgaatttagctccacttcaataccaagatgttcctcttgtcaacttggccaaccttttgattcattacggccttcatcttgatgccactaagctgctacttcaagctttggccatcaatagctctgagcctctgacctttttgagcctgggaaatgcttaccttgctctgaagaatatcagtggggcacttgaggcctttagacaggccttgaaattaaccaccaaatgtccagagtgtgaaaacagcctgaagttgatccgctgtatgcagttttatccttttctgtacaacatcacttcttctgtttgcagtggtaattgtcatgagaaaaccctggacaacagccatgacaaacagaaatattttgacaactcacagtcactggatgctgctgaagaagagcccctgagagaggaa

SEQ ID NO: 2743 - DNA, 423 bp, Homo sapiens
  misc_feature (1)...(423): n = a,t,c or g
ggtgnnnnnnnnnnnnnnnnnnnnnnnnnnnnnnnnnnnnnnnnnnnnnnnnnnnnnnnnnnnnnnnnnnnnnnnnnnnnnnnnnnnnnnnnnnnnnnnnnnnnnnnnnnnnnnnnnnnnnnnnnnnnnnnnnnnnnnnnnnnnnnnnnnnnnnnnnnnnnnnnnnnnnnnnnnnnnnnnnnnnnnnnnnnnnnnnnnnnnnnnnnnnnnnnnnnnnnnnnnnnnngctgctttcattctatgggtgacagagttgagtaactactacaagagactgtatggcccacgaagtctaaaatatttactatctatctgatgctttcaagtaaaagcttgcaaaccctgctcttgaaaagggagggaaggaagaggagaggaggaaggcaggaaggagcaganagggacacggggctgtattnaaac

SEQ ID NO: 2744 - DNA, 1473 bp, Homo sapiens
tttttcaggttgtaaatatttatatttctctcacatacaatgttgtatgagacacttgttttaatatgtatccataggattaatactcatatggagtataatgtggaaaagtgcagaactaaagaaataagtctatccgaaaacaaaagcacacatttctcaggatttaaaaatattgcacatagtaaggttgcacagaaattactggctggttttacaaacagaatgaggtatcagtcaatctctagataaagatgagagagaggataaactacacacacacaaacacataaatccatactaagacctaagagtgccaacaactaagaaagaaatatgaaaaagctatgtaagtagctatgatttcaacactacaaaatcatttttaggctggaaccaaacacataacaatctcttggcaatatttcgttaagttttcaacttttttccagcctaaatgactatgggcaataaaaccatttcctttaccccagttctactggtagaaaggcacagcgctgtggtaacttatcaaaccattcctttctcaacctttcagtagcaattaaccaagatactgttctcctttactgaatgactcaattatacagtttcatgtacactctgcaacgcaagtcacagatgtcatagaacatgcaactttgaattagtaaaggtttcactgcaaaaatcattaggttcacacaatttaaatctacaattaacttttaaagtttaatcaggtaaactcaatattttcttggtaataatactggtgatattagtgagcccaagggcaggtagagaaaaagcactaggcaaaattacgtgttttttaaagaaactttcctaatcagggaaataattagcattttgtctactcgttgaatgttgaatttgtcaaaaaaaaaaaacccttaaatatatttaatagctatatcaaattgtttaaagtgaaatcatgcacttgtcaaaatagttcacagaaaattgtttagcatcaaagataatgaggaagagtcaaccagttggatttagtgagaatagaataagaactactgtcctgaacagtcagtgtatgtagtaaccatatttcctcttcgttgagtgacagtcctgcagtgcttgctagatccatgaaatctattttcagtctgtactgtatgctgattggtagagtcaaaaccactaaaagaaaacattttctccatatcttcaaacatgtcatcaaataatccacctccaaaagaaaattcttggaaatgatgcctttgtctactggaaccaccatcctggcgtgtctggaaatgattttcaaaacgcttcttggatccagtgttttggttttgaccaaaaaagccaaagtctttaaataagtcatcaaaattgaagttaaatgactgctcaaaagaacttccactacctctttgtcctttaccactagtaaaagcactgtgtccaagtgtatcatac

(The sequence listing continues in the following parts.)

1. An isolated polynucleotide comprising a nucleotide sequence selected from the group consisting of 748 SEQ ID NO: 1-45,207, 752 SEQ ID NO: 1-13,203, 778 SEQ ID NO: 1-105, 779 SEQ ID NO: 1-128, 782 SEQ ID NO: 1-798, 800-7403, 7405-10,451, 784 SEQ ID NO: 1-2127, 2129-3136, 3138-3761, 3763-5167, 5169-5851, 5853-7091, 7093-7290, 7292-7451, 7453-7829, 7831-8083, 8085-10,289, 785 SEQ ID NO: 1-3796, 787 SEQ ID NO: 1-5411, 5413-6686, 6688-10410, 788 SEQ ID NO: 1-14,074, 789 SEQ ID NO: 1-6391, 790 SEQ ID NO: 1-7953, 7956-10589, 10592-17791, 17793-18425, 18427-24980, 24982-25025, 25027-29003, 29005-30533, 791 SEQ ID NO: 1-2356, 2358-5822, and 792 SEQ ID NO: 1-8502, a mature protein coding portion of 748 SEQ ID NO: 1-45,207, 752 SEQ ID NO: 1-13,203, 778 SEQ ID NO: 1-105, 779 SEQ ID NO: 1-128, 782 SEQ ID NO: 1-798, 800-7403, 7405-10,451, 784 SEQ ID NO: 1-2127, 2129-3136, 3138-3761, 3763-5167, 5169-5851, 5853-7091, 7093-7290, 7292-7451, 7453-7829, 7831-8083, 8085-10,289, 785 SEQ ID NO: 1-3796, 787 SEQ ID NO: 1-5411, 5413-6686, 6688-10410, 788 SEQ ID NO: 1-14,074, 789 SEQ ID NO: 1-6391, 790 SEQ ID NO: 1-7953, 7956-10589, 10592-17791, 17793-18425, 18427-24980, 24982-25025, 25027-29003, 29005-30533, 791 SEQ ID NO: 1-2356, 2358-5822, and 792 SEQ ID NO: 1-8502, an active domain of 748 SEQ ID NO: 1-45,207, 752 SEQ ID NO: 1-13,203, 778 SEQ ID NO: 1-105, 779 SEQ ID NO: 1-128, 782 SEQ ID NO: 1-798, 800-7403, 7405-10,451, 784 SEQ ID NO: 1-2127, 2129-3136, 3138-3761, 3763-5167, 5169-5851, 5853-7091, 7093-7290, 7292-7451, 7453-7829, 7831-8083, 8085-10,289, 785 SEQ ID NO: 1-3796, 787 SEQ ID NO: 1-5411, 5413-6686, 6688-10410, 788 SEQ ID NO: 1-14,074, 789 SEQ ID NO: 1-6391, 790 SEQ ID NO: 1-7953, 7956-10589, 10592-17791, 17793-18425, 18427-24980, 24982-25025, 25027-29003, 29005-30533, 791 SEQ ID NO: 1-2356, 2358-5822, and 792 SEQ ID NO: 1-8502, and complementary sequences thereof.

2. An isolated polynucleotide encoding a polypeptide with biological activity, wherein said polynucleotide hybridizes to the polynucleotide of claim 1 under stringent hybridization conditions.

3. An isolated polynucleotide encoding a polypeptide with biological activity, wherein said polynucleotide has greater than about 90% sequence identity with the polynucleotide of claim 1.

4. The polynucleotide of claim 1 wherein said polynucleotide is DNA.

5. An isolated polynucleotide of claim 1 wherein said polynucleotide comprises the complementary sequences.

6. A vector comprising the polynucleotide of claim 1.

7. An expression vector comprising the polynucleotide of claim 1.

8. A host cell genetically engineered to comprise the polynucleotide of claim 1.

9. A host cell genetically engineered to comprise the polynucleotide of claim 1 operatively associated with a regulatory sequence that modulates expression of the polynucleotide in the host cell.

10. An isolated polypeptide, wherein the polypeptide is selected from the group consisting of:
(a) a polypeptide encoded by any one of the polynucleotides of claim 1; and
(b) a polypeptide encoded by a polynucleotide hybridizing under stringent conditions with any one of 748 SEQ ID NO: 1-45,207, 752 SEQ ID NO: 1-13,203, 778 SEQ ID NO: 1-105, 779 SEQ ID NO: 1-128, 782 SEQ ID NO: 1-798, 800-7403, 7405-10,451, 784 SEQ ID NO: 1-2127, 2129-3136, 3138-3761, 3763-5167, 5169-5851, 5853-7091, 7093-7290, 7292-7451, 7453-7829, 7831-8083, 8085-10,289, 785 SEQ ID NO: 1-3796, 787 SEQ ID NO: 1-5411, 5413-6686, 6688-10410, 788 SEQ ID NO: 1-14,074, 789 SEQ ID NO: 1-6391, 790 SEQ ID NO: 1-7953, 7956-10589, 10592-17791, 17793-18425, 18427-24980, 24982-25025, 25027-29003, 29005-30533, 791 SEQ ID NO: 1-2356, 2358-5822, or 792 SEQ ID NO: 1-8502.

11. A composition comprising the polypeptide of claim 10 and a carrier.

12. An antibody directed against the polypeptide of claim 10.

13. A method for detecting the polynucleotide of claim 1 in a sample, comprising:
a) contacting the sample with a compound that binds to and forms a complex with the polynucleotide of claim 1 for a period sufficient to form the complex; and
b) detecting the complex, so that if a complex is detected, the polynucleotide of claim 1 is detected.

14. A method for detecting the polynucleotide of claim 1 in a sample, comprising:
a) contacting the sample under stringent hybridization conditions with nucleic acid primers that anneal to the polynucleotide of claim 1 under such conditions;
b) amplifying a product comprising at least a portion of the polynucleotide of claim 1; and
c) detecting said product and thereby the polynucleotide of claim 1 in the sample.

15. The method of claim 14, wherein the polynucleotide is an RNA molecule and the method further comprises reverse transcribing an annealed RNA molecule into a cDNA polynucleotide.

16. A method for detecting the polypeptide of claim 10 in a sample, comprising:
a) contacting the sample with a compound that binds to and forms a complex with the polypeptide under conditions and for a period sufficient to form the complex; and
b) detecting formation of the complex, so that if a complex formation is detected, the polypeptide of claim 10 is detected.

17. A method for identifying a compound that binds to the polypeptide of claim 10, comprising:
a) contacting the compound with the polypeptide of claim 10 under conditions sufficient to form a polypeptide/compound complex; and
b) detecting the complex, so that if the polypeptide/compound complex is detected, a compound that binds to the polypeptide of claim 10 is identified.

18. A method for identifying a compound that binds to the polypeptide of claim 10, comprising:
a) contacting the compound with the polypeptide of claim 10, in a cell, under conditions sufficient to form a polypeptide/compound complex, wherein the complex drives expression of a reporter gene sequence in the cell; and
b) detecting the complex by detecting reporter gene sequence expression, so that if the polypeptide/compound complex is detected, a compound that binds to the polypeptide of claim 10 is identified.

19. A method of producing the polypeptide of claim 10, comprising,
a) culturing a host cell comprising a polynucleotide sequence selected from the group consisting of a polynucleotide sequence of 748 SEQ ID NO: 1-45,207, 752 SEQ ID NO: 1-13,203, 778 SEQ ID NO: 1-105, 779 SEQ ID NO: 1-128, 782 SEQ ID NO: 1-798, 800-7403, 7405-10,451, 784 SEQ ID NO: 1-2127, 2129-3136, 3138-3761, 3763-5167, 5169-5851, 5853-7091, 7093-7290, 7292-7451, 7453-7829, 7831-8083, 8085-10,289, 785 SEQ ID NO: 1-3796, 787 SEQ ID NO: 1-5411, 5413-6686, 6688-10410, 788 SEQ ID NO: 1-14,074, 789 SEQ ID NO: 1-6391, 790 SEQ ID NO: 1-7953, 7956-10589, 10592-17791, 17793-18425, 18427-24980, 24982-25025, 25027-29003, 29005-30533, 791 SEQ ID NO: 1-2356, 2358-5822, and 792 SEQ ID NO: 1-8502, a mature protein coding portion of SEQ ID NO: 1-739, an active domain of 748 SEQ ID NO: 1-45,207, 752 SEQ ID NO: 1-13,203, 778 SEQ ID NO: 1-105, 779 SEQ ID NO: 1-128, 782 SEQ ID NO: 1-798, 800-7403, 7405-10,451, 784 SEQ ID NO: 1-2127, 2129-3136, 3138-3761, 3763-5167, 5169-5851, 5853-7091, 7093-7290, 7292-7451, 7453-7829, 7831-8083, 8085-10,289, 785 SEQ ID NO: 1-3796, 787 SEQ ID NO: 1-5411, 5413-6686, 6688-10410, 788 SEQ ID NO: 1-14,074, 789 SEQ ID NO: 1-6391, 790 SEQ ID NO: 1-7953, 7956-10589, 10592-17791, 17793-18425, 18427-24980, 24982-25025, 25027-29003, 29005-30533, 791 SEQ ID NO: 1-2356, 2358-5822, and 792 SEQ ID NO: 1-8502, complementary sequences thereof and a polynucleotide sequence hybridizing under stringent conditions to 748 SEQ ID NO: 1-45,207, 752 SEQ ID NO: 1-13,203, 778 SEQ ID NO: 1-105, 779 SEQ ID NO: 1-128, 782 SEQ ID NO: 1-798, 800-7403, 7405-10,451, 784 SEQ ID NO: 1-2127, 2129-3136, 3138-3761, 3763-5167, 5169-5851, 5853-7091, 7093-7290, 7292-7451, 7453-7829, 7831-8083, 8085-10,289, 785 SEQ ID NO: 1-3796, 787 SEQ ID NO: 1-5411, 5413-6686, 6688-10410, 788 SEQ ID NO: 1-14,074, 789 SEQ ID NO: 1-6391, 790 SEQ ID NO: 1-7953, 7956-10589, 10592-17791, 17793-18425, 18427-24980, 24982-25025, 25027-29003, 29005-30533, 791 SEQ ID NO: 1-2356, 2358-5822, and 792 SEQ ID NO: 1-8502, under conditions sufficient to express the polypeptide in said cell; and
b) isolating the polypeptide from the cell culture or cells of step (a).

20. An isolated polypeptide encoded by a polynucleotide sequence selected from the group consisting of 748 SEQ ID NO: 1-45,207, 752 SEQ ID NO: 1-13,203, 778 SEQ ID NO: 1-105, 779 SEQ ID NO: 1-128, 782 SEQ ID NO: 1-798, 800-7403, 7405-10,451, 784 SEQ ID NO: 1-2127, 2129-3136, 3138-3761, 3763-5167, 5169-5851, 5853-7091, 7093-7290, 7292-7451, 7453-7829, 7831-8083, 8085-10,289, 785 SEQ ID NO: 1-3796, 787 SEQ ID NO: 1-5411, 5413-6686, 6688-10410, 788 SEQ ID NO: 1-14,074, 789 SEQ ID NO: 1-6391, 790 SEQ ID NO: 1-7953, 7956-10589, 10592-17791, 17793-18425, 18427-24980, 24982-25025, 25027-29003, 29005-30533, 791 SEQ ID NO: 1-2356, 2358-5822, and 792 SEQ ID NO: 1-8502, the mature protein portion thereof, the active domain thereof, and complementary sequences thereof.

21. The polypeptide of claim 20 wherein the polypeptide is provided on a polypeptide array.

22. A collection of polynucleotides, wherein the collection comprises the sequence information of at least one of 748 SEQ ID NO: 1-45,207, 752 SEQ ID NO: 1-13,203, 778 SEQ ID NO: 1-105, 779 SEQ ID NO: 1-128, 782 SEQ ID NO: 1-798, 800-7403, 7405-10,451, 784 SEQ ID NO: 1-2127, 2129-3136, 3138-3761, 3763-5167, 5169-5851, 5853-7091, 7093-7290, 7292-7451, 7453-7829, 7831-8083, 8085-10,289, 785 SEQ ID NO: 1-3796, 787 SEQ ID NO: 1-5411, 5413-6686, 6688-10410, 788 SEQ ID NO: 1-14,074, 789 SEQ ID NO: 1-6391, 790 SEQ ID NO: 1-7953, 7956-10589, 10592-17791, 17793-18425, 18427-24980, 24982-25025, 25027-29003, 29005-30533, 791 SEQ ID NO: 1-2356, 2358-5822, and 792 SEQ ID NO: 1-8502.

23. The collection of claim 22, wherein the collection is provided on a nucleic acid array.

24. The collection of claim 23, wherein the array detects full-matches to any one of the polynucleotides in the collection.

25. The collection of claim 23, wherein the array detects mismatches to any one of the polynucleotides in the collection.

26. The collection of claim 22, wherein the collection is provided in a computer-readable format.

27. A method of treatment comprising administering to a mammalian subject in need thereof a therapeutic amount of a composition comprising a polypeptide of claim 10 or 20 and a pharmaceutically acceptable carrier.

28. A method of treatment comprising administering to a mammalian subject in need thereof a therapeutic amount of a composition comprising an antibody that specifically binds to a polypeptide of claim 10 or 20 and a pharmaceutically acceptable carrier.
